United States Patent Application Publication US 2014/0004565 A1 - sequence listing, part 98

SEQ ID NO: 2433910 - RNA, 19 nt, Artificial Sequence
  Description of Artificial Sequence: Synthetic oligonucleotide
auguaccaggcuugcacca

SEQ ID NO: 2433911 - RNA, 19 nt, Artificial Sequence
  Description of Artificial Sequence: Synthetic oligonucleotide
cagucuugccaagaagagc

SEQ ID NO: 2433912 - RNA, 19 nt, Artificial Sequence
  Description of Artificial Sequence: Synthetic oligonucleotide
cacagugcaguacucuuca

SEQ ID NO: 2433913 - RNA, 19 nt, Artificial Sequence
  Description of Artificial Sequence: Synthetic oligonucleotide
gagaggugagcaaccuucc

SEQ ID NO: 2433914 - RNA, 19 nt, Artificial Sequence
  Description of Artificial Sequence: Synthetic oligonucleotide
ggaucauucucauacuugu

SEQ ID NO: 2433915 - RNA, 19 nt, Artificial Sequence
  Description of Artificial Sequence: Synthetic oligonucleotide
gugagcaaccuucccacca

SEQ ID NO: 2433916 - RNA, 19 nt, Artificial Sequence
  Description of Artificial Sequence: Synthetic oligonucleotide
acgguuguacgguguccac

SEQ ID NO: 2433917 - RNA, 19 nt, Artificial Sequence
  Description of Artificial Sequence: Synthetic oligonucleotide
ugcauaugguaaugauguc

SEQ ID NO: 2433918 - RNA, 19 nt, Artificial Sequence
  Description of Artificial Sequence: Synthetic oligonucleotide
caccaguaacugcagcgag

SEQ ID NO: 2433919 - RNA, 19 nt, Artificial Sequence
  Description of Artificial Sequence: Synthetic oligonucleotide
aguuucucucuuuccggau

SEQ ID NO: 2433920 - RNA, 19 nt, Artificial Sequence
  Description of Artificial Sequence: Synthetic oligonucleotide
uguacugaacccgggcauc

SEQ ID NO: 2433921 - RNA, 19 nt, Artificial Sequence
  Description of Artificial Sequence: Synthetic oligonucleotide
uguagcggaucuccucauc

SEQ ID NO: 2433922 - RNA, 19 nt, Artificial Sequence
  Description of Artificial Sequence: Synthetic oligonucleotide
uucucauacuugucagcau

SEQ ID NO: 2433923 - RNA, 19 nt, Artificial Sequence
  Description of Artificial Sequence: Synthetic oligonucleotide
agcaggaagcgugaucaug

SEQ ID NO: 2433924 - RNA, 19 nt, Artificial Sequence
  Description of Artificial Sequence: Synthetic oligonucleotide
uggacgguuguacgguguc

SEQ ID NO: 2433925 - RNA, 19 nt, Artificial Sequence
  Description of Artificial Sequence: Synthetic oligonucleotide
uccgagcgugcgcagcugc

SEQ ID NO: 2433926 - RNA, 19 nt, Artificial Sequence
  Description of Artificial Sequence: Synthetic oligonucleotide
cauggaaauccggauccac

SEQ ID NO: 2433927 - RNA, 19 nt, Artificial Sequence
  Description of Artificial Sequence: Synthetic oligonucleotide
gcgagagccucacacagug

SEQ ID NO: 2433928 - RNA, 19 nt, Artificial Sequence
  Description of Artificial Sequence: Synthetic oligonucleotide
caagaagagcuggucuagc

SEQ ID NO: 2433929 - RNA, 19 nt, Artificial Sequence
  Description of Artificial Sequence: Synthetic oligonucleotide
gaagucuaucuuugcauau

SEQ ID NO: 2433930 - RNA, 19 nt, Artificial Sequence
  Description of Artificial Sequence: Synthetic oligonucleotide
uacccacugcccuccagga

SEQ ID NO: 2433931 - RNA, 19 nt, Artificial Sequence
  Description of Artificial Sequence: Synthetic oligonucleotide
ggaaauccggauccacuug

SEQ ID NO: 2433932 - RNA, 19 nt, Artificial Sequence
  Description of Artificial Sequence: Synthetic oligonucleotide
gacgguuguacggugucca

SEQ ID NO: 2433933 - RNA, 19 nt, Artificial Sequence
  Description of Artificial Sequence: Synthetic oligonucleotide
uaccucucuaugucuugac

SEQ ID NO: 2433934 - RNA, 19 nt, Artificial Sequence
  Description of Artificial Sequence: Synthetic oligonucleotide
cucguccagcgugaaacgg

SEQ ID NO: 2433935 - RNA, 19 nt, Artificial Sequence
  Description of Artificial Sequence: Synthetic oligonucleotide
agcacuccgagcgugcgca

SEQ ID NO: 2433936 - RNA, 19 nt, Artificial Sequence
  Description of Artificial Sequence: Synthetic oligonucleotide
ccaguaacugcagcgagag

SEQ ID NO: 2433937 - RNA, 19 nt, Artificial Sequence
  Description of Artificial Sequence: Synthetic oligonucleotide
gucagcuggacgguuguac

SEQ ID NO: 2433938 - RNA, 19 nt, Artificial Sequence
  Description of Artificial Sequence: Synthetic oligonucleotide
ccagucuugccaagaagag

SEQ ID NO: 2433939 - RNA, 19 nt, Artificial Sequence
  Description of Artificial Sequence: Synthetic oligonucleotide
ggaagucuaucuuugcaua

SEQ ID NO: 2433940 - RNA, 19 nt, Artificial Sequence
  Description of Artificial Sequence: Synthetic oligonucleotide
acuccgagcgugcgcagcu

SEQ ID NO: 2433941 - RNA, 19 nt, Artificial Sequence
  Description of Artificial Sequence: Synthetic oligonucleotide
auacagcacuccgagcgug

SEQ ID NO: 2433942 - RNA, 19 nt, Artificial Sequence
  Description of Artificial Sequence: Synthetic oligonucleotide
ucggccgcggacucgucca

SEQ ID NO: 2433943 - RNA, 19 nt, Artificial Sequence
  Description of Artificial Sequence: Synthetic oligonucleotide
cucacacagugcaguacuc

SEQ ID NO: 2433944 - RNA, 19 nt, Artificial Sequence
  Description of Artificial Sequence: Synthetic oligonucleotide
acugcccuccaggauguag

SEQ ID NO: 2433945 - RNA, 19 nt, Artificial Sequence
  Description of Artificial Sequence: Synthetic oligonucleotide
cuuugcauaugguaaugau

SEQ ID NO: 2433946 - RNA, 19 nt, Artificial Sequence
  Description of Artificial Sequence: Synthetic oligonucleotide
acagcacuccgagcgugcg

SEQ ID NO: 2433947 - RNA, 19 nt, Artificial Sequence
  Description of Artificial Sequence: Synthetic oligonucleotide
cugaacccgggcaucaaaa

SEQ ID NO: 2433948 - RNA, 19 nt, Artificial Sequence
  Description of Artificial Sequence: Synthetic oligonucleotide
aaacagccgcauggccuuc

SEQ ID NO: 2433949 - RNA, 19 nt, Artificial Sequence
  Description of Artificial Sequence: Synthetic oligonucleotide
agcuggacgguuguacggu

SEQ ID NO: 2433950 - RNA, 19 nt, Artificial Sequence
  Description of Artificial Sequence: Synthetic oligonucleotide
ccuucuccauggaaauccg

SEQ ID NO: 2433951 - RNA, 19 nt, Artificial Sequence
  Description of Artificial Sequence: Synthetic oligonucleotide
cagaugcuccucgaagaac

SEQ ID NO: 2433952 - RNA, 19 nt, Artificial Sequence
  Description of Artificial Sequence: Synthetic oligonucleotide
uccucauaauugggaaguc

SEQ ID NO: 2433953 - RNA, 19 nt, Artificial Sequence
  Description of Artificial Sequence: Synthetic oligonucleotide
accaguaacugcagcgaga

SEQ ID NO: 2433954 - RNA, 19 nt, Artificial Sequence
  Description of Artificial Sequence: Synthetic oligonucleotide
ggauguagcggaucuccuc

SEQ ID NO: 2433955 - RNA, 19 nt, Artificial Sequence
  Description of Artificial Sequence: Synthetic oligonucleotide
uguaccaggcuugcaccau

SEQ ID NO: 2433956 - RNA, 19 nt, Artificial Sequence
  Description of Artificial Sequence: Synthetic oligonucleotide
ggacaugaagaucuguuau

SEQ ID NO: 2433957 - RNA, 19 nt, Artificial Sequence
  Description of Artificial Sequence: Synthetic oligonucleotide
ggcaucaaaauggucagcu

SEQ ID NO: 2433958 - RNA, 19 nt, Artificial Sequence
  Description of Artificial Sequence: Synthetic oligonucleotide
caggaagcgugaucauguc

SEQ ID NO: 2433959 - RNA, 19 nt, Artificial Sequence
  Description of Artificial Sequence: Synthetic oligonucleotide
agcgugaaacggugauaga

SEQ ID NO: 2433960 - RNA, 19 nt, Artificial Sequence
  Description of Artificial Sequence: Synthetic oligonucleotide
aggcccaccgggcggucgg

SEQ ID NO: 2433961 - RNA, 19 nt, Artificial Sequence
  Description of Artificial Sequence: Synthetic oligonucleotide
ccaaguaagaaucacuuuu

SEQ ID NO: 2433962 - RNA, 19 nt, Artificial Sequence
  Description of Artificial Sequence: Synthetic oligonucleotide
cauccaggaguaguuucuc

SEQ ID NO: 2433963 - RNA, 19 nt, Artificial Sequence
  Description of Artificial Sequence: Synthetic oligonucleotide
gggacaugaagaucuguua

SEQ ID NO: 2433964 - RNA, 19 nt, Artificial Sequence
  Description of Artificial Sequence: Synthetic oligonucleotide
cuagcgucaaguccacaua

SEQ ID NO: 2433965 - RNA, 19 nt, Artificial Sequence
  Description of Artificial Sequence: Synthetic oligonucleotide
auguagcggaucuccucau

SEQ ID NO: 2433966 - RNA, 19 nt, Artificial Sequence
  Description of Artificial Sequence: Synthetic oligonucleotide
aacagccgcauggccuuca

SEQ ID NO: 2433967 - RNA, 19 nt, Artificial Sequence
  Description of Artificial Sequence: Synthetic oligonucleotide
agcgucaaguccacauaca

SEQ ID NO: 2433968 - RNA, 19 nt, Artificial Sequence
  Description of Artificial Sequence: Synthetic oligonucleotide
accuucccaccaguaacug

SEQ ID NO: 2433969 - RNA, 19 nt, Artificial Sequence
  Description of Artificial Sequence: Synthetic oligonucleotide
caguaacugcagcgagagc

SEQ ID NO: 2433970 - RNA, 19 nt, Artificial Sequence
  Description of Artificial Sequence: Synthetic oligonucleotide
gcgucaaguccacauacaa

SEQ ID NO: 2433971 - RNA, 19 nt, Artificial Sequence
  Description of Artificial Sequence: Synthetic oligonucleotide
ccaagaagagcuggucuag

SEQ ID NO: 2433972 - RNA, 19 nt, Artificial Sequence
  Description of Artificial Sequence: Synthetic oligonucleotide
guacugaacccgggcauca

SEQ ID NO: 2433973 - RNA, 19 nt, Artificial Sequence
  Description of Artificial Sequence: Synthetic oligonucleotide
augcaccaaugcacacacc

SEQ ID NO: 2433974 - RNA, 19 nt, Artificial Sequence
  Description of Artificial Sequence: Synthetic oligonucleotide
caaagugcaccgcuaugcu

SEQ ID NO: 2433975 - RNA, 19 nt, Artificial Sequence
  Description of Artificial Sequence: Synthetic oligonucleotide
gcggacucguccauguacc

SEQ ID NO: 2433976 - RNA, 19 nt, Artificial Sequence
  Description of Artificial Sequence: Synthetic oligonucleotide
aggauguagcggaucuccu

SEQ ID NO: 2433977 - RNA, 19 nt, Artificial Sequence
  Description of Artificial Sequence: Synthetic oligonucleotide
cuucaaagugcaccgcuau

SEQ ID NO: 2433978 - RNA, 19 nt, Artificial Sequence
  Description of Artificial Sequence: Synthetic oligonucleotide
ggacucguccauguaccag

SEQ ID NO: 2433979 - RNA, 19 nt, Artificial Sequence
  Description of Artificial Sequence: Synthetic oligonucleotide
gcaaccuucccaccaguaa

SEQ ID NO: 2433980 - RNA, 19 nt, Artificial Sequence
  Description of Artificial Sequence: Synthetic oligonucleotide
cucuaugucuugacagagu

SEQ ID NO: 2433981 - RNA, 19 nt, Artificial Sequence
  Description of Artificial Sequence: Synthetic oligonucleotide
cagccgcauggccuucacg

SEQ ID NO: 2433982 - RNA, 19 nt, Artificial Sequence
  Description of Artificial Sequence: Synthetic oligonucleotide
gcggaucuccucauccagg

SEQ ID NO: 2433983 - RNA, 19 nt, Artificial Sequence
  Description of Artificial Sequence: Synthetic oligonucleotide
guuguacgguguccacaca

SEQ ID NO: 2433984 - RNA, 19 nt, Artificial Sequence
  Description of Artificial Sequence: Synthetic oligonucleotide
cagcacuccgagcgugcgc

SEQ ID NO: 2433985 - RNA, 19 nt, Artificial Sequence
  Description of Artificial Sequence: Synthetic oligonucleotide
guaacugcagcgagagccu

SEQ ID NO: 2433986 - RNA, 19 nt, Artificial Sequence
  Description of Artificial Sequence: Synthetic oligonucleotide
ccugacaucgaaguaccca

SEQ ID NO: 2433987 - RNA, 19 nt, Artificial Sequence
  Description of Artificial Sequence: Synthetic oligonucleotide
cagcauccagcuuccaaua

SEQ ID NO: 2433988 - RNA, 19 nt, Artificial Sequence
  Description of Artificial Sequence: Synthetic oligonucleotide
ccacaaacagccgcauggc

SEQ ID NO: 2433989 - RNA, 19 nt, Artificial Sequence
  Description of Artificial Sequence: Synthetic oligonucleotide
ucuucucguccagcgugaa

SEQ ID NO: 2433990 - RNA, 19 nt, Artificial Sequence
  Description of Artificial Sequence: Synthetic oligonucleotide
cacuuuuauagaugcuuuu

SEQ ID NO: 2433991 - RNA, 19 nt, Artificial Sequence
  Description of Artificial Sequence: Synthetic oligonucleotide
cacccaaaccagggcuucc

SEQ ID NO: 2433992 - RNA, 19 nt, Artificial Sequence
  Description of Artificial Sequence: Synthetic oligonucleotide
cguccauguaccaggcuug

SEQ ID NO: 2433993 - RNA, 19 nt, Artificial Sequence
  Description of Artificial Sequence: Synthetic oligonucleotide
ggcauccgcgggucggccg

SEQ ID NO: 2433994 - RNA, 19 nt, Artificial Sequence
  Description of Artificial Sequence: Synthetic oligonucleotide
gcuggacgguuguacggug

SEQ ID NO: 2433995 - RNA, 19 nt, Artificial Sequence
  Description of Artificial Sequence: Synthetic oligonucleotide
uacugaacccgggcaucaa

SEQ ID NO: 2433996 - RNA, 19 nt, Artificial Sequence
  Description of Artificial Sequence: Synthetic oligonucleotide
ggugcagaugcuccucgaa

SEQ ID NO: 2433997 - RNA, 19 nt, Artificial Sequence
  Description of Artificial Sequence: Synthetic oligonucleotide
cacuccgagcgugcgcagc

SEQ ID NO: 2433998 - RNA, 19 nt, Artificial Sequence
  Description of Artificial Sequence: Synthetic oligonucleotide
agcgagagccucacacagu

SEQ ID NO: 2433999 - RNA, 19 nt, Artificial Sequence
  Description of Artificial Sequence: Synthetic oligonucleotide
guggggcauccgcgggucg

SEQ ID NO: 2434000 - RNA, 19 nt, Artificial Sequence
  Description of Artificial Sequence: Synthetic oligonucleotide
ccgcuaugcucuuccuucc

SEQ ID NO: 2434001 - RNA, 19 nt, Artificial Sequence
  Description of Artificial Sequence: Synthetic oligonucleotide
agaugccagcaggaagcgu

SEQ ID NO: 2434002 - RNA, 19 nt, Artificial Sequence
  Description of Artificial Sequence: Synthetic oligonucleotide
gccuucacguaauucuucu

SEQ ID NO: 2434003 - RNA, 19 nt, Artificial Sequence
  Description of Artificial Sequence: Synthetic oligonucleotide
gcuaugcucuuccuuccaa

SEQ ID NO: 2434004 - RNA, 19 nt, Artificial Sequence
  Description of Artificial Sequence: Synthetic oligonucleotide
agugcaccgcuaugcucuu

SEQ ID NO: 2434005 - RNA, 19 nt, Artificial Sequence
  Description of Artificial Sequence: Synthetic oligonucleotide
acccgggcaucaaaauggu

SEQ ID NO: 2434006 - RNA, 19 nt, Artificial Sequence
  Description of Artificial Sequence: Synthetic oligonucleotide
cguccagcgugaaacggug

SEQ ID NO: 2434007 - RNA, 19 nt, Artificial Sequence
  Description of Artificial Sequence: Synthetic oligonucleotide
ggacgguuguacggugucc

SEQ ID NO: 2434008 - RNA, 19 nt, Artificial Sequence
  Description of Artificial Sequence: Synthetic oligonucleotide
gcauccgcgggucggccgc

SEQ ID NO: 2434009 - RNA, 19 nt, Artificial Sequence
  Description of Artificial Sequence: Synthetic oligonucleotide
gucuaucuuugcauauggu

SEQ ID NO: 2434010 - RNA, 19 nt, Artificial Sequence
  Description of Artificial Sequence: Synthetic oligonucleotide
cgaaguacccacugcccuc

SEQ ID NO: 2434011 - RNA, 19 nt, Artificial Sequence
  Description of Artificial Sequence: Synthetic oligonucleotide
gcgugaaacggugauagau

SEQ ID NO: 2434012 - RNA, 19 nt, Artificial Sequence
  Description of Artificial Sequence: Synthetic oligonucleotide
guccuccuugucccugaca

SEQ ID NO: 2434013 - RNA, 19 nt, Artificial Sequence
  Description of Artificial Sequence: Synthetic oligonucleotide
cgcggacucguccauguac

SEQ ID NO: 2434014 - RNA, 19 nt, Artificial Sequence
  Description of Artificial Sequence: Synthetic oligonucleotide
gggcaucaaaauggucagc

SEQ ID NO: 2434015 - RNA, 19 nt, Artificial Sequence
  Description of Artificial Sequence: Synthetic oligonucleotide
uccgcgggucggccgcgga

SEQ ID NO: 2434016 - RNA, 19 nt, Artificial Sequence
  Description of Artificial Sequence: Synthetic oligonucleotide
cuucucguccagcgugaaa

SEQ ID NO: 2434017 - RNA, 19 nt, Artificial Sequence
  Description of Artificial Sequence: Synthetic oligonucleotide
ggccuucacguaauucuuc

SEQ ID NO: 2434018 - RNA, 19 nt, Artificial Sequence
  Description of Artificial Sequence: Synthetic oligonucleotide
cuggacgguuguacggugu

SEQ ID NO: 2434019 - RNA, 19 nt, Artificial Sequence
  Description of Artificial Sequence: Synthetic oligonucleotide
ccaggaguaguuucucucu

SEQ ID NO: 2434020 - RNA, 19 nt, Artificial Sequence
  Description of Artificial Sequence: Synthetic oligonucleotide
caccgggcggucgggcugc

SEQ ID NO: 2434021 - RNA, 19 nt, Artificial Sequence
  Description of Artificial Sequence: Synthetic oligonucleotide
cacacccaaaccagggcuu

SEQ ID NO: 2434022 - RNA, 19 nt, Artificial Sequence
  Description of Artificial Sequence: Synthetic oligonucleotide
ggucuagcgucaaguccac

SEQ ID NO: 2434023 - RNA, 19 nt, Artificial Sequence
  Description of Artificial Sequence: Synthetic oligonucleotide
cccugacaucgaaguaccc

SEQ ID NO: 2434024 - RNA, 19 nt, Artificial Sequence
  Description of Artificial Sequence: Synthetic oligonucleotide
gccucacacagugcaguac

SEQ ID NO: 2434025 - RNA, 19 nt, Artificial Sequence
  Description of Artificial Sequence: Synthetic oligonucleotide
caggcccaccgggcggucg

SEQ ID NO: 2434026 - RNA, 19 nt, Artificial Sequence
  Description of Artificial Sequence: Synthetic oligonucleotide
ccaccaguaacugcagcga

SEQ ID NO: 2434027 - RNA, 19 nt, Artificial Sequence
  Description of Artificial Sequence: Synthetic oligonucleotide
ccggauccacuuguccucc

SEQ ID NO: 2434028 - RNA, 19 nt, Artificial Sequence
  Description of Artificial Sequence: Synthetic oligonucleotide
cgggcggucgggcugcgcg

SEQ ID NO: 2434029 - RNA, 19 nt, Artificial Sequence
  Description of Artificial Sequence: Synthetic oligonucleotide
ggcggucgggcugcgcgcg

SEQ ID NO: 2434030 - RNA, 19 nt, Artificial Sequence
  Description of Artificial Sequence: Synthetic oligonucleotide
caggaguaguuucucucuu

SEQ ID NO: 2434031 - RNA, 19 nt, Artificial Sequence
  Description of Artificial Sequence: Synthetic oligonucleotide
ugcgcgcgguggggcaucc

SEQ ID NO: 2434032 - RNA, 19 nt, Artificial Sequence
  Description of Artificial Sequence: Synthetic oligonucleotide
cauccgcgggucggccgcg

SEQ ID NO: 2434033 - RNA, 19 nt, Artificial Sequence
  Description of Artificial Sequence: Synthetic oligonucleotide
cuccgagcgugcgcagcug

SEQ ID NO: 2434034 - RNA, 19 nt, Artificial Sequence
  Description of Artificial Sequence: Synthetic oligonucleotide
gguggggcauccgcggguc

SEQ ID NO: 2434035 - RNA, 19 nt, Artificial Sequence
  Description of Artificial Sequence: Synthetic oligonucleotide
gcgcgguggggcauccgcg

SEQ ID NO: 2434036 - RNA, 19 nt, Artificial Sequence
  Description of Artificial Sequence: Synthetic oligonucleotide
gggcggucgggcugcgcgc

SEQ ID NO: 2434037 - RNA, 19 nt, Artificial Sequence
  Description of Artificial Sequence: Synthetic oligonucleotide
ccucgaagaacaucuugau

SEQ ID NO: 2434038 - RNA, 19 nt, Artificial Sequence
  Description of Artificial Sequence: Synthetic oligonucleotide
auccgcgggucggccgcgg

SEQ ID NO: 2434039 - RNA, 19 nt, Artificial Sequence
  Description of Artificial Sequence: Synthetic oligonucleotide
cgcgcgguggggcauccgc

SEQ ID NO: 2434040 - RNA, 19 nt, Artificial Sequence
  Description of Artificial Sequence: Synthetic oligonucleotide
cccgggcaucaaaaugguc

SEQ ID NO: 2434041 - RNA, 19 nt, Artificial Sequence
  Description of Artificial Sequence: Synthetic oligonucleotide
ggucgggcugcgcgcggug

SEQ ID NO: 2434042 - RNA, 19 nt, Artificial Sequence
  Description of Artificial Sequence: Synthetic oligonucleotide
ccgcauggccuucacguaa

SEQ ID NO: 2434043 - RNA, 19 nt, Artificial Sequence
  Description of Artificial Sequence: Synthetic oligonucleotide
gcacuccgagcgugcgcag

SEQ ID NO: 2434044 - RNA, 19 nt, Artificial Sequence
  Description of Artificial Sequence: Synthetic oligonucleotide
ccauaccucucuaugucuu

SEQ ID NO: 2434045 - RNA, 19 nt, Artificial Sequence
  Description of Artificial Sequence: Synthetic oligonucleotide
ccaccgggcggucgggcug

SEQ ID NO: 2434046 - RNA, 19 nt, Artificial Sequence
  Description of Artificial Sequence: Synthetic oligonucleotide
gccgcggacucguccaugu

SEQ ID NO: 2434047 - RNA, 19 nt, Artificial Sequence
  Description of Artificial Sequence: Synthetic oligonucleotide
gccgcauggccuucacgua

SEQ ID NO: 2434048 - RNA, 19 nt, Artificial Sequence
  Description of Artificial Sequence: Synthetic oligonucleotide
caccgcuaugcucuuccuu

SEQ ID NO: 2434049 - RNA, 19 nt, Artificial Sequence
  Description of Artificial Sequence: Synthetic oligonucleotide
ggcugcgcgcgguggggca

SEQ ID NO: 2434050 - RNA, 19 nt, Artificial Sequence
  Description of Artificial Sequence: Synthetic oligonucleotide
ggauccacuuguccuccuu

SEQ ID NO: 2434051 - RNA, 19 nt, Artificial Sequence
  Description of Artificial Sequence: Synthetic oligonucleotide
gugcaccgcuaugcucuuc

SEQ ID NO: 2434052 - RNA, 19 nt, Artificial Sequence
  Description of Artificial Sequence: Synthetic oligonucleotide
gggcauccgcgggucggcc

SEQ ID NO: 2434053 - RNA, 19 nt, Artificial Sequence
  Description of Artificial Sequence: Synthetic oligonucleotide
cugcgcgcgguggggcauc

SEQ ID NO: 2434054 - RNA, 19 nt, Artificial Sequence
  Description of Artificial Sequence: Synthetic oligonucleotide
gggcugcgcgcgguggggc

SEQ ID NO: 2434055 - RNA, 19 nt, Artificial Sequence
  Description of Artificial Sequence: Synthetic oligonucleotide
ggccgcggacucguccaug

SEQ ID NO: 2434056 - RNA, 19 nt, Artificial Sequence
  Description of Artificial Sequence: Synthetic oligonucleotide
cggacucguccauguacca

SEQ ID NO: 2434057 - RNA, 19 nt, Artificial Sequence
  Description of Artificial Sequence: Synthetic oligonucleotide
cgcuaugcucuuccuucca

SEQ ID NO: 2434058 - RNA, 19 nt, Artificial Sequence
  Description of Artificial Sequence: Synthetic oligonucleotide
cgguuguacgguguccaca

SEQ ID NO: 2434059 - RNA, 19 nt, Artificial Sequence
  Description of Artificial Sequence: Synthetic oligonucleotide
ccagcgugaaacggugaua

SEQ ID NO: 2434060 - RNA, 19 nt, Artificial Sequence
  Description of Artificial Sequence: Synthetic oligonucleotide
ggcccaccgggcggucggg

SEQ ID NO: 2434061 - RNA, 19 nt, Artificial Sequence
  Description of Artificial Sequence: Synthetic oligonucleotide
gcgggucggccgcggacuc

SEQ ID NO: 2434062 - RNA, 19 nt, Artificial Sequence
  Description of Artificial Sequence: Synthetic oligonucleotide
gcaccgcuaugcucuuccu

SEQ ID NO: 2434063 - RNA, 19 nt, Artificial Sequence
  Description of Artificial Sequence: Synthetic oligonucleotide
ccgcgggucggccgcggac

SEQ ID NO: 2434064 - RNA, 19 nt, Artificial Sequence
  Description of Artificial Sequence: Synthetic oligonucleotide
ccgagcgugcgcagcugcu

SEQ ID NO: 2434065 - RNA, 19 nt, Artificial Sequence
  Description of Artificial Sequence: Synthetic oligonucleotide
gcgcgcgguggggcauccg

SEQ ID NO: 2434066 - RNA, 19 nt, Artificial Sequence
  Description of Artificial Sequence: Synthetic oligonucleotide
ccgcggacucguccaugua

SEQ ID NO: 2434067 - RNA, 19 nt, Artificial Sequence
  Description of Artificial Sequence: Synthetic oligonucleotide
gcugcgcgcgguggggcau

SEQ ID NO: 2434068 - RNA, 19 nt, Artificial Sequence
  Description of Artificial Sequence: Synthetic oligonucleotide
ccgggcggucgggcugcgc

SEQ ID NO: 2434069 - RNA, 19 nt, Artificial Sequence
  Description of Artificial Sequence: Synthetic oligonucleotide
cgguggggcauccgcgggu

SEQ ID NO: 2434070 - RNA, 19 nt, Artificial Sequence
  Description of Artificial Sequence: Synthetic oligonucleotide
cgcgggucggccgcggacu

SEQ ID NO: 2434071 - RNA, 19 nt, Artificial Sequence
  Description of Artificial Sequence: Synthetic oligonucleotide
cggucgggcugcgcgcggu

SEQ ID NO: 2434072 - RNA, 19 nt, Artificial Sequence
  Description of Artificial Sequence: Synthetic oligonucleotide
cggccgcggacucguccau

SEQ ID NO: 2434073 - RNA, 19 nt, Artificial Sequence
  Description of Artificial Sequence: Synthetic oligonucleotide
aauacuggacaccagaccc

SEQ ID NO: 2434074 - RNA, 19 nt, Artificial Sequence
  Description of Artificial Sequence: Synthetic oligonucleotide
aagauaagaagucucauag

SEQ ID NO: 2434075 - RNA, 19 nt, Artificial Sequence
  Description of Artificial Sequence: Synthetic oligonucleotide
auauaaaccacguugagag

SEQ ID NO: 2434076 - RNA, 19 nt, Artificial Sequence
  Description of Artificial Sequence: Synthetic oligonucleotide
uaagaagucucauagaaag

SEQ ID NO: 2434077 - RNA, 19 nt, Artificial Sequence
  Description of Artificial Sequence: Synthetic oligonucleotide
aagcauauaaaccacguug

SEQ ID NO: 2434078 - RNA, 19 nt, Artificial Sequence
  Description of Artificial Sequence: Synthetic oligonucleotide
ucuuggaacaggcaaaucc

SEQ ID NO: 2434079 - RNA, 19 nt, Artificial Sequence
  Description of Artificial Sequence: Synthetic oligonucleotide
aaugaugugaauacuggac

SEQ ID NO: 2434080 - RNA, 19 nt, Artificial Sequence
  Description of Artificial Sequence: Synthetic oligonucleotide
uguaagguugaacaaacca

SEQ ID NO: 2434081 - RNA, 19 nt, Artificial Sequence
  Description of Artificial Sequence: Synthetic oligonucleotide
acuucucuccaauucaugc

SEQ ID NO: 2434082 - RNA, 19 nt, Artificial Sequence
  Description of Artificial Sequence: Synthetic oligonucleotide
agagauugcaaacuggaag

SEQ ID NO: 2434083 - RNA, 19 nt, Artificial Sequence
  Description of Artificial Sequence: Synthetic oligonucleotide
guaaguacggcauuguaag

SEQ ID NO: 2434084 - RNA, 19 nt, Artificial Sequence
  Description of Artificial Sequence: Synthetic oligonucleotide
uaaagaagaggccaacacc

SEQ ID NO: 2434085 - RNA, 19 nt, Artificial Sequence
  Description of Artificial Sequence: Synthetic oligonucleotide
uaagguugaacaaaccaca

SEQ ID NO: 2434086 - RNA, 19 nt, Artificial Sequence
  Description of Artificial Sequence: Synthetic oligonucleotide
uugcucaugacccaccagg

SEQ ID NO: 2434087 - RNA, 19 nt, Artificial Sequence
  Description of Artificial Sequence: Synthetic oligonucleotide
gauaagaagucucauagaa

SEQ ID NO: 2434088 - RNA, 19 nt, Artificial Sequence
  Description of Artificial Sequence: Synthetic oligonucleotide
caaagauccuaucugaaag

SEQ ID NO: 2434089 - RNA, 19 nt, Artificial Sequence
  Description of Artificial Sequence: Synthetic oligonucleotide
uugguggugguuaacagcc

SEQ ID NO: 2434090 - RNA, 19 nt, Artificial Sequence
  Description of Artificial Sequence: Synthetic oligonucleotide
agagcaagagauugcaaac

SEQ ID NO: 2434091 - RNA, 19 nt, Artificial Sequence
  Description of Artificial Sequence: Synthetic oligonucleotide
auaaaccacguugagagcg

SEQ ID NO: 2434092 - RNA, 19 nt, Artificial Sequence
  Description of Artificial Sequence: Synthetic oligonucleotide
ugagcaauaagcccacaag

SEQ ID NO: 2434093 - RNA, 19 nt, Artificial Sequence
  Description of Artificial Sequence: Synthetic oligonucleotide
acgccaaugagcaauaagc

SEQ ID NO: 2434094 - RNA, 19 nt, Artificial Sequence
  Description of Artificial Sequence: Synthetic oligonucleotide
ugaucauguaaaagaagag

SEQ ID NO: 2434095 - RNA, 19 nt, Artificial Sequence
  Description of Artificial Sequence: Synthetic oligonucleotide
uguuugaggaacuucuccc

SEQ ID NO: 2434096 - RNA, 19 nt, Artificial Sequence
  Description of Artificial Sequence: Synthetic oligonucleotide
uccaaugaugugaauacug

SEQ ID NO: 2434097 - RNA, 19 nt, Artificial Sequence
  Description of Artificial Sequence: Synthetic oligonucleotide
gaucauguaaaagaagagc

SEQ ID NO: 2434098 - RNA, 19 nt, Artificial Sequence
  Description of Artificial Sequence: Synthetic oligonucleotide
ugcacauugcaccacagga

SEQ ID NO: 2434099 - RNA, 19 nt, Artificial Sequence
  Description of Artificial Sequence: Synthetic oligonucleotide
ucauagaaaggcacugggg

SEQ ID NO: 2434100 - RNA, 19 nt, Artificial Sequence
  Description of Artificial Sequence: Synthetic oligonucleotide
ugauagccagacaagagca

SEQ ID NO: 2434101 - RNA, 19 nt, Artificial Sequence
  Description of Artificial Sequence: Synthetic oligonucleotide
uacauagcaaguuggagac

SEQ ID NO: 2434102 - RNA, 19 nt, Artificial Sequence
  Description of Artificial Sequence: Synthetic oligonucleotide
cuuguuucuguugauagcc

SEQ ID NO: 2434103 - RNA, 19 nt, Artificial Sequence
  Description of Artificial Sequence: Synthetic oligonucleotide
aaagauccuaucugaaaga

SEQ ID NO: 2434104 - RNA, 19 nt, Artificial Sequence
  Description of Artificial Sequence: Synthetic oligonucleotide
cucauugccagccaaacac

SEQ ID NO: 2434105 - RNA, 19 nt, Artificial Sequence
  Description of Artificial Sequence: Synthetic oligonucleotide
gagcaauaagcccacaagc

SEQ ID NO: 2434106 - RNA, 19 nt, Artificial Sequence
  Description of Artificial Sequence: Synthetic oligonucleotide
uguaaguacggcauuguaa

SEQ ID NO: 2434107 - RNA, 19 nt, Artificial Sequence
  Description of Artificial Sequence: Synthetic oligonucleotide
uggucuugcacauugcacc

SEQ ID NO: 2434108 - RNA, 19 nt, Artificial Sequence
  Description of Artificial Sequence: Synthetic oligonucleotide
aacucaaggucauccuugg

SEQ ID NO: 2434109 - RNA, 19 nt, Artificial Sequence
  Description of Artificial Sequence: Synthetic oligonucleotide
aaagauaagaagucucaua

SEQ ID NO: 2434110 - RNA, 19 nt, Artificial Sequence
  Description of Artificial Sequence: Synthetic oligonucleotide
ugcuuguuucuguugauag

SEQ ID NO: 2434111 - RNA, 19 nt, Artificial Sequence
  Description of Artificial Sequence: Synthetic oligonucleotide
gauccuaucugaaagauaa

SEQ ID NO: 2434112 - RNA, 19 nt, Artificial Sequence
  Description of Artificial Sequence: Synthetic oligonucleotide
uaucaucuuguaaguacgg

SEQ ID NO: 2434113 - RNA, 19 nt, Artificial Sequence
  Description of Artificial Sequence: Synthetic oligonucleotide
ucauccgaauguuugagga

SEQ ID NO: 2434114 - RNA, 19 nt, Artificial Sequence
  Description of Artificial Sequence: Synthetic oligonucleotide
auuuucagggcuucauccg

SEQ ID NO: 2434115 - RNA, 19 nt, Artificial Sequence
  Description of Artificial Sequence: Synthetic oligonucleotide
aucauguaaaagaagagca

SEQ ID NO: 2434116 - RNA, 19 nt, Artificial Sequence
  Description of Artificial Sequence: Synthetic oligonucleotide
aucucugugaagcuaaaga

SEQ ID NO: 2434117 - RNA, 19 nt, Artificial Sequence
  Description of Artificial Sequence: Synthetic oligonucleotide
ugaagcuaaagaagaggcc

SEQ ID NO: 2434118 - RNA, 19 nt, Artificial Sequence
  Description of Artificial Sequence: Synthetic oligonucleotide
augaucauguaaaagaaga

SEQ ID NO: 2434119 - RNA, 19 nt, Artificial Sequence
  Description of Artificial Sequence: Synthetic oligonucleotide
agguugaacaaaccacagc

SEQ ID NO: 2434120 - RNA, 19 nt, Artificial Sequence
  Description of Artificial Sequence: Synthetic oligonucleotide
gaagcuaaagaagaggcca

SEQ ID NO: 2434121 - RNA, 19 nt, Artificial Sequence
  Description of Artificial Sequence: Synthetic oligonucleotide
augaggagaaggaagacuc

SEQ ID NO: 2434122 - RNA, 19 nt, Artificial Sequence
  Description of Artificial Sequence: Synthetic oligonucleotide
aaugacuccuccaaugaug

SEQ ID NO: 2434123 - RNA, 19 nt, Artificial Sequence
  Description of Artificial Sequence: Synthetic oligonucleotide
uggcuacauagcaaguugg

SEQ ID NO: 2434124 - RNA, 19 nt, Artificial Sequence
  Description of Artificial Sequence: Synthetic oligonucleotide
cuaaagaagaggccaacac

SEQ ID NO: 2434125 - RNA, 19 nt, Artificial Sequence
  Description of Artificial Sequence: Synthetic oligonucleotide
aaggaugaucauguaaaag

SEQ ID NO: 2434126 - RNA, 19 nt, Artificial Sequence
  Description of Artificial Sequence: Synthetic oligonucleotide
ugaacaaaccacagcaguc

SEQ ID NO: 2434127 - RNA, 19 nt, Artificial Sequence
  Description of Artificial Sequence: Synthetic oligonucleotide
cucauagaaaggcacuggg

SEQ ID NO: 2434128 - RNA, 19 nt, Artificial Sequence
  Description of Artificial Sequence: Synthetic oligonucleotide
accaccuaggauuuucagg

SEQ ID NO: 2434129 - RNA, 19 nt, Artificial Sequence
  Description of Artificial Sequence: Synthetic oligonucleotide
acguugagagcgcacagcg

SEQ ID NO: 2434130 - RNA, 19 nt, Artificial Sequence
  Description of Artificial Sequence: Synthetic oligonucleotide
uguuucuguugauagccag

SEQ ID NO: 2434131 - RNA, 19 nt, Artificial Sequence
  Description of Artificial Sequence: Synthetic oligonucleotide
gguacuguugcucaugacc

SEQ ID NO: 2434132 - RNA, 19 nt, Artificial Sequence
  Description of Artificial Sequence: Synthetic oligonucleotide
gaauacuggacaccagacc

SEQ ID NO: 2434133 - RNA, 19 nt, Artificial Sequence
  Description of Artificial Sequence: Synthetic oligonucleotide
uuuugguuccggaaucuca

SEQ ID NO: 2434134 - RNA, 19 nt, Artificial Sequence
  Description of Artificial Sequence: Synthetic oligonucleotide
uaagcccacaagcauauaa

SEQ ID NO: 2434135 - RNA, 19 nt, Artificial Sequence
  Description of Artificial Sequence: Synthetic oligonucleotide
aaauccgccgcaaaccauc

SEQ ID NO: 2434136 - RNA, 19 nt, Artificial Sequence
  Description of Artificial Sequence: Synthetic oligonucleotide
gaugaucauguaaaagaag

SEQ ID NO: 2434137 - RNA, 19 nt, Artificial Sequence
  Description of Artificial Sequence: Synthetic oligonucleotide
gugaagcuaaagaagaggc

SEQ ID NO: 2434138 - RNA, 19 nt, Artificial Sequence
  Description of Artificial Sequence: Synthetic oligonucleotide
uucauccgaauguuugagg

SEQ ID NO: 2434139 - RNA, 19 nt, Artificial Sequence
  Description of Artificial Sequence: Synthetic oligonucleotide
aacaccaccuaggauuuuc

SEQ ID NO: 2434140 - RNA, 19 nt, Artificial Sequence
  Description of Artificial Sequence: Synthetic oligonucleotide
auccgaauguuugaggaac

SEQ ID NO: 2434141 - RNA, 19 nt, Artificial Sequence
  Description of Artificial Sequence: Synthetic oligonucleotide
ugcaccacaggaaguauca

SEQ ID NO: 2434142 - RNA, 19 nt, Artificial Sequence
  Description of Artificial Sequence: Synthetic oligonucleotide
cuacauagcaaguuggaga

SEQ ID NO: 2434143 - RNA, 19 nt, Artificial Sequence
  Description of Artificial Sequence: Synthetic oligonucleotide
agcaagagauugcaaacug

SEQ ID NO: 2434144 - RNA, 19 nt, Artificial Sequence
  Description of Artificial Sequence: Synthetic oligonucleotide
aucugaaagauaagaaguc

SEQ ID NO: 2434145 - RNA, 19 nt, Artificial Sequence
  Description of Artificial Sequence: Synthetic oligonucleotide
ccaccuaggauuuucaggg

SEQ ID NO: 2434146 - RNA, 19 nt, Artificial Sequence
  Description of Artificial Sequence: Synthetic oligonucleotide
ucggggacugccuuguagg

SEQ ID NO: 2434147 - RNA, 19 nt, Artificial Sequence
  Description of Artificial Sequence: Synthetic oligonucleotide
ggcauuguaagguugaaca

SEQ ID NO: 2434148 - RNA, 19 nt, Artificial Sequence
  Description of Artificial Sequence: Synthetic oligonucleotide
augaagaccaagccaagga

SEQ ID NO: 2434149 - RNA, 19 nt, Artificial Sequence
  Description of Artificial Sequence: Synthetic oligonucleotide
cacauugcaccacaggaag

SEQ ID NO: 2434150 - RNA, 19 nt, Artificial Sequence
  Description of Artificial Sequence: Synthetic oligonucleotide
guaagguugaacaaaccac

SEQ ID NO: 2434151 - RNA, 19 nt, Artificial Sequence
  Description of Artificial Sequence: Synthetic oligonucleotide
aaguacggcauuguaaggu

SEQ ID NO: 2434152 - RNA, 19 nt, Artificial Sequence
  Description of Artificial Sequence: Synthetic oligonucleotide
aauguuugaggaacuucuc

SEQ ID NO: 2434153 - RNA, 19 nt, Artificial Sequence
  Description of Artificial Sequence: Synthetic oligonucleotide
ucuggcaugcagaacuucu

SEQ ID NO: 2434154 - RNA, 19 nt, Artificial Sequence
  Description of Artificial Sequence: Synthetic oligonucleotide
cacaagcauauaaaccacg

SEQ ID NO: 2434155 - RNA, 19 nt, Artificial Sequence
  Description of Artificial Sequence: Synthetic oligonucleotide
aucaucuuguaaguacggc

SEQ ID NO: 2434156 - RNA, 19 nt, Artificial Sequence
  Description of Artificial Sequence: Synthetic oligonucleotide
uuuucagggcuucauccga

SEQ ID NO: 2434157 - RNA, 19 nt, Artificial Sequence
  Description of Artificial Sequence: Synthetic oligonucleotide
uuugaggaacuucucccca

SEQ ID NO: 2434158 - RNA, 19 nt, Artificial Sequence
  Description of Artificial Sequence: Synthetic oligonucleotide
agcaaguuggagaccagcc

SEQ ID NO: 2434159 - RNA, 19 nt, Artificial Sequence
  Description of Artificial Sequence: Synthetic oligonucleotide
uaaguacggcauuguaagg

SEQ ID NO: 2434160 - RNA, 19 nt, Artificial Sequence
  Description of Artificial Sequence: Synthetic oligonucleotide
agacaagagcaagagauug

SEQ ID NO: 2434161 - RNA, 19 nt, Artificial Sequence
  Description of Artificial Sequence: Synthetic oligonucleotide
ugguuccggaaucucauug

SEQ ID NO: 2434162 - RNA, 19 nt, Artificial Sequence
  Description of Artificial Sequence: Synthetic oligonucleotide
gacccaaauggccccaagg

SEQ ID NO: 2434163 - RNA, 19 nt, Artificial Sequence
  Description of Artificial Sequence: Synthetic oligonucleotide
uugcacauugcaccacagg

SEQ ID NO: 2434164 - RNA, 19 nt, Artificial Sequence
  Description of Artificial Sequence: Synthetic oligonucleotide
ucuuguaaguacggcauug

SEQ ID NO: 2434165 - RNA, 19 nt, Artificial Sequence
  Description of Artificial Sequence: Synthetic oligonucleotide
uucaaagauccuaucugaa

SEQ ID NO: 2434166 - RNA, 19 nt, Artificial Sequence
  Description of Artificial Sequence: Synthetic oligonucleotide
aagaccaagccaaggauga

SEQ ID NO: 2434167 - RNA, 19 nt, Artificial Sequence
  Description of Artificial Sequence: Synthetic oligonucleotide
uuucuguugauagccagac

SEQ ID NO: 2434168 - RNA, 19 nt, Artificial Sequence
  Description of Artificial Sequence: Synthetic oligonucleotide
uccaauucaugccggguac

SEQ ID NO: 2434169 - RNA, 19 nt, Artificial Sequence
  Description of Artificial Sequence: Synthetic oligonucleotide
caagagauugcaaacugga

SEQ ID NO: 2434170 - RNA, 19 nt, Artificial Sequence
  Description of Artificial Sequence: Synthetic oligonucleotide
uaggcuucaaagauccuau

SEQ ID NO: 2434171 - RNA, 19 nt, Artificial Sequence
  Description of Artificial Sequence: Synthetic oligonucleotide
guugagagcgcacagcgca

SEQ ID NO: 2434172 - RNA, 19 nt, Artificial Sequence
  Description of Artificial Sequence: Synthetic oligonucleotide
aggcaaauccgccgcaaac

SEQ ID NO: 2434173 - RNA, 19 nt, Artificial Sequence
  Description of Artificial Sequence: Synthetic oligonucleotide
aauaagcccacaagcauau

SEQ ID NO: 2434174 - RNA, 19 nt, Artificial Sequence
  Description of Artificial Sequence: Synthetic oligonucleotide
ccaagaaucucugugaagc

SEQ ID NO: 2434175 - RNA, 19 nt, Artificial Sequence
  Description of Artificial Sequence: Synthetic oligonucleotide
uuguaagguugaacaaacc

SEQ ID NO: 2434176 - RNA, 19 nt, Artificial Sequence
  Description of Artificial Sequence: Synthetic oligonucleotide
gaacaggcaaauccgccgc

SEQ ID NO: 2434177 - RNA, 19 nt, Artificial Sequence
  Description of Artificial Sequence: Synthetic oligonucleotide
ucucuccaauucaugccgg

SEQ ID NO: 2434178 - RNA, 19 nt, Artificial Sequence
  Description of Artificial Sequence: Synthetic oligonucleotide
ggccccaaggacuugaggg

SEQ ID NO: 2434179 - RNA, 19 nt, Artificial Sequence
  Description of Artificial Sequence: Synthetic oligonucleotide
gaacuucuggucuugcaca

SEQ ID NO: 2434180 - RNA, 19 nt, Artificial Sequence
  Description of Artificial Sequence: Synthetic oligonucleotide
aagacucccacagcaauga

SEQ ID NO: 2434181 - RNA, 19 nt, Artificial Sequence
  Description of Artificial Sequence: Synthetic oligonucleotide
uaaaccacguugagagcgc

SEQ ID NO: 2434182 - RNA, 19 nt, Artificial Sequence
  Description of Artificial Sequence: Synthetic oligonucleotide
cacugcaaugaggagaagg

SEQ ID NO: 2434183 - RNA, 19 nt, Artificial Sequence
  Description of Artificial Sequence: Synthetic oligonucleotide
ggaacaggcaaauccgccg

SEQ ID NO: 2434184 - RNA, 19 nt, Artificial Sequence
  Description of Artificial Sequence: Synthetic oligonucleotide
agauaagaagucucauaga

SEQ ID NO: 2434185 - RNA, 19 nt, Artificial Sequence
  Description of Artificial Sequence: Synthetic oligonucleotide
gaugugaauacuggacacc

SEQ ID NO: 2434186 - RNA, 19 nt, Artificial Sequence
  Description of Artificial Sequence: Synthetic oligonucleotide
uugaggggaggguaucggg

SEQ ID NO: 2434187 - RNA, 19 nt, Artificial Sequence
  Description of Artificial Sequence: Synthetic oligonucleotide
uacggcauuguaagguuga

SEQ ID NO: 2434188 - RNA, 19 nt, Artificial Sequence
  Description of Artificial Sequence: Synthetic oligonucleotide
agcauauaaaccacguuga

SEQ ID NO: 2434189 - RNA, 19 nt, Artificial Sequence
  Description of Artificial Sequence: Synthetic oligonucleotide
ugaggagaaggaagacucc

SEQ ID NO: 2434190 - RNA, 19 nt, Artificial Sequence
  Description of Artificial Sequence: Synthetic oligonucleotide
aaucucugugaagcuaaag

SEQ ID NO: 2434191 - RNA, 19 nt, Artificial Sequence
  Description of Artificial Sequence: Synthetic oligonucleotide
cacaggaaguaucaucuug

SEQ ID NO: 2434192 - RNA, 19 nt, Artificial Sequence
  Description of Artificial Sequence: Synthetic oligonucleotide
acccaaauggccccaagga

SEQ ID NO: 2434193 - RNA, 19 nt, Artificial Sequence
  Description of Artificial Sequence: Synthetic oligonucleotide
gaauguuugaggaacuucu

SEQ ID NO: 2434194 - RNA, 19 nt, Artificial Sequence
  Description of Artificial Sequence: Synthetic oligonucleotide
aagaagaggccaacaccac

SEQ ID NO: 2434195 - RNA, 19 nt, Artificial Sequence
  Description of Artificial Sequence: Synthetic oligonucleotide
gugaauacuggacaccaga

SEQ ID NO: 2434196 - RNA, 19 nt, Artificial Sequence
  Description of Artificial Sequence: Synthetic oligonucleotide
uguugcucaugacccacca

SEQ ID NO: 2434197 - RNA, 19 nt, Artificial Sequence
  Description of Artificial Sequence: Synthetic oligonucleotide
acaagagcaagagauugca

SEQ ID NO: 2434198 - RNA, 19 nt, Artificial Sequence
  Description of Artificial Sequence: Synthetic oligonucleotide
cuggggacccaaauggccc

SEQ ID NO: 2434199 - RNA, 19 nt, Artificial Sequence
  Description of Artificial Sequence: Synthetic oligonucleotide
gaggagaaggaagacuccc

SEQ ID NO: 2434200 - RNA, 19 nt, Artificial Sequence
  Description of Artificial Sequence: Synthetic oligonucleotide
agcaauaagcccacaagca

SEQ ID NO: 2434201 - RNA, 19 nt, Artificial Sequence
  Description of Artificial Sequence: Synthetic oligonucleotide
acagcagucaaaacuucuc

SEQ ID NO: 2434202 - RNA, 19 nt, Artificial Sequence
  Description of Artificial Sequence: Synthetic oligonucleotide
guaaaagaagagcagcacu

SEQ ID NO: 2434203 - RNA, 19 nt, Artificial Sequence
  Description of Artificial Sequence: Synthetic oligonucleotide
ggauccagaacucaagguc

SEQ ID NO: 2434204 - RNA, 19 nt, Artificial Sequence
  Description of Artificial Sequence: Synthetic oligonucleotide
gacaagagcaagagauugc

SEQ ID NO: 2434205 - RNA, 19 nt, Artificial Sequence
  Description of Artificial Sequence: Synthetic oligonucleotide
aacuucuggucuugcacau

SEQ ID NO: 2434206 - RNA, 19 nt, Artificial Sequence
  Description of Artificial Sequence: Synthetic oligonucleotide
acuguugcucaugacccac

SEQ ID NO: 2434207 - RNA, 19 nt, Artificial Sequence
  Description of Artificial Sequence: Synthetic oligonucleotide
accaagaaucucugugaag

SEQ ID NO: 2434208 - RNA, 19 nt, Artificial Sequence
  Description of Artificial Sequence: Synthetic oligonucleotide
ugaggaacuucuccccaca

SEQ ID NO: 2434209 - RNA, 19 nt, Artificial Sequence
  Description of Artificial Sequence: Synthetic oligonucleotide
aaacaccaagaaucucugu

SEQ ID NO: 2434210 - RNA, 19 nt, Artificial Sequence
  Description of Artificial Sequence: Synthetic oligonucleotide
augugaauacuggacacca

SEQ ID NO: 2434211 - RNA, 19 nt, Artificial Sequence
  Description of Artificial Sequence: Synthetic oligonucleotide
guugaacaaaccacagcag

SEQ ID NO: 2434212 - RNA, 19 nt, Artificial Sequence
  Description of Artificial Sequence: Synthetic oligonucleotide
accuaggauuuucagggcu

SEQ ID NO: 2434213 - RNA, 19 nt, Artificial Sequence
  Description of Artificial Sequence: Synthetic oligonucleotide
aaaacggcuguggcagggg

SEQ ID NO: 2434214 - RNA, 19 nt, Artificial Sequence
  Description of Artificial Sequence: Synthetic oligonucleotide
cauagaaaggcacuggggu

SEQ ID NO: 2434215 - RNA, 19 nt, Artificial Sequence
  Description of Artificial Sequence: Synthetic oligonucleotide
ucaugccggguacuguugc

SEQ ID NO: 2434216 - RNA, 19 nt, Artificial Sequence
  Description of Artificial Sequence: Synthetic oligonucleotide
gaggguaucggggacugcc

SEQ ID NO: 2434217 - RNA, 19 nt, Artificial Sequence
  Description of Artificial Sequence: Synthetic oligonucleotide
acucaaggucauccuuggc

SEQ ID NO: 2434218 - RNA, 19 nt, Artificial Sequence
  Description of Artificial Sequence: Synthetic oligonucleotide
uccuccaaugaugugaaua

SEQ ID NO: 2434219 - RNA, 19 nt, Artificial Sequence
  Description of Artificial Sequence: Synthetic oligonucleotide
cacagcgcauucuuggaac

SEQ ID NO: 2434220 - RNA, 19 nt, Artificial Sequence
  Description of Artificial Sequence: Synthetic oligonucleotide
acaagcauauaaaccacgu

SEQ ID NO: 2434221 - RNA, 19 nt, Artificial Sequence
  Description of Artificial Sequence: Synthetic oligonucleotide
caagccaaggaugaucaug

SEQ ID NO: 2434222 - RNA, 19 nt, Artificial Sequence
  Description of Artificial Sequence: Synthetic oligonucleotide
ucagggcuucauccgaaug

SEQ ID NO: 2434223 - RNA, 19 nt, Artificial Sequence
  Description of Artificial Sequence: Synthetic oligonucleotide
gaagacucccacagcaaug

SEQ ID NO: 2434224 - RNA, 19 nt, Artificial Sequence
  Description of Artificial Sequence: Synthetic oligonucleotide
auagaaaggcacugggguu

SEQ ID NO: 2434225 - RNA, 19 nt, Artificial Sequence
  Description of Artificial Sequence: Synthetic oligonucleotide
augagcaauaagcccacaa

SEQ ID NO: 2434226 - RNA, 19 nt, Artificial Sequence
  Description of Artificial Sequence: Synthetic oligonucleotide
cuucauccgaauguuugag

SEQ ID NO: 2434227 - RNA, 19 nt, Artificial Sequence
  Description of Artificial Sequence: Synthetic oligonucleotide
uuguaaguacggcauugua

SEQ ID NO: 2434228 - RNA, 19 nt, Artificial Sequence
  Description of Artificial Sequence: Synthetic oligonucleotide
uccgaauguuugaggaacu

SEQ ID NO: 2434229 - RNA, 19 nt, Artificial Sequence
  Description of Artificial Sequence: Synthetic oligonucleotide
gccaaugagcaauaagccc

SEQ ID NO: 2434230 - RNA, 19 nt, Artificial Sequence
  Description of Artificial Sequence: Synthetic oligonucleotide
caaugaugugaauacugga

SEQ ID NO: 2434231 - RNA, 19 nt, Artificial Sequence
  Description of Artificial Sequence: Synthetic oligonucleotide
aauucaugccggguacugu

SEQ ID NO: 2434232 - RNA, 19 nt, Artificial Sequence
  Description of Artificial Sequence: Synthetic oligonucleotide
gaagucucauagaaaggca

SEQ ID NO: 2434233 - RNA, 19 nt, Artificial Sequence
  Description of Artificial Sequence: Synthetic oligonucleotide
uucaugccggguacuguug

SEQ ID NO: 2434234 - RNA, 19 nt, Artificial Sequence
  Description of Artificial Sequence: Synthetic oligonucleotide
ggggauccagaacucaagg

SEQ ID NO: 2434235 - RNA, 19 nt, Artificial Sequence
  Description of Artificial Sequence: Synthetic oligonucleotide
accaggacgcguugaugac

SEQ ID NO: 2434236 - RNA, 19 nt, Artificial Sequence
  Description of Artificial Sequence: Synthetic oligonucleotide
aucggggacugccuuguag

SEQ ID NO: 2434237 - RNA, 19 nt, Artificial Sequence
  Description of Artificial Sequence: Synthetic oligonucleotide
agcgcauucuuggaacagg

SEQ ID NO: 2434238 - RNA, 19 nt, Artificial Sequence
  Description of Artificial Sequence: Synthetic oligonucleotide
uugaggaacuucuccccac

SEQ ID NO: 2434239 - RNA, 19 nt, Artificial Sequence
  Description of Artificial Sequence: Synthetic oligonucleotide
aauggccccaaggacuuga

SEQ ID NO: 2434240 - RNA, 19 nt, Artificial Sequence
  Description of Artificial Sequence: Synthetic oligonucleotide
aguacggcauuguaagguu

SEQ ID NO: 2434241 - RNA, 19 nt, Artificial Sequence
  Description of Artificial Sequence: Synthetic oligonucleotide
cacgccaaugagcaauaag

SEQ ID NO: 2434242 - RNA, 19 nt, Artificial Sequence
  Description of Artificial Sequence: Synthetic oligonucleotide
auucaugccggguacuguu

SEQ ID NO: 2434243 - RNA, 19 nt, Artificial Sequence
  Description of Artificial Sequence: Synthetic oligonucleotide
cuugcacauugcaccacag

SEQ ID NO: 2434244 - RNA, 19 nt, Artificial Sequence
  Description of Artificial Sequence: Synthetic oligonucleotide
aacaggcaaauccgccgca

SEQ ID NO: 2434245 - RNA, 19 nt, Artificial Sequence
  Description of Artificial Sequence: Synthetic oligonucleotide
agaaucucugugaagcuaa

SEQ ID NO: 2434246 - RNA, 19 nt, Artificial Sequence
  Description of Artificial Sequence: Synthetic oligonucleotide
uuucagggcuucauccgaa

SEQ ID NO: 2434247 - RNA, 19 nt, Artificial Sequence
  Description of Artificial Sequence: Synthetic oligonucleotide
augacuccuccaaugaugu

SEQ ID NO: 2434248 - RNA, 19 nt, Artificial Sequence
  Description of Artificial Sequence: Synthetic oligonucleotide
uggagaccagccuaggcuu

SEQ ID NO: 2434249 - RNA, 19 nt, Artificial Sequence
  Description of Artificial Sequence: Synthetic oligonucleotide
aagcccacaagcauauaaa

SEQ ID NO: 2434250 - RNA, 19 nt, Artificial Sequence
  Description of Artificial Sequence: Synthetic oligonucleotide
auaagaagucucauagaaa

SEQ ID NO: 2434251 - RNA, 19 nt, Artificial Sequence
  Description of Artificial Sequence: Synthetic oligonucleotide
cucuccaauucaugccggg

SEQ ID NO: 2434252 - RNA, 19 nt, Artificial Sequence
  Description of Artificial Sequence: Synthetic oligonucleotide
caauaagcccacaagcaua

SEQ ID NO: 2434253 - RNA, 19 nt, Artificial Sequence
  Description of Artificial Sequence: Synthetic oligonucleotide
ugccagccaaacaccaaga

SEQ ID NO: 2434254 - RNA, 19 nt, Artificial Sequence
  Description of Artificial Sequence: Synthetic oligonucleotide
acuugaggggaggguaucg

SEQ ID NO: 2434255 - RNA, 19 nt, Artificial Sequence
  Description of Artificial Sequence: Synthetic oligonucleotide
cuugaggggaggguaucgg

SEQ ID NO: 2434256 - RNA, 19 nt, Artificial Sequence
  Description of Artificial Sequence: Synthetic oligonucleotide
acacaucuggcaugcagaa

SEQ ID NO: 2434257 - RNA, 19 nt, Artificial Sequence
  Description of Artificial Sequence: Synthetic oligonucleotide
caccaggacgcguugauga

SEQ ID NO: 2434258 - RNA, 19 nt, Artificial Sequence
  Description of Artificial Sequence: Synthetic oligonucleotide
gcauauaaaccacguugag

SEQ ID NO: 2434259 - RNA, 19 nt, Artificial Sequence
  Description of Artificial Sequence: Synthetic oligonucleotide
gguuccggaaucucauugc

SEQ ID NO: 2434260 - RNA, 19 nt, Artificial Sequence
  Description of Artificial Sequence: Synthetic oligonucleotide
gcaagagauugcaaacugg

SEQ ID NO: 2434261 - RNA, 19 nt, Artificial Sequence
  Description of Artificial Sequence: Synthetic oligonucleotide
ccaaggaugaucauguaaa

SEQ ID NO: 2434262 - RNA, 19 nt, Artificial Sequence
  Description of Artificial Sequence: Synthetic oligonucleotide
aaguaucaucuuguaagua

SEQ ID NO: 2434263 - RNA, 19 nt, Artificial Sequence
  Description of Artificial Sequence: Synthetic oligonucleotide
acagcgcauucuuggaaca

SEQ ID NO: 2434264 - RNA, 19 nt, Artificial Sequence
  Description of Artificial Sequence: Synthetic oligonucleotide
aggggaggguaucggggac

SEQ ID NO: 2434265 - RNA, 19 nt, Artificial Sequence
  Description of Artificial Sequence: Synthetic oligonucleotide
aagcuaaagaagaggccaa

SEQ ID NO: 2434266 - RNA, 19 nt, Artificial Sequence
  Description of Artificial Sequence: Synthetic oligonucleotide
ggagaaggaagacucccac

SEQ ID NO: 2434267 - RNA, 19 nt, Artificial Sequence
  Description of Artificial Sequence: Synthetic oligonucleotide
cauugccagccaaacacca

SEQ ID NO: 2434268 - RNA, 19 nt, Artificial Sequence
  Description of Artificial Sequence: Synthetic oligonucleotide
gcauucuuggaacaggcaa

SEQ ID NO: 2434269 - RNA, 19 nt, Artificial Sequence
  Description of Artificial Sequence: Synthetic oligonucleotide
ggacgcguugaugacaucc

SEQ ID NO: 2434270 - RNA, 19 nt, Artificial Sequence
  Description of Artificial Sequence: Synthetic oligonucleotide
ggcaaauccgccgcaaacc

SEQ ID NO: 2434271 - RNA, 19 nt, Artificial Sequence
  Description of Artificial Sequence: Synthetic oligonucleotide
gcuacauagcaaguuggag

SEQ ID NO: 2434272 - RNA, 19 nt, Artificial Sequence
  Description of Artificial Sequence: Synthetic oligonucleotide
ugccggguacuguugcuca

SEQ ID NO: 2434273 - RNA, 19 nt, Artificial Sequence
  Description of Artificial Sequence: Synthetic oligonucleotide
gcuuguuucuguugauagc

SEQ ID NO: 2434274 - RNA, 19 nt, Artificial Sequence
  Description of Artificial Sequence: Synthetic oligonucleotide
aaccacguugagagcgcac

SEQ ID NO: 2434275 - RNA, 19 nt, Artificial Sequence
  Description of Artificial Sequence: Synthetic oligonucleotide
caaguuggagaccagccua

SEQ ID NO: 2434276 - RNA, 19 nt, Artificial Sequence
  Description of Artificial Sequence: Synthetic oligonucleotide
uccccacacaucuggcaug

SEQ ID NO: 2434277 - RNA, 19 nt, Artificial Sequence
  Description of Artificial Sequence: Synthetic oligonucleotide
ugacccaccaggacgcguu

SEQ ID NO: 2434278 - RNA, 19 nt, Artificial Sequence
  Description of Artificial Sequence: Synthetic oligonucleotide
cuguugcucaugacccacc

SEQ ID NO: 2434279 - RNA, 19 nt, Artificial Sequence
  Description of Artificial Sequence: Synthetic oligonucleotide
caaggacuugaggggaggg

SEQ ID NO: 2434280 - RNA, 19 nt, Artificial Sequence
  Description of Artificial Sequence: Synthetic oligonucleotide
ugguggugguuaacagccc

SEQ ID NO: 2434281 - RNA, 19 nt, Artificial Sequence
  Description of Artificial Sequence: Synthetic oligonucleotide
accacguugagagcgcaca

SEQ ID NO: 2434282 - RNA, 19 nt, Artificial Sequence
  Description of Artificial Sequence: Synthetic oligonucleotide
caccaccuaggauuuucag

SEQ ID NO: 2434283 - RNA, 19 nt, Artificial Sequence
  Description of Artificial Sequence: Synthetic oligonucleotide
agccuaggcuucaaagauc

SEQ ID NO: 2434284 - RNA, 19 nt, Artificial Sequence
  Description of Artificial Sequence: Synthetic oligonucleotide
gcgcacagcgcauucuugg

SEQ ID NO: 2434285 - RNA, 19 nt, Artificial Sequence
  Description of Artificial Sequence: Synthetic oligonucleotide
caccuaggauuuucagggc

SEQ ID NO: 2434286 - RNA, 19 nt, Artificial Sequence
  Description of Artificial Sequence: Synthetic oligonucleotide
ccuaucugaaagauaagaa

SEQ ID NO: 2434287 - RNA, 19 nt, Artificial Sequence
  Description of Artificial Sequence: Synthetic oligonucleotide
aguuggagaccagccuagg

SEQ ID NO: 2434288 - RNA, 19 nt, Artificial Sequence
  Description of Artificial Sequence: Synthetic oligonucleotide
agcccagccacugcaauga

SEQ ID NO: 2434289 - RNA, 19 nt, Artificial Sequence
  Description of Artificial Sequence: Synthetic oligonucleotide
caaggaugaucauguaaaa

SEQ ID NO: 2434290 - RNA, 19 nt, Artificial Sequence
  Description of Artificial Sequence: Synthetic oligonucleotide
aaaccacguugagagcgca

SEQ ID NO: 2434291 - RNA, 19 nt, Artificial Sequence
  Description of Artificial Sequence: Synthetic oligonucleotide
guuucuguugauagccaga

SEQ ID NO: 2434292 - RNA, 19 nt, Artificial Sequence
  Description of Artificial Sequence: Synthetic oligonucleotide
gcaugcagaacuucugguc

SEQ ID NO: 2434293 - RNA, 19 nt, Artificial Sequence
  Description of Artificial Sequence: Synthetic oligonucleotide
cacguugagagcgcacagc

SEQ ID NO: 2434294 - RNA, 19 nt, Artificial Sequence
  Description of Artificial Sequence: Synthetic oligonucleotide
aaugagcaauaagcccaca

SEQ ID NO: 2434295 - RNA, 19 nt, Artificial Sequence
  Description of Artificial Sequence: Synthetic oligonucleotide
cuaggcuucaaagauccua

SEQ ID NO: 2434296 - RNA, 19 nt, Artificial Sequence
  Description of Artificial Sequence: Synthetic oligonucleotide
aucuuguaaguacggcauu

SEQ ID NO: 2434297 - RNA, 19 nt, Artificial Sequence
  Description of Artificial Sequence: Synthetic oligonucleotide
augccggguacuguugcuc

SEQ ID NO: 2434298 - RNA, 19 nt, Artificial Sequence
  Description of Artificial Sequence: Synthetic oligonucleotide
agcacuugguggugguuaa

SEQ ID NO: 2434299 - RNA, 19 nt, Artificial Sequence
  Description of Artificial Sequence: Synthetic oligonucleotide
uugagagcgcacagcgcau

SEQ ID NO: 2434300 - RNA, 19 nt, Artificial Sequence
  Description of Artificial Sequence: Synthetic oligonucleotide
cgccaaugagcaauaagcc

SEQ ID NO: 2434301 - RNA, 19 nt, Artificial Sequence
  Description of Artificial Sequence: Synthetic oligonucleotide
gcccacaagcauauaaacc

SEQ ID NO: 2434302 - RNA, 19 nt, Artificial Sequence
  Description of Artificial Sequence: Synthetic oligonucleotide
agccacgccaaugagcaau

SEQ ID NO: 2434303 - RNA, 19 nt, Artificial Sequence
  Description of Artificial Sequence: Synthetic oligonucleotide
gcaaauccgccgcaaacca

SEQ ID NO: 2434304 - RNA, 19 nt, Artificial Sequence
  Description of Artificial Sequence: Synthetic oligonucleotide
gacgcguugaugacaucca

SEQ ID NO: 2434305 - RNA, 19 nt, Artificial Sequence
  Description of Artificial Sequence: Synthetic oligonucleotide
guacggcauuguaagguug

SEQ ID NO: 2434306 - RNA, 19 nt, Artificial Sequence
  Description of Artificial Sequence: Synthetic oligonucleotide
ccacaagcauauaaaccac

SEQ ID NO: 2434307 - RNA, 19 nt, Artificial Sequence
  Description of Artificial Sequence: Synthetic oligonucleotide
gguaucggggacugccuug

SEQ ID NO: 2434308 - RNA, 19 nt, Artificial Sequence
  Description of Artificial Sequence: Synthetic oligonucleotide
gagcaagagauugcaaacu

SEQ ID NO: 2434309 - RNA, 19 nt, Artificial Sequence
  Description of Artificial Sequence: Synthetic oligonucleotide
ugacuccuccaaugaugug

SEQ ID NO: 2434310 - RNA, 19 nt, Artificial Sequence
  Description of Artificial Sequence: Synthetic oligonucleotide
uucagggcuucauccgaau

SEQ ID NO: 2434311 - RNA, 19 nt, Artificial Sequence
  Description of Artificial Sequence: Synthetic oligonucleotide
aggagaaggaagacuccca

SEQ ID NO: 2434312 - RNA, 19 nt, Artificial Sequence
  Description of Artificial Sequence: Synthetic oligonucleotide
ggucuugcacauugcacca

SEQ ID NO: 2434313 - RNA, 19 nt, Artificial Sequence
  Description of Artificial Sequence: Synthetic oligonucleotide
augcagaacuucuggucuu

SEQ ID NO: 2434314 - RNA, 19 nt, Artificial Sequence
  Description of Artificial Sequence: Synthetic oligonucleotide
cauugcaccacaggaagua

SEQ ID NO: 2434315 - RNA, 19 nt, Artificial Sequence
  Description of Artificial Sequence: Synthetic oligonucleotide
gagagcgcacagcgcauuc

SEQ ID NO: 2434316 - RNA, 19 nt, Artificial Sequence
  Description of Artificial Sequence: Synthetic oligonucleotide
cuccaauucaugccgggua

SEQ ID NO: 2434317 - RNA, 19 nt, Artificial Sequence
  Description of Artificial Sequence: Synthetic oligonucleotide
caccaagaaucucugugaa

SEQ ID NO: 2434318 - RNA, 19 nt, Artificial Sequence
  Description of Artificial Sequence: Synthetic oligonucleotide
cauccgaauguuugaggaa

SEQ ID NO: 2434319 - RNA, 19 nt, Artificial Sequence
  Description of Artificial Sequence: Synthetic oligonucleotide
aaccaucuccccaguucug

SEQ ID NO: 2434320 - RNA, 19 nt, Artificial Sequence
  Description of Artificial Sequence: Synthetic oligonucleotide
gcauuguaagguugaacaa

SEQ ID NO: 2434321 - RNA, 19 nt, Artificial Sequence
  Description of Artificial Sequence: Synthetic oligonucleotide
gccaaggaugaucauguaa

SEQ ID NO: 2434322 - RNA, 19 nt, Artificial Sequence
  Description of Artificial Sequence: Synthetic oligonucleotide
acauugcaccacaggaagu

SEQ ID NO: 2434323 - RNA, 19 nt, Artificial Sequence
  Description of Artificial Sequence: Synthetic oligonucleotide
ccgcaaaccaucuccccag

SEQ ID NO: 2434324 - RNA, 19 nt, Artificial Sequence
  Description of Artificial Sequence: Synthetic oligonucleotide
aggcagccacgccaaugag

SEQ ID NO: 2434325 - RNA, 19 nt, Artificial Sequence
  Description of Artificial Sequence: Synthetic oligonucleotide
gccuuguaggacuccaaca

SEQ ID NO: 2434326 - RNA, 19 nt, Artificial Sequence
  Description of Artificial Sequence: Synthetic oligonucleotide
gcuaaagaagaggccaaca

SEQ ID NO: 2434327 - RNA, 19 nt, Artificial Sequence
  Description of Artificial Sequence: Synthetic oligonucleotide
aaauggccccaaggacuug

SEQ ID NO: 2434328 - RNA, 19 nt, Artificial Sequence
  Description of Artificial Sequence: Synthetic oligonucleotide
agggcuucauccgaauguu

SEQ ID NO: 2434329 - RNA, 19 nt, Artificial Sequence
  Description of Artificial Sequence: Synthetic oligonucleotide
acgcguugaugacauccau

SEQ ID NO: 2434330 - RNA, 19 nt, Artificial Sequence
  Description of Artificial Sequence: Synthetic oligonucleotide
agauccuaucugaaagaua

SEQ ID NO: 2434331 - RNA, 19 nt, Artificial Sequence
  Description of Artificial Sequence: Synthetic oligonucleotide
ccaaauggccccaaggacu

SEQ ID NO: 2434332 - RNA, 19 nt, Artificial Sequence
  Description of Artificial Sequence: Synthetic oligonucleotide
cagcgcauucuuggaacag

SEQ ID NO: 2434333 - RNA, 19 nt, Artificial Sequence
  Description of Artificial Sequence: Synthetic oligonucleotide
gggacugccuuguaggacu

SEQ ID NO: 2434334 - RNA, 19 nt, Artificial Sequence
  Description of Artificial Sequence: Synthetic oligonucleotide
cagcagucaaaacuucucu

SEQ ID NO: 2434335 - RNA, 19 nt, Artificial Sequence
  Description of Artificial Sequence: Synthetic oligonucleotide
gacuugaggggaggguauc

SEQ ID NO: 2434336 - RNA, 19 nt, Artificial Sequence
  Description of Artificial Sequence: Synthetic oligonucleotide
caggaaguaucaucuugua

SEQ ID NO: 2434337 - RNA, 19 nt, Artificial Sequence
  Description of Artificial Sequence: Synthetic oligonucleotide
gacccaccaggacgcguug

SEQ ID NO: 2434338 - RNA, 19 nt, Artificial Sequence
  Description of Artificial Sequence: Synthetic oligonucleotide
agagcgcacagcgcauucu

SEQ ID NO: 2434339 - RNA, 19 nt, Artificial Sequence
  Description of Artificial Sequence: Synthetic oligonucleotide
cacaucuggcaugcagaac

SEQ ID NO: 2434340 - RNA, 19 nt, Artificial Sequence
  Description of Artificial Sequence: Synthetic oligonucleotide
uccagaacucaaggucauc

SEQ ID NO: 2434341 - RNA, 19 nt, Artificial Sequence
  Description of Artificial Sequence: Synthetic oligonucleotide
gcgcauucuuggaacaggc

SEQ ID NO: 2434342 - RNA, 19 nt, Artificial Sequence
  Description of Artificial Sequence: Synthetic oligonucleotide
gccgcaaaccaucucccca

SEQ ID NO: 2434343 - RNA, 19 nt, Artificial Sequence
  Description of Artificial Sequence: Synthetic oligonucleotide
gaaucucugugaagcuaaa

SEQ ID NO: 2434344 - RNA, 19 nt, Artificial Sequence
  Description of Artificial Sequence: Synthetic oligonucleotide
acaggcaaauccgccgcaa

SEQ ID NO: 2434345 - RNA, 19 nt, Artificial Sequence
  Description of Artificial Sequence: Synthetic oligonucleotide
caaauggccccaaggacuu

SEQ ID NO: 2434346 - RNA, 19 nt, Artificial Sequence
  Description of Artificial Sequence: Synthetic oligonucleotide
ggcuacauagcaaguugga

SEQ ID NO: 2434347 - RNA, 19 nt, Artificial Sequence
  Description of Artificial Sequence: Synthetic oligonucleotide
cuuguaaguacggcauugu

SEQ ID NO: 2434348 - RNA, 19 nt, Artificial Sequence
  Description of Artificial Sequence: Synthetic oligonucleotide
aggacgcguugaugacauc

SEQ ID NO: 2434349 - RNA, 19 nt, Artificial Sequence
  Description of Artificial Sequence: Synthetic oligonucleotide
caugacccaccaggacgcg

SEQ ID NO: 2434350 - RNA, 19 nt, Artificial Sequence
  Description of Artificial Sequence: Synthetic oligonucleotide
agcgcacagcgcauucuug

SEQ ID NO: 2434351 - RNA, 19 nt, Artificial Sequence
  Description of Artificial Sequence: Synthetic oligonucleotide
gcaaguuggagaccagccu

SEQ ID NO: 2434352 - RNA, 19 nt, Artificial Sequence
  Description of Artificial Sequence: Synthetic oligonucleotide
caagcauauaaaccacguu

SEQ ID NO: 2434353 - RNA, 19 nt, Artificial Sequence
  Description of Artificial Sequence: Synthetic oligonucleotide
aggguaucggggacugccu

SEQ ID NO: 2434354 - RNA, 19 nt, Artificial Sequence
  Description of Artificial Sequence: Synthetic oligonucleotide
ggacccaaauggccccaag

SEQ ID NO: 2434355 - RNA, 19 nt, Artificial Sequence
  Description of Artificial Sequence: Synthetic oligonucleotide
cuuggcuacauagcaaguu

SEQ ID NO: 2434356 - RNA, 19 nt, Artificial Sequence
  Description of Artificial Sequence: Synthetic oligonucleotide
cccaaggacuugaggggag

SEQ ID NO: 2434357 - RNA, 19 nt, Artificial Sequence
  Description of Artificial Sequence: Synthetic oligonucleotide
caggacgcguugaugacau

SEQ ID NO: 2434358 - RNA, 19 nt, Artificial Sequence
  Description of Artificial Sequence: Synthetic oligonucleotide
ggcaugcagaacuucuggu

SEQ ID NO: 2434359 - RNA, 19 nt, Artificial Sequence
  Description of Artificial Sequence: Synthetic oligonucleotide
agccaaggaugaucaugua

SEQ ID NO: 2434360 - RNA, 19 nt, Artificial Sequence
  Description of Artificial Sequence: Synthetic oligonucleotide
gccagacaagagcaagaga

SEQ ID NO: 2434361 - RNA, 19 nt, Artificial Sequence
  Description of Artificial Sequence: Synthetic oligonucleotide
cagacaagagcaagagauu

SEQ ID NO: 2434362 - RNA, 19 nt, Artificial Sequence
  Description of Artificial Sequence: Synthetic oligonucleotide
cgaauguuugaggaacuuc

SEQ ID NO: 2434363 - RNA, 19 nt, Artificial Sequence
  Description of Artificial Sequence: Synthetic oligonucleotide
ccacguugagagcgcacag

SEQ ID NO: 2434364 - RNA, 19 nt, Artificial Sequence
  Description of Artificial Sequence: Synthetic oligonucleotide
ccggaaucucauugccagc

SEQ ID NO: 2434365 - RNA, 19 nt, Artificial Sequence
  Description of Artificial Sequence: Synthetic oligonucleotide
acggcauuguaagguugaa

SEQ ID NO: 2434366 - RNA, 19 nt, Artificial Sequence
  Description of Artificial Sequence: Synthetic oligonucleotide
gggaggguaucggggacug

SEQ ID NO: 2434367 - RNA, 19 nt, Artificial Sequence
  Description of Artificial Sequence: Synthetic oligonucleotide
guaucggggacugccuugu

SEQ ID NO: 2434368 - RNA, 19 nt, Artificial Sequence
  Description of Artificial Sequence: Synthetic oligonucleotide
cagcacuugguggugguua

SEQ ID NO: 2434369 - RNA, 19 nt, Artificial Sequence
  Description of Artificial Sequence: Synthetic oligonucleotide
caggcaaauccgccgcaaa

SEQ ID NO: 2434370 - RNA, 19 nt, Artificial Sequence
  Description of Artificial Sequence: Synthetic oligonucleotide
gccagccaaacaccaagaa

SEQ ID NO: 2434371 - RNA, 19 nt, Artificial Sequence
  Description of Artificial Sequence: Synthetic oligonucleotide
ccgccgcaaaccaucuccc

SEQ ID NO: 2434372 - RNA, 19 nt, Artificial Sequence
  Description of Artificial Sequence: Synthetic oligonucleotide
gcagaacuucuggucuugc

SEQ ID NO: 2434373 - RNA, 19 nt, Artificial Sequence
  Description of Artificial Sequence: Synthetic oligonucleotide
ccacagcaaugacuccucc

SEQ ID NO: 2434374 - RNA, 19 nt, Artificial Sequence
  Description of Artificial Sequence: Synthetic oligonucleotide
cguugagagcgcacagcgc

SEQ ID NO: 2434375 - RNA, 19 nt, Artificial Sequence
  Description of Artificial Sequence: Synthetic oligonucleotide
gagcgcacagcgcauucuu

SEQ ID NO: 2434376 - RNA, 19 nt, Artificial Sequence
  Description of Artificial Sequence: Synthetic oligonucleotide
cgcguugaugacauccauc

SEQ ID NO: 2434377 - RNA, 19 nt, Artificial Sequence
  Description of Artificial Sequence: Synthetic oligonucleotide
gcacagcgcauucuuggaa

SEQ ID NO: 2434378 - RNA, 19 nt, Artificial Sequence
  Description of Artificial Sequence: Synthetic oligonucleotide
cuccaaugaugugaauacu

SEQ ID NO: 2434379 - RNA, 19 nt, Artificial Sequence
  Description of Artificial Sequence: Synthetic oligonucleotide
caaauccgccgcaaaccau

SEQ ID NO: 2434380 - RNA, 19 nt, Artificial Sequence
  Description of Artificial Sequence: Synthetic oligonucleotide
gccaaacaccaagaaucuc

SEQ ID NO: 2434381 - RNA, 19 nt, Artificial Sequence
  Description of Artificial Sequence: Synthetic oligonucleotide
auaagcccacaagcauaua

SEQ ID NO: 2434382 - RNA, 19 nt, Artificial Sequence
  Description of Artificial Sequence: Synthetic oligonucleotide
caugccggguacuguugcu

SEQ ID NO: 2434383 - RNA, 19 nt, Artificial Sequence
  Description of Artificial Sequence: Synthetic oligonucleotide
caucuggcaugcagaacuu

SEQ ID NO: 2434384 - RNA, 19 nt, Artificial Sequence
  Description of Artificial Sequence: Synthetic oligonucleotide
cagcaaugacuccuccaau

SEQ ID NO: 2434385 - RNA, 19 nt, Artificial Sequence
  Description of Artificial Sequence: Synthetic oligonucleotide
ccggguacuguugcucaug

SEQ ID NO: 2434386 - RNA, 19 nt, Artificial Sequence
  Description of Artificial Sequence: Synthetic oligonucleotide
ggacugccuuguaggacuc

SEQ ID NO: 2434387 - RNA, 19 nt, Artificial Sequence
  Description of Artificial Sequence: Synthetic oligonucleotide
cgccgcaaaccaucucccc

SEQ ID NO: 2434388 - RNA, 19 nt, Artificial Sequence
  Description of Artificial Sequence: Synthetic oligonucleotide
ccuaggauuuucagggcuu

SEQ ID NO: 2434389 - RNA, 19 nt, Artificial Sequence
  Description of Artificial Sequence: Synthetic oligonucleotide
ccaccaggacgcguugaug

SEQ ID NO: 2434390 - RNA, 19 nt, Artificial Sequence
  Description of Artificial Sequence: Synthetic oligonucleotide
cgcauucuuggaacaggca

SEQ ID NO: 2434391 - RNA, 19 nt, Artificial Sequence
  Description of Artificial Sequence: Synthetic oligonucleotide
ggaggguaucggggacugc

SEQ ID NO: 2434392 - RNA, 19 nt, Artificial Sequence
  Description of Artificial Sequence: Synthetic oligonucleotide
ccccaaggacuugagggga

SEQ ID NO: 2434393 - RNA, 19 nt, Artificial Sequence
  Description of Artificial Sequence: Synthetic oligonucleotide
cggguacuguugcucauga

SEQ ID NO: 2434394 - RNA, 19 nt, Artificial Sequence
  Description of Artificial Sequence: Synthetic oligonucleotide
ggguaucggggacugccuu

SEQ ID NO: 2434395 - RNA, 19 nt, Artificial Sequence
  Description of Artificial Sequence: Synthetic oligonucleotide
ggggacccaaauggcccca

SEQ ID NO: 2434396 - RNA, 19 nt, Artificial Sequence
  Description of Artificial Sequence: Synthetic oligonucleotide
cagccacgccaaugagcaa

SEQ ID NO: 2434397 - RNA, 19 nt, Artificial Sequence
  Description of Artificial Sequence: Synthetic oligonucleotide
ggccaacaccaccuaggau

SEQ ID NO: 2434398 - RNA, 19 nt, Artificial Sequence
  Description of Artificial Sequence: Synthetic oligonucleotide
gccacgccaaugagcaaua

SEQ ID NO: 2434399 - RNA, 19 nt, Artificial Sequence
  Description of Artificial Sequence: Synthetic oligonucleotide
ggggaggguaucggggacu

SEQ ID NO: 2434400 - RNA, 19 nt, Artificial Sequence
  Description of Artificial Sequence: Synthetic oligonucleotide
cggggacugccuuguagga

SEQ ID NO: 2434401 - RNA, 19 nt, Artificial Sequence
  Description of Artificial Sequence: Synthetic oligonucleotide
ccaauucaugccggguacu

SEQ ID NO: 2434402 - RNA, 19 nt, Artificial Sequence
  Description of Artificial Sequence: Synthetic oligonucleotide
gggacccaaauggccccaa

SEQ ID NO: 2434403 - RNA, 19 nt, Artificial Sequence
  Description of Artificial Sequence: Synthetic oligonucleotide
ccuaggcuucaaagauccu

SEQ ID NO: 2434404 - RNA, 19 nt, Artificial Sequence
  Description of Artificial Sequence: Synthetic oligonucleotide
cccaccaggacgcguugau

SEQ ID NO: 2434405 - RNA, 19 nt, Artificial Sequence
  Description of Artificial Sequence: Synthetic oligonucleotide
ccgaauguuugaggaacuu

SEQ ID NO: 2434406 - RNA, 19 nt, Artificial Sequence
  Description of Artificial Sequence: Synthetic oligonucleotide
ccacgccaaugagcaauaa

SEQ ID NO: 2434407 - RNA, 19 nt, Artificial Sequence
  Description of Artificial Sequence: Synthetic oligonucleotide
caacaccaccuaggauuuu

SEQ ID NO: 2434408 - RNA, 19 nt, Artificial Sequence
  Description of Artificial Sequence: Synthetic oligonucleotide
cgcaaaccaucuccccagu

SEQ ID NO: 2434409 - RNA, 19 nt, Artificial Sequence
  Description of Artificial Sequence: Synthetic oligonucleotide
ccccacgagcccagccacu

SEQ ID NO: 2434410 - RNA, 19 nt, Artificial Sequence
  Description of Artificial Sequence: Synthetic oligonucleotide
ucuaacgacaucccgaucc

SEQ ID NO: 2434411 - RNA, 19 nt, Artificial Sequence
  Description of Artificial Sequence: Synthetic oligonucleotide
agaaguugcauaguaaccc

SEQ ID NO: 2434412 - RNA, 19 nt, Artificial Sequence
  Description of Artificial Sequence: Synthetic oligonucleotide
ugcauaguaacccuuaggu

SEQ ID NO: 2434413 - RNA, 19 nt, Artificial Sequence
  Description of Artificial Sequence: Synthetic oligonucleotide
cauaguaacccuuagguuc

SEQ ID NO: 2434414 - RNA, 19 nt, Artificial Sequence
  Description of Artificial Sequence: Synthetic oligonucleotide
aaugcuugccaccucuaac

SEQ ID NO: 2434415 - RNA, 19 nt, Artificial Sequence
  Description of Artificial Sequence: Synthetic oligonucleotide
guaauugguauccagggcc

SEQ ID NO: 2434416 - RNA, 19 nt, Artificial Sequence
  Description of Artificial Sequence: Synthetic oligonucleotide
uucuuuaccacagugauuc

SEQ ID NO: 2434417 - RNA, 19 nt, Artificial Sequence
  Description of Artificial Sequence: Synthetic oligonucleotide
uuuaccacagugauucuca

SEQ ID NO: 2434418 - RNA, 19 nt, Artificial Sequence
  Description of Artificial Sequence: Synthetic oligonucleotide
ucucagagcuagcagaaag

SEQ ID NO: 2434419 - RNA, 19 nt, Artificial Sequence
  Description of Artificial Sequence: Synthetic oligonucleotide
agcacggagaagccgaugc

SEQ ID NO: 2434420 - RNA, 19 nt, Artificial Sequence
  Description of Artificial Sequence: Synthetic oligonucleotide
uagcagaaagaaauguucc

SEQ ID NO: 2434421 - RNA, 19 nt, Artificial Sequence
  Description of Artificial Sequence: Synthetic oligonucleotide
gaugccuccggguucaggg

SEQ ID NO: 2434422 - RNA, 19 nt, Artificial Sequence
  Description of Artificial Sequence: Synthetic oligonucleotide
cuaacgagucccauuaccc

SEQ ID NO: 2434423 - RNA, 19 nt, Artificial Sequence
  Description of Artificial Sequence: Synthetic oligonucleotide
cuagcagaaagaaauguuc

SEQ ID NO: 2434424 - RNA, 19 nt, Artificial Sequence
  Description of Artificial Sequence: Synthetic oligonucleotide
caguaauugguauccaggg

SEQ ID NO: 2434425 - RNA, 19 nt, Artificial Sequence
  Description of Artificial Sequence: Synthetic oligonucleotide
ucaagugccuuccagucug

SEQ ID NO: 2434426 - RNA, 19 nt, Artificial Sequence
  Description of Artificial Sequence: Synthetic oligonucleotide
augcuugccaccucuaacg

SEQ ID NO: 2434427 - RNA, 19 nt, Artificial Sequence
  Description of Artificial Sequence: Synthetic oligonucleotide
cuuugguuucccaaggagc

SEQ ID NO: 2434428 - RNA, 19 nt, Artificial Sequence
  Description of Artificial Sequence: Synthetic oligonucleotide
acuugcacgacuucaccac

SEQ ID NO: 2434429 - RNA, 19 nt, Artificial Sequence
  Description of Artificial Sequence: Synthetic oligonucleotide
agagcuagcagaaagaaau

SEQ ID NO: 2434430 - RNA, 19 nt, Artificial Sequence
  Description of Artificial Sequence: Synthetic oligonucleotide
aucccgauccccuagagca

SEQ ID NO: 2434431 - RNA, 19 nt, Artificial Sequence
  Description of Artificial Sequence: Synthetic oligonucleotide
gauucucagagcuagcaga

SEQ ID NO: 2434432 - RNA, 19 nt, Artificial Sequence
  Description of Artificial Sequence: Synthetic oligonucleotide
uuaccccacacccuguggg

SEQ ID NO: 2434433 - RNA, 19 nt, Artificial Sequence
  Description of Artificial Sequence: Synthetic oligonucleotide
ucacuuugguuucccaagg

SEQ ID NO: 2434434 - RNA, 19 nt, Artificial Sequence
  Description of Artificial Sequence: Synthetic oligonucleotide
uugcauaguaacccuuagg

SEQ ID NO: 2434435 - RNA, 19 nt, Artificial Sequence
  Description of Artificial Sequence: Synthetic oligonucleotide
uccugcggcacacagcacg

SEQ ID NO: 2434436 - RNA, 19 nt, Artificial Sequence
  Description of Artificial Sequence: Synthetic oligonucleotide
aacccuuagguucguggac

SEQ ID NO: 2434437 - RNA, 19 nt, Artificial Sequence
  Description of Artificial Sequence: Synthetic oligonucleotide
uauuguacagucccagcac

SEQ ID NO: 2434438 - RNA, 19 nt, Artificial Sequence
  Description of Artificial Sequence: Synthetic oligonucleotide
caggguauuguacaguccc

SEQ ID NO: 2434439 - RNA, 19 nt, Artificial Sequence
  Description of Artificial Sequence: Synthetic oligonucleotide
aacccacacuuucuuuacc

SEQ ID NO: 2434440 - RNA, 19 nt, Artificial Sequence
  Description of Artificial Sequence: Synthetic oligonucleotide
ugcggaagcaguaauuggu

SEQ ID NO: 2434441 - RNA, 19 nt, Artificial Sequence
  Description of Artificial Sequence: Synthetic oligonucleotide
uaauugguauccagggccc

SEQ ID NO: 2434442 - RNA, 19 nt, Artificial Sequence
  Description of Artificial Sequence: Synthetic oligonucleotide
guaacccuuagguucgugg

SEQ ID NO: 2434443 - RNA, 19 nt, Artificial Sequence
  Description of Artificial Sequence: Synthetic oligonucleotide
agaaagaaauguuccagaa

SEQ ID NO: 2434444 - RNA, 19 nt, Artificial Sequence
  Description of Artificial Sequence: Synthetic oligonucleotide
uauggguugugucugcacu

SEQ ID NO: 2434445 - RNA, 19 nt, Artificial Sequence
  Description of Artificial Sequence: Synthetic oligonucleotide
aacgagucccauuacccca

SEQ ID NO: 2434446 - RNA, 19 nt, Artificial Sequence
  Description of Artificial Sequence: Synthetic oligonucleotide
ucaagaguuugccuucccc

SEQ ID NO: 2434447 - RNA, 19 nt, Artificial Sequence
  Description of Artificial Sequence: Synthetic oligonucleotide
uuguacagucccagcaccg

SEQ ID NO: 2434448 - RNA, 19 nt, Artificial Sequence
  Description of Artificial Sequence: Synthetic oligonucleotide
auaguaacccuuagguucg

SEQ ID NO: 2434449 - RNA, 19 nt, Artificial Sequence
  Description of Artificial Sequence: Synthetic oligonucleotide
auguucucaagaguuugcc

SEQ ID NO: 2434450 - RNA, 19 nt, Artificial Sequence
  Description of Artificial Sequence: Synthetic oligonucleotide
cagaaguugcauaguaacc

SEQ ID NO: 2434451 - RNA, 19 nt, Artificial Sequence
  Description of Artificial Sequence: Synthetic oligonucleotide
uuugccuuccccuaaccaa

SEQ ID NO: 2434452 - RNA, 19 nt, Artificial Sequence
  Description of Artificial Sequence: Synthetic oligonucleotide
acuugaaugggcaaagcug

SEQ ID NO: 2434453 - RNA, 19 nt, Artificial Sequence
  Description of Artificial Sequence: Synthetic oligonucleotide
cuaaccaacccacacuuuc

SEQ ID NO: 2434454 - RNA, 19 nt, Artificial Sequence
  Description of Artificial Sequence: Synthetic oligonucleotide
gaaggaagccucccucucg

SEQ ID NO: 2434455 - RNA, 19 nt, Artificial Sequence
  Description of Artificial Sequence: Synthetic oligonucleotide
uucaggguauuguacaguc

SEQ ID NO: 2434456 - RNA, 19 nt, Artificial Sequence
  Description of Artificial Sequence: Synthetic oligonucleotide
uaggguagcccuaacgagu

SEQ ID NO: 2434457 - RNA, 19 nt, Artificial Sequence
  Description of Artificial Sequence: Synthetic oligonucleotide
uccccuagagcagaugugg

SEQ ID NO: 2434458 - RNA, 19 nt, Artificial Sequence
  Description of Artificial Sequence: Synthetic oligonucleotide
uaacgagucccauuacccc

SEQ ID NO: 2434459 - RNA, 19 nt, Artificial Sequence
  Description of Artificial Sequence: Synthetic oligonucleotide
uugcggaagcaguaauugg

SEQ ID NO: 2434460 - RNA, 19 nt, Artificial Sequence
  Description of Artificial Sequence: Synthetic oligonucleotide
ccaacauaguacaggaugg

SEQ ID NO: 2434461 - RNA, 19 nt, Artificial Sequence
  Description of Artificial Sequence: Synthetic oligonucleotide
uccaaguugcggaagcagu

SEQ ID NO: 2434462 - RNA, 19 nt, Artificial Sequence
  Description of Artificial Sequence: Synthetic oligonucleotide
aguuugccuuccccuaacc

SEQ ID NO: 2434463 - RNA, 19 nt, Artificial Sequence
  Description of Artificial Sequence: Synthetic oligonucleotide
ucaccaucccuucucuacc

SEQ ID NO: 2434464 - RNA, 19 nt, Artificial Sequence
  Description of Artificial Sequence: Synthetic oligonucleotide
uaacccuuagguucgugga

SEQ ID NO: 2434465 - RNA, 19 nt, Artificial Sequence
  Description of Artificial Sequence: Synthetic oligonucleotide
cuggcccucaccuagccgc

SEQ ID NO: 2434466 - RNA, 19 nt, Artificial Sequence
  Description of Artificial Sequence: Synthetic oligonucleotide
cuagacugaggucugucac

SEQ ID NO: 2434467 - RNA, 19 nt, Artificial Sequence
  Description of Artificial Sequence: Synthetic oligonucleotide
uaaccaacccacacuuucu

SEQ ID NO: 2434468 - RNA, 19 nt, Artificial Sequence
  Description of Artificial Sequence: Synthetic oligonucleotide
accucagaucucaagugcc

SEQ ID NO: 2434469 - RNA, 19 nt, Artificial Sequence
  Description of Artificial Sequence: Synthetic oligonucleotide
uguucucaagaguuugccu

SEQ ID NO: 2434470 - RNA, 19 nt, Artificial Sequence
  Description of Artificial Sequence: Synthetic oligonucleotide
acccuuagguucguggacc

SEQ ID NO: 2434471 - RNA, 19 nt, Artificial Sequence
  Description of Artificial Sequence: Synthetic oligonucleotide
guugcggaagcaguaauug

SEQ ID NO: 2434472 - RNA, 19 nt, Artificial Sequence
  Description of Artificial Sequence: Synthetic oligonucleotide
gucugcaccacagaaauuc

SEQ ID NO: 2434473 - RNA, 19 nt, Artificial Sequence
  Description of Artificial Sequence: Synthetic oligonucleotide
cucaccaucccuucucuac

SEQ ID NO: 2434474 - RNA, 19 nt, Artificial Sequence
  Description of Artificial Sequence: Synthetic oligonucleotide
aucucaagugccuuccagu

SEQ ID NO: 2434475 - RNA, 19 nt, Artificial Sequence
  Description of Artificial Sequence: Synthetic oligonucleotide
aaaugcuugccaccucuaa

SEQ ID NO: 2434476 - RNA, 19 nt, Artificial Sequence
  Description of Artificial Sequence: Synthetic oligonucleotide
ucaggguauuguacagucc

SEQ ID NO: 2434477 - RNA, 19 nt, Artificial Sequence
  Description of Artificial Sequence: Synthetic oligonucleotide
uugccuuccccuaaccaac

SEQ ID NO: 2434478 - RNA, 19 nt, Artificial Sequence
  Description of Artificial Sequence: Synthetic oligonucleotide
gaaugggcaaagcugaccu

SEQ ID NO: 2434479 - RNA, 19 nt, Artificial Sequence
  Description of Artificial Sequence: Synthetic oligonucleotide
acagcaguucuccuccaag

SEQ ID NO: 2434480 - RNA, 19 nt, Artificial Sequence
  Description of Artificial Sequence: Synthetic oligonucleotide
uucguggacccauuuccag

SEQ ID NO: 2434481 - RNA, 19 nt, Artificial Sequence
  Description of Artificial Sequence: Synthetic oligonucleotide
aagaguuugccuuccccua

SEQ ID NO: 2434482 - RNA, 19 nt, Artificial Sequence
  Description of Artificial Sequence: Synthetic oligonucleotide
ucaccuagccgccacucga

SEQ ID NO: 2434483 - RNA, 19 nt, Artificial Sequence
  Description of Artificial Sequence: Synthetic oligonucleotide
ugucacuuugguuucccaa

SEQ ID NO: 2434484 - RNA, 19 nt, Artificial Sequence
  Description of Artificial Sequence: Synthetic oligonucleotide
aagaaauguuccagaagga

SEQ ID NO: 2434485 - RNA, 19 nt, Artificial Sequence
  Description of Artificial Sequence: Synthetic oligonucleotide
cagugauucucagagcuag

SEQ ID NO: 2434486 - RNA, 19 nt, Artificial Sequence
  Description of Artificial Sequence: Synthetic oligonucleotide
ucggccguuugccaggagc

SEQ ID NO: 2434487 - RNA, 19 nt, Artificial Sequence
  Description of Artificial Sequence: Synthetic oligonucleotide
ucagagcuagcagaaagaa

SEQ ID NO: 2434488 - RNA, 19 nt, Artificial Sequence
  Description of Artificial Sequence: Synthetic oligonucleotide
cuaacgacaucccgauccc

SEQ ID NO: 2434489 - RNA, 19 nt, Artificial Sequence
  Description of Artificial Sequence: Synthetic oligonucleotide
ugaaugggcaaagcugacc

SEQ ID NO: 2434490 - RNA, 19 nt, Artificial Sequence
  Description of Artificial Sequence: Synthetic oligonucleotide
agaaauguuccagaaggaa

SEQ ID NO: 2434491 - RNA, 19 nt, Artificial Sequence
  Description of Artificial Sequence: Synthetic oligonucleotide
ggagguacgggcaagggcc

SEQ ID NO: 2434492 - RNA, 19 nt, Artificial Sequence
  Description of Artificial Sequence: Synthetic oligonucleotide
cugccggaagucaauguag

SEQ ID NO: 2434493 - RNA, 19 nt, Artificial Sequence
  Description of Artificial Sequence: Synthetic oligonucleotide
gcaguaauugguauccagg

SEQ ID NO: 2434494 - RNA, 19 nt, Artificial Sequence
  Description of Artificial Sequence: Synthetic oligonucleotide
ugcggcacacagcacggag

SEQ ID NO: 2434495 - RNA, 19 nt, Artificial Sequence
  Description of Artificial Sequence: Synthetic oligonucleotide
uucucaagaguuugccuuc

SEQ ID NO: 2434496 - RNA, 19 nt, Artificial Sequence
  Description of Artificial Sequence: Synthetic oligonucleotide
uagacugaggucugucacu

SEQ ID NO: 2434497 - RNA, 19 nt, Artificial Sequence
  Description of Artificial Sequence: Synthetic oligonucleotide
uccccuaaccaacccacac

SEQ ID NO: 2434498 - RNA, 19 nt, Artificial Sequence
  Description of Artificial Sequence: Synthetic oligonucleotide
gaccccauguccucccuag

SEQ ID NO: 2434499 - RNA, 19 nt, Artificial Sequence
  Description of Artificial Sequence: Synthetic oligonucleotide
aaguugcggaagcaguaau

SEQ ID NO: 2434500 - RNA, 19 nt, Artificial Sequence
  Description of Artificial Sequence: Synthetic oligonucleotide
agcuagcagaaagaaaugu

SEQ ID NO: 2434501 - RNA, 19 nt, Artificial Sequence
  Description of Artificial Sequence: Synthetic oligonucleotide
ugcacugcggagguacggg

SEQ ID NO: 2434502 - RNA, 19 nt, Artificial Sequence
  Description of Artificial Sequence: Synthetic oligonucleotide
aacgacaucccgauccccu

SEQ ID NO: 2434503 - RNA, 19 nt, Artificial Sequence
  Description of Artificial Sequence: Synthetic oligonucleotide
gagcagaugugguacuuga

SEQ ID NO: 2434504 - RNA, 19 nt, Artificial Sequence
  Description of Artificial Sequence: Synthetic oligonucleotide
ucuggcccucaccuagccg

SEQ ID NO: 2434505 - RNA, 19 nt, Artificial Sequence
  Description of Artificial Sequence: Synthetic oligonucleotide
aucccuucucuaccccacc

SEQ ID NO: 2434506 - RNA, 19 nt, Artificial Sequence
  Description of Artificial Sequence: Synthetic oligonucleotide
ugcuugccaccucuaacga

SEQ ID NO: 2434507 - RNA, 19 nt, Artificial Sequence
  Description of Artificial Sequence: Synthetic oligonucleotide
cuugcacgacuucaccacc

SEQ ID NO: 2434508 - RNA, 19 nt, Artificial Sequence
  Description of Artificial Sequence: Synthetic oligonucleotide
aaccaacccacacuuucuu

SEQ ID NO: 2434509 - RNA, 19 nt, Artificial Sequence
  Description of Artificial Sequence: Synthetic oligonucleotide
ucgucuuggugaccugaag

SEQ ID NO: 2434510 - RNA, 19 nt, Artificial Sequence
  Description of Artificial Sequence: Synthetic oligonucleotide
accuagccgccacucgacc

SEQ ID NO: 2434511 - RNA, 19 nt, Artificial Sequence
  Description of Artificial Sequence: Synthetic oligonucleotide
gaaguugcauaguaacccu

SEQ ID NO: 2434512 - RNA, 19 nt, Artificial Sequence
  Description of Artificial Sequence: Synthetic oligonucleotide
uugguuucccaaggagccg

SEQ ID NO: 2434513 - RNA, 19 nt, Artificial Sequence
  Description of Artificial Sequence: Synthetic oligonucleotide
gucuuggugaccugaagaa

SEQ ID NO: 2434514 - RNA, 19 nt, Artificial Sequence
  Description of Artificial Sequence: Synthetic oligonucleotide
agugguggcagucuuccuu

SEQ ID NO: 2434515 - RNA, 19 nt, Artificial Sequence
  Description of Artificial Sequence: Synthetic oligonucleotide
gauccccuagagcagaugu

SEQ ID NO: 2434516 - RNA, 19 nt, Artificial Sequence
  Description of Artificial Sequence: Synthetic oligonucleotide
cagucuggcccucaccuag

SEQ ID NO: 2434517 - RNA, 19 nt, Artificial Sequence
  Description of Artificial Sequence: Synthetic oligonucleotide
cuagccgccacucgacccc

SEQ ID NO: 2434518 - RNA, 19 nt, Artificial Sequence
  Description of Artificial Sequence: Synthetic oligonucleotide
augggcaaagcugaccuca

SEQ ID NO: 2434519 - RNA, 19 nt, Artificial Sequence
  Description of Artificial Sequence: Synthetic oligonucleotide
gguucaggguauuguacag

SEQ ID NO: 2434520 - RNA, 19 nt, Artificial Sequence
  Description of Artificial Sequence: Synthetic oligonucleotide
ugguuucccaaggagccgc

SEQ ID NO: 2434521 - RNA, 19 nt, Artificial Sequence
  Description of Artificial Sequence: Synthetic oligonucleotide
gccaccucuaacgacaucc

SEQ ID NO: 2434522 - RNA, 19 nt, Artificial Sequence
  Description of Artificial Sequence: Synthetic oligonucleotide
ggggacuucgucuugguga

SEQ ID NO: 2434523 - RNA, 19 nt, Artificial Sequence
  Description of Artificial Sequence: Synthetic oligonucleotide
acccugugggcucaccauc

SEQ ID NO: 2434524 - RNA, 19 nt, Artificial Sequence
  Description of Artificial Sequence: Synthetic oligonucleotide
gguauuguacagucccagc

SEQ ID NO: 2434525 - RNA, 19 nt, Artificial Sequence
  Description of Artificial Sequence: Synthetic oligonucleotide
cucagagcuagcagaaaga

SEQ ID NO: 2434526 - RNA, 19 nt, Artificial Sequence
  Description of Artificial Sequence: Synthetic oligonucleotide
aagccgaugccuccggguu

SEQ ID NO: 2434527 - RNA, 19 nt, Artificial Sequence
  Description of Artificial Sequence: Synthetic oligonucleotide
cacgacuucaccaccaugu

SEQ ID NO: 2434528 - RNA, 19 nt, Artificial Sequence
  Description of Artificial Sequence: Synthetic oligonucleotide
ugguacuugaaugggcaaa

SEQ ID NO: 2434529 - RNA, 19 nt, Artificial Sequence
  Description of Artificial Sequence: Synthetic oligonucleotide
aggguagcccuaacgaguc

SEQ ID NO: 2434530 - RNA, 19 nt, Artificial Sequence
  Description of Artificial Sequence: Synthetic oligonucleotide
uuccucugucgcaggcugg

SEQ ID NO: 2434531 - RNA, 19 nt, Artificial Sequence
  Description of Artificial Sequence: Synthetic oligonucleotide
caccucuaacgacaucccg

SEQ ID NO: 2434532 - RNA, 19 nt, Artificial Sequence
  Description of Artificial Sequence: Synthetic oligonucleotide
uugugucugcacugcggag

SEQ ID NO: 2434533 - RNA, 19 nt, Artificial Sequence
  Description of Artificial Sequence: Synthetic oligonucleotide
ccuaacgagucccauuacc

SEQ ID NO: 2434534 - RNA, 19 nt, Artificial Sequence
  Description of Artificial Sequence: Synthetic oligonucleotide
accucuaacgacaucccga

SEQ ID NO: 2434535 - RNA, 19 nt, Artificial Sequence
  Description of Artificial Sequence: Synthetic oligonucleotide
uaccacagugauucucaga

SEQ ID NO: 2434536 - RNA, 19 nt, Artificial Sequence
  Description of Artificial Sequence: Synthetic oligonucleotide
gguccugcggcacacagca

SEQ ID NO: 2434537 - RNA, 19 nt, Artificial Sequence
  Description of Artificial Sequence: Synthetic oligonucleotide
ugccuauggguugugucug

SEQ ID NO: 2434538 - RNA, 19 nt, Artificial Sequence
  Description of Artificial Sequence: Synthetic oligonucleotide
aaggagccgcagccagugg

SEQ ID NO: 2434539 - RNA, 19 nt, Artificial Sequence
  Description of Artificial Sequence: Synthetic oligonucleotide
uccugccaacauaguacag

SEQ ID NO: 2434540 - RNA, 19 nt, Artificial Sequence
  Description of Artificial Sequence: Synthetic oligonucleotide
uucgucuuggugaccugaa

SEQ ID NO: 2434541 - RNA, 19 nt, Artificial Sequence
  Description of Artificial Sequence: Synthetic oligonucleotide
ugccuuccccuaaccaacc

SEQ ID NO: 2434542 - RNA, 19 nt, Artificial Sequence
  Description of Artificial Sequence: Synthetic oligonucleotide
guccugccaacauaguaca

SEQ ID NO: 2434543 - RNA, 19 nt, Artificial Sequence
  Description of Artificial Sequence: Synthetic oligonucleotide
caccaucccuucucuaccc

SEQ ID NO: 2434544 - RNA, 19 nt, Artificial Sequence
  Description of Artificial Sequence: Synthetic oligonucleotide
ucccauuaccccacacccu

SEQ ID NO: 2434545 - RNA, 19 nt, Artificial Sequence
  Description of Artificial Sequence: Synthetic oligonucleotide
cuauggguugugucugcac

SEQ ID NO: 2434546 - RNA, 19 nt, Artificial Sequence
  Description of Artificial Sequence: Synthetic oligonucleotide
uguacagucccagcaccgu

SEQ ID NO: 2434547 - RNA, 19 nt, Artificial Sequence
  Description of Artificial Sequence: Synthetic oligonucleotide
agaguuugccuuccccuaa

SEQ ID NO: 2434548 - RNA, 19 nt, Artificial Sequence
  Description of Artificial Sequence: Synthetic oligonucleotide
gugauucucagagcuagca

SEQ ID NO: 2434549 - RNA, 19 nt, Artificial Sequence
  Description of Artificial Sequence: Synthetic oligonucleotide
acaucccgauccccuagag

SEQ ID NO: 2434550 - RNA, 19 nt, Artificial Sequence
  Description of Artificial Sequence: Synthetic oligonucleotide
agcaguucuccuccaaguu

SEQ ID NO: 2434551 - RNA, 19 nt, Artificial Sequence
  Description of Artificial Sequence: Synthetic oligonucleotide
uggcagucuuccuuccucu

SEQ ID NO: 2434552 - RNA, 19 nt, Artificial Sequence
  Description of Artificial Sequence: Synthetic oligonucleotide
ugagcagaaguugcauagu

SEQ ID NO: 2434553 - RNA, 19 nt, Artificial Sequence
  Description of Artificial Sequence: Synthetic oligonucleotide
ccugccaacauaguacagg

SEQ ID NO: 2434554 - RNA, 19 nt, Artificial Sequence
  Description of Artificial Sequence: Synthetic oligonucleotide
aggccucuagacugagguc

SEQ ID NO: 2434555 - RNA, 19 nt, Artificial Sequence
  Description of Artificial Sequence: Synthetic oligonucleotide
uggggacuucgucuuggug

SEQ ID NO: 2434556 - RNA, 19 nt, Artificial Sequence
  Description of Artificial Sequence: Synthetic oligonucleotide
caucccgauccccuagagc

SEQ ID NO: 2434557 - RNA, 19 nt, Artificial Sequence
  Description of Artificial Sequence: Synthetic oligonucleotide
ucccgauccccuagagcag

SEQ ID NO: 2434558 - RNA, 19 nt, Artificial Sequence
  Description of Artificial Sequence: Synthetic oligonucleotide
cucaccuagccgccacucg

SEQ ID NO: 2434559 - RNA, 19 nt, Artificial Sequence
  Description of Artificial Sequence: Synthetic oligonucleotide
gaguuugccuuccccuaac

SEQ ID NO: 2434560 - RNA, 19 nt, Artificial Sequence
  Description of Artificial Sequence: Synthetic oligonucleotide
uaccccacacccugugggc

SEQ ID NO: 2434561 - RNA, 19 nt, Artificial Sequence
  Description of Artificial Sequence: Synthetic oligonucleotide
cagucuuccuuccucuguc

SEQ ID NO: 2434562 - RNA, 19 nt, Artificial Sequence
  Description of Artificial Sequence: Synthetic oligonucleotide
uccggguucaggguauugu

SEQ ID NO: 2434563 - RNA, 19 nt, Artificial Sequence
  Description of Artificial Sequence: Synthetic oligonucleotide
acucgaccccauguccucc

SEQ ID NO: 2434564 - RNA, 19 nt, Artificial Sequence
  Description of Artificial Sequence: Synthetic oligonucleotide
ucugucgcaggcuggccuc

SEQ ID NO: 2434565 - RNA, 19 nt, Artificial Sequence
  Description of Artificial Sequence: Synthetic oligonucleotide
agagcagaugugguacuug

SEQ ID NO: 2434566 - RNA, 19 nt, Artificial Sequence
  Description of Artificial Sequence: Synthetic oligonucleotide
auguccucccuaggguagc

SEQ ID NO: 2434567 - RNA, 19 nt, Artificial Sequence
  Description of Artificial Sequence: Synthetic oligonucleotide
ugggcuccaggccucuaga

SEQ ID NO: 2434568 - RNA, 19 nt, Artificial Sequence
  Description of Artificial Sequence: Synthetic oligonucleotide
acggagaagccgaugccuc

SEQ ID NO: 2434569 - RNA, 19 nt, Artificial Sequence
  Description of Artificial Sequence: Synthetic oligonucleotide
ccuagagcagaugugguac

SEQ ID NO: 2434570 - RNA, 19 nt, Artificial Sequence
  Description of Artificial Sequence: Synthetic oligonucleotide
acgagucccauuaccccac

SEQ ID NO: 2434571 - RNA, 19 nt, Artificial Sequence
  Description of Artificial Sequence: Synthetic oligonucleotide
ucuaccccaccaccucugu

SEQ ID NO: 2434572 - RNA, 19 nt, Artificial Sequence
  Description of Artificial Sequence: Synthetic oligonucleotide
uuccccuaaccaacccaca

SEQ ID NO: 2434573 - RNA, 19 nt, Artificial Sequence
  Description of Artificial Sequence: Synthetic oligonucleotide
acacccugugggcucacca

SEQ ID NO: 2434574 - RNA, 19 nt, Artificial Sequence
  Description of Artificial Sequence: Synthetic oligonucleotide
agccgaugccuccggguuc

SEQ ID NO: 2434575 - RNA, 19 nt, Artificial Sequence
  Description of Artificial Sequence: Synthetic oligonucleotide
uccucugucgcaggcuggc

SEQ ID NO: 2434576 - RNA, 19 nt, Artificial Sequence
  Description of Artificial Sequence: Synthetic oligonucleotide
ggguauuguacagucccag

SEQ ID NO: 2434577 - RNA, 19 nt, Artificial Sequence
  Description of Artificial Sequence: Synthetic oligonucleotide
agaucucaagugccuucca

SEQ ID NO: 2434578 - RNA, 19 nt, Artificial Sequence
  Description of Artificial Sequence: Synthetic oligonucleotide
uggucaggggcuccagguc

SEQ ID NO: 2434579 - RNA, 19 nt, Artificial Sequence
  Description of Artificial Sequence: Synthetic oligonucleotide
gggacuucgucuuggugac

SEQ ID NO: 2434580 - RNA, 19 nt, Artificial Sequence
  Description of Artificial Sequence: Synthetic oligonucleotide
ugcacgacuucaccaccau

SEQ ID NO: 2434581 - RNA, 19 nt, Artificial Sequence
  Description of Artificial Sequence: Synthetic oligonucleotide
caagugccuuccagucugg

SEQ ID NO: 2434582 - RNA, 19 nt, Artificial Sequence
  Description of Artificial Sequence: Synthetic oligonucleotide
aaguugcauaguaacccuu

SEQ ID NO: 2434583 - RNA, 19 nt, Artificial Sequence
  Description of Artificial Sequence: Synthetic oligonucleotide
aguugcauaguaacccuua

SEQ ID NO: 2434584 - RNA, 19 nt, Artificial Sequence
  Description of Artificial Sequence: Synthetic oligonucleotide
agcagaaguugcauaguaa

SEQ ID NO: 2434585 - RNA, 19 nt, Artificial Sequence
  Description of Artificial Sequence: Synthetic oligonucleotide
cucuaccccaccaccucug

SEQ ID NO: 2434586 - RNA, 19 nt, Artificial Sequence
  Description of Artificial Sequence: Synthetic oligonucleotide
ucccucucggccguuugcc

SEQ ID NO: 2434587 - RNA, 19 nt, Artificial Sequence
  Description of Artificial Sequence: Synthetic oligonucleotide
gcaaagcugaccucagauc

SEQ ID NO: 2434588 - RNA, 19 nt, Artificial Sequence
  Description of Artificial Sequence: Synthetic oligonucleotide
agucccagcaccgugccua

SEQ ID NO: 2434589 - RNA, 19 nt, Artificial Sequence
  Description of Artificial Sequence: Synthetic oligonucleotide
agucuggcccucaccuagc

SEQ ID NO: 2434590 - RNA, 19 nt, Artificial Sequence
  Description of Artificial Sequence: Synthetic oligonucleotide
acugcggagguacgggcaa

SEQ ID NO: 2434591 - RNA, 19 nt, Artificial Sequence
  Description of Artificial Sequence: Synthetic oligonucleotide
uaacgacaucccgaucccc

SEQ ID NO: 2434592 - RNA, 19 nt, Artificial Sequence
  Description of Artificial Sequence: Synthetic oligonucleotide
gacaucccgauccccuaga

SEQ ID NO: 2434593 - RNA, 19 nt, Artificial Sequence
  Description of Artificial Sequence: Synthetic oligonucleotide
ccuaggguagcccuaacga

SEQ ID NO: 2434594 - RNA, 19 nt, Artificial Sequence
  Description of Artificial Sequence: Synthetic oligonucleotide
ccuucucuaccccaccacc

SEQ ID NO: 2434595 - RNA, 19 nt, Artificial Sequence
  Description of Artificial Sequence: Synthetic oligonucleotide
cucgaccccauguccuccc

SEQ ID NO: 2434596 - RNA, 19 nt, Artificial Sequence
  Description of Artificial Sequence: Synthetic oligonucleotide
cccauuaccccacacccug

SEQ ID NO: 2434597 - RNA, 19 nt, Artificial Sequence
  Description of Artificial Sequence: Synthetic oligonucleotide
uugguauccagggcccgcu

SEQ ID NO: 2434598 - RNA, 19 nt, Artificial Sequence
  Description of Artificial Sequence: Synthetic oligonucleotide
agacugaggucugucacuu

SEQ ID NO: 2434599 - RNA, 19 nt, Artificial Sequence
  Description of Artificial Sequence: Synthetic oligonucleotide
gugccuauggguugugucu

SEQ ID NO: 2434600 - RNA, 19 nt, Artificial Sequence
  Description of Artificial Sequence: Synthetic oligonucleotide
accccauguccucccuagg

SEQ ID NO: 2434601 - RNA, 19 nt, Artificial Sequence
  Description of Artificial Sequence: Synthetic oligonucleotide
cugcaccacagaaauucca

SEQ ID NO: 2434602 - RNA, 19 nt, Artificial Sequence
  Description of Artificial Sequence: Synthetic oligonucleotide
gacuucgucuuggugaccu

SEQ ID NO: 2434603 - RNA, 19 nt, Artificial Sequence
  Description of Artificial Sequence: Synthetic oligonucleotide
agcaccgugccuauggguu

SEQ ID NO: 2434604 - RNA, 19 nt, Artificial Sequence
  Description of Artificial Sequence: Synthetic oligonucleotide
caccuagccgccacucgac

SEQ ID NO: 2434605 - RNA, 19 nt, Artificial Sequence
  Description of Artificial Sequence: Synthetic oligonucleotide
accaacccacacuuucuuu

SEQ ID NO: 2434606 - RNA, 19 nt, Artificial Sequence
  Description of Artificial Sequence: Synthetic oligonucleotide
cagagcuagcagaaagaaa

SEQ ID NO: 2434607 - RNA, 19 nt, Artificial Sequence
  Description of Artificial Sequence: Synthetic oligonucleotide
gccacucgaccccaugucc

SEQ ID NO: 2434608 - RNA, 19 nt, Artificial Sequence
  Description of Artificial Sequence: Synthetic oligonucleotide
gaagccgaugccuccgggu

SEQ ID NO: 2434609 - RNA, 19 nt, Artificial Sequence
  Description of Artificial Sequence: Synthetic oligonucleotide
cucuagacugaggucuguc

SEQ ID NO: 2434610 - RNA, 19 nt, Artificial Sequence
  Description of Artificial Sequence: Synthetic oligonucleotide
aagggccugagcagaaguu

SEQ ID NO: 2434611 - RNA, 19 nt, Artificial Sequence
  Description of Artificial Sequence: Synthetic oligonucleotide
ugucugcaccacagaaauu

SEQ ID NO: 2434612 - RNA, 19 nt, Artificial Sequence
  Description of Artificial Sequence: Synthetic oligonucleotide
cacuuugguuucccaagga

SEQ ID NO: 2434613 - RNA, 19 nt, Artificial Sequence
  Description of Artificial Sequence: Synthetic oligonucleotide
aguugcggaagcaguaauu

SEQ ID NO: 2434614 - RNA, 19 nt, Artificial Sequence
  Description of Artificial Sequence: Synthetic oligonucleotide
cccuaggguagcccuaacg

SEQ ID NO: 2434615 - RNA, 19 nt, Artificial Sequence
  Description of Artificial Sequence: Synthetic oligonucleotide
gucuggcccucaccuagcc

SEQ ID NO: 2434616 - RNA, 19 nt, Artificial Sequence
  Description of Artificial Sequence: Synthetic oligonucleotide
cugcacugcggagguacgg

SEQ ID NO: 2434617 - RNA, 19 nt, Artificial Sequence
  Description of Artificial Sequence: Synthetic oligonucleotide
uguccucccuaggguagcc

SEQ ID NO: 2434618 - RNA, 19 nt, Artificial Sequence
  Description of Artificial Sequence: Synthetic oligonucleotide
uucucagagcuagcagaaa

SEQ ID NO: 2434619 - RNA, 19 nt, Artificial Sequence
  Description of Artificial Sequence: Synthetic oligonucleotide
cucccucucggccguuugc

SEQ ID NO: 2434620 - RNA, 19 nt, Artificial Sequence
  Description of Artificial Sequence: Synthetic oligonucleotide
aguaacccuuagguucgug

SEQ ID NO: 2434621 - RNA, 19 nt, Artificial Sequence
  Description of Artificial Sequence: Synthetic oligonucleotide
agcccuaacgagucccauu

SEQ ID NO: 2434622 - RNA, 19 nt, Artificial Sequence
  Description of Artificial Sequence: Synthetic oligonucleotide
cacucgaccccauguccuc

SEQ ID NO: 2434623 - RNA, 19 nt, Artificial Sequence
  Description of Artificial Sequence: Synthetic oligonucleotide
cuucucuaccccaccaccu

SEQ ID NO: 2434624 - RNA, 19 nt, Artificial Sequence
  Description of Artificial Sequence: Synthetic oligonucleotide
gcggacacagcaguucucc

SEQ ID NO: 2434625 - RNA, 19 nt, Artificial Sequence
  Description of Artificial Sequence: Synthetic oligonucleotide
ccagugguggcagucuucc

SEQ ID NO: 2434626 - RNA, 19 nt, Artificial Sequence
  Description of Artificial Sequence: Synthetic oligonucleotide
ccugcggcacacagcacgg

SEQ ID NO: 2434627 - RNA, 19 nt, Artificial Sequence
  Description of Artificial Sequence: Synthetic oligonucleotide
agauccugccggaagucaa

SEQ ID NO: 2434628 - RNA, 19 nt, Artificial Sequence
  Description of Artificial Sequence: Synthetic oligonucleotide
auccccuagagcagaugug

SEQ ID NO: 2434629 - RNA, 19 nt, Artificial Sequence
  Description of Artificial Sequence: Synthetic oligonucleotide
gugguacuugaaugggcaa

SEQ ID NO: 2434630 - RNA, 19 nt, Artificial Sequence
  Description of Artificial Sequence: Synthetic oligonucleotide
cuucgucuuggugaccuga

SEQ ID NO: 2434631 - RNA, 19 nt, Artificial Sequence
  Description of Artificial Sequence: Synthetic oligonucleotide
guggacccauuuccagccc

SEQ ID NO: 2434632 - RNA, 19 nt, Artificial Sequence
  Description of Artificial Sequence: Synthetic oligonucleotide
ccuagccgccacucgaccc

SEQ ID NO: 2434633 - RNA, 19 nt, Artificial Sequence
  Description of Artificial Sequence: Synthetic oligonucleotide
acgacaucccgauccccua

SEQ ID NO: 2434634 - RNA, 19 nt, Artificial Sequence
  Description of Artificial Sequence: Synthetic oligonucleotide
ccaccucuaacgacauccc

SEQ ID NO: 2434635 - RNA, 19 nt, Artificial Sequence
  Description of Artificial Sequence: Synthetic oligonucleotide
caaguugcggaagcaguaa

SEQ ID NO: 2434636 - RNA, 19 nt, Artificial Sequence
  Description of Artificial Sequence: Synthetic oligonucleotide
ucgaccccauguccucccu

SEQ ID NO: 2434637 - RNA, 19 nt, Artificial Sequence
  Description of Artificial Sequence: Synthetic oligonucleotide
gcccuaacgagucccauua

SEQ ID NO: 2434638 - RNA, 19 nt, Artificial Sequence
  Description of Artificial Sequence: Synthetic oligonucleotide
cucuaacgacaucccgauc

SEQ ID NO: 2434639 - RNA, 19 nt, Artificial Sequence
  Description of Artificial Sequence: Synthetic oligonucleotide
augauucuggggacuucgu

SEQ ID NO: 2434640 - RNA, 19 nt, Artificial Sequence
  Description of Artificial Sequence: Synthetic oligonucleotide
ggcucgugggcuccaggcc

SEQ ID NO: 2434641 - RNA, 19 nt, Artificial Sequence
  Description of Artificial Sequence: Synthetic oligonucleotide
acagugauucucagagcua

SEQ ID NO: 2434642 - RNA, 19 nt, Artificial Sequence
  Description of Artificial Sequence: Synthetic oligonucleotide
gcacggagaagccgaugcc

SEQ ID NO: 2434643 - RNA, 19 nt, Artificial Sequence
  Description of Artificial Sequence: Synthetic oligonucleotide
ggccucuagacugaggucu

SEQ ID NO: 2434644 - RNA, 19 nt, Artificial Sequence
  Description of Artificial Sequence: Synthetic oligonucleotide
gcuugccaccucuaacgac

SEQ ID NO: 2434645 - RNA, 19 nt, Artificial Sequence
  Description of Artificial Sequence: Synthetic oligonucleotide
cccuuagguucguggaccc

SEQ ID NO: 2434646 - RNA, 19 nt, Artificial Sequence
  Description of Artificial Sequence: Synthetic oligonucleotide
cucgugggcuccaggccuc

SEQ ID NO: 2434647 - RNA, 19 nt, Artificial Sequence
  Description of Artificial Sequence: Synthetic oligonucleotide
gucugucacuuugguuucc

SEQ ID NO: 2434648 - RNA, 19 nt, Artificial Sequence
  Description of Artificial Sequence: Synthetic oligonucleotide
gcccagauccugccggaag

SEQ ID NO: 2434649 - RNA, 19 nt, Artificial Sequence
  Description of Artificial Sequence: Synthetic oligonucleotide
agccagugguggcagucuu

SEQ ID NO: 2434650 - RNA, 19 nt, Artificial Sequence
  Description of Artificial Sequence: Synthetic oligonucleotide
ccucucggccguuugccag

SEQ ID NO: 2434651 - RNA, 19 nt, Artificial Sequence
  Description of Artificial Sequence: Synthetic oligonucleotide
ucccuaggguagcccuaac

SEQ ID NO: 2434652 - RNA, 19 nt, Artificial Sequence
  Description of Artificial Sequence: Synthetic oligonucleotide
ccaacccacacuuucuuua

SEQ ID NO: 2434653 - RNA, 19 nt, Artificial Sequence
  Description of Artificial Sequence: Synthetic oligonucleotide
gcacugcggagguacgggc

SEQ ID NO: 2434654 - RNA, 19 nt, Artificial Sequence
  Description of Artificial Sequence: Synthetic oligonucleotide
caagggccugagcagaagu

SEQ ID NO: 2434655 - RNA, 19 nt, Artificial Sequence
  Description of Artificial Sequence: Synthetic oligonucleotide
guagcccuaacgaguccca

SEQ ID NO: 2434656 - RNA, 19 nt, Artificial Sequence
  Description of Artificial Sequence: Synthetic oligonucleotide
ggguccugccaacauagua

SEQ ID NO: 2434657 - RNA, 19 nt, Artificial Sequence
  Description of Artificial Sequence: Synthetic oligonucleotide
cucaagugccuuccagucu

SEQ ID NO: 2434658 - RNA, 19 nt, Artificial Sequence
  Description of Artificial Sequence: Synthetic oligonucleotide
gcaccgugccuauggguug

SEQ ID NO: 2434659 - RNA, 19 nt, Artificial Sequence
  Description of Artificial Sequence: Synthetic oligonucleotide
cuuagguucguggacccau

SEQ ID NO: 2434660 - RNA, 19 nt, Artificial Sequence
  Description of Artificial Sequence: Synthetic oligonucleotide
guacgggcaagggccugag

SEQ ID NO: 2434661 - RNA, 19 nt, Artificial Sequence
  Description of Artificial Sequence: Synthetic oligonucleotide
ugguauccagggcccgcuu

SEQ ID NO: 2434662 - RNA, 19 nt, Artificial Sequence
  Description of Artificial Sequence: Synthetic oligonucleotide
cgucuuggugaccugaaga

SEQ ID NO: 2434663 - RNA, 19 nt, Artificial Sequence
  Description of Artificial Sequence: Synthetic oligonucleotide
uaguaacccuuagguucgu

SEQ ID NO: 2434664 - RNA, 19 nt, Artificial Sequence
  Description of Artificial Sequence: Synthetic oligonucleotide
cggccguuugccaggagcc

SEQ ID NO: 2434665 - RNA, 19 nt, Artificial Sequence
  Description of Artificial Sequence: Synthetic oligonucleotide
ugccaccucuaacgacauc

SEQ ID NO: 2434666 - RNA, 19 nt, Artificial Sequence
  Description of Artificial Sequence: Synthetic oligonucleotide
gucgcaggcuggccucagc

SEQ ID NO: 2434667 - RNA, 19 nt, Artificial Sequence
  Description of Artificial Sequence: Synthetic oligonucleotide
gcacgacuucaccaccaug

SEQ ID NO: 2434668 - RNA, 19 nt, Artificial Sequence
  Description of Artificial Sequence: Synthetic oligonucleotide
caacauaguacaggauggu

SEQ ID NO: 2434669 - RNA, 19 nt, Artificial Sequence
  Description of Artificial Sequence: Synthetic oligonucleotide
cggguucaggguauuguac

SEQ ID NO: 2434670 - RNA, 19 nt, Artificial Sequence
  Description of Artificial Sequence: Synthetic oligonucleotide
gccuauggguugugucugc

SEQ ID NO: 2434671 - RNA, 19 nt, Artificial Sequence
  Description of Artificial Sequence: Synthetic oligonucleotide
gcauaguaacccuuagguu

SEQ ID NO: 2434672 - RNA, 19 nt, Artificial Sequence
  Description of Artificial Sequence: Synthetic oligonucleotide
uagcccuaacgagucccau

SEQ ID NO: 2434673 - RNA, 19 nt, Artificial Sequence
  Description of Artificial Sequence: Synthetic oligonucleotide
cacggagaagccgaugccu

SEQ ID NO: 2434674 - RNA, 19 nt, Artificial Sequence
  Description of Artificial Sequence: Synthetic oligonucleotide
cggagguacgggcaagggc

SEQ ID NO: 2434675 - RNA, 19 nt, Artificial Sequence
  Description of Artificial Sequence: Synthetic oligonucleotide
gcuagcagaaagaaauguu

SEQ ID NO: 2434676 - RNA, 19 nt, Artificial Sequence
  Description of Artificial Sequence: Synthetic oligonucleotide
cucugucgcaggcuggccu

SEQ ID NO: 2434677 - RNA, 19 nt, Artificial Sequence
  Description of Artificial Sequence: Synthetic oligonucleotide
gggcuccaggccucuagac

SEQ ID NO: 2434678 - RNA, 19 nt, Artificial Sequence
  Description of Artificial Sequence: Synthetic oligonucleotide
cccuucucuaccccaccac

SEQ ID NO: 2434679 - RNA, 19 nt, Artificial Sequence
  Description of Artificial Sequence: Synthetic oligonucleotide
cugcggagguacgggcaag

SEQ ID NO: 2434680 - RNA, 19 nt, Artificial Sequence
  Description of Artificial Sequence: Synthetic oligonucleotide
ggguagcccuaacgagucc

SEQ ID NO: 2434681 - RNA, 19 nt, Artificial Sequence
  Description of Artificial Sequence: Synthetic oligonucleotide
ccaggccucuagacugagg

SEQ ID NO: 2434682 - RNA, 19 nt, Artificial Sequence
  Description of Artificial Sequence: Synthetic oligonucleotide
gcggagguacgggcaaggg

SEQ ID NO: 2434683 - RNA, 19 nt, Artificial Sequence
  Description of Artificial Sequence: Synthetic oligonucleotide
ccugugggcucaccauccc

SEQ ID NO: 2434684 - RNA, 19 nt, Artificial Sequence
  Description of Artificial Sequence: Synthetic oligonucleotide
cuccggguucaggguauug

SEQ ID NO: 2434685 - RNA, 19 nt, Artificial Sequence
  Description of Artificial Sequence: Synthetic oligonucleotide
agguacgggcaagggccug

SEQ ID NO: 2434686 - RNA, 19 nt, Artificial Sequence
  Description of Artificial Sequence: Synthetic oligonucleotide
gauccugccggaagucaau

SEQ ID NO: 2434687 - RNA, 19 nt, Artificial Sequence
  Description of Artificial Sequence: Synthetic oligonucleotide
ccugccggaagucaaugua

SEQ ID NO: 2434688 - RNA, 19 nt, Artificial Sequence
  Description of Artificial Sequence: Synthetic oligonucleotide
cagcacggagaagccgaug

SEQ ID NO: 2434689 - RNA, 19 nt, Artificial Sequence
  Description of Artificial Sequence: Synthetic oligonucleotide
cagcccagauccugccgga

SEQ ID NO: 2434690 - RNA, 19 nt, Artificial Sequence
  Description of Artificial Sequence: Synthetic oligonucleotide
ggggcggacacagcaguuc

SEQ ID NO: 2434691 - RNA, 19 nt, Artificial Sequence
  Description of Artificial Sequence: Synthetic oligonucleotide
gcggaagcaguaauuggua

SEQ ID NO: 2434692 - RNA, 19 nt, Artificial Sequence
  Description of Artificial Sequence: Synthetic oligonucleotide
gcucgugggcuccaggccu

SEQ ID NO: 2434693 - RNA, 19 nt, Artificial Sequence
  Description of Artificial Sequence: Synthetic oligonucleotide
cucccuaggguagcccuaa

SEQ ID NO: 2434694 - RNA, 19 nt, Artificial Sequence
  Description of Artificial Sequence: Synthetic oligonucleotide
ccaucccuucucuacccca

SEQ ID NO: 2434695 - RNA, 19 nt, Artificial Sequence
  Description of Artificial Sequence: Synthetic oligonucleotide
gguacgggcaagggccuga

SEQ ID NO: 2434696 - RNA, 19 nt, Artificial Sequence
  Description of Artificial Sequence: Synthetic oligonucleotide
gagguacgggcaagggccu

SEQ ID NO: 2434697 - RNA, 19 nt, Artificial Sequence
  Description of Artificial Sequence: Synthetic oligonucleotide
ccucuaacgacaucccgau

SEQ ID NO: 2434698 - RNA, 19 nt, Artificial Sequence
  Description of Artificial Sequence: Synthetic oligonucleotide
cccuaacgagucccauuac

SEQ ID NO: 2434699 - RNA, 19 nt, Artificial Sequence
  Description of Artificial Sequence: Synthetic oligonucleotide
cgacaucccgauccccuag

SEQ ID NO: 2434700 - RNA, 19 nt, Artificial Sequence
  Description of Artificial Sequence: Synthetic oligonucleotide
gggcggacacagcaguucu

SEQ ID NO: 2434701 - RNA, 19 nt, Artificial Sequence
  Description of Artificial Sequence: Synthetic oligonucleotide
cauuuccagcccagauccu

SEQ ID NO: 2434702 - RNA, 19 nt, Artificial Sequence
  Description of Artificial Sequence: Synthetic oligonucleotide
cugugggcucaccaucccu

SEQ ID NO: 2434703 - RNA, 19 nt, Artificial Sequence
  Description of Artificial Sequence: Synthetic oligonucleotide
cguuugccaggagccaggg

SEQ ID NO: 2434704 - RNA, 19 nt, Artificial Sequence
  Description of Artificial Sequence: Synthetic oligonucleotide
ccagauccugccggaaguc

SEQ ID NO: 2434705 - RNA, 19 nt, Artificial Sequence
  Description of Artificial Sequence: Synthetic oligonucleotide
cccuagagcagauguggua

SEQ ID NO: 2434706 - RNA, 19 nt, Artificial Sequence
  Description of Artificial Sequence: Synthetic oligonucleotide
cagcaccgugccuaugggu

SEQ ID NO: 2434707 - RNA, 19 nt, Artificial Sequence
  Description of Artificial Sequence: Synthetic oligonucleotide
ggcucaccaucccuucucu

SEQ ID NO: 2434708 - RNA, 19 nt, Artificial Sequence
  Description of Artificial Sequence: Synthetic oligonucleotide
cucagaucucaagugccuu

SEQ ID NO: 2434709 - RNA, 19 nt, Artificial Sequence
  Description of Artificial Sequence: Synthetic oligonucleotide
agcccagauccugccggaa

SEQ ID NO: 2434710 - RNA, 19 nt, Artificial Sequence
  Description of Artificial Sequence: Synthetic oligonucleotide
cucggccguuugccaggag

SEQ ID NO: 2434711 - RNA, 19 nt, Artificial Sequence
  Description of Artificial Sequence: Synthetic oligonucleotide
accgugccuauggguugug

SEQ ID NO: 2434712 - RNA, 19 nt, Artificial Sequence
  Description of Artificial Sequence: Synthetic oligonucleotide
gcggcacacagcacggaga

SEQ ID NO: 2434713 - RNA, 19 nt, Artificial Sequence
  Description of Artificial Sequence: Synthetic oligonucleotide
cccuaaccaacccacacuu

SEQ ID NO: 2434714 - RNA, 19 nt, Artificial Sequence
  Description of Artificial Sequence: Synthetic oligonucleotide
ccucagaucucaagugccu

SEQ ID NO: 2434715 - RNA, 19 nt, Artificial Sequence
  Description of Artificial Sequence: Synthetic oligonucleotide
gccgaugccuccggguuca

SEQ ID NO: 2434716 - RNA, 19 nt, Artificial Sequence
  Description of Artificial Sequence: Synthetic oligonucleotide
ugucugcacugcggaggua

SEQ ID NO: 2434717 - RNA, 19 nt, Artificial Sequence
  Description of Artificial Sequence: Synthetic oligonucleotide
ccggguucaggguauugua

SEQ ID NO: 2434718 - RNA, 19 nt, Artificial Sequence
  Description of Artificial Sequence: Synthetic oligonucleotide
gguggcagucuuccuuccu

SEQ ID NO: 2434719 - RNA, 19 nt, Artificial Sequence
  Description of Artificial Sequence: Synthetic oligonucleotide
gccgccacucgaccccaug

SEQ ID NO: 2434720 - RNA, 19 nt, Artificial Sequence
  Description of Artificial Sequence: Synthetic oligonucleotide
ggacuucgucuuggugacc

SEQ ID NO: 2434721 - RNA, 19 nt, Artificial Sequence
  Description of Artificial Sequence: Synthetic oligonucleotide
agcugaccucagaucucaa

SEQ ID NO: 2434722 - RNA, 19 nt, Artificial Sequence
  Description of Artificial Sequence: Synthetic oligonucleotide
ccuauggguugugucugca

SEQ ID NO: 2434723 - RNA, 19 nt, Artificial Sequence
  Description of Artificial Sequence: Synthetic oligonucleotide
ccccacacccugugggcuc

SEQ ID NO: 2434724 - RNA, 19 nt, Artificial Sequence
  Description of Artificial Sequence: Synthetic oligonucleotide
ccacucgaccccauguccu

SEQ ID NO: 2434725 - RNA, 19 nt, Artificial Sequence
  Description of Artificial Sequence: Synthetic oligonucleotide
cugucgcaggcuggccuca

SEQ ID NO: 2434726 - RNA, 19 nt, Artificial Sequence
  Description of Artificial Sequence: Synthetic oligonucleotide
ccccuaaccaacccacacu

SEQ ID NO: 2434727 - RNA, 19 nt, Artificial Sequence
  Description of Artificial Sequence: Synthetic oligonucleotide
ccuccaaguugcggaagca

SEQ ID NO: 2434728 - RNA, 19 nt, Artificial Sequence
  Description of Artificial Sequence: Synthetic oligonucleotide
cgccacucgaccccauguc

SEQ ID NO: 2434729 - RNA, 19 nt, Artificial Sequence
  Description of Artificial Sequence: Synthetic oligonucleotide
ccucugucgcaggcuggcc

SEQ ID NO: 2434730 - RNA, 19 nt, Artificial Sequence
  Description of Artificial Sequence: Synthetic oligonucleotide
guccugcggcacacagcac

SEQ ID NO: 2434731 - RNA, 19 nt, Artificial Sequence
  Description of Artificial Sequence: Synthetic oligonucleotide
cccgauccccuagagcaga

SEQ ID NO: 2434732 - RNA, 19 nt, Artificial Sequence
  Description of Artificial Sequence: Synthetic oligonucleotide
cagugguggcagucuuccu

SEQ ID NO: 2434733 - RNA, 19 nt, Artificial Sequence
  Description of Artificial Sequence: Synthetic oligonucleotide
cugcggcacacagcacgga

SEQ ID NO: 2434734 - RNA, 19 nt, Artificial Sequence
  Description of Artificial Sequence: Synthetic oligonucleotide
caccgugccuauggguugu

SEQ ID NO: 2434735 - RNA, 19 nt, Artificial Sequence
  Description of Artificial Sequence: Synthetic oligonucleotide
cccucucggccguuugcca

SEQ ID NO: 2434736 - RNA, 19 nt, Artificial Sequence
  Description of Artificial Sequence: Synthetic oligonucleotide
ccuuagguucguggaccca

SEQ ID NO: 2434737 - RNA, 19 nt, Artificial Sequence
  Description of Artificial Sequence: Synthetic oligonucleotide
ccccuagagcagauguggu

SEQ ID NO: 2434738 - RNA, 19 nt, Artificial Sequence
  Description of Artificial Sequence: Synthetic oligonucleotide
cgauccccuagagcagaug

SEQ ID NO: 2434739 - RNA, 19 nt, Artificial Sequence
  Description of Artificial Sequence: Synthetic oligonucleotide
ccucccuaggguagcccua

SEQ ID NO: 2434740 - RNA, 19 nt, Artificial Sequence
  Description of Artificial Sequence: Synthetic oligonucleotide
ccauuaccccacacccugu

SEQ ID NO: 2434741 - RNA, 19 nt, Artificial Sequence
  Description of Artificial Sequence: Synthetic oligonucleotide
ccuaaccaacccacacuuu

SEQ ID NO: 2434742 - RNA, 19 nt, Artificial Sequence
  Description of Artificial Sequence: Synthetic oligonucleotide
ccgccacucgaccccaugu

SEQ ID NO: 2434743 - RNA, 19 nt, Artificial Sequence
  Description of Artificial Sequence: Synthetic oligonucleotide
cgagucccauuaccccaca

SEQ ID NO: 2434744 - RNA, 19 nt, Artificial Sequence
  Description of Artificial Sequence: Synthetic oligonucleotide
gggguccugccaacauagu

SEQ ID NO: 2434745 - RNA, 19 nt, Artificial Sequence
  Description of Artificial Sequence: Synthetic oligonucleotide
gccuccggguucaggguau

SEQ ID NO: 2434746 - RNA, 19 nt, Artificial Sequence
  Description of Artificial Sequence: Synthetic oligonucleotide
cggacacagcaguucuccu

SEQ ID NO: 2434747 - RNA, 19 nt, Artificial Sequence
  Description of Artificial Sequence: Synthetic oligonucleotide
ccucuagacugaggucugu

SEQ ID NO: 2434748 - RNA, 19 nt, Artificial Sequence
  Description of Artificial Sequence: Synthetic oligonucleotide
ccgaugccuccggguucag

SEQ ID NO: 2434749 - RNA, 19 nt, Artificial Sequence
  Description of Artificial Sequence: Synthetic oligonucleotide
ccgauccccuagagcagau

SEQ ID NO: 2434750 - RNA, 19 nt, Artificial Sequence
  Description of Artificial Sequence: Synthetic oligonucleotide
ccacacccugugggcucac

SEQ ID NO: 2434751 - RNA, 19 nt, Artificial Sequence
  Description of Artificial Sequence: Synthetic oligonucleotide
cgaccccauguccucccua

SEQ ID NO: 2434752 - RNA, 19 nt, Artificial Sequence
  Description of Artificial Sequence: Synthetic oligonucleotide
ccgugccuauggguugugu

SEQ ID NO: 2434753 - RNA, 19 nt, Artificial Sequence
  Description of Artificial Sequence: Synthetic oligonucleotide
gccucccucucggccguuu

SEQ ID NO: 2434754 - RNA, 19 nt, Artificial Sequence
  Description of Artificial Sequence: Synthetic oligonucleotide
ccuccggguucaggguauu

SEQ ID NO: 2434755 - RNA, 19 nt, Artificial Sequence
  Description of Artificial Sequence: Synthetic oligonucleotide
uuuucuauguauuugaagg

SEQ ID NO: 2434756 - RNA, 19 nt, Artificial Sequence
  Description of Artificial Sequence: Synthetic oligonucleotide
auugaacacacauauaugg

SEQ ID NO: 2434757 - RNA, 19 nt, Artificial Sequence
  Description of Artificial Sequence: Synthetic oligonucleotide
auuguuuacaagcauacgg

SEQ ID NO: 2434758 - RNA, 19 nt, Artificial Sequence
  Description of Artificial Sequence: Synthetic oligonucleotide
aggcagaacauuuaaaugc

SEQ ID NO: 2434759 - RNA, 19 nt, Artificial Sequence
  Description of Artificial Sequence: Synthetic oligonucleotide
uagaauauuauccacugag

SEQ ID NO: 2434760 - RNA, 19 nt, Artificial Sequence
  Description of Artificial Sequence: Synthetic oligonucleotide
uuucaugauaauaacaagc

SEQ ID NO: 2434761 - RNA, 19 nt, Artificial Sequence
  Description of Artificial Sequence: Synthetic oligonucleotide
aaaaggugaacguuuuccc

SEQ ID NO: 2434762 - RNA, 19 nt, Artificial Sequence
  Description of Artificial Sequence: Synthetic oligonucleotide
auauauaggguuuucuccc

SEQ ID NO: 2434763 - RNA, 19 nt, Artificial Sequence
  Description of Artificial Sequence: Synthetic oligonucleotide
gacuguaacaaucaucacg

SEQ ID NO: 2434764 - RNA, 19 nt, Artificial Sequence
  Description of Artificial Sequence: Synthetic oligonucleotide
acugcacacacauauaugg

SEQ ID NO: 2434765 - RNA, 19 nt, Artificial Sequence
  Description of Artificial Sequence: Synthetic oligonucleotide
cauugguagaauauuaucc

SEQ ID NO: 2434766 - RNA, 19 nt, Artificial Sequence
  Description of Artificial Sequence: Synthetic oligonucleotide
aacagguaaaugcuuuccc

SEQ ID NO: 2434767 - RNA, 19 nt, Artificial Sequence
  Description of Artificial Sequence: Synthetic oligonucleotide
aaacugaauagcuucccac

SEQ ID NO: 2434768 - RNA, 19 nt, Artificial Sequence
  Description of Artificial Sequence: Synthetic oligonucleotide
uucaugauaauaacaagca

SEQ ID NO: 2434769 - RNA, 19 nt, Artificial Sequence
  Description of Artificial Sequence: Synthetic oligonucleotide
acugccuacauacauacgg

SEQ ID NO: 2434770 - RNA, 19 nt, Artificial Sequence
  Description of Artificial Sequence: Synthetic oligonucleotide
aaaaguugacaccagacau

SEQ ID NO: 2434771 - RNA, 19 nt, Artificial Sequence
  Description of Artificial Sequence: Synthetic oligonucleotide
aacgaagaaaggcuuuccc

SEQ ID NO: 2434772 - RNA, 19 nt, Artificial Sequence
  Description of Artificial Sequence: Synthetic oligonucleotide
acaaucaucacguuggaug

SEQ ID NO: 2434773 - RNA, 19 nt, Artificial Sequence
  Description of Artificial Sequence: Synthetic oligonucleotide
guaacaaucaucacguugg

SEQ ID NO: 2434774 - RNA, 19 nt, Artificial Sequence
  Description of Artificial Sequence: Synthetic oligonucleotide
ugaacguuuucccacauug

SEQ ID NO: 2434775 - RNA, 19 nt, Artificial Sequence
  Description of Artificial Sequence: Synthetic oligonucleotide
agaguggauucuuucaugc

SEQ ID NO: 2434776 - RNA, 19 nt, Artificial Sequence
  Description of Artificial Sequence: Synthetic oligonucleotide
ugagaaguuggcaggaacg

SEQ ID NO: 2434777 - RNA, 19 nt, Artificial Sequence
  Description of Artificial Sequence: Synthetic oligonucleotide
uuggcaggaacgaagaaag

SEQ ID NO: 2434778 - RNA, 19 nt, Artificial Sequence
  Description of Artificial Sequence: Synthetic oligonucleotide
uguaacaaucaucacguug

SEQ ID NO: 2434779 - RNA, 19 nt, Artificial Sequence
  Description of Artificial Sequence: Synthetic oligonucleotide
aagcauacgguuucacgcc

SEQ ID NO: 2434780 - RNA, 19 nt, Artificial Sequence
  Description of Artificial Sequence: Synthetic oligonucleotide
aguggcauaagcaaaggcc

SEQ ID NO: 2434781 - RNA, 19 nt, Artificial Sequence
  Description of Artificial Sequence: Synthetic oligonucleotide
auacaaaaggucucucucc

SEQ ID NO: 2434782 - RNA, 19 nt, Artificial Sequence
  Description of Artificial Sequence: Synthetic oligonucleotide
agaucuuucauguauguga

SEQ ID NO: 2434783 - RNA, 19 nt, Artificial Sequence
  Description of Artificial Sequence: Synthetic oligonucleotide
uuucuauguauuugaaggg

SEQ ID NO: 2434784 - RNA, 19 nt, Artificial Sequence
  Description of Artificial Sequence: Synthetic oligonucleotide
cauauauaggguuuucucc

SEQ ID NO: 2434785 - RNA, 19 nt, Artificial Sequence
  Description of Artificial Sequence: Synthetic oligonucleotide
gauuuggaaaaggugaacg

SEQ ID NO: 2434786 - RNA, 19 nt, Artificial Sequence
  Description of Artificial Sequence: Synthetic oligonucleotide
uuuucaaagaaguucccug

SEQ ID NO: 2434787 - RNA, 19 nt, Artificial Sequence
  Description of Artificial Sequence: Synthetic oligonucleotide
uaugguuucucucccagag

SEQ ID NO: 2434788 - RNA, 19 nt, Artificial Sequence
  Description of Artificial Sequence: Synthetic oligonucleotide
acauauauaggguuuucuc

SEQ ID NO: 2434789 - RNA, 19 nt, Artificial Sequence
  Description of Artificial Sequence: Synthetic oligonucleotide
uguauuugaagggauuugg

SEQ ID NO: 2434790 - RNA, 19 nt, Artificial Sequence
  Description of Artificial Sequence: Synthetic oligonucleotide
ugugaagguaggcagaaca

SEQ ID NO: 2434791 - RNA, 19 nt, Artificial Sequence
  Description of Artificial Sequence: Synthetic oligonucleotide
uucauguaugugaagguag

SEQ ID NO: 2434792 - RNA, 19 nt, Artificial Sequence
  Description of Artificial Sequence: Synthetic oligonucleotide
ugucugagaagguaugugg

SEQ ID NO: 2434793 - RNA, 19 nt, Artificial Sequence
  Description of Artificial Sequence: Synthetic oligonucleotide
aauauuauccacugaguuu

SEQ ID NO: 2434794 - RNA, 19 nt, Artificial Sequence
  Description of Artificial Sequence: Synthetic oligonucleotide
aauaacaagcacuggagua

SEQ ID NO: 2434795 - RNA, 19 nt, Artificial Sequence
  Description of Artificial Sequence: Synthetic oligonucleotide
auucuuucaugcuugugac

SEQ ID NO: 2434796 - RNA, 19 nt, Artificial Sequence
  Description of Artificial Sequence: Synthetic oligonucleotide
uucauggaugagaaguugg

SEQ ID NO: 2434797 - RNA, 19 nt, Artificial Sequence
  Description of Artificial Sequence: Synthetic oligonucleotide
ugaauagcuucccacacug

SEQ ID NO: 2434798 - RNA, 19 nt, Artificial Sequence
  Description of Artificial Sequence: Synthetic oligonucleotide
aauucguucgugucuuuuc

SEQ ID NO: 2434799 - RNA, 19 nt, Artificial Sequence
  Description of Artificial Sequence: Synthetic oligonucleotide
auugguagaauauuaucca

SEQ ID NO: 2434800 - RNA, 19 nt, Artificial Sequence
  Description of Artificial Sequence: Synthetic oligonucleotide
caagcauacgguuucacgc

SEQ ID NO: 2434801 - RNA, 19 nt, Artificial Sequence
  Description of Artificial Sequence: Synthetic oligonucleotide
ucauguaugugaagguagg

SEQ ID NO: 2434802 - RNA, 19 nt, Artificial Sequence
  Description of Artificial Sequence: Synthetic oligonucleotide
aaagacuucccacacugcu

SEQ ID NO: 2434803 - RNA, 19 nt, Artificial Sequence
  Description of Artificial Sequence: Synthetic oligonucleotide
uuccacaaugcuuacauac

SEQ ID NO: 2434804 - RNA, 19 nt, Artificial Sequence
  Description of Artificial Sequence: Synthetic oligonucleotide
uuguuuacaagcauacggu

SEQ ID NO: 2434805 - RNA, 19 nt, Artificial Sequence
  Description of Artificial Sequence: Synthetic oligonucleotide
aacacacauauaugguuuc

SEQ ID NO: 2434806 - RNA, 19 nt, Artificial Sequence
  Description of Artificial Sequence: Synthetic oligonucleotide
acauugguagaauauuauc

SEQ ID NO: 2434807 - RNA, 19 nt, Artificial Sequence
  Description of Artificial Sequence: Synthetic oligonucleotide
uguggaacagguaaaugcu

SEQ ID NO: 2434808 - RNA, 19 nt, Artificial Sequence
  Description of Artificial Sequence: Synthetic oligonucleotide
uaugugaagggaucugggg

SEQ ID NO: 2434809 - RNA, 19 nt, Artificial Sequence
  Description of Artificial Sequence: Synthetic oligonucleotide
augacuguaacaaucauca

SEQ ID NO: 2434810 - RNA, 19 nt, Artificial Sequence
  Description of Artificial Sequence: Synthetic oligonucleotide
acugaaagacuucccacac

SEQ ID NO: 2434811 - RNA, 19 nt, Artificial Sequence
  Description of Artificial Sequence: Synthetic oligonucleotide
uauaugguuucucucccag

SEQ ID NO: 2434812 - RNA, 19 nt, Artificial Sequence
  Description of Artificial Sequence: Synthetic oligonucleotide
guugacaccagacauuccc

SEQ ID NO: 2434813 - RNA, 19 nt, Artificial Sequence
  Description of Artificial Sequence: Synthetic oligonucleotide
uucaugacuguaacaauca

SEQ ID NO: 2434814 - RNA, 19 nt, Artificial Sequence
  Description of Artificial Sequence: Synthetic oligonucleotide
uucacugugaguucuuuca

SEQ ID NO: 2434815 - RNA, 19 nt, Artificial Sequence
  Description of Artificial Sequence: Synthetic oligonucleotide
acugaauagcuucccacac

SEQ ID NO: 2434816 - RNA, 19 nt, Artificial Sequence
  Description of Artificial Sequence: Synthetic oligonucleotide
acacugccuacauacauac

SEQ ID NO: 2434817 - RNA, 19 nt, Artificial Sequence
  Description of Artificial Sequence: Synthetic oligonucleotide
aguucccugacugaaagac

SEQ ID NO: 2434818 - RNA, 19 nt, Artificial Sequence
  Description of Artificial Sequence: Synthetic oligonucleotide
aacugaauagcuucccaca

SEQ ID NO: 2434819 - RNA, 19 nt, Artificial Sequence
  Description of Artificial Sequence: Synthetic oligonucleotide
aaaaggucucucuccagug

SEQ ID NO: 2434820 - RNA, 19 nt, Artificial Sequence
  Description of Artificial Sequence: Synthetic oligonucleotide
acugugagaucuuucaugu

SEQ ID NO: 2434821 - RNA, 19 nt, Artificial Sequence
  Description of Artificial Sequence: Synthetic oligonucleotide
uuucaaagaaguucccuga

SEQ ID NO: 2434822 - RNA, 19 nt, Artificial Sequence
  Description of Artificial Sequence: Synthetic oligonucleotide
uauauaggguuuucucccg

SEQ ID NO: 2434823 - RNA, 19 nt, Artificial Sequence
  Description of Artificial Sequence: Synthetic oligonucleotide
uggaugagaaguuggcagg

SEQ ID NO: 2434824 - RNA, 19 nt, Artificial Sequence
  Description of Artificial Sequence: Synthetic oligonucleotide
auaauaacaagcacuggag

SEQ ID NO: 2434825 - RNA, 19 nt, Artificial Sequence
  Description of Artificial Sequence: Synthetic oligonucleotide
ugugaauucguucgugucu

SEQ ID NO: 2434826 - RNA, 19 nt, Artificial Sequence
  Description of Artificial Sequence: Synthetic oligonucleotide
gaaguucccugacugaaag

SEQ ID NO: 2434827 - RNA, 19 nt, Artificial Sequence
  Description of Artificial Sequence: Synthetic oligonucleotide
acuguaacaaucaucacgu

SEQ ID NO: 2434828 - RNA, 19 nt, Artificial Sequence
  Description of Artificial Sequence: Synthetic oligonucleotide
caaagaaguucccugacug

SEQ ID NO: 2434829 - RNA, 19 nt, Artificial Sequence
  Description of Artificial Sequence: Synthetic oligonucleotide
uaauaacaagcacuggagu

SEQ ID NO: 2434830 - RNA, 19 nt, Artificial Sequence
  Description of Artificial Sequence: Synthetic oligonucleotide
gaacauuuaaaugcuuucc

SEQ ID NO: 2434831 - RNA, 19 nt, Artificial Sequence
  Description of Artificial Sequence: Synthetic oligonucleotide
augauaauaacaagcacug

SEQ ID NO: 2434832 - RNA, 19 nt, Artificial Sequence
  Description of Artificial Sequence: Synthetic oligonucleotide
aaaggugaacguuuuccca

SEQ ID NO: 2434833 - RNA, 19 nt, Artificial Sequence
  Description of Artificial Sequence: Synthetic oligonucleotide
acaagcauacgguuucacg

SEQ ID NO: 2434834 - RNA, 19 nt, Artificial Sequence
  Description of Artificial Sequence: Synthetic oligonucleotide
cuuucaugauaauaacaag

SEQ ID NO: 2434835 - RNA, 19 nt, Artificial Sequence
  Description of Artificial Sequence: Synthetic oligonucleotide
acauuguuuacaagcauac

SEQ ID NO: 2434836 - RNA, 19 nt, Artificial Sequence
  Description of Artificial Sequence: Synthetic oligonucleotide
ucaugauaauaacaagcac

SEQ ID NO: 2434837 - RNA, 19 nt, Artificial Sequence
  Description of Artificial Sequence: Synthetic oligonucleotide
aacguuuucccacauugaa

SEQ ID NO: 2434838 - RNA, 19 nt, Artificial Sequence
  Description of Artificial Sequence: Synthetic oligonucleotide
uccaguggcauaagcaaag

SEQ ID NO: 2434839 - RNA, 19 nt, Artificial Sequence
  Description of Artificial Sequence: Synthetic oligonucleotide
uaggcagaacauuuaaaug

SEQ ID NO: 2434840 - RNA, 19 nt, Artificial Sequence
  Description of Artificial Sequence: Synthetic oligonucleotide
uuucaugcuugugacaucc

SEQ ID NO: 2434841 - RNA, 19 nt, Artificial Sequence
  Description of Artificial Sequence: Synthetic oligonucleotide
ugguagaauauuauccacu

SEQ ID NO: 2434842 - RNA, 19 nt, Artificial Sequence
  Description of Artificial Sequence: Synthetic oligonucleotide
augagaaguuggcaggaac

SEQ ID NO: 2434843 - RNA, 19 nt, Artificial Sequence
  Description of Artificial Sequence: Synthetic oligonucleotide
auaacaagcacuggaguag

SEQ ID NO: 2434844 - RNA, 19 nt, Artificial Sequence
  Description of Artificial Sequence: Synthetic oligonucleotide
uuacauugguagaauauua

SEQ ID NO: 2434845 - RNA, 19 nt, Artificial Sequence
  Description of Artificial Sequence: Synthetic oligonucleotide
ugagaucuuuucauguaug

SEQ ID NO: 2434846 - RNA, 19 nt, Artificial Sequence
  Description of Artificial Sequence: Synthetic oligonucleotide
caugauaauaacaagcacu

SEQ ID NO: 2434847 - RNA, 19 nt, Artificial Sequence
  Description of Artificial Sequence: Synthetic oligonucleotide
ucauggaugagaaguuggc

SEQ ID NO: 2434848 - RNA, 19 nt, Artificial Sequence
  Description of Artificial Sequence: Synthetic oligonucleotide
augcuugugacauccagug

SEQ ID NO: 2434849 - RNA, 19 nt, Artificial Sequence
  Description of Artificial Sequence: Synthetic oligonucleotide
ucaugcuugugacauccag

SEQ ID NO: 2434850 - RNA, 19 nt, Artificial Sequence
  Description of Artificial Sequence: Synthetic oligonucleotide
aaagaaguucccugacuga

SEQ ID NO: 2434851 - RNA, 19 nt, Artificial Sequence
  Description of Artificial Sequence: Synthetic oligonucleotide
gaaguuggcaggaacgaag

SEQ ID NO: 2434852 - RNA, 19 nt, Artificial Sequence
  Description of Artificial Sequence: Synthetic oligonucleotide
cauacaaaaggucucucuc

SEQ ID NO: 2434853 - RNA, 19 nt, Artificial Sequence
  Description of Artificial Sequence: Synthetic oligonucleotide
ccaugauuuacauugguag

SEQ ID NO: 2434854 - RNA, 19 nt, Artificial Sequence
  Description of Artificial Sequence: Synthetic oligonucleotide
auauuauccacugaguuuu

SEQ ID NO: 2434855 - RNA, 19 nt, Artificial Sequence
  Description of Artificial Sequence: Synthetic oligonucleotide
auuuggaaaaggugaacgu

SEQ ID NO: 2434856 - RNA, 19 nt, Artificial Sequence
  Description of Artificial Sequence: Synthetic oligonucleotide
ucuauguauuugaagggau

SEQ ID NO: 2434857 - RNA, 19 nt, Artificial Sequence
  Description of Artificial Sequence: Synthetic oligonucleotide
ucaucacguuggaugaagg

SEQ ID NO: 2434858 - RNA, 19 nt, Artificial Sequence
  Description of Artificial Sequence: Synthetic oligonucleotide
ucuuucaugcuugugacau

SEQ ID NO: 2434859 - RNA, 19 nt, Artificial Sequence
  Description of Artificial Sequence: Synthetic oligonucleotide
ugaacacacauauaugguu

SEQ ID NO: 2434860 - RNA, 19 nt, Artificial Sequence
  Description of Artificial Sequence: Synthetic oligonucleotide
uucaugucugagaagguau

SEQ ID NO: 2434861 - RNA, 19 nt, Artificial Sequence
  Description of Artificial Sequence: Synthetic oligonucleotide
gguagaauauuauccacug

SEQ ID NO: 2434862 - RNA, 19 nt, Artificial Sequence
  Description of Artificial Sequence: Synthetic oligonucleotide
ucaaagaaguucccugacu

SEQ ID NO: 2434863 - RNA, 19 nt, Artificial Sequence
  Description of Artificial Sequence: Synthetic oligonucleotide
uacauugguagaauauuau

SEQ ID NO: 2434864 - RNA, 19 nt, Artificial Sequence
  Description of Artificial Sequence: Synthetic oligonucleotide
uucauguaugugaagggau

SEQ ID NO: 2434865 - RNA, 19 nt, Artificial Sequence
  Description of Artificial Sequence: Synthetic oligonucleotide
uucuauguauuugaaggga

SEQ ID NO: 2434866 - RNA, 19 nt, Artificial Sequence
  Description of Artificial Sequence: Synthetic oligonucleotide
agacauucccaugauuuac

SEQ ID NO: 2434867 - RNA, 19 nt, Artificial Sequence
  Description of Artificial Sequence: Synthetic oligonucleotide
uuggaaaaggugaacguuu

SEQ ID NO: 2434868 - RNA, 19 nt, Artificial Sequence
  Description of Artificial Sequence: Synthetic oligonucleotide
uuucauguaugugaaggga

SEQ ID NO: 2434869 - RNA, 19 nt, Artificial Sequence
  Description of Artificial Sequence: Synthetic oligonucleotide
cauugaacacacauauaug

SEQ ID NO: 2434870 - RNA, 19 nt, Artificial Sequence
  Description of Artificial Sequence: Synthetic oligonucleotide
uuuacauugguagaauauu

SEQ ID NO: 2434871 - RNA, 19 nt, Artificial Sequence
  Description of Artificial Sequence: Synthetic oligonucleotide
uucgugucuuuucaaagaa

SEQ ID NO: 2434872 - RNA, 19 nt, Artificial Sequence
  Description of Artificial Sequence: Synthetic oligonucleotide
caugacuguaacaaucauc

SEQ ID NO: 2434873 - RNA, 19 nt, Artificial Sequence
  Description of Artificial Sequence: Synthetic oligonucleotide
ucauguaugugaagggauc

SEQ ID NO: 2434874 - RNA, 19 nt, Artificial Sequence
  Description of Artificial Sequence: Synthetic oligonucleotide
acugugagaucuuuucaug

SEQ ID NO: 2434875 - RNA, 19 nt, Artificial Sequence
  Description of Artificial Sequence: Synthetic oligonucleotide
acauugcuuacaaacacag

SEQ ID NO: 2434876 - RNA, 19 nt, Artificial Sequence
  Description of Artificial Sequence: Synthetic oligonucleotide
uugguagaauauuauccac

SEQ ID NO: 2434877 - RNA, 19 nt, Artificial Sequence
  Description of Artificial Sequence: Synthetic oligonucleotide
aagggauuuggaaaaggug

SEQ ID NO: 2434878 - RNA, 19 nt, Artificial Sequence
  Description of Artificial Sequence: Synthetic oligonucleotide
ucccacauugaacacacau

SEQ ID NO: 2434879 - RNA, 19 nt, Artificial Sequence
  Description of Artificial Sequence: Synthetic oligonucleotide
ucuggggaaacugaauagc

SEQ ID NO: 2434880 - RNA, 19 nt, Artificial Sequence
  Description of Artificial Sequence: Synthetic oligonucleotide
aucuggggaaacugaauag

SEQ ID NO: 2434881 - RNA, 19 nt, Artificial Sequence
  Description of Artificial Sequence: Synthetic oligonucleotide
uucaaagaaguucccugac

SEQ ID NO: 2434882 - RNA, 19 nt, Artificial Sequence
  Description of Artificial Sequence: Synthetic oligonucleotide
ugauaauaacaagcacugg

SEQ ID NO: 2434883 - RNA, 19 nt, Artificial Sequence
  Description of Artificial Sequence: Synthetic oligonucleotide
acagguaaaugcuuuccca

SEQ ID NO: 2434884 - RNA, 19 nt, Artificial Sequence
  Description of Artificial Sequence: Synthetic oligonucleotide
ucaugucugagaagguaug

SEQ ID NO: 2434885 - RNA, 19 nt, Artificial Sequence
  Description of Artificial Sequence: Synthetic oligonucleotide
augugaagggaucugggga

SEQ ID NO: 2434886 - RNA, 19 nt, Artificial Sequence
  Description of Artificial Sequence: Synthetic oligonucleotide
uacgguuucacgccagugu

SEQ ID NO: 2434887 - RNA, 19 nt, Artificial Sequence
  Description of Artificial Sequence: Synthetic oligonucleotide
acaccagacauucccauga

SEQ ID NO: 2434888 - RNA, 19 nt, Artificial Sequence
  Description of Artificial Sequence: Synthetic oligonucleotide
aagaaaggcuuucccacau

SEQ ID NO: 2434889 - RNA, 19 nt, Artificial Sequence
  Description of Artificial Sequence: Synthetic oligonucleotide
gugaguucguucaugacug

SEQ ID NO: 2434890 - RNA, 19 nt, Artificial Sequence
  Description of Artificial Sequence: Synthetic oligonucleotide
uccacugugagaucuuuuc

SEQ ID NO: 2434891 - RNA, 19 nt, Artificial Sequence
  Description of Artificial Sequence: Synthetic oligonucleotide
gcuugugacauccaguggc

SEQ ID NO: 2434892 - RNA, 19 nt, Artificial Sequence
  Description of Artificial Sequence: Synthetic oligonucleotide
acgaagaaaggcuuuccca

SEQ ID NO: 2434893 - RNA, 19 nt, Artificial Sequence
  Description of Artificial Sequence: Synthetic oligonucleotide
uaacaagcacuggaguagg

SEQ ID NO: 2434894 - RNA, 19 nt, Artificial Sequence
  Description of Artificial Sequence: Synthetic oligonucleotide
ugagaucuuucauguaugu

SEQ ID NO: 2434895 - RNA, 19 nt, Artificial Sequence
  Description of Artificial Sequence: Synthetic oligonucleotide
uucccaugauuuacauugg

SEQ ID NO: 2434896 - RNA, 19 nt, Artificial Sequence
  Description of Artificial Sequence: Synthetic oligonucleotide
cacugugagaucuuucaug

SEQ ID NO: 2434897 - RNA, 19 nt, Artificial Sequence
  Description of Artificial Sequence: Synthetic oligonucleotide
ucgugucuuuucaaagaag

SEQ ID NO: 2434898 - RNA, 19 nt, Artificial Sequence
  Description of Artificial Sequence: Synthetic oligonucleotide
uauguauuugaagggauuu

SEQ ID NO: 2434899 - RNA, 19 nt, Artificial Sequence
  Description of Artificial Sequence: Synthetic oligonucleotide
cagguaaaugcuuucccac

SEQ ID NO: 2434900 - RNA, 19 nt, Artificial Sequence
  Description of Artificial Sequence: Synthetic oligonucleotide
uucccugacugaaagacuu

SEQ ID NO: 2434901 - RNA, 19 nt, Artificial Sequence
  Description of Artificial Sequence: Synthetic oligonucleotide
gaacagguaaaugcuuucc

SEQ ID NO: 2434902 - RNA, 19 nt, Artificial Sequence
  Description of Artificial Sequence: Synthetic oligonucleotide
cauugcuuacaaacacagg

SEQ ID NO: 2434903 - RNA, 19 nt, Artificial Sequence
  Description of Artificial Sequence: Synthetic oligonucleotide
uacauauauaggguuuucu

SEQ ID NO: 2434904 - RNA, 19 nt, Artificial Sequence
  Description of Artificial Sequence: Synthetic oligonucleotide
ucacguuggaugaaggcuu

SEQ ID NO: 2434905 - RNA, 19 nt, Artificial Sequence
  Description of Artificial Sequence: Synthetic oligonucleotide
gaauauuauccacugaguu

SEQ ID NO: 2434906 - RNA, 19 nt, Artificial Sequence
  Description of Artificial Sequence: Synthetic oligonucleotide
gaaacugaauagcuuccca

SEQ ID NO: 2434907 - RNA, 19 nt, Artificial Sequence
  Description of Artificial Sequence: Synthetic oligonucleotide
uuucacgccagugugaguu

SEQ ID NO: 2434908 - RNA, 19 nt, Artificial Sequence
  Description of Artificial Sequence: Synthetic oligonucleotide
aagaaguucccugacugaa

SEQ ID NO: 2434909 - RNA, 19 nt, Artificial Sequence
  Description of Artificial Sequence: Synthetic oligonucleotide
caugauuuacauugguaga

SEQ ID NO: 2434910 - RNA, 19 nt, Artificial Sequence
  Description of Artificial Sequence: Synthetic oligonucleotide
uguuuacaagcauacgguu

SEQ ID NO: 2434911 - RNA, 19 nt, Artificial Sequence
  Description of Artificial Sequence: Synthetic oligonucleotide
ugcuugugacauccagugg

SEQ ID NO: 2434912 - RNA, 19 nt, Artificial Sequence
  Description of Artificial Sequence: Synthetic oligonucleotide
ucugagaagguauguggaa

SEQ ID NO: 2434913 - RNA, 19 nt, Artificial Sequence
  Description of Artificial Sequence: Synthetic oligonucleotide
auucguucgugucuuuuca

SEQ ID NO: 2434914 - RNA, 19 nt, Artificial Sequence
  Description of Artificial Sequence: Synthetic oligonucleotide
gaucuggggaaacugaaua

SEQ ID NO: 2434915 - RNA, 19 nt, Artificial Sequence
  Description of Artificial Sequence: Synthetic oligonucleotide
uagcuucccacacugcaca

SEQ ID NO: 2434916 - RNA, 19 nt, Artificial Sequence
  Description of Artificial Sequence: Synthetic oligonucleotide
uugacaccagacauuccca

SEQ ID NO: 2434917 - RNA, 19 nt, Artificial Sequence
  Description of Artificial Sequence: Synthetic oligonucleotide
ugugagaucuuuucaugua

SEQ ID NO: 2434918 - RNA, 19 nt, Artificial Sequence
  Description of Artificial Sequence: Synthetic oligonucleotide
acacugcacacacauauau

SEQ ID NO: 2434919 - RNA, 19 nt, Artificial Sequence
  Description of Artificial Sequence: Synthetic oligonucleotide
auuuacauugguagaauau

SEQ ID NO: 2434920 - RNA, 19 nt, Artificial Sequence
  Description of Artificial Sequence: Synthetic oligonucleotide
ugcacacacauauaugguu

SEQ ID NO: 2434921 - RNA, 19 nt, Artificial Sequence
  Description of Artificial Sequence: Synthetic oligonucleotide
augauuuacauugguagaa

SEQ ID NO: 2434922 - RNA, 19 nt, Artificial Sequence
  Description of Artificial Sequence: Synthetic oligonucleotide
uggaacagguaaaugcuuu

SEQ ID NO: 2434923 - RNA, 19 nt, Artificial Sequence
  Description of Artificial Sequence: Synthetic oligonucleotide
caucacguuggaugaaggc

SEQ ID NO: 2434924 - RNA, 19 nt, Artificial Sequence
  Description of Artificial Sequence: Synthetic oligonucleotide
guucaugacuguaacaauc

SEQ ID NO: 2434925 - RNA, 19 nt, Artificial Sequence
  Description of Artificial Sequence: Synthetic oligonucleotide
uauaggguuuucucccgug

SEQ ID NO: 2434926 - RNA, 19 nt, Artificial Sequence
  Description of Artificial Sequence: Synthetic oligonucleotide
aucacguuggaugaaggcu

SEQ ID NO: 2434927 - RNA, 19 nt, Artificial Sequence
  Description of Artificial Sequence: Synthetic oligonucleotide
caaucaucacguuggauga

SEQ ID NO: 2434928 - RNA, 19 nt, Artificial Sequence
  Description of Artificial Sequence: Synthetic oligonucleotide
acgguuucacgccagugug

SEQ ID NO: 2434929 - RNA, 19 nt, Artificial Sequence
  Description of Artificial Sequence: Synthetic oligonucleotide
ucccacacugcacacacau

SEQ ID NO: 2434930 - RNA, 19 nt, Artificial Sequence
  Description of Artificial Sequence: Synthetic oligonucleotide
aagggaucuggggaaacug

SEQ ID NO: 2434931 - RNA, 19 nt, Artificial Sequence
  Description of Artificial Sequence: Synthetic oligonucleotide
uuucauguaugugaaggua

SEQ ID NO: 2434932 - RNA, 19 nt, Artificial Sequence
  Description of Artificial Sequence: Synthetic oligonucleotide
gauuuacauugguagaaua

SEQ ID NO: 2434933 - RNA, 19 nt, Artificial Sequence
  Description of Artificial Sequence: Synthetic oligonucleotide
auguaugugaagguaggca

SEQ ID NO: 2434934 - RNA, 19 nt, Artificial Sequence
  Description of Artificial Sequence: Synthetic oligonucleotide
gacauccaguggcauaagc

SEQ ID NO: 2434935 - RNA, 19 nt, Artificial Sequence
  Description of Artificial Sequence: Synthetic oligonucleotide
agaucuuuucauguaugug

SEQ ID NO: 2434936 - RNA, 19 nt, Artificial Sequence
  Description of Artificial Sequence: Synthetic oligonucleotide
agaagguauguggaacagg

SEQ ID NO: 2434937 - RNA, 19 nt, Artificial Sequence
  Description of Artificial Sequence: Synthetic oligonucleotide
acguuuucccacauugaac

SEQ ID NO: 2434938 - RNA, 19 nt, Artificial Sequence
  Description of Artificial Sequence: Synthetic oligonucleotide
uaacaaucaucacguugga

SEQ ID NO: 2434939 - RNA, 19 nt, Artificial Sequence
  Description of Artificial Sequence: Synthetic oligonucleotide
cauuguuuacaagcauacg

SEQ ID NO: 2434940 - RNA, 19 nt, Artificial Sequence
  Description of Artificial Sequence: Synthetic oligonucleotide
agaauauuauccacugagu

SEQ ID NO: 2434941 - RNA, 19 nt, Artificial Sequence
  Description of Artificial Sequence: Synthetic oligonucleotide
gaagguauguggaacaggu

SEQ ID NO: 2434942 - RNA, 19 nt, Artificial Sequence
  Description of Artificial Sequence: Synthetic oligonucleotide
guaggcagaacauuuaaau

SEQ ID NO: 2434943 - RNA, 19 nt, Artificial Sequence
  Description of Artificial Sequence: Synthetic oligonucleotide
auagcuucccacacugcac

SEQ ID NO: 2434944 - RNA, 19 nt, Artificial Sequence
  Description of Artificial Sequence: Synthetic oligonucleotide
guucgugucuuuucaaaga

SEQ ID NO: 2434945 - RNA, 19 nt, Artificial Sequence
  Description of Artificial Sequence: Synthetic oligonucleotide
caagcacuggaguagguga

SEQ ID NO: 2434946 - RNA, 19 nt, Artificial Sequence
  Description of Artificial Sequence: Synthetic oligonucleotide
aucaucacguuggaugaag

SEQ ID NO: 2434947 - RNA, 19 nt, Artificial Sequence
  Description of Artificial Sequence: Synthetic oligonucleotide
guucguucaugacuguaac

SEQ ID NO: 2434948 - RNA, 19 nt, Artificial Sequence
  Description of Artificial Sequence: Synthetic oligonucleotide
uuucaugucugagaaggua

SEQ ID NO: 2434949 - RNA, 19 nt, Artificial Sequence
  Description of Artificial Sequence: Synthetic oligonucleotide
ggggaaacugaauagcuuc

SEQ ID NO: 2434950 - RNA, 19 nt, Artificial Sequence
  Description of Artificial Sequence: Synthetic oligonucleotide
gagaagguauguggaacag

SEQ ID NO: 2434951 - RNA, 19 nt, Artificial Sequence
  Description of Artificial Sequence: Synthetic oligonucleotide
aaaguugacaccagacauu

SEQ ID NO: 2434952 - RNA, 19 nt, Artificial Sequence
  Description of Artificial Sequence: Synthetic oligonucleotide
aaguuggcaggaacgaaga

SEQ ID NO: 2434953 - RNA, 19 nt, Artificial Sequence
  Description of Artificial Sequence: Synthetic oligonucleotide
gacaccagacauucccaug

SEQ ID NO: 2434954 - RNA, 19 nt, Artificial Sequence
  Description of Artificial Sequence: Synthetic oligonucleotide
uggaaaaggugaacguuuu

SEQ ID NO: 2434955 - RNA, 19 nt, Artificial Sequence
  Description of Artificial Sequence: Synthetic oligonucleotide
cugagaagguauguggaac

SEQ ID NO: 2434956 - RNA, 19 nt, Artificial Sequence
  Description of Artificial Sequence: Synthetic oligonucleotide
ugauuuacauugguagaau

SEQ ID NO: 2434957 - RNA, 19 nt, Artificial Sequence
  Description of Artificial Sequence: Synthetic oligonucleotide
ucccaugauuuacauuggu

SEQ ID NO: 2434958 - RNA, 19 nt, Artificial Sequence
  Description of Artificial Sequence: Synthetic oligonucleotide
gaucuuucauguaugugaa

SEQ ID NO: 2434959 - RNA, 19 nt, Artificial Sequence
  Description of Artificial Sequence: Synthetic oligonucleotide
gagaucuuucauguaugug

SEQ ID NO: 2434960 - RNA, 19 nt, Artificial Sequence
  Description of Artificial Sequence: Synthetic oligonucleotide
ucaugacuguaacaaucau

SEQ ID NO: 2434961 - RNA, 19 nt, Artificial Sequence
  Description of Artificial Sequence: Synthetic oligonucleotide
gaacgaagaaaggcuuucc

SEQ ID NO: 2434962 - RNA, 19 nt, Artificial Sequence
  Description of Artificial Sequence: Synthetic oligonucleotide
auguauuugaagggauuug

SEQ ID NO: 2434963 - RNA, 19 nt, Artificial Sequence
  Description of Artificial Sequence: Synthetic oligonucleotide
uugaagggauuuggaaaag

SEQ ID NO: 2434964 - RNA, 19 nt, Artificial Sequence
  Description of Artificial Sequence: Synthetic oligonucleotide
acauccaguggcauaagca

SEQ ID NO: 2434965 - RNA, 19 nt, Artificial Sequence
  Description of Artificial Sequence: Synthetic oligonucleotide
aaguucccugacugaaaga

SEQ ID NO: 2434966 - RNA, 19 nt, Artificial Sequence
  Description of Artificial Sequence: Synthetic oligonucleotide
cauguaugugaagguaggc

SEQ ID NO: 2434967 - RNA, 19 nt, Artificial Sequence
  Description of Artificial Sequence: Synthetic oligonucleotide
ggcaggaacgaagaaaggc

SEQ ID NO: 2434968 - RNA, 19 nt, Artificial Sequence
  Description of Artificial Sequence: Synthetic oligonucleotide
cagaguggauucuuucaug

SEQ ID NO: 2434969 - RNA, 19 nt, Artificial Sequence
  Description of Artificial Sequence: Synthetic oligonucleotide
cauccaguggcauaagcaa

SEQ ID NO: 2434970 - RNA, 19 nt, Artificial Sequence
  Description of Artificial Sequence: Synthetic oligonucleotide
caguggcauaagcaaaggc

SEQ ID NO: 2434971 - RNA, 19 nt, Artificial Sequence
  Description of Artificial Sequence: Synthetic oligonucleotide
ucguucgugucuuuucaaa

SEQ ID NO: 2434972 - RNA, 19 nt, Artificial Sequence
  Description of Artificial Sequence: Synthetic oligonucleotide
aggguuuucucccguguga

SEQ ID NO: 2434973 - RNA, 19 nt, Artificial Sequence
  Description of Artificial Sequence: Synthetic oligonucleotide
gaguucuuucaugucugag

SEQ ID NO: 2434974 - RNA, 19 nt, Artificial Sequence
  Description of Artificial Sequence: Synthetic oligonucleotide
ugugacauccaguggcaua

SEQ ID NO: 2434975 - RNA, 19 nt, Artificial Sequence
  Description of Artificial Sequence: Synthetic oligonucleotide
ugaguucuuucaugucuga

SEQ ID NO: 2434976 - RNA, 19 nt, Artificial Sequence
  Description of Artificial Sequence: Synthetic oligonucleotide
agguaggcagaacauuuaa

SEQ ID NO: 2434977 - RNA, 19 nt, Artificial Sequence
  Description of Artificial Sequence: Synthetic oligonucleotide
guagaauauuauccacuga

SEQ ID NO: 2434978 - RNA, 19 nt, Artificial Sequence
  Description of Artificial Sequence: Synthetic oligonucleotide
gugagaucuuucauguaug

SEQ ID NO: 2434979 - RNA, 19 nt, Artificial Sequence
  Description of Artificial Sequence: Synthetic oligonucleotide
cacugcacacacauauaug

SEQ ID NO: 2434980 - RNA, 19 nt, Artificial Sequence
  Description of Artificial Sequence: Synthetic oligonucleotide
auauaggguuuucucccgu

SEQ ID NO: 2434981 - RNA, 19 nt, Artificial Sequence
  Description of Artificial Sequence: Synthetic oligonucleotide
uggggaaacugaauagcuu

SEQ ID NO: 2434982 - RNA, 19 nt, Artificial Sequence
  Description of Artificial Sequence: Synthetic oligonucleotide
cacacacauauaugguuuc

SEQ ID NO: 2434983 - RNA, 19 nt, Artificial Sequence
  Description of Artificial Sequence: Synthetic oligonucleotide
augucugagaagguaugug

SEQ ID NO: 2434984 - RNA, 19 nt, Artificial Sequence
  Description of Artificial Sequence: Synthetic oligonucleotide
auaugguuucucucccaga

SEQ ID NO: 2434985 - RNA, 19 nt, Artificial Sequence
  Description of Artificial Sequence: Synthetic oligonucleotide
uuacauauauaggguuuuc

SEQ ID NO: 2434986 - RNA, 19 nt, Artificial Sequence
  Description of Artificial Sequence: Synthetic oligonucleotide
gagaaguuggcaggaacga

SEQ ID NO: 2434987 - RNA, 19 nt, Artificial Sequence
  Description of Artificial Sequence: Synthetic oligonucleotide
gacauucccaugauuuaca

SEQ ID NO: 2434988 - RNA, 19 nt, Artificial Sequence
  Description of Artificial Sequence: Synthetic oligonucleotide
ugaagguaggcagaacauu

SEQ ID NO: 2434989 - RNA, 19 nt, Artificial Sequence
  Description of Artificial Sequence: Synthetic oligonucleotide
agcauacgguuucacgcca

SEQ ID NO: 2434990 - RNA, 19 nt, Artificial Sequence
  Description of Artificial Sequence: Synthetic oligonucleotide
ugacaccagacauucccau

SEQ ID NO: 2434991 - RNA, 19 nt, Artificial Sequence
  Description of Artificial Sequence: Synthetic oligonucleotide
aacaaucaucacguuggau

SEQ ID NO: 2434992 - RNA, 19 nt, Artificial Sequence
  Description of Artificial Sequence: Synthetic oligonucleotide
cuugugacauccaguggca

SEQ ID NO: 2434993 - RNA, 19 nt, Artificial Sequence
  Description of Artificial Sequence: Synthetic oligonucleotide
ugacuguaacaaucaucac

SEQ ID NO: 2434994 - RNA, 19 nt, Artificial Sequence
  Description of Artificial Sequence: Synthetic oligonucleotide
guuggcaggaacgaagaaa

SEQ ID NO: 2434995 - RNA, 19 nt, Artificial Sequence
  Description of Artificial Sequence: Synthetic oligonucleotide
guauuugaagggauuugga

SEQ ID NO: 2434996 - RNA, 19 nt, Artificial Sequence
  Description of Artificial Sequence: Synthetic oligonucleotide
aguucguucaugacuguaa

SEQ ID NO: 2434997 - RNA, 19 nt, Artificial Sequence
  Description of Artificial Sequence: Synthetic oligonucleotide
guuuucccacauugaacac

SEQ ID NO: 2434998 - RNA, 19 nt, Artificial Sequence
  Description of Artificial Sequence: Synthetic oligonucleotide
ugccuacauacauacgguu

SEQ ID NO: 2434999 - RNA, 19 nt, Artificial Sequence
  Description of Artificial Sequence: Synthetic oligonucleotide
gguuucacgccagugugag

SEQ ID NO: 2435000 - RNA, 19 nt, Artificial Sequence
  Description of Artificial Sequence: Synthetic oligonucleotide
uucguucgugucuuuucaa

SEQ ID NO: 2435001 - RNA, 19 nt, Artificial Sequence
  Description of Artificial Sequence: Synthetic oligonucleotide
uucaugcuugugacaucca

SEQ ID NO: 2435002 - RNA, 19 nt, Artificial Sequence
  Description of Artificial Sequence: Synthetic oligonucleotide
uuacaagcauacgguuuca

SEQ ID NO: 2435003 - RNA, 19 nt, Artificial Sequence
  Description of Artificial Sequence: Synthetic oligonucleotide
cguuuucccacauugaaca

SEQ ID NO: 2435004 - RNA, 19 nt, Artificial Sequence
  Description of Artificial Sequence: Synthetic oligonucleotide
auguaugugaagggaucug

SEQ ID NO: 2435005 - RNA, 19 nt, Artificial Sequence
  Description of Artificial Sequence: Synthetic oligonucleotide
aguugacaccagacauucc

SEQ ID NO: 2435006 - RNA, 19 nt, Artificial Sequence
  Description of Artificial Sequence: Synthetic oligonucleotide
gaauagcuucccacacugc

SEQ ID NO: 2435007 - RNA, 19 nt, Artificial Sequence
  Description of Artificial Sequence: Synthetic oligonucleotide
ucucucccagaguggauuc

SEQ ID NO: 2435008 - RNA, 19 nt, Artificial Sequence
  Description of Artificial Sequence: Synthetic oligonucleotide
gucugagaagguaugugga

SEQ ID NO: 2435009 - RNA, 19 nt, Artificial Sequence
  Description of Artificial Sequence: Synthetic oligonucleotide
gugacauccaguggcauaa

SEQ ID NO: 2435010 - RNA, 19 nt, Artificial Sequence
  Description of Artificial Sequence: Synthetic oligonucleotide
gaacacacauauaugguuu

SEQ ID NO: 2435011 - RNA, 19 nt, Artificial Sequence
  Description of Artificial Sequence: Synthetic oligonucleotide
ggaaacugaauagcuuccc

SEQ ID NO: 2435012 - RNA, 19 nt, Artificial Sequence
  Description of Artificial Sequence: Synthetic oligonucleotide
uucucucccagaguggauu

SEQ ID NO: 2435013 - RNA, 19 nt, Artificial Sequence
  Description of Artificial Sequence: Synthetic oligonucleotide
gaagguaggcagaacauuu

SEQ ID NO: 2435014 - RNA, 19 nt, Artificial Sequence
  Description of Artificial Sequence: Synthetic oligonucleotide
gaacguuuucccacauuga

SEQ ID NO: 2435015 - RNA, 19 nt, Artificial Sequence
  Description of Artificial Sequence: Synthetic oligonucleotide
guggcauaagcaaaggccu

SEQ ID NO: 2435016 - RNA, 19 nt, Artificial Sequence
  Description of Artificial Sequence: Synthetic oligonucleotide
aagacuucccacacugcuu

SEQ ID NO: 2435017 - RNA, 19 nt, Artificial Sequence
  Description of Artificial Sequence: Synthetic oligonucleotide
ggaacagguaaaugcuuuc

SEQ ID NO: 2435018 - RNA, 19 nt, Artificial Sequence
  Description of Artificial Sequence: Synthetic oligonucleotide
acacacauauaugguuucu

SEQ ID NO: 2435019 - RNA, 19 nt, Artificial Sequence
  Description of Artificial Sequence: Synthetic oligonucleotide
cuuucaugcuugugacauc

SEQ ID NO: 2435020 - RNA, 19 nt, Artificial Sequence
  Description of Artificial Sequence: Synthetic oligonucleotide
uacaagcauacgguuucac

SEQ ID NO: 2435021 - RNA, 19 nt, Artificial Sequence
  Description of Artificial Sequence: Synthetic oligonucleotide
cacugccuacauacauacg

SEQ ID NO: 2435022 - RNA, 19 nt, Artificial Sequence
  Description of Artificial Sequence: Synthetic oligonucleotide
uggcauaagcaaaggccuu

SEQ ID NO: 2435023 - RNA, 19 nt, Artificial Sequence
  Description of Artificial Sequence: Synthetic oligonucleotide
cauggaugagaaguuggca

SEQ ID NO: 2435024 - RNA, 19 nt, Artificial Sequence
  Description of Artificial Sequence: Synthetic oligonucleotide
aagguaggcagaacauuua

SEQ ID NO: 2435025 - RNA, 19 nt, Artificial Sequence
  Description of Artificial Sequence: Synthetic oligonucleotide
guaugugaagguaggcaga

SEQ ID NO: 2435026 - RNA, 19 nt, Artificial Sequence
  Description of Artificial Sequence: Synthetic oligonucleotide
gggaaacugaauagcuucc

SEQ ID NO: 2435027 - RNA, 19 nt, Artificial Sequence
  Description of Artificial Sequence: Synthetic oligonucleotide
aaucaucacguuggaugaa

SEQ ID NO: 2435028 - RNA, 19 nt, Artificial Sequence
  Description of Artificial Sequence: Synthetic oligonucleotide
uuuucucccgugugauuuu

SEQ ID NO: 2435029 - RNA, 19 nt, Artificial Sequence
  Description of Artificial Sequence: Synthetic oligonucleotide
caaaaggucucucuccagu

SEQ ID NO: 2435030 - RNA, 19 nt, Artificial Sequence
  Description of Artificial Sequence: Synthetic oligonucleotide
auacgguuucacgccagug

SEQ ID NO: 2435031 - RNA, 19 nt, Artificial Sequence
  Description of Artificial Sequence: Synthetic oligonucleotide
ugaguucguucaugacugu

SEQ ID NO: 2435032 - RNA, 19 nt, Artificial Sequence
  Description of Artificial Sequence: Synthetic oligonucleotide
cugugagaucuuuucaugu

SEQ ID NO: 2435033 - RNA, 19 nt, Artificial Sequence
  Description of Artificial Sequence: Synthetic oligonucleotide
aagcacuggaguaggugaa

SEQ ID NO: 2435034 - RNA, 19 nt, Artificial Sequence
  Description of Artificial Sequence: Synthetic oligonucleotide
uuucucucccagaguggau

SEQ ID NO: 2435035 - RNA, 19 nt, Artificial Sequence
  Description of Artificial Sequence: Synthetic oligonucleotide
ucccugacugaaagacuuc

SEQ ID NO: 2435036 - RNA, 19 nt, Artificial Sequence
  Description of Artificial Sequence: Synthetic oligonucleotide
aguuggcaggaacgaagaa

SEQ ID NO: 2435037 - RNA, 19 nt, Artificial Sequence
  Description of Artificial Sequence: Synthetic oligonucleotide
gugagaucuuuucauguau

SEQ ID NO: 2435038 - RNA, 19 nt, Artificial Sequence
  Description of Artificial Sequence: Synthetic oligonucleotide
cuggggaaacugaauagcu

SEQ ID NO: 2435039 - RNA, 19 nt, Artificial Sequence
  Description of Artificial Sequence: Synthetic oligonucleotide
agaaguuggcaggaacgaa

SEQ ID NO: 2435040 - RNA, 19 nt, Artificial Sequence
  Description of Artificial Sequence: Synthetic oligonucleotide
aacaagcacuggaguaggu

SEQ ID NO: 2435041 - RNA, 19 nt, Artificial Sequence
  Description of Artificial Sequence: Synthetic oligonucleotide
caugcuugugacauccagu

SEQ ID NO: 2435042 - RNA, 19 nt, Artificial Sequence
  Description of Artificial Sequence: Synthetic oligonucleotide
cguucgugucuuuucaaag

SEQ ID NO: 2435043 - RNA, 19 nt, Artificial Sequence
  Description of Artificial Sequence: Synthetic oligonucleotide
cuuuucaaagaaguucccu

SEQ ID NO: 2435044 - RNA, 19 nt, Artificial Sequence
  Description of Artificial Sequence: Synthetic oligonucleotide
cacacugccuacauacaua

SEQ ID NO: 2435045 - RNA, 19 nt, Artificial Sequence
  Description of Artificial Sequence: Synthetic oligonucleotide
ggaacgaagaaaggcuuuc

SEQ ID NO: 2435046 - RNA, 19 nt, Artificial Sequence
  Description of Artificial Sequence: Synthetic oligonucleotide
accagacauucccaugauu

SEQ ID NO: 2435047 - RNA, 19 nt, Artificial Sequence
  Description of Artificial Sequence: Synthetic oligonucleotide
gaguggauucuuucaugcu

SEQ ID NO: 2435048 - RNA, 19 nt, Artificial Sequence
  Description of Artificial Sequence: Synthetic oligonucleotide
ucacgccagugugaguucu

SEQ ID NO: 2435049 - RNA, 19 nt, Artificial Sequence
  Description of Artificial Sequence: Synthetic oligonucleotide
ggaaaaggugaacguuuuc

SEQ ID NO: 2435050 - RNA, 19 nt, Artificial Sequence
  Description of Artificial Sequence: Synthetic oligonucleotide
cagacauucccaugauuua

SEQ ID NO: 2435051 - RNA, 19 nt, Artificial Sequence
  Description of Artificial Sequence: Synthetic oligonucleotide
gaugagaaguuggcaggaa

SEQ ID NO: 2435052 - RNA, 19 nt, Artificial Sequence
  Description of Artificial Sequence: Synthetic oligonucleotide
uucacgccagugugaguuc

SEQ ID NO: 2435053 - RNA, 19 nt, Artificial Sequence
  Description of Artificial Sequence: Synthetic oligonucleotide
cuuucauggaugagaaguu

SEQ ID NO: 2435054 - RNA, 19 nt, Artificial Sequence
  Description of Artificial Sequence: Synthetic oligonucleotide
ugacauccaguggcauaag

SEQ ID NO: 2435055 - RNA, 19 nt, Artificial Sequence
  Description of Artificial Sequence: Synthetic oligonucleotide
cacugugagaucuuuucau

SEQ ID NO: 2435056 - RNA, 19 nt, Artificial Sequence
  Description of Artificial Sequence: Synthetic oligonucleotide
ggauuuggaaaaggugaac

SEQ ID NO: 2435057 - RNA, 19 nt, Artificial Sequence
  Description of Artificial Sequence: Synthetic oligonucleotide
uucuccacugugagaucuu

SEQ ID NO: 2435058 - RNA, 19 nt, Artificial Sequence
  Description of Artificial Sequence: Synthetic oligonucleotide
cuauguauuugaagggauu

SEQ ID NO: 2435059 - RNA, 19 nt, Artificial Sequence
  Description of Artificial Sequence: Synthetic oligonucleotide
agaaguucccugacugaaa

SEQ ID NO: 2435060 - RNA, 19 nt, Artificial Sequence
  Description of Artificial Sequence: Synthetic oligonucleotide
guuuacaagcauacgguuu

SEQ ID NO: 2435061 - RNA, 19 nt, Artificial Sequence
  Description of Artificial Sequence: Synthetic oligonucleotide
cauguaugugaagggaucu

SEQ ID NO: 2435062 - RNA, 19 nt, Artificial Sequence
  Description of Artificial Sequence: Synthetic oligonucleotide
auccaguggcauaagcaaa

SEQ ID NO: 2435063 - RNA, 19 nt, Artificial Sequence
  Description of Artificial Sequence: Synthetic oligonucleotide
ucucccagaguggauucuu

SEQ ID NO: 2435064 - RNA, 19 nt, Artificial Sequence
  Description of Artificial Sequence: Synthetic oligonucleotide
ccacauugaacacacauau

SEQ ID NO: 2435065 - RNA, 19 nt, Artificial Sequence
  Description of Artificial Sequence: Synthetic oligonucleotide
uucccacauugaacacaca

SEQ ID NO: 2435066 - RNA, 19 nt, Artificial Sequence
  Description of Artificial Sequence: Synthetic oligonucleotide
ugaauucguucgugucuuu

SEQ ID NO: 2435067 - RNA, 19 nt, Artificial Sequence
  Description of Artificial Sequence: Synthetic oligonucleotide
cugccuacauacauacggu

SEQ ID NO: 2435068 - RNA, 19 nt, Artificial Sequence
  Description of Artificial Sequence: Synthetic oligonucleotide
cccugacugaaagacuucc

SEQ ID NO: 2435069 - RNA, 19 nt, Artificial Sequence
  Description of Artificial Sequence: Synthetic oligonucleotide
gcaggaacgaagaaaggcu

SEQ ID NO: 2435070 - RNA, 19 nt, Artificial Sequence
  Description of Artificial Sequence: Synthetic oligonucleotide
ggcagaacauuuaaaugcu

SEQ ID NO: 2435071 - RNA, 19 nt, Artificial Sequence
  Description of Artificial Sequence: Synthetic oligonucleotide
cugaauagcuucccacacu

SEQ ID NO: 2435072 - RNA, 19 nt, Artificial Sequence
  Description of Artificial Sequence: Synthetic oligonucleotide
acguuggaugaaggcuuuc

SEQ ID NO: 2435073 - RNA, 19 nt, Artificial Sequence
  Description of Artificial Sequence: Synthetic oligonucleotide
uugugacauccaguggcau

SEQ ID NO: 2435074 - RNA, 19 nt, Artificial Sequence
  Description of Artificial Sequence: Synthetic oligonucleotide
gaagggaucuggggaaacu

SEQ ID NO: 2435075 - RNA, 19 nt, Artificial Sequence
  Description of Artificial Sequence: Synthetic oligonucleotide
gaguucguucaugacugua

SEQ ID NO: 2435076 - RNA, 19 nt, Artificial Sequence
  Description of Artificial Sequence: Synthetic oligonucleotide
cgugucuuuucaaagaagu

SEQ ID NO: 2435077 - RNA, 19 nt, Artificial Sequence
  Description of Artificial Sequence: Synthetic oligonucleotide
ggaugagaaguuggcagga

SEQ ID NO: 2435078 - RNA, 19 nt, Artificial Sequence
  Description of Artificial Sequence: Synthetic oligonucleotide
gguaggcagaacauuuaaa

SEQ ID NO: 2435079 - RNA, 19 nt, Artificial Sequence
  Description of Artificial Sequence: Synthetic oligonucleotide
cacacugcacacacauaua

SEQ ID NO: 2435080 - RNA, 19 nt, Artificial Sequence
  Description of Artificial Sequence: Synthetic oligonucleotide
ccaguggcauaagcaaagg

SEQ ID NO: 2435081 - RNA, 19 nt, Artificial Sequence
  Description of Artificial Sequence: Synthetic oligonucleotide
cccagaguggauucuuuca

SEQ ID NO: 2435082 - RNA, 19 nt, Artificial Sequence
  Description of Artificial Sequence: Synthetic oligonucleotide
cguuggaugaaggcuuucc

SEQ ID NO: 2435083 - RNA, 19 nt, Artificial Sequence
  Description of Artificial Sequence: Synthetic oligonucleotide
gugaauucguucgugucuu

SEQ ID NO: 2435084 - RNA, 19 nt, Artificial Sequence
  Description of Artificial Sequence: Synthetic oligonucleotide
aggcuuucccacacugccu

SEQ ID NO: 2435085 - RNA, 19 nt, Artificial Sequence
  Description of Artificial Sequence: Synthetic oligonucleotide
gugaagguaggcagaacau

SEQ ID NO: 2435086 - RNA, 19 nt, Artificial Sequence
  Description of Artificial Sequence: Synthetic oligonucleotide
caugucugagaagguaugu

SEQ ID NO: 2435087 - RNA, 19 nt, Artificial Sequence
  Description of Artificial Sequence: Synthetic oligonucleotide
cacgccagugugaguucuc

SEQ ID NO: 2435088 - RNA, 19 nt, Artificial Sequence
  Description of Artificial Sequence: Synthetic oligonucleotide
gaauucguucgugucuuuu

SEQ ID NO: 2435089 - RNA, 19 nt, Artificial Sequence
  Description of Artificial Sequence: Synthetic oligonucleotide
cccaugauuuacauuggua

SEQ ID NO: 2435090 - RNA, 19 nt, Artificial Sequence
  Description of Artificial Sequence: Synthetic oligonucleotide
gcauaagcaaaggccuuuc

SEQ ID NO: 2435091 - RNA, 19 nt, Artificial Sequence
  Description of Artificial Sequence: Synthetic oligonucleotide
gcauacgguuucacgccag

SEQ ID NO: 2435092 - RNA, 19 nt, Artificial Sequence
  Description of Artificial Sequence: Synthetic oligonucleotide
guucccugacugaaagacu

SEQ ID NO: 2435093 - RNA, 19 nt, Artificial Sequence
  Description of Artificial Sequence: Synthetic oligonucleotide
gugucuuuucaaagaaguu

SEQ ID NO: 2435094 - RNA, 19 nt, Artificial Sequence
  Description of Artificial Sequence: Synthetic oligonucleotide
cauacgguuucacgccagu

SEQ ID NO: 2435095 - RNA, 19 nt, Artificial Sequence
  Description of Artificial Sequence: Synthetic oligonucleotide
ccuacauacauacgguuuu

SEQ ID NO: 2435096 - RNA, 19 nt, Artificial Sequence
  Description of Artificial Sequence: Synthetic oligonucleotide
cauucccaugauuuacauu

SEQ ID NO: 2435097 - RNA, 19 nt, Artificial Sequence
  Description of Artificial Sequence: Synthetic oligonucleotide
gcacacacauauaugguuu

SEQ ID NO: 2435098 - RNA, 19 nt, Artificial Sequence
  Description of Artificial Sequence: Synthetic oligonucleotide
guggaacagguaaaugcuu

SEQ ID NO: 2435099 - RNA, 19 nt, Artificial Sequence
  Description of Artificial Sequence: Synthetic oligonucleotide
guuucacgccagugugagu

SEQ ID NO: 2435100 - RNA, 19 nt, Artificial Sequence
  Description of Artificial Sequence: Synthetic oligonucleotide
ccagaguggauucuuucau

SEQ ID NO: 2435101 - RNA, 19 nt, Artificial Sequence
  Description of Artificial Sequence: Synthetic oligonucleotide
gccuacauacauacgguuu

SEQ ID NO: 2435102 - RNA, 19 nt, Artificial Sequence
  Description of Artificial Sequence: Synthetic oligonucleotide
cacguuggaugaaggcuuu

SEQ ID NO: 2435103 - RNA, 19 nt, Artificial Sequence
  Description of Artificial Sequence: Synthetic oligonucleotide
ggugaacguuuucccacau

SEQ ID NO: 2435104 - RNA, 19 nt, Artificial Sequence
  Description of Artificial Sequence: Synthetic oligonucleotide
ggcauaagcaaaggccuuu

SEQ ID NO: 2435105 - RNA, 19 nt, Artificial Sequence
  Description of Artificial Sequence: Synthetic oligonucleotide
cuccacugugagaucuuuu

SEQ ID NO: 2435106 - RNA, 19 nt, Artificial Sequence
  Description of Artificial Sequence: Synthetic oligonucleotide
cuguaacaaucaucacguu

SEQ ID NO: 2435107 - RNA, 19 nt, Artificial Sequence
  Description of Artificial Sequence: Synthetic oligonucleotide
ggaucuggggaaacugaau

SEQ ID NO: 2435108 - RNA, 19 nt, Artificial Sequence
  Description of Artificial Sequence: Synthetic oligonucleotide
ggguuuucucccgugugau

SEQ ID NO: 2435109 - RNA, 19 nt, Artificial Sequence
  Description of Artificial Sequence: Synthetic oligonucleotide
caccagacauucccaugau

SEQ ID NO: 2435110 - RNA, 19 nt, Artificial Sequence
  Description of Artificial Sequence: Synthetic oligonucleotide
cucccagaguggauucuuu

SEQ ID NO: 2435111 - RNA, 19 nt, Artificial Sequence
  Description of Artificial Sequence: Synthetic oligonucleotide
gguuuucucccgugugauu

SEQ ID NO: 2435112 - RNA, 19 nt, Artificial Sequence
  Description of Artificial Sequence: Synthetic oligonucleotide
gcagaacauuuaaaugcuu

SEQ ID NO: 2435113 - RNA, 19 nt, Artificial Sequence
  Description of Artificial Sequence: Synthetic oligonucleotide
cucucccagaguggauucu

SEQ ID NO: 2435114 - RNA, 19 nt, Artificial Sequence
  Description of Artificial Sequence: Synthetic oligonucleotide
cgguuucacgccaguguga

SEQ ID NO: 2435115 - RNA, 19 nt, Artificial Sequence
  Description of Artificial Sequence: Synthetic oligonucleotide
cguucaugacuguaacaau

SEQ ID NO: 2435116 - RNA, 19 nt, Artificial Sequence
  Description of Artificial Sequence: Synthetic oligonucleotide
agucugacaacccagagcc

SEQ ID NO: 2435117 - RNA, 19 nt, Artificial Sequence
  Description of Artificial Sequence: Synthetic oligonucleotide
aacuaugcaagguagauug

SEQ ID NO: 2435118 - RNA, 19 nt, Artificial Sequence
  Description of Artificial Sequence: Synthetic oligonucleotide
aguauggauaucuacauag

SEQ ID NO: 2435119 - RNA, 19 nt, Artificial Sequence
  Description of Artificial Sequence: Synthetic oligonucleotide
agaacuugaggcuuggugg

SEQ ID NO: 2435120 - RNA, 19 nt, Artificial Sequence
  Description of Artificial Sequence: Synthetic oligonucleotide
uuagcuuccacuuugccug

SEQ ID NO: 2435121 - RNA, 19 nt, Artificial Sequence
  Description of Artificial Sequence: Synthetic oligonucleotide
ugagaaugugcacacaaag

SEQ ID NO: 2435122 - RNA, 19 nt, Artificial Sequence
  Description of Artificial Sequence: Synthetic oligonucleotide
ucgaaugaggccuugggcg

SEQ ID NO: 2435123 - RNA, 19 nt, Artificial Sequence
  Description of Artificial Sequence: Synthetic oligonucleotide
aacacucuuguuuucgggg

SEQ ID NO: 2435124 - RNA, 19 nt, Artificial Sequence
  Description of Artificial Sequence: Synthetic oligonucleotide
uggauaucuacauaggacu

SEQ ID NO: 2435125 - RNA, 19 nt, Artificial Sequence
  Description of Artificial Sequence: Synthetic oligonucleotide
aucuggcagaacuugaggc

SEQ ID NO: 2435126 - RNA, 19 nt, Artificial Sequence
  Description of Artificial Sequence: Synthetic oligonucleotide
agagauuccugucuguugg

SEQ ID NO: 2435127 - RNA, 19 nt, Artificial Sequence
  Description of Artificial Sequence: Synthetic oligonucleotide
aagaugauaagugagcagu

SEQ ID NO: 2435128 - RNA, 19 nt, Artificial Sequence
  Description of Artificial Sequence: Synthetic oligonucleotide
cuacauaggacucaggaac

SEQ ID NO: 2435129 - RNA, 19 nt, Artificial Sequence
  Description of Artificial Sequence: Synthetic oligonucleotide
agugaguagucugacaacc

SEQ ID NO: 2435130 - RNA, 19 nt, Artificial Sequence
  Description of Artificial Sequence: Synthetic oligonucleotide
aaagaugauaagugagcag

SEQ ID NO: 2435131 - RNA, 19 nt, Artificial Sequence
  Description of Artificial Sequence: Synthetic oligonucleotide
aacuacaggagccacuucu

SEQ ID NO: 2435132 - RNA, 19 nt, Artificial Sequence
  Description of Artificial Sequence: Synthetic oligonucleotide
uauggauaucuacauagga

SEQ ID NO: 2435133 - RNA, 19 nt, Artificial Sequence
  Description of Artificial Sequence: Synthetic oligonucleotide
aaugcggugggccaggcca

SEQ ID NO: 2435134 - RNA, 19 nt, Artificial Sequence
  Description of Artificial Sequence: Synthetic oligonucleotide
agugguaacuacaggagcc

SEQ ID NO: 2435135 - RNA, 19 nt, Artificial Sequence
  Description of Artificial Sequence: Synthetic oligonucleotide
ucagugguaacuacaggag

SEQ ID NO: 2435136 - RNA, 19 nt, Artificial Sequence
  Description of Artificial Sequence: Synthetic oligonucleotide
uuugccugcucgaaugagg

SEQ ID NO: 2435137 - RNA, 19 nt, Artificial Sequence
  Description of Artificial Sequence: Synthetic oligonucleotide
uaagugagcaguucugcag

SEQ ID NO: 2435138 - RNA, 19 nt, Artificial Sequence
  Description of Artificial Sequence: Synthetic oligonucleotide
gacucaggaaccucuaugc

SEQ ID NO: 2435139 - RNA, 19 nt, Artificial Sequence
  Description of Artificial Sequence: Synthetic oligonucleotide
ugcugaguuccuuagcccg

SEQ ID NO: 2435140 - RNA, 19 nt, Artificial Sequence
  Description of Artificial Sequence: Synthetic oligonucleotide
cuugcugaguuccuuagcc

SEQ ID NO: 2435141 - RNA, 19 nt, Artificial Sequence
  Description of Artificial Sequence: Synthetic oligonucleotide
auggauaucuacauaggac

SEQ ID NO: 2435142 - RNA, 19 nt, Artificial Sequence
  Description of Artificial Sequence: Synthetic oligonucleotide
agcgaacucagagacaccc

SEQ ID NO: 2435143 - RNA, 19 nt, Artificial Sequence
  Description of Artificial Sequence: Synthetic oligonucleotide
aagguagauugggagagac

SEQ ID NO: 2435144 - RNA, 19 nt, Artificial Sequence
  Description of Artificial Sequence: Synthetic oligonucleotide
cacgcagcuguucagaucc

SEQ ID NO: 2435145 - RNA, 19 nt, Artificial Sequence
  Description of Artificial Sequence: Synthetic oligonucleotide
auugggagagacucgcaac

SEQ ID NO: 2435146 - RNA, 19 nt, Artificial Sequence
  Description of Artificial Sequence: Synthetic oligonucleotide
ugauaagugagcaguucug

SEQ ID NO: 2435147 - RNA, 19 nt, Artificial Sequence
  Description of Artificial Sequence: Synthetic oligonucleotide
uccuccagcgaacucagag

SEQ ID NO: 2435148 - RNA, 19 nt, Artificial Sequence
  Description of Artificial Sequence: Synthetic oligonucleotide
aaugugcacacaaaggcca

SEQ ID NO: 2435149 - RNA, 19 nt, Artificial Sequence
  Description of Artificial Sequence: Synthetic oligonucleotide
uacauaggacucaggaacc

SEQ ID NO: 2435150 - RNA, 19 nt, Artificial Sequence
  Description of Artificial Sequence: Synthetic oligonucleotide
ucuguuggugcacuggcca

SEQ ID NO: 2435151 - RNA, 19 nt, Artificial Sequence
  Description of Artificial Sequence: Synthetic oligonucleotide
uaugcaagguagauuggga

SEQ ID NO: 2435152 - RNA, 19 nt, Artificial Sequence
  Description of Artificial Sequence: Synthetic oligonucleotide
ugaguagucugacaaccca

SEQ ID NO: 2435153 - RNA, 19 nt, Artificial Sequence
  Description of Artificial Sequence: Synthetic oligonucleotide
ucuguaggagcucagcguc

SEQ ID NO: 2435154 - RNA, 19 nt, Artificial Sequence
  Description of Artificial Sequence: Synthetic oligonucleotide
auucccagcaugguggccc

SEQ ID NO: 2435155 - RNA, 19 nt, Artificial Sequence
  Description of Artificial Sequence: Synthetic oligonucleotide
ggcaugcccaucuugaugg

SEQ ID NO: 2435156 - RNA, 19 nt, Artificial Sequence
  Description of Artificial Sequence: Synthetic oligonucleotide
agugacagagauuccuguc

SEQ ID NO: 2435157 - RNA, 19 nt, Artificial Sequence
  Description of Artificial Sequence: Synthetic oligonucleotide
agcaugguggccccgugcc

SEQ ID NO: 2435158 - RNA, 19 nt, Artificial Sequence
  Description of Artificial Sequence: Synthetic oligonucleotide
aguuccuuagcccggcagg

SEQ ID NO: 2435159 - RNA, 19 nt, Artificial Sequence
  Description of Artificial Sequence: Synthetic oligonucleotide
uagucugacaacccagagc

SEQ ID NO: 2435160 - RNA, 19 nt, Artificial Sequence
  Description of Artificial Sequence: Synthetic oligonucleotide
gauaagugagcaguucugc

SEQ ID NO: 2435161 - RNA, 19 nt, Artificial Sequence
  Description of Artificial Sequence: Synthetic oligonucleotide
ugaagugacagagauuccu

SEQ ID NO: 2435162 - RNA, 19 nt, Artificial Sequence
  Description of Artificial Sequence: Synthetic oligonucleotide
augcaagguagauugggag

SEQ ID NO: 2435163 - RNA, 19 nt, Artificial Sequence
  Description of Artificial Sequence: Synthetic oligonucleotide
ucuacauaggacucaggaa

SEQ ID NO: 2435164 - RNA, 19 nt, Artificial Sequence
  Description of Artificial Sequence: Synthetic oligonucleotide
gaaugugcacacaaaggcc

SEQ ID NO: 2435165 - RNA, 19 nt, Artificial Sequence
  Description of Artificial Sequence: Synthetic oligonucleotide
uugggagagacucgcaaca

SEQ ID NO: 2435166 - RNA, 19 nt, Artificial Sequence
  Description of Artificial Sequence: Synthetic oligonucleotide
cucagugguaacuacagga

SEQ ID NO: 2435167 - RNA, 19 nt, Artificial Sequence
  Description of Artificial Sequence: Synthetic oligonucleotide
gauuccugucuguuggugc

SEQ ID NO: 2435168 - RNA, 19 nt, Artificial Sequence
  Description of Artificial Sequence: Synthetic oligonucleotide
cacaucaguccgaagcugg

SEQ ID NO: 2435169 - RNA, 19 nt, Artificial Sequence
  Description of Artificial Sequence: Synthetic oligonucleotide
ugacagagauuccugucug

SEQ ID NO: 2435170 - RNA, 19 nt, Artificial Sequence
  Description of Artificial Sequence: Synthetic oligonucleotide
guggcaaagaugauaagug

SEQ ID NO: 2435171 - RNA, 19 nt, Artificial Sequence
  Description of Artificial Sequence: Synthetic oligonucleotide
ugcaagguagauugggaga

SEQ ID NO: 2435172 - RNA, 19 nt, Artificial Sequence
  Description of Artificial Sequence: Synthetic oligonucleotide
ugucuguuggugcacuggc

SEQ ID NO: 2435173 - RNA, 19 nt, Artificial Sequence
  Description of Artificial Sequence: Synthetic oligonucleotide
cuaugcaagguagauuggg

SEQ ID NO: 2435174 - RNA, 19 nt, Artificial Sequence
  Description of Artificial Sequence: Synthetic oligonucleotide
uccuuagcccggcagguag

SEQ ID NO: 2435175 - RNA, 19 nt, Artificial Sequence
  Description of Artificial Sequence: Synthetic oligonucleotide
uggcaaagaugauaaguga

SEQ ID NO: 2435176 - RNA, 19 nt, Artificial Sequence
  Description of Artificial Sequence: Synthetic oligonucleotide
ucuggcagaacuugaggcu

SEQ ID NO: 2435177 - RNA, 19 nt, Artificial Sequence
  Description of Artificial Sequence: Synthetic oligonucleotide
aaccucuaugcacugucca

SEQ ID NO: 2435178 - RNA, 19 nt, Artificial Sequence
  Description of Artificial Sequence: Synthetic oligonucleotide
accucuaugcacuguccac

SEQ ID NO: 2435179 - RNA, 19 nt, Artificial Sequence
  Description of Artificial Sequence: Synthetic oligonucleotide
agcuguucagauccugccg

SEQ ID NO: 2435180 - RNA, 19 nt, Artificial Sequence
  Description of Artificial Sequence: Synthetic oligonucleotide
ugagcaguucugcagcacu

SEQ ID NO: 2435181 - RNA, 19 nt, Artificial Sequence
  Description of Artificial Sequence: Synthetic oligonucleotide
uacaggagccacuucugcc

SEQ ID NO: 2435182 - RNA, 19 nt, Artificial Sequence
  Description of Artificial Sequence: Synthetic oligonucleotide
uagauugggagagacucgc

SEQ ID NO: 2435183 - RNA, 19 nt, Artificial Sequence
  Description of Artificial Sequence: Synthetic oligonucleotide
auaagugagcaguucugca

SEQ ID NO: 2435184 - RNA, 19 nt, Artificial Sequence
  Description of Artificial Sequence: Synthetic oligonucleotide
aucuugauggcaccuucag

SEQ ID NO: 2435185 - RNA, 19 nt, Artificial Sequence
  Description of Artificial Sequence: Synthetic oligonucleotide
ucugacaacccagagcccu

SEQ ID NO: 2435186 - RNA, 19 nt, Artificial Sequence
  Description of Artificial Sequence: Synthetic oligonucleotide
uucuugcugaguuccuuag

SEQ ID NO: 2435187 - RNA, 19 nt, Artificial Sequence
  Description of Artificial Sequence: Synthetic oligonucleotide
ucagcgucgucauucccag

SEQ ID NO: 2435188 - RNA, 19 nt, Artificial Sequence
  Description of Artificial Sequence: Synthetic oligonucleotide
aguccauggauggugguuc

SEQ ID NO: 2435189 - RNA, 19 nt, Artificial Sequence
  Description of Artificial Sequence: Synthetic oligonucleotide
guauggauaucuacauagg

SEQ ID NO: 2435190 - RNA, 19 nt, Artificial Sequence
  Description of Artificial Sequence: Synthetic oligonucleotide
ugaacuaugcaagguagau

SEQ ID NO: 2435191 - RNA, 19 nt, Artificial Sequence
  Description of Artificial Sequence: Synthetic oligonucleotide
agcgucgucauucccagca

SEQ ID NO: 2435192 - RNA, 19 nt, Artificial Sequence
  Description of Artificial Sequence: Synthetic oligonucleotide
uccugaacuaugcaaggua

SEQ ID NO: 2435193 - RNA, 19 nt, Artificial Sequence
  Description of Artificial Sequence: Synthetic oligonucleotide
acucgcaacacucuuguuu

SEQ ID NO: 2435194 - RNA, 19 nt, Artificial Sequence
  Description of Artificial Sequence: Synthetic oligonucleotide
acagacaccacgaugugcu

SEQ ID NO: 2435195 - RNA, 19 nt, Artificial Sequence
  Description of Artificial Sequence: Synthetic oligonucleotide
uggugugagcacaucaguc

SEQ ID NO: 2435196 - RNA, 19 nt, Artificial Sequence
  Description of Artificial Sequence: Synthetic oligonucleotide
gguagauugggagagacuc

SEQ ID NO: 2435197 - RNA, 19 nt, Artificial Sequence
  Description of Artificial Sequence: Synthetic oligonucleotide
caucuggcagaacuugagg

SEQ ID NO: 2435198 - RNA, 19 nt, Artificial Sequence
  Description of Artificial Sequence: Synthetic oligonucleotide
cucgaaugaggccuugggc

SEQ ID NO: 2435199 - RNA, 19 nt, Artificial Sequence
  Description of Artificial Sequence: Synthetic oligonucleotide
ugccagaacaucuggcaga

SEQ ID NO: 2435200 - RNA, 19 nt, Artificial Sequence
  Description of Artificial Sequence: Synthetic oligonucleotide
ucuaugcacuguccacagg

SEQ ID NO: 2435201 - RNA, 19 nt, Artificial Sequence
  Description of Artificial Sequence: Synthetic oligonucleotide
cuccagcgaacucagagac

SEQ ID NO: 2435202 - RNA, 19 nt, Artificial Sequence
  Description of Artificial Sequence: Synthetic oligonucleotide
aucaguccgaagcugggcu

SEQ ID NO: 2435203 - RNA, 19 nt, Artificial Sequence
  Description of Artificial Sequence: Synthetic oligonucleotide
cacuuugccugcucgaaug

SEQ ID NO: 2435204 - RNA, 19 nt, Artificial Sequence
  Description of Artificial Sequence: Synthetic oligonucleotide
gaacaucuggcagaacuug

SEQ ID NO: 2435205 - RNA, 19 nt, Artificial Sequence
  Description of Artificial Sequence: Synthetic oligonucleotide
agacucgcaacacucuugu

SEQ ID NO: 2435206 - RNA, 19 nt, Artificial Sequence
  Description of Artificial Sequence: Synthetic oligonucleotide
caucuuggcaguucccagc

SEQ ID NO: 2435207 - RNA, 19 nt, Artificial Sequence
  Description of Artificial Sequence: Synthetic oligonucleotide
uggauggugguuccagcug

SEQ ID NO: 2435208 - RNA, 19 nt, Artificial Sequence
  Description of Artificial Sequence: Synthetic oligonucleotide
auuccugucuguuggugca

SEQ ID NO: 2435209 - RNA, 19 nt, Artificial Sequence
  Description of Artificial Sequence: Synthetic oligonucleotide
cagcaaguucuguaggagc

SEQ ID NO: 2435210 - RNA, 19 nt, Artificial Sequence
  Description of Artificial Sequence: Synthetic oligonucleotide
agcucagcgucgucauucc

SEQ ID NO: 2435211 - RNA, 19 nt, Artificial Sequence
  Description of Artificial Sequence: Synthetic oligonucleotide
uggugcacuggccagcacu

SEQ ID NO: 2435212 - RNA, 19 nt, Artificial Sequence
  Description of Artificial Sequence: Synthetic oligonucleotide
cagugguaacuacaggagc

SEQ ID NO: 2435213 - RNA, 19 nt, Artificial Sequence
  Description of Artificial Sequence: Synthetic oligonucleotide
gaguagucugacaacccag

SEQ ID NO: 2435214 - RNA, 19 nt, Artificial Sequence
  Description of Artificial Sequence: Synthetic oligonucleotide
caaagaugauaagugagca

SEQ ID NO: 2435215 - RNA, 19 nt, Artificial Sequence
  Description of Artificial Sequence: Synthetic oligonucleotide
uugcugaguuccuuagccc

SEQ ID NO: 2435216 - RNA, 19 nt, Artificial Sequence
  Description of Artificial Sequence: Synthetic oligonucleotide
gucgucauucccagcaugg

SEQ ID NO: 2435217 - RNA, 19 nt, Artificial Sequence
  Description of Artificial Sequence: Synthetic oligonucleotide
gaugauaagugagcaguuc

SEQ ID NO: 2435218 - RNA, 19 nt, Artificial Sequence
  Description of Artificial Sequence: Synthetic oligonucleotide
cuucugccagaacaucugg

SEQ ID NO: 2435219 - RNA, 19 nt, Artificial Sequence
  Description of Artificial Sequence: Synthetic oligonucleotide
auggauggugguuccagcu

SEQ ID NO: 2435220 - RNA, 19 nt, Artificial Sequence
  Description of Artificial Sequence: Synthetic oligonucleotide
uccgaagcugggcugggug

SEQ ID NO: 2435221 - RNA, 19 nt, Artificial Sequence
  Description of Artificial Sequence: Synthetic oligonucleotide
cucuaugcacuguccacag

SEQ ID NO: 2435222 - RNA, 19 nt, Artificial Sequence
  Description of Artificial Sequence: Synthetic oligonucleotide
uggugguuccagcuggugu

SEQ ID NO: 2435223 - RNA, 19 nt, Artificial Sequence
  Description of Artificial Sequence: Synthetic oligonucleotide
gugaaguccauggauggug

SEQ ID NO: 2435224 - RNA, 19 nt, Artificial Sequence
  Description of Artificial Sequence: Synthetic oligonucleotide
gauugggagagacucgcaa

SEQ ID NO: 2435225 - RNA, 19 nt, Artificial Sequence
  Description of Artificial Sequence: Synthetic oligonucleotide
auggccuccgccaugcgac

SEQ ID NO: 2435226 - RNA, 19 nt, Artificial Sequence
  Description of Artificial Sequence: Synthetic oligonucleotide
ugugcucagugguaacuac

SEQ ID NO: 2435227 - RNA, 19 nt, Artificial Sequence
  Description of Artificial Sequence: Synthetic oligonucleotide
guagauugggagagacucg

SEQ ID NO: 2435228 - RNA, 19 nt, Artificial Sequence
  Description of Artificial Sequence: Synthetic oligonucleotide
acaacccagagcccugaag

SEQ ID NO: 2435229 - RNA, 19 nt, Artificial Sequence
  Description of Artificial Sequence: Synthetic oligonucleotide
cagguagccgcuuccacug

SEQ ID NO: 2435230 - RNA, 19 nt, Artificial Sequence
  Description of Artificial Sequence: Synthetic oligonucleotide
cacucauggcagcugcucg

SEQ ID NO: 2435231 - RNA, 19 nt, Artificial Sequence
  Description of Artificial Sequence: Synthetic oligonucleotide
uguucagauccugccgccg

SEQ ID NO: 2435232 - RNA, 19 nt, Artificial Sequence
  Description of Artificial Sequence: Synthetic oligonucleotide
agcaaguucuguaggagcu

SEQ ID NO: 2435233 - RNA, 19 nt, Artificial Sequence
  Description of Artificial Sequence: Synthetic oligonucleotide
augcccaucuugauggcac

SEQ ID NO: 2435234 - RNA, 19 nt, Artificial Sequence
  Description of Artificial Sequence: Synthetic oligonucleotide
gaguuccuuagcccggcag

SEQ ID NO: 2435235 - RNA, 19 nt, Artificial Sequence
  Description of Artificial Sequence: Synthetic oligonucleotide
ugcucuagggcgugaaguc

SEQ ID NO: 2435236 - RNA, 19 nt, Artificial Sequence
  Description of Artificial Sequence: Synthetic oligonucleotide
cagcuguucagauccugcc

SEQ ID NO: 2435237 - RNA, 19 nt, Artificial Sequence
  Description of Artificial Sequence: Synthetic oligonucleotide
uucagauccugccgccgcc

SEQ ID NO: 2435238 - RNA, 19 nt, Artificial Sequence
  Description of Artificial Sequence: Synthetic oligonucleotide
cuacaggagccacuucugc

SEQ ID NO: 2435239 - RNA, 19 nt, Artificial Sequence
  Description of Artificial Sequence: Synthetic oligonucleotide
cauggauggugguuccagc

SEQ ID NO: 2435240 - RNA, 19 nt, Artificial Sequence
  Description of Artificial Sequence: Synthetic oligonucleotide
gagugaguagucugacaac

SEQ ID NO: 2435241 - RNA, 19 nt, Artificial Sequence
  Description of Artificial Sequence: Synthetic oligonucleotide
ucauucccagcaugguggc

SEQ ID NO: 2435242 - RNA, 19 nt, Artificial Sequence
  Description of Artificial Sequence: Synthetic oligonucleotide
ugcacuguccacaggccuc

SEQ ID NO: 2435243 - RNA, 19 nt, Artificial Sequence
  Description of Artificial Sequence: Synthetic oligonucleotide
cagaacaucuggcagaacu

SEQ ID NO: 2435244 - RNA, 19 nt, Artificial Sequence
  Description of Artificial Sequence: Synthetic oligonucleotide
gcaagguagauugggagag

SEQ ID NO: 2435245 - RNA, 19 nt, Artificial Sequence
  Description of Artificial Sequence: Synthetic oligonucleotide
acucaggaaccucuaugca

SEQ ID NO: 2435246 - RNA, 19 nt, Artificial Sequence
  Description of Artificial Sequence: Synthetic oligonucleotide
ugcacacaaaggccacacc

SEQ ID NO: 2435247 - RNA, 19 nt, Artificial Sequence
  Description of Artificial Sequence: Synthetic oligonucleotide
uagcccggcagguagccgc

SEQ ID NO: 2435248 - RNA, 19 nt, Artificial Sequence
  Description of Artificial Sequence: Synthetic oligonucleotide
ucaguccgaagcugggcug

SEQ ID NO: 2435249 - RNA, 19 nt, Artificial Sequence
  Description of Artificial Sequence: Synthetic oligonucleotide
uaggagcucagcgucguca

SEQ ID NO: 2435250 - RNA, 19 nt, Artificial Sequence
  Description of Artificial Sequence: Synthetic oligonucleotide
gcuguucagauccugccgc

SEQ ID NO: 2435251 - RNA, 19 nt, Artificial Sequence
  Description of Artificial Sequence: Synthetic oligonucleotide
cuguaggagcucagcgucg

SEQ ID NO: 2435252 - RNA, 19 nt, Artificial Sequence
  Description of Artificial Sequence: Synthetic oligonucleotide
cauggcagcugcucgaaga

SEQ ID NO: 2435253 - RNA, 19 nt, Artificial Sequence
  Description of Artificial Sequence: Synthetic oligonucleotide
caaaggccacaccacugcc

SEQ ID NO: 2435254 - RNA, 19 nt, Artificial Sequence
  Description of Artificial Sequence: Synthetic oligonucleotide
ggcuugguggcaaagauga

SEQ ID NO: 2435255 - RNA, 19 nt, Artificial Sequence
  Description of Artificial Sequence: Synthetic oligonucleotide
cuuagcuuccacuuugccu

SEQ ID NO: 2435256 - RNA, 19 nt, Artificial Sequence
  Description of Artificial Sequence: Synthetic oligonucleotide
acugggcaugcccaucuug

SEQ ID NO: 2435257 - RNA, 19 nt, Artificial Sequence
  Description of Artificial Sequence: Synthetic oligonucleotide
agccgcuuccacugcacuc

SEQ ID NO: 2435258 - RNA, 19 nt, Artificial Sequence
  Description of Artificial Sequence: Synthetic oligonucleotide
cacgaagcccacacgcagc

SEQ ID NO: 2435259 - RNA, 19 nt, Artificial Sequence
  Description of Artificial Sequence: Synthetic oligonucleotide
uccgccaugcgaccugcgc

SEQ ID NO: 2435260 - RNA, 19 nt, Artificial Sequence
  Description of Artificial Sequence: Synthetic oligonucleotide
gcgugaaguccauggaugg

SEQ ID NO: 2435261 - RNA, 19 nt, Artificial Sequence
  Description of Artificial Sequence: Synthetic oligonucleotide
acucauggcagcugcucga

SEQ ID NO: 2435262 - RNA, 19 nt, Artificial Sequence
  Description of Artificial Sequence: Synthetic oligonucleotide
ggacucaggaaccucuaug

SEQ ID NO: 2435263 - RNA, 19 nt, Artificial Sequence
  Description of Artificial Sequence: Synthetic oligonucleotide
cugcacucauggcagcugc

SEQ ID NO: 2435264 - RNA, 19 nt, Artificial Sequence
  Description of Artificial Sequence: Synthetic oligonucleotide
agcaucuuggcaguuccca

SEQ ID NO: 2435265 - RNA, 19 nt, Artificial Sequence
  Description of Artificial Sequence: Synthetic oligonucleotide
gagacucgcaacacucuug

SEQ ID NO: 2435266 - RNA, 19 nt, Artificial Sequence
  Description of Artificial Sequence: Synthetic oligonucleotide
uggcagaacuugaggcuug

SEQ ID NO: 2435267 - RNA, 19 nt, Artificial Sequence
  Description of Artificial Sequence: Synthetic oligonucleotide
acuuugccugcucgaauga

SEQ ID NO: 2435268 - RNA, 19 nt, Artificial Sequence
  Description of Artificial Sequence: Synthetic oligonucleotide
gaaccucuaugcacugucc

SEQ ID NO: 2435269 - RNA, 19 nt, Artificial Sequence
  Description of Artificial Sequence: Synthetic oligonucleotide
acuuccugguuggagugag

SEQ ID NO: 2435270 - RNA, 19 nt, Artificial Sequence
  Description of Artificial Sequence: Synthetic oligonucleotide
aguagucugacaacccaga

SEQ ID NO: 2435271 - RNA, 19 nt, Artificial Sequence
  Description of Artificial Sequence: Synthetic oligonucleotide
acuaugcaagguagauugg

SEQ ID NO: 2435272 - RNA, 19 nt, Artificial Sequence
  Description of Artificial Sequence: Synthetic oligonucleotide
cuuggcaguucccagcaga

SEQ ID NO: 2435273 - RNA, 19 nt, Artificial Sequence
  Description of Artificial Sequence: Synthetic oligonucleotide
acgaagcccacacgcagcu

SEQ ID NO: 2435274 - RNA, 19 nt, Artificial Sequence
  Description of Artificial Sequence: Synthetic oligonucleotide
uuccacuuugccugcucga

SEQ ID NO: 2435275 - RNA, 19 nt, Artificial Sequence
  Description of Artificial Sequence: Synthetic oligonucleotide
cuguucagauccugccgcc

SEQ ID NO: 2435276 - RNA, 19 nt, Artificial Sequence
  Description of Artificial Sequence: Synthetic oligonucleotide
cucagcgucgucauuccca

SEQ ID NO: 2435277 - RNA, 19 nt, Artificial Sequence
  Description of Artificial Sequence: Synthetic oligonucleotide
guuggagugaguagucuga

SEQ ID NO: 2435278 - RNA, 19 nt, Artificial Sequence
  Description of Artificial Sequence: Synthetic oligonucleotide
ucauggcagcugcucgaag

SEQ ID NO: 2435279 - RNA, 19 nt, Artificial Sequence
  Description of Artificial Sequence: Synthetic oligonucleotide
gagcucagcgucgucauuc

SEQ ID NO: 2435280 - RNA, 19 nt, Artificial Sequence
  Description of Artificial Sequence: Synthetic oligonucleotide
uccagcuggugugagcaca

SEQ ID NO: 2435281 - RNA, 19 nt, Artificial Sequence
  Description of Artificial Sequence: Synthetic oligonucleotide
gaagcccacacgcagcugu

SEQ ID NO: 2435282 - RNA, 19 nt, Artificial Sequence
  Description of Artificial Sequence: Synthetic oligonucleotide
ggaaccucuaugcacuguc

SEQ ID NO: 2435283 - RNA, 19 nt, Artificial Sequence
  Description of Artificial Sequence: Synthetic oligonucleotide
uguaggagcucagcgucgu

SEQ ID NO: 2435284 - RNA, 19 nt, Artificial Sequence
  Description of Artificial Sequence: Synthetic oligonucleotide
cugucuguuggugcacugg

SEQ ID NO: 2435285 - RNA, 19 nt, Artificial Sequence
  Description of Artificial Sequence: Synthetic oligonucleotide
accugcgcccacgaagccc

SEQ ID NO: 2435286 - RNA, 19 nt, Artificial Sequence
  Description of Artificial Sequence: Synthetic oligonucleotide
cuguuggugcacuggccag

SEQ ID NO: 2435287 - RNA, 19 nt, Artificial Sequence
  Description of Artificial Sequence: Synthetic oligonucleotide
gugaguagucugacaaccc

SEQ ID NO: 2435288 - RNA, 19 nt, Artificial Sequence
  Description of Artificial Sequence: Synthetic oligonucleotide
uuggagugaguagucugac

SEQ ID NO: 2435289 - RNA, 19 nt, Artificial Sequence
  Description of Artificial Sequence: Synthetic oligonucleotide
cugaacuaugcaagguaga

SEQ ID NO: 2435290 - RNA, 19 nt, Artificial Sequence
  Description of Artificial Sequence: Synthetic oligonucleotide
ugggugcuucccuuccugc

SEQ ID NO: 2435291 - RNA, 19 nt, Artificial Sequence
  Description of Artificial Sequence: Synthetic oligonucleotide
agguagccgcuuccacugc

SEQ ID NO: 2435292 - RNA, 19 nt, Artificial Sequence
  Description of Artificial Sequence: Synthetic oligonucleotide
acuacaggagccacuucug

SEQ ID NO: 2435293 - RNA, 19 nt, Artificial Sequence
  Description of Artificial Sequence: Synthetic oligonucleotide
gaggccaguauggauaucu

SEQ ID NO: 2435294 - RNA, 19 nt, Artificial Sequence
  Description of Artificial Sequence: Synthetic oligonucleotide
cacagacaccacgaugugc

SEQ ID NO: 2435295 - RNA, 19 nt, Artificial Sequence
  Description of Artificial Sequence: Synthetic oligonucleotide
agauuccugucuguuggug

SEQ ID NO: 2435296 - RNA, 19 nt, Artificial Sequence
  Description of Artificial Sequence: Synthetic oligonucleotide
acaucaguccgaagcuggg

SEQ ID NO: 2435297 - RNA, 19 nt, Artificial Sequence
  Description of Artificial Sequence: Synthetic oligonucleotide
gauggccuccgccaugcga

SEQ ID NO: 2435298 - RNA, 19 nt, Artificial Sequence
  Description of Artificial Sequence: Synthetic oligonucleotide
aaguccauggauggugguu

SEQ ID NO: 2435299 - RNA, 19 nt, Artificial Sequence
  Description of Artificial Sequence: Synthetic oligonucleotide
ugagcacaucaguccgaag

SEQ ID NO: 2435300 - RNA, 19 nt, Artificial Sequence
  Description of Artificial Sequence: Synthetic oligonucleotide
ccagcgaacucagagacac

SEQ ID NO: 2435301 - RNA, 19 nt, Artificial Sequence
  Description of Artificial Sequence: Synthetic oligonucleotide
cucuagggcgugaagucca

SEQ ID NO: 2435302 - RNA, 19 nt, Artificial Sequence
  Description of Artificial Sequence: Synthetic oligonucleotide
aacuugaggcuugguggca

SEQ ID NO: 2435303 - RNA, 19 nt, Artificial Sequence
  Description of Artificial Sequence: Synthetic oligonucleotide
aaguucuguaggagcucag

SEQ ID NO: 2435304 - RNA, 19 nt, Artificial Sequence
  Description of Artificial Sequence: Synthetic oligonucleotide
gccaguauggauaucuaca

SEQ ID NO: 2435305 - RNA, 19 nt, Artificial Sequence
  Description of Artificial Sequence: Synthetic oligonucleotide
uccacuuugccugcucgaa

SEQ ID NO: 2435306 - RNA, 19 nt, Artificial Sequence
  Description of Artificial Sequence: Synthetic oligonucleotide
cuuagcccggcagguagcc

SEQ ID NO: 2435307 - RNA, 19 nt, Artificial Sequence
  Description of Artificial Sequence: Synthetic oligonucleotide
cuuugccugcucgaaugag

SEQ ID NO: 2435308 - RNA, 19 nt, Artificial Sequence
  Description of Artificial Sequence: Synthetic oligonucleotide
ugugcacacaaaggccaca

SEQ ID NO: 2435309 - RNA, 19 nt, Artificial Sequence
  Description of Artificial Sequence: Synthetic oligonucleotide
caccacgaugugcucagug

SEQ ID NO: 2435310 - RNA, 19 nt, Artificial Sequence
  Description of Artificial Sequence: Synthetic oligonucleotide
cagagcccugaagugacag

SEQ ID NO: 2435311 - RNA, 19 nt, Artificial Sequence
  Description of Artificial Sequence: Synthetic oligonucleotide
acuguccacaggccuccag

SEQ ID NO: 2435312 - RNA, 19 nt, Artificial Sequence
  Description of Artificial Sequence: Synthetic oligonucleotide
cugacaacccagagcccug

SEQ ID NO: 2435313 - RNA, 19 nt, Artificial Sequence
  Description of Artificial Sequence: Synthetic oligonucleotide
ggcgugaaguccauggaug

SEQ ID NO: 2435314 - RNA, 19 nt, Artificial Sequence
  Description of Artificial Sequence: Synthetic oligonucleotide
ccuccugaacuaugcaagg

SEQ ID NO: 2435315 - RNA, 19 nt, Artificial Sequence
  Description of Artificial Sequence: Synthetic oligonucleotide
agaacaucuggcagaacuu

SEQ ID NO: 2435316 - RNA, 19 nt, Artificial Sequence
  Description of Artificial Sequence: Synthetic oligonucleotide
caucaguccgaagcugggc

SEQ ID NO: 2435317 - RNA, 19 nt, Artificial Sequence
  Description of Artificial Sequence: Synthetic oligonucleotide
gacaccccagcagccacag

SEQ ID NO: 2435318 - RNA, 19 nt, Artificial Sequence
  Description of Artificial Sequence: Synthetic oligonucleotide
acauaggacucaggaaccu

SEQ ID NO: 2435319 - RNA, 19 nt, Artificial Sequence
  Description of Artificial Sequence: Synthetic oligonucleotide
ugguaacuacaggagccac

SEQ ID NO: 2435320 - RNA, 19 nt, Artificial Sequence
  Description of Artificial Sequence: Synthetic oligonucleotide
uaggacucaggaaccucua

SEQ ID NO: 2435321 - RNA, 19 nt, Artificial Sequence
  Description of Artificial Sequence: Synthetic oligonucleotide
ugaguuccuuagcccggca

SEQ ID NO: 2435322 - RNA, 19 nt, Artificial Sequence
  Description of Artificial Sequence: Synthetic oligonucleotide
ggugcuucccuuccugcug

SEQ ID NO: 2435323 - RNA, 19 nt, Artificial Sequence
  Description of Artificial Sequence: Synthetic oligonucleotide
ugcacucauggcagcugcu

SEQ ID NO: 2435324 - RNA, 19 nt, Artificial Sequence
  Description of Artificial Sequence: Synthetic oligonucleotide
agagcccugaagugacaga

SEQ ID NO: 2435325 - RNA, 19 nt, Artificial Sequence
  Description of Artificial Sequence: Synthetic oligonucleotide
cugagaaugugcacacaaa

SEQ ID NO: 2435326 - RNA, 19 nt, Artificial Sequence
  Description of Artificial Sequence: Synthetic oligonucleotide
ugggagagacucgcaacac

SEQ ID NO: 2435327 - RNA, 19 nt, Artificial Sequence
  Description of Artificial Sequence: Synthetic oligonucleotide
caugcgaccugcgcccacg

SEQ ID NO: 2435328 - RNA, 19 nt, Artificial Sequence
  Description of Artificial Sequence: Synthetic oligonucleotide
ugguuggagugaguagucu

SEQ ID NO: 2435329 - RNA, 19 nt, Artificial Sequence
  Description of Artificial Sequence: Synthetic oligonucleotide
gcgaccugcgcccacgaag

SEQ ID NO: 2435330 - RNA, 19 nt, Artificial Sequence
  Description of Artificial Sequence: Synthetic oligonucleotide
gcccacgaagcccacacgc

SEQ ID NO: 2435331 - RNA, 19 nt, Artificial Sequence
  Description of Artificial Sequence: Synthetic oligonucleotide
caguccgaagcugggcugg

SEQ ID NO: 2435332 - RNA, 19 nt, Artificial Sequence
  Description of Artificial Sequence: Synthetic oligonucleotide
gguggcaaagaugauaagu

SEQ ID NO: 2435333 - RNA, 19 nt, Artificial Sequence
  Description of Artificial Sequence: Synthetic oligonucleotide
acgaugugcucagugguaa

SEQ ID NO: 2435334 - RNA, 19 nt, Artificial Sequence
  Description of Artificial Sequence: Synthetic oligonucleotide
guccauggauggugguucc

SEQ ID NO: 2435335 - RNA, 19 nt, Artificial Sequence
  Description of Artificial Sequence: Synthetic oligonucleotide
uagcuuccacuuugccugc

SEQ ID NO: 2435336 - RNA, 19 nt, Artificial Sequence
  Description of Artificial Sequence: Synthetic oligonucleotide
ugccugcucgaaugaggcc

SEQ ID NO: 2435337 - RNA, 19 nt, Artificial Sequence
  Description of Artificial Sequence: Synthetic oligonucleotide
uuagcccggcagguagccg

SEQ ID NO: 2435338 - RNA, 19 nt, Artificial Sequence
  Description of Artificial Sequence: Synthetic oligonucleotide
ggccaguauggauaucuac

SEQ ID NO: 2435339 - RNA, 19 nt, Artificial Sequence
  Description of Artificial Sequence: Synthetic oligonucleotide
aggagcucagcgucgucau

SEQ ID NO: 2435340 - RNA, 19 nt, Artificial Sequence
  Description of Artificial Sequence: Synthetic oligonucleotide
cugggugcuucccuuccug

SEQ ID NO: 2435341 - RNA, 19 nt, Artificial Sequence
  Description of Artificial Sequence: Synthetic oligonucleotide
gaugugcucagugguaacu

SEQ ID NO: 2435342 - RNA, 19 nt, Artificial Sequence
  Description of Artificial Sequence: Synthetic oligonucleotide
acugcacucauggcagcug

SEQ ID NO: 2435343 - RNA, 19 nt, Artificial Sequence
  Description of Artificial Sequence: Synthetic oligonucleotide
ucuagggcgugaaguccau

SEQ ID NO: 2435344 - RNA, 19 nt, Artificial Sequence
  Description of Artificial Sequence: Synthetic oligonucleotide
caggagccacuucugccag

SEQ ID NO: 2435345 - RNA, 19 nt, Artificial Sequence
  Description of Artificial Sequence: Synthetic oligonucleotide
acuggccagcacuugcuua

SEQ ID NO: 2435346 - RNA, 19 nt, Artificial Sequence
  Description of Artificial Sequence: Synthetic oligonucleotide
agaugauaagugagcaguu

SEQ ID NO: 2435347 - RNA, 19 nt, Artificial Sequence
  Description of Artificial Sequence: Synthetic oligonucleotide
gaggcuugguggcaaagau

SEQ ID NO: 2435348 - RNA, 19 nt, Artificial Sequence
  Description of Artificial Sequence: Synthetic oligonucleotide
ugacaacccagagcccuga

SEQ ID NO: 2435349 - RNA, 19 nt, Artificial Sequence
  Description of Artificial Sequence: Synthetic oligonucleotide
ucgucauucccagcauggu

SEQ ID NO: 2435350 - RNA, 19 nt, Artificial Sequence
  Description of Artificial Sequence: Synthetic oligonucleotide
gugguaacuacaggagcca

SEQ ID NO: 2435351 - RNA, 19 nt, Artificial Sequence
  Description of Artificial Sequence: Synthetic oligonucleotide
aggacucaggaaccucuau

SEQ ID NO: 2435352 - RNA, 19 nt, Artificial Sequence
  Description of Artificial Sequence: Synthetic oligonucleotide
ucagauccugccgccgcca

SEQ ID NO: 2435353 - RNA, 19 nt, Artificial Sequence
  Description of Artificial Sequence: Synthetic oligonucleotide
caccacugccacugaggcc

SEQ ID NO: 2435354 - RNA, 19 nt, Artificial Sequence
  Description of Artificial Sequence: Synthetic oligonucleotide
ccucugagaaugugcacac

SEQ ID NO: 2435355 - RNA, 19 nt, Artificial Sequence
  Description of Artificial Sequence: Synthetic oligonucleotide
cucgcaacacucuuguuuu

SEQ ID NO: 2435356 - RNA, 19 nt, Artificial Sequence
  Description of Artificial Sequence: Synthetic oligonucleotide
ccuggcuuacuucuugcug

SEQ ID NO: 2435357 - RNA, 19 nt, Artificial Sequence
  Description of Artificial Sequence: Synthetic oligonucleotide
gucuguuggugcacuggcc

SEQ ID NO: 2435358 - RNA, 19 nt, Artificial Sequence
  Description of Artificial Sequence: Synthetic oligonucleotide
caggaaccucuaugcacug

SEQ ID NO: 2435359 - RNA, 19 nt, Artificial Sequence
  Description of Artificial Sequence: Synthetic oligonucleotide
gcuuagcuuccacuuugcc

SEQ ID NO: 2435360 - RNA, 19 nt, Artificial Sequence
  Description of Artificial Sequence: Synthetic oligonucleotide
guaacuacaggagccacuu

SEQ ID NO: 2435361 - RNA, 19 nt, Artificial Sequence
  Description of Artificial Sequence: Synthetic oligonucleotide
augguggccccgugccauc

SEQ ID NO: 2435362 - RNA, 19 nt, Artificial Sequence
  Description of Artificial Sequence: Synthetic oligonucleotide
gcugaguuccuuagcccgg

SEQ ID NO: 2435363 - RNA, 19 nt, Artificial Sequence
  Description of Artificial Sequence: Synthetic oligonucleotide
gcacuuccugguuggagug

SEQ ID NO: 2435364 - RNA, 19 nt, Artificial Sequence
  Description of Artificial Sequence: Synthetic oligonucleotide
uccugucuguuggugcacu

SEQ ID NO: 2435365 - RNA, 19 nt, Artificial Sequence
  Description of Artificial Sequence: Synthetic oligonucleotide
augaggccuugggcgaugg

SEQ ID NO: 2435366 - RNA, 19 nt, Artificial Sequence
  Description of Artificial Sequence: Synthetic oligonucleotide
cagcacuuccugguuggag

SEQ ID NO: 2435367 - RNA, 19 nt, Artificial Sequence
  Description of Artificial Sequence: Synthetic oligonucleotide
gguuccagcuggugugagc

SEQ ID NO: 2435368 - RNA, 19 nt, Artificial Sequence
  Description of Artificial Sequence: Synthetic oligonucleotide
augugcucagugguaacua

SEQ ID NO: 2435369 - RNA, 19 nt, Artificial Sequence
  Description of Artificial Sequence: Synthetic oligonucleotide
gugcucagugguaacuaca

SEQ ID NO: 2435370 - RNA, 19 nt, Artificial Sequence
  Description of Artificial Sequence: Synthetic oligonucleotide
gccacagacaccacgaugu

SEQ ID NO: 2435371 - RNA, 19 nt, Artificial Sequence
  Description of Artificial Sequence: Synthetic oligonucleotide
ccacgaagcccacacgcag

SEQ ID NO: 2435372 - RNA, 19 nt, Artificial Sequence
  Description of Artificial Sequence: Synthetic oligonucleotide
ucgcaacacucuuguuuuc

SEQ ID NO: 2435373 - RNA, 19 nt, Artificial Sequence
  Description of Artificial Sequence: Synthetic oligonucleotide
ugguuccagcuggugugag

SEQ ID NO: 2435374 - RNA, 19 nt, Artificial Sequence
  Description of Artificial Sequence: Synthetic oligonucleotide
agguagauugggagagacu

SEQ ID NO: 2435375 - RNA, 19 nt, Artificial Sequence
  Description of Artificial Sequence: Synthetic oligonucleotide
caaugcggugggccaggcc

SEQ ID NO: 2435376 - RNA, 19 nt, Artificial Sequence
  Description of Artificial Sequence: Synthetic oligonucleotide
cagcgaacucagagacacc

SEQ ID NO: 2435377 - RNA, 19 nt, Artificial Sequence
  Description of Artificial Sequence: Synthetic oligonucleotide
gcagcaaugcggugggcca

SEQ ID NO: 2435378 - RNA, 19 nt, Artificial Sequence
  Description of Artificial Sequence: Synthetic oligonucleotide
cccagagcccugaagugac

SEQ ID NO: 2435379 - RNA, 19 nt, Artificial Sequence
  Description of Artificial Sequence: Synthetic oligonucleotide
caguauggauaucuacaua

SEQ ID NO: 2435380 - RNA, 19 nt, Artificial Sequence
  Description of Artificial Sequence: Synthetic oligonucleotide
aguccgaagcugggcuggg

SEQ ID NO: 2435381 - RNA, 19 nt, Artificial Sequence
  Description of Artificial Sequence: Synthetic oligonucleotide
guggccccgugccaucacc

SEQ ID NO: 2435382 - RNA, 19 nt, Artificial Sequence
  Description of Artificial Sequence: Synthetic oligonucleotide
gaacuaugcaagguagauu

SEQ ID NO: 2435383 - RNA, 19 nt, Artificial Sequence
  Description of Artificial Sequence: Synthetic oligonucleotide
ggcagaacuugaggcuugg

SEQ ID NO: 2435384 - RNA, 19 nt, Artificial Sequence
  Description of Artificial Sequence: Synthetic oligonucleotide
gagauuccugucuguuggu

SEQ ID NO: 2435385 - RNA, 19 nt, Artificial Sequence
  Description of Artificial Sequence: Synthetic oligonucleotide
uuccugucuguuggugcac

SEQ ID NO: 2435386 - RNA, 19 nt, Artificial Sequence
  Description of Artificial Sequence: Synthetic oligonucleotide
gcucuagggcgugaagucc

SEQ ID NO: 2435387 - RNA, 19 nt, Artificial Sequence
  Description of Artificial Sequence: Synthetic oligonucleotide
cgaccugcgcccacgaagc

SEQ ID NO: 2435388 - RNA, 19 nt, Artificial Sequence
  Description of Artificial Sequence: Synthetic oligonucleotide
augcggugggccaggccac

SEQ ID NO: 2435389 - RNA, 19 nt, Artificial Sequence
  Description of Artificial Sequence: Synthetic oligonucleotide
auggugguuccagcuggug

SEQ ID NO: 2435390 - RNA, 19 nt, Artificial Sequence
  Description of Artificial Sequence: Synthetic oligonucleotide
ccgaagcugggcugggugc

SEQ ID NO: 2435391 - RNA, 19 nt, Artificial Sequence
  Description of Artificial Sequence: Synthetic oligonucleotide
cauucccagcaugguggcc

SEQ ID NO: 2435392 - RNA, 19 nt, Artificial Sequence
  Description of Artificial Sequence: Synthetic oligonucleotide
cacgaugugcucaguggua

SEQ ID NO: 2435393 - RNA, 19 nt, Artificial Sequence
  Description of Artificial Sequence: Synthetic oligonucleotide
gugagcacaucaguccgaa

SEQ ID NO: 2435394 - RNA, 19 nt, Artificial Sequence
  Description of Artificial Sequence: Synthetic oligonucleotide
guagccgcuuccacugcac

SEQ ID NO: 2435395 - RNA, 19 nt, Artificial Sequence
  Description of Artificial Sequence: Synthetic oligonucleotide
aggaaccucuaugcacugu

SEQ ID NO: 2435396 - RNA, 19 nt, Artificial Sequence
  Description of Artificial Sequence: Synthetic oligonucleotide
agauugggagagacucgca

SEQ ID NO: 2435397 - RNA, 19 nt, Artificial Sequence
  Description of Artificial Sequence: Synthetic oligonucleotide
ugcuucccuuccugcugca

SEQ ID NO: 2435398 - RNA, 19 nt, Artificial Sequence
  Description of Artificial Sequence: Synthetic oligonucleotide
gagagacucgcaacacucu

SEQ ID NO: 2435399 - RNA, 19 nt, Artificial Sequence
  Description of Artificial Sequence: Synthetic oligonucleotide
cagacaccacgaugugcuc

SEQ ID NO: 2435400 - RNA, 19 nt, Artificial Sequence
  Description of Artificial Sequence: Synthetic oligonucleotide
cacuugcuuagcuuccacu

SEQ ID NO: 2435401 - RNA, 19 nt, Artificial Sequence
  Description of Artificial Sequence: Synthetic oligonucleotide
cuggugugagcacaucagu

SEQ ID NO: 2435402 - RNA, 19 nt, Artificial Sequence
  Description of Artificial Sequence: Synthetic oligonucleotide
gguagccgcuuccacugca

SEQ ID NO: 2435403 - RNA, 19 nt, Artificial Sequence
  Description of Artificial Sequence: Synthetic oligonucleotide
ccgccaugcgaccugcgcc

SEQ ID NO: 2435404 - RNA, 19 nt, Artificial Sequence
  Description of Artificial Sequence: Synthetic oligonucleotide
gggccucugagaaugugca

SEQ ID NO: 2435405 - RNA, 19 nt, Artificial Sequence
  Description of Artificial Sequence: Synthetic oligonucleotide
ugcgaccugcgcccacgaa

SEQ ID NO: 2435406 - RNA, 19 nt, Artificial Sequence
  Description of Artificial Sequence: Synthetic oligonucleotide
gacaacccagagcccugaa

SEQ ID NO: 2435407 - RNA, 19 nt, Artificial Sequence
  Description of Artificial Sequence: Synthetic oligonucleotide
gucugacaacccagagccc

SEQ ID NO: 2435408 - RNA, 19 nt, Artificial Sequence
  Description of Artificial Sequence: Synthetic oligonucleotide
ccuuagcccggcagguagc

SEQ ID NO: 2435409 - RNA, 19 nt, Artificial Sequence
  Description of Artificial Sequence: Synthetic oligonucleotide
cuugcuuagcuuccacuuu

SEQ ID NO: 2435410 - RNA, 19 nt, Artificial Sequence
  Description of Artificial Sequence: Synthetic oligonucleotide
gcacaucaguccgaagcug

SEQ ID NO: 2435411 - RNA, 19 nt, Artificial Sequence
  Description of Artificial Sequence: Synthetic oligonucleotide
ggcagguagccgcuuccac

SEQ ID NO: 2435412 - RNA, 19 nt, Artificial Sequence
  Description of Artificial Sequence: Synthetic oligonucleotide
uuccuuagcccggcaggua

SEQ ID NO: 2435413 - RNA, 19 nt, Artificial Sequence
  Description of Artificial Sequence: Synthetic oligonucleotide
cugcucuagggcgugaagu

SEQ ID NO: 2435414 - RNA, 19 nt, Artificial Sequence
  Description of Artificial Sequence: Synthetic oligonucleotide
agcccugaagugacagaga

SEQ ID NO: 2435415 - RNA, 19 nt, Artificial Sequence
  Description of Artificial Sequence: Synthetic oligonucleotide
caagguagauugggagaga

SEQ ID NO: 2435416 - RNA, 19 nt, Artificial Sequence
  Description of Artificial Sequence: Synthetic oligonucleotide
ccuccagcgaacucagaga

SEQ ID NO: 2435417 - RNA, 19 nt, Artificial Sequence
  Description of Artificial Sequence: Synthetic oligonucleotide
augcgaccugcgcccacga

SEQ ID NO: 2435418 - RNA, 19 nt, Artificial Sequence
  Description of Artificial Sequence: Synthetic oligonucleotide
ugguggccccgugccauca

SEQ ID NO: 2435419 - RNA, 19 nt, Artificial Sequence
  Description of Artificial Sequence: Synthetic oligonucleotide
ccaguauggauaucuacau

SEQ ID NO: 2435420 - RNA, 19 nt, Artificial Sequence
  Description of Artificial Sequence: Synthetic oligonucleotide
guuccuuagcccggcaggu

SEQ ID NO: 2435421 - RNA, 19 nt, Artificial Sequence
  Description of Artificial Sequence: Synthetic oligonucleotide
cuagggcgugaaguccaug

SEQ ID NO: 2435422 - RNA, 19 nt, Artificial Sequence
  Description of Artificial Sequence: Synthetic oligonucleotide
cuccgccaugcgaccugcg

SEQ ID NO: 2435423 - RNA, 19 nt, Artificial Sequence
  Description of Artificial Sequence: Synthetic oligonucleotide
gccgcuuccacugcacuca

SEQ ID NO: 2435424 - RNA, 19 nt, Artificial Sequence
  Description of Artificial Sequence: Synthetic oligonucleotide
gcgcccacgaagcccacac

SEQ ID NO: 2435425 - RNA, 19 nt, Artificial Sequence
  Description of Artificial Sequence: Synthetic oligonucleotide
gcagguagccgcuuccacu

SEQ ID NO: 2435426 - RNA, 19 nt, Artificial Sequence
  Description of Artificial Sequence: Synthetic oligonucleotide
gccuccagcaaguucugua

SEQ ID NO: 2435427 - RNA, 19 nt, Artificial Sequence
  Description of Artificial Sequence: Synthetic oligonucleotide
ccucuaugcacuguccaca

SEQ ID NO: 2435428 - RNA, 19 nt, Artificial Sequence
  Description of Artificial Sequence: Synthetic oligonucleotide
cgccaugcgaccugcgccc

SEQ ID NO: 2435429 - RNA, 19 nt, Artificial Sequence
  Description of Artificial Sequence: Synthetic oligonucleotide
cagcgucgucauucccagc

SEQ ID NO: 2435430 - RNA, 19 nt, Artificial Sequence
  Description of Artificial Sequence: Synthetic oligonucleotide
agacaccccagcagccaca

SEQ ID NO: 2435431 - RNA, 19 nt, Artificial Sequence
  Description of Artificial Sequence: Synthetic oligonucleotide
gguaacuacaggagccacu

SEQ ID NO: 2435432 - RNA, 19 nt, Artificial Sequence
  Description of Artificial Sequence: Synthetic oligonucleotide
ggccucugagaaugugcac

SEQ ID NO: 2435433 - RNA, 19 nt, Artificial Sequence
  Description of Artificial Sequence: Synthetic oligonucleotide
gauggugguuccagcuggu

SEQ ID NO: 2435434 - RNA, 19 nt, Artificial Sequence
  Description of Artificial Sequence: Synthetic oligonucleotide
ccugcucuagggcgugaag

SEQ ID NO: 2435435 - RNA, 19 nt, Artificial Sequence
  Description of Artificial Sequence: Synthetic oligonucleotide
gccagaacaucuggcagaa

SEQ ID NO: 2435436 - RNA, 19 nt, Artificial Sequence
  Description of Artificial Sequence: Synthetic oligonucleotide
cucugagaaugugcacaca

SEQ ID NO: 2435437 - RNA, 19 nt, Artificial Sequence
  Description of Artificial Sequence: Synthetic oligonucleotide
gccugcucgaaugaggccu

SEQ ID NO: 2435438 - RNA, 19 nt, Artificial Sequence
  Description of Artificial Sequence: Synthetic oligonucleotide
aagcccacacgcagcuguu

SEQ ID NO: 2435439 - RNA, 19 nt, Artificial Sequence
  Description of Artificial Sequence: Synthetic oligonucleotide
cuugggcgauggccuccgc

SEQ ID NO: 2435440 - RNA, 19 nt, Artificial Sequence
  Description of Artificial Sequence: Synthetic oligonucleotide
cgaaugaggccuugggcga

SEQ ID NO: 2435441 - RNA, 19 nt, Artificial Sequence
  Description of Artificial Sequence: Synthetic oligonucleotide
gcucagcgucgucauuccc

SEQ ID NO: 2435442 - RNA, 19 nt, Artificial Sequence
  Description of Artificial Sequence: Synthetic oligonucleotide
ugcgcccacgaagcccaca

SEQ ID NO: 2435443 - RNA, 19 nt, Artificial Sequence
  Description of Artificial Sequence: Synthetic oligonucleotide
ugaggccaguauggauauc

SEQ ID NO: 2435444 - RNA, 19 nt, Artificial Sequence
  Description of Artificial Sequence: Synthetic oligonucleotide
cuccugaacuaugcaaggu

SEQ ID NO: 2435445 - RNA, 19 nt, Artificial Sequence
  Description of Artificial Sequence: Synthetic oligonucleotide
ggcgauggccuccgccaug

SEQ ID NO: 2435446 - RNA, 19 nt, Artificial Sequence
  Description of Artificial Sequence: Synthetic oligonucleotide
gccccgugccaucaccaug

SEQ ID NO: 2435447 - RNA, 19 nt, Artificial Sequence
  Description of Artificial Sequence: Synthetic oligonucleotide
ccacagacaccacgaugug

SEQ ID NO: 2435448 - RNA, 19 nt, Artificial Sequence
  Description of Artificial Sequence: Synthetic oligonucleotide
cacacgcagcuguucagau

SEQ ID NO: 2435449 - RNA, 19 nt, Artificial Sequence
  Description of Artificial Sequence: Synthetic oligonucleotide
ccggcagguagccgcuucc

SEQ ID NO: 2435450 - RNA, 19 nt, Artificial Sequence
  Description of Artificial Sequence: Synthetic oligonucleotide
cacuuccugguuggaguga

SEQ ID NO: 2435451 - RNA, 19 nt, Artificial Sequence
  Description of Artificial Sequence: Synthetic oligonucleotide
aggccaguauggauaucua

SEQ ID NO: 2435452 - RNA, 19 nt, Artificial Sequence
  Description of Artificial Sequence: Synthetic oligonucleotide
cuggcagaacuugaggcuu

SEQ ID NO: 2435453 - RNA, 19 nt, Artificial Sequence
  Description of Artificial Sequence: Synthetic oligonucleotide
ccuugggcgauggccuccg

SEQ ID NO: 2435454 - RNA, 19 nt, Artificial Sequence
  Description of Artificial Sequence: Synthetic oligonucleotide
cgucgucauucccagcaug

SEQ ID NO: 2435455 - RNA, 19 nt, Artificial Sequence
  Description of Artificial Sequence: Synthetic oligonucleotide
gcagagucugggcagcaau

SEQ ID NO: 2435456 - RNA, 19 nt, Artificial Sequence
  Description of Artificial Sequence: Synthetic oligonucleotide
gggcgugaaguccauggau

SEQ ID NO: 2435457 - RNA, 19 nt, Artificial Sequence
  Description of Artificial Sequence: Synthetic oligonucleotide
ccgugccaucaccauggcc

SEQ ID NO: 2435458 - RNA, 19 nt, Artificial Sequence
  Description of Artificial Sequence: Synthetic oligonucleotide
cugcucgaaugaggccuug

SEQ ID NO: 2435459 - RNA, 19 nt, Artificial Sequence
  Description of Artificial Sequence: Synthetic oligonucleotide
gcagcugcucgaagacccc

SEQ ID NO: 2435460 - RNA, 19 nt, Artificial Sequence
  Description of Artificial Sequence: Synthetic oligonucleotide
ccuucagccagggccucug

SEQ ID NO: 2435461 - RNA, 19 nt, Artificial Sequence
  Description of Artificial Sequence: Synthetic oligonucleotide
gccuccgccaugcgaccug

SEQ ID NO: 2435462 - RNA, 19 nt, Artificial Sequence
  Description of Artificial Sequence: Synthetic oligonucleotide
gggugcuucccuuccugcu

SEQ ID NO: 2435463 - RNA, 19 nt, Artificial Sequence
  Description of Artificial Sequence: Synthetic oligonucleotide
caugguggccccgugccau

SEQ ID NO: 2435464 - RNA, 19 nt, Artificial Sequence
  Description of Artificial Sequence: Synthetic oligonucleotide
ccacgaugugcucaguggu

SEQ ID NO: 2435465 - RNA, 19 nt, Artificial Sequence
  Description of Artificial Sequence: Synthetic oligonucleotide
acaccacgaugugcucagu

SEQ ID NO: 2435466 - RNA, 19 nt, Artificial Sequence
  Description of Artificial Sequence: Synthetic oligonucleotide
gccacuucugccagaacau

SEQ ID NO: 2435467 - RNA, 19 nt, Artificial Sequence
  Description of Artificial Sequence: Synthetic oligonucleotide
cagcuggugugagcacauc

SEQ ID NO: 2435468 - RNA, 19 nt, Artificial Sequence
  Description of Artificial Sequence: Synthetic oligonucleotide
cccuuccugcugcagcauc

SEQ ID NO: 2435469 - RNA, 19 nt, Artificial Sequence
  Description of Artificial Sequence: Synthetic oligonucleotide
agcccggcagguagccgcu

SEQ ID NO: 2435470 - RNA, 19 nt, Artificial Sequence
  Description of Artificial Sequence: Synthetic oligonucleotide
gcaugguggccccgugcca

SEQ ID NO: 2435471 - RNA, 19 nt, Artificial Sequence
  Description of Artificial Sequence: Synthetic oligonucleotide
gggcugggugcuucccuuc

SEQ ID NO: 2435472 - RNA, 19 nt, Artificial Sequence
  Description of Artificial Sequence: Synthetic oligonucleotide
cuuccugguuggagugagu

SEQ ID NO: 2435473 - RNA, 19 nt, Artificial Sequence
  Description of Artificial Sequence: Synthetic oligonucleotide
cacugcacucauggcagcu

SEQ ID NO: 2435474 - RNA, 19 nt, Artificial Sequence
  Description of Artificial Sequence: Synthetic oligonucleotide
gacucgcaacacucuuguu

SEQ ID NO: 2435475 - RNA, 19 nt, Artificial Sequence
  Description of Artificial Sequence: Synthetic oligonucleotide
ggccuugggcgauggccuc

SEQ ID NO: 2435476 - RNA, 19 nt, Artificial Sequence
  Description of Artificial Sequence: Synthetic oligonucleotide
gguggccccgugccaucac

SEQ ID NO: 2435477 - RNA, 19 nt, Artificial Sequence
  Description of Artificial Sequence: Synthetic oligonucleotide
gccuugggcgauggccucc

SEQ ID NO: 2435478 - RNA, 19 nt, Artificial Sequence
  Description of Artificial Sequence: Synthetic oligonucleotide
gccagcacuugcuuagcuu

SEQ ID NO: 2435479 - RNA, 19 nt, Artificial Sequence
  Description of Artificial Sequence: Synthetic oligonucleotide
gcaaugcggugggccaggc

SEQ ID NO: 2435480 - RNA, 19 nt, Artificial Sequence
  Description of Artificial Sequence: Synthetic oligonucleotide
acgcagcuguucagauccu

SEQ ID NO: 2435481 - RNA, 19 nt, Artificial Sequence
  Description of Artificial Sequence: Synthetic oligonucleotide
cuccuccagcgaacucaga

SEQ ID NO: 2435482 - RNA, 19 nt, Artificial Sequence
  Description of Artificial Sequence: Synthetic oligonucleotide
ccacacgcagcuguucaga

SEQ ID NO: 2435483 - RNA, 19 nt, Artificial Sequence
  Description of Artificial Sequence: Synthetic oligonucleotide
ggugcacuggccagcacuu

SEQ ID NO: 2435484 - RNA, 19 nt, Artificial Sequence
  Description of Artificial Sequence: Synthetic oligonucleotide
cugccacugaggccaguau

SEQ ID NO: 2435485 - RNA, 19 nt, Artificial Sequence
  Description of Artificial Sequence: Synthetic oligonucleotide
cccgugccaucaccauggc

SEQ ID NO: 2435486 - RNA, 19 nt, Artificial Sequence
  Description of Artificial Sequence: Synthetic oligonucleotide
cccggcagguagccgcuuc

SEQ ID NO: 2435487 - RNA, 19 nt, Artificial Sequence
  Description of Artificial Sequence: Synthetic oligonucleotide
ccacugggcaugcccaucu

SEQ ID NO: 2435488 - RNA, 19 nt, Artificial Sequence
  Description of Artificial Sequence: Synthetic oligonucleotide
cgcccacgaagcccacacg

SEQ ID NO: 2435489 - RNA, 19 nt, Artificial Sequence
  Description of Artificial Sequence: Synthetic oligonucleotide
ccagagcccugaagugaca

SEQ ID NO: 2435490 - RNA, 19 nt, Artificial Sequence
  Description of Artificial Sequence: Synthetic oligonucleotide
gcugggugcuucccuuccu

SEQ ID NO: 2435491 - RNA, 19 nt, Artificial Sequence
  Description of Artificial Sequence: Synthetic oligonucleotide
gcagcacuuccugguugga

SEQ ID NO: 2435492 - RNA, 19 nt, Artificial Sequence
  Description of Artificial Sequence: Synthetic oligonucleotide
ccagaacaucuggcagaac

SEQ ID NO: 2435493 - RNA, 19 nt, Artificial Sequence
  Description of Artificial Sequence: Synthetic oligonucleotide
ccaugcgaccugcgcccac

SEQ ID NO: 2435494 - RNA, 19 nt, Artificial Sequence
  Description of Artificial Sequence: Synthetic oligonucleotide
cacuguccacaggccucca

SEQ ID NO: 2435495 - RNA, 19 nt, Artificial Sequence
  Description of Artificial Sequence: Synthetic oligonucleotide
cagauccugccgccgccau

SEQ ID NO: 2435496 - RNA, 19 nt, Artificial Sequence
  Description of Artificial Sequence: Synthetic oligonucleotide
ccagcuggugugagcacau

SEQ ID NO: 2435497 - RNA, 19 nt, Artificial Sequence
  Description of Artificial Sequence: Synthetic oligonucleotide
guccgaagcugggcugggu

SEQ ID NO: 2435498 - RNA, 19 nt, Artificial Sequence
  Description of Artificial Sequence: Synthetic oligonucleotide
ggcuuacuucuugcugagu

SEQ ID NO: 2435499 - RNA, 19 nt, Artificial Sequence
  Description of Artificial Sequence: Synthetic oligonucleotide
gcgucgucauucccagcau

SEQ ID NO: 2435500 - RNA, 19 nt, Artificial Sequence
  Description of Artificial Sequence: Synthetic oligonucleotide
ccacuuugccugcucgaau

SEQ ID NO: 2435501 - RNA, 19 nt, Artificial Sequence
  Description of Artificial Sequence: Synthetic oligonucleotide
gccaugcgaccugcgccca

SEQ ID NO: 2435502 - RNA, 19 nt, Artificial Sequence
  Description of Artificial Sequence: Synthetic oligonucleotide
ggagcucagcgucgucauu

SEQ ID NO: 2435503 - RNA, 19 nt, Artificial Sequence
  Description of Artificial Sequence: Synthetic oligonucleotide
cccugaagugacagagauu

SEQ ID NO: 2435504 - RNA, 19 nt, Artificial Sequence
  Description of Artificial Sequence: Synthetic oligonucleotide
ccugcucgaaugaggccuu

SEQ ID NO: 2435505 - RNA, 19 nt, Artificial Sequence
  Description of Artificial Sequence: Synthetic oligonucleotide
cgugaaguccauggauggu

SEQ ID NO: 2435506 - RNA, 19 nt, Artificial Sequence
  Description of Artificial Sequence: Synthetic oligonucleotide
cccugcucuagggcgugaa

SEQ ID NO: 2435507 - RNA, 19 nt, Artificial Sequence
  Description of Artificial Sequence: Synthetic oligonucleotide
ggccuccgccaugcgaccu

SEQ ID NO: 2435508 - RNA, 19 nt, Artificial Sequence
  Description of Artificial Sequence: Synthetic oligonucleotide
cggcagguagccgcuucca

SEQ ID NO: 2435509 - RNA, 19 nt, Artificial Sequence
  Description of Artificial Sequence: Synthetic oligonucleotide
ccgcuuccacugcacucau

SEQ ID NO: 2435510 - RNA, 19 nt, Artificial Sequence
  Description of Artificial Sequence: Synthetic oligonucleotide
ccccugcucuagggcguga

SEQ ID NO: 2435511 - RNA, 19 nt, Artificial Sequence
  Description of Artificial Sequence: Synthetic oligonucleotide
gcccggcagguagccgcuu

SEQ ID NO: 2435512 - RNA, 19 nt, Artificial Sequence
  Description of Artificial Sequence: Synthetic oligonucleotide
uuuaucucaauauacaagg

SEQ ID NO: 2435513 - RNA, 19 nt, Artificial Sequence
  Description of Artificial Sequence: Synthetic oligonucleotide
aaauguuuguagaagaagc

SEQ ID NO: 2435514 - RNA, 19 nt, Artificial Sequence
  Description of Artificial Sequence: Synthetic oligonucleotide
ugagucaacaaucaguucc

SEQ ID NO: 2435515 - RNA, 19 nt, Artificial Sequence
  Description of Artificial Sequence: Synthetic oligonucleotide
uucaccagagcauaaaugg

SEQ ID NO: 2435516 - RNA, 19 nt, Artificial Sequence
  Description of Artificial Sequence: Synthetic oligonucleotide
ugaaguuguagaaagauuc

SEQ ID NO: 2435517 - RNA, 19 nt, Artificial Sequence
  Description of Artificial Sequence: Synthetic oligonucleotide
uguagaaagauucaccaga

SEQ ID NO: 2435518 - RNA, 19 nt, Artificial Sequence
  Description of Artificial Sequence: Synthetic oligonucleotide
uucucaaucagccacuugc

SEQ ID NO: 2435519 - RNA, 19 nt, Artificial Sequence
  Description of Artificial Sequence: Synthetic oligonucleotide
uauacaaggacuccaagac

SEQ ID NO: 2435520 - RNA, 19 nt, Artificial Sequence
  Description of Artificial Sequence: Synthetic oligonucleotide
agccuuucuaaacaggucc

SEQ ID NO: 2435521 - RNA, 19 nt, Artificial Sequence
  Description of Artificial Sequence: Synthetic oligonucleotide
ugucucacagcuuugaccc

SEQ ID NO: 2435522 - RNA, 19 nt, Artificial Sequence
  Description of Artificial Sequence: Synthetic oligonucleotide
aaucauuacagugaggaca

SEQ ID NO: 2435523 - RNA, 19 nt, Artificial Sequence
  Description of Artificial Sequence: Synthetic oligonucleotide
gaaaucauuacagugagga

SEQ ID NO: 2435524 - RNA, 19 nt, Artificial Sequence
  Description of Artificial Sequence: Synthetic oligonucleotide
uuucuuuaucucaauauac

SEQ ID NO: 2435525 - RNA, 19 nt, Artificial Sequence
  Description of Artificial Sequence: Synthetic oligonucleotide
aaaauguuuguagaagaag

SEQ ID NO: 2435526 - RNA, 19 nt, Artificial Sequence
  Description of Artificial Sequence: Synthetic oligonucleotide
ucaaccagguucaaaaugu

SEQ ID NO: 2435527 - RNA, 19 nt, Artificial Sequence
  Description of Artificial Sequence: Synthetic oligonucleotide
gaguugaucaaccagguuc

SEQ ID NO: 2435528 - RNA, 19 nt, Artificial Sequence
  Description of Artificial Sequence: Synthetic oligonucleotide
aaugcauccuaauaccaca

SEQ ID NO: 2435529 - RNA, 19 nt, Artificial Sequence
  Description of Artificial Sequence: Synthetic oligonucleotide
cuuuaucucaauauacaag

SEQ ID NO: 2435530 - RNA, 19 nt, Artificial Sequence
  Description of Artificial Sequence: Synthetic oligonucleotide
uucuuuaucucaauauaca

SEQ ID NO: 2435531 - RNA, 19 nt, Artificial Sequence
  Description of Artificial Sequence: Synthetic oligonucleotide
aauauacaaggacuccaag

SEQ ID NO: 2435532 - RNA, 19 nt, Artificial Sequence
  Description of Artificial Sequence: Synthetic oligonucleotide
uaucucaauauacaaggac

SEQ ID NO: 2435533 - RNA, 19 nt, Artificial Sequence
  Description of Artificial Sequence: Synthetic oligonucleotide
aaguuguagaaagauucac

SEQ ID NO: 2435534 - RNA, 19 nt, Artificial Sequence
  Description of Artificial Sequence: Synthetic oligonucleotide
aaauccguggccauuuugg

SEQ ID NO: 2435535 - RNA, 19 nt, Artificial Sequence
  Description of Artificial Sequence: Synthetic oligonucleotide
agcauuucggucauggacc

SEQ ID NO: 2435536 - RNA, 19 nt, Artificial Sequence
  Description of Artificial Sequence: Synthetic oligonucleotide
aguuguagaaagauucacc

SEQ ID NO: 2435537 - RNA, 19 nt, Artificial Sequence
  Description of Artificial Sequence: Synthetic oligonucleotide
ucugagucaacaaucaguu

SEQ ID NO: 2435538 - RNA, 19 nt, Artificial Sequence
  Description of Artificial Sequence: Synthetic oligonucleotide
uucugagucaacaaucagu

SEQ ID NO: 2435539 - RNA, 19 nt, Artificial Sequence
  Description of Artificial Sequence: Synthetic oligonucleotide
uaucuucacagcauccggg

SEQ ID NO: 2435540 - RNA, 19 nt, Artificial Sequence
  Description of Artificial Sequence: Synthetic oligonucleotide
uaccacaugucucacagcu

SEQ ID NO: 2435541 - RNA, 19 nt, Artificial Sequence
  Description of Artificial Sequence: Synthetic oligonucleotide
auauacaaggacuccaaga

SEQ ID NO: 2435542 - RNA, 19 nt, Artificial Sequence
  Description of Artificial Sequence: Synthetic oligonucleotide
agauguugcauaucuucac

SEQ ID NO: 2435543 - RNA, 19 nt, Artificial Sequence
  Description of Artificial Sequence: Synthetic oligonucleotide
ucuuuaucucaauauacaa

SEQ ID NO: 2435544 - RNA, 19 nt, Artificial Sequence
  Description of Artificial Sequence: Synthetic oligonucleotide
auuguugaugaaguccucc

SEQ ID NO: 2435545 - RNA, 19 nt, Artificial Sequence
  Description of Artificial Sequence: Synthetic oligonucleotide
ucaaucagccacuugcucu

SEQ ID NO: 2435546 - RNA, 19 nt, Artificial Sequence
  Description of Artificial Sequence: Synthetic oligonucleotide
acacagcuaaugcugacgg

SEQ ID NO: 2435547 - RNA, 19 nt, Artificial Sequence
  Description of Artificial Sequence: Synthetic oligonucleotide
auaucuucacagcauccgg

SEQ ID NO: 2435548 - RNA, 19 nt, Artificial Sequence
  Description of Artificial Sequence: Synthetic oligonucleotide
acgcaaggcaaaugcaucc

SEQ ID NO: 2435549 - RNA, 19 nt, Artificial Sequence
  Description of Artificial Sequence: Synthetic oligonucleotide
auaaaugggucucccauca

SEQ ID NO: 2435550 - RNA, 19 nt, Artificial Sequence
  Description of Artificial Sequence: Synthetic oligonucleotide
uagcauuucggucauggac

SEQ ID NO: 2435551 - RNA, 19 nt, Artificial Sequence
  Description of Artificial Sequence: Synthetic oligonucleotide
aguagcauuucggucaugg

SEQ ID NO: 2435552 - RNA, 19 nt, Artificial Sequence
  Description of Artificial Sequence: Synthetic oligonucleotide
cagaaaucauuacagugag

SEQ ID NO: 2435553 - RNA, 19 nt, Artificial Sequence
  Description of Artificial Sequence: Synthetic oligonucleotide
uuacagugaggacagcgug

SEQ ID NO: 2435554 - RNA, 19 nt, Artificial Sequence
  Description of Artificial Sequence: Synthetic oligonucleotide
cuuugaguugaucaaccag

SEQ ID NO: 2435555 - RNA, 19 nt, Artificial Sequence
  Description of Artificial Sequence: Synthetic oligonucleotide
uuaucucaauauacaagga

SEQ ID NO: 2435556 - RNA, 19 nt, Artificial Sequence
  Description of Artificial Sequence: Synthetic oligonucleotide
aaaauccguggccauuuug

SEQ ID NO: 2435557 - RNA, 19 nt, Artificial Sequence
  Description of Artificial Sequence: Synthetic oligonucleotide
uuggaaacugaaguuguag

SEQ ID NO: 2435558 - RNA, 19 nt, Artificial Sequence
  Description of Artificial Sequence: Synthetic oligonucleotide
uccagcuuaucuacaguag

SEQ ID NO: 2435559 - RNA, 19 nt, Artificial Sequence
  Description of Artificial Sequence: Synthetic oligonucleotide
ucuuccgugauuccuuucu

SEQ ID NO: 2435560 - RNA, 19 nt, Artificial Sequence
  Description of Artificial Sequence: Synthetic oligonucleotide
uuucugagucaacaaucag

SEQ ID NO: 2435561 - RNA, 19 nt, Artificial Sequence
  Description of Artificial Sequence: Synthetic oligonucleotide
cauaucuucacagcauccg

SEQ ID NO: 2435562 - RNA, 19 nt, Artificial Sequence
  Description of Artificial Sequence: Synthetic oligonucleotide
auauuguugaugaaguccu

SEQ ID NO: 2435563 - RNA, 19 nt, Artificial Sequence
  Description of Artificial Sequence: Synthetic oligonucleotide
guggacuggaaguacuugg

SEQ ID NO: 2435564 - RNA, 19 nt, Artificial Sequence
  Description of Artificial Sequence: Synthetic oligonucleotide
aguuccaaagccuuucuaa

SEQ ID NO: 2435565 - RNA, 19 nt, Artificial Sequence
  Description of Artificial Sequence: Synthetic oligonucleotide
auguugcauaucuucacag

SEQ ID NO: 2435566 - RNA, 19 nt, Artificial Sequence
  Description of Artificial Sequence: Synthetic oligonucleotide
ucuggaaugucguggggcc

SEQ ID NO: 2435567 - RNA, 19 nt, Artificial Sequence
  Description of Artificial Sequence: Synthetic oligonucleotide
ugugcugcccugcauguug

SEQ ID NO: 2435568 - RNA, 19 nt, Artificial Sequence
  Description of Artificial Sequence: Synthetic oligonucleotide
cuguugauauuguugauga

SEQ ID NO: 2435569 - RNA, 19 nt, Artificial Sequence
  Description of Artificial Sequence: Synthetic oligonucleotide
uguagcagugguucugcag

SEQ ID NO: 2435570 - RNA, 19 nt, Artificial Sequence
  Description of Artificial Sequence: Synthetic oligonucleotide
caggacacagcuaaugcug

SEQ ID NO: 2435571 - RNA, 19 nt, Artificial Sequence
  Description of Artificial Sequence: Synthetic oligonucleotide
uuucugcucgacuuggaga

SEQ ID NO: 2435572 - RNA, 19 nt, Artificial Sequence
  Description of Artificial Sequence: Synthetic oligonucleotide
aaagccaguuucugaguca

SEQ ID NO: 2435573 - RNA, 19 nt, Artificial Sequence
  Description of Artificial Sequence: Synthetic oligonucleotide
accgugagucaucaacagc

SEQ ID NO: 2435574 - RNA, 19 nt, Artificial Sequence
  Description of Artificial Sequence: Synthetic oligonucleotide
uucugcucgacuuggagau

SEQ ID NO: 2435575 - RNA, 19 nt, Artificial Sequence
  Description of Artificial Sequence: Synthetic oligonucleotide
agagcauaaaugggucucc

SEQ ID NO: 2435576 - RNA, 19 nt, Artificial Sequence
  Description of Artificial Sequence: Synthetic oligonucleotide
uccuaauaccacaugucuc

SEQ ID NO: 2435577 - RNA, 19 nt, Artificial Sequence
  Description of Artificial Sequence: Synthetic oligonucleotide
acuguugauauuguugaug

SEQ ID NO: 2435578 - RNA, 19 nt, Artificial Sequence
  Description of Artificial Sequence: Synthetic oligonucleotide
uccguggccauuuuggaaa

SEQ ID NO: 2435579 - RNA, 19 nt, Artificial Sequence
  Description of Artificial Sequence: Synthetic oligonucleotide
gcaaaugcauccuaauacc

SEQ ID NO: 2435580 - RNA, 19 nt, Artificial Sequence
  Description of Artificial Sequence: Synthetic oligonucleotide
gacacagcuaaugcugacg

SEQ ID NO: 2435581 - RNA, 19 nt, Artificial Sequence
  Description of Artificial Sequence: Synthetic oligonucleotide
gacagcgugguucagaggu

SEQ ID NO: 2435582 - RNA, 19 nt, Artificial Sequence
  Description of Artificial Sequence: Synthetic oligonucleotide
cacaccgugagucaucaac

SEQ ID NO: 2435583 - RNA, 19 nt, Artificial Sequence
  Description of Artificial Sequence: Synthetic oligonucleotide
cucgacuuggagaugccag

SEQ ID NO: 2435584 - RNA, 19 nt, Artificial Sequence
  Description of Artificial Sequence: Synthetic oligonucleotide
aggacagcgugguucagag

SEQ ID NO: 2435585 - RNA, 19 nt, Artificial Sequence
  Description of Artificial Sequence: Synthetic oligonucleotide
aauccguggccauuuugga

SEQ ID NO: 2435586 - RNA, 19 nt, Artificial Sequence
  Description of Artificial Sequence: Synthetic oligonucleotide
uugcucugcacgaauuucu

SEQ ID NO: 2435587 - RNA, 19 nt, Artificial Sequence
  Description of Artificial Sequence: Synthetic oligonucleotide
cacgaauuucugcagcacc

SEQ ID NO: 2435588 - RNA, 19 nt, Artificial Sequence
  Description of Artificial Sequence: Synthetic oligonucleotide
aaggcaaaugcauccuaau

SEQ ID NO: 2435589 - RNA, 19 nt, Artificial Sequence
  Description of Artificial Sequence: Synthetic oligonucleotide
cuccuucucaaucagccac

SEQ ID NO: 2435590 - RNA, 19 nt, Artificial Sequence
  Description of Artificial Sequence: Synthetic oligonucleotide
gucgaagacuucuggaaug

SEQ ID NO: 2435591 - RNA, 19 nt, Artificial Sequence
  Description of Artificial Sequence: Synthetic oligonucleotide
ugauauuguugaugaaguc

SEQ ID NO: 2435592 - RNA, 19 nt, Artificial Sequence
  Description of Artificial Sequence: Synthetic oligonucleotide
gaagcaaagccaguuucug

SEQ ID NO: 2435593 - RNA, 19 nt, Artificial Sequence
  Description of Artificial Sequence: Synthetic oligonucleotide
auacaaggacuccaagaca

SEQ ID NO: 2435594 - RNA, 19 nt, Artificial Sequence
  Description of Artificial Sequence: Synthetic oligonucleotide
cugcccugcauguuggagg

SEQ ID NO: 2435595 - RNA, 19 nt, Artificial Sequence
  Description of Artificial Sequence: Synthetic oligonucleotide
uaaccucccacuccuccag

SEQ ID NO: 2435596 - RNA, 19 nt, Artificial Sequence
  Description of Artificial Sequence: Synthetic oligonucleotide
cauaaaugggucucccauc

SEQ ID NO: 2435597 - RNA, 19 nt, Artificial Sequence
  Description of Artificial Sequence: Synthetic oligonucleotide
ugacggguccgcaaggacu

SEQ ID NO: 2435598 - RNA, 19 nt, Artificial Sequence
  Description of Artificial Sequence: Synthetic oligonucleotide
aaugcugacggguccgcaa

SEQ ID NO: 2435599 - RNA, 19 nt, Artificial Sequence
  Description of Artificial Sequence: Synthetic oligonucleotide
caaucagccacuugcucug

SEQ ID NO: 2435600 - RNA, 19 nt, Artificial Sequence
  Description of Artificial Sequence: Synthetic oligonucleotide
augucguggggccagaaau

SEQ ID NO: 2435601 - RNA, 19 nt, Artificial Sequence
  Description of Artificial Sequence: Synthetic oligonucleotide
aguugaucaaccagguuca

SEQ ID NO: 2435602 - RNA, 19 nt, Artificial Sequence
  Description of Artificial Sequence: Synthetic oligonucleotide
gaaguuguagaaagauuca

SEQ ID NO: 2435603 - RNA, 19 nt, Artificial Sequence
  Description of Artificial Sequence: Synthetic oligonucleotide
ugcauccuaauaccacaug

SEQ ID NO: 2435604 - RNA, 19 nt, Artificial Sequence
  Description of Artificial Sequence: Synthetic oligonucleotide
caaagccaguuucugaguc

SEQ ID NO: 2435605 - RNA, 19 nt, Artificial Sequence
  Description of Artificial Sequence: Synthetic oligonucleotide
uaauaccacaugucucaca

SEQ ID NO: 2435606 - RNA, 19 nt, Artificial Sequence
  Description of Artificial Sequence: Synthetic oligonucleotide
cucccucuccuucucaggg

SEQ ID NO: 2435607 - RNA, 19 nt, Artificial Sequence
  Description of Artificial Sequence: Synthetic oligonucleotide
ucagggucgaagacuucug

SEQ ID NO: 2435608 - RNA, 19 nt, Artificial Sequence
  Description of Artificial Sequence: Synthetic oligonucleotide
caugcaaggugaacucccc

SEQ ID NO: 2435609 - RNA, 19 nt, Artificial Sequence
  Description of Artificial Sequence: Synthetic oligonucleotide
aaugucguggggccagaaa

SEQ ID NO: 2435610 - RNA, 19 nt, Artificial Sequence
  Description of Artificial Sequence: Synthetic oligonucleotide
uccgugauuccuuucuuua

SEQ ID NO: 2435611 - RNA, 19 nt, Artificial Sequence
  Description of Artificial Sequence: Synthetic oligonucleotide
agaagaagcaaagccaguu

SEQ ID NO: 2435612 - RNA, 19 nt, Artificial Sequence
  Description of Artificial Sequence: Synthetic oligonucleotide
guuucugagucaacaauca

SEQ ID NO: 2435613 - RNA, 19 nt, Artificial Sequence
  Description of Artificial Sequence: Synthetic oligonucleotide
agagguggacuggaaguac

SEQ ID NO: 2435614 - RNA, 19 nt, Artificial Sequence
  Description of Artificial Sequence: Synthetic oligonucleotide
auuacagugaggacagcgu

SEQ ID NO: 2435615 - RNA, 19 nt, Artificial Sequence
  Description of Artificial Sequence: Synthetic oligonucleotide
auccggguaggucucucgg

SEQ ID NO: 2435616 - RNA, 19 nt, Artificial Sequence
  Description of Artificial Sequence: Synthetic oligonucleotide
cuuguagcagugguucugc

SEQ ID NO: 2435617 - RNA, 19 nt, Artificial Sequence
  Description of Artificial Sequence: Synthetic oligonucleotide
ccagaaaucauuacaguga

SEQ ID NO: 2435618 - RNA, 19 nt, Artificial Sequence
  Description of Artificial Sequence: Synthetic oligonucleotide
uccgucauggcacccacuu

SEQ ID NO: 2435619 - RNA, 19 nt, Artificial Sequence
  Description of Artificial Sequence: Synthetic oligonucleotide
gaggccguggcagauguug

SEQ ID NO: 2435620 - RNA, 19 nt, Artificial Sequence
  Description of Artificial Sequence: Synthetic oligonucleotide
ccuaauaccacaugucuca

SEQ ID NO: 2435621 - RNA, 19 nt, Artificial Sequence
  Description of Artificial Sequence: Synthetic oligonucleotide
agcauaaaugggucuccca

SEQ ID NO: 2435622 - RNA, 19 nt, Artificial Sequence
  Description of Artificial Sequence: Synthetic oligonucleotide
cacgcaaggcaaaugcauc

SEQ ID NO: 2435623 - RNA, 19 nt, Artificial Sequence
  Description of Artificial Sequence: Synthetic oligonucleotide
ggaaacugaaguuguagaa

SEQ ID NO: 2435624 - RNA, 19 nt, Artificial Sequence
  Description of Artificial Sequence: Synthetic oligonucleotide
gaaguacuuggccacgcaa

SEQ ID NO: 2435625 - RNA, 19 nt, Artificial Sequence
  Description of Artificial Sequence: Synthetic oligonucleotide
ugucguggggccagaaauc

SEQ ID NO: 2435626 - RNA, 19 nt, Artificial Sequence
  Description of Artificial Sequence: Synthetic oligonucleotide
aggucucucggaugaacug

SEQ ID NO: 2435627 - RNA, 19 nt, Artificial Sequence
  Description of Artificial Sequence: Synthetic oligonucleotide
ucgaagacuucuggaaugu

SEQ ID NO: 2435628 - RNA, 19 nt, Artificial Sequence
  Description of Artificial Sequence: Synthetic oligonucleotide
agaaaucauuacagugagg

SEQ ID NO: 2435629 - RNA, 19 nt, Artificial Sequence
  Description of Artificial Sequence: Synthetic oligonucleotide
gugguucagagguggacug

SEQ ID NO: 2435630 - RNA, 19 nt, Artificial Sequence
  Description of Artificial Sequence: Synthetic oligonucleotide
gagucaacaaucaguucca

SEQ ID NO: 2435631 - RNA, 19 nt, Artificial Sequence
  Description of Artificial Sequence: Synthetic oligonucleotide
uggaaugucguggggccag

SEQ ID NO: 2435632 - RNA, 19 nt, Artificial Sequence
  Description of Artificial Sequence: Synthetic oligonucleotide
agaagcaaagccaguuucu

SEQ ID NO: 2435633 - RNA, 19 nt, Artificial Sequence
  Description of Artificial Sequence: Synthetic oligonucleotide
cugcacgaauuucugcagc

SEQ ID NO: 2435634 - RNA, 19 nt, Artificial Sequence
  Description of Artificial Sequence: Synthetic oligonucleotide
cagggucgaagacuucugg

SEQ ID NO: 2435635 - RNA, 19 nt, Artificial Sequence
  Description of Artificial Sequence: Synthetic oligonucleotide
ugcugacggguccgcaagg

SEQ ID NO: 2435636 - RNA, 19 nt, Artificial Sequence
  Description of Artificial Sequence: Synthetic oligonucleotide
gauggcccggccaugcaag

SEQ ID NO: 2435637 - RNA, 19 nt, Artificial Sequence
  Description of Artificial Sequence: Synthetic oligonucleotide
agggucgaagacuucugga

SEQ ID NO: 2435638 - RNA, 19 nt, Artificial Sequence
  Description of Artificial Sequence: Synthetic oligonucleotide
acgaauuucugcagcaccu

SEQ ID NO: 2435639 - RNA, 19 nt, Artificial Sequence
  Description of Artificial Sequence: Synthetic oligonucleotide
aagccaguuucugagucaa

SEQ ID NO: 2435640 - RNA, 19 nt, Artificial Sequence
  Description of Artificial Sequence: Synthetic oligonucleotide
caccgugagucaucaacag

SEQ ID NO: 2435641 - RNA, 19 nt, Artificial Sequence
  Description of Artificial Sequence: Synthetic oligonucleotide
cacagcuaaugcugacggg

SEQ ID NO: 2435642 - RNA, 19 nt, Artificial Sequence
  Description of Artificial Sequence: Synthetic oligonucleotide
cagagcauaaaugggucuc

SEQ ID NO: 2435643 - RNA, 19 nt, Artificial Sequence
  Description of Artificial Sequence: Synthetic oligonucleotide
cucacagcuuugacccugg

SEQ ID NO: 2435644 - RNA, 19 nt, Artificial Sequence
  Description of Artificial Sequence: Synthetic oligonucleotide
caugucucacagcuuugac

SEQ ID NO: 2435645 - RNA, 19 nt, Artificial Sequence
  Description of Artificial Sequence: Synthetic oligonucleotide
cuuugacccuggaugagga

SEQ ID NO: 2435646 - RNA, 19 nt, Artificial Sequence
  Description of Artificial Sequence: Synthetic oligonucleotide
ggccacgcaaggcaaaugc

SEQ ID NO: 2435647 - RNA, 19 nt, Artificial Sequence
  Description of Artificial Sequence: Synthetic oligonucleotide
cugcucgacuuggagaugc

SEQ ID NO: 2435648 - RNA, 19 nt, Artificial Sequence
  Description of Artificial Sequence: Synthetic oligonucleotide
uccagcacaccgugaguca

SEQ ID NO: 2435649 - RNA, 19 nt, Artificial Sequence
  Description of Artificial Sequence: Synthetic oligonucleotide
acuuuccuugugcugcccu

SEQ ID NO: 2435650 - RNA, 19 nt, Artificial Sequence
  Description of Artificial Sequence: Synthetic oligonucleotide
gagcauaaaugggucuccc

SEQ ID NO: 2435651 - RNA, 19 nt, Artificial Sequence
  Description of Artificial Sequence: Synthetic oligonucleotide
ccaaagccuuucuaaacag

SEQ ID NO: 2435652 - RNA, 19 nt, Artificial Sequence
  Description of Artificial Sequence: Synthetic oligonucleotide
acaccgugagucaucaaca

SEQ ID NO: 2435653 - RNA, 19 nt, Artificial Sequence
  Description of Artificial Sequence: Synthetic oligonucleotide
augcaggacacagcuaaug

SEQ ID NO: 2435654 - RNA, 19 nt, Artificial Sequence
  Description of Artificial Sequence: Synthetic oligonucleotide
cauccggguaggucucucg

SEQ ID NO: 2435655 - RNA, 19 nt, Artificial Sequence
  Description of Artificial Sequence: Synthetic oligonucleotide
gucauggaccuuguagcag

SEQ ID NO: 2435656 - RNA, 19 nt, Artificial Sequence
  Description of Artificial Sequence: Synthetic oligonucleotide
cuugcucugcacgaauuuc

SEQ ID NO: 2435657 - RNA, 19 nt, Artificial Sequence
  Description of Artificial Sequence: Synthetic oligonucleotide
acuugcucugcacgaauuu

SEQ ID NO: 2435658 - RNA, 19 nt, Artificial Sequence
  Description of Artificial Sequence: Synthetic oligonucleotide
ugaguugaucaaccagguu

SEQ ID NO: 2435659 - RNA, 19 nt, Artificial Sequence
  Description of Artificial Sequence: Synthetic oligonucleotide
uccagcucguucucggcaa

SEQ ID NO: 2435660 - RNA, 19 nt, Artificial Sequence
  Description of Artificial Sequence: Synthetic oligonucleotide
aucuuccgugauuccuuuc

SEQ ID NO: 2435661 - RNA, 19 nt, Artificial Sequence
  Description of Artificial Sequence: Synthetic oligonucleotide
aggaggccguggcagaugu

SEQ ID NO: 2435662 - RNA, 19 nt, Artificial Sequence
  Description of Artificial Sequence: Synthetic oligonucleotide
caaggcaaaugcauccuaa

SEQ ID NO: 2435663 - RNA, 19 nt, Artificial Sequence
  Description of Artificial Sequence: Synthetic oligonucleotide
uugaucaaccagguucaaa

SEQ ID NO: 2435664 - RNA, 19 nt, Artificial Sequence
  Description of Artificial Sequence: Synthetic oligonucleotide
acaugucucacagcuuuga

SEQ ID NO: 2435665 - RNA, 19 nt, Artificial Sequence
  Description of Artificial Sequence: Synthetic oligonucleotide
cagcuaaugcugacggguc

SEQ ID NO: 2435666 - RNA, 19 nt, Artificial Sequence
  Description of Artificial Sequence: Synthetic oligonucleotide
agauucaccagagcauaaa

SEQ ID NO: 2435667 - RNA, 19 nt, Artificial Sequence
  Description of Artificial Sequence: Synthetic oligonucleotide
cagcgugguucagaggugg

SEQ ID NO: 2435668 - RNA, 19 nt, Artificial Sequence
  Description of Artificial Sequence: Synthetic oligonucleotide
gucaacaaucaguuccaaa

SEQ ID NO: 2435669 - RNA, 19 nt, Artificial Sequence
  Description of Artificial Sequence: Synthetic oligonucleotide
acagcuggaggaagcgccg

SEQ ID NO: 2435670 - RNA, 19 nt, Artificial Sequence
  Description of Artificial Sequence: Synthetic oligonucleotide
uaaaugggucucccaucau

SEQ ID NO: 2435671 - RNA, 19 nt, Artificial Sequence
  Description of Artificial Sequence: Synthetic oligonucleotide
cugagucaacaaucaguuc

SEQ ID NO: 2435672 - RNA, 19 nt, Artificial Sequence
  Description of Artificial Sequence: Synthetic oligonucleotide
uuucggucauggaccuugu

SEQ ID NO: 2435673 - RNA, 19 nt, Artificial Sequence
  Description of Artificial Sequence: Synthetic oligonucleotide
uccggguaggucucucgga

SEQ ID NO: 2435674 - RNA, 19 nt, Artificial Sequence
  Description of Artificial Sequence: Synthetic oligonucleotide
cuaaccucccacuccucca

SEQ ID NO: 2435675 - RNA, 19 nt, Artificial Sequence
  Description of Artificial Sequence: Synthetic oligonucleotide
gaggaagcgccgauggaca

SEQ ID NO: 2435676 - RNA, 19 nt, Artificial Sequence
  Description of Artificial Sequence: Synthetic oligonucleotide
aagauucaccagagcauaa

SEQ ID NO: 2435677 - RNA, 19 nt, Artificial Sequence
  Description of Artificial Sequence: Synthetic oligonucleotide
cccacuuuccuugugcugc

SEQ ID NO: 2435678 - RNA, 19 nt, Artificial Sequence
  Description of Artificial Sequence: Synthetic oligonucleotide
ugcauguuggagggagcgc

SEQ ID NO: 2435679 - RNA, 19 nt, Artificial Sequence
  Description of Artificial Sequence: Synthetic oligonucleotide
caucaacagcuggaggaag

SEQ ID NO: 2435680 - RNA, 19 nt, Artificial Sequence
  Description of Artificial Sequence: Synthetic oligonucleotide
cuggaaguacuuggccacg

SEQ ID NO: 2435681 - RNA, 19 nt, Artificial Sequence
  Description of Artificial Sequence: Synthetic oligonucleotide
gcuuugacccuggaugagg

SEQ ID NO: 2435682 - RNA, 19 nt, Artificial Sequence
  Description of Artificial Sequence: Synthetic oligonucleotide
agacacuguugauauuguu

SEQ ID NO: 2435683 - RNA, 19 nt, Artificial Sequence
  Description of Artificial Sequence: Synthetic oligonucleotide
auccguggccauuuuggaa

SEQ ID NO: 2435684 - RNA, 19 nt, Artificial Sequence
  Description of Artificial Sequence: Synthetic oligonucleotide
ggaggaagcgccgauggac

SEQ ID NO: 2435685 - RNA, 19 nt, Artificial Sequence
  Description of Artificial Sequence: Synthetic oligonucleotide
uggggccagaaaucauuac

SEQ ID NO: 2435686 - RNA, 19 nt, Artificial Sequence
  Description of Artificial Sequence: Synthetic oligonucleotide
guucugcaggcgccuaacc

SEQ ID NO: 2435687 - RNA, 19 nt, Artificial Sequence
  Description of Artificial Sequence: Synthetic oligonucleotide
acccuggaugaggaggccg

SEQ ID NO: 2435688 - RNA, 19 nt, Artificial Sequence
  Description of Artificial Sequence: Synthetic oligonucleotide
ggucucucggaugaacugc

SEQ ID NO: 2435689 - RNA, 19 nt, Artificial Sequence
  Description of Artificial Sequence: Synthetic oligonucleotide
guacuuggccacgcaaggc

SEQ ID NO: 2435690 - RNA, 19 nt, Artificial Sequence
  Description of Artificial Sequence: Synthetic oligonucleotide
guagcauuucggucaugga

SEQ ID NO: 2435691 - RNA, 19 nt, Artificial Sequence
  Description of Artificial Sequence: Synthetic oligonucleotide
agcgccgauggacauccgu

SEQ ID NO: 2435692 - RNA, 19 nt, Artificial Sequence
  Description of Artificial Sequence: Synthetic oligonucleotide
auggcccggccaugcaagg

SEQ ID NO: 2435693 - RNA, 19 nt, Artificial Sequence
  Description of Artificial Sequence: Synthetic oligonucleotide
gucauggcacccacuuucc

SEQ ID NO: 2435694 - RNA, 19 nt, Artificial Sequence
  Description of Artificial Sequence: Synthetic oligonucleotide
gcauccuaauaccacaugu

SEQ ID NO: 2435695 - RNA, 19 nt, Artificial Sequence
  Description of Artificial Sequence: Synthetic oligonucleotide
guaggucucucggaugaac

SEQ ID NO: 2435696 - RNA, 19 nt, Artificial Sequence
  Description of Artificial Sequence: Synthetic oligonucleotide
gcagugguucugcaggcgc

SEQ ID NO: 2435697 - RNA, 19 nt, Artificial Sequence
  Description of Artificial Sequence: Synthetic oligonucleotide
cgcaaggacuuucugcucg

SEQ ID NO: 2435698 - RNA, 19 nt, Artificial Sequence
  Description of Artificial Sequence: Synthetic oligonucleotide
agauggcccggccaugcaa

SEQ ID NO: 2435699 - RNA, 19 nt, Artificial Sequence
  Description of Artificial Sequence: Synthetic oligonucleotide
ccuaaccucccacuccucc

SEQ ID NO: 2435700 - RNA, 19 nt, Artificial Sequence
  Description of Artificial Sequence: Synthetic oligonucleotide
gccuuugaguugaucaacc

SEQ ID NO: 2435701 - RNA, 19 nt, Artificial Sequence
  Description of Artificial Sequence: Synthetic oligonucleotide
cgauggacauccgucaugg

SEQ ID NO: 2435702 - RNA, 19 nt, Artificial Sequence
  Description of Artificial Sequence: Synthetic oligonucleotide
uggagaugccagccucccu

SEQ ID NO: 2435703 - RNA, 19 nt, Artificial Sequence
  Description of Artificial Sequence: Synthetic oligonucleotide
gucguggggccagaaauca

SEQ ID NO: 2435704 - RNA, 19 nt, Artificial Sequence
  Description of Artificial Sequence: Synthetic oligonucleotide
gggucgaagacuucuggaa

SEQ ID NO: 2435705 - RNA, 19 nt, Artificial Sequence
  Description of Artificial Sequence: Synthetic oligonucleotide
ccuugugcugcccugcaug

SEQ ID NO: 2435706 - RNA, 19 nt, Artificial Sequence
  Description of Artificial Sequence: Synthetic oligonucleotide
cugacggguccgcaaggac

SEQ ID NO: 2435707 - RNA, 19 nt, Artificial Sequence
  Description of Artificial Sequence: Synthetic oligonucleotide
gccaguuucugagucaaca

SEQ ID NO: 2435708 - RNA, 19 nt, Artificial Sequence
  Description of Artificial Sequence: Synthetic oligonucleotide
gaggacagcgugguucaga

SEQ ID NO: 2435709 - RNA, 19 nt, Artificial Sequence
  Description of Artificial Sequence: Synthetic oligonucleotide
ccgugagucaucaacagcu

SEQ ID NO: 2435710 - RNA, 19 nt, Artificial Sequence
  Description of Artificial Sequence: Synthetic oligonucleotide
augcauccuaauaccacau

SEQ ID NO: 2435711 - RNA, 19 nt, Artificial Sequence
  Description of Artificial Sequence: Synthetic oligonucleotide
cgucauggcacccacuuuc

SEQ ID NO: 2435712 - RNA, 19 nt, Artificial Sequence
  Description of Artificial Sequence: Synthetic oligonucleotide
ucugcucgacuuggagaug

SEQ ID NO: 2435713 - RNA, 19 nt, Artificial Sequence
  Description of Artificial Sequence: Synthetic oligonucleotide
cuaaacagguccagcucgu

SEQ ID NO: 2435714 - RNA, 19 nt, Artificial Sequence
  Description of Artificial Sequence: Synthetic oligonucleotide
aggcgccuaaccucccacu

SEQ ID NO: 2435715 - RNA, 19 nt, Artificial Sequence
  Description of Artificial Sequence: Synthetic oligonucleotide
ggacauccgucauggcacc

SEQ ID NO: 2435716 - RNA, 19 nt, Artificial Sequence
  Description of Artificial Sequence: Synthetic oligonucleotide
ccuuucuuuaucucaauau

SEQ ID NO: 2435717 - RNA, 19 nt, Artificial Sequence
  Description of Artificial Sequence: Synthetic oligonucleotide
ugcaggcgccuaaccuccc

SEQ ID NO: 2435718 - RNA, 19 nt, Artificial Sequence
  Description of Artificial Sequence: Synthetic oligonucleotide
caguuucugagucaacaau

SEQ ID NO: 2435719 - RNA, 19 nt, Artificial Sequence
  Description of Artificial Sequence: Synthetic oligonucleotide
caggcgccuaaccucccac

SEQ ID NO: 2435720 - RNA, 19 nt, Artificial Sequence
  Description of Artificial Sequence: Synthetic oligonucleotide
ccacuccuccagcacaccg

SEQ ID NO: 2435721 - RNA, 19 nt, Artificial Sequence
  Description of Artificial Sequence: Synthetic oligonucleotide
gacauccgucauggcaccc

SEQ ID NO: 2435722 - RNA, 19 nt, Artificial Sequence
  Description of Artificial Sequence: Synthetic oligonucleotide
ggucucccaucaucuuccg

SEQ ID NO: 2435723 - RNA, 19 nt, Artificial Sequence
  Description of Artificial Sequence: Synthetic oligonucleotide
uucggucauggaccuugua

SEQ ID NO: 2435724 - RNA, 19 nt, Artificial Sequence
  Description of Artificial Sequence: Synthetic oligonucleotide
cuugugcugcccugcaugu

SEQ ID NO: 2435725 - RNA, 19 nt, Artificial Sequence
  Description of Artificial Sequence: Synthetic oligonucleotide
ggaaguacuuggccacgca

SEQ ID NO: 2435726 - RNA, 19 nt, Artificial Sequence
  Description of Artificial Sequence: Synthetic oligonucleotide
ggacacagcuaaugcugac

SEQ ID NO: 2435727 - RNA, 19 nt, Artificial Sequence
  Description of Artificial Sequence: Synthetic oligonucleotide
uggccacgcaaggcaaaug

SEQ ID NO: 2435728 - RNA, 19 nt, Artificial Sequence
  Description of Artificial Sequence: Synthetic oligonucleotide
agucaacaaucaguuccaa

SEQ ID NO: 2435729 - RNA, 19 nt, Artificial Sequence
  Description of Artificial Sequence: Synthetic oligonucleotide
agcucguucucggcaaaau

SEQ ID NO: 2435730 - RNA, 19 nt, Artificial Sequence
  Description of Artificial Sequence: Synthetic oligonucleotide
acagcgugguucagaggug

SEQ ID NO: 2435731 - RNA, 19 nt, Artificial Sequence
  Description of Artificial Sequence: Synthetic oligonucleotide
cagcacaccgugagucauc

SEQ ID NO: 2435732 - RNA, 19 nt, Artificial Sequence
  Description of Artificial Sequence: Synthetic oligonucleotide
gguucagagguggacugga

SEQ ID NO: 2435733 - RNA, 19 nt, Artificial Sequence
  Description of Artificial Sequence: Synthetic oligonucleotide
ggacagcgugguucagagg

SEQ ID NO: 2435734 - RNA, 19 nt, Artificial Sequence
  Description of Artificial Sequence: Synthetic oligonucleotide
acuuggccacgcaaggcaa

SEQ ID NO: 2435735 - RNA, 19 nt, Artificial Sequence
  Description of Artificial Sequence: Synthetic oligonucleotide
ccuuugaguugaucaacca

SEQ ID NO: 2435736 - RNA, 19 nt, Artificial Sequence
  Description of Artificial Sequence: Synthetic oligonucleotide
gcgccuaaccucccacucc

SEQ ID NO: 2435737 - RNA, 19 nt, Artificial Sequence
  Description of Artificial Sequence: Synthetic oligonucleotide
cagguucaaaauguuugua

SEQ ID NO: 2435738 - RNA, 19 nt, Artificial Sequence
  Description of Artificial Sequence: Synthetic oligonucleotide
ggucgaagacuucuggaau

SEQ ID NO: 2435739 - RNA, 19 nt, Artificial Sequence
  Description of Artificial Sequence: Synthetic oligonucleotide
ggcgccuaaccucccacuc

SEQ ID NO: 2435740 - RNA, 19 nt, Artificial Sequence
  Description of Artificial Sequence: Synthetic oligonucleotide
cagagguggacuggaagua

SEQ ID NO: 2435741 - RNA, 19 nt, Artificial Sequence
  Description of Artificial Sequence: Synthetic oligonucleotide
cgugagucaucaacagcug

SEQ ID NO: 2435742 - RNA, 19 nt, Artificial Sequence
  Description of Artificial Sequence: Synthetic oligonucleotide
guggggccagaaaucauua

SEQ ID NO: 2435743 - RNA, 19 nt, Artificial Sequence
  Description of Artificial Sequence: Synthetic oligonucleotide
ccgauggacauccgucaug

SEQ ID NO: 2435744 - RNA, 19 nt, Artificial Sequence
  Description of Artificial Sequence: Synthetic oligonucleotide
gucucucggaugaacugcu

SEQ ID NO: 2435745 - RNA, 19 nt, Artificial Sequence
  Description of Artificial Sequence: Synthetic oligonucleotide
gcacgaauuucugcagcac

SEQ ID NO: 2435746 - RNA, 19 nt, Artificial Sequence
  Description of Artificial Sequence: Synthetic oligonucleotide
cacuccuccagcacaccgu

SEQ ID NO: 2435747 - RNA, 19 nt, Artificial Sequence
  Description of Artificial Sequence: Synthetic oligonucleotide
gacggguccgcaaggacuu

SEQ ID NO: 2435748 - RNA, 19 nt, Artificial Sequence
  Description of Artificial Sequence: Synthetic oligonucleotide
gcaaggcaaaugcauccua

SEQ ID NO: 2435749 - RNA, 19 nt, Artificial Sequence
  Description of Artificial Sequence: Synthetic oligonucleotide
uggcccggccaugcaaggu

SEQ ID NO: 2435750 - RNA, 19 nt, Artificial Sequence
  Description of Artificial Sequence: Synthetic oligonucleotide
cgacuuggagaugccagcc

SEQ ID NO: 2435751 - RNA, 19 nt, Artificial Sequence
  Description of Artificial Sequence: Synthetic oligonucleotide
gcauuucggucauggaccu

SEQ ID NO: 2435752 - RNA, 19 nt, Artificial Sequence
  Description of Artificial Sequence: Synthetic oligonucleotide
guugaucaaccagguucaa

SEQ ID NO: 2435753 - RNA, 19 nt, Artificial Sequence
  Description of Artificial Sequence: Synthetic oligonucleotide
caaccagguucaaaauguu

SEQ ID NO: 2435754 - RNA, 19 nt, Artificial Sequence
  Description of Artificial Sequence: Synthetic oligonucleotide
cacagcuuugacccuggau

SEQ ID NO: 2435755 - RNA, 19 nt, Artificial Sequence
  Description of Artificial Sequence: Synthetic oligonucleotide
aagcgccgauggacauccg

SEQ ID NO: 2435756 - RNA, 19 nt, Artificial Sequence
  Description of Artificial Sequence: Synthetic oligonucleotide
agcgugguucagaggugga

SEQ ID NO: 2435757 - RNA, 19 nt, Artificial Sequence
  Description of Artificial Sequence: Synthetic oligonucleotide
uugugcugcccugcauguu

SEQ ID NO: 2435758 - RNA, 19 nt, Artificial Sequence
  Description of Artificial Sequence: Synthetic oligonucleotide
gcgccgauggacauccguc

SEQ ID NO: 2435759 - RNA, 19 nt, Artificial Sequence
  Description of Artificial Sequence: Synthetic oligonucleotide
gccacgcaaggcaaaugca

SEQ ID NO: 2435760 - RNA, 19 nt, Artificial Sequence
  Description of Artificial Sequence: Synthetic oligonucleotide
gcgugguucagagguggac

SEQ ID NO: 2435761 - RNA, 19 nt, Artificial Sequence
  Description of Artificial Sequence: Synthetic oligonucleotide
cacuugcucugcacgaauu

SEQ ID NO: 2435762 - RNA, 19 nt, Artificial Sequence
  Description of Artificial Sequence: Synthetic oligonucleotide
ccacaugucucacagcuuu

SEQ ID NO: 2435763 - RNA, 19 nt, Artificial Sequence
  Description of Artificial Sequence: Synthetic oligonucleotide
ggaagcgccgauggacauc

SEQ ID NO: 2435764 - RNA, 19 nt, Artificial Sequence
  Description of Artificial Sequence: Synthetic oligonucleotide
gcaaaauccguggccauuu

SEQ ID NO: 2435765 - RNA, 19 nt, Artificial Sequence
  Description of Artificial Sequence: Synthetic oligonucleotide
caugcaggacacagcuaau

SEQ ID NO: 2435766 - RNA, 19 nt, Artificial Sequence
  Description of Artificial Sequence: Synthetic oligonucleotide
gcugacggguccgcaagga

SEQ ID NO: 2435767 - RNA, 19 nt, Artificial Sequence
  Description of Artificial Sequence: Synthetic oligonucleotide
gcucgacuuggagaugcca

SEQ ID NO: 2435768 - RNA, 19 nt, Artificial Sequence
  Description of Artificial Sequence: Synthetic oligonucleotide
ccagagcauaaaugggucu

SEQ ID NO: 2435769 - RNA, 19 nt, Artificial Sequence
  Description of Artificial Sequence: Synthetic oligonucleotide
ccacgcaaggcaaaugcau

SEQ ID NO: 2435770 - RNA, 19 nt, Artificial Sequence
  Description of Artificial Sequence: Synthetic oligonucleotide
ccgcaaggacuuucugcuc

SEQ ID NO: 2435771 - RNA, 19 nt, Artificial Sequence
  Description of Artificial Sequence: Synthetic oligonucleotide
gcaggcgccuaaccuccca

SEQ ID NO: 2435772 - RNA, 19 nt, Artificial Sequence
  Description of Artificial Sequence: Synthetic oligonucleotide
cggguaggucucucggaug

SEQ ID NO: 2435773 - RNA, 19 nt, Artificial Sequence
  Description of Artificial Sequence: Synthetic oligonucleotide
ccaagauggcccggccaug

SEQ ID NO: 2435774 - RNA, 19 nt, Artificial Sequence
  Description of Artificial Sequence: Synthetic oligonucleotide
cgccgauggacauccguca

SEQ ID NO: 2435775 - RNA, 19 nt, Artificial Sequence
  Description of Artificial Sequence: Synthetic oligonucleotide
ggaaugucguggggccaga

SEQ ID NO: 2435776 - RNA, 19 nt, Artificial Sequence
  Description of Artificial Sequence: Synthetic oligonucleotide
gccacuugcucugcacgaa

SEQ ID NO: 2435777 - RNA, 19 nt, Artificial Sequence
  Description of Artificial Sequence: Synthetic oligonucleotide
ccggccaugcaaggugaac

SEQ ID NO: 2435778 - RNA, 19 nt, Artificial Sequence
  Description of Artificial Sequence: Synthetic oligonucleotide
gugguucugcaggcgccua

SEQ ID NO: 2435779 - RNA, 19 nt, Artificial Sequence
  Description of Artificial Sequence: Synthetic oligonucleotide
gccgauggacauccgucau

SEQ ID NO: 2435780 - RNA, 19 nt, Artificial Sequence
  Description of Artificial Sequence: Synthetic oligonucleotide
gcccggccaugcaagguga

SEQ ID NO: 2435781 - RNA, 19 nt, Artificial Sequence
  Description of Artificial Sequence: Synthetic oligonucleotide
ggaccuuguagcagugguu

SEQ ID NO: 2435782 - RNA, 19 nt, Artificial Sequence
  Description of Artificial Sequence: Synthetic oligonucleotide
ccguggcagauguugcaua

SEQ ID NO: 2435783 - RNA, 19 nt, Artificial Sequence
  Description of Artificial Sequence: Synthetic oligonucleotide
ccggguaggucucucggau

SEQ ID NO: 2435784 - RNA, 19 nt, Artificial Sequence
  Description of Artificial Sequence: Synthetic oligonucleotide
cgccuaaccucccacuccu

SEQ ID NO: 2435785 - RNA, 19 nt, Artificial Sequence
  Description of Artificial Sequence: Synthetic oligonucleotide
cggccaugcaaggugaacu

SEQ ID NO: 2435786 - RNA, 19 nt, Artificial Sequence
  Description of Artificial Sequence: Synthetic oligonucleotide
gccguggcagauguugcau

SEQ ID NO: 2435787 - RNA, 19 nt, Artificial Sequence
  Description of Artificial Sequence: Synthetic oligonucleotide
gcuccgcuuccuucuuccu

SEQ ID NO: 2435788 - RNA, 19 nt, Artificial Sequence
  Description of Artificial Sequence: Synthetic oligonucleotide
gccaugcaggacacagcua

SEQ ID NO: 2435789 - RNA, 19 nt, Artificial Sequence
  Description of Artificial Sequence: Synthetic oligonucleotide
gccuaaccucccacuccuc

SEQ ID NO: 2435790 - RNA, 19 nt, Artificial Sequence
  Description of Artificial Sequence: Synthetic oligonucleotide
ccacuugcucugcacgaau

SEQ ID NO: 2435791 - RNA, 19 nt, Artificial Sequence
  Description of Artificial Sequence: Synthetic oligonucleotide
gcacaccgugagucaucaa

SEQ ID NO: 2435792 - RNA, 19 nt, Artificial Sequence
  Description of Artificial Sequence: Synthetic oligonucleotide
cggguccgcaaggacuuuc

SEQ ID NO: 2435793 - RNA, 19 nt, Artificial Sequence
  Description of Artificial Sequence: Synthetic oligonucleotide
cauuucggucauggaccuu

SEQ ID NO: 2435794 - RNA, 19 nt, Artificial Sequence
  Description of Artificial Sequence: Synthetic oligonucleotide
cccggccaugcaaggugaa

SEQ ID NO: 2435795 - RNA, 19 nt, Artificial Sequence
  Description of Artificial Sequence: Synthetic oligonucleotide
ccgucauggcacccacuuu

SEQ ID NO: 2435796 - RNA, 19 nt, Artificial Sequence
  Description of Artificial Sequence: Synthetic oligonucleotide
ccgcuuccuucuuccucau

SEQ ID NO: 2435797 - RNA, 19 nt, Artificial Sequence
  Description of Artificial Sequence: Synthetic oligonucleotide
uugaaauucucuaucaugg

SEQ ID NO: 2435798 - RNA, 19 nt, Artificial Sequence
  Description of Artificial Sequence: Synthetic oligonucleotide
uguagggagacauauuugg

SEQ ID NO: 2435799 - RNA, 19 nt, Artificial Sequence
  Description of Artificial Sequence: Synthetic oligonucleotide
aagcauguugccuuugccc

SEQ ID NO: 2435800 - RNA, 19 nt, Artificial Sequence
  Description of Artificial Sequence: Synthetic oligonucleotide
ugaacgugcacgcucagcg

SEQ ID NO: 2435801 - RNA, 19 nt, Artificial Sequence
  Description of Artificial Sequence: Synthetic oligonucleotide
ugauccaucagcuucugag

SEQ ID NO: 2435802 - RNA, 19 nt, Artificial Sequence
  Description of Artificial Sequence: Synthetic oligonucleotide
aauucucuaucauggcucg

SEQ ID NO: 2435803 - RNA, 19 nt, Artificial Sequence
  Description of Artificial Sequence: Synthetic oligonucleotide
ucuaucauggcucgagagg

SEQ ID NO: 2435804 - RNA, 19 nt, Artificial Sequence
  Description of Artificial Sequence: Synthetic oligonucleotide
cugaucugaaaguugaggg

SEQ ID NO: 2435805 - RNA, 19 nt, Artificial Sequence
  Description of Artificial Sequence: Synthetic oligonucleotide
aaauucucuaucauggcuc

SEQ ID NO: 2435806 - RNA, 19 nt, Artificial Sequence
  Description of Artificial Sequence: Synthetic oligonucleotide
auugaaauucucuaucaug

SEQ ID NO: 2435807 - RNA, 19 nt, Artificial Sequence
  Description of Artificial Sequence: Synthetic oligonucleotide
uggguuaugaacgugcacg

SEQ ID NO: 2435808 - RNA, 19 nt, Artificial Sequence
  Description of Artificial Sequence: Synthetic oligonucleotide
agcaauguaagagagcugg

SEQ ID NO: 2435809 - RNA, 19 nt, Artificial Sequence
  Description of Artificial Sequence: Synthetic oligonucleotide
uccucguggguuaugaacg

SEQ ID NO: 2435810 - RNA, 19 nt, Artificial Sequence
  Description of Artificial Sequence: Synthetic oligonucleotide
uacucuuucugacauguag

SEQ ID NO: 2435811 - RNA, 19 nt, Artificial Sequence
  Description of Artificial Sequence: Synthetic oligonucleotide
auugcggauauucaucacg

SEQ ID NO: 2435812 - RNA, 19 nt, Artificial Sequence
  Description of Artificial Sequence: Synthetic oligonucleotide
auguaagagagcuggggcc

SEQ ID NO: 2435813 - RNA, 19 nt, Artificial Sequence
  Description of Artificial Sequence: Synthetic oligonucleotide
guaaggucccucuucaugg

SEQ ID NO: 2435814 - RNA, 19 nt, Artificial Sequence
  Description of Artificial Sequence: Synthetic oligonucleotide
ugaggugauauguccaugg

SEQ ID NO: 2435815 - RNA, 19 nt, Artificial Sequence
  Description of Artificial Sequence: Synthetic oligonucleotide
aacgugcacgcucagcggc

SEQ ID NO: 2435816 - RNA, 19 nt, Artificial Sequence
  Description of Artificial Sequence: Synthetic oligonucleotide
uugcggauauucaucacgg

SEQ ID NO: 2435817 - RNA, 19 nt, Artificial Sequence
  Description of Artificial Sequence: Synthetic oligonucleotide
aauagagaugcagggcagc

SEQ ID NO: 2435818 - RNA, 19 nt, Artificial Sequence
  Description of Artificial Sequence: Synthetic oligonucleotide
ggaggcuugaaccaggugg

SEQ ID NO: 2435819 - RNA, 19 nt, Artificial Sequence
  Description of Artificial Sequence: Synthetic oligonucleotide
ugcccuuucuuucagcucc

SEQ ID NO: 2435820 - RNA, 19 nt, Artificial Sequence
  Description of Artificial Sequence: Synthetic oligonucleotide
guuggaauagagaugcagg

SEQ ID NO: 2435821 - RNA, 19 nt, Artificial Sequence
  Description of Artificial Sequence: Synthetic oligonucleotide
aguauuugggcuccacuuc

SEQ ID NO: 2435822 - RNA, 19 nt, Artificial Sequence
  Description of Artificial Sequence: Synthetic oligonucleotide
uguaaggucccucuucaug

SEQ ID NO: 2435823 - RNA, 19 nt, Artificial Sequence
  Description of Artificial Sequence: Synthetic oligonucleotide
agagaugcagggcagcccg

SEQ ID NO: 2435824 - RNA, 19 nt, Artificial Sequence
  Description of Artificial Sequence: Synthetic oligonucleotide
cauggcauacgcaucuucg

SEQ ID NO: 2435825 - RNA, 19 nt, Artificial Sequence
  Description of Artificial Sequence: Synthetic oligonucleotide
ugagcugucuuugacaucu

SEQ ID NO: 2435826 - RNA, 19 nt, Artificial Sequence
  Description of Artificial Sequence: Synthetic oligonucleotide
uguguaaggucccucuuca

SEQ ID NO: 2435827 - RNA, 19 nt, Artificial Sequence
  Description of Artificial Sequence: Synthetic oligonucleotide
agaagcauguugccuuugc

SEQ ID NO: 2435828 - RNA, 19 nt, Artificial Sequence
  Description of Artificial Sequence: Synthetic oligonucleotide
uguuggaauagagaugcag

SEQ ID NO: 2435829 - RNA, 19 nt, Artificial Sequence
  Description of Artificial Sequence: Synthetic oligonucleotide
gaucugaaaguugagggug

SEQ ID NO: 2435830 - RNA, 19 nt, Artificial Sequence
  Description of Artificial Sequence: Synthetic oligonucleotide
uuaugaacgugcacgcuca

SEQ ID NO: 2435831 - RNA, 19 nt, Artificial Sequence
  Description of Artificial Sequence: Synthetic oligonucleotide
cauuuauuguaaaagcaca

SEQ ID NO: 2435832 - RNA, 19 nt, Artificial Sequence
  Description of Artificial Sequence: Synthetic oligonucleotide
ucuguggucucgcugaccu

SEQ ID NO: 2435833 - RNA, 19 nt, Artificial Sequence
  Description of Artificial Sequence: Synthetic oligonucleotide
uagggagacauauuuggca

SEQ ID NO: 2435834 - RNA, 19 nt, Artificial Sequence
  Description of Artificial Sequence: Synthetic oligonucleotide
auggcauacgcaucuucgc

SEQ ID NO: 2435835 - RNA, 19 nt, Artificial Sequence
  Description of Artificial Sequence: Synthetic oligonucleotide
aucuucgccaucugcauag

SEQ ID NO: 2435836 - RNA, 19 nt, Artificial Sequence
  Description of Artificial Sequence: Synthetic oligonucleotide
uucucgggcaggcagagga

SEQ ID NO: 2435837 - RNA, 19 nt, Artificial Sequence
  Description of Artificial Sequence: Synthetic oligonucleotide
ugaaauucucuaucauggc

SEQ ID NO: 2435838 - RNA, 19 nt, Artificial Sequence
  Description of Artificial Sequence: Synthetic oligonucleotide
uguggucucgcugaccucg

SEQ ID NO: 2435839 - RNA, 19 nt, Artificial Sequence
  Description of Artificial Sequence: Synthetic oligonucleotide
cuaucauggcucgagaggc

SEQ ID NO: 2435840 - RNA, 19 nt, Artificial Sequence
  Description of Artificial Sequence: Synthetic oligonucleotide
uuggccaagacguacccca

SEQ ID NO: 2435841 - RNA, 19 nt, Artificial Sequence
  Description of Artificial Sequence: Synthetic oligonucleotide
uauuuggcauugaaauucu

SEQ ID NO: 2435842 - RNA, 19 nt, Artificial Sequence
  Description of Artificial Sequence: Synthetic oligonucleotide
auuuuggccaagacguacc

SEQ ID NO: 2435843 - RNA, 19 nt, Artificial Sequence
  Description of Artificial Sequence: Synthetic oligonucleotide
ggugauauguccauggggc

SEQ ID NO: 2435844 - RNA, 19 nt, Artificial Sequence
  Description of Artificial Sequence: Synthetic oligonucleotide
gauauguccauggggcacg

SEQ ID NO: 2435845 - RNA, 19 nt, Artificial Sequence
  Description of Artificial Sequence: Synthetic oligonucleotide
ucguggguuaugaacgugc

SEQ ID NO: 2435846 - RNA, 19 nt, Artificial Sequence
  Description of Artificial Sequence: Synthetic oligonucleotide
auagagaugcagggcagcc

SEQ ID NO: 2435847 - RNA, 19 nt, Artificial Sequence
  Description of Artificial Sequence: Synthetic oligonucleotide
ugaggguguuggaauagag

SEQ ID NO: 2435848 - RNA, 19 nt, Artificial Sequence
  Description of Artificial Sequence: Synthetic oligonucleotide
agcucagaagcauguugcc

SEQ ID NO: 2435849 - RNA, 19 nt, Artificial Sequence
  Description of Artificial Sequence: Synthetic oligonucleotide
acuucacugaucugaaagu

SEQ ID NO: 2435850 - RNA, 19 nt, Artificial Sequence
  Description of Artificial Sequence: Synthetic oligonucleotide
ucuuugacaucugugcucu

SEQ ID NO: 2435851 - RNA, 19 nt, Artificial Sequence
  Description of Artificial Sequence: Synthetic oligonucleotide
agcauguugccuuugcccu

SEQ ID NO: 2435852 - RNA, 19 nt, Artificial Sequence
  Description of Artificial Sequence: Synthetic oligonucleotide
caauguaagagagcugggg

SEQ ID NO: 2435853 - RNA, 19 nt, Artificial Sequence
  Description of Artificial Sequence: Synthetic oligonucleotide
caagacguaccccacaauc

SEQ ID NO: 2435854 - RNA, 19 nt, Artificial Sequence
  Description of Artificial Sequence: Synthetic oligonucleotide
guuaugaacgugcacgcuc

SEQ ID NO: 2435855 - RNA, 19 nt, Artificial Sequence
  Description of Artificial Sequence: Synthetic oligonucleotide
ucagccaucuguguaaggu

SEQ ID NO: 2435856 - RNA, 19 nt, Artificial Sequence
  Description of Artificial Sequence: Synthetic oligonucleotide
uucucuaucauggcucgag

SEQ ID NO: 2435857 - RNA, 19 nt, Artificial Sequence
  Description of Artificial Sequence: Synthetic oligonucleotide
agagucagaggccucugag

SEQ ID NO: 2435858 - RNA, 19 nt, Artificial Sequence
  Description of Artificial Sequence: Synthetic oligonucleotide
uuuuggccaagacguaccc

SEQ ID NO: 2435859 - RNA, 19 nt, Artificial Sequence
  Description of Artificial Sequence: Synthetic oligonucleotide
uggcauacgcaucuucgcc

SEQ ID NO: 2435860 - RNA, 19 nt, Artificial Sequence
  Description of Artificial Sequence: Synthetic oligonucleotide
gaggcuugaaccagguggg

SEQ ID NO: 2435861 - RNA, 19 nt, Artificial Sequence
  Description of Artificial Sequence: Synthetic oligonucleotide
ucaucagccaucuguguaa

SEQ ID NO: 2435862 - RNA, 19 nt, Artificial Sequence
  Description of Artificial Sequence: Synthetic oligonucleotide
ucugcccuuucuuucagcu

SEQ ID NO: 2435863 - RNA, 19 nt, Artificial Sequence
  Description of Artificial Sequence: Synthetic oligonucleotide
auaguauuugggcuccacu

SEQ ID NO: 2435864 - RNA, 19 nt, Artificial Sequence
  Description of Artificial Sequence: Synthetic oligonucleotide
ccacauuuauuguaaaagc

SEQ ID NO: 2435865 - RNA, 19 nt, Artificial Sequence
  Description of Artificial Sequence: Synthetic oligonucleotide
uugacaucugugcucucug

SEQ ID NO: 2435866 - RNA, 19 nt, Artificial Sequence
  Description of Artificial Sequence: Synthetic oligonucleotide
gaaauucucuaucauggcu

SEQ ID NO: 2435867 - RNA, 19 nt, Artificial Sequence
  Description of Artificial Sequence: Synthetic oligonucleotide
agcaccaugugucugcccu

SEQ ID NO: 2435868 - RNA, 19 nt, Artificial Sequence
  Description of Artificial Sequence: Synthetic oligonucleotide
gacucuucucacgacaggc

SEQ ID NO: 2435869 - RNA, 19 nt, Artificial Sequence
  Description of Artificial Sequence: Synthetic oligonucleotide
uguaagagagcuggggcca

SEQ ID NO: 2435870 - RNA, 19 nt, Artificial Sequence
  Description of Artificial Sequence: Synthetic oligonucleotide
gcggauauucaucacggcg

SEQ ID NO: 2435871 - RNA, 19 nt, Artificial Sequence
  Description of Artificial Sequence: Synthetic oligonucleotide
auguccauggggcacguca

SEQ ID NO: 2435872 - RNA, 19 nt, Artificial Sequence
  Description of Artificial Sequence: Synthetic oligonucleotide
cucuaucauggcucgagag

SEQ ID NO: 2435873 - RNA, 19 nt, Artificial Sequence
  Description of Artificial Sequence: Synthetic oligonucleotide
uccgccuuguucuccgugg

SEQ ID NO: 2435874 - RNA, 19 nt, Artificial Sequence
  Description of Artificial Sequence: Synthetic oligonucleotide
uggaauagagaugcagggc

SEQ ID NO: 2435875 - RNA, 19 nt, Artificial Sequence
  Description of Artificial Sequence: Synthetic oligonucleotide
aagacguaccccacaaucu

SEQ ID NO: 2435876 - RNA, 19 nt, Artificial Sequence
  Description of Artificial Sequence: Synthetic oligonucleotide
agggagacauauuuggcau

SEQ ID NO: 2435877 - RNA, 19 nt, Artificial Sequence
  Description of Artificial Sequence: Synthetic oligonucleotide
gaauagagaugcagggcag

SEQ ID NO: 2435878 - RNA, 19 nt, Artificial Sequence
  Description of Artificial Sequence: Synthetic oligonucleotide
cucacgacaggccucuccc

SEQ ID NO: 2435879 - RNA, 19 nt, Artificial Sequence
  Description of Artificial Sequence: Synthetic oligonucleotide
uugcccuccgccuuguucu

SEQ ID NO: 2435880 - RNA, 19 nt, Artificial Sequence
  Description of Artificial Sequence: Synthetic oligonucleotide
acgcuucacagccagugag

SEQ ID NO: 2435881 - RNA, 19 nt, Artificial Sequence
  Description of Artificial Sequence: Synthetic oligonucleotide
auuuauuguaaaagcacau

SEQ ID NO: 2435882 - RNA, 19 nt, Artificial Sequence
  Description of Artificial Sequence: Synthetic oligonucleotide
gagucagaggccucugagc

SEQ ID NO: 2435883 - RNA, 19 nt, Artificial Sequence
  Description of Artificial Sequence: Synthetic oligonucleotide
uucccauucucauccucag

SEQ ID NO: 2435884 - RNA, 19 nt, Artificial Sequence
  Description of Artificial Sequence: Synthetic oligonucleotide
agacauauuuggcauugaa

SEQ ID NO: 2435885 - RNA, 19 nt, Artificial Sequence
  Description of Artificial Sequence: Synthetic oligonucleotide
cauggggcacgucaucugg

SEQ ID NO: 2435886 - RNA, 19 nt, Artificial Sequence
  Description of Artificial Sequence: Synthetic oligonucleotide
aucuguguaaggucccucu

SEQ ID NO: 2435887 - RNA, 19 nt, Artificial Sequence
  Description of Artificial Sequence: Synthetic oligonucleotide
ggcucgagaggccugaucc

SEQ ID NO: 2435888 - RNA, 19 nt, Artificial Sequence
  Description of Artificial Sequence: Synthetic oligonucleotide
acgcaucuucgccaucugc

SEQ ID NO: 2435889 - RNA, 19 nt, Artificial Sequence
  Description of Artificial Sequence: Synthetic oligonucleotide
ucucuaucauggcucgaga

SEQ ID NO: 2435890 - RNA, 19 nt, Artificial Sequence
  Description of Artificial Sequence: Synthetic oligonucleotide
gaacgugcacgcucagcgg

SEQ ID NO: 2435891 - RNA, 19 nt, Artificial Sequence
  Description of Artificial Sequence: Synthetic oligonucleotide
acucuucucacgacaggcc

SEQ ID NO: 2435892 - RNA, 19 nt, Artificial Sequence
  Description of Artificial Sequence: Synthetic oligonucleotide
aacgcuucacagccaguga

SEQ ID NO: 2435893 - RNA, 19 nt, Artificial Sequence
  Description of Artificial Sequence: Synthetic oligonucleotide
acguaccccacaaucuucc

SEQ ID NO: 2435894 - RNA, 19 nt, Artificial Sequence
  Description of Artificial Sequence: Synthetic oligonucleotide
gacauauuuggcauugaaa

SEQ ID NO: 2435895 - RNA, 19 nt, Artificial Sequence
  Description of Artificial Sequence: Synthetic oligonucleotide
ucucacgacaggccucucc

SEQ ID NO: 2435896 - RNA, 19 nt, Artificial Sequence
  Description of Artificial Sequence: Synthetic oligonucleotide
ugauauguccauggggcac

SEQ ID NO: 2435897 - RNA, 19 nt, Artificial Sequence
  Description of Artificial Sequence: Synthetic oligonucleotide
uaccccacaaucuucccau

SEQ ID NO: 2435898 - RNA, 19 nt, Artificial Sequence
  Description of Artificial Sequence: Synthetic oligonucleotide
guauuugggcuccacuuca

SEQ ID NO: 2435899 - RNA, 19 nt, Artificial Sequence
  Description of Artificial Sequence: Synthetic oligonucleotide
agugaggugauauguccau

SEQ ID NO: 2435900 - RNA, 19 nt, Artificial Sequence
  Description of Artificial Sequence: Synthetic oligonucleotide
uagcauugcggauauucau

SEQ ID NO: 2435901 - RNA, 19 nt, Artificial Sequence
  Description of Artificial Sequence: Synthetic oligonucleotide
uauucaucacggcggcgga

SEQ ID NO: 2435902 - RNA, 19 nt, Artificial Sequence
  Description of Artificial Sequence: Synthetic oligonucleotide
ggcauugaaauucucuauc

SEQ ID NO: 2435903 - RNA, 19 nt, Artificial Sequence
  Description of Artificial Sequence: Synthetic oligonucleotide
cuagcauugcggauauuca

SEQ ID NO: 2435904 - RNA, 19 nt, Artificial Sequence
  Description of Artificial Sequence: Synthetic oligonucleotide
agcagccagacucuucuca

SEQ ID NO: 2435905 - RNA, 19 nt, Artificial Sequence
  Description of Artificial Sequence: Synthetic oligonucleotide
cggauauucaucacggcgg

SEQ ID NO: 2435906 - RNA, 19 nt, Artificial Sequence
  Description of Artificial Sequence: Synthetic oligonucleotide
gauauucaucacggcggcg

SEQ ID NO: 2435907 - RNA, 19 nt, Artificial Sequence
  Description of Artificial Sequence: Synthetic oligonucleotide
uucaucacggcggcggagc

SEQ ID NO: 2435908 - RNA, 19 nt, Artificial Sequence
  Description of Artificial Sequence: Synthetic oligonucleotide
accucgcugagguccuugc

SEQ ID NO: 2435909 - RNA, 19 nt, Artificial Sequence
  Description of Artificial Sequence: Synthetic oligonucleotide
guccucguggguuaugaac

SEQ ID NO: 2435910 - RNA, 19 nt, Artificial Sequence
  Description of Artificial Sequence: Synthetic oligonucleotide
agcccgguuacucuuucug

SEQ ID NO: 2435911 - RNA, 19 nt, Artificial Sequence
  Description of Artificial Sequence: Synthetic oligonucleotide
uauuugggcuccacuucac

SEQ ID NO: 2435912 - RNA, 19 nt, Artificial Sequence
  Description of Artificial Sequence: Synthetic oligonucleotide
cucuaggaggcagagucag

SEQ ID NO: 2435913 - RNA, 19 nt, Artificial Sequence
  Description of Artificial Sequence: Synthetic oligonucleotide
ucauggcauacgcaucuuc

SEQ ID NO: 2435914 - RNA, 19 nt, Artificial Sequence
  Description of Artificial Sequence: Synthetic oligonucleotide
ucuuccauuuuggccaaga

SEQ ID NO: 2435915 - RNA, 19 nt, Artificial Sequence
  Description of Artificial Sequence: Synthetic oligonucleotide
agcucgcagguccucgugg

SEQ ID NO: 2435916 - RNA, 19 nt, Artificial Sequence
  Description of Artificial Sequence: Synthetic oligonucleotide
uaugaacgugcacgcucag

SEQ ID NO: 2435917 - RNA, 19 nt, Artificial Sequence
  Description of Artificial Sequence: Synthetic oligonucleotide
cucgcugagguccuugcug

SEQ ID NO: 2435918 - RNA, 19 nt, Artificial Sequence
  Description of Artificial Sequence: Synthetic oligonucleotide
agccagacucuucucacga

SEQ ID NO: 2435919 - RNA, 19 nt, Artificial Sequence
  Description of Artificial Sequence: Synthetic oligonucleotide
augaacgugcacgcucagc

SEQ ID NO: 2435920 - RNA, 19 nt, Artificial Sequence
  Description of Artificial Sequence: Synthetic oligonucleotide
cugagccagcccaaggcgc

SEQ ID NO: 2435921 - RNA, 19 nt, Artificial Sequence
  Description of Artificial Sequence: Synthetic oligonucleotide
ucgcugagguccuugcugu

SEQ ID NO: 2435922 - RNA, 19 nt, Artificial Sequence
  Description of Artificial Sequence: Synthetic oligonucleotide
guagggagacauauuuggc

SEQ ID NO: 2435923 - RNA, 19 nt, Artificial Sequence
  Description of Artificial Sequence: Synthetic oligonucleotide
ucucccgagcucagaagca

SEQ ID NO: 2435924 - RNA, 19 nt, Artificial Sequence
  Description of Artificial Sequence: Synthetic oligonucleotide
uucuccguggcugccagca

SEQ ID NO: 2435925 - RNA, 19 nt, Artificial Sequence
  Description of Artificial Sequence: Synthetic oligonucleotide
cuuccauuuuggccaagac

SEQ ID NO: 2435926 - RNA, 19 nt, Artificial Sequence
  Description of Artificial Sequence: Synthetic oligonucleotide
gcauugaaauucucuauca

SEQ ID NO: 2435927 - RNA, 19 nt, Artificial Sequence
  Description of Artificial Sequence: Synthetic oligonucleotide
acaggaccacauuuauugu

SEQ ID NO: 2435928 - RNA, 19 nt, Artificial Sequence
  Description of Artificial Sequence: Synthetic oligonucleotide
ucuucucacgacaggccuc

SEQ ID NO: 2435929 - RNA, 19 nt, Artificial Sequence
  Description of Artificial Sequence: Synthetic oligonucleotide
ccagugaggugauaugucc

SEQ ID NO: 2435930 - RNA, 19 nt, Artificial Sequence
  Description of Artificial Sequence: Synthetic oligonucleotide
auacgcaucuucgccaucu

SEQ ID NO: 2435931 - RNA, 19 nt, Artificial Sequence
  Description of Artificial Sequence: Synthetic oligonucleotide
cucucuguggucucgcuga

SEQ ID NO: 2435932 - RNA, 19 nt, Artificial Sequence
  Description of Artificial Sequence: Synthetic oligonucleotide
ggauauucaucacggcggc

SEQ ID NO: 2435933 - RNA, 19 nt, Artificial Sequence
  Description of Artificial Sequence: Synthetic oligonucleotide
ucacgacaggccucucccg

SEQ ID NO: 2435934 - RNA, 19 nt, Artificial Sequence
  Description of Artificial Sequence: Synthetic oligonucleotide
guugaggguguuggaauag

SEQ ID NO: 2435935 - RNA, 19 nt, Artificial Sequence
  Description of Artificial Sequence: Synthetic oligonucleotide
ugcggauauucaucacggc

SEQ ID NO: 2435936 - RNA, 19 nt, Artificial Sequence
  Description of Artificial Sequence: Synthetic oligonucleotide
ucaucagguccucgggccu

SEQ ID NO: 2435937 - RNA, 19 nt, Artificial Sequence
  Description of Artificial Sequence: Synthetic oligonucleotide
ucgccaucugcauaguauu

SEQ ID NO: 2435938 - RNA, 19 nt, Artificial Sequence
  Description of Artificial Sequence: Synthetic oligonucleotide
agacguaccccacaaucuu

SEQ ID NO: 2435939 - RNA, 19 nt, Artificial Sequence
  Description of Artificial Sequence: Synthetic oligonucleotide
auuugggcuccacuucacu

SEQ ID NO: 2435940 - RNA, 19 nt, Artificial Sequence
  Description of Artificial Sequence: Synthetic oligonucleotide
cuguguaaggucccucuuc

SEQ ID NO: 2435941 - RNA, 19 nt, Artificial Sequence
  Description of Artificial Sequence: Synthetic oligonucleotide
ucgggccuagcauugcgga

SEQ ID NO: 2435942 - RNA, 19 nt, Artificial Sequence
  Description of Artificial Sequence: Synthetic oligonucleotide
ugcagggcagcccgguuac

SEQ ID NO: 2435943 - RNA, 19 nt, Artificial Sequence
  Description of Artificial Sequence: Synthetic oligonucleotide
ucccauucucauccucagc

SEQ ID NO: 2435944 - RNA, 19 nt, Artificial Sequence
  Description of Artificial Sequence: Synthetic oligonucleotide
ggugggaacgcuucacagc

SEQ ID NO: 2435945 - RNA, 19 nt, Artificial Sequence
  Description of Artificial Sequence: Synthetic oligonucleotide
ggguuaugaacgugcacgc

SEQ ID NO: 2435946 - RNA, 19 nt, Artificial Sequence
  Description of Artificial Sequence: Synthetic oligonucleotide
cucgggccuagcauugcgg

SEQ ID NO: 2435947 - RNA, 19 nt, Artificial Sequence
  Description of Artificial Sequence: Synthetic oligonucleotide
uccauggggcacgucaucu

SEQ ID NO: 2435948 - RNA, 19 nt, Artificial Sequence
  Description of Artificial Sequence: Synthetic oligonucleotide
ucuaggaggcagagucaga

SEQ ID NO: 2435949 - RNA, 19 nt, Artificial Sequence
  Description of Artificial Sequence: Synthetic oligonucleotide
cauguugccuuugcccucc

SEQ ID NO: 2435950 - RNA, 19 nt, Artificial Sequence
  Description of Artificial Sequence: Synthetic oligonucleotide
uuuggccaagacguacccc

SEQ ID NO: 2435951 - RNA, 19 nt, Artificial Sequence
  Description of Artificial Sequence: Synthetic oligonucleotide
acgcucagcggccacucag

SEQ ID NO: 2435952 - RNA, 19 nt, Artificial Sequence
  Description of Artificial Sequence: Synthetic oligonucleotide
ugacaucugugcucucugu

SEQ ID NO: 2435953 - RNA, 19 nt, Artificial Sequence
  Description of Artificial Sequence: Synthetic oligonucleotide
uguccauggggcacgucau

SEQ ID NO: 2435954 - RNA, 19 nt, Artificial Sequence
  Description of Artificial Sequence: Synthetic oligonucleotide
cacugaucugaaaguugag

SEQ ID NO: 2435955 - RNA, 19 nt, Artificial Sequence
  Description of Artificial Sequence: Synthetic oligonucleotide
uagagaugcagggcagccc

SEQ ID NO: 2435956 - RNA, 19 nt, Artificial Sequence
  Description of Artificial Sequence: Synthetic oligonucleotide
ucuguguaaggucccucuu

SEQ ID NO: 2435957 - RNA, 19 nt, Artificial Sequence
  Description of Artificial Sequence: Synthetic oligonucleotide
auguagggagacauauuug

SEQ ID NO: 2435958 - RNA, 19 nt, Artificial Sequence
  Description of Artificial Sequence: Synthetic oligonucleotide
gacauguagggagacauau

SEQ ID NO: 2435959 - RNA, 19 nt, Artificial Sequence
  Description of Artificial Sequence: Synthetic oligonucleotide
gggcacgucaucugggucc

SEQ ID NO: 2435960 - RNA, 19 nt, Artificial Sequence
  Description of Artificial Sequence: Synthetic oligonucleotide
ucccgagcucagaagcaug

SEQ ID NO: 2435961 - RNA, 19 nt, Artificial Sequence
  Description of Artificial Sequence: Synthetic oligonucleotide
uugaggguguuggaauaga

SEQ ID NO: 2435962 - RNA, 19 nt, Artificial Sequence
  Description of Artificial Sequence: Synthetic oligonucleotide
ccuagcauugcggauauuc

SEQ ID NO: 2435963 - RNA, 19 nt, Artificial Sequence
  Description of Artificial Sequence: Synthetic oligonucleotide
ugacauguagggagacaua

SEQ ID NO: 2435964 - RNA, 19 nt, Artificial Sequence
  Description of Artificial Sequence: Synthetic oligonucleotide
cucuucauggcauacgcau

SEQ ID NO: 2435965 - RNA, 19 nt, Artificial Sequence
  Description of Artificial Sequence: Synthetic oligonucleotide
cauugcggauauucaucac

SEQ ID NO: 2435966 - RNA, 19 nt, Artificial Sequence
  Description of Artificial Sequence: Synthetic oligonucleotide
uacgcaucuucgccaucug

SEQ ID NO: 2435967 - RNA, 19 nt, Artificial Sequence
  Description of Artificial Sequence: Synthetic oligonucleotide
ucucgcugaccucgcugag

SEQ ID NO: 2435968 - RNA, 19 nt, Artificial Sequence
  Description of Artificial Sequence: Synthetic oligonucleotide
gucucgcugaccucgcuga

SEQ ID NO: 2435969 - RNA, 19 nt, Artificial Sequence
  Description of Artificial Sequence: Synthetic oligonucleotide
cagugaggugauaugucca

SEQ ID NO: 2435970 - RNA, 19 nt, Artificial Sequence
  Description of Artificial Sequence: Synthetic oligonucleotide
ucgggcaggcagaggaggu

SEQ ID NO: 2435971 - RNA, 19 nt, Artificial Sequence
  Description of Artificial Sequence: Synthetic oligonucleotide
gcuugaaccagguggggca

SEQ ID NO: 2435972 - RNA, 19 nt, Artificial Sequence
  Description of Artificial Sequence: Synthetic oligonucleotide
agcccaaggcgccgguggg

SEQ ID NO: 2435973 - RNA, 19 nt, Artificial Sequence
  Description of Artificial Sequence: Synthetic oligonucleotide
cucagcggccacucagaag

SEQ ID NO: 2435974 - RNA, 19 nt, Artificial Sequence
  Description of Artificial Sequence: Synthetic oligonucleotide
ugggcuccacuucacugau

SEQ ID NO: 2435975 - RNA, 19 nt, Artificial Sequence
  Description of Artificial Sequence: Synthetic oligonucleotide
cugaaaguugaggguguug

SEQ ID NO: 2435976 - RNA, 19 nt, Artificial Sequence
  Description of Artificial Sequence: Synthetic oligonucleotide
ucucuguggucucgcugac

SEQ ID NO: 2435977 - RNA, 19 nt, Artificial Sequence
  Description of Artificial Sequence: Synthetic oligonucleotide
ucaucacggcggcggagcu

SEQ ID NO: 2435978 - RNA, 19 nt, Artificial Sequence
  Description of Artificial Sequence: Synthetic oligonucleotide
cccucuucauggcauacgc

SEQ ID NO: 2435979 - RNA, 19 nt, Artificial Sequence
  Description of Artificial Sequence: Synthetic oligonucleotide
ugccgccucagcucaucag

SEQ ID NO: 2435980 - RNA, 19 nt, Artificial Sequence
  Description of Artificial Sequence: Synthetic oligonucleotide
agguccuugcuguccccag

SEQ ID NO: 2435981 - RNA, 19 nt, Artificial Sequence
  Description of Artificial Sequence: Synthetic oligonucleotide
ggcauacgcaucuucgcca

SEQ ID NO: 2435982 - RNA, 19 nt, Artificial Sequence
  Description of Artificial Sequence: Synthetic oligonucleotide
cagcaauguaagagagcug

SEQ ID NO: 2435983 - RNA, 19 nt, Artificial Sequence
  Description of Artificial Sequence: Synthetic oligonucleotide
ucgagaggccugauccauc

SEQ ID NO: 2435984 - RNA, 19 nt, Artificial Sequence
  Description of Artificial Sequence: Synthetic oligonucleotide
guggguuaugaacgugcac

SEQ ID NO: 2435985 - RNA, 19 nt, Artificial Sequence
  Description of Artificial Sequence: Synthetic oligonucleotide
cauauuuggcauugaaauu

SEQ ID NO: 2435986 - RNA, 19 nt, Artificial Sequence
  Description of Artificial Sequence: Synthetic oligonucleotide
uaagagagcuggggccaag

SEQ ID NO: 2435987 - RNA, 19 nt, Artificial Sequence
  Description of Artificial Sequence: Synthetic oligonucleotide
agguccucgggccuagcau

SEQ ID NO: 2435988 - RNA, 19 nt, Artificial Sequence
  Description of Artificial Sequence: Synthetic oligonucleotide
gacguaccccacaaucuuc

SEQ ID NO: 2435989 - RNA, 19 nt, Artificial Sequence
  Description of Artificial Sequence: Synthetic oligonucleotide
cucagaagcauguugccuu

SEQ ID NO: 2435990 - RNA, 19 nt, Artificial Sequence
  Description of Artificial Sequence: Synthetic oligonucleotide
caggaccacauuuauugua

SEQ ID NO: 2435991 - RNA, 19 nt, Artificial Sequence
  Description of Artificial Sequence: Synthetic oligonucleotide
cucgcugaccucgcugagg

SEQ ID NO: 2435992 - RNA, 19 nt, Artificial Sequence
  Description of Artificial Sequence: Synthetic oligonucleotide
ugagguccuugcugucccc

SEQ ID NO: 2435993 - RNA, 19 nt, Artificial Sequence
  Description of Artificial Sequence: Synthetic oligonucleotide
guccuugcuguccccagca

SEQ ID NO: 2435994 - RNA, 19 nt, Artificial Sequence
  Description of Artificial Sequence: Synthetic oligonucleotide
acggcggcggagcucgcag

SEQ ID NO: 2435995 - RNA, 19 nt, Artificial Sequence
  Description of Artificial Sequence: Synthetic oligonucleotide
uggccaagacguaccccac

SEQ ID NO: 2435996 - RNA, 19 nt, Artificial Sequence
  Description of Artificial Sequence: Synthetic oligonucleotide
cuuguucuccguggcugcc

SEQ ID NO: 2435997 - RNA, 19 nt, Artificial Sequence
  Description of Artificial Sequence: Synthetic oligonucleotide
gccgccucagcucaucagc

SEQ ID NO: 2435998 - RNA, 19 nt, Artificial Sequence
  Description of Artificial Sequence: Synthetic oligonucleotide
auucaucacggcggcggag

SEQ ID NO: 2435999 - RNA, 19 nt, Artificial Sequence
  Description of Artificial Sequence: Synthetic oligonucleotide
gcaauguaagagagcuggg

SEQ ID NO: 2436000 - RNA, 19 nt, Artificial Sequence
  Description of Artificial Sequence: Synthetic oligonucleotide
auggggcacgucaucuggg

SEQ ID NO: 2436001 - RNA, 19 nt, Artificial Sequence
  Description of Artificial Sequence: Synthetic oligonucleotide
uccuugcuguccccagcac

SEQ ID NO: 2436002 - RNA, 19 nt, Artificial Sequence
  Description of Artificial Sequence: Synthetic oligonucleotide
cauugaaauucucuaucau

SEQ ID NO: 2436003 - RNA, 19 nt, Artificial Sequence
  Description of Artificial Sequence: Synthetic oligonucleotide
gugaggugauauguccaug

SEQ ID NO: 2436004 - RNA, 19 nt, Artificial Sequence
  Description of Artificial Sequence: Synthetic oligonucleotide
gcucgcagguccucguggg

SEQ ID NO: 2436005 - RNA, 19 nt, Artificial Sequence
  Description of Artificial Sequence: Synthetic oligonucleotide
uuguucuccguggcugcca

SEQ ID NO: 2436006 - RNA, 19 nt, Artificial Sequence
  Description of Artificial Sequence: Synthetic oligonucleotide
agguccucguggguuauga

SEQ ID NO: 2436007 - RNA, 19 nt, Artificial Sequence
  Description of Artificial Sequence: Synthetic oligonucleotide
cccgguuacucuuucugac

SEQ ID NO: 2436008 - RNA, 19 nt, Artificial Sequence
  Description of Artificial Sequence: Synthetic oligonucleotide
uguccucagcagccagacu

SEQ ID NO: 2436009 - RNA, 19 nt, Artificial Sequence
  Description of Artificial Sequence: Synthetic oligonucleotide
augcagggcagcccgguua

SEQ ID NO: 2436010 - RNA, 19 nt, Artificial Sequence
  Description of Artificial Sequence: Synthetic oligonucleotide
gagaugcagggcagcccgg

SEQ ID NO: 2436011 - RNA, 19 nt, Artificial Sequence
  Description of Artificial Sequence: Synthetic oligonucleotide
gagcucgcagguccucgug

SEQ ID NO: 2436012 - RNA, 19 nt, Artificial Sequence
  Description of Artificial Sequence: Synthetic oligonucleotide
ggucucgcugaccucgcug

SEQ ID NO: 2436013 - RNA, 19 nt, Artificial Sequence
  Description of Artificial Sequence: Synthetic oligonucleotide
aggcuugaaccaggugggg

SEQ ID NO: 2436014 - RNA, 19 nt, Artificial Sequence
  Description of Artificial Sequence: Synthetic oligonucleotide
gagacauauuuggcauuga

SEQ ID NO: 2436015 - RNA, 19 nt, Artificial Sequence
  Description of Artificial Sequence: Synthetic oligonucleotide
uggcucgagaggccugauc

SEQ ID NO: 2436016 - RNA, 19 nt, Artificial Sequence
  Description of Artificial Sequence: Synthetic oligonucleotide
cucuucucacgacaggccu

SEQ ID NO: 2436017 - RNA, 19 nt, Artificial Sequence
  Description of Artificial Sequence: Synthetic oligonucleotide
ggcuugaaccagguggggc

SEQ ID NO: 2436018 - RNA, 19 nt, Artificial Sequence
  Description of Artificial Sequence: Synthetic oligonucleotide
cacgacaggccucucccga

SEQ ID NO: 2436019 - RNA, 19 nt, Artificial Sequence
  Description of Artificial Sequence: Synthetic oligonucleotide
caucuguguaaggucccuc

SEQ ID NO: 2436020 - RNA, 19 nt, Artificial Sequence
  Description of Artificial Sequence: Synthetic oligonucleotide
cucguggguuaugaacgug

SEQ ID NO: 2436021 - RNA, 19 nt, Artificial Sequence
  Description of Artificial Sequence: Synthetic oligonucleotide
cugagcugucuuugacauc

SEQ ID NO: 2436022 - RNA, 19 nt, Artificial Sequence
  Description of Artificial Sequence: Synthetic oligonucleotide
gccuuguucuccguggcug

SEQ ID NO: 2436023 - RNA, 19 nt, Artificial Sequence
  Description of Artificial Sequence: Synthetic oligonucleotide
gccaagagaggccaugaua

SEQ ID NO: 2436024 - RNA, 19 nt, Artificial Sequence
  Description of Artificial Sequence: Synthetic oligonucleotide
agaugcagggcagcccggu

SEQ ID NO: 2436025 - RNA, 19 nt, Artificial Sequence
  Description of Artificial Sequence: Synthetic oligonucleotide
aggccucugagcugucuuu

SEQ ID NO: 2436026 - RNA, 19 nt, Artificial Sequence
  Description of Artificial Sequence: Synthetic oligonucleotide
aucagguccucgggccuag

SEQ ID NO: 2436027 - RNA, 19 nt, Artificial Sequence
  Description of Artificial Sequence: Synthetic oligonucleotide
ggggcaggcucuaggaggc

SEQ ID NO: 2436028 - RNA, 19 nt, Artificial Sequence
  Description of Artificial Sequence: Synthetic oligonucleotide
uggucucgcugaccucgcu

SEQ ID NO: 2436029 - RNA, 19 nt, Artificial Sequence
  Description of Artificial Sequence: Synthetic oligonucleotide
ucgcagguccucguggguu

SEQ ID NO: 2436030 - RNA, 19 nt, Artificial Sequence
  Description of Artificial Sequence: Synthetic oligonucleotide
acauguagggagacauauu

SEQ ID NO: 2436031 - RNA, 19 nt, Artificial Sequence
  Description of Artificial Sequence: Synthetic oligonucleotide
gaccucgcugagguccuug

SEQ ID NO: 2436032 - RNA, 19 nt, Artificial Sequence
  Description of Artificial Sequence: Synthetic oligonucleotide
ucuucgccaucugcauagu

SEQ ID NO: 2436033 - RNA, 19 nt, Artificial Sequence
  Description of Artificial Sequence: Synthetic oligonucleotide
ccagacucuucucacgaca

SEQ ID NO: 2436034 - RNA, 19 nt, Artificial Sequence
  Description of Artificial Sequence: Synthetic oligonucleotide
cuccgccuuguucuccgug

SEQ ID NO: 2436035 - RNA, 19 nt, Artificial Sequence
  Description of Artificial Sequence: Synthetic oligonucleotide
gccaagacguaccccacaa

SEQ ID NO: 2436036 - RNA, 19 nt, Artificial Sequence
  Description of Artificial Sequence: Synthetic oligonucleotide
auucucuaucauggcucga

SEQ ID NO: 2436037 - RNA, 19 nt, Artificial Sequence
  Description of Artificial Sequence: Synthetic oligonucleotide
cagggcagcccgguuacuc

SEQ ID NO: 2436038 - RNA, 19 nt, Artificial Sequence
  Description of Artificial Sequence: Synthetic oligonucleotide
uucauggcauacgcaucuu

SEQ ID NO: 2436039 - RNA, 19 nt, Artificial Sequence
  Description of Artificial Sequence: Synthetic oligonucleotide
auauguccauggggcacgu

SEQ ID NO: 2436040 - RNA, 19 nt, Artificial Sequence
  Description of Artificial Sequence: Synthetic oligonucleotide
cauacgcaucuucgccauc

SEQ ID NO: 2436041 - RNA, 19 nt, Artificial Sequence
  Description of Artificial Sequence: Synthetic oligonucleotide
guccucgggccuagcauug

SEQ ID NO: 2436042 - RNA, 19 nt, Artificial Sequence
  Description of Artificial Sequence: Synthetic oligonucleotide
cagaagcauguugccuuug

SEQ ID NO: 2436043 - RNA, 19 nt, Artificial Sequence
  Description of Artificial Sequence: Synthetic oligonucleotide
cuucacugaucugaaaguu

SEQ ID NO: 2436044 - RNA, 19 nt, Artificial Sequence
  Description of Artificial Sequence: Synthetic oligonucleotide
caggccucucccgagcuca

SEQ ID NO: 2436045 - RNA, 19 nt, Artificial Sequence
  Description of Artificial Sequence: Synthetic oligonucleotide
ccgccucagcucaucagcc

SEQ ID NO: 2436046 - RNA, 19 nt, Artificial Sequence
  Description of Artificial Sequence: Synthetic oligonucleotide
uccucgggccuagcauugc

SEQ ID NO: 2436047 - RNA, 19 nt, Artificial Sequence
  Description of Artificial Sequence: Synthetic oligonucleotide
cagagucagaggccucuga

SEQ ID NO: 2436048 - RNA, 19 nt, Artificial Sequence
  Description of Artificial Sequence: Synthetic oligonucleotide
guccauggggcacgucauc

SEQ ID NO: 2436049 - RNA, 19 nt, Artificial Sequence
  Description of Artificial Sequence: Synthetic oligonucleotide
cugugcucucuguggucuc

SEQ ID NO: 2436050 - RNA, 19 nt, Artificial Sequence
  Description of Artificial Sequence: Synthetic oligonucleotide
caucuucgccaucugcaua

SEQ ID NO: 2436051 - RNA, 19 nt, Artificial Sequence
  Description of Artificial Sequence: Synthetic oligonucleotide
guucucgggcaggcagagg

SEQ ID NO: 2436052 - RNA, 19 nt, Artificial Sequence
  Description of Artificial Sequence: Synthetic oligonucleotide
ggaccacauuuauuguaaa

SEQ ID NO: 2436053 - RNA, 19 nt, Artificial Sequence
  Description of Artificial Sequence: Synthetic oligonucleotide
agaggccucugagcugucu

SEQ ID NO: 2436054 - RNA, 19 nt, Artificial Sequence
  Description of Artificial Sequence: Synthetic oligonucleotide
ccucgggccuagcauugcg

SEQ ID NO: 2436055 - RNA, 19 nt, Artificial Sequence
  Description of Artificial Sequence: Synthetic oligonucleotide
guucuccguggcugccagc

SEQ ID NO: 2436056 - RNA, 19 nt, Artificial Sequence
  Description of Artificial Sequence: Synthetic oligonucleotide
cccuccgccuuguucuccg

SEQ ID NO: 2436057 - RNA, 19 nt, Artificial Sequence
  Description of Artificial Sequence: Synthetic oligonucleotide
gagcugucuuugacaucug

SEQ ID NO: 2436058 - RNA, 19 nt, Artificial Sequence
  Description of Artificial Sequence: Synthetic oligonucleotide
cugauccaucagcuucuga

SEQ ID NO: 2436059 - RNA, 19 nt, Artificial Sequence
  Description of Artificial Sequence: Synthetic oligonucleotide
cuucucacgacaggccucu

SEQ ID NO: 2436060 - RNA, 19 nt, Artificial Sequence
  Description of Artificial Sequence: Synthetic oligonucleotide
cggugggaacgcuucacag

SEQ ID NO: 2436061 - RNA, 19 nt, Artificial Sequence
  Description of Artificial Sequence: Synthetic oligonucleotide
gcccgguuacucuuucuga

SEQ ID NO: 2436062 - RNA, 19 nt, Artificial Sequence
  Description of Artificial Sequence: Synthetic oligonucleotide
ccucucccgagcucagaag

SEQ ID NO: 2436063 - RNA, 19 nt, Artificial Sequence
  Description of Artificial Sequence: Synthetic oligonucleotide
gccagugaggugauauguc

SEQ ID NO: 2436064 - RNA, 19 nt, Artificial Sequence
  Description of Artificial Sequence: Synthetic oligonucleotide
cagcagccagacucuucuc

SEQ ID NO: 2436065 - RNA, 19 nt, Artificial Sequence
  Description of Artificial Sequence: Synthetic oligonucleotide
gccagacucuucucacgac

SEQ ID NO: 2436066 - RNA, 19 nt, Artificial Sequence
  Description of Artificial Sequence: Synthetic oligonucleotide
cagguccucgggccuagca

SEQ ID NO: 2436067 - RNA, 19 nt, Artificial Sequence
  Description of Artificial Sequence: Synthetic oligonucleotide
aggcagagucagaggccuc

SEQ ID NO: 2436068 - RNA, 19 nt, Artificial Sequence
  Description of Artificial Sequence: Synthetic oligonucleotide
uggggccaagagaggccau

SEQ ID NO: 2436069 - RNA, 19 nt, Artificial Sequence
  Description of Artificial Sequence: Synthetic oligonucleotide
guggucucgcugaccucgc

SEQ ID NO: 2436070 - RNA, 19 nt, Artificial Sequence
  Description of Artificial Sequence: Synthetic oligonucleotide
guaagagagcuggggccaa

SEQ ID NO: 2436071 - RNA, 19 nt, Artificial Sequence
  Description of Artificial Sequence: Synthetic oligonucleotide
cuucgccaucugcauagua

SEQ ID NO: 2436072 - RNA, 19 nt, Artificial Sequence
  Description of Artificial Sequence: Synthetic oligonucleotide
gcucgagaggccugaucca

SEQ ID NO: 2436073 - RNA, 19 nt, Artificial Sequence
  Description of Artificial Sequence: Synthetic oligonucleotide
gugccgccucagcucauca

SEQ ID NO: 2436074 - RNA, 19 nt, Artificial Sequence
  Description of Artificial Sequence: Synthetic oligonucleotide
ggggccaagagaggccaug

SEQ ID NO: 2436075 - RNA, 19 nt, Artificial Sequence
  Description of Artificial Sequence: Synthetic oligonucleotide
ccucagcucaucagccauc

SEQ ID NO: 2436076 - RNA, 19 nt, Artificial Sequence
  Description of Artificial Sequence: Synthetic oligonucleotide
agcuucugagccagcccaa

SEQ ID NO: 2436077 - RNA, 19 nt, Artificial Sequence
  Description of Artificial Sequence: Synthetic oligonucleotide
accccacaaucuucccauu

SEQ ID NO: 2436078 - RNA, 19 nt, Artificial Sequence
  Description of Artificial Sequence: Synthetic oligonucleotide
gccucucccgagcucagaa

SEQ ID NO: 2436079 - RNA, 19 nt, Artificial Sequence
  Description of Artificial Sequence: Synthetic oligonucleotide
cuguccccagcacuguccu

SEQ ID NO: 2436080 - RNA, 19 nt, Artificial Sequence
  Description of Artificial Sequence: Synthetic oligonucleotide
cucuuccauuuuggccaag

SEQ ID NO: 2436081 - RNA, 19 nt, Artificial Sequence
  Description of Artificial Sequence: Synthetic oligonucleotide
gggccuagcauugcggaua

SEQ ID NO: 2436082 - RNA, 19 nt, Artificial Sequence
  Description of Artificial Sequence: Synthetic oligonucleotide
caucacggcggcggagcuc

SEQ ID NO: 2436083 - RNA, 19 nt, Artificial Sequence
  Description of Artificial Sequence: Synthetic oligonucleotide
ccgccuuguucuccguggc

SEQ ID NO: 2436084 - RNA, 19 nt, Artificial Sequence
  Description of Artificial Sequence: Synthetic oligonucleotide
cguggguuaugaacgugca

SEQ ID NO: 2436085 - RNA, 19 nt, Artificial Sequence
  Description of Artificial Sequence: Synthetic oligonucleotide
gcagagucagaggccucug

SEQ ID NO: 2436086 - RNA, 19 nt, Artificial Sequence
  Description of Artificial Sequence: Synthetic oligonucleotide
gcaucuucgccaucugcau

SEQ ID NO: 2436087 - RNA, 19 nt, Artificial Sequence
  Description of Artificial Sequence: Synthetic oligonucleotide
gggccaagagaggccauga

SEQ ID NO: 2436088 - RNA, 19 nt, Artificial Sequence
  Description of Artificial Sequence: Synthetic oligonucleotide
cggcggagcucgcaggucc

SEQ ID NO: 2436089 - RNA, 19 nt, Artificial Sequence
  Description of Artificial Sequence: Synthetic oligonucleotide
gccacaggaccacauuuau

SEQ ID NO: 2436090 - RNA, 19 nt, Artificial Sequence
  Description of Artificial Sequence: Synthetic oligonucleotide
cugaccucgcugagguccu

SEQ ID NO: 2436091 - RNA, 19 nt, Artificial Sequence
  Description of Artificial Sequence: Synthetic oligonucleotide
gcucuaggaggcagaguca

SEQ ID NO: 2436092 - RNA, 19 nt, Artificial Sequence
  Description of Artificial Sequence: Synthetic oligonucleotide
guguaaggucccucuucau

SEQ ID NO: 2436093 - RNA, 19 nt, Artificial Sequence
  Description of Artificial Sequence: Synthetic oligonucleotide
gaugcagggcagcccgguu

SEQ ID NO: 2436094 - RNA, 19 nt, Artificial Sequence
  Description of Artificial Sequence: Synthetic oligonucleotide
gcauacgcaucuucgccau

SEQ ID NO: 2436095 - RNA, 19 nt, Artificial Sequence
  Description of Artificial Sequence: Synthetic oligonucleotide
gguuaugaacgugcacgcu

SEQ ID NO: 2436096 - RNA, 19 nt, Artificial Sequence
  Description of Artificial Sequence: Synthetic oligonucleotide
gguccucgggccuagcauu

SEQ ID NO: 2436097 - RNA, 19 nt, Artificial Sequence
  Description of Artificial Sequence: Synthetic oligonucleotide
ggccacaggaccacauuua

SEQ ID NO: 2436098 - RNA, 19 nt, Artificial Sequence
  Description of Artificial Sequence: Synthetic oligonucleotide
cucgagaggccugauccau

SEQ ID NO: 2436099 - RNA, 19 nt, Artificial Sequence
  Description of Artificial Sequence: Synthetic oligonucleotide
gcagcccgguuacucuuuc

SEQ ID NO: 2436100 - RNA, 19 nt, Artificial Sequence
  Description of Artificial Sequence: Synthetic oligonucleotide
gcucagcggccacucagaa

SEQ ID NO: 2436101 - RNA, 19 nt, Artificial Sequence
  Description of Artificial Sequence: Synthetic oligonucleotide
gguccucguggguuaugaa

SEQ ID NO: 2436102 - RNA, 19 nt, Artificial Sequence
  Description of Artificial Sequence: Synthetic oligonucleotide
ucacggcggcggagcucgc

SEQ ID NO: 2436103 - RNA, 19 nt, Artificial Sequence
  Description of Artificial Sequence: Synthetic oligonucleotide
cagguccucguggguuaug

SEQ ID NO: 2436104 - RNA, 19 nt, Artificial Sequence
  Description of Artificial Sequence: Synthetic oligonucleotide
aggccucucccgagcucag

SEQ ID NO: 2436105 - RNA, 19 nt, Artificial Sequence
  Description of Artificial Sequence: Synthetic oligonucleotide
uucucacgacaggccucuc

SEQ ID NO: 2436106 - RNA, 19 nt, Artificial Sequence
  Description of Artificial Sequence: Synthetic oligonucleotide
gccucagcucaucagccau

SEQ ID NO: 2436107 - RNA, 19 nt, Artificial Sequence
  Description of Artificial Sequence: Synthetic oligonucleotide
gggagacauauuuggcauu

SEQ ID NO: 2436108 - RNA, 19 nt, Artificial Sequence
  Description of Artificial Sequence: Synthetic oligonucleotide
cagaggccucugagcuguc

SEQ ID NO: 2436109 - RNA, 19 nt, Artificial Sequence
  Description of Artificial Sequence: Synthetic oligonucleotide
auggcucgagaggccugau

SEQ ID NO: 2436110 - RNA, 19 nt, Artificial Sequence
  Description of Artificial Sequence: Synthetic oligonucleotide
ggugccgccucagcucauc

SEQ ID NO: 2436111 - RNA, 19 nt, Artificial Sequence
  Description of Artificial Sequence: Synthetic oligonucleotide
ggagcucgcagguccucgu

SEQ ID NO: 2436112 - RNA, 19 nt, Artificial Sequence
  Description of Artificial Sequence: Synthetic oligonucleotide
ccuugcuguccccagcacu

SEQ ID NO: 2436113 - RNA, 19 nt, Artificial Sequence
  Description of Artificial Sequence: Synthetic oligonucleotide
cucgcagguccucgugggu

SEQ ID NO: 2436114 - RNA, 19 nt, Artificial Sequence
  Description of Artificial Sequence: Synthetic oligonucleotide
cccuuucuuucagcuccag

SEQ ID NO: 2436115 - RNA, 19 nt, Artificial Sequence
  Description of Artificial Sequence: Synthetic oligonucleotide
ccaaggcgccggugggaac

SEQ ID NO: 2436116 - RNA, 19 nt, Artificial Sequence
  Description of Artificial Sequence: Synthetic oligonucleotide
ugaccucgcugagguccuu

SEQ ID NO: 2436117 - RNA, 19 nt, Artificial Sequence
  Description of Artificial Sequence: Synthetic oligonucleotide
ggcacgucaucuggguccu

SEQ ID NO: 2436118 - RNA, 19 nt, Artificial Sequence
  Description of Artificial Sequence: Synthetic oligonucleotide
cagcccgguuacucuuucu

SEQ ID NO: 2436119 - RNA, 19 nt, Artificial Sequence
  Description of Artificial Sequence: Synthetic oligonucleotide
ggccaagagaggccaugau

SEQ ID NO: 2436120 - RNA, 19 nt, Artificial Sequence
  Description of Artificial Sequence: Synthetic oligonucleotide
ccucguggguuaugaacgu

SEQ ID NO: 2436121 - RNA, 19 nt, Artificial Sequence
  Description of Artificial Sequence: Synthetic oligonucleotide
gcccuuucuuucagcucca

SEQ ID NO: 2436122 - RNA, 19 nt, Artificial Sequence
  Description of Artificial Sequence: Synthetic oligonucleotide
caccaugugucugcccuuu

SEQ ID NO: 2436123 - RNA, 19 nt, Artificial Sequence
  Description of Artificial Sequence: Synthetic oligonucleotide
cgcucagcggccacucaga

SEQ ID NO: 2436124 - RNA, 19 nt, Artificial Sequence
  Description of Artificial Sequence: Synthetic oligonucleotide
ggggaggcuugaaccaggu

SEQ ID NO: 2436125 - RNA, 19 nt, Artificial Sequence
  Description of Artificial Sequence: Synthetic oligonucleotide
ccagcccaaggcgccggug

SEQ ID NO: 2436126 - RNA, 19 nt, Artificial Sequence
  Description of Artificial Sequence: Synthetic oligonucleotide
cccaaggcgccggugggaa

SEQ ID NO: 2436127 - RNA, 19 nt, Artificial Sequence
  Description of Artificial Sequence: Synthetic oligonucleotide
ccacaggaccacauuuauu

SEQ ID NO: 2436128 - RNA, 19 nt, Artificial Sequence
  Description of Artificial Sequence: Synthetic oligonucleotide
gggcagcccgguuacucuu

SEQ ID NO: 2436129 - RNA, 19 nt, Artificial Sequence
  Description of Artificial Sequence: Synthetic oligonucleotide
gcccaaggcgccgguggga

SEQ ID NO: 2436130 - RNA, 19 nt, Artificial Sequence
  Description of Artificial Sequence: Synthetic oligonucleotide
gcaccaugugucugcccuu

SEQ ID NO: 2436131 - RNA, 19 nt, Artificial Sequence
  Description of Artificial Sequence: Synthetic oligonucleotide
ccaagacguaccccacaau

SEQ ID NO: 2436132 - RNA, 19 nt, Artificial Sequence
  Description of Artificial Sequence: Synthetic oligonucleotide
ggccucucccgagcucaga

SEQ ID NO: 2436133 - RNA, 19 nt, Artificial Sequence
  Description of Artificial Sequence: Synthetic oligonucleotide
aggugccgccucagcucau

SEQ ID NO: 2436134 - RNA, 19 nt, Artificial Sequence
  Description of Artificial Sequence: Synthetic oligonucleotide
gcggagcucgcagguccuc

SEQ ID NO: 2436135 - RNA, 19 nt, Artificial Sequence
  Description of Artificial Sequence: Synthetic oligonucleotide
gcggcggagcucgcagguc

SEQ ID NO: 2436136 - RNA, 19 nt, Artificial Sequence
  Description of Artificial Sequence: Synthetic oligonucleotide
ggcggagcucgcagguccu

SEQ ID NO: 2436137 - RNA, 19 nt, Artificial Sequence
  Description of Artificial Sequence: Synthetic oligonucleotide
ggcagcccgguuacucuuu

SEQ ID NO: 2436138 - RNA, 19 nt, Artificial Sequence
  Description of Artificial Sequence: Synthetic oligonucleotide
cgccaucugcauaguauuu

SEQ ID NO: 2436139 - RNA, 19 nt, Artificial Sequence
  Description of Artificial Sequence: Synthetic oligonucleotide
gccagcccaaggcgccggu

SEQ ID NO: 2436140 - RNA, 19 nt, Artificial Sequence
  Description of Artificial Sequence: Synthetic oligonucleotide
ggcgccggugggaacgcuu

SEQ ID NO: 2436141 - RNA, 19 nt, Artificial Sequence
  Description of Artificial Sequence: Synthetic oligonucleotide
gcagguccucguggguuau

SEQ ID NO: 2436142 - RNA, 19 nt, Artificial Sequence
  Description of Artificial Sequence: Synthetic oligonucleotide
gcacgucaucuggguccuc

SEQ ID NO: 2436143 - RNA, 19 nt, Artificial Sequence
  Description of Artificial Sequence: Synthetic oligonucleotide
cgccuuguucuccguggcu

SEQ ID NO: 2436144 - RNA, 19 nt, Artificial Sequence
  Description of Artificial Sequence: Synthetic oligonucleotide
cgggccuagcauugcggau

SEQ ID NO: 2436145 - RNA, 19 nt, Artificial Sequence
  Description of Artificial Sequence: Synthetic oligonucleotide
ccuccgccuuguucuccgu

SEQ ID NO: 2436146 - RNA, 19 nt, Artificial Sequence
  Description of Artificial Sequence: Synthetic oligonucleotide
ccgagcucagaagcauguu

SEQ ID NO: 2436147 - RNA, 19 nt, Artificial Sequence
  Description of Artificial Sequence: Synthetic oligonucleotide
gccuagcauugcggauauu

SEQ ID NO: 2436148 - RNA, 19 nt, Artificial Sequence
  Description of Artificial Sequence: Synthetic oligonucleotide
ccguggcugccagcaccau

SEQ ID NO: 2436149 - RNA, 19 nt, Artificial Sequence
  Description of Artificial Sequence: Synthetic oligonucleotide
acaaauaacaccuuuaagc

SEQ ID NO: 2436150 - RNA, 19 nt, Artificial Sequence
  Description of Artificial Sequence: Synthetic oligonucleotide
uuuaucggaaacaagauag

SEQ ID NO: 2436151 - RNA, 19 nt, Artificial Sequence
  Description of Artificial Sequence: Synthetic oligonucleotide
cugguuaacaccaugaugg

SEQ ID NO: 2436152 - RNA, 19 nt, Artificial Sequence
  Description of Artificial Sequence: Synthetic oligonucleotide
aguuuugacaaauaacacc

SEQ ID NO: 2436153 - RNA, 19 nt, Artificial Sequence
  Description of Artificial Sequence: Synthetic oligonucleotide
uaugacauaaccuuguuug

SEQ ID NO: 2436154 - RNA, 19 nt, Artificial Sequence
  Description of Artificial Sequence: Synthetic oligonucleotide
aaacaucacacauauuagc

SEQ ID NO: 2436155 - RNA, 19 nt, Artificial Sequence
  Description of Artificial Sequence: Synthetic oligonucleotide
aaaacuuguauguggaauc

SEQ ID NO: 2436156 - RNA, 19 nt, Artificial Sequence
  Description of Artificial Sequence: Synthetic oligonucleotide
ucggaaacaagauagacca

SEQ ID NO: 2436157 - RNA, 19 nt, Artificial Sequence
  Description of Artificial Sequence: Synthetic oligonucleotide
aauucaggacucucaaagc

SEQ ID NO: 2436158 - RNA, 19 nt, Artificial Sequence
  Description of Artificial Sequence: Synthetic oligonucleotide
aacuuuagcugguuaacac

SEQ ID NO: 2436159 - RNA, 19 nt, Artificial Sequence
  Description of Artificial Sequence: Synthetic oligonucleotide
aucauugcacuuuaacugc

SEQ ID NO: 2436160 - RNA, 19 nt, Artificial Sequence
  Description of Artificial Sequence: Synthetic oligonucleotide
ucuggcaaacuuuagcugg

SEQ ID NO: 2436161 - RNA, 19 nt, Artificial Sequence
  Description of Artificial Sequence: Synthetic oligonucleotide
aacaccuuuaagcagacaa

SEQ ID NO: 2436162 - RNA, 19 nt, Artificial Sequence
  Description of Artificial Sequence: Synthetic oligonucleotide
ucaggguuccuucugauag

SEQ ID NO: 2436163 - RNA, 19 nt, Artificial Sequence
  Description of Artificial Sequence: Synthetic oligonucleotide
aaauaacaccuuuaagcag

SEQ ID NO: 2436164 - RNA, 19 nt, Artificial Sequence
  Description of Artificial Sequence: Synthetic oligonucleotide
acuuuagcugguuaacacc

SEQ ID NO: 2436165 - RNA, 19 nt, Artificial Sequence
  Description of Artificial Sequence: Synthetic oligonucleotide
aguagucaaacaucauugc

SEQ ID NO: 2436166 - RNA, 19 nt, Artificial Sequence
  Description of Artificial Sequence: Synthetic oligonucleotide
aaguuuaucggaaacaaga

SEQ ID NO: 2436167 - RNA, 19 nt, Artificial Sequence
  Description of Artificial Sequence: Synthetic oligonucleotide
caucauugcacuuuaacug

SEQ ID NO: 2436168 - RNA, 19 nt, Artificial Sequence
  Description of Artificial Sequence: Synthetic oligonucleotide
uguauaugacauaaccuug

SEQ ID NO: 2436169 - RNA, 19 nt, Artificial Sequence
  Description of Artificial Sequence: Synthetic oligonucleotide
uguauguggaaucuucacc

SEQ ID NO: 2436170 - RNA, 19 nt, Artificial Sequence
  Description of Artificial Sequence: Synthetic oligonucleotide
cauauuagcgguaacggug

SEQ ID NO: 2436171 - RNA, 19 nt, Artificial Sequence
  Description of Artificial Sequence: Synthetic oligonucleotide
agaguauugcgccuucucc

SEQ ID NO: 2436172 - RNA, 19 nt, Artificial Sequence
  Description of Artificial Sequence: Synthetic oligonucleotide
uguggaaucuucaccaacc

SEQ ID NO: 2436173 - RNA, 19 nt, Artificial Sequence
  Description of Artificial Sequence: Synthetic oligonucleotide
agcuuuauggaauggauca

SEQ ID NO: 2436174 - RNA, 19 nt, Artificial Sequence
  Description of Artificial Sequence: Synthetic oligonucleotide
uaagcagacaagacggucc

SEQ ID NO: 2436175 - RNA, 19 nt, Artificial Sequence
  Description of Artificial Sequence: Synthetic oligonucleotide
uuuauggaauggaucaaug

SEQ ID NO: 2436176 - RNA, 19 nt, Artificial Sequence
  Description of Artificial Sequence: Synthetic oligonucleotide
acuaguuuugacaaauaac

SEQ ID NO: 2436177 - RNA, 19 nt, Artificial Sequence
  Description of Artificial Sequence: Synthetic oligonucleotide
ucugauagcuuuauggaau

SEQ ID NO: 2436178 - RNA, 19 nt, Artificial Sequence
  Description of Artificial Sequence: Synthetic oligonucleotide
acaucauugcacuuuaacu

SEQ ID NO: 2436179 - RNA, 19 nt, Artificial Sequence
  Description of Artificial Sequence: Synthetic oligonucleotide
aaggccacggcucuuucgg

SEQ ID NO: 2436180 - RNA, 19 nt, Artificial Sequence
  Description of Artificial Sequence: Synthetic oligonucleotide
guaaguugcacccuuagga

SEQ ID NO: 2436181 - RNA, 19 nt, Artificial Sequence
  Description of Artificial Sequence: Synthetic oligonucleotide
uagaccaucaccaguaguc

SEQ ID NO: 2436182 - RNA, 19 nt, Artificial Sequence
  Description of Artificial Sequence: Synthetic oligonucleotide
augacguccagcucucucc

SEQ ID NO: 2436183 - RNA, 19 nt, Artificial Sequence
  Description of Artificial Sequence: Synthetic oligonucleotide
acaucacacauauuagcgg

SEQ ID NO: 2436184 - RNA, 19 nt, Artificial Sequence
  Description of Artificial Sequence: Synthetic oligonucleotide
caguagucaaacaucauug

SEQ ID NO: 2436185 - RNA, 19 nt, Artificial Sequence
  Description of Artificial Sequence: Synthetic oligonucleotide
agcugcagaguauugcgcc

SEQ ID NO: 2436186 - RNA, 19 nt, Artificial Sequence
  Description of Artificial Sequence: Synthetic oligonucleotide
cuuguaugcacccaucuug

SEQ ID NO: 2436187 - RNA, 19 nt, Artificial Sequence
  Description of Artificial Sequence: Synthetic oligonucleotide
gacauaaccuuguuuggcc

SEQ ID NO: 2436188 - RNA, 19 nt, Artificial Sequence
  Description of Artificial Sequence: Synthetic oligonucleotide
ucaaagccccacaaugacg

SEQ ID NO: 2436189 - RNA, 19 nt, Artificial Sequence
  Description of Artificial Sequence: Synthetic oligonucleotide
aucggaaacaagauagacc

SEQ ID NO: 2436190 - RNA, 19 nt, Artificial Sequence
  Description of Artificial Sequence: Synthetic oligonucleotide
caaacaucacacauauuag

SEQ ID NO: 2436191 - RNA, 19 nt, Artificial Sequence
  Description of Artificial Sequence: Synthetic oligonucleotide
aaugacguccagcucucuc

SEQ ID NO: 2436192 - RNA, 19 nt, Artificial Sequence
  Description of Artificial Sequence: Synthetic oligonucleotide
cuugccguaaguugcaccc

SEQ ID NO: 2436193 - RNA, 19 nt, Artificial Sequence
  Description of Artificial Sequence: Synthetic oligonucleotide
auugcacuuuaacugcuac

SEQ ID NO: 2436194 - RNA, 19 nt, Artificial Sequence
  Description of Artificial Sequence: Synthetic oligonucleotide
ugcacuuuaacugcuacca

SEQ ID NO: 2436195 - RNA, 19 nt, Artificial Sequence
  Description of Artificial Sequence: Synthetic oligonucleotide
acacauauuagcgguaacg

SEQ ID NO: 2436196 - RNA, 19 nt, Artificial Sequence
  Description of Artificial Sequence: Synthetic oligonucleotide
acaagauagaccaucacca

SEQ ID NO: 2436197 - RNA, 19 nt, Artificial Sequence
  Description of Artificial Sequence: Synthetic oligonucleotide
acacgaauccuguauauga

SEQ ID NO: 2436198 - RNA, 19 nt, Artificial Sequence
  Description of Artificial Sequence: Synthetic oligonucleotide
agucaaacaucauugcacu

SEQ ID NO: 2436199 - RNA, 19 nt, Artificial Sequence
  Description of Artificial Sequence: Synthetic oligonucleotide
guauguggaaucuucacca

SEQ ID NO: 2436200 - RNA, 19 nt, Artificial Sequence
  Description of Artificial Sequence: Synthetic oligonucleotide
aaauuguuuauuggguaug

SEQ ID NO: 2436201 - RNA, 19 nt, Artificial Sequence
  Description of Artificial Sequence: Synthetic oligonucleotide
aagaauucaggacucucaa

SEQ ID NO: 2436202 - RNA, 19 nt, Artificial Sequence
  Description of Artificial Sequence: Synthetic oligonucleotide
ccuucugauagcuuuaugg

SEQ ID NO: 2436203 - RNA, 19 nt, Artificial Sequence
  Description of Artificial Sequence: Synthetic oligonucleotide
uuuggugauccacugugug

SEQ ID NO: 2436204 - RNA, 19 nt, Artificial Sequence
  Description of Artificial Sequence: Synthetic oligonucleotide
uuaacaccaugauggacag

SEQ ID NO: 2436205 - RNA, 19 nt, Artificial Sequence
  Description of Artificial Sequence: Synthetic oligonucleotide
aucaccaguagucaaacau

SEQ ID NO: 2436206 - RNA, 19 nt, Artificial Sequence
  Description of Artificial Sequence: Synthetic oligonucleotide
ugcagacuaguuuugacaa

SEQ ID NO: 2436207 - RNA, 19 nt, Artificial Sequence
  Description of Artificial Sequence: Synthetic oligonucleotide
cacauauuagcgguaacgg

SEQ ID NO: 2436208 - RNA, 19 nt, Artificial Sequence
  Description of Artificial Sequence: Synthetic oligonucleotide
augacauaaccuuguuugg

SEQ ID NO: 2436209 - RNA, 19 nt, Artificial Sequence
  Description of Artificial Sequence: Synthetic oligonucleotide
cuuguuuggccuuguaccc

SEQ ID NO: 2436210 - RNA, 19 nt, Artificial Sequence
  Description of Artificial Sequence: Synthetic oligonucleotide
aauggaucaaugaggauaa

SEQ ID NO: 2436211 - RNA, 19 nt, Artificial Sequence
  Description of Artificial Sequence: Synthetic oligonucleotide
augauggacaggcuugccg

SEQ ID NO: 2436212 - RNA, 19 nt, Artificial Sequence
  Description of Artificial Sequence: Synthetic oligonucleotide
uuguuuauuggguaugaau

SEQ ID NO: 2436213 - RNA, 19 nt, Artificial Sequence
  Description of Artificial Sequence: Synthetic oligonucleotide
accuuguuuggccuuguac

SEQ ID NO: 2436214 - RNA, 19 nt, Artificial Sequence
  Description of Artificial Sequence: Synthetic oligonucleotide
ucuuucggccagcagaugu

SEQ ID NO: 2436215 - RNA, 19 nt, Artificial Sequence
  Description of Artificial Sequence: Synthetic oligonucleotide
uuguggacugguuugguga

SEQ ID NO: 2436216 - RNA, 19 nt, Artificial Sequence
  Description of Artificial Sequence: Synthetic oligonucleotide
uuagcgguaacgguggagc

SEQ ID NO: 2436217 - RNA, 19 nt, Artificial Sequence
  Description of Artificial Sequence: Synthetic oligonucleotide
uaugcacccaucuuggcuc

SEQ ID NO: 2436218 - RNA, 19 nt, Artificial Sequence
  Description of Artificial Sequence: Synthetic oligonucleotide
aaaguuuaucggaaacaag

SEQ ID NO: 2436219 - RNA, 19 nt, Artificial Sequence
  Description of Artificial Sequence: Synthetic oligonucleotide
uggaucaaugaggauaacc

SEQ ID NO: 2436220 - RNA, 19 nt, Artificial Sequence
  Description of Artificial Sequence: Synthetic oligonucleotide
gaauggaucaaugaggaua

SEQ ID NO: 2436221 - RNA, 19 nt, Artificial Sequence
  Description of Artificial Sequence: Synthetic oligonucleotide
aagcgcaucacgucggacu

SEQ ID NO: 2436222 - RNA, 19 nt, Artificial Sequence
  Description of Artificial Sequence: Synthetic oligonucleotide
aauuguuuauuggguauga

SEQ ID NO: 2436223 - RNA, 19 nt, Artificial Sequence
  Description of Artificial Sequence: Synthetic oligonucleotide
uuaucggaaacaagauaga

SEQ ID NO: 2436224 - RNA, 19 nt, Artificial Sequence
  Description of Artificial Sequence: Synthetic oligonucleotide
auauuagcgguaacggugg

SEQ ID NO: 2436225 - RNA, 19 nt, Artificial Sequence
  Description of Artificial Sequence: Synthetic oligonucleotide
uaaguugcacccuuaggaa

SEQ ID NO: 2436226 - RNA, 19 nt, Artificial Sequence
  Description of Artificial Sequence: Synthetic oligonucleotide
ccuuuaagcagacaagacg

SEQ ID NO: 2436227 - RNA, 19 nt, Artificial Sequence
  Description of Artificial Sequence: Synthetic oligonucleotide
auguggaaucuucaccaac

SEQ ID NO: 2436228 - RNA, 19 nt, Artificial Sequence
  Description of Artificial Sequence: Synthetic oligonucleotide
ugauggacaggcuugccgu

SEQ ID NO: 2436229 - RNA, 19 nt, Artificial Sequence
  Description of Artificial Sequence: Synthetic oligonucleotide
aagcuggcgguauugccag

SEQ ID NO: 2436230 - RNA, 19 nt, Artificial Sequence
  Description of Artificial Sequence: Synthetic oligonucleotide
aguauugcgccuucuccag

SEQ ID NO: 2436231 - RNA, 19 nt, Artificial Sequence
  Description of Artificial Sequence: Synthetic oligonucleotide
gauggcugccaccagagga

SEQ ID NO: 2436232 - RNA, 19 nt, Artificial Sequence
  Description of Artificial Sequence: Synthetic oligonucleotide
aaacuuuagcugguuaaca

SEQ ID NO: 2436233 - RNA, 19 nt, Artificial Sequence
  Description of Artificial Sequence: Synthetic oligonucleotide
ucaccaguagucaaacauc

SEQ ID NO: 2436234 - RNA, 19 nt, Artificial Sequence
  Description of Artificial Sequence: Synthetic oligonucleotide
gaucaaugaggauaaccuc

SEQ ID NO: 2436235 - RNA, 19 nt, Artificial Sequence
  Description of Artificial Sequence: Synthetic oligonucleotide
uucugauagcuuuauggaa

SEQ ID NO: 2436236 - RNA, 19 nt, Artificial Sequence
  Description of Artificial Sequence: Synthetic oligonucleotide
agcauucaugacaaucugc

SEQ ID NO: 2436237 - RNA, 19 nt, Artificial Sequence
  Description of Artificial Sequence: Synthetic oligonucleotide
aaacuuguauguggaaucu

SEQ ID NO: 2436238 - RNA, 19 nt, Artificial Sequence
  Description of Artificial Sequence: Synthetic oligonucleotide
cacccuuaggaacugggcg

SEQ ID NO: 2436239 - RNA, 19 nt, Artificial Sequence
  Description of Artificial Sequence: Synthetic oligonucleotide
aucaaugaggauaaccuca

SEQ ID NO: 2436240 - RNA, 19 nt, Artificial Sequence
  Description of Artificial Sequence: Synthetic oligonucleotide
cuaccaauuccacaaagca

SEQ ID NO: 2436241 - RNA, 19 nt, Artificial Sequence
  Description of Artificial Sequence: Synthetic oligonucleotide
aggaacugggcguuugcgg

SEQ ID NO: 2436242 - RNA, 19 nt, Artificial Sequence
  Description of Artificial Sequence: Synthetic oligonucleotide
caggcuugccguaaguugc

SEQ ID NO: 2436243 - RNA, 19 nt, Artificial Sequence
  Description of Artificial Sequence: Synthetic oligonucleotide
ugacauaaccuuguuuggc

SEQ ID NO: 2436244 - RNA, 19 nt, Artificial Sequence
  Description of Artificial Sequence: Synthetic oligonucleotide
gacuaguuuugacaaauaa

SEQ ID NO: 2436245 - RNA, 19 nt, Artificial Sequence
  Description of Artificial Sequence: Synthetic oligonucleotide
caaagcauucaugacaauc

SEQ ID NO: 2436246 - RNA, 19 nt, Artificial Sequence
  Description of Artificial Sequence: Synthetic oligonucleotide
uauugcgccuucuccaggc

SEQ ID NO: 2436247 - RNA, 19 nt, Artificial Sequence
  Description of Artificial Sequence: Synthetic oligonucleotide
uaucggaaacaagauagac

SEQ ID NO: 2436248 - RNA, 19 nt, Artificial Sequence
  Description of Artificial Sequence: Synthetic oligonucleotide
cuucugauagcuuuaugga

SEQ ID NO: 2436249 - RNA, 19 nt, Artificial Sequence
  Description of Artificial Sequence: Synthetic oligonucleotide
uaacgguggagcugcagag

SEQ ID NO: 2436250 - RNA, 19 nt, Artificial Sequence
  Description of Artificial Sequence: Synthetic oligonucleotide
uucuggcaaacuuuagcug

SEQ ID NO: 2436251 - RNA, 19 nt, Artificial Sequence
  Description of Artificial Sequence: Synthetic oligonucleotide
uuuaagcagacaagacggu

SEQ ID NO: 2436252 - RNA, 19 nt, Artificial Sequence
  Description of Artificial Sequence: Synthetic oligonucleotide
acauauuagcgguaacggu

SEQ ID NO: 2436253 - RNA, 19 nt, Artificial Sequence
  Description of Artificial Sequence: Synthetic oligonucleotide
acgucggacugcuucuucc

SEQ ID NO: 2436254 - RNA, 19 nt, Artificial Sequence
  Description of Artificial Sequence: Synthetic oligonucleotide
acaggcuugccguaaguug

SEQ ID NO: 2436255 - RNA, 19 nt, Artificial Sequence
  Description of Artificial Sequence: Synthetic oligonucleotide
ugugcuuguggacugguuu

SEQ ID NO: 2436256 - RNA, 19 nt, Artificial Sequence
  Description of Artificial Sequence: Synthetic oligonucleotide
aagcagacaagacgguccu

SEQ ID NO: 2436257 - RNA, 19 nt, Artificial Sequence
  Description of Artificial Sequence: Synthetic oligonucleotide
aaagcuggcgguauugcca

SEQ ID NO: 2436258 - RNA, 19 nt, Artificial Sequence
  Description of Artificial Sequence: Synthetic oligonucleotide
agaaagcuggcgguauugc

SEQ ID NO: 2436259 - RNA, 19 nt, Artificial Sequence
  Description of Artificial Sequence: Synthetic oligonucleotide
uguaccccagccuucgcgc

SEQ ID NO: 2436260 - RNA, 19 nt, Artificial Sequence
  Description of Artificial Sequence: Synthetic oligonucleotide
gaguauugcgccuucucca

SEQ ID NO: 2436261 - RNA, 19 nt, Artificial Sequence
  Description of Artificial Sequence: Synthetic oligonucleotide
cuuuccaaggccacggcuc

SEQ ID NO: 2436262 - RNA, 19 nt, Artificial Sequence
  Description of Artificial Sequence: Synthetic oligonucleotide
gauagaccaucaccaguag

SEQ ID NO: 2436263 - RNA, 19 nt, Artificial Sequence
  Description of Artificial Sequence: Synthetic oligonucleotide
uggaaucuucaccaaccca

SEQ ID NO: 2436264 - RNA, 19 nt, Artificial Sequence
  Description of Artificial Sequence: Synthetic oligonucleotide
cugauagcuuuauggaaug

SEQ ID NO: 2436265 - RNA, 19 nt, Artificial Sequence
  Description of Artificial Sequence: Synthetic oligonucleotide
ugauccacugugugucagg

SEQ ID NO: 2436266 - RNA, 19 nt, Artificial Sequence
  Description of Artificial Sequence: Synthetic oligonucleotide
uuaggaacugggcguuugc

SEQ ID NO: 2436267 - RNA, 19 nt, Artificial Sequence
  Description of Artificial Sequence: Synthetic oligonucleotide
cuaaauuguuuauugggua

SEQ ID NO: 2436268 - RNA, 19 nt, Artificial Sequence
  Description of Artificial Sequence: Synthetic oligonucleotide
uuuauuggguaugaauuuu

SEQ ID NO: 2436269 - RNA, 19 nt, Artificial Sequence
  Description of Artificial Sequence: Synthetic oligonucleotide
acgaauccuguauaugaca

SEQ ID NO: 2436270 - RNA, 19 nt, Artificial Sequence
  Description of Artificial Sequence: Synthetic oligonucleotide
gguauugccagcaacggac

SEQ ID NO: 2436271 - RNA, 19 nt, Artificial Sequence
  Description of Artificial Sequence: Synthetic oligonucleotide
ucugcagacuaguuuugac

SEQ ID NO: 2436272 - RNA, 19 nt, Artificial Sequence
  Description of Artificial Sequence: Synthetic oligonucleotide
uggacugguuuggugaucc

SEQ ID NO: 2436273 - RNA, 19 nt, Artificial Sequence
  Description of Artificial Sequence: Synthetic oligonucleotide
uaucaggccggguggggcg

SEQ ID NO: 2436274 - RNA, 19 nt, Artificial Sequence
  Description of Artificial Sequence: Synthetic oligonucleotide
ucgcgcuuuaucaggccgg

SEQ ID NO: 2436275 - RNA, 19 nt, Artificial Sequence
  Description of Artificial Sequence: Synthetic oligonucleotide
agcagaugucagcccacgc

SEQ ID NO: 2436276 - RNA, 19 nt, Artificial Sequence
  Description of Artificial Sequence: Synthetic oligonucleotide
acauaaccuuguuuggccu

SEQ ID NO: 2436277 - RNA, 19 nt, Artificial Sequence
  Description of Artificial Sequence: Synthetic oligonucleotide
uauugccagcaacggaccc

SEQ ID NO: 2436278 - RNA, 19 nt, Artificial Sequence
  Description of Artificial Sequence: Synthetic oligonucleotide
uuuccaaggccacggcucu

SEQ ID NO: 2436279 - RNA, 19 nt, Artificial Sequence
  Description of Artificial Sequence: Synthetic oligonucleotide
caaacuuuagcugguuaac

SEQ ID NO: 2436280 - RNA, 19 nt, Artificial Sequence
  Description of Artificial Sequence: Synthetic oligonucleotide
uuaagcagacaagacgguc

SEQ ID NO: 2436281 - RNA, 19 nt, Artificial Sequence
  Description of Artificial Sequence: Synthetic oligonucleotide
cuuuaacugcuaccaauuc

SEQ ID NO: 2436282 - RNA, 19 nt, Artificial Sequence
  Description of Artificial Sequence: Synthetic oligonucleotide
auaugacauaaccuuguuu

SEQ ID NO: 2436283 - RNA, 19 nt, Artificial Sequence
  Description of Artificial Sequence: Synthetic oligonucleotide
gagagccaccaauagugug

SEQ ID NO: 2436284 - RNA, 19 nt, Artificial Sequence
  Description of Artificial Sequence: Synthetic oligonucleotide
cuuguauguggaaucuuca

SEQ ID NO: 2436285 - RNA, 19 nt, Artificial Sequence
  Description of Artificial Sequence: Synthetic oligonucleotide
ugucagcccacgcaucucu

SEQ ID NO: 2436286 - RNA, 19 nt, Artificial Sequence
  Description of Artificial Sequence: Synthetic oligonucleotide
uaggaacugggcguuugcg

SEQ ID NO: 2436287 - RNA, 19 nt, Artificial Sequence
  Description of Artificial Sequence: Synthetic oligonucleotide
uuuaucaggccgggugggg

SEQ ID NO: 2436288 - RNA, 19 nt, Artificial Sequence
  Description of Artificial Sequence: Synthetic oligonucleotide
acccuuaggaacugggcgu

SEQ ID NO: 2436289 - RNA, 19 nt, Artificial Sequence
  Description of Artificial Sequence: Synthetic oligonucleotide
uccuccauagcuccuggau

SEQ ID NO: 2436290 - RNA, 19 nt, Artificial Sequence
  Description of Artificial Sequence: Synthetic oligonucleotide
aacuuguggcccuuuccaa

SEQ ID NO: 2436291 - RNA, 19 nt, Artificial Sequence
  Description of Artificial Sequence: Synthetic oligonucleotide
cuguauaugacauaaccuu

SEQ ID NO: 2436292 - RNA, 19 nt, Artificial Sequence
  Description of Artificial Sequence: Synthetic oligonucleotide
ccuggauguacuuguaugc

SEQ ID NO: 2436293 - RNA, 19 nt, Artificial Sequence
  Description of Artificial Sequence: Synthetic oligonucleotide
aaagcgcaucacgucggac

SEQ ID NO: 2436294 - RNA, 19 nt, Artificial Sequence
  Description of Artificial Sequence: Synthetic oligonucleotide
caucacgucggacugcuuc

SEQ ID NO: 2436295 - RNA, 19 nt, Artificial Sequence
  Description of Artificial Sequence: Synthetic oligonucleotide
agauagaccaucaccagua

SEQ ID NO: 2436296 - RNA, 19 nt, Artificial Sequence
  Description of Artificial Sequence: Synthetic oligonucleotide
auaacaccuuuaagcagac

SEQ ID NO: 2436297 - RNA, 19 nt, Artificial Sequence
  Description of Artificial Sequence: Synthetic oligonucleotide
agacaagacgguccuaaau

SEQ ID NO: 2436298 - RNA, 19 nt, Artificial Sequence
  Description of Artificial Sequence: Synthetic oligonucleotide
auagaccaucaccaguagu

SEQ ID NO: 2436299 - RNA, 19 nt, Artificial Sequence
  Description of Artificial Sequence: Synthetic oligonucleotide
guaacgguggagcugcaga

SEQ ID NO: 2436300 - RNA, 19 nt, Artificial Sequence
  Description of Artificial Sequence: Synthetic oligonucleotide
cuucuggcaaacuuuagcu

SEQ ID NO: 2436301 - RNA, 19 nt, Artificial Sequence
  Description of Artificial Sequence: Synthetic oligonucleotide
cuuguggacugguuuggug

SEQ ID NO: 2436302 - RNA, 19 nt, Artificial Sequence
  Description of Artificial Sequence: Synthetic oligonucleotide
cagcgcagaaagcuggcgg

SEQ ID NO: 2436303 - RNA, 19 nt, Artificial Sequence
  Description of Artificial Sequence: Synthetic oligonucleotide
ggaaacaagauagaccauc

SEQ ID NO: 2436304 - RNA, 19 nt, Artificial Sequence
  Description of Artificial Sequence: Synthetic oligonucleotide
ugguuaacaccaugaugga

SEQ ID NO: 2436305 - RNA, 19 nt, Artificial Sequence
  Description of Artificial Sequence: Synthetic oligonucleotide
ggaacugggcguuugcggc

SEQ ID NO: 2436306 - RNA, 19 nt, Artificial Sequence
  Description of Artificial Sequence: Synthetic oligonucleotide
gacacgaauccuguauaug

SEQ ID NO: 2436307 - RNA, 19 nt, Artificial Sequence
  Description of Artificial Sequence: Synthetic oligonucleotide
gacaagacgguccuaaauu

SEQ ID NO: 2436308 - RNA, 19 nt, Artificial Sequence
  Description of Artificial Sequence: Synthetic oligonucleotide
uguggcccuuuccaaggcc

SEQ ID NO: 2436309 - RNA, 19 nt, Artificial Sequence
  Description of Artificial Sequence: Synthetic oligonucleotide
ugauggcugccaccagagg

SEQ ID NO: 2436310 - RNA, 19 nt, Artificial Sequence
  Description of Artificial Sequence: Synthetic oligonucleotide
agcgcaucacgucggacug

SEQ ID NO: 2436311 - RNA, 19 nt, Artificial Sequence
  Description of Artificial Sequence: Synthetic oligonucleotide
uguaugcacccaucuuggc

SEQ ID NO: 2436312 - RNA, 19 nt, Artificial Sequence
  Description of Artificial Sequence: Synthetic oligonucleotide
cugcagacuaguuuugaca

SEQ ID NO: 2436313 - RNA, 19 nt, Artificial Sequence
  Description of Artificial Sequence: Synthetic oligonucleotide
ucacacauauuagcgguaa

SEQ ID NO: 2436314 - RNA, 19 nt, Artificial Sequence
  Description of Artificial Sequence: Synthetic oligonucleotide
gcgagagccaccaauagug

SEQ ID NO: 2436315 - RNA, 19 nt, Artificial Sequence
  Description of Artificial Sequence: Synthetic oligonucleotide
ggauguacuuguaugcacc

SEQ ID NO: 2436316 - RNA, 19 nt, Artificial Sequence
  Description of Artificial Sequence: Synthetic oligonucleotide
cugguuuggugauccacug

SEQ ID NO: 2436317 - RNA, 19 nt, Artificial Sequence
  Description of Artificial Sequence: Synthetic oligonucleotide
aucacgucggacugcuucu

SEQ ID NO: 2436318 - RNA, 19 nt, Artificial Sequence
  Description of Artificial Sequence: Synthetic oligonucleotide
gcugguuaacaccaugaug

SEQ ID NO: 2436319 - RNA, 19 nt, Artificial Sequence
  Description of Artificial Sequence: Synthetic oligonucleotide
agcgcagaaagcuggcggu

SEQ ID NO: 2436320 - RNA, 19 nt, Artificial Sequence
  Description of Artificial Sequence: Synthetic oligonucleotide
cccaguaagaauucaggac

SEQ ID NO: 2436321 - RNA, 19 nt, Artificial Sequence
  Description of Artificial Sequence: Synthetic oligonucleotide
uaacugcuaccaauuccac

SEQ ID NO: 2436322 - RNA, 19 nt, Artificial Sequence
  Description of Artificial Sequence: Synthetic oligonucleotide
cuuuaucaggccggguggg

SEQ ID NO: 2436323 - RNA, 19 nt, Artificial Sequence
  Description of Artificial Sequence: Synthetic oligonucleotide
ggcgguauugccagcaacg

SEQ ID NO: 2436324 - RNA, 19 nt, Artificial Sequence
  Description of Artificial Sequence: Synthetic oligonucleotide
cacaaugacguccagcucu

SEQ ID NO: 2436325 - RNA, 19 nt, Artificial Sequence
  Description of Artificial Sequence: Synthetic oligonucleotide
agaauucaggacucucaaa

SEQ ID NO: 2436326 - RNA, 19 nt, Artificial Sequence
  Description of Artificial Sequence: Synthetic oligonucleotide
acuuuaacugcuaccaauu

SEQ ID NO: 2436327 - RNA, 19 nt, Artificial Sequence
  Description of Artificial Sequence: Synthetic oligonucleotide
accacggcggacacgaauc

SEQ ID NO: 2436328 - RNA, 19 nt, Artificial Sequence
  Description of Artificial Sequence: Synthetic oligonucleotide
uuaucaggccggguggggc

SEQ ID NO: 2436329 - RNA, 19 nt, Artificial Sequence
  Description of Artificial Sequence: Synthetic oligonucleotide
uuuagcugguuaacaccau

SEQ ID NO: 2436330 - RNA, 19 nt, Artificial Sequence
  Description of Artificial Sequence: Synthetic oligonucleotide
gaacugggcguuugcggcc

SEQ ID NO: 2436331 - RNA, 19 nt, Artificial Sequence
  Description of Artificial Sequence: Synthetic oligonucleotide
auaaccuuguuuggccuug

SEQ ID NO: 2436332 - RNA, 19 nt, Artificial Sequence
  Description of Artificial Sequence: Synthetic oligonucleotide
caaagccccacaaugacgu

SEQ ID NO: 2436333 - RNA, 19 nt, Artificial Sequence
  Description of Artificial Sequence: Synthetic oligonucleotide
gacgguccuaaauuguuua

SEQ ID NO: 2436334 - RNA, 19 nt, Artificial Sequence
  Description of Artificial Sequence: Synthetic oligonucleotide
caucacacauauuagcggu

SEQ ID NO: 2436335 - RNA, 19 nt, Artificial Sequence
  Description of Artificial Sequence: Synthetic oligonucleotide
uuguuuggccuuguacccc

SEQ ID NO: 2436336 - RNA, 19 nt, Artificial Sequence
  Description of Artificial Sequence: Synthetic oligonucleotide
guaagaauucaggacucuc

SEQ ID NO: 2436337 - RNA, 19 nt, Artificial Sequence
  Description of Artificial Sequence: Synthetic oligonucleotide
acugguuuggugauccacu

SEQ ID NO: 2436338 - RNA, 19 nt, Artificial Sequence
  Description of Artificial Sequence: Synthetic oligonucleotide
uguggacugguuuggugau

SEQ ID NO: 2436339 - RNA, 19 nt, Artificial Sequence
  Description of Artificial Sequence: Synthetic oligonucleotide
aagacgguccuaaauuguu

SEQ ID NO: 2436340 - RNA, 19 nt, Artificial Sequence
  Description of Artificial Sequence: Synthetic oligonucleotide
acuuguaugcacccaucuu

SEQ ID NO: 2436341 - RNA, 19 nt, Artificial Sequence
  Description of Artificial Sequence: Synthetic oligonucleotide
auuagcgguaacgguggag

SEQ ID NO: 2436342 - RNA, 19 nt, Artificial Sequence
  Description of Artificial Sequence: Synthetic oligonucleotide
ugguuuggugauccacugu

SEQ ID NO: 2436343 - RNA, 19 nt, Artificial Sequence
  Description of Artificial Sequence: Synthetic oligonucleotide
cuuucggccagcagauguc

SEQ ID NO: 2436344 - RNA, 19 nt, Artificial Sequence
  Description of Artificial Sequence: Synthetic oligonucleotide
acaaugacguccagcucuc

SEQ ID NO: 2436345 - RNA, 19 nt, Artificial Sequence
  Description of Artificial Sequence: Synthetic oligonucleotide
agccuucgcgcuuuaucag

SEQ ID NO: 2436346 - RNA, 19 nt, Artificial Sequence
  Description of Artificial Sequence: Synthetic oligonucleotide
ucaccugauggcugccacc

SEQ ID NO: 2436347 - RNA, 19 nt, Artificial Sequence
  Description of Artificial Sequence: Synthetic oligonucleotide
ggaucaaugaggauaaccu

SEQ ID NO: 2436348 - RNA, 19 nt, Artificial Sequence
  Description of Artificial Sequence: Synthetic oligonucleotide
aguaagaauucaggacucu

SEQ ID NO: 2436349 - RNA, 19 nt, Artificial Sequence
  Description of Artificial Sequence: Synthetic oligonucleotide
guauugcgccuucuccagg

SEQ ID NO: 2436350 - RNA, 19 nt, Artificial Sequence
  Description of Artificial Sequence: Synthetic oligonucleotide
cagccuucgcgcuuuauca

SEQ ID NO: 2436351 - RNA, 19 nt, Artificial Sequence
  Description of Artificial Sequence: Synthetic oligonucleotide
agcugguuaacaccaugau

SEQ ID NO: 2436352 - RNA, 19 nt, Artificial Sequence
  Description of Artificial Sequence: Synthetic oligonucleotide
caccuuuaagcagacaaga

SEQ ID NO: 2436353 - RNA, 19 nt, Artificial Sequence
  Description of Artificial Sequence: Synthetic oligonucleotide
caaggccacggcucuuucg

SEQ ID NO: 2436354 - RNA, 19 nt, Artificial Sequence
  Description of Artificial Sequence: Synthetic oligonucleotide
uuguggcccuuuccaaggc

SEQ ID NO: 2436355 - RNA, 19 nt, Artificial Sequence
  Description of Artificial Sequence: Synthetic oligonucleotide
ucuccaggcugcacggcga

SEQ ID NO: 2436356 - RNA, 19 nt, Artificial Sequence
  Description of Artificial Sequence: Synthetic oligonucleotide
gacucucaaagccccacaa

SEQ ID NO: 2436357 - RNA, 19 nt, Artificial Sequence
  Description of Artificial Sequence: Synthetic oligonucleotide
uauuagcgguaacggugga

SEQ ID NO: 2436358 - RNA, 19 nt, Artificial Sequence
  Description of Artificial Sequence: Synthetic oligonucleotide
gacugguuuggugauccac

SEQ ID NO: 2436359 - RNA, 19 nt, Artificial Sequence
  Description of Artificial Sequence: Synthetic oligonucleotide
uuucggccagcagauguca

SEQ ID NO: 2436360 - RNA, 19 nt, Artificial Sequence
  Description of Artificial Sequence: Synthetic oligonucleotide
ugcacggcgagagccacca

SEQ ID NO: 2436361 - RNA, 19 nt, Artificial Sequence
  Description of Artificial Sequence: Synthetic oligonucleotide
agaccaucaccaguaguca

SEQ ID NO: 2436362 - RNA, 19 nt, Artificial Sequence
  Description of Artificial Sequence: Synthetic oligonucleotide
caggguuccuucugauagc

SEQ ID NO: 2436363 - RNA, 19 nt, Artificial Sequence
  Description of Artificial Sequence: Synthetic oligonucleotide
accaacccaguaagaauuc

SEQ ID NO: 2436364 - RNA, 19 nt, Artificial Sequence
  Description of Artificial Sequence: Synthetic oligonucleotide
caaacaucauugcacuuua

SEQ ID NO: 2436365 - RNA, 19 nt, Artificial Sequence
  Description of Artificial Sequence: Synthetic oligonucleotide
uugcgccuucuccaggcug

SEQ ID NO: 2436366 - RNA, 19 nt, Artificial Sequence
  Description of Artificial Sequence: Synthetic oligonucleotide
guauaugacauaaccuugu

SEQ ID NO: 2436367 - RNA, 19 nt, Artificial Sequence
  Description of Artificial Sequence: Synthetic oligonucleotide
cagaguauugcgccuucuc

SEQ ID NO: 2436368 - RNA, 19 nt, Artificial Sequence
  Description of Artificial Sequence: Synthetic oligonucleotide
uggcgguauugccagcaac

SEQ ID NO: 2436369 - RNA, 19 nt, Artificial Sequence
  Description of Artificial Sequence: Synthetic oligonucleotide
ucagcccacgcaucucucu

SEQ ID NO: 2436370 - RNA, 19 nt, Artificial Sequence
  Description of Artificial Sequence: Synthetic oligonucleotide
guauugccagcaacggacc

SEQ ID NO: 2436371 - RNA, 19 nt, Artificial Sequence
  Description of Artificial Sequence: Synthetic oligonucleotide
aggccacggcucuuucggc

SEQ ID NO: 2436372 - RNA, 19 nt, Artificial Sequence
  Description of Artificial Sequence: Synthetic oligonucleotide
cagaaagcuggcgguauug

SEQ ID NO: 2436373 - RNA, 19 nt, Artificial Sequence
  Description of Artificial Sequence: Synthetic oligonucleotide
cuucgcgcuuuaucaggcc

SEQ ID NO: 2436374 - RNA, 19 nt, Artificial Sequence
  Description of Artificial Sequence: Synthetic oligonucleotide
auccuguauaugacauaac

SEQ ID NO: 2436375 - RNA, 19 nt, Artificial Sequence
  Description of Artificial Sequence: Synthetic oligonucleotide
guaugcacccaucuuggcu

SEQ ID NO: 2436376 - RNA, 19 nt, Artificial Sequence
  Description of Artificial Sequence: Synthetic oligonucleotide
aacuuguauguggaaucuu

SEQ ID NO: 2436377 - RNA, 19 nt, Artificial Sequence
  Description of Artificial Sequence: Synthetic oligonucleotide
ugcagaguauugcgccuuc

SEQ ID NO: 2436378 - RNA, 19 nt, Artificial Sequence
  Description of Artificial Sequence: Synthetic oligonucleotide
cagcucucuccucagcaac

SEQ ID NO: 2436379 - RNA, 19 nt, Artificial Sequence
  Description of Artificial Sequence: Synthetic oligonucleotide
gccuucgcgcuuuaucagg

SEQ ID NO: 2436380 - RNA, 19 nt, Artificial Sequence
  Description of Artificial Sequence: Synthetic oligonucleotide
acgguggagcugcagagua

SEQ ID NO: 2436381 - RNA, 19 nt, Artificial Sequence
  Description of Artificial Sequence: Synthetic oligonucleotide
caucuuggcucaccugaug

SEQ ID NO: 2436382 - RNA, 19 nt, Artificial Sequence
  Description of Artificial Sequence: Synthetic oligonucleotide
acgguccuaaauuguuuau

SEQ ID NO: 2436383 - RNA, 19 nt, Artificial Sequence
  Description of Artificial Sequence: Synthetic oligonucleotide
uagcgguaacgguggagcu

SEQ ID NO: 2436384 - RNA, 19 nt, Artificial Sequence
  Description of Artificial Sequence: Synthetic oligonucleotide
ugccguaaguugcacccuu

SEQ ID NO: 2436385 - RNA, 19 nt, Artificial Sequence
  Description of Artificial Sequence: Synthetic oligonucleotide
gcagaugucagcccacgca

SEQ ID NO: 2436386 - RNA, 19 nt, Artificial Sequence
  Description of Artificial Sequence: Synthetic oligonucleotide
agaugucagcccacgcauc

SEQ ID NO: 2436387 - RNA, 19 nt, Artificial Sequence
  Description of Artificial Sequence: Synthetic oligonucleotide
acgcaucucucugugcuug

SEQ ID NO: 2436388 - RNA, 19 nt, Artificial Sequence
  Description of Artificial Sequence: Synthetic oligonucleotide
ccuaaauuguuuauugggu

SEQ ID NO: 2436389 - RNA, 19 nt, Artificial Sequence
  Description of Artificial Sequence: Synthetic oligonucleotide
cacuuuaacugcuaccaau

SEQ ID NO: 2436390 - RNA, 19 nt, Artificial Sequence
  Description of Artificial Sequence: Synthetic oligonucleotide
aacugggcguuugcggcca

SEQ ID NO: 2436391 - RNA, 19 nt, Artificial Sequence
  Description of Artificial Sequence: Synthetic oligonucleotide
cagcaacggacccucagca

SEQ ID NO: 2436392 - RNA, 19 nt, Artificial Sequence
  Description of Artificial Sequence: Synthetic oligonucleotide
agcgguaacgguggagcug

SEQ ID NO: 2436393 - RNA, 19 nt, Artificial Sequence
  Description of Artificial Sequence: Synthetic oligonucleotide
gugauccacugugugucag

SEQ ID NO: 2436394 - RNA, 19 nt, Artificial Sequence
  Description of Artificial Sequence: Synthetic oligonucleotide
uugccagcaacggacccuc

SEQ ID NO: 2436395 - RNA, 19 nt, Artificial Sequence
  Description of Artificial Sequence: Synthetic oligonucleotide
acggcggacacgaauccug

SEQ ID NO: 2436396 - RNA, 19 nt, Artificial Sequence
  Description of Artificial Sequence: Synthetic oligonucleotide
cuccucagcaacagacuga

SEQ ID NO: 2436397 - RNA, 19 nt, Artificial Sequence
  Description of Artificial Sequence: Synthetic oligonucleotide
accaucaccaguagucaaa

SEQ ID NO: 2436398 - RNA, 19 nt, Artificial Sequence
  Description of Artificial Sequence: Synthetic oligonucleotide
ucaugacaaucugcagacu

SEQ ID NO: 2436399 - RNA, 19 nt, Artificial Sequence
  Description of Artificial Sequence: Synthetic oligonucleotide
auguacuuguaugcaccca

SEQ ID NO: 2436400 - RNA, 19 nt, Artificial Sequence
  Description of Artificial Sequence: Synthetic oligonucleotide
gguuaacaccaugauggac

SEQ ID NO: 2436401 - RNA, 19 nt, Artificial Sequence
  Description of Artificial Sequence: Synthetic oligonucleotide
auugcgccuucuccaggcu

SEQ ID NO: 2436402 - RNA, 19 nt, Artificial Sequence
  Description of Artificial Sequence: Synthetic oligonucleotide
cauagcuccuggauguacu

SEQ ID NO: 2436403 - RNA, 19 nt, Artificial Sequence
  Description of Artificial Sequence: Synthetic oligonucleotide
ccuucgcgcuuuaucaggc

SEQ ID NO: 2436404 - RNA, 19 nt, Artificial Sequence
  Description of Artificial Sequence: Synthetic oligonucleotide
agcaacggacccucagcaa

SEQ ID NO: 2436405 - RNA, 19 nt, Artificial Sequence
  Description of Artificial Sequence: Synthetic oligonucleotide
ugggcguuugcggccacca

SEQ ID NO: 2436406 - RNA, 19 nt, Artificial Sequence
  Description of Artificial Sequence: Synthetic oligonucleotide
aaacaucauugcacuuuaa

SEQ ID NO: 2436407 - RNA, 19 nt, Artificial Sequence
  Description of Artificial Sequence: Synthetic oligonucleotide
agcuggcgguauugccagc

SEQ ID NO: 2436408 - RNA, 19 nt, Artificial Sequence
  Description of Artificial Sequence: Synthetic oligonucleotide
gcguuugcggccaccacgg

SEQ ID NO: 2436409 - RNA, 19 nt, Artificial Sequence
  Description of Artificial Sequence: Synthetic oligonucleotide
auggaucaaugaggauaac

SEQ ID NO: 2436410 - RNA, 19 nt, Artificial Sequence
  Description of Artificial Sequence: Synthetic oligonucleotide
cguaaguugcacccuuagg

SEQ ID NO: 2436411 - RNA, 19 nt, Artificial Sequence
  Description of Artificial Sequence: Synthetic oligonucleotide
uggggcguggagcccugug

SEQ ID NO: 2436412 - RNA, 19 nt, Artificial Sequence
  Description of Artificial Sequence: Synthetic oligonucleotide
gcgguaacgguggagcugc

SEQ ID NO: 2436413 - RNA, 19 nt, Artificial Sequence
  Description of Artificial Sequence: Synthetic oligonucleotide
cuuguaccccagccuucgc

SEQ ID NO: 2436414 - RNA, 19 nt, Artificial Sequence
  Description of Artificial Sequence: Synthetic oligonucleotide
cagcccacgcaucucucug

SEQ ID NO: 2436415 - RNA, 19 nt, Artificial Sequence
  Description of Artificial Sequence: Synthetic oligonucleotide
caagacgguccuaaauugu

SEQ ID NO: 2436416 - RNA, 19 nt, Artificial Sequence
  Description of Artificial Sequence: Synthetic oligonucleotide
acccaucuuggcucaccug

SEQ ID NO: 2436417 - RNA, 19 nt, Artificial Sequence
  Description of Artificial Sequence: Synthetic oligonucleotide
ccagcaacggacccucagc

SEQ ID NO: 2436418 - RNA, 19 nt, Artificial Sequence
  Description of Artificial Sequence: Synthetic oligonucleotide
gcuugccguaaguugcacc

SEQ ID NO: 2436419 - RNA, 19 nt, Artificial Sequence
  Description of Artificial Sequence: Synthetic oligonucleotide
guugcacccuuaggaacug

SEQ ID NO: 2436420 - RNA, 19 nt, Artificial Sequence
  Description of Artificial Sequence: Synthetic oligonucleotide
agcccacgcaucucucugu

SEQ ID NO: 2436421 - RNA, 19 nt, Artificial Sequence
  Description of Artificial Sequence: Synthetic oligonucleotide
augcacccaucuuggcuca

SEQ ID NO: 2436422 - RNA, 19 nt, Artificial Sequence
  Description of Artificial Sequence: Synthetic oligonucleotide
auccacugugugucagggu

SEQ ID NO: 2436423 - RNA, 19 nt, Artificial Sequence
  Description of Artificial Sequence: Synthetic oligonucleotide
guacuuguaugcacccauc

SEQ ID NO: 2436424 - RNA, 19 nt, Artificial Sequence
  Description of Artificial Sequence: Synthetic oligonucleotide
cgcuuuaucaggccgggug

SEQ ID NO: 2436425 - RNA, 19 nt, Artificial Sequence
  Description of Artificial Sequence: Synthetic oligonucleotide
cuuuauggaauggaucaau

SEQ ID NO: 2436426 - RNA, 19 nt, Artificial Sequence
  Description of Artificial Sequence: Synthetic oligonucleotide
cagacuaguuuugacaaau

SEQ ID NO: 2436427 - RNA, 19 nt, Artificial Sequence
  Description of Artificial Sequence: Synthetic oligonucleotide
caccugauggcugccacca

SEQ ID NO: 2436428 - RNA, 19 nt, Artificial Sequence
  Description of Artificial Sequence: Synthetic oligonucleotide
ccuuguaccccagccuucg

SEQ ID NO: 2436429 - RNA, 19 nt, Artificial Sequence
  Description of Artificial Sequence: Synthetic oligonucleotide
agcucucuccucagcaaca

SEQ ID NO: 2436430 - RNA, 19 nt, Artificial Sequence
  Description of Artificial Sequence: Synthetic oligonucleotide
caacggacccucagcaaaa

SEQ ID NO: 2436431 - RNA, 19 nt, Artificial Sequence
  Description of Artificial Sequence: Synthetic oligonucleotide
caucaccaguagucaaaca

SEQ ID NO: 2436432 - RNA, 19 nt, Artificial Sequence
  Description of Artificial Sequence: Synthetic oligonucleotide
ggccacggcucuuucggcc

SEQ ID NO: 2436433 - RNA, 19 nt, Artificial Sequence
  Description of Artificial Sequence: Synthetic oligonucleotide
uugccguaaguugcacccu

SEQ ID NO: 2436434 - RNA, 19 nt, Artificial Sequence
  Description of Artificial Sequence: Synthetic oligonucleotide
cauugcacuuuaacugcua

SEQ ID NO: 2436435 - RNA, 19 nt, Artificial Sequence
  Description of Artificial Sequence: Synthetic oligonucleotide
uaaccuuguuuggccuugu

SEQ ID NO: 2436436 - RNA, 19 nt, Artificial Sequence
  Description of Artificial Sequence: Synthetic oligonucleotide
gucggacugcuucuuccuc

SEQ ID NO: 2436437 - RNA, 19 nt, Artificial Sequence
  Description of Artificial Sequence: Synthetic oligonucleotide
agacgguccuaaauuguuu

SEQ ID NO: 2436438 - RNA, 19 nt, Artificial Sequence
  Description of Artificial Sequence: Synthetic oligonucleotide
agcccugugcagcgcagaa

SEQ ID NO: 2436439 - RNA, 19 nt, Artificial Sequence
  Description of Artificial Sequence: Synthetic oligonucleotide
cagaugucagcccacgcau

SEQ ID NO: 2436440 - RNA, 19 nt, Artificial Sequence
  Description of Artificial Sequence: Synthetic oligonucleotide
ccguaaguugcacccuuag

SEQ ID NO: 2436441 - RNA, 19 nt, Artificial Sequence
  Description of Artificial Sequence: Synthetic oligonucleotide
agacuaguuuugacaaaua

SEQ ID NO: 2436442 - RNA, 19 nt, Artificial Sequence
  Description of Artificial Sequence: Synthetic oligonucleotide
aucacacauauuagcggua

SEQ ID NO: 2436443 - RNA, 19 nt, Artificial Sequence
  Description of Artificial Sequence: Synthetic oligonucleotide
aggcuucuggcaaacuuua

SEQ ID NO: 2436444 - RNA, 19 nt, Artificial Sequence
  Description of Artificial Sequence: Synthetic oligonucleotide
ccaucaccaguagucaaac

SEQ ID NO: 2436445 - RNA, 19 nt, Artificial Sequence
  Description of Artificial Sequence: Synthetic oligonucleotide
gguaacgguggagcugcag

SEQ ID NO: 2436446 - RNA, 19 nt, Artificial Sequence
  Description of Artificial Sequence: Synthetic oligonucleotide
ccagccuucgcgcuuuauc

SEQ ID NO: 2436447 - RNA, 19 nt, Artificial Sequence
  Description of Artificial Sequence: Synthetic oligonucleotide
acugggcguuugcggccac

SEQ ID NO: 2436448 - RNA, 19 nt, Artificial Sequence
  Description of Artificial Sequence: Synthetic oligonucleotide
caggcugcacggcgagagc

SEQ ID NO: 2436449 - RNA, 19 nt, Artificial Sequence
  Description of Artificial Sequence: Synthetic oligonucleotide
ggcaaacuuuagcugguua

SEQ ID NO: 2436450 - RNA, 19 nt, Artificial Sequence
  Description of Artificial Sequence: Synthetic oligonucleotide
ccaugauggacaggcuugc

SEQ ID NO: 2436451 - RNA, 19 nt, Artificial Sequence
  Description of Artificial Sequence: Synthetic oligonucleotide
cucuccucagcaacagacu

SEQ ID NO: 2436452 - RNA, 19 nt, Artificial Sequence
  Description of Artificial Sequence: Synthetic oligonucleotide
acggcgagagccaccaaua

SEQ ID NO: 2436453 - RNA, 19 nt, Artificial Sequence
  Description of Artificial Sequence: Synthetic oligonucleotide
gccaccacggcggacacga

SEQ ID NO: 2436454 - RNA, 19 nt, Artificial Sequence
  Description of Artificial Sequence: Synthetic oligonucleotide
cagacaagacgguccuaaa

SEQ ID NO: 2436455 - RNA, 19 nt, Artificial Sequence
  Description of Artificial Sequence: Synthetic oligonucleotide
accaguagucaaacaucau

SEQ ID NO: 2436456 - RNA, 19 nt, Artificial Sequence
  Description of Artificial Sequence: Synthetic oligonucleotide
ggugauccacuguguguca

SEQ ID NO: 2436457 - RNA, 19 nt, Artificial Sequence
  Description of Artificial Sequence: Synthetic oligonucleotide
ggacucucaaagccccaca

SEQ ID NO: 2436458 - RNA, 19 nt, Artificial Sequence
  Description of Artificial Sequence: Synthetic oligonucleotide
uaccccagccuucgcgcuu

SEQ ID NO: 2436459 - RNA, 19 nt, Artificial Sequence
  Description of Artificial Sequence: Synthetic oligonucleotide
uccauagcuccuggaugua

SEQ ID NO: 2436460 - RNA, 19 nt, Artificial Sequence
  Description of Artificial Sequence: Synthetic oligonucleotide
uggcaaacuuuagcugguu

SEQ ID NO: 2436461 - RNA, 19 nt, Artificial Sequence
  Description of Artificial Sequence: Synthetic oligonucleotide
gagccaccaauaguguggu

SEQ ID NO: 2436462 - RNA, 19 nt, Artificial Sequence
  Description of Artificial Sequence: Synthetic oligonucleotide
agccaccaauaguguggug

SEQ ID NO: 2436463 - RNA, 19 nt, Artificial Sequence
  Description of Artificial Sequence: Synthetic oligonucleotide
guuuggugauccacugugu

SEQ ID NO: 2436464 - RNA, 19 nt, Artificial Sequence
  Description of Artificial Sequence: Synthetic oligonucleotide
ccaauagugugguggaacu

SEQ ID NO: 2436465 - RNA, 19 nt, Artificial Sequence
  Description of Artificial Sequence: Synthetic oligonucleotide
aggcuugccguaaguugca

SEQ ID NO: 2436466 - RNA, 19 nt, Artificial Sequence
  Description of Artificial Sequence: Synthetic oligonucleotide
gacaaucugcagacuaguu

SEQ ID NO: 2436467 - RNA, 19 nt, Artificial Sequence
  Description of Artificial Sequence: Synthetic oligonucleotide
cauaaccuuguuuggccuu

SEQ ID NO: 2436468 - RNA, 19 nt, Artificial Sequence
  Description of Artificial Sequence: Synthetic oligonucleotide
ggcuucuggcaaacuuuag

SEQ ID NO: 2436469 - RNA, 19 nt, Artificial Sequence
  Description of Artificial Sequence: Synthetic oligonucleotide
ugccagcaacggacccuca

SEQ ID NO: 2436470 - RNA, 19 nt, Artificial Sequence
  Description of Artificial Sequence: Synthetic oligonucleotide
ccaguagucaaacaucauu

SEQ ID NO: 2436471 - RNA, 19 nt, Artificial Sequence
  Description of Artificial Sequence: Synthetic oligonucleotide
uugcggccaccacggcgga

SEQ ID NO: 2436472 - RNA, 19 nt, Artificial Sequence
  Description of Artificial Sequence: Synthetic oligonucleotide
ggacacgaauccuguauau

SEQ ID NO: 2436473 - RNA, 19 nt, Artificial Sequence
  Description of Artificial Sequence: Synthetic oligonucleotide
acggcucuuucggccagca

SEQ ID NO: 2436474 - RNA, 19 nt, Artificial Sequence
  Description of Artificial Sequence: Synthetic oligonucleotide
cucuuucggccagcagaug

SEQ ID NO: 2436475 - RNA, 19 nt, Artificial Sequence
  Description of Artificial Sequence: Synthetic oligonucleotide
uccaggcugcacggcgaga

SEQ ID NO: 2436476 - RNA, 19 nt, Artificial Sequence
  Description of Artificial Sequence: Synthetic oligonucleotide
gcuggcgguauugccagca

SEQ ID NO: 2436477 - RNA, 19 nt, Artificial Sequence
  Description of Artificial Sequence: Synthetic oligonucleotide
ccauagcuccuggauguac

SEQ ID NO: 2436478 - RNA, 19 nt, Artificial Sequence
  Description of Artificial Sequence: Synthetic oligonucleotide
gcggacacgaauccuguau

SEQ ID NO: 2436479 - RNA, 19 nt, Artificial Sequence
  Description of Artificial Sequence: Synthetic oligonucleotide
gccacggcucuuucggcca

SEQ ID NO: 2436480 - RNA, 19 nt, Artificial Sequence
  Description of Artificial Sequence: Synthetic oligonucleotide
guggacugguuuggugauc

SEQ ID NO: 2436481 - RNA, 19 nt, Artificial Sequence
  Description of Artificial Sequence: Synthetic oligonucleotide
cacggcgagagccaccaau

SEQ ID NO: 2436482 - RNA, 19 nt, Artificial Sequence
  Description of Artificial Sequence: Synthetic oligonucleotide
cacccaucuuggcucaccu

SEQ ID NO: 2436483 - RNA, 19 nt, Artificial Sequence
  Description of Artificial Sequence: Synthetic oligonucleotide
gagcccugugcagcgcaga

SEQ ID NO: 2436484 - RNA, 19 nt, Artificial Sequence
  Description of Artificial Sequence: Synthetic oligonucleotide
cugggcguuugcggccacc

SEQ ID NO: 2436485 - RNA, 19 nt, Artificial Sequence
  Description of Artificial Sequence: Synthetic oligonucleotide
gucagcccacgcaucucuc

SEQ ID NO: 2436486 - RNA, 19 nt, Artificial Sequence
  Description of Artificial Sequence: Synthetic oligonucleotide
gcugcagaguauugcgccu

SEQ ID NO: 2436487 - RNA, 19 nt, Artificial Sequence
  Description of Artificial Sequence: Synthetic oligonucleotide
cacggcucuuucggccagc

SEQ ID NO: 2436488 - RNA, 19 nt, Artificial Sequence
  Description of Artificial Sequence: Synthetic oligonucleotide
cccacgcaucucucugugc

SEQ ID NO: 2436489 - RNA, 19 nt, Artificial Sequence
  Description of Artificial Sequence: Synthetic oligonucleotide
cgaauccuguauaugacau

SEQ ID NO: 2436490 - RNA, 19 nt, Artificial Sequence
  Description of Artificial Sequence: Synthetic oligonucleotide
ccacgcaucucucugugcu

SEQ ID NO: 2436491 - RNA, 19 nt, Artificial Sequence
  Description of Artificial Sequence: Synthetic oligonucleotide
ugcacccaucuuggcucac

SEQ ID NO: 2436492 - RNA, 19 nt, Artificial Sequence
  Description of Artificial Sequence: Synthetic oligonucleotide
cccuuuccaaggccacggc

SEQ ID NO: 2436493 - RNA, 19 nt, Artificial Sequence
  Description of Artificial Sequence: Synthetic oligonucleotide
guaccccagccuucgcgcu

SEQ ID NO: 2436494 - RNA, 19 nt, Artificial Sequence
  Description of Artificial Sequence: Synthetic oligonucleotide
ucaggccggguggggcgug

SEQ ID NO: 2436495 - RNA, 19 nt, Artificial Sequence
  Description of Artificial Sequence: Synthetic oligonucleotide
ggaauggaucaaugaggau

SEQ ID NO: 2436496 - RNA, 19 nt, Artificial Sequence
  Description of Artificial Sequence: Synthetic oligonucleotide
cuggcgguauugccagcaa

SEQ ID NO: 2436497 - RNA, 19 nt, Artificial Sequence
  Description of Artificial Sequence: Synthetic oligonucleotide
caccaauagugugguggaa

SEQ ID NO: 2436498 - RNA, 19 nt, Artificial Sequence
  Description of Artificial Sequence: Synthetic oligonucleotide
ggacugguuuggugaucca

SEQ ID NO: 2436499 - RNA, 19 nt, Artificial Sequence
  Description of Artificial Sequence: Synthetic oligonucleotide
agcagacaagacgguccua

SEQ ID NO: 2436500 - RNA, 19 nt, Artificial Sequence
  Description of Artificial Sequence: Synthetic oligonucleotide
gcucuuucggccagcagau

SEQ ID NO: 2436501 - RNA, 19 nt, Artificial Sequence
  Description of Artificial Sequence: Synthetic oligonucleotide
cggcgagagccaccaauag

SEQ ID NO: 2436502 - RNA, 19 nt, Artificial Sequence
  Description of Artificial Sequence: Synthetic oligonucleotide
cgcgcuuuaucaggccggg

SEQ ID NO: 2436503 - RNA, 19 nt, Artificial Sequence
  Description of Artificial Sequence: Synthetic oligonucleotide
caauagugugguggaacuu

SEQ ID NO: 2436504 - RNA, 19 nt, Artificial Sequence
  Description of Artificial Sequence: Synthetic oligonucleotide
caccacggcggacacgaau

SEQ ID NO: 2436505 - RNA, 19 nt, Artificial Sequence
  Description of Artificial Sequence: Synthetic oligonucleotide
ggcuugccguaaguugcac

SEQ ID NO: 2436506 - RNA, 19 nt, Artificial Sequence
  Description of Artificial Sequence: Synthetic oligonucleotide
ggcugcacggcgagagcca

SEQ ID NO: 2436507 - RNA, 19 nt, Artificial Sequence
  Description of Artificial Sequence: Synthetic oligonucleotide
ugcggccaccacggcggac

SEQ ID NO: 2436508 - RNA, 19 nt, Artificial Sequence
  Description of Artificial Sequence: Synthetic oligonucleotide
ggcucaccugauggcugcc

SEQ ID NO: 2436509 - RNA, 19 nt, Artificial Sequence
  Description of Artificial Sequence: Synthetic oligonucleotide
ccacggcucuuucggccag

SEQ ID NO: 2436510 - RNA, 19 nt, Artificial Sequence
  Description of Artificial Sequence: Synthetic oligonucleotide
gccuuguaccccagccuuc

SEQ ID NO: 2436511 - RNA, 19 nt, Artificial Sequence
  Description of Artificial Sequence: Synthetic oligonucleotide
cgguauugccagcaacgga

SEQ ID NO: 2436512 - RNA, 19 nt, Artificial Sequence
  Description of Artificial Sequence: Synthetic oligonucleotide
ggcggacacgaauccugua

SEQ ID NO: 2436513 - RNA, 19 nt, Artificial Sequence
  Description of Artificial Sequence: Synthetic oligonucleotide
cggacacgaauccuguaua

SEQ ID NO: 2436514 - RNA, 19 nt, Artificial Sequence
  Description of Artificial Sequence: Synthetic oligonucleotide
cugcagaguauugcgccuu

SEQ ID NO: 2436515 - RNA, 19 nt, Artificial Sequence
  Description of Artificial Sequence: Synthetic oligonucleotide
gcgcaucacgucggacugc

SEQ ID NO: 2436516 - RNA, 19 nt, Artificial Sequence
  Description of Artificial Sequence: Synthetic oligonucleotide
cacggcggacacgaauccu

SEQ ID NO: 2436517 - RNA, 19 nt, Artificial Sequence
  Description of Artificial Sequence: Synthetic oligonucleotide
gcagaguauugcgccuucu

SEQ ID NO: 2436518 - RNA, 19 nt, Artificial Sequence
  Description of Artificial Sequence: Synthetic oligonucleotide
gccguaaguugcacccuua

SEQ ID NO: 2436519 - RNA, 19 nt, Artificial Sequence
  Description of Artificial Sequence: Synthetic oligonucleotide
cgagagccaccaauagugu

SEQ ID NO: 2436520 - RNA, 19 nt, Artificial Sequence
  Description of Artificial Sequence: Synthetic oligonucleotide
gcgcagaaagcuggcggua

SEQ ID NO: 2436521 - RNA, 19 nt, Artificial Sequence
  Description of Artificial Sequence: Synthetic oligonucleotide
caaugacguccagcucucu

SEQ ID NO: 2436522 - RNA, 19 nt, Artificial Sequence
  Description of Artificial Sequence: Synthetic oligonucleotide
gcccugugcagcgcagaaa

SEQ ID NO: 2436523 - RNA, 19 nt, Artificial Sequence
  Description of Artificial Sequence: Synthetic oligonucleotide
cgucggacugcuucuuccu

SEQ ID NO: 2436524 - RNA, 19 nt, Artificial Sequence
  Description of Artificial Sequence: Synthetic oligonucleotide
cggcucuuucggccagcag

SEQ ID NO: 2436525 - RNA, 19 nt, Artificial Sequence
  Description of Artificial Sequence: Synthetic oligonucleotide
cgcaucacgucggacugcu

SEQ ID NO: 2436526 - RNA, 19 nt, Artificial Sequence
  Description of Artificial Sequence: Synthetic oligonucleotide
cgguccuaaauuguuuauu

SEQ ID NO: 2436527 - RNA, 19 nt, Artificial Sequence
  Description of Artificial Sequence: Synthetic oligonucleotide
cggaaacaagauagaccau

SEQ ID NO: 2436528 - RNA, 19 nt, Artificial Sequence
  Description of Artificial Sequence: Synthetic oligonucleotide
cccuuaggaacugggcguu

SEQ ID NO: 2436529 - RNA, 19 nt, Artificial Sequence
  Description of Artificial Sequence: Synthetic oligonucleotide
ggguuccuucugauagcuu

SEQ ID NO: 2436530 - RNA, 19 nt, Artificial Sequence
  Description of Artificial Sequence: Synthetic oligonucleotide
gcacggcgagagccaccaa

SEQ ID NO: 2436531 - RNA, 19 nt, Artificial Sequence
  Description of Artificial Sequence: Synthetic oligonucleotide
gcgcuuuaucaggccgggu

SEQ ID NO: 2436532 - RNA, 19 nt, Artificial Sequence
  Description of Artificial Sequence: Synthetic oligonucleotide
guggggcguggagcccugu

SEQ ID NO: 2436533 - RNA, 19 nt, Artificial Sequence
  Description of Artificial Sequence: Synthetic oligonucleotide
cgguaacgguggagcugca

SEQ ID NO: 2436534 - RNA, 19 nt, Artificial Sequence
  Description of Artificial Sequence: Synthetic oligonucleotide
ccaccacggcggacacgaa

SEQ ID NO: 2436535 - RNA, 19 nt, Artificial Sequence
  Description of Artificial Sequence: Synthetic oligonucleotide
ccuuaggaacugggcguuu

SEQ ID NO: 2436536 - RNA, 19 nt, Artificial Sequence
  Description of Artificial Sequence: Synthetic oligonucleotide
  modified_base (6)..(6): a, c, u, g, unknown or other
aaaacngagugccaaaucc

SEQ ID NO: 2436537 - RNA, 19 nt, Artificial Sequence
  Description of Artificial Sequence: Synthetic oligonucleotide
ugugaaaagauauucacca

SEQ ID NO: 2436538 - RNA, 19 nt, Artificial Sequence
  Description of Artificial Sequence: Synthetic oligonucleotide
  modified_base (3)..(3): a, c, u, g, unknown or other
aanaagaauguccuggccu

SEQ ID NO: 2436539 - RNA, 19 nt, Artificial Sequence
  Description of Artificial Sequence: Synthetic oligonucleotide
aagaacacauaauugaggu

SEQ ID NO: 2436540 - RNA, 19 nt, Artificial Sequence
  Description of Artificial Sequence: Synthetic oligonucleotide
gaaaagaacacauaauuga

SEQ ID NO: 2436541 - RNA, 19 nt, Artificial Sequence
  Description of Artificial Sequence: Synthetic oligonucleotide
aaaggaugaagacagaaaa

SEQ ID NO: 2436542 - RNA, 19 nt, Artificial Sequence
  Description of Artificial Sequence: Synthetic oligonucleotide
uuuucaaugaugaagcauc

SEQ ID NO: 2436543 - RNA, 19 nt, Artificial Sequence
  Description of Artificial Sequence: Synthetic oligonucleotide
ugaaaagaacacauaauug

SEQ ID NO: 2436544 - RNA, 19 nt, Artificial Sequence
  Description of Artificial Sequence: Synthetic oligonucleotide
aacucgucaauacuggcgg

SEQ ID NO: 2436545 - RNA, 19 nt, Artificial Sequence
  Description of Artificial Sequence: Synthetic oligonucleotide
  modified_base (9)..(9): a, c, u, g, unknown or other
ucauggaanaagaaugucc

SEQ ID NO: 2436546 - RNA, 19 nt, Artificial Sequence
  Description of Artificial Sequence: Synthetic oligonucleotide
acaucagugaagcugcugc

SEQ ID NO: 2436547 - RNA, 19 nt, Artificial Sequence
  Description of Artificial Sequence: Synthetic oligonucleotide
auaauugagguauuucagg

SEQ ID NO: 2436548 - RNA, 19 nt, Artificial Sequence
  Description of Artificial Sequence: Synthetic oligonucleotide
aauguccuggccuuguuuc

SEQ ID NO: 2436549 - RNA, 19 nt, Artificial Sequence
  Description of Artificial Sequence: Synthetic oligonucleotide
ucaaugaugaagcaucucu

SEQ ID NO: 2436550 - RNA, 19 nt, Artificial Sequence
  Description of Artificial Sequence: Synthetic oligonucleotide
aaaacucgucaauacuggc

SEQ ID NO: 2436551 - RNA, 19 nt, Artificial Sequence
  Description of Artificial Sequence: Synthetic oligonucleotide
  modified_base (6)..(6): a, c, u, g, unknown or other
uggaanaagaauguccugg

SEQ ID NO: 2436552 - RNA, 19 nt, Artificial Sequence
  Description of Artificial Sequence: Synthetic oligonucleotide
ucgaaaauaccaaacaauc

SEQ ID NO: 2436553 - RNA, 19 nt, Artificial Sequence
  Description of Artificial Sequence: Synthetic oligonucleotide
aaaggacacagucagcaag

SEQ ID NO: 2436554 - RNA, 19 nt, Artificial Sequence
  Description of Artificial Sequence: Synthetic oligonucleotide
ugaaaagauauucaccaac

SEQ ID NO: 2436555 - RNA, 19 nt, Artificial Sequence
  Description of Artificial Sequence: Synthetic oligonucleotide
acagaagguucuuugaagg

SEQ ID NO: 2436556 - RNA, 19 nt, Artificial Sequence
  Description of Artificial Sequence: Synthetic oligonucleotide
aagggaacgacuucuccac

SEQ ID NO: 2436557 - RNA, 19 nt, Artificial Sequence
  Description of Artificial Sequence: Synthetic oligonucleotide
aacagaagguucuuugaag

SEQ ID NO: 2436558 - RNA, 19 nt, Artificial Sequence
  Description of Artificial Sequence: Synthetic oligonucleotide
auugagguauuucaggaag

SEQ ID NO: 2436559 - RNA, 19 nt, Artificial Sequence
  Description of Artificial Sequence: Synthetic oligonucleotide
guuaugauccagaucaugg

SEQ ID NO: 2436560 - RNA, 19 nt, Artificial Sequence
  Description of Artificial Sequence: Synthetic oligonucleotide
aacaagagaacucuggcuu

SEQ ID NO: 2436561 - RNA, 19 nt, Artificial Sequence
  Description of Artificial Sequence: Synthetic oligonucleotide
augaaaagaacacauaauu

SEQ ID NO: 2436562 - RNA, 19 nt, Artificial Sequence
  Description of Artificial Sequence: Synthetic oligonucleotide
aagcuauucucgaaaauac

SEQ ID NO: 2436563 - RNA, 19 nt, Artificial Sequence
  Description of Artificial Sequence: Synthetic oligonucleotide
aacggcagcccauagacug

SEQ ID NO: 2436564 - RNA, 19 nt, Artificial Sequence
  Description of Artificial Sequence: Synthetic oligonucleotide
aagauauucaccaacccca

SEQ ID NO: 2436565 - RNA, 19 nt, Artificial Sequence
  Description of Artificial Sequence: Synthetic oligonucleotide
aguucuuuccggcauaaag

SEQ ID NO: 2436566 - RNA, 19 nt, Artificial Sequence
  Description of Artificial Sequence: Synthetic oligonucleotide
auuagaauaguuccccgag

SEQ ID NO: 2436567 - RNA, 19 nt, Artificial Sequence
  Description of Artificial Sequence: Synthetic oligonucleotide
agcaagacaaaacggcagc

SEQ ID NO: 2436568 - RNA, 19 nt, Artificial Sequence
  Description of Artificial Sequence: Synthetic oligonucleotide
  modified_base (12)..(12): a, c, u, g, unknown or other
agaucauggaanaagaaug

SEQ ID NO: 2436569 - RNA, 19 nt, Artificial Sequence
  Description of Artificial Sequence: Synthetic oligonucleotide
gaugaagcaucucucagug

SEQ ID NO: 2436570 - RNA, 19 nt, Artificial Sequence
  Description of Artificial Sequence: Synthetic oligonucleotide
uaauugagguauuucagga

SEQ ID NO: 2436571 - RNA, 19 nt, Artificial Sequence
  Description of Artificial Sequence: Synthetic oligonucleotide
agaacucuggcuuguacac

SEQ ID NO: 2436572 - RNA, 19 nt, Artificial Sequence
  Description of Artificial Sequence: Synthetic oligonucleotide
uuguuucucacacagcaca

SEQ ID NO: 2436573 - RNA, 19 nt, Artificial Sequence
  Description of Artificial Sequence: Synthetic oligonucleotide
aaagggaacgacuucucca

SEQ ID NO: 2436574 - RNA, 19 nt, Artificial Sequence
  Description of Artificial Sequence: Synthetic oligonucleotide
uugaaggcggcucagagaa

SEQ ID NO: 2436575 - RNA, 19 nt, Artificial Sequence
  Description of Artificial Sequence: Synthetic oligonucleotide
aaacaagagaacucuggcu

SEQ ID NO: 2436576 - RNA, 19 nt, Artificial Sequence
  Description of Artificial Sequence: Synthetic oligonucleotide
agaauaguuccccgagucc

SEQ ID NO: 2436577 - RNA, 19 nt, Artificial Sequence
  Description of Artificial Sequence: Synthetic oligonucleotide
uuucucacacagcacauca

SEQ ID NO: 2436578 - RNA, 19 nt, Artificial Sequence
  Description of Artificial Sequence: Synthetic oligonucleotide
aauaccaaacaauccaauu

SEQ ID NO: 2436579 - RNA, 19 nt, Artificial Sequence
  Description of Artificial Sequence: Synthetic oligonucleotide
uucauuagaauaguucccc

SEQ ID NO: 2436580 - RNA, 19 nt, Artificial Sequence
  Description of Artificial Sequence: Synthetic oligonucleotide
aagacaaaacggcagccca

SEQ ID NO: 2436581 - RNA, 19 nt, Artificial Sequence
  Description of Artificial Sequence: Synthetic oligonucleotide
  modified_base (2)..(2): a, c, u, g, unknown or other
anaagaauguccuggccuu

SEQ ID NO: 2436582 - RNA, 19 nt, Artificial Sequence
  Description of Artificial Sequence: Synthetic oligonucleotide
aaacucgucaauacuggcg

SEQ ID NO: 2436583 - RNA, 19 nt, Artificial Sequence
  Description of Artificial Sequence: Synthetic oligonucleotide
aaguguacuuucuguguuc

SEQ ID NO: 2436584 - RNA, 19 nt, Artificial Sequence
  Description of Artificial Sequence: Synthetic oligonucleotide
cuuuccggcauaaaggaug

SEQ ID NO: 2436585 - RNA, 19 nt, Artificial Sequence
  Description of Artificial Sequence: Synthetic oligonucleotide
ucagcaagacaaaacggca

SEQ ID NO: 2436586 - RNA, 19 nt, Artificial Sequence
  Description of Artificial Sequence: Synthetic oligonucleotide
acugagaagcuucuguaag

SEQ ID NO: 2436587 - RNA, 19 nt, Artificial Sequence
  Description of Artificial Sequence: Synthetic oligonucleotide
gacacagucagcaagacaa

SEQ ID NO: 2436588 - RNA, 19 nt, Artificial Sequence
  Description of Artificial Sequence: Synthetic oligonucleotide
  modified_base (4)..(4): a, c, u, g, unknown or other
gaanaagaauguccuggcc

SEQ ID NO: 2436589 - RNA, 19 nt, Artificial Sequence
  Description of Artificial Sequence: Synthetic oligonucleotide
guguuuucaaugaugaagc

SEQ ID NO: 2436590 - RNA, 19 nt, Artificial Sequence
  Description of Artificial Sequence: Synthetic oligonucleotide
guucuuuccggcauaaagg

SEQ ID NO: 2436591 - RNA, 19 nt, Artificial Sequence
  Description of Artificial Sequence: Synthetic oligonucleotide
caaacaagagaacucuggc

SEQ ID NO: 2436592 - RNA, 19 nt, Artificial Sequence
  Description of Artificial Sequence: Synthetic oligonucleotide
ucauuagaauaguuccccg

SEQ ID NO: 2436593 - RNA, 19 nt, Artificial Sequence
  Description of Artificial Sequence: Synthetic oligonucleotide
uuccacguggcaaacaaga

SEQ ID NO: 2436594 - RNA, 19 nt, Artificial Sequence
  Description of Artificial Sequence: Synthetic oligonucleotide
cugugaaaagauauucacc

SEQ ID NO: 2436595 - RNA, 19 nt, Artificial Sequence
  Description of Artificial Sequence: Synthetic oligonucleotide
agcacaucagugaagcugc

SEQ ID NO: 2436596 - RNA, 19 nt, Artificial Sequence
  Description of Artificial Sequence: Synthetic oligonucleotide
agacugugaaaagauauuc

SEQ ID NO: 2436597 - RNA, 19 nt, Artificial Sequence
  Description of Artificial Sequence: Synthetic oligonucleotide
uucuuuccggcauaaagga

SEQ ID NO: 2436598 - RNA, 19 nt, Artificial Sequence
  Description of Artificial Sequence: Synthetic oligonucleotide
aaacagaagguucuuugaa

SEQ ID NO: 2436599 - RNA, 19 nt, Artificial Sequence
  Description of Artificial Sequence: Synthetic oligonucleotide
  modified_base (15)..(15): a, c, u, g, unknown or other
uccagaucauggaanaaga

SEQ ID NO: 2436600 - RNA, 19 nt, Artificial Sequence
  Description of Artificial Sequence: Synthetic oligonucleotide
uagaauaguuccccgaguc

SEQ ID NO: 2436601 - RNA, 19 nt, Artificial Sequence
  Description of Artificial Sequence: Synthetic oligonucleotide
uaugauccagaucauggaa

SEQ ID NO: 2436602 - RNA, 19 nt, Artificial Sequence
  Description of Artificial Sequence: Synthetic oligonucleotide
auaccaaacaauccaauua

SEQ ID NO: 2436603 - RNA, 19 nt, Artificial Sequence
  Description of Artificial Sequence: Synthetic oligonucleotide
acuggcggaggcuuggggc

SEQ ID NO: 2436604 - RNA, 19 nt, Artificial Sequence
  Description of Artificial Sequence: Synthetic oligonucleotide
uuaugauccagaucaugga

SEQ ID NO: 2436605 - RNA, 19 nt, Artificial Sequence
  Description of Artificial Sequence: Synthetic oligonucleotide
aauugagguauuucaggaa

SEQ ID NO: 2436606 - RNA, 19 nt, Artificial Sequence
  Description of Artificial Sequence: Synthetic oligonucleotide
gcuuguacacaauacacag

SEQ ID NO: 2436607 - RNA, 19 nt, Artificial Sequence
  Description of Artificial Sequence: Synthetic oligonucleotide
auauucaccaaccccacau

SEQ ID NO: 2436608 - RNA, 19 nt, Artificial Sequence
  Description of Artificial Sequence: Synthetic oligonucleotide
uggcuuguacacaauacac

SEQ ID NO: 2436609 - RNA, 19 nt, Artificial Sequence
  Description of Artificial Sequence: Synthetic oligonucleotide
acgacuucuccacugcugg

SEQ ID NO: 2436610 - RNA, 19 nt, Artificial Sequence
  Description of Artificial Sequence: Synthetic oligonucleotide
auucucgaaaauaccaaac

SEQ ID NO: 2436611 - RNA, 19 nt, Artificial Sequence
  Description of Artificial Sequence: Synthetic oligonucleotide
  modified_base (4)..(4): a, c, u, g, unknown or other
aacngagugccaaauccag

SEQ ID NO: 2436612 - RNA, 19 nt, Artificial Sequence
  Description of Artificial Sequence: Synthetic oligonucleotide
guguucaacauccuuaguc

SEQ ID NO: 2436613 - RNA, 19 nt, Artificial Sequence
  Description of Artificial Sequence: Synthetic oligonucleotide
uggggcgaugaaaagaaca

SEQ ID NO: 2436614 - RNA, 19 nt, Artificial Sequence
  Description of Artificial Sequence: Synthetic oligonucleotide
ucuggcuuguacacaauac

SEQ ID NO: 2436615 - RNA, 19 nt, Artificial Sequence
  Description of Artificial Sequence: Synthetic oligonucleotide
aaccuccugaaacugagaa

SEQ ID NO: 2436616 - RNA, 19 nt, Artificial Sequence
  Description of Artificial Sequence: Synthetic oligonucleotide
aaacugagaagcuucugua

SEQ ID NO: 2436617 - RNA, 19 nt, Artificial Sequence
  Description of Artificial Sequence: Synthetic oligonucleotide
ucuguguucuuccucggga

SEQ ID NO: 2436618 - RNA, 19 nt, Artificial Sequence
  Description of Artificial Sequence: Synthetic oligonucleotide
  modified_base (10)..(10): a, c, u, g, unknown or other
aucauggaanaagaauguc

SEQ ID NO: 2436619 - RNA, 19 nt, Artificial Sequence
  Description of Artificial Sequence: Synthetic oligonucleotide
ucucacacagcacaucagu

SEQ ID NO: 2436620 - RNA, 19 nt, Artificial Sequence
  Description of Artificial Sequence: Synthetic oligonucleotide
aaaauaccaaacaauccaa

SEQ ID NO: 2436621 - RNA, 19 nt, Artificial Sequence
  Description of Artificial Sequence: Synthetic oligonucleotide
cugagaagcuucuguaagg

SEQ ID NO: 2436622 - RNA, 19 nt, Artificial Sequence
  Description of Artificial Sequence: Synthetic oligonucleotide
uauucucgaaaauaccaaa

SEQ ID NO: 2436623 - RNA, 19 nt, Artificial Sequence
  Description of Artificial Sequence: Synthetic oligonucleotide
aaauccaguuaugauccag

SEQ ID NO: 2436624 - RNA, 19 nt, Artificial Sequence
  Description of Artificial Sequence: Synthetic oligonucleotide
guuacagcaacagugucug

SEQ ID NO: 2436625 - RNA, 19 nt, Artificial Sequence
  Description of Artificial Sequence: Synthetic oligonucleotide
ucaccaaccccacaucuga

SEQ ID NO: 2436626 - RNA, 19 nt, Artificial Sequence
  Description of Artificial Sequence: Synthetic oligonucleotide
uuucaaugaugaagcaucu

SEQ ID NO: 2436627 - RNA, 19 nt, Artificial Sequence
  Description of Artificial Sequence: Synthetic oligonucleotide
agguauuucaggaaguucu

SEQ ID NO: 2436628 - RNA, 19 nt, Artificial Sequence
  Description of Artificial Sequence: Synthetic oligonucleotide
augaugaagcaucucucag

SEQ ID NO: 2436629 - RNA, 19 nt, Artificial Sequence
  Description of Artificial Sequence: Synthetic oligonucleotide
ugagaagcuucuguaaggc

SEQ ID NO: 2436630 - RNA, 19 nt, Artificial Sequence
  Description of Artificial Sequence: Synthetic oligonucleotide
ugaugaagcaucucucagu

SEQ ID NO: 2436631 - RNA, 19 nt, Artificial Sequence
  Description of Artificial Sequence: Synthetic oligonucleotide
aauacuggcggaggcuugg

SEQ ID NO: 2436632 - RNA, 19 nt, Artificial Sequence
  Description of Artificial Sequence: Synthetic oligonucleotide
uguuccacguggcaaacaa

SEQ ID NO: 2436633 - RNA, 19 nt, Artificial Sequence
  Description of Artificial Sequence: Synthetic oligonucleotide
gucagcaagacaaaacggc

SEQ ID NO: 2436634 - RNA, 19 nt, Artificial Sequence
  Description of Artificial Sequence: Synthetic oligonucleotide
uuagaauaguuccccgagu

SEQ ID NO: 2436635 - RNA, 19 nt, Artificial Sequence
  Description of Artificial Sequence: Synthetic oligonucleotide
uccggcauaaaggaugaag

SEQ ID NO: 2436636 - RNA, 19 nt, Artificial Sequence
  Description of Artificial Sequence: Synthetic oligonucleotide
  modified_base (18)..(18): a, c, u, g, unknown or other
ugauccagaucauggaana

SEQ ID NO: 2436637 - RNA, 19 nt, Artificial Sequence
  Description of Artificial Sequence: Synthetic oligonucleotide
gaaagggaacgacuucucc

SEQ ID NO: 2436638 - RNA, 19 nt, Artificial Sequence
  Description of Artificial Sequence: Synthetic oligonucleotide
auagacugugaaaagauau

SEQ ID NO: 2436639 - RNA, 19 nt, Artificial Sequence
  Description of Artificial Sequence: Synthetic oligonucleotide
acagucagcaagacaaaac

SEQ ID NO: 2436640 - RNA, 19 nt, Artificial Sequence
  Description of Artificial Sequence: Synthetic oligonucleotide
aacagugucuguguuuuca

SEQ ID NO: 2436641 - RNA, 19 nt, Artificial Sequence
  Description of Artificial Sequence: Synthetic oligonucleotide
uacagcaacagugucugug

SEQ ID NO: 2436642 - RNA, 19 nt, Artificial Sequence
  Description of Artificial Sequence: Synthetic oligonucleotide
agcuauucucgaaaauacc

SEQ ID NO: 2436643 - RNA, 19 nt, Artificial Sequence
  Description of Artificial Sequence: Synthetic oligonucleotide
ucagaauggcuaaaaucaa

SEQ ID NO: 2436644 - RNA, 19 nt, Artificial Sequence
  Description of Artificial Sequence: Synthetic oligonucleotide
  modified_base (7)..(7): a, c, u, g, unknown or other
auggaanaagaauguccug

SEQ ID NO: 2436645 - RNA, 19 nt, Artificial Sequence
  Description of Artificial Sequence: Synthetic oligonucleotide
  modified_base (5)..(5): a, c, u, g, unknown or other
aaacngagugccaaaucca

SEQ ID NO: 2436646 - RNA, 19 nt, Artificial Sequence
  Description of Artificial Sequence: Synthetic oligonucleotide
  modified_base (5)..(5): a, c, u, g, unknown or other
ggaanaagaauguccuggc

SEQ ID NO: 2436647 - RNA, 19 nt, Artificial Sequence
  Description of Artificial Sequence: Synthetic oligonucleotide
ugcgaaguguacuuucugu

SEQ ID NO: 2436648 - RNA, 19 nt, Artificial Sequence
  Description of Artificial Sequence: Synthetic oligonucleotide
cuuugaaggcggcucagag

SEQ ID NO: 2436649 - RNA, 19 nt, Artificial Sequence
  Description of Artificial Sequence: Synthetic oligonucleotide
uucuguguucuuccucggg

SEQ ID NO: 2436650 - RNA, 19 nt, Artificial Sequence
  Description of Artificial Sequence: Synthetic oligonucleotide
guacuuucuguguucuucc

SEQ ID NO: 2436651 - RNA, 19 nt, Artificial Sequence
  Description of Artificial Sequence: Synthetic oligonucleotide
caaugaugaagcaucucuc

SEQ ID NO: 2436652 - RNA, 19 nt, Artificial Sequence
  Description of Artificial Sequence: Synthetic oligonucleotide
gaagcuauucucgaaaaua

SEQ ID NO: 2436653 - RNA, 19 nt, Artificial Sequence
  Description of Artificial Sequence: Synthetic oligonucleotide
uguuuucaaugaugaagca

SEQ ID NO: 2436654 - RNA, 19 nt, Artificial Sequence
  Description of Artificial Sequence: Synthetic oligonucleotide
auaaaggaugaagacagaa

SEQ ID NO: 2436655 - RNA, 19 nt, Artificial Sequence
  Description of Artificial Sequence: Synthetic oligonucleotide
auucaccaaccccacaucu

SEQ ID NO: 2436656 - RNA, 19 nt, Artificial Sequence
  Description of Artificial Sequence: Synthetic oligonucleotide
gaaacugagaagcuucugu

SEQ ID NO: 2436657 - RNA, 19 nt, Artificial Sequence
  Description of Artificial Sequence: Synthetic oligonucleotide
aaauggcugaaagacuccu

SEQ ID NO: 2436658 - RNA, 19 nt, Artificial Sequence
  Description of Artificial Sequence: Synthetic oligonucleotide
  modified_base (8)..(8): a, c, u, g, unknown or other
cauggaanaagaauguccu

SEQ ID NO: 2436659 - RNA, 19 nt, Artificial Sequence
  Description of Artificial Sequence: Synthetic oligonucleotide
agucagcaagacaaaacgg

SEQ ID NO: 2436660 - RNA, 19 nt, Artificial Sequence
  Description of Artificial Sequence: Synthetic oligonucleotide
uccacguggcaaacaagag

SEQ ID NO: 2436661 - RNA, 19 nt, Artificial Sequence
  Description of Artificial Sequence: Synthetic oligonucleotide
aauccaguuaugauccaga

SEQ ID NO: 2436662 - RNA, 19 nt, Artificial Sequence
  Description of Artificial Sequence: Synthetic oligonucleotide
cacguggcaaacaagagaa

SEQ ID NO: 2436663 - RNA, 19 nt, Artificial Sequence
  Description of Artificial Sequence: Synthetic oligonucleotide
acaagagaacucuggcuug

SEQ ID NO: 2436664 - RNA, 19 nt, Artificial Sequence
  Description of Artificial Sequence: Synthetic oligonucleotide
ucagugaagcugcugcuuc

SEQ ID NO: 2436665 - RNA, 19 nt, Artificial Sequence
  Description of Artificial Sequence: Synthetic oligonucleotide
uggcaaacaagagaacucu

SEQ ID NO: 2436666 - RNA, 19 nt, Artificial Sequence
  Description of Artificial Sequence: Synthetic oligonucleotide
aagacuccuugagaaagug

SEQ ID NO: 2436667 - RNA, 19 nt, Artificial Sequence
  Description of Artificial Sequence: Synthetic oligonucleotide
agaauggcuaaaaucaaaa

SEQ ID NO: 2436668 - RNA, 19 nt, Artificial Sequence
  Description of Artificial Sequence: Synthetic oligonucleotide
uagacugugaaaagauauu

SEQ ID NO: 2436669 - RNA, 19 nt, Artificial Sequence
  Description of Artificial Sequence: Synthetic oligonucleotide
ucucaguguguuccucagg

SEQ ID NO: 2436670 - RNA, 19 nt, Artificial Sequence
  Description of Artificial Sequence: Synthetic oligonucleotide
gcuucuguaaggcaaagga

SEQ ID NO: 2436671 - RNA, 19 nt, Artificial Sequence
  Description of Artificial Sequence: Synthetic oligonucleotide
uuucuguguucuuccucgg

SEQ ID NO: 2436672 - RNA, 19 nt, Artificial Sequence
  Description of Artificial Sequence: Synthetic oligonucleotide
gccaaauccaguuaugauc

SEQ ID NO: 2436673 - RNA, 19 nt, Artificial Sequence
  Description of Artificial Sequence: Synthetic oligonucleotide
aaauaccaaacaauccaau

SEQ ID NO: 2436674 - RNA, 19 nt, Artificial Sequence
  Description of Artificial Sequence: Synthetic oligonucleotide
aaggacacagucagcaaga

SEQ ID NO: 2436675 - RNA, 19 nt, Artificial Sequence
  Description of Artificial Sequence: Synthetic oligonucleotide
cuggccuuguuucucacac

SEQ ID NO: 2436676 - RNA, 19 nt, Artificial Sequence
  Description of Artificial Sequence: Synthetic oligonucleotide
agugugauuuucuucuguu

SEQ ID NO: 2436677 - RNA, 19 nt, Artificial Sequence
  Description of Artificial Sequence: Synthetic oligonucleotide
gcaaacaagagaacucugg

SEQ ID NO: 2436678 - RNA, 19 nt, Artificial Sequence
  Description of Artificial Sequence: Synthetic oligonucleotide
gugucuguguuuucaauga

SEQ ID NO: 2436679 - RNA, 19 nt, Artificial Sequence
  Description of Artificial Sequence: Synthetic oligonucleotide
cuuguuucucacacagcac

SEQ ID NO: 2436680 - RNA, 19 nt, Artificial Sequence
  Description of Artificial Sequence: Synthetic oligonucleotide
agauauucaccaaccccac

SEQ ID NO: 2436681 - RNA, 19 nt, Artificial Sequence
  Description of Artificial Sequence: Synthetic oligonucleotide
uccaguuaugauccagauc

SEQ ID NO: 2436682 - RNA, 19 nt, Artificial Sequence
  Description of Artificial Sequence: Synthetic oligonucleotide
uguuucucacacagcacau

SEQ ID NO: 2436683 - RNA, 19 nt, Artificial Sequence
  Description of Artificial Sequence: Synthetic oligonucleotide
agaagcuucuguaaggcaa

SEQ ID NO: 2436684 - RNA, 19 nt, Artificial Sequence
  Description of Artificial Sequence: Synthetic oligonucleotide
uucuguuccacguggcaaa

SEQ ID NO: 2436685 - RNA, 19 nt, Artificial Sequence
  Description of Artificial Sequence: Synthetic oligonucleotide
ucgucaauacuggcggagg

SEQ ID NO: 2436686 - RNA, 19 nt, Artificial Sequence
  Description of Artificial Sequence: Synthetic oligonucleotide
caagacaaaacggcagccc

SEQ ID NO: 2436687 - RNA, 19 nt, Artificial Sequence
  Description of Artificial Sequence: Synthetic oligonucleotide
agcccauagacugugaaaa

SEQ ID NO: 2436688 - RNA, 19 nt, Artificial Sequence
  Description of Artificial Sequence: Synthetic oligonucleotide
uauucaccaaccccacauc

SEQ ID NO: 2436689 - RNA, 19 nt, Artificial Sequence
  Description of Artificial Sequence: Synthetic oligonucleotide
cauuagaauaguuccccga

SEQ ID NO: 2436690 - RNA, 19 nt, Artificial Sequence
  Description of Artificial Sequence: Synthetic oligonucleotide
aguuaugauccagaucaug

SEQ ID NO: 2436691 - RNA, 19 nt, Artificial Sequence
  Description of Artificial Sequence: Synthetic oligonucleotide
cuuggggcgaugaaaagaa

SEQ ID NO: 2436692 - RNA, 19 nt, Artificial Sequence
  Description of Artificial Sequence: Synthetic oligonucleotide
ucaguguguuccucaggag

SEQ ID NO: 2436693 - RNA, 19 nt, Artificial Sequence
  Description of Artificial Sequence: Synthetic oligonucleotide
cucaguguguuccucagga

SEQ ID NO: 2436694 - RNA, 19 nt, Artificial Sequence
  Description of Artificial Sequence: Synthetic oligonucleotide
cuauucucgaaaauaccaa

SEQ ID NO: 2436695 - RNA, 19 nt, Artificial Sequence
  Description of Artificial Sequence: Synthetic oligonucleotide
uguggagaaagggaacgac

SEQ ID NO: 2436696 - RNA, 19 nt, Artificial Sequence
  Description of Artificial Sequence: Synthetic oligonucleotide
cgaaaauaccaaacaaucc

SEQ ID NO: 2436697 - RNA, 19 nt, Artificial Sequence
  Description of Artificial Sequence: Synthetic oligonucleotide
cagcacaucagugaagcug

SEQ ID NO: 2436698 - RNA, 19 nt, Artificial Sequence
  Description of Artificial Sequence: Synthetic oligonucleotide
cuguguucuuccucgggag

SEQ ID NO: 2436699 - RNA, 19 nt, Artificial Sequence
  Description of Artificial Sequence: Synthetic oligonucleotide
aaagacuccuugagaaagu

SEQ ID NO: 2436700 - RNA, 19 nt, Artificial Sequence
  Description of Artificial Sequence: Synthetic oligonucleotide
uguguucuuccucgggagu

SEQ ID NO: 2436701 - RNA, 19 nt, Artificial Sequence
  Description of Artificial Sequence: Synthetic oligonucleotide
aacgacuucuccacugcug

SEQ ID NO: 2436702 - RNA, 19 nt, Artificial Sequence
  Description of Artificial Sequence: Synthetic oligonucleotide
acaaaacggcagcccauag

SEQ ID NO: 2436703 - RNA, 19 nt, Artificial Sequence
  Description of Artificial Sequence: Synthetic oligonucleotide
uggaaccuccugaaacuga

SEQ ID NO: 2436704 - RNA, 19 nt, Artificial Sequence
  Description of Artificial Sequence: Synthetic oligonucleotide
ggccuuguuucucacacag

SEQ ID NO: 2436705 - RNA, 19 nt, Artificial Sequence
  Description of Artificial Sequence: Synthetic oligonucleotide
aauaguuccccgaguccug

SEQ ID NO: 2436706 - RNA, 19 nt, Artificial Sequence
  Description of Artificial Sequence: Synthetic oligonucleotide
agaagcuauucucgaaaau

SEQ ID NO: 2436707 - RNA, 19 nt, Artificial Sequence
  Description of Artificial Sequence: Synthetic oligonucleotide
cacauaauugagguauuuc

SEQ ID NO: 2436708 - RNA, 19 nt, Artificial Sequence
  Description of Artificial Sequence: Synthetic oligonucleotide
gcuauucucgaaaauacca

SEQ ID NO: 2436709 - RNA, 19 nt, Artificial Sequence
  Description of Artificial Sequence: Synthetic oligonucleotide
cuggcggaggcuuggggcg

SEQ ID NO: 2436710 - RNA, 19 nt, Artificial Sequence
  Description of Artificial Sequence: Synthetic oligonucleotide
ugccaaauccaguuaugau

SEQ ID NO: 2436711 - RNA, 19 nt, Artificial Sequence
  Description of Artificial Sequence: Synthetic oligonucleotide
aggaaguucuuuccggcau

SEQ ID NO: 2436712 - RNA, 19 nt, Artificial Sequence
  Description of Artificial Sequence: Synthetic oligonucleotide
  modified_base (11)..(11): a, c, u, g, unknown or other
gaucauggaanaagaaugu

SEQ ID NO: 2436713 - RNA, 19 nt, Artificial Sequence
  Description of Artificial Sequence: Synthetic oligonucleotide
ggcugaaagacuccuugag

SEQ ID NO: 2436714 - RNA, 19 nt, Artificial Sequence
  Description of Artificial Sequence: Synthetic oligonucleotide
ugaaacugagaagcuucug

SEQ ID NO: 2436715 - RNA, 19 nt, Artificial Sequence
  Description of Artificial Sequence: Synthetic oligonucleotide
cuggcuuguacacaauaca

SEQ ID NO: 2436716 - RNA, 19 nt, Artificial Sequence
  Description of Artificial Sequence: Synthetic oligonucleotide
uuccccgaguccuggcugg

SEQ ID NO: 2436717 - RNA, 19 nt, Artificial Sequence
  Description of Artificial Sequence: Synthetic oligonucleotide
uacuggcggaggcuugggg

SEQ ID NO: 2436718 - RNA, 19 nt, Artificial Sequence
  Description of Artificial Sequence: Synthetic oligonucleotide
agaaagggaacgacuucuc

SEQ ID NO: 2436719 - RNA, 19 nt, Artificial Sequence
  Description of Artificial Sequence: Synthetic oligonucleotide
uggcugaaagacuccuuga

SEQ ID NO: 2436720 - RNA, 19 nt, Artificial Sequence
  Description of Artificial Sequence: Synthetic oligonucleotide
aguguacuuucuguguucu

SEQ ID NO: 2436721 - RNA, 19 nt, Artificial Sequence
  Description of Artificial Sequence: Synthetic oligonucleotide
ugucuguguuuucaaugau

SEQ ID NO: 2436722 - RNA, 19 nt, Artificial Sequence
  Description of Artificial Sequence: Synthetic oligonucleotide
uccucuucauuagaauagu

SEQ ID NO: 2436723 - RNA, 19 nt, Artificial Sequence
  Description of Artificial Sequence: Synthetic oligonucleotide
aagaauguccuggccuugu

SEQ ID NO: 2436724 - RNA, 19 nt, Artificial Sequence
  Description of Artificial Sequence: Synthetic oligonucleotide
agaacacauaauugaggua

SEQ ID NO: 2436725 - RNA, 19 nt, Artificial Sequence
  Description of Artificial Sequence: Synthetic oligonucleotide
gaauaguuccccgaguccu

SEQ ID NO: 2436726 - RNA, 19 nt, Artificial Sequence
  Description of Artificial Sequence: Synthetic oligonucleotide
ucuuuccggcauaaaggau

SEQ ID NO: 2436727 - RNA, 19 nt, Artificial Sequence
  Description of Artificial Sequence: Synthetic oligonucleotide
gauauucaccaaccccaca

SEQ ID NO: 2436728 - RNA, 19 nt, Artificial Sequence
  Description of Artificial Sequence: Synthetic oligonucleotide
agcuucuguaaggcaaagg

SEQ ID NO: 2436729 - RNA, 19 nt, Artificial Sequence
  Description of Artificial Sequence: Synthetic oligonucleotide
auaguuccccgaguccugg

SEQ ID NO: 2436730 - RNA, 19 nt, Artificial Sequence
  Description of Artificial Sequence: Synthetic oligonucleotide
gcaucucucaguguguucc

SEQ ID NO: 2436731 - RNA, 19 nt, Artificial Sequence
  Description of Artificial Sequence: Synthetic oligonucleotide
gagaaagggaacgacuucu

SEQ ID NO: 2436732 - RNA, 19 nt, Artificial Sequence
  Description of Artificial Sequence: Synthetic oligonucleotide
  modified_base (13)..(13): a, c, u, g, unknown or other
cagaucauggaanaagaau

SEQ ID NO: 2436733 - RNA, 19 nt, Artificial Sequence
  Description of Artificial Sequence: Synthetic oligonucleotide
gcgaaguguacuuucugug

SEQ ID NO: 2436734 - RNA, 19 nt, Artificial Sequence
  Description of Artificial Sequence: Synthetic oligonucleotide
uuccucgggagugugauuu

SEQ ID NO: 2436735 - RNA, 19 nt, Artificial Sequence
  Description of Artificial Sequence: Synthetic oligonucleotide
gaaggcggcucagagaaaa

SEQ ID NO: 2436736 - RNA, 19 nt, Artificial Sequence
  Description of Artificial Sequence: Synthetic oligonucleotide
  modified_base (19)..(19): a, c, u, g, unknown or other
augauccagaucauggaan

SEQ ID NO: 2436737 - RNA, 19 nt, Artificial Sequence
  Description of Artificial Sequence: Synthetic oligonucleotide
uggucugcgaaguguacuu

SEQ ID NO: 2436738 - RNA, 19 nt, Artificial Sequence
  Description of Artificial Sequence: Synthetic oligonucleotide
uucuuugaaggcggcucag

SEQ ID NO: 2436739 - RNA, 19 nt, Artificial Sequence
  Description of Artificial Sequence: Synthetic oligonucleotide
cucgucaauacuggcggag

SEQ ID NO: 2436740 - RNA, 19 nt, Artificial Sequence
  Description of Artificial Sequence: Synthetic oligonucleotide
gggagugugauuuucuucu

SEQ ID NO: 2436741 - RNA, 19 nt, Artificial Sequence
  Description of Artificial Sequence: Synthetic oligonucleotide
ggaaccuccugaaacugag

SEQ ID NO: 2436742 - RNA, 19 nt, Artificial Sequence
  Description of Artificial Sequence: Synthetic oligonucleotide
acagugucuguguuuucaa

SEQ ID NO: 2436743 - RNA, 19 nt, Artificial Sequence
  Description of Artificial Sequence: Synthetic oligonucleotide
cuccuugagaaaguguuca

SEQ ID NO: 2436744 - RNA, 19 nt, Artificial Sequence
  Description of Artificial Sequence: Synthetic oligonucleotide
cagaauggcuaaaaucaaa

SEQ ID NO: 2436745 - RNA, 19 nt, Artificial Sequence
  Description of Artificial Sequence: Synthetic oligonucleotide
aguguucaacauccuuagu

SEQ ID NO: 2436746 - RNA, 19 nt, Artificial Sequence
  Description of Artificial Sequence: Synthetic oligonucleotide
ggaacgacuucuccacugc

SEQ ID NO: 2436747 - RNA, 19 nt, Artificial Sequence
  Description of Artificial Sequence: Synthetic oligonucleotide
uucaaugaugaagcaucuc

SEQ ID NO: 2436748 - RNA, 19 nt, Artificial Sequence
  Description of Artificial Sequence: Synthetic oligonucleotide
ucuuugaaggcggcucaga

SEQ ID NO: 2436749 - RNA, 19 nt, Artificial Sequence
  Description of Artificial Sequence: Synthetic oligonucleotide
agcaacagugucuguguuu

SEQ ID NO: 2436750 - RNA, 19 nt, Artificial Sequence
  Description of Artificial Sequence: Synthetic oligonucleotide
cuguuacagcaacaguguc

SEQ ID NO: 2436751 - RNA, 19 nt, Artificial Sequence
  Description of Artificial Sequence: Synthetic oligonucleotide
gaaguguacuuucuguguu

SEQ ID NO: 2436752 - RNA, 19 nt, Artificial Sequence
  Description of Artificial Sequence: Synthetic oligonucleotide
gucugcgaaguguacuuuc

SEQ ID NO: 2436753 - RNA, 19 nt, Artificial Sequence
  Description of Artificial Sequence: Synthetic oligonucleotide
cauagacugugaaaagaua

SEQ ID NO: 2436754 - RNA, 19 nt, Artificial Sequence
  Description of Artificial Sequence: Synthetic oligonucleotide
gaagcuucuguaaggcaaa

SEQ ID NO: 2436755 - RNA, 19 nt, Artificial Sequence
  Description of Artificial Sequence: Synthetic oligonucleotide
gacuccuugagaaaguguu

SEQ ID NO: 2436756 - RNA, 19 nt, Artificial Sequence
  Description of Artificial Sequence: Synthetic oligonucleotide
gggaacgacuucuccacug

SEQ ID NO: 2436757 - RNA, 19 nt, Artificial Sequence
  Description of Artificial Sequence: Synthetic oligonucleotide
aacacauaauugagguauu

SEQ ID NO: 2436758 - RNA, 19 nt, Artificial Sequence
  Description of Artificial Sequence: Synthetic oligonucleotide
caaaacggcagcccauaga

SEQ ID NO: 2436759 - RNA, 19 nt, Artificial Sequence
  Description of Artificial Sequence: Synthetic oligonucleotide
cugcgaaguguacuuucug

SEQ ID NO: 2436760 - RNA, 19 nt, Artificial Sequence
  Description of Artificial Sequence: Synthetic oligonucleotide
uuggggcgaugaaaagaac

SEQ ID NO: 2436761 - RNA, 19 nt, Artificial Sequence
  Description of Artificial Sequence: Synthetic oligonucleotide
caauacuggcggaggcuug

SEQ ID NO: 2436762 - RNA, 19 nt, Artificial Sequence
  Description of Artificial Sequence: Synthetic oligonucleotide
augaagcaucucucagugu

SEQ ID NO: 2436763 - RNA, 19 nt, Artificial Sequence
  Description of Artificial Sequence: Synthetic oligonucleotide
ccggcauaaaggaugaaga

SEQ ID NO: 2436764 - RNA, 19 nt, Artificial Sequence
  Description of Artificial Sequence: Synthetic oligonucleotide
ccaaccccacaucugacag

SEQ ID NO: 2436765 - RNA, 19 nt, Artificial Sequence
  Description of Artificial Sequence: Synthetic oligonucleotide
aagcaucucucaguguguu

SEQ ID NO: 2436766 - RNA, 19 nt, Artificial Sequence
  Description of Artificial Sequence: Synthetic oligonucleotide
ucgggagugugauuuucuu

SEQ ID NO: 2436767 - RNA, 19 nt, Artificial Sequence
  Description of Artificial Sequence: Synthetic oligonucleotide
aucucucaguguguuccuc

SEQ ID NO: 2436768 - RNA, 19 nt, Artificial Sequence
  Description of Artificial Sequence: Synthetic oligonucleotide
cgaugaaaagaacacauaa

SEQ ID NO: 2436769 - RNA, 19 nt, Artificial Sequence
  Description of Artificial Sequence: Synthetic oligonucleotide
guuuucaaugaugaagcau

SEQ ID NO: 2436770 - RNA, 19 nt, Artificial Sequence
  Description of Artificial Sequence: Synthetic oligonucleotide
aauggcugaaagacuccuu

SEQ ID NO: 2436771 - RNA, 19 nt, Artificial Sequence
  Description of Artificial Sequence: Synthetic oligonucleotide
gagugugauuuucuucugu

SEQ ID NO: 2436772 - RNA, 19 nt, Artificial Sequence
  Description of Artificial Sequence: Synthetic oligonucleotide
ucuguuccacguggcaaac

SEQ ID NO: 2436773 - RNA, 19 nt, Artificial Sequence
  Description of Artificial Sequence: Synthetic oligonucleotide
gugugauuuucuucuguua

SEQ ID NO: 2436774 - RNA, 19 nt, Artificial Sequence
  Description of Artificial Sequence: Synthetic oligonucleotide
gaaguucuuuccggcauaa

SEQ ID NO: 2436775 - RNA, 19 nt, Artificial Sequence
  Description of Artificial Sequence: Synthetic oligonucleotide
auguggagaaagggaacga

SEQ ID NO: 2436776 - RNA, 19 nt, Artificial Sequence
  Description of Artificial Sequence: Synthetic oligonucleotide
aaacggcagcccauagacu

SEQ ID NO: 2436777 - RNA, 19 nt, Artificial Sequence
  Description of Artificial Sequence: Synthetic oligonucleotide
  modified_base (3)..(3): a, c, u, g, unknown or other
acngagugccaaauccagu

SEQ ID NO: 2436778 - RNA, 19 nt, Artificial Sequence
  Description of Artificial Sequence: Synthetic oligonucleotide
ggagaaagggaacgacuuc

SEQ ID NO: 2436779 - RNA, 19 nt, Artificial Sequence
  Description of Artificial Sequence: Synthetic oligonucleotide
acacauaauugagguauuu

SEQ ID NO: 2436780 - RNA, 19 nt, Artificial Sequence
  Description of Artificial Sequence: Synthetic oligonucleotide
caggaaguucuuuccggca

SEQ ID NO: 2436781 - RNA, 19 nt, Artificial Sequence
  Description of Artificial Sequence: Synthetic oligonucleotide
guuccacguggcaaacaag

SEQ ID NO: 2436782 - RNA, 19 nt, Artificial Sequence
  Description of Artificial Sequence: Synthetic oligonucleotide
uggcuggucugcgaagugu

SEQ ID NO: 2436783 - RNA, 19 nt, Artificial Sequence
  Description of Artificial Sequence: Synthetic oligonucleotide
uggccuuguuucucacaca

SEQ ID NO: 2436784 - RNA, 19 nt, Artificial Sequence
  Description of Artificial Sequence: Synthetic oligonucleotide
acucgucaauacuggcgga

SEQ ID NO: 2436785 - RNA, 19 nt, Artificial Sequence
  Description of Artificial Sequence: Synthetic oligonucleotide
ggagugugauuuucuucug

SEQ ID NO: 2436786 - RNA, 19 nt, Artificial Sequence
  Description of Artificial Sequence: Synthetic oligonucleotide
cuuguacacaauacacagu

SEQ ID NO: 2436787 - RNA, 19 nt, Artificial Sequence
  Description of Artificial Sequence: Synthetic oligonucleotide
ggcuuguacacaauacaca

SEQ ID NO: 2436788 - RNA, 19 nt, Artificial Sequence
  Description of Artificial Sequence: Synthetic oligonucleotide
gacaaaacggcagcccaua

SEQ ID NO: 2436789 - RNA, 19 nt, Artificial Sequence
  Description of Artificial Sequence: Synthetic oligonucleotide
guuucucacacagcacauc

SEQ ID NO: 2436790 - RNA, 19 nt, Artificial Sequence
  Description of Artificial Sequence: Synthetic oligonucleotide
agggaacgacuucuccacu

SEQ ID NO: 2436791 - RNA, 19 nt, Artificial Sequence
  Description of Artificial Sequence: Synthetic oligonucleotide
  modified_base (2)..(2): a, c, u, g, unknown or other
cngagugccaaauccaguu

SEQ ID NO: 2436792 - RNA, 19 nt, Artificial Sequence
  Description of Artificial Sequence: Synthetic oligonucleotide
cuuucagaauggcuaaaau

SEQ ID NO: 2436793 - RNA, 19 nt, Artificial Sequence
  Description of Artificial Sequence: Synthetic oligonucleotide
acguggcaaacaagagaac

SEQ ID NO: 2436794 - RNA, 19 nt, Artificial Sequence
  Description of Artificial Sequence: Synthetic oligonucleotide
caaaggacacagucagcaa

SEQ ID NO: 2436795 - RNA, 19 nt, Artificial Sequence
  Description of Artificial Sequence: Synthetic oligonucleotide
caguguguuccucaggagu

SEQ ID NO: 2436796 - RNA, 19 nt, Artificial Sequence
  Description of Artificial Sequence: Synthetic oligonucleotide
aggcuuggggcgaugaaaa

SEQ ID NO: 2436797 - RNA, 19 nt, Artificial Sequence
  Description of Artificial Sequence: Synthetic oligonucleotide
gcccauagacugugaaaag

SEQ ID NO: 2436798 - RNA, 19 nt, Artificial Sequence
  Description of Artificial Sequence: Synthetic oligonucleotide
cacaucagugaagcugcug

SEQ ID NO: 2436799 - RNA, 19 nt, Artificial Sequence
  Description of Artificial Sequence: Synthetic oligonucleotide
acugcuggugggauccucu

SEQ ID NO: 2436800 - RNA, 19 nt, Artificial Sequence
  Description of Artificial Sequence: Synthetic oligonucleotide
agacuccuugagaaagugu

SEQ ID NO: 2436801 - RNA, 19 nt, Artificial Sequence
  Description of Artificial Sequence: Synthetic oligonucleotide
cuucuguuccacguggcaa

SEQ ID NO: 2436802 - RNA, 19 nt, Artificial Sequence
  Description of Artificial Sequence: Synthetic oligonucleotide
  modified_base (17)..(17): a, c, u, g, unknown or other
gauccagaucauggaanaa

SEQ ID NO: 2436803 - RNA, 19 nt, Artificial Sequence
  Description of Artificial Sequence: Synthetic oligonucleotide
aucagugaagcugcugcuu

SEQ ID NO: 2436804 - RNA, 19 nt, Artificial Sequence
  Description of Artificial Sequence: Synthetic oligonucleotide
cugaaacugagaagcuucu

SEQ ID NO: 2436805 - RNA, 19 nt, Artificial Sequence
  Description of Artificial Sequence: Synthetic oligonucleotide
  modified_base (14)..(14): a, c, u, g, unknown or other
ccagaucauggaanaagaa

SEQ ID NO: 2436806 - RNA, 19 nt, Artificial Sequence
  Description of Artificial Sequence: Synthetic oligonucleotide
auacuggcggaggcuuggg

SEQ ID NO: 2436807 - RNA, 19 nt, Artificial Sequence
  Description of Artificial Sequence: Synthetic oligonucleotide
uuacagcaacagugucugu

SEQ ID NO: 2436808 - RNA, 19 nt, Artificial Sequence
  Description of Artificial Sequence: Synthetic oligonucleotide
ggcaaacaagagaacucug

SEQ ID NO: 2436809 - RNA, 19 nt, Artificial Sequence
  Description of Artificial Sequence: Synthetic oligonucleotide
uggugggauccucuucauu

SEQ ID NO: 2436810 - RNA, 19 nt, Artificial Sequence
  Description of Artificial Sequence: Synthetic oligonucleotide
agacaaaacggcagcccau

SEQ ID NO: 2436811 - RNA, 19 nt, Artificial Sequence
  Description of Artificial Sequence: Synthetic oligonucleotide
ugaaggcggcucagagaaa

SEQ ID NO: 2436812 - RNA, 19 nt, Artificial Sequence
  Description of Artificial Sequence: Synthetic oligonucleotide
caaauccaguuaugaucca

SEQ ID NO: 2436813 - RNA, 19 nt, Artificial Sequence
  Description of Artificial Sequence: Synthetic oligonucleotide
gaacgacuucuccacugcu

SEQ ID NO: 2436814 - RNA, 19 nt, Artificial Sequence
  Description of Artificial Sequence: Synthetic oligonucleotide
ggcgaugaaaagaacacau

SEQ ID NO: 2436815 - RNA, 19 nt, Artificial Sequence
  Description of Artificial Sequence: Synthetic oligonucleotide
aaguucuuuccggcauaaa

SEQ ID NO: 2436816 - RNA, 19 nt, Artificial Sequence
  Description of Artificial Sequence: Synthetic oligonucleotide
cucuggcuuguacacaaua

SEQ ID NO: 2436817 - RNA, 19 nt, Artificial Sequence
  Description of Artificial Sequence: Synthetic oligonucleotide
agguucuuugaaggcggcu

SEQ ID NO: 2436818 - RNA, 19 nt, Artificial Sequence
  Description of Artificial Sequence: Synthetic oligonucleotide
cggcauaaaggaugaagac

SEQ ID NO: 2436819 - RNA, 19 nt, Artificial Sequence
  Description of Artificial Sequence: Synthetic oligonucleotide
cagcccauagacugugaaa

SEQ ID NO: 2436820 - RNA, 19 nt, Artificial Sequence
  Description of Artificial Sequence: Synthetic oligonucleotide
gcuuggggcgaugaaaaga

SEQ ID NO: 2436821 - RNA, 19 nt, Artificial Sequence
  Description of Artificial Sequence: Synthetic oligonucleotide
gaaccuccugaaacugaga

SEQ ID NO: 2436822 - RNA, 19 nt, Artificial Sequence
  Description of Artificial Sequence: Synthetic oligonucleotide
ggcuuggggcgaugaaaag

SEQ ID NO: 2436823 - RNA, 19 nt, Artificial Sequence
  Description of Artificial Sequence: Synthetic oligonucleotide
caucagugaagcugcugcu

SEQ ID NO: 2436824 - RNA, 19 nt, Artificial Sequence
  Description of Artificial Sequence: Synthetic oligonucleotide
cgucaauacuggcggaggc

SEQ ID NO: 2436825 - RNA, 19 nt, Artificial Sequence
  Description of Artificial Sequence: Synthetic oligonucleotide
gucaauacuggcggaggcu

SEQ ID NO: 2436826 - RNA, 19 nt, Artificial Sequence
  Description of Artificial Sequence: Synthetic oligonucleotide
gcuucuguuccacguggca

SEQ ID NO: 2436827 - RNA, 19 nt, Artificial Sequence
  Description of Artificial Sequence: Synthetic oligonucleotide
cccauagacugugaaaaga

SEQ ID NO: 2436828 - RNA, 19 nt, Artificial Sequence
  Description of Artificial Sequence: Synthetic oligonucleotide
caaccccacaucugacaga

SEQ ID NO: 2436829 - RNA, 19 nt, Artificial Sequence
  Description of Artificial Sequence: Synthetic oligonucleotide
ccauagacugugaaaagau

SEQ ID NO: 2436830 - RNA, 19 nt, Artificial Sequence
  Description of Artificial Sequence: Synthetic oligonucleotide
guccuggcuggucugcgaa

SEQ ID NO: 2436831 - RNA, 19 nt, Artificial Sequence
  Description of Artificial Sequence: Synthetic oligonucleotide
ggaaguucuuuccggcaua

SEQ ID NO: 2436832 - RNA, 19 nt, Artificial Sequence
  Description of Artificial Sequence: Synthetic oligonucleotide
gggauccucuucauuagaa

SEQ ID NO: 2436833 - RNA, 19 nt, Artificial Sequence
  Description of Artificial Sequence: Synthetic oligonucleotide
acacagucagcaagacaaa

SEQ ID NO: 2436834 - RNA, 19 nt, Artificial Sequence
  Description of Artificial Sequence: Synthetic oligonucleotide
cucgggagugugauuuucu

SEQ ID NO: 2436835 - RNA, 19 nt, Artificial Sequence
  Description of Artificial Sequence: Synthetic oligonucleotide
gggcgaugaaaagaacaca

SEQ ID NO: 2436836 - RNA, 19 nt, Artificial Sequence
  Description of Artificial Sequence: Synthetic oligonucleotide
uccucgggagugugauuuu

SEQ ID NO: 2436837 - RNA, 19 nt, Artificial Sequence
  Description of Artificial Sequence: Synthetic oligonucleotide
guauuucaggaaguucuuu

SEQ ID NO: 2436838 - RNA, 19 nt, Artificial Sequence
  Description of Artificial Sequence: Synthetic oligonucleotide
acggcagcccauagacugu

SEQ ID NO: 2436839 - RNA, 19 nt, Artificial Sequence
  Description of Artificial Sequence: Synthetic oligonucleotide
cgggagugugauuuucuuc

SEQ ID NO: 2436840 - RNA, 19 nt, Artificial Sequence
  Description of Artificial Sequence: Synthetic oligonucleotide
cuggucugcgaaguguacu

SEQ ID NO: 2436841 - RNA, 19 nt, Artificial Sequence
  Description of Artificial Sequence: Synthetic oligonucleotide
gcgaugaaaagaacacaua

SEQ ID NO: 2436842 - RNA, 19 nt, Artificial Sequence
  Description of Artificial Sequence: Synthetic oligonucleotide
caucucucaguguguuccu

SEQ ID NO: 2436843 - RNA, 19 nt, Artificial Sequence
  Description of Artificial Sequence: Synthetic oligonucleotide
cuguuccacguggcaaaca

SEQ ID NO: 2436844 - RNA, 19 nt, Artificial Sequence
  Description of Artificial Sequence: Synthetic oligonucleotide
cgaaguguacuuucugugu

SEQ ID NO: 2436845 - RNA, 19 nt, Artificial Sequence
  Description of Artificial Sequence: Synthetic oligonucleotide
uuccggcauaaaggaugaa

SEQ ID NO: 2436846 - RNA, 19 nt, Artificial Sequence
  Description of Artificial Sequence: Synthetic oligonucleotide
gguauuucaggaaguucuu

SEQ ID NO: 2436847 - RNA, 19 nt, Artificial Sequence
  Description of Artificial Sequence: Synthetic oligonucleotide
cguggcaaacaagagaacu

SEQ ID NO: 2436848 - RNA, 19 nt, Artificial Sequence
  Description of Artificial Sequence: Synthetic oligonucleotide
gcuggucugcgaaguguac

SEQ ID NO: 2436849 - RNA, 19 nt, Artificial Sequence
  Description of Artificial Sequence: Synthetic oligonucleotide
acucuggcuuguacacaau

SEQ ID NO: 2436850 - RNA, 19 nt, Artificial Sequence
  Description of Artificial Sequence: Synthetic oligonucleotide
uccccgaguccuggcuggu

SEQ ID NO: 2436851 - RNA, 19 nt, Artificial Sequence
  Description of Artificial Sequence: Synthetic oligonucleotide
ggaggcuuggggcgaugaa

SEQ ID NO: 2436852 - RNA, 19 nt, Artificial Sequence
  Description of Artificial Sequence: Synthetic oligonucleotide
ggcuggucugcgaagugua

SEQ ID NO: 2436853 - RNA, 19 nt, Artificial Sequence
  Description of Artificial Sequence: Synthetic oligonucleotide
ccucgggagugugauuuuc

SEQ ID NO: 2436854 - RNA, 19 nt, Artificial Sequence
  Description of Artificial Sequence: Synthetic oligonucleotide
cccgaguccuggcuggucu

SEQ ID NO: 2436855 - RNA, 19 nt, Artificial Sequence
  Description of Artificial Sequence: Synthetic oligonucleotide
cuuccucgggagugugauu

SEQ ID NO: 2436856 - RNA, 19 nt, Artificial Sequence
  Description of Artificial Sequence: Synthetic oligonucleotide
ccuggcuggucugcgaagu

SEQ ID NO: 2436857 - RNA, 19 nt, Artificial Sequence
  Description of Artificial Sequence: Synthetic oligonucleotide
ggucugcgaaguguacuuu

SEQ ID NO: 2436858 - RNA, 19 nt, Artificial Sequence
  Description of Artificial Sequence: Synthetic oligonucleotide
gcacaucagugaagcugcu

SEQ ID NO: 2436859 - RNA, 19 nt, Artificial Sequence
  Description of Artificial Sequence: Synthetic oligonucleotide
gcggaggcuuggggcgaug

SEQ ID NO: 2436860 - RNA, 19 nt, Artificial Sequence
  Description of Artificial Sequence: Synthetic oligonucleotide
ccccgaguccuggcugguc

SEQ ID NO: 2436861 - RNA, 19 nt, Artificial Sequence
  Description of Artificial Sequence: Synthetic oligonucleotide
cggaggcuuggggcgauga

SEQ ID NO: 2436862 - RNA, 19 nt, Artificial Sequence
  Description of Artificial Sequence: Synthetic oligonucleotide
ggcggaggcuuggggcgau

SEQ ID NO: 2436863 - RNA, 19 nt, Artificial Sequence
  Description of Artificial Sequence: Synthetic oligonucleotide
  modified_base (1)..(1): a, c, u, g, unknown or other
ngagugccaaauccaguua

SEQ ID NO: 2436864 - RNA, 19 nt, Artificial Sequence
  Description of Artificial Sequence: Synthetic oligonucleotide
aaaauguaaaaccaaagcu

SEQ ID NO: 2436865 - RNA, 19 nt, Artificial Sequence
  Description of Artificial Sequence: Synthetic oligonucleotide
aauaccacgauucccaguc

SEQ ID NO: 2436866 - RNA, 19 nt, Artificial Sequence
  Description of Artificial Sequence: Synthetic oligonucleotide
uguaaaaccaaugugaaca

SEQ ID NO: 2436867 - RNA, 19 nt, Artificial Sequence
  Description of Artificial Sequence: Synthetic oligonucleotide
ucgucuaagaauaugugcg

SEQ ID NO: 2436868 - RNA, 19 nt, Artificial Sequence
  Description of Artificial Sequence: Synthetic oligonucleotide
cuugaaaccgaguauaucc

SEQ ID NO: 2436869 - RNA, 19 nt, Artificial Sequence
  Description of Artificial Sequence: Synthetic oligonucleotide
aauguuucuccccggaaac

SEQ ID NO: 2436870 - RNA, 19 nt, Artificial Sequence
  Description of Artificial Sequence: Synthetic oligonucleotide
aaguaaacaaucuccagca

SEQ ID NO: 2436871 - RNA, 19 nt, Artificial Sequence
  Description of Artificial Sequence: Synthetic oligonucleotide
ugaacagucaugcaggcug

SEQ ID NO: 2436872 - RNA, 19 nt, Artificial Sequence
  Description of Artificial Sequence: Synthetic oligonucleotide
agagcaauuggacuuuucc

SEQ ID NO: 2436873 - RNA, 19 nt, Artificial Sequence
  Description of Artificial Sequence: Synthetic oligonucleotide
agauaaacuccuugaaacc

SEQ ID NO: 2436874 - RNA, 19 nt, Artificial Sequence
  Description of Artificial Sequence: Synthetic oligonucleotide
cuagugagaguauaaaugc

SEQ ID NO: 2436875 - RNA, 19 nt, Artificial Sequence
  Description of Artificial Sequence: Synthetic oligonucleotide
aacucuuauaauauuuuac

SEQ ID NO: 2436876 - RNA, 19 nt, Artificial Sequence
  Description of Artificial Sequence: Synthetic oligonucleotide
agucaaguaaacaaucucc

SEQ ID NO: 2436877 - RNA, 19 nt, Artificial Sequence
  Description of Artificial Sequence: Synthetic oligonucleotide
aauaugugcgaguacaaaa

SEQ ID NO: 2436878 - RNA, 19 nt, Artificial Sequence
  Description of Artificial Sequence: Synthetic oligonucleotide
gauaaacuccuugaaaccg

SEQ ID NO: 2436879 - RNA, 19 nt, Artificial Sequence
  Description of Artificial Sequence: Synthetic oligonucleotide
aauguaaaaccaaagcucu

SEQ ID NO: 2436880 - RNA, 19 nt, Artificial Sequence
  Description of Artificial Sequence: Synthetic oligonucleotide
uguaaaaccaaagcucugg

SEQ ID NO: 2436881 - RNA, 19 nt, Artificial Sequence
  Description of Artificial Sequence: Synthetic oligonucleotide
cagauaaacuccuugaaac

SEQ ID NO: 2436882 - RNA, 19 nt, Artificial Sequence
  Description of Artificial Sequence: Synthetic oligonucleotide
acucuuauaauauuuuacu

SEQ ID NO: 2436883 - RNA, 19 nt, Artificial Sequence
  Description of Artificial Sequence: Synthetic oligonucleotide
ucagauuagcaccagcacc

SEQ ID NO: 2436884 - RNA, 19 nt, Artificial Sequence
  Description of Artificial Sequence: Synthetic oligonucleotide
auauccuaauguuucuccc

SEQ ID NO: 2436885 - RNA, 19 nt, Artificial Sequence
  Description of Artificial Sequence: Synthetic oligonucleotide
ucuguuccaaacuugcucc

SEQ ID NO: 2436886 - RNA, 19 nt, Artificial Sequence
  Description of Artificial Sequence: Synthetic oligonucleotide
agugagaguauaaaugccc

SEQ ID NO: 2436887 - RNA, 19 nt, Artificial Sequence
  Description of Artificial Sequence: Synthetic oligonucleotide
uauuuuacuccauaaacua

SEQ ID NO: 2436888 - RNA, 19 nt, Artificial Sequence
  Description of Artificial Sequence: Synthetic oligonucleotide
aagaauaugugcgaguaca

SEQ ID NO: 2436889 - RNA, 19 nt, Artificial Sequence
  Description of Artificial Sequence: Synthetic oligonucleotide
uauauccuaauguuucucc

SEQ ID NO: 2436890 - RNA, 19 nt, Artificial Sequence
  Description of Artificial Sequence: Synthetic oligonucleotide
agaaaggaagugcacgugg

SEQ ID NO: 2436891 - RNA, 19 nt, Artificial Sequence
  Description of Artificial Sequence: Synthetic oligonucleotide
auuaccuagcuccugagca

SEQ ID NO: 2436892 - RNA, 19 nt, Artificial Sequence
  Description of Artificial Sequence: Synthetic oligonucleotide
agaguauaaaugcccaguc

SEQ ID NO: 2436893 - RNA, 19 nt, Artificial Sequence
  Description of Artificial Sequence: Synthetic oligonucleotide
ucugggaauaccacgauuc

SEQ ID NO: 2436894 - RNA, 19 nt, Artificial Sequence
  Description of Artificial Sequence: Synthetic oligonucleotide
uccauaaacuauaauuggu

SEQ ID NO: 2436895 - RNA, 19 nt, Artificial Sequence
  Description of Artificial Sequence: Synthetic oligonucleotide
aaaacucuguucccacaac

SEQ ID NO: 2436896 - RNA, 19 nt, Artificial Sequence
  Description of Artificial Sequence: Synthetic oligonucleotide
cuccauaaacuauaauugg

SEQ ID NO: 2436897 - RNA, 19 nt, Artificial Sequence
  Description of Artificial Sequence: Synthetic oligonucleotide
uguguaaaaccaaugugaa

SEQ ID NO: 2436898 - RNA, 19 nt, Artificial Sequence
  Description of Artificial Sequence: Synthetic oligonucleotide
uauaucccagagcaauugg

SEQ ID NO: 2436899 - RNA, 19 nt, Artificial Sequence
  Description of Artificial Sequence: Synthetic oligonucleotide
gauggugacaucaucauca

SEQ ID NO: 2436900 - RNA, 19 nt, Artificial Sequence
  Description of Artificial Sequence: Synthetic oligonucleotide
ucuaccauuugugugacca

SEQ ID NO: 2436901 - RNA, 19 nt, Artificial Sequence
  Description of Artificial Sequence: Synthetic oligonucleotide
uacugagucaaguaaacaa

SEQ ID NO: 2436902 - RNA, 19 nt, Artificial Sequence
  Description of Artificial Sequence: Synthetic oligonucleotide
auuugugugaccaaggggu

SEQ ID NO: 2436903 - RNA, 19 nt, Artificial Sequence
  Description of Artificial Sequence: Synthetic oligonucleotide
uccaucguguguaaaacca

SEQ ID NO: 2436904 - RNA, 19 nt, Artificial Sequence
  Description of Artificial Sequence: Synthetic oligonucleotide
uauaauuggucgucuaaga

SEQ ID NO: 2436905 - RNA, 19 nt, Artificial Sequence
  Description of Artificial Sequence: Synthetic oligonucleotide
auaaacuauaauuggucgu

SEQ ID NO: 2436906 - RNA, 19 nt, Artificial Sequence
  Description of Artificial Sequence: Synthetic oligonucleotide
aguauaaaugcccagucuu

SEQ ID NO: 2436907 - RNA, 19 nt, Artificial Sequence
  Description of Artificial Sequence: Synthetic oligonucleotide
auacccaucauucuccaug

SEQ ID NO: 2436908 - RNA, 19 nt, Artificial Sequence
  Description of Artificial Sequence: Synthetic oligonucleotide
aacuccuugaaaccgagua

SEQ ID NO: 2436909 - RNA, 19 nt, Artificial Sequence
  Description of Artificial Sequence: Synthetic oligonucleotide
aaugcccagucuucuugcc

SEQ ID NO: 2436910 - RNA, 19 nt, Artificial Sequence
  Description of Artificial Sequence: Synthetic oligonucleotide
ugagucaaguaaacaaucu

SEQ ID NO: 2436911 - RNA, 19 nt, Artificial Sequence
  Description of Artificial Sequence: Synthetic oligonucleotide
uuugucauaaaugccccag

SEQ ID NO: 2436912 - RNA, 19 nt, Artificial Sequence
  Description of Artificial Sequence: Synthetic oligonucleotide
aaacucuguucccacaaca

SEQ ID NO: 2436913 - RNA, 19 nt, Artificial Sequence
  Description of Artificial Sequence: Synthetic oligonucleotide
aguggccccuuguauaucc

SEQ ID NO: 2436914 - RNA, 19 nt, Artificial Sequence
  Description of Artificial Sequence: Synthetic oligonucleotide
uagcuuguaguacugaguc

SEQ ID NO: 2436915 - RNA, 19 nt, Artificial Sequence
  Description of Artificial Sequence: Synthetic oligonucleotide
aaggaagugcacguggagg

SEQ ID NO: 2436916 - RNA, 19 nt, Artificial Sequence
  Description of Artificial Sequence: Synthetic oligonucleotide
guucccacaacaaaggcag

SEQ ID NO: 2436917 - RNA, 19 nt, Artificial Sequence
  Description of Artificial Sequence: Synthetic oligonucleotide
uguucccacaacaaaggca

SEQ ID NO: 2436918 - RNA, 19 nt, Artificial Sequence
  Description of Artificial Sequence: Synthetic oligonucleotide
aaacucuuauaauauuuua

SEQ ID NO: 2436919 - RNA, 19 nt, Artificial Sequence
  Description of Artificial Sequence: Synthetic oligonucleotide
aaaggaagugcacguggag

SEQ ID NO: 2436920 - RNA, 19 nt, Artificial Sequence
  Description of Artificial Sequence: Synthetic oligonucleotide
gucuuugucauaaaugccc

SEQ ID NO: 2436921 - RNA, 19 nt, Artificial Sequence
  Description of Artificial Sequence: Synthetic oligonucleotide
uggucgucuaagaauaugu

SEQ ID NO: 2436922 - RNA, 19 nt, Artificial Sequence
  Description of Artificial Sequence: Synthetic oligonucleotide
uaauuggucgucuaagaau

SEQ ID NO: 2436923 - RNA, 19 nt, Artificial Sequence
  Description of Artificial Sequence: Synthetic oligonucleotide
auccuaauguuucuccccg

SEQ ID NO: 2436924 - RNA, 19 nt, Artificial Sequence
  Description of Artificial Sequence: Synthetic oligonucleotide
guaaaaccaaagcucuggg

SEQ ID NO: 2436925 - RNA, 19 nt, Artificial Sequence
  Description of Artificial Sequence: Synthetic oligonucleotide
uaaacuauaauuggucguc

SEQ ID NO: 2436926 - RNA, 19 nt, Artificial Sequence
  Description of Artificial Sequence: Synthetic oligonucleotide
aaacaaucuccagcagucc

SEQ ID NO: 2436927 - RNA, 19 nt, Artificial Sequence
  Description of Artificial Sequence: Synthetic oligonucleotide
uugucauaaaugccccagg

SEQ ID NO: 2436928 - RNA, 19 nt, Artificial Sequence
  Description of Artificial Sequence: Synthetic oligonucleotide
uauccuaauguuucucccc

SEQ ID NO: 2436929 - RNA, 19 nt, Artificial Sequence
  Description of Artificial Sequence: Synthetic oligonucleotide
uacccaucauucuccaugg

SEQ ID NO: 2436930 - RNA, 19 nt, Artificial Sequence
  Description of Artificial Sequence: Synthetic oligonucleotide
caaacuugcuccaggcugg

SEQ ID NO: 2436931 - RNA, 19 nt, Artificial Sequence
  Description of Artificial Sequence: Synthetic oligonucleotide
ugucauaaaugccccaggu

SEQ ID NO: 2436932 - RNA, 19 nt, Artificial Sequence
  Description of Artificial Sequence: Synthetic oligonucleotide
accgaguauauccuaaugu

SEQ ID NO: 2436933 - RNA, 19 nt, Artificial Sequence
  Description of Artificial Sequence: Synthetic oligonucleotide
uagugagaguauaaaugcc

SEQ ID NO: 2436934 - RNA, 19 nt, Artificial Sequence
  Description of Artificial Sequence: Synthetic oligonucleotide
gucgucuaagaauaugugc

SEQ ID NO: 2436935 - RNA, 19 nt, Artificial Sequence
  Description of Artificial Sequence: Synthetic oligonucleotide
ucgguugccauacccauca

SEQ ID NO: 2436936 - RNA, 19 nt, Artificial Sequence
  Description of Artificial Sequence: Synthetic oligonucleotide
aauuggucgucuaagaaua

SEQ ID NO: 2436937 - RNA, 19 nt, Artificial Sequence
  Description of Artificial Sequence: Synthetic oligonucleotide
uaaacuccuugaaaccgag

SEQ ID NO: 2436938 - RNA, 19 nt, Artificial Sequence
  Description of Artificial Sequence: Synthetic oligonucleotide
agcaccagcaccucgguug

SEQ ID NO: 2436939 - RNA, 19 nt, Artificial Sequence
  Description of Artificial Sequence: Synthetic oligonucleotide
agcaauuggacuuuuccaa

SEQ ID NO: 2436940 - RNA, 19 nt, Artificial Sequence
  Description of Artificial Sequence: Synthetic oligonucleotide
gaguauauccuaauguuuc

SEQ ID NO: 2436941 - RNA, 19 nt, Artificial Sequence
  Description of Artificial Sequence: Synthetic oligonucleotide
ucuaagaauaugugcgagu

SEQ ID NO: 2436942 - RNA, 19 nt, Artificial Sequence
  Description of Artificial Sequence: Synthetic oligonucleotide
ugugucuguuccaaacuug

SEQ ID NO: 2436943 - RNA, 19 nt, Artificial Sequence
  Description of Artificial Sequence: Synthetic oligonucleotide
ucuguagcggucaagccau

SEQ ID NO: 2436944 - RNA, 19 nt, Artificial Sequence
  Description of Artificial Sequence: Synthetic oligonucleotide
accaaggggugauuucucc

SEQ ID NO: 2436945 - RNA, 19 nt, Artificial Sequence
  Description of Artificial Sequence: Synthetic oligonucleotide
uucagauuagcaccagcac

SEQ ID NO: 2436946 - RNA, 19 nt, Artificial Sequence
  Description of Artificial Sequence: Synthetic oligonucleotide
aaccgaguauauccuaaug

SEQ ID NO: 2436947 - RNA, 19 nt, Artificial Sequence
  Description of Artificial Sequence: Synthetic oligonucleotide
ugagaguauaaaugcccag

SEQ ID NO: 2436948 - RNA, 19 nt, Artificial Sequence
  Description of Artificial Sequence: Synthetic oligonucleotide
aaaaugugugucuguucca

SEQ ID NO: 2436949 - RNA, 19 nt, Artificial Sequence
  Description of Artificial Sequence: Synthetic oligonucleotide
cuauaauuggucgucuaag

SEQ ID NO: 2436950 - RNA, 19 nt, Artificial Sequence
  Description of Artificial Sequence: Synthetic oligonucleotide
cauaaaugccccagguagc

SEQ ID NO: 2436951 - RNA, 19 nt, Artificial Sequence
  Description of Artificial Sequence: Synthetic oligonucleotide
cauuguucuucccucagug

SEQ ID NO: 2436952 - RNA, 19 nt, Artificial Sequence
  Description of Artificial Sequence: Synthetic oligonucleotide
auaauuggucgucuaagaa

SEQ ID NO: 2436953 - RNA, 19 nt, Artificial Sequence
  Description of Artificial Sequence: Synthetic oligonucleotide
ugugugucuguuccaaacu

SEQ ID NO: 2436954 - RNA, 19 nt, Artificial Sequence
  Description of Artificial Sequence: Synthetic oligonucleotide
aaaccaaagcucugggaau

SEQ ID NO: 2436955 - RNA, 19 nt, Artificial Sequence
  Description of Artificial Sequence: Synthetic oligonucleotide
uauaaaugcccagucuucu

SEQ ID NO: 2436956 - RNA, 19 nt, Artificial Sequence
  Description of Artificial Sequence: Synthetic oligonucleotide
uccccggaaacucuuauaa

SEQ ID NO: 2436957 - RNA, 19 nt, Artificial Sequence
  Description of Artificial Sequence: Synthetic oligonucleotide
cuagcuccugagcagaaag

SEQ ID NO: 2436958 - RNA, 19 nt, Artificial Sequence
  Description of Artificial Sequence: Synthetic oligonucleotide
uuguauaucccagagcaau

SEQ ID NO: 2436959 - RNA, 19 nt, Artificial Sequence
  Description of Artificial Sequence: Synthetic oligonucleotide
auugccacuagaacucccc

SEQ ID NO: 2436960 - RNA, 19 nt, Artificial Sequence
  Description of Artificial Sequence: Synthetic oligonucleotide
gauuagcaccagcaccucg

SEQ ID NO: 2436961 - RNA, 19 nt, Artificial Sequence
  Description of Artificial Sequence: Synthetic oligonucleotide
aaccaaugugaacagucau

SEQ ID NO: 2436962 - RNA, 19 nt, Artificial Sequence
  Description of Artificial Sequence: Synthetic oligonucleotide
auuagcaccagcaccucgg

SEQ ID NO: 2436963 - RNA, 19 nt, Artificial Sequence
  Description of Artificial Sequence: Synthetic oligonucleotide
uuaccuagcuccugagcag

SEQ ID NO: 2436964 - RNA, 19 nt, Artificial Sequence
  Description of Artificial Sequence: Synthetic oligonucleotide
acuauaauuggucgucuaa

SEQ ID NO: 2436965 - RNA, 19 nt, Artificial Sequence
  Description of Artificial Sequence: Synthetic oligonucleotide
uaagaauaugugcgaguac

SEQ ID NO: 2436966 - RNA, 19 nt, Artificial Sequence
  Description of Artificial Sequence: Synthetic oligonucleotide
gcuagugagaguauaaaug

SEQ ID NO: 2436967 - RNA, 19 nt, Artificial Sequence
  Description of Artificial Sequence: Synthetic oligonucleotide
ugugaacagucaugcaggc

SEQ ID NO: 2436968 - RNA, 19 nt, Artificial Sequence
  Description of Artificial Sequence: Synthetic oligonucleotide
uggcaaccaaagcagagaa

SEQ ID NO: 2436969 - RNA, 19 nt, Artificial Sequence
  Description of Artificial Sequence: Synthetic oligonucleotide
gagcaauuggacuuuucca

SEQ ID NO: 2436970 - RNA, 19 nt, Artificial Sequence
  Description of Artificial Sequence: Synthetic oligonucleotide
uuccaucguguguaaaacc

SEQ ID NO: 2436971 - RNA, 19 nt, Artificial Sequence
  Description of Artificial Sequence: Synthetic oligonucleotide
uuuccaucguguguaaaac

SEQ ID NO: 2436972 - RNA, 19 nt, Artificial Sequence
  Description of Artificial Sequence: Synthetic oligonucleotide
aaacuauaauuggucgucu

SEQ ID NO: 2436973 - RNA, 19 nt, Artificial Sequence
  Description of Artificial Sequence: Synthetic oligonucleotide
uaccauuugugugaccaag

SEQ ID NO: 2436974 - RNA, 19 nt, Artificial Sequence
  Description of Artificial Sequence: Synthetic oligonucleotide
aaaccgaguauauccuaau

SEQ ID NO: 2436975 - RNA, 19 nt, Artificial Sequence
  Description of Artificial Sequence: Synthetic oligonucleotide
aggcagauaaacuccuuga

SEQ ID NO: 2436976 - RNA, 19 nt, Artificial Sequence
  Description of Artificial Sequence: Synthetic oligonucleotide
cugagcagaaaggaagugc

SEQ ID NO: 2436977 - RNA, 19 nt, Artificial Sequence
  Description of Artificial Sequence: Synthetic oligonucleotide
ucuccagcaguccgguucc

SEQ ID NO: 2436978 - RNA, 19 nt, Artificial Sequence
  Description of Artificial Sequence: Synthetic oligonucleotide
ugccauacccaucauucuc

SEQ ID NO: 2436979 - RNA, 19 nt, Artificial Sequence
  Description of Artificial Sequence: Synthetic oligonucleotide
uccuuucacugucaaccag

SEQ ID NO: 2436980 - RNA, 19 nt, Artificial Sequence
  Description of Artificial Sequence: Synthetic oligonucleotide
cuuuccgaagcaccgaguc

SEQ ID NO: 2436981 - RNA, 19 nt, Artificial Sequence
  Description of Artificial Sequence: Synthetic oligonucleotide
agcuagugagaguauaaau

SEQ ID NO: 2436982 - RNA, 19 nt, Artificial Sequence
  Description of Artificial Sequence: Synthetic oligonucleotide
ccuuguauaucccagagca

SEQ ID NO: 2436983 - RNA, 19 nt, Artificial Sequence
  Description of Artificial Sequence: Synthetic oligonucleotide
uccgacgcgagcuuuucug

SEQ ID NO: 2436984 - RNA, 19 nt, Artificial Sequence
  Description of Artificial Sequence: Synthetic oligonucleotide
ucaugcagggcuuuccgaa

SEQ ID NO: 2436985 - RNA, 19 nt, Artificial Sequence
  Description of Artificial Sequence: Synthetic oligonucleotide
ucauuaccuagcuccugag

SEQ ID NO: 2436986 - RNA, 19 nt, Artificial Sequence
  Description of Artificial Sequence: Synthetic oligonucleotide
aacuauaauuggucgucua

SEQ ID NO: 2436987 - RNA, 19 nt, Artificial Sequence
  Description of Artificial Sequence: Synthetic oligonucleotide
agcaccucgguugccauac

SEQ ID NO: 2436988 - RNA, 19 nt, Artificial Sequence
  Description of Artificial Sequence: Synthetic oligonucleotide
gguagcuuguaguacugag

SEQ ID NO: 2436989 - RNA, 19 nt, Artificial Sequence
  Description of Artificial Sequence: Synthetic oligonucleotide
caugcaggcugucaugcag

SEQ ID NO: 2436990 - RNA, 19 nt, Artificial Sequence
  Description of Artificial Sequence: Synthetic oligonucleotide
uguauaucccagagcaauu

SEQ ID NO: 2436991 - RNA, 19 nt, Artificial Sequence
  Description of Artificial Sequence: Synthetic oligonucleotide
guucagauuagcaccagca

SEQ ID NO: 2436992 - RNA, 19 nt, Artificial Sequence
  Description of Artificial Sequence: Synthetic oligonucleotide
uacaaggccggaucugucu

SEQ ID NO: 2436993 - RNA, 19 nt, Artificial Sequence
  Description of Artificial Sequence: Synthetic oligonucleotide
guauaucccagagcaauug

SEQ ID NO: 2436994 - RNA, 19 nt, Artificial Sequence
  Description of Artificial Sequence: Synthetic oligonucleotide
uguucuucccucagugaaa

SEQ ID NO: 2436995 - RNA, 19 nt, Artificial Sequence
  Description of Artificial Sequence: Synthetic oligonucleotide
gucaaguaaacaaucucca

SEQ ID NO: 2436996 - RNA, 19 nt, Artificial Sequence
  Description of Artificial Sequence: Synthetic oligonucleotide
ugaccaaggggugauuucu

SEQ ID NO: 2436997 - RNA, 19 nt, Artificial Sequence
  Description of Artificial Sequence: Synthetic oligonucleotide
uccuaauguuucuccccgg

SEQ ID NO: 2436998 - RNA, 19 nt, Artificial Sequence
  Description of Artificial Sequence: Synthetic oligonucleotide
gaagcaccgagucuuuguc

SEQ ID NO: 2436999 - RNA, 19 nt, Artificial Sequence
  Description of Artificial Sequence: Synthetic oligonucleotide
aaacuugcuccaggcuggc

SEQ ID NO: 2437000 - RNA, 19 nt, Artificial Sequence
  Description of Artificial Sequence: Synthetic oligonucleotide
auaaaugccccagguagcu

SEQ ID NO: 2437001 - RNA, 19 nt, Artificial Sequence
  Description of Artificial Sequence: Synthetic oligonucleotide
ugggaauaccacgauuccc

SEQ ID NO: 2437002 - RNA, 19 nt, Artificial Sequence
  Description of Artificial Sequence: Synthetic oligonucleotide
gucuaagaauaugugcgag

SEQ ID NO: 2437003 - RNA, 19 nt, Artificial Sequence
  Description of Artificial Sequence: Synthetic oligonucleotide
uuccuuucacugucaacca

SEQ ID NO: 2437004 - RNA, 19 nt, Artificial Sequence
  Description of Artificial Sequence: Synthetic oligonucleotide
guaaacaaucuccagcagu

SEQ ID NO: 2437005 - RNA, 19 nt, Artificial Sequence
  Description of Artificial Sequence: Synthetic oligonucleotide
agaaguggccccuuguaua

SEQ ID NO: 2437006 - RNA, 19 nt, Artificial Sequence
  Description of Artificial Sequence: Synthetic oligonucleotide
cauuaccuagcuccugagc

SEQ ID NO: 2437007 - RNA, 19 nt, Artificial Sequence
  Description of Artificial Sequence: Synthetic oligonucleotide
acgauucccagucuuucca

SEQ ID NO: 2437008 - RNA, 19 nt, Artificial Sequence
  Description of Artificial Sequence: Synthetic oligonucleotide
aagcaccgagucuuuguca

SEQ ID NO: 2437009 - RNA, 19 nt, Artificial Sequence
  Description of Artificial Sequence: Synthetic oligonucleotide
ccaaugugaacagucaugc

SEQ ID NO: 2437010 - RNA, 19 nt, Artificial Sequence
  Description of Artificial Sequence: Synthetic oligonucleotide
acugagucaaguaaacaau

SEQ ID NO: 2437011 - RNA, 19 nt, Artificial Sequence
  Description of Artificial Sequence: Synthetic oligonucleotide
ugucuguagcggucaagcc

SEQ ID NO: 2437012 - RNA, 19 nt, Artificial Sequence
  Description of Artificial Sequence: Synthetic oligonucleotide
cuccaggcuggcuagcuag

SEQ ID NO: 2437013 - RNA, 19 nt, Artificial Sequence
  Description of Artificial Sequence: Synthetic oligonucleotide
ugcuccucauuaccuagcu

SEQ ID NO: 2437014 - RNA, 19 nt, Artificial Sequence
  Description of Artificial Sequence: Synthetic oligonucleotide
cagggauguacaaggccgg

SEQ ID NO: 2437015 - RNA, 19 nt, Artificial Sequence
  Description of Artificial Sequence: Synthetic oligonucleotide
cugggaauaccacgauucc

SEQ ID NO: 2437016 - RNA, 19 nt, Artificial Sequence
  Description of Artificial Sequence: Synthetic oligonucleotide
cuuguaguacugagucaag

SEQ ID NO: 2437017 - RNA, 19 nt, Artificial Sequence
  Description of Artificial Sequence: Synthetic oligonucleotide
acaaggccggaucugucug

SEQ ID NO: 2437018 - RNA, 19 nt, Artificial Sequence
  Description of Artificial Sequence: Synthetic oligonucleotide
accaaugugaacagucaug

SEQ ID NO: 2437019 - RNA, 19 nt, Artificial Sequence
  Description of Artificial Sequence: Synthetic oligonucleotide
uccucauuaccuagcuccu

SEQ ID NO: 2437020 - RNA, 19 nt, Artificial Sequence
  Description of Artificial Sequence: Synthetic oligonucleotide
ugaaaccgaguauauccua

SEQ ID NO: 2437021 - RNA, 19 nt, Artificial Sequence
  Description of Artificial Sequence: Synthetic oligonucleotide
gugucuguuccaaacuugc

SEQ ID NO: 2437022 - RNA, 19 nt, Artificial Sequence
  Description of Artificial Sequence: Synthetic oligonucleotide
aucaguguucagauuagca

SEQ ID NO: 2437023 - RNA, 19 nt, Artificial Sequence
  Description of Artificial Sequence: Synthetic oligonucleotide
uggcuagcuagugagagua

SEQ ID NO: 2437024 - RNA, 19 nt, Artificial Sequence
  Description of Artificial Sequence: Synthetic oligonucleotide
agacagggauguacaaggc

SEQ ID NO: 2437025 - RNA, 19 nt, Artificial Sequence
  Description of Artificial Sequence: Synthetic oligonucleotide
ugauuucuccgacgcgagc

SEQ ID NO: 2437026 - RNA, 19 nt, Artificial Sequence
  Description of Artificial Sequence: Synthetic oligonucleotide
aggggugauuucuccgacg

SEQ ID NO: 2437027 - RNA, 19 nt, Artificial Sequence
  Description of Artificial Sequence: Synthetic oligonucleotide
cacgauucccagucuuucc

SEQ ID NO: 2437028 - RNA, 19 nt, Artificial Sequence
  Description of Artificial Sequence: Synthetic oligonucleotide
aguguucagauuagcacca

SEQ ID NO: 2437029 - RNA, 19 nt, Artificial Sequence
  Description of Artificial Sequence: Synthetic oligonucleotide
ugcacguggaggagcuucc

SEQ ID NO: 2437030 - RNA, 19 nt, Artificial Sequence
  Description of Artificial Sequence: Synthetic oligonucleotide
uccuugaaaccgaguauau

SEQ ID NO: 2437031 - RNA, 19 nt, Artificial Sequence
  Description of Artificial Sequence: Synthetic oligonucleotide
caucauucuccauggcaac

SEQ ID NO: 2437032 - RNA, 19 nt, Artificial Sequence
  Description of Artificial Sequence: Synthetic oligonucleotide
caauuggacuuuuccaaca

SEQ ID NO: 2437033 - RNA, 19 nt, Artificial Sequence
  Description of Artificial Sequence: Synthetic oligonucleotide
agcaccgagucuuugucau

SEQ ID NO: 2437034 - RNA, 19 nt, Artificial Sequence
  Description of Artificial Sequence: Synthetic oligonucleotide
cuaagaauaugugcgagua

SEQ ID NO: 2437035 - RNA, 19 nt, Artificial Sequence
  Description of Artificial Sequence: Synthetic oligonucleotide
guauaaaugcccagucuuc

SEQ ID NO: 2437036 - RNA, 19 nt, Artificial Sequence
  Description of Artificial Sequence: Synthetic oligonucleotide
caucagacagggauguaca

SEQ ID NO: 2437037 - RNA, 19 nt, Artificial Sequence
  Description of Artificial Sequence: Synthetic oligonucleotide
caguccgguuccaaagugc

SEQ ID NO: 2437038 - RNA, 19 nt, Artificial Sequence
  Description of Artificial Sequence: Synthetic oligonucleotide
acucuguucccacaacaaa

SEQ ID NO: 2437039 - RNA, 19 nt, Artificial Sequence
  Description of Artificial Sequence: Synthetic oligonucleotide
gaagugcacguggaggagc

SEQ ID NO: 2437040 - RNA, 19 nt, Artificial Sequence
  Description of Artificial Sequence: Synthetic oligonucleotide
ucccagucuuuccaucgug

SEQ ID NO: 2437041 - RNA, 19 nt, Artificial Sequence
  Description of Artificial Sequence: Synthetic oligonucleotide
cagauuagcaccagcaccu

SEQ ID NO: 2437042 - RNA, 19 nt, Artificial Sequence
  Description of Artificial Sequence: Synthetic oligonucleotide
gauucccagucuuuccauc

SEQ ID NO: 2437043 - RNA, 19 nt, Artificial Sequence
  Description of Artificial Sequence: Synthetic oligonucleotide
cucauuaccuagcuccuga

SEQ ID NO: 2437044 - RNA, 19 nt, Artificial Sequence
  Description of Artificial Sequence: Synthetic oligonucleotide
gauguacaaggccggaucu

SEQ ID NO: 2437045 - RNA, 19 nt, Artificial Sequence
  Description of Artificial Sequence: Synthetic oligonucleotide
gaaaccgaguauauccuaa

SEQ ID NO: 2437046 - RNA, 19 nt, Artificial Sequence
  Description of Artificial Sequence: Synthetic oligonucleotide
auuggacuuuuccaacaaa

SEQ ID NO: 2437047 - RNA, 19 nt, Artificial Sequence
  Description of Artificial Sequence: Synthetic oligonucleotide
uccgguuccaaagugcaua

SEQ ID NO: 2437048 - RNA, 19 nt, Artificial Sequence
  Description of Artificial Sequence: Synthetic oligonucleotide
uuccgaagcaccgagucuu

SEQ ID NO: 2437049 - RNA, 19 nt, Artificial Sequence
  Description of Artificial Sequence: Synthetic oligonucleotide
cuagcuagugagaguauaa

SEQ ID NO: 2437050 - RNA, 19 nt, Artificial Sequence
  Description of Artificial Sequence: Synthetic oligonucleotide
gaguauaaaugcccagucu

SEQ ID NO: 2437051 - RNA, 19 nt, Artificial Sequence
  Description of Artificial Sequence: Synthetic oligonucleotide
uugccauacccaucauucu

SEQ ID NO: 2437052 - RNA, 19 nt, Artificial Sequence
  Description of Artificial Sequence: Synthetic oligonucleotide
ggggugauuucuccgacgc

SEQ ID NO: 2437053 - RNA, 19 nt, Artificial Sequence
  Description of Artificial Sequence: Synthetic oligonucleotide
agcuccugagcagaaagga

SEQ ID NO: 2437054 - RNA, 19 nt, Artificial Sequence
  Description of Artificial Sequence: Synthetic oligonucleotide
uuucuaccauuugugugac

SEQ ID NO: 2437055 - RNA, 19 nt, Artificial Sequence
  Description of Artificial Sequence: Synthetic oligonucleotide
uuagcaccagcaccucggu

SEQ ID NO: 2437056 - RNA, 19 nt, Artificial Sequence
  Description of Artificial Sequence: Synthetic oligonucleotide
cauugccacuagaacuccc

SEQ ID NO: 2437057 - RNA, 19 nt, Artificial Sequence
  Description of Artificial Sequence: Synthetic oligonucleotide
agcaguccgguuccaaagu

SEQ ID NO: 2437058 - RNA, 19 nt, Artificial Sequence
  Description of Artificial Sequence: Synthetic oligonucleotide
ugcccagucuucuugccau

SEQ ID NO: 2437059 - RNA, 19 nt, Artificial Sequence
  Description of Artificial Sequence: Synthetic oligonucleotide
gugagaguauaaaugccca

SEQ ID NO: 2437060 - RNA, 19 nt, Artificial Sequence
  Description of Artificial Sequence: Synthetic oligonucleotide
agcuuguaguacugaguca

SEQ ID NO: 2437061 - RNA, 19 nt, Artificial Sequence
  Description of Artificial Sequence: Synthetic oligonucleotide
gagaguauaaaugcccagu

SEQ ID NO: 2437062 - RNA, 19 nt, Artificial Sequence
  Description of Artificial Sequence: Synthetic oligonucleotide
auaaaugcccagucuucuu

SEQ ID NO: 2437063 - RNA, 19 nt, Artificial Sequence
  Description of Artificial Sequence: Synthetic oligonucleotide
gaauaugugcgaguacaaa

SEQ ID NO: 2437064 - RNA, 19 nt, Artificial Sequence
  Description of Artificial Sequence: Synthetic oligonucleotide
uagcuagugagaguauaaa

SEQ ID NO: 2437065 - RNA, 19 nt, Artificial Sequence
  Description of Artificial Sequence: Synthetic oligonucleotide
cucuccaucagacagggau

SEQ ID NO: 2437066 - RNA, 19 nt, Artificial Sequence
  Description of Artificial Sequence: Synthetic oligonucleotide
gauuucuccgacgcgagcu

SEQ ID NO: 2437067 - RNA, 19 nt, Artificial Sequence
  Description of Artificial Sequence: Synthetic oligonucleotide
ggauguacaaggccggauc

SEQ ID NO: 2437068 - RNA, 19 nt, Artificial Sequence
  Description of Artificial Sequence: Synthetic oligonucleotide
ucugucuguagcggucaag

SEQ ID NO: 2437069 - RNA, 19 nt, Artificial Sequence
  Description of Artificial Sequence: Synthetic oligonucleotide
aagugcacguggaggagcu

SEQ ID NO: 2437070 - RNA, 19 nt, Artificial Sequence
  Description of Artificial Sequence: Synthetic oligonucleotide
cgagucuuugucauaaaug

SEQ ID NO: 2437071 - RNA, 19 nt, Artificial Sequence
  Description of Artificial Sequence: Synthetic oligonucleotide
caaggggugauuucuccga

SEQ ID NO: 2437072 - RNA, 19 nt, Artificial Sequence
  Description of Artificial Sequence: Synthetic oligonucleotide
gggaauaccacgauuccca

SEQ ID NO: 2437073 - RNA, 19 nt, Artificial Sequence
  Description of Artificial Sequence: Synthetic oligonucleotide
ggugauuucuccgacgcga

SEQ ID NO: 2437074 - RNA, 19 nt, Artificial Sequence
  Description of Artificial Sequence: Synthetic oligonucleotide
ugugugaccaaggggugau

SEQ ID NO: 2437075 - RNA, 19 nt, Artificial Sequence
  Description of Artificial Sequence: Synthetic oligonucleotide
acguggaggagcuuccuuu

SEQ ID NO: 2437076 - RNA, 19 nt, Artificial Sequence
  Description of Artificial Sequence: Synthetic oligonucleotide
ggaauaccacgauucccag

SEQ ID NO: 2437077 - RNA, 19 nt, Artificial Sequence
  Description of Artificial Sequence: Synthetic oligonucleotide
ugugaccaaggggugauuu

SEQ ID NO: 2437078 - RNA, 19 nt, Artificial Sequence
  Description of Artificial Sequence: Synthetic oligonucleotide
ucccacaacaaaggcagau

SEQ ID NO: 2437079 - RNA, 19 nt, Artificial Sequence
  Description of Artificial Sequence: Synthetic oligonucleotide
cugcuccucauuaccuagc

SEQ ID NO: 2437080 - RNA, 19 nt, Artificial Sequence
  Description of Artificial Sequence: Synthetic oligonucleotide
uaccuagcuccugagcaga

SEQ ID NO: 2437081 - RNA, 19 nt, Artificial Sequence
  Description of Artificial Sequence: Synthetic oligonucleotide
uaccacgauucccagucuu

SEQ ID NO: 2437082 - RNA, 19 nt, Artificial Sequence
  Description of Artificial Sequence: Synthetic oligonucleotide
aucagacagggauguacaa

SEQ ID NO: 2437083 - RNA, 19 nt, Artificial Sequence
  Description of Artificial Sequence: Synthetic oligonucleotide
cagguagcuuguaguacug

SEQ ID NO: 2437084 - RNA, 19 nt, Artificial Sequence
  Description of Artificial Sequence: Synthetic oligonucleotide
gccggaucugucuguagcg

SEQ ID NO: 2437085 - RNA, 19 nt, Artificial Sequence
  Description of Artificial Sequence: Synthetic oligonucleotide
gcagauaaacuccuugaaa

SEQ ID NO: 2437086 - RNA, 19 nt, Artificial Sequence
  Description of Artificial Sequence: Synthetic oligonucleotide
caccucgguugccauaccc

SEQ ID NO: 2437087 - RNA, 19 nt, Artificial Sequence
  Description of Artificial Sequence: Synthetic oligonucleotide
gucauaaaugccccaggua

SEQ ID NO: 2437088 - RNA, 19 nt, Artificial Sequence
  Description of Artificial Sequence: Synthetic oligonucleotide
cagcaguccagccacucuc

SEQ ID NO: 2437089 - RNA, 19 nt, Artificial Sequence
  Description of Artificial Sequence: Synthetic oligonucleotide
ucuccccggaaacucuuau

SEQ ID NO: 2437090 - RNA, 19 nt, Artificial Sequence
  Description of Artificial Sequence: Synthetic oligonucleotide
aguccgguuccaaagugca

SEQ ID NO: 2437091 - RNA, 19 nt, Artificial Sequence
  Description of Artificial Sequence: Synthetic oligonucleotide
gugauuucuccgacgcgag

SEQ ID NO: 2437092 - RNA, 19 nt, Artificial Sequence
  Description of Artificial Sequence: Synthetic oligonucleotide
ccaaggggugauuucuccg

SEQ ID NO: 2437093 - RNA, 19 nt, Artificial Sequence
  Description of Artificial Sequence: Synthetic oligonucleotide
uuucuccccggaaacucuu

SEQ ID NO: 2437094 - RNA, 19 nt, Artificial Sequence
  Description of Artificial Sequence: Synthetic oligonucleotide
aaguggccccuuguauauc

SEQ ID NO: 2437095 - RNA, 19 nt, Artificial Sequence
  Description of Artificial Sequence: Synthetic oligonucleotide
gcuuguaguacugagucaa

SEQ ID NO: 2437096 - RNA, 19 nt, Artificial Sequence
  Description of Artificial Sequence: Synthetic oligonucleotide
gaaguggccccuuguauau

SEQ ID NO: 2437097 - RNA, 19 nt, Artificial Sequence
  Description of Artificial Sequence: Synthetic oligonucleotide
augcccagucuucuugcca

SEQ ID NO: 2437098 - RNA, 19 nt, Artificial Sequence
  Description of Artificial Sequence: Synthetic oligonucleotide
cagucacacagcaguccag

SEQ ID NO: 2437099 - RNA, 19 nt, Artificial Sequence
  Description of Artificial Sequence: Synthetic oligonucleotide
ggcuuuccgaagcaccgag

SEQ ID NO: 2437100 - RNA, 19 nt, Artificial Sequence
  Description of Artificial Sequence: Synthetic oligonucleotide
auguacaaggccggaucug

SEQ ID NO: 2437101 - RNA, 19 nt, Artificial Sequence
  Description of Artificial Sequence: Synthetic oligonucleotide
cuuguauaucccagagcaa

SEQ ID NO: 2437102 - RNA, 19 nt, Artificial Sequence
  Description of Artificial Sequence: Synthetic oligonucleotide
ggucgucuaagaauaugug

SEQ ID NO: 2437103 - RNA, 19 nt, Artificial Sequence
  Description of Artificial Sequence: Synthetic oligonucleotide
gugaccaaggggugauuuc

SEQ ID NO: 2437104 - RNA, 19 nt, Artificial Sequence
  Description of Artificial Sequence: Synthetic oligonucleotide
gccauacccaucauucucc

SEQ ID NO: 2437105 - RNA, 19 nt, Artificial Sequence
  Description of Artificial Sequence: Synthetic oligonucleotide
cuaauguuucuccccggaa

SEQ ID NO: 2437106 - RNA, 19 nt, Artificial Sequence
  Description of Artificial Sequence: Synthetic oligonucleotide
uucuaccauuugugugacc

SEQ ID NO: 2437107 - RNA, 19 nt, Artificial Sequence
  Description of Artificial Sequence: Synthetic oligonucleotide
gagcagaaaggaagugcac

SEQ ID NO: 2437108 - RNA, 19 nt, Artificial Sequence
  Description of Artificial Sequence: Synthetic oligonucleotide
auuucuccgacgcgagcuu

SEQ ID NO: 2437109 - RNA, 19 nt, Artificial Sequence
  Description of Artificial Sequence: Synthetic oligonucleotide
ggcagauaaacuccuugaa

SEQ ID NO: 2437110 - RNA, 19 nt, Artificial Sequence
  Description of Artificial Sequence: Synthetic oligonucleotide
uucccacaacaaaggcaga

SEQ ID NO: 2437111 - RNA, 19 nt, Artificial Sequence
  Description of Artificial Sequence: Synthetic oligonucleotide
auaccacgauucccagucu

SEQ ID NO: 2437112 - RNA, 19 nt, Artificial Sequence
  Description of Artificial Sequence: Synthetic oligonucleotide
cugucaaccagaggcaaaa

SEQ ID NO: 2437113 - RNA, 19 nt, Artificial Sequence
  Description of Artificial Sequence: Synthetic oligonucleotide
cucgguugccauacccauc

SEQ ID NO: 2437114 - RNA, 19 nt, Artificial Sequence
  Description of Artificial Sequence: Synthetic oligonucleotide
gaauaccacgauucccagu

SEQ ID NO: 2437115 - RNA, 19 nt, Artificial Sequence
  Description of Artificial Sequence: Synthetic oligonucleotide
gccauuguucuucccucag

SEQ ID NO: 2437116 - RNA, 19 nt, Artificial Sequence
  Description of Artificial Sequence: Synthetic oligonucleotide
gggugauuucuccgacgcg

SEQ ID NO: 2437117 - RNA, 19 nt, Artificial Sequence
  Description of Artificial Sequence: Synthetic oligonucleotide
gcaguccgguuccaaagug

SEQ ID NO: 2437118 - RNA, 19 nt, Artificial Sequence
  Description of Artificial Sequence: Synthetic oligonucleotide
cccggaaacucuuauaaua

SEQ ID NO: 2437119 - RNA, 19 nt, Artificial Sequence
  Description of Artificial Sequence: Synthetic oligonucleotide
gcagaaaggaagugcacgu

SEQ ID NO: 2437120 - RNA, 19 nt, Artificial Sequence
  Description of Artificial Sequence: Synthetic oligonucleotide
accucgguugccauaccca

SEQ ID NO: 2437121 - RNA, 19 nt, Artificial Sequence
  Description of Artificial Sequence: Synthetic oligonucleotide
uucuccgacgcgagcuuuu

SEQ ID NO: 2437122 - RNA, 19 nt, Artificial Sequence
  Description of Artificial Sequence: Synthetic oligonucleotide
ccagucuuuccaucgugug

SEQ ID NO: 2437123 - RNA, 19 nt, Artificial Sequence
  Description of Artificial Sequence: Synthetic oligonucleotide
uguagcggucaagccauuu

SEQ ID NO: 2437124 - RNA, 19 nt, Artificial Sequence
  Description of Artificial Sequence: Synthetic oligonucleotide
uucuccccggaaacucuua

SEQ ID NO: 2437125 - RNA, 19 nt, Artificial Sequence
  Description of Artificial Sequence: Synthetic oligonucleotide
caucguguguaaaaccaau

SEQ ID NO: 2437126 - RNA, 19 nt, Artificial Sequence
  Description of Artificial Sequence: Synthetic oligonucleotide
guguucagauuagcaccag

SEQ ID NO: 2437127 - RNA, 19 nt, Artificial Sequence
  Description of Artificial Sequence: Synthetic oligonucleotide
cccuuguauaucccagagc

SEQ ID NO: 2437128 - RNA, 19 nt, Artificial Sequence
  Description of Artificial Sequence: Synthetic oligonucleotide
caccgagucuuugucauaa

SEQ ID NO: 2437129 - RNA, 19 nt, Artificial Sequence
  Description of Artificial Sequence: Synthetic oligonucleotide
aggccggaucugucuguag

SEQ ID NO: 2437130 - RNA, 19 nt, Artificial Sequence
  Description of Artificial Sequence: Synthetic oligonucleotide
caggcuggcuagcuaguga

SEQ ID NO: 2437131 - RNA, 19 nt, Artificial Sequence
  Description of Artificial Sequence: Synthetic oligonucleotide
acugucaaccagaggcaaa

SEQ ID NO: 2437132 - RNA, 19 nt, Artificial Sequence
  Description of Artificial Sequence: Synthetic oligonucleotide
gugugucuguuccaaacuu

SEQ ID NO: 2437133 - RNA, 19 nt, Artificial Sequence
  Description of Artificial Sequence: Synthetic oligonucleotide
auuggucgucuaagaauau

SEQ ID NO: 2437134 - RNA, 19 nt, Artificial Sequence
  Description of Artificial Sequence: Synthetic oligonucleotide
uuucuccgacgcgagcuuu

SEQ ID NO: 2437135 - RNA, 19 nt, Artificial Sequence
  Description of Artificial Sequence: Synthetic oligonucleotide
ggccccuuguauaucccag

SEQ ID NO: 2437136 - RNA, 19 nt, Artificial Sequence
  Description of Artificial Sequence: Synthetic oligonucleotide
ucuccgacgcgagcuuuuc

SEQ ID NO: 2437137 - RNA, 19 nt, Artificial Sequence
  Description of Artificial Sequence: Synthetic oligonucleotide
aucugucuguagcggucaa

SEQ ID NO: 2437138 - RNA, 19 nt, Artificial Sequence
  Description of Artificial Sequence: Synthetic oligonucleotide
ccgacgcgagcuuuucugc

SEQ ID NO: 2437139 - RNA, 19 nt, Artificial Sequence
  Description of Artificial Sequence: Synthetic oligonucleotide
ggaucugucuguagcgguc

SEQ ID NO: 2437140 - RNA, 19 nt, Artificial Sequence
  Description of Artificial Sequence: Synthetic oligonucleotide
gacgcgagcuuuucugcau

SEQ ID NO: 2437141 - RNA, 19 nt, Artificial Sequence
  Description of Artificial Sequence: Synthetic oligonucleotide
ccacucucugagcaguuuc

SEQ ID NO: 2437142 - RNA, 19 nt, Artificial Sequence
  Description of Artificial Sequence: Synthetic oligonucleotide
cacucucugagcaguuucu

SEQ ID NO: 2437143 - RNA, 19 nt, Artificial Sequence
  Description of Artificial Sequence: Synthetic oligonucleotide
guagcggucaagccauuuu

SEQ ID NO: 2437144 - RNA, 19 nt, Artificial Sequence
  Description of Artificial Sequence: Synthetic oligonucleotide
guacaaggccggaucuguc

SEQ ID NO: 2437145 - RNA, 19 nt, Artificial Sequence
  Description of Artificial Sequence: Synthetic oligonucleotide
ccuugaaaccgaguauauc

SEQ ID NO: 2437146 - RNA, 19 nt, Artificial Sequence
  Description of Artificial Sequence: Synthetic oligonucleotide
accacgauucccagucuuu

SEQ ID NO: 2437147 - RNA, 19 nt, Artificial Sequence
  Description of Artificial Sequence: Synthetic oligonucleotide
ccggaucugucuguagcgg

SEQ ID NO: 2437148 - RNA, 19 nt, Artificial Sequence
  Description of Artificial Sequence: Synthetic oligonucleotide
ccaaagcucugggaauacc

SEQ ID NO: 2437149 - RNA, 19 nt, Artificial Sequence
  Description of Artificial Sequence: Synthetic oligonucleotide
gcauugccacuagaacucc

SEQ ID NO: 2437150 - RNA, 19 nt, Artificial Sequence
  Description of Artificial Sequence: Synthetic oligonucleotide
ccagguagcuuguaguacu

SEQ ID NO: 2437151 - RNA, 19 nt, Artificial Sequence
  Description of Artificial Sequence: Synthetic oligonucleotide
gagcuuccuuucacuguca

SEQ ID NO: 2437152 - RNA, 19 nt, Artificial Sequence
  Description of Artificial Sequence: Synthetic oligonucleotide
guggccccuuguauauccc

SEQ ID NO: 2437153 - RNA, 19 nt, Artificial Sequence
  Description of Artificial Sequence: Synthetic oligonucleotide
cacugucaaccagaggcaa

SEQ ID NO: 2437154 - RNA, 19 nt, Artificial Sequence
  Description of Artificial Sequence: Synthetic oligonucleotide
ccggaaacucuuauaauau

SEQ ID NO: 2437155 - RNA, 19 nt, Artificial Sequence
  Description of Artificial Sequence: Synthetic oligonucleotide
gcuagcuagugagaguaua

SEQ ID NO: 2437156 - RNA, 19 nt, Artificial Sequence
  Description of Artificial Sequence: Synthetic oligonucleotide
ccgaguauauccuaauguu

SEQ ID NO: 2437157 - RNA, 19 nt, Artificial Sequence
  Description of Artificial Sequence: Synthetic oligonucleotide
cccagguagcuuguaguac

SEQ ID NO: 2437158 - RNA, 19 nt, Artificial Sequence
  Description of Artificial Sequence: Synthetic oligonucleotide
uccaucagacagggaugua

SEQ ID NO: 2437159 - RNA, 19 nt, Artificial Sequence
  Description of Artificial Sequence: Synthetic oligonucleotide
gcgagcuuuucugcauugc

SEQ ID NO: 2437160 - RNA, 19 nt, Artificial Sequence
  Description of Artificial Sequence: Synthetic oligonucleotide
cuggcuagcuagugagagu

SEQ ID NO: 2437161 - RNA, 19 nt, Artificial Sequence
  Description of Artificial Sequence: Synthetic oligonucleotide
cuccccggaaacucuuaua

SEQ ID NO: 2437162 - RNA, 19 nt, Artificial Sequence
  Description of Artificial Sequence: Synthetic oligonucleotide
ccaucguguguaaaaccaa

SEQ ID NO: 2437163 - RNA, 19 nt, Artificial Sequence
  Description of Artificial Sequence: Synthetic oligonucleotide
gccccuuguauaucccaga

SEQ ID NO: 2437164 - RNA, 19 nt, Artificial Sequence
  Description of Artificial Sequence: Synthetic oligonucleotide
ccacgauucccagucuuuc

SEQ ID NO: 2437165 - RNA, 19 nt, Artificial Sequence
  Description of Artificial Sequence: Synthetic oligonucleotide
ccauggcaaccaaagcaga

SEQ ID NO: 2437166 - RNA, 19 nt, Artificial Sequence
  Description of Artificial Sequence: Synthetic oligonucleotide
gugaacagucaugcaggcu

SEQ ID NO: 2437167 - RNA, 19 nt, Artificial Sequence
  Description of Artificial Sequence: Synthetic oligonucleotide
gcuccugagcagaaaggaa

SEQ ID NO: 2437168 - RNA, 19 nt, Artificial Sequence
  Description of Artificial Sequence: Synthetic oligonucleotide
cucugggaauaccacgauu

SEQ ID NO: 2437169 - RNA, 19 nt, Artificial Sequence
  Description of Artificial Sequence: Synthetic oligonucleotide
cccagucuucuugccauug

SEQ ID NO: 2437170 - RNA, 19 nt, Artificial Sequence
  Description of Artificial Sequence: Synthetic oligonucleotide
ccucauuaccuagcuccug

SEQ ID NO: 2437171 - RNA, 19 nt, Artificial Sequence
  Description of Artificial Sequence: Synthetic oligonucleotide
caaggccggaucugucugu

SEQ ID NO: 2437172 - RNA, 19 nt, Artificial Sequence
  Description of Artificial Sequence: Synthetic oligonucleotide
gccccagguagcuuguagu

SEQ ID NO: 2437173 - RNA, 19 nt, Artificial Sequence
  Description of Artificial Sequence: Synthetic oligonucleotide
accuagcuccugagcagaa

SEQ ID NO: 2437174 - RNA, 19 nt, Artificial Sequence
  Description of Artificial Sequence: Synthetic oligonucleotide
ccagcaguccgguuccaaa

SEQ ID NO: 2437175 - RNA, 19 nt, Artificial Sequence
  Description of Artificial Sequence: Synthetic oligonucleotide
ccgguuccaaagugcauaa

SEQ ID NO: 2437176 - RNA, 19 nt, Artificial Sequence
  Description of Artificial Sequence: Synthetic oligonucleotide
caucaucaguguucagauu

SEQ ID NO: 2437177 - RNA, 19 nt, Artificial Sequence
  Description of Artificial Sequence: Synthetic oligonucleotide
cauacccaucauucuccau

SEQ ID NO: 2437178 - RNA, 19 nt, Artificial Sequence
  Description of Artificial Sequence: Synthetic oligonucleotide
cgaguauauccuaauguuu

SEQ ID NO: 2437179 - RNA, 19 nt, Artificial Sequence
  Description of Artificial Sequence: Synthetic oligonucleotide
gggcuuuccgaagcaccga

SEQ ID NO: 2437180 - RNA, 19 nt, Artificial Sequence
  Description of Artificial Sequence: Synthetic oligonucleotide
ggcuggcuagcuagugaga

SEQ ID NO: 2437181 - RNA, 19 nt, Artificial Sequence
  Description of Artificial Sequence: Synthetic oligonucleotide
cccacaacaaaggcagaua

SEQ ID NO: 2437182 - RNA, 19 nt, Artificial Sequence
  Description of Artificial Sequence: Synthetic oligonucleotide
gcaccucgguugccauacc

SEQ ID NO: 2437183 - RNA, 19 nt, Artificial Sequence
  Description of Artificial Sequence: Synthetic oligonucleotide
ccgaagcaccgagucuuug

SEQ ID NO: 2437184 - RNA, 19 nt, Artificial Sequence
  Description of Artificial Sequence: Synthetic oligonucleotide
ccauuguucuucccucagu

SEQ ID NO: 2437185 - RNA, 19 nt, Artificial Sequence
  Description of Artificial Sequence: Synthetic oligonucleotide
cgacgcgagcuuuucugca

SEQ ID NO: 2437186 - RNA, 19 nt, Artificial Sequence
  Description of Artificial Sequence: Synthetic oligonucleotide
cgaagcaccgagucuuugu

SEQ ID NO: 2437187 - RNA, 19 nt, Artificial Sequence
  Description of Artificial Sequence: Synthetic oligonucleotide
cuccgacgcgagcuuuucu

SEQ ID NO: 2437188 - RNA, 19 nt, Artificial Sequence
  Description of Artificial Sequence: Synthetic oligonucleotide
cacguggaggagcuuccuu

SEQ ID NO: 2437189 - RNA, 19 nt, Artificial Sequence
  Description of Artificial Sequence: Synthetic oligonucleotide
gggauguacaaggccggau

SEQ ID NO: 2437190 - RNA, 19 nt, Artificial Sequence
  Description of Artificial Sequence: Synthetic oligonucleotide
ccucgguugccauacccau

SEQ ID NO: 2437191 - RNA, 19 nt, Artificial Sequence
  Description of Artificial Sequence: Synthetic oligonucleotide
gcucugggaauaccacgau

SEQ ID NO: 2437192 - RNA, 19 nt, Artificial Sequence
  Description of Artificial Sequence: Synthetic oligonucleotide
gcaccgagucuuugucaua

SEQ ID NO: 2437193 - RNA, 19 nt, Artificial Sequence
  Description of Artificial Sequence: Synthetic oligonucleotide
ccagucuucuugccauugu

SEQ ID NO: 2437194 - RNA, 19 nt, Artificial Sequence
  Description of Artificial Sequence: Synthetic oligonucleotide
gcuuuccgaagcaccgagu

SEQ ID NO: 2437195 - RNA, 19 nt, Artificial Sequence
  Description of Artificial Sequence: Synthetic oligonucleotide
guccgguuccaaagugcau

SEQ ID NO: 2437196 - RNA, 19 nt, Artificial Sequence
  Description of Artificial Sequence: Synthetic oligonucleotide
cggaaacucuuauaauauu

SEQ ID NO: 2437197 - RNA, 19 nt, Artificial Sequence
  Description of Artificial Sequence: Synthetic oligonucleotide
cggaucugucuguagcggu

SEQ ID NO: 2437198 - RNA, 19 nt, Artificial Sequence
  Description of Artificial Sequence: Synthetic oligonucleotide
ccccggaaacucuuauaau

SEQ ID NO: 2437199 - RNA, 19 nt, Artificial Sequence
  Description of Artificial Sequence: Synthetic oligonucleotide
ggcuagcuagugagaguau

SEQ ID NO: 2437200 - RNA, 19 nt, Artificial Sequence
  Description of Artificial Sequence: Synthetic oligonucleotide
cgauucccagucuuuccau

SEQ ID NO: 2437201 - RNA, 19 nt, Artificial Sequence
  Description of Artificial Sequence: Synthetic oligonucleotide
gugugaccaaggggugauu

SEQ ID NO: 2437202 - RNA, 19 nt, Artificial Sequence
  Description of Artificial Sequence: Synthetic oligonucleotide
cuguagcggucaagccauu

SEQ ID NO: 2437203 - RNA, 19 nt, Artificial Sequence
  Description of Artificial Sequence: Synthetic oligonucleotide
gcacguggaggagcuuccu

SEQ ID NO: 2437204 - RNA, 19 nt, Artificial Sequence
  Description of Artificial Sequence: Synthetic oligonucleotide
cccagagcaauuggacuuu

SEQ ID NO: 2437205 - RNA, 19 nt, Artificial Sequence
  Description of Artificial Sequence: Synthetic oligonucleotide
gcccagucuucuugccauu

SEQ ID NO: 2437206 - RNA, 19 nt, Artificial Sequence
  Description of Artificial Sequence: Synthetic oligonucleotide
cgguugccauacccaucau

SEQ ID NO: 2437207 - RNA, 19 nt, Artificial Sequence
  Description of Artificial Sequence: Synthetic oligonucleotide
uuguauuugucauagaugg

SEQ ID NO: 2437208 - RNA, 19 nt, Artificial Sequence
  Description of Artificial Sequence: Synthetic oligonucleotide
agaauauagaagucgaacc

SEQ ID NO: 2437209 - RNA, 19 nt, Artificial Sequence
  Description of Artificial Sequence: Synthetic oligonucleotide
aauuggaauggguacgucc

SEQ ID NO: 2437210 - RNA, 19 nt, Artificial Sequence
  Description of Artificial Sequence: Synthetic oligonucleotide
ucuacguagaccuugaaca

SEQ ID NO: 2437211 - RNA, 19 nt, Artificial Sequence
  Description of Artificial Sequence: Synthetic oligonucleotide
auaucuguagcccaaaauc

SEQ ID NO: 2437212 - RNA, 19 nt, Artificial Sequence
  Description of Artificial Sequence: Synthetic oligonucleotide
aauggguacguccucaacg

SEQ ID NO: 2437213 - RNA, 19 nt, Artificial Sequence
  Description of Artificial Sequence: Synthetic oligonucleotide
aguaaauuggaauggguac

SEQ ID NO: 2437214 - RNA, 19 nt, Artificial Sequence
  Description of Artificial Sequence: Synthetic oligonucleotide
agaagucgaacccauaggc

SEQ ID NO: 2437215 - RNA, 19 nt, Artificial Sequence
  Description of Artificial Sequence: Synthetic oligonucleotide
aggauacuuaugcagaggc

SEQ ID NO: 2437216 - RNA, 19 nt, Artificial Sequence
  Description of Artificial Sequence: Synthetic oligonucleotide
gaauauagaagucgaaccc

SEQ ID NO: 2437217 - RNA, 19 nt, Artificial Sequence
  Description of Artificial Sequence: Synthetic oligonucleotide
cuugagaauauagaagucg

SEQ ID NO: 2437218 - RNA, 19 nt, Artificial Sequence
  Description of Artificial Sequence: Synthetic oligonucleotide
ucugggaugacaaaacccu

SEQ ID NO: 2437219 - RNA, 19 nt, Artificial Sequence
  Description of Artificial Sequence: Synthetic oligonucleotide
uugagaauauagaagucga

SEQ ID NO: 2437220 - RNA, 19 nt, Artificial Sequence
  Description of Artificial Sequence: Synthetic oligonucleotide
aagucgaacccauaggccu

SEQ ID NO: 2437221 - RNA, 19 nt, Artificial Sequence
  Description of Artificial Sequence: Synthetic oligonucleotide
uuuccaagcaacccacagg

SEQ ID NO: 2437222 - RNA, 19 nt, Artificial Sequence
  Description of Artificial Sequence: Synthetic oligonucleotide
auggguacguccucaacgc

SEQ ID NO: 2437223 - RNA, 19 nt, Artificial Sequence
  Description of Artificial Sequence: Synthetic oligonucleotide
aauauagaagucgaaccca

SEQ ID NO: 2437224 - RNA, 19 nt, Artificial Sequence
  Description of Artificial Sequence: Synthetic oligonucleotide
aaaucacgcccucuccgcc

SEQ ID NO: 2437225 - RNA, 19 nt, Artificial Sequence
  Description of Artificial Sequence: Synthetic oligonucleotide
aacgcguucgcgcugcccg

SEQ ID NO: 2437226 - RNA, 19 nt, Artificial Sequence
  Description of Artificial Sequence: Synthetic oligonucleotide
uacaggauacuuaugcaga

SEQ ID NO: 2437227 - RNA, 19 nt, Artificial Sequence
  Description of Artificial Sequence: Synthetic oligonucleotide
uagaagucgaacccauagg

SEQ ID NO: 2437228 - RNA, 19 nt, Artificial Sequence
  Description of Artificial Sequence: Synthetic oligonucleotide
acuguaaaguucccgagug

SEQ ID NO: 2437229 - RNA, 19 nt, Artificial Sequence
  Description of Artificial Sequence: Synthetic oligonucleotide
uaaaguucccgagugaaca

SEQ ID NO: 2437230 - RNA, 19 nt, Artificial Sequence
  Description of Artificial Sequence: Synthetic oligonucleotide
guaaauuggaauggguacg

SEQ ID NO: 2437231 - RNA, 19 nt, Artificial Sequence
  Description of Artificial Sequence: Synthetic oligonucleotide
uaguaaauuggaaugggua

SEQ ID NO: 2437232 - RNA, 19 nt, Artificial Sequence
  Description of Artificial Sequence: Synthetic oligonucleotide
guacaggauacuuaugcag

SEQ ID NO: 2437233 - RNA, 19 nt, Artificial Sequence
  Description of Artificial Sequence: Synthetic oligonucleotide
gaagugagcgggcaaacgc

SEQ ID NO: 2437234 - RNA, 19 nt, Artificial Sequence
  Description of Artificial Sequence: Synthetic oligonucleotide
aaucacgcccucuccgccc

SEQ ID NO: 2437235 - RNA, 19 nt, Artificial Sequence
  Description of Artificial Sequence: Synthetic oligonucleotide
uuccacaccuucuuuaccc

SEQ ID NO: 2437236 - RNA, 19 nt, Artificial Sequence
  Description of Artificial Sequence: Synthetic oligonucleotide
gagaauauagaagucgaac

SEQ ID NO: 2437237 - RNA, 19 nt, Artificial Sequence
  Description of Artificial Sequence: Synthetic oligonucleotide
gaacccauaggccucauca

SEQ ID NO: 2437238 - RNA, 19 nt, Artificial Sequence
  Description of Artificial Sequence: Synthetic oligonucleotide
cucauggucacagucacgg

SEQ ID NO: 2437239 - RNA, 19 nt, Artificial Sequence
  Description of Artificial Sequence: Synthetic oligonucleotide
aaaguucccgagugaacag

SEQ ID NO: 2437240 - RNA, 19 nt, Artificial Sequence
  Description of Artificial Sequence: Synthetic oligonucleotide
aaacccuuguauuugucau

SEQ ID NO: 2437241 - RNA, 19 nt, Artificial Sequence
  Description of Artificial Sequence: Synthetic oligonucleotide
uuuacccucguugaaagcu

SEQ ID NO: 2437242 - RNA, 19 nt, Artificial Sequence
  Description of Artificial Sequence: Synthetic oligonucleotide
ucguucuuccuccagcgag

SEQ ID NO: 2437243 - RNA, 19 nt, Artificial Sequence
  Description of Artificial Sequence: Synthetic oligonucleotide
uguacaggauacuuaugca

SEQ ID NO: 2437244 - RNA, 19 nt, Artificial Sequence
  Description of Artificial Sequence: Synthetic oligonucleotide
caaaaucacgcccucuccg

SEQ ID NO: 2437245 - RNA, 19 nt, Artificial Sequence
  Description of Artificial Sequence: Synthetic oligonucleotide
ugccaaacuuggaacacag

SEQ ID NO: 2437246 - RNA, 19 nt, Artificial Sequence
  Description of Artificial Sequence: Synthetic oligonucleotide
uccagagucaggccaaccc

SEQ ID NO: 2437247 - RNA, 19 nt, Artificial Sequence
  Description of Artificial Sequence: Synthetic oligonucleotide
agcgcaagaagugagcggg

SEQ ID NO: 2437248 - RNA, 19 nt, Artificial Sequence
  Description of Artificial Sequence: Synthetic oligonucleotide
accuucuuuacccucguug

SEQ ID NO: 2437249 - RNA, 19 nt, Artificial Sequence
  Description of Artificial Sequence: Synthetic oligonucleotide
cuggaggguaguaaauugg

SEQ ID NO: 2437250 - RNA, 19 nt, Artificial Sequence
  Description of Artificial Sequence: Synthetic oligonucleotide
uguagugcacuggagucgg

SEQ ID NO: 2437251 - RNA, 19 nt, Artificial Sequence
  Description of Artificial Sequence: Synthetic oligonucleotide
cuuaugcagaggcauugcg

SEQ ID NO: 2437252 - RNA, 19 nt, Artificial Sequence
  Description of Artificial Sequence: Synthetic oligonucleotide
gucuugagaauauagaagu

SEQ ID NO: 2437253 - RNA, 19 nt, Artificial Sequence
  Description of Artificial Sequence: Synthetic oligonucleotide
aacccacucugccucugcc

SEQ ID NO: 2437254 - RNA, 19 nt, Artificial Sequence
  Description of Artificial Sequence: Synthetic oligonucleotide
ugggaugacaaaacccuug

SEQ ID NO: 2437255 - RNA, 19 nt, Artificial Sequence
  Description of Artificial Sequence: Synthetic oligonucleotide
uggaggguaguaaauugga

SEQ ID NO: 2437256 - RNA, 19 nt, Artificial Sequence
  Description of Artificial Sequence: Synthetic oligonucleotide
acaggauacuuaugcagag

SEQ ID NO: 2437257 - RNA, 19 nt, Artificial Sequence
  Description of Artificial Sequence: Synthetic oligonucleotide
cuuguagugcacuggaguc

SEQ ID NO: 2437258 - RNA, 19 nt, Artificial Sequence
  Description of Artificial Sequence: Synthetic oligonucleotide
uguaaaguucccgagugaa

SEQ ID NO: 2437259 - RNA, 19 nt, Artificial Sequence
  Description of Artificial Sequence: Synthetic oligonucleotide
uuguuggcauaucuguagc

SEQ ID NO: 2437260 - RNA, 19 nt, Artificial Sequence
  Description of Artificial Sequence: Synthetic oligonucleotide
uccagcgagcgcaagaagu

SEQ ID NO: 2437261 - RNA, 19 nt, Artificial Sequence
  Description of Artificial Sequence: Synthetic oligonucleotide
aacagcugaggcuuccaca

SEQ ID NO: 2437262 - RNA, 19 nt, Artificial Sequence
  Description of Artificial Sequence: Synthetic oligonucleotide
gaugccuugccgcagccgc

SEQ ID NO: 2437263 - RNA, 19 nt, Artificial Sequence
  Description of Artificial Sequence: Synthetic oligonucleotide
cuguagcccaaaaucacgc

SEQ ID NO: 2437264 - RNA, 19 nt, Artificial Sequence
  Description of Artificial Sequence: Synthetic oligonucleotide
uucagguccaugccaaacu

SEQ ID NO: 2437265 - RNA, 19 nt, Artificial Sequence
  Description of Artificial Sequence: Synthetic oligonucleotide
ucacuguaaaguucccgag

SEQ ID NO: 2437266 - RNA, 19 nt, Artificial Sequence
  Description of Artificial Sequence: Synthetic oligonucleotide
augacaaaacccuuguauu

SEQ ID NO: 2437267 - RNA, 19 nt, Artificial Sequence
  Description of Artificial Sequence: Synthetic oligonucleotide
uaggccucaucaaugagau

SEQ ID NO: 2437268 - RNA, 19 nt, Artificial Sequence
  Description of Artificial Sequence: Synthetic oligonucleotide
aagugagcgggcaaacgcg

SEQ ID NO: 2437269 - RNA, 19 nt, Artificial Sequence
  Description of Artificial Sequence: Synthetic oligonucleotide
uagaccuugaacaggggua

SEQ ID NO: 2437270 - RNA, 19 nt, Artificial Sequence
  Description of Artificial Sequence: Synthetic oligonucleotide
ucuugagaauauagaaguc

SEQ ID NO: 2437271 - RNA, 19 nt, Artificial Sequence
  Description of Artificial Sequence: Synthetic oligonucleotide
ugucguuguuggcauaucu

SEQ ID NO: 2437272 - RNA, 19 nt, Artificial Sequence
  Description of Artificial Sequence: Synthetic oligonucleotide
aagaagugagcgggcaaac

SEQ ID NO: 2437273 - RNA, 19 nt, Artificial Sequence
  Description of Artificial Sequence: Synthetic oligonucleotide
ucuccguucagggucauca

SEQ ID NO: 2437274 - RNA, 19 nt, Artificial Sequence
  Description of Artificial Sequence: Synthetic oligonucleotide
uuguagugcacuggagucg

SEQ ID NO: 2437275 - RNA, 19 nt, Artificial Sequence
  Description of Artificial Sequence: Synthetic oligonucleotide
cuacguagaccuugaacag

SEQ ID NO: 2437276 - RNA, 19 nt, Artificial Sequence
  Description of Artificial Sequence: Synthetic oligonucleotide
uguuggcauaucuguagcc

SEQ ID NO: 2437277 - RNA, 19 nt, Artificial Sequence
  Description of Artificial Sequence: Synthetic oligonucleotide
ugagaauauagaagucgaa

SEQ ID NO: 2437278 - RNA, 19 nt, Artificial Sequence
  Description of Artificial Sequence: Synthetic oligonucleotide
ugacaaaacccuuguauuu

SEQ ID NO: 2437279 - RNA, 19 nt, Artificial Sequence
  Description of Artificial Sequence: Synthetic oligonucleotide
cacaccuucuuuacccucg

SEQ ID NO: 2437280 - RNA, 19 nt, Artificial Sequence
  Description of Artificial Sequence: Synthetic oligonucleotide
ucucacuguaaaguucccg

SEQ ID NO: 2437281 - RNA, 19 nt, Artificial Sequence
  Description of Artificial Sequence: Synthetic oligonucleotide
uacguagaccuugaacagg

SEQ ID NO: 2437282 - RNA, 19 nt, Artificial Sequence
  Description of Artificial Sequence: Synthetic oligonucleotide
uaaauuggaauggguacgu

SEQ ID NO: 2437283 - RNA, 19 nt, Artificial Sequence
  Description of Artificial Sequence: Synthetic oligonucleotide
agguguacaggauacuuau

SEQ ID NO: 2437284 - RNA, 19 nt, Artificial Sequence
  Description of Artificial Sequence: Synthetic oligonucleotide
cauggucacagucacggug

SEQ ID NO: 2437285 - RNA, 19 nt, Artificial Sequence
  Description of Artificial Sequence: Synthetic oligonucleotide
uuggcauaucuguagccca

SEQ ID NO: 2437286 - RNA, 19 nt, Artificial Sequence
  Description of Artificial Sequence: Synthetic oligonucleotide
gaacuuggccccgugaggc

SEQ ID NO: 2437287 - RNA, 19 nt, Artificial Sequence
  Description of Artificial Sequence: Synthetic oligonucleotide
acuuaugcagaggcauugc

SEQ ID NO: 2437288 - RNA, 19 nt, Artificial Sequence
  Description of Artificial Sequence: Synthetic oligonucleotide
acguagaccuugaacaggg

SEQ ID NO: 2437289 - RNA, 19 nt, Artificial Sequence
  Description of Artificial Sequence: Synthetic oligonucleotide
uacuuaugcagaggcauug

SEQ ID NO: 2437290 - RNA, 19 nt, Artificial Sequence
  Description of Artificial Sequence: Synthetic oligonucleotide
uguagcccaaaaucacgcc

SEQ ID NO: 2437291 - RNA, 19 nt, Artificial Sequence
  Description of Artificial Sequence: Synthetic oligonucleotide
guuggcauaucuguagccc

SEQ ID NO: 2437292 - RNA, 19 nt, Artificial Sequence
  Description of Artificial Sequence: Synthetic oligonucleotide
gaagucgaacccauaggcc

SEQ ID NO: 2437293 - RNA, 19 nt, Artificial Sequence
  Description of Artificial Sequence: Synthetic oligonucleotide
uuuuccuccaggagccucu

SEQ ID NO: 2437294 - RNA, 19 nt, Artificial Sequence
  Description of Artificial Sequence: Synthetic oligonucleotide
gguaguaaauuggaauggg

SEQ ID NO: 2437295 - RNA, 19 nt, Artificial Sequence
  Description of Artificial Sequence: Synthetic oligonucleotide
gaaccugcuccugaagccg

SEQ ID NO: 2437296 - RNA, 19 nt, Artificial Sequence
  Description of Artificial Sequence: Synthetic oligonucleotide
aaauuggaauggguacguc

SEQ ID NO: 2437297 - RNA, 19 nt, Artificial Sequence
  Description of Artificial Sequence: Synthetic oligonucleotide
cucacuguaaaguucccga

SEQ ID NO: 2437298 - RNA, 19 nt, Artificial Sequence
  Description of Artificial Sequence: Synthetic oligonucleotide
cucuacguagaccuugaac

SEQ ID NO: 2437299 - RNA, 19 nt, Artificial Sequence
  Description of Artificial Sequence: Synthetic oligonucleotide
acccuuguauuugucauag

SEQ ID NO: 2437300 - RNA, 19 nt, Artificial Sequence
  Description of Artificial Sequence: Synthetic oligonucleotide
ggcaaacgcgcguagaugc

SEQ ID NO: 2437301 - RNA, 19 nt, Artificial Sequence
  Description of Artificial Sequence: Synthetic oligonucleotide
caacccacagggaaggcug

SEQ ID NO: 2437302 - RNA, 19 nt, Artificial Sequence
  Description of Artificial Sequence: Synthetic oligonucleotide
auuggaauggguacguccu

SEQ ID NO: 2437303 - RNA, 19 nt, Artificial Sequence
  Description of Artificial Sequence: Synthetic oligonucleotide
ucaucaggguguagcuggg

SEQ ID NO: 2437304 - RNA, 19 nt, Artificial Sequence
  Description of Artificial Sequence: Synthetic oligonucleotide
cacggugaacuucuugucc

SEQ ID NO: 2437305 - RNA, 19 nt, Artificial Sequence
  Description of Artificial Sequence: Synthetic oligonucleotide
uacguccucaacgcguucg

SEQ ID NO: 2437306 - RNA, 19 nt, Artificial Sequence
  Description of Artificial Sequence: Synthetic oligonucleotide
gaacacagguccuccuuug

SEQ ID NO: 2437307 - RNA, 19 nt, Artificial Sequence
  Description of Artificial Sequence: Synthetic oligonucleotide
cuugaacagggguacagga

SEQ ID NO: 2437308 - RNA, 19 nt, Artificial Sequence
  Description of Artificial Sequence: Synthetic oligonucleotide
gagcgcaagaagugagcgg

SEQ ID NO: 2437309 - RNA, 19 nt, Artificial Sequence
  Description of Artificial Sequence: Synthetic oligonucleotide
aaagccccugcugggacuc

SEQ ID NO: 2437310 - RNA, 19 nt, Artificial Sequence
  Description of Artificial Sequence: Synthetic oligonucleotide
uuuggggucuugagaauau

SEQ ID NO: 2437311 - RNA, 19 nt, Artificial Sequence
  Description of Artificial Sequence: Synthetic oligonucleotide
gauacuuaugcagaggcau

SEQ ID NO: 2437312 - RNA, 19 nt, Artificial Sequence
  Description of Artificial Sequence: Synthetic oligonucleotide
uagugcacuggagucggcg

SEQ ID NO: 2437313 - RNA, 19 nt, Artificial Sequence
  Description of Artificial Sequence: Synthetic oligonucleotide
cucuccgccccaaagcccc

SEQ ID NO: 2437314 - RNA, 19 nt, Artificial Sequence
  Description of Artificial Sequence: Synthetic oligonucleotide
agugagcgggcaaacgcgc

SEQ ID NO: 2437315 - RNA, 19 nt, Artificial Sequence
  Description of Artificial Sequence: Synthetic oligonucleotide
aggaucucacuguaaaguu

SEQ ID NO: 2437316 - RNA, 19 nt, Artificial Sequence
  Description of Artificial Sequence: Synthetic oligonucleotide
gaacagggguacaggaucc

SEQ ID NO: 2437317 - RNA, 19 nt, Artificial Sequence
  Description of Artificial Sequence: Synthetic oligonucleotide
uggguacguccucaacgcg

SEQ ID NO: 2437318 - RNA, 19 nt, Artificial Sequence
  Description of Artificial Sequence: Synthetic oligonucleotide
gaggcuuguagugcacugg

SEQ ID NO: 2437319 - RNA, 19 nt, Artificial Sequence
  Description of Artificial Sequence: Synthetic oligonucleotide
acguccucaacgcguucgc

SEQ ID NO: 2437320 - RNA, 19 nt, Artificial Sequence
  Description of Artificial Sequence: Synthetic oligonucleotide
agaagugagcgggcaaacg

SEQ ID NO: 2437321 - RNA, 19 nt, Artificial Sequence
  Description of Artificial Sequence: Synthetic oligonucleotide
auaggccucaucaaugaga

SEQ ID NO: 2437322 - RNA, 19 nt, Artificial Sequence
  Description of Artificial Sequence: Synthetic oligonucleotide
aacccauaggccucaucaa

SEQ ID NO: 2437323 - RNA, 19 nt, Artificial Sequence
  Description of Artificial Sequence: Synthetic oligonucleotide
uccucuacguagaccuuga

SEQ ID NO: 2437324 - RNA, 19 nt, Artificial Sequence
  Description of Artificial Sequence: Synthetic oligonucleotide
ugagcucaguggucaggcg

SEQ ID NO: 2437325 - RNA, 19 nt, Artificial Sequence
  Description of Artificial Sequence: Synthetic oligonucleotide
ucggcguucguucuuccuc

SEQ ID NO: 2437326 - RNA, 19 nt, Artificial Sequence
  Description of Artificial Sequence: Synthetic oligonucleotide
uccucaacgcguucgcgcu

SEQ ID NO: 2437327 - RNA, 19 nt, Artificial Sequence
  Description of Artificial Sequence: Synthetic oligonucleotide
aggauccuuuuccuccagg

SEQ ID NO: 2437328 - RNA, 19 nt, Artificial Sequence
  Description of Artificial Sequence: Synthetic oligonucleotide
cuuuacccucguugaaagc

SEQ ID NO: 2437329 - RNA, 19 nt, Artificial Sequence
  Description of Artificial Sequence: Synthetic oligonucleotide
agucacggugaacuucuug

SEQ ID NO: 2437330 - RNA, 19 nt, Artificial Sequence
  Description of Artificial Sequence: Synthetic oligonucleotide
cucgcuucagguccaugcc

SEQ ID NO: 2437331 - RNA, 19 nt, Artificial Sequence
  Description of Artificial Sequence: Synthetic oligonucleotide
gucacagucacggugaacu

SEQ ID NO: 2437332 - RNA, 19 nt, Artificial Sequence
  Description of Artificial Sequence: Synthetic oligonucleotide
aacccuuguauuugucaua

SEQ ID NO: 2437333 - RNA, 19 nt, Artificial Sequence
  Description of Artificial Sequence: Synthetic oligonucleotide
uugucuccguucaggguca

SEQ ID NO: 2437334 - RNA, 19 nt, Artificial Sequence
  Description of Artificial Sequence: Synthetic oligonucleotide
gucacggugaacuucuugu

SEQ ID NO: 2437335 - RNA, 19 nt, Artificial Sequence
  Description of Artificial Sequence: Synthetic oligonucleotide
guccucaacgcguucgcgc

SEQ ID NO: 2437336 - RNA, 19 nt, Artificial Sequence
  Description of Artificial Sequence: Synthetic oligonucleotide
guagaugccuugccgcagc

SEQ ID NO: 2437337 - RNA, 19 nt, Artificial Sequence
  Description of Artificial Sequence: Synthetic oligonucleotide
acagucacggugaacuucu

SEQ ID NO: 2437338 - RNA, 19 nt, Artificial Sequence
  Description of Artificial Sequence: Synthetic oligonucleotide
ucuugaacuuggccccgug

SEQ ID NO: 2437339 - RNA, 19 nt, Artificial Sequence
  Description of Artificial Sequence: Synthetic oligonucleotide
uacccucguugaaagcuug

SEQ ID NO: 2437340 - RNA, 19 nt, Artificial Sequence
  Description of Artificial Sequence: Synthetic oligonucleotide
uggaauggguacguccuca

SEQ ID NO: 2437341 - RNA, 19 nt, Artificial Sequence
  Description of Artificial Sequence: Synthetic oligonucleotide
cuuccacaccuucuuuacc

SEQ ID NO: 2437342 - RNA, 19 nt, Artificial Sequence
  Description of Artificial Sequence: Synthetic oligonucleotide
aggcuuguagugcacugga

SEQ ID NO: 2437343 - RNA, 19 nt, Artificial Sequence
  Description of Artificial Sequence: Synthetic oligonucleotide
caggauacuuaugcagagg

SEQ ID NO: 2437344 - RNA, 19 nt, Artificial Sequence
  Description of Artificial Sequence: Synthetic oligonucleotide
ccguucagggucaucaggg

SEQ ID NO: 2437345 - RNA, 19 nt, Artificial Sequence
  Description of Artificial Sequence: Synthetic oligonucleotide
caggccaacccacucugcc

SEQ ID NO: 2437346 - RNA, 19 nt, Artificial Sequence
  Description of Artificial Sequence: Synthetic oligonucleotide
ucacggugaacuucuuguc

SEQ ID NO: 2437347 - RNA, 19 nt, Artificial Sequence
  Description of Artificial Sequence: Synthetic oligonucleotide
gucaggccaacccacucug

SEQ ID NO: 2437348 - RNA, 19 nt, Artificial Sequence
  Description of Artificial Sequence: Synthetic oligonucleotide
cuggagucggcguucguuc

SEQ ID NO: 2437349 - RNA, 19 nt, Artificial Sequence
  Description of Artificial Sequence: Synthetic oligonucleotide
ccucguugaaagcuugucg

SEQ ID NO: 2437350 - RNA, 19 nt, Artificial Sequence
  Description of Artificial Sequence: Synthetic oligonucleotide
cucguugaaagcuugucgu

SEQ ID NO: 2437351 - RNA, 19 nt, Artificial Sequence
  Description of Artificial Sequence: Synthetic oligonucleotide
agugcacuggagucggcgu

SEQ ID NO: 2437352 - RNA, 19 nt, Artificial Sequence
  Description of Artificial Sequence: Synthetic oligonucleotide
ggcuugucuccguucaggg

SEQ ID NO: 2437353 - RNA, 19 nt, Artificial Sequence
  Description of Artificial Sequence: Synthetic oligonucleotide
uggcauaucuguagcccaa

SEQ ID NO: 2437354 - RNA, 19 nt, Artificial Sequence
  Description of Artificial Sequence: Synthetic oligonucleotide
guggucaccagcucucuuc

SEQ ID NO: 2437355 - RNA, 19 nt, Artificial Sequence
  Description of Artificial Sequence: Synthetic oligonucleotide
cuaggguccucauggucac

SEQ ID NO: 2437356 - RNA, 19 nt, Artificial Sequence
  Description of Artificial Sequence: Synthetic oligonucleotide
uucguucuuccuccagcga

SEQ ID NO: 2437357 - RNA, 19 nt, Artificial Sequence
  Description of Artificial Sequence: Synthetic oligonucleotide
uuacccucguugaaagcuu

SEQ ID NO: 2437358 - RNA, 19 nt, Artificial Sequence
  Description of Artificial Sequence: Synthetic oligonucleotide
gaauggguacguccucaac

SEQ ID NO: 2437359 - RNA, 19 nt, Artificial Sequence
  Description of Artificial Sequence: Synthetic oligonucleotide
auagauggcuugucuccgu

SEQ ID NO: 2437360 - RNA, 19 nt, Artificial Sequence
  Description of Artificial Sequence: Synthetic oligonucleotide
agucggcguucguucuucc

SEQ ID NO: 2437361 - RNA, 19 nt, Artificial Sequence
  Description of Artificial Sequence: Synthetic oligonucleotide
augagaucuaggguccuca

SEQ ID NO: 2437362 - RNA, 19 nt, Artificial Sequence
  Description of Artificial Sequence: Synthetic oligonucleotide
agccucuguuucucuacag

SEQ ID NO: 2437363 - RNA, 19 nt, Artificial Sequence
  Description of Artificial Sequence: Synthetic oligonucleotide
agcccaaaaucacgcccuc

SEQ ID NO: 2437364 - RNA, 19 nt, Artificial Sequence
  Description of Artificial Sequence: Synthetic oligonucleotide
agucgaacccauaggccuc

SEQ ID NO: 2437365 - RNA, 19 nt, Artificial Sequence
  Description of Artificial Sequence: Synthetic oligonucleotide
agcuugucguuguuggcau

SEQ ID NO: 2437366 - RNA, 19 nt, Artificial Sequence
  Description of Artificial Sequence: Synthetic oligonucleotide
agcaucccucgcuucaggu

SEQ ID NO: 2437367 - RNA, 19 nt, Artificial Sequence
  Description of Artificial Sequence: Synthetic oligonucleotide
uuggaauggguacguccuc

SEQ ID NO: 2437368 - RNA, 19 nt, Artificial Sequence
  Description of Artificial Sequence: Synthetic oligonucleotide
guugaaagcuugucguugu

SEQ ID NO: 2437369 - RNA, 19 nt, Artificial Sequence
  Description of Artificial Sequence: Synthetic oligonucleotide
gcgagcaagccucagcagc

SEQ ID NO: 2437370 - RNA, 19 nt, Artificial Sequence
  Description of Artificial Sequence: Synthetic oligonucleotide
aacgcgcguagaugccuug

SEQ ID NO: 2437371 - RNA, 19 nt, Artificial Sequence
  Description of Artificial Sequence: Synthetic oligonucleotide
ucguugaaagcuugucguu

SEQ ID NO: 2437372 - RNA, 19 nt, Artificial Sequence
  Description of Artificial Sequence: Synthetic oligonucleotide
acagguguacaggauacuu

SEQ ID NO: 2437373 - RNA, 19 nt, Artificial Sequence
  Description of Artificial Sequence: Synthetic oligonucleotide
ugggguugaucuugaacuu

SEQ ID NO: 2437374 - RNA, 19 nt, Artificial Sequence
  Description of Artificial Sequence: Synthetic oligonucleotide
uggucaggcguggucacca

SEQ ID NO: 2437375 - RNA, 19 nt, Artificial Sequence
  Description of Artificial Sequence: Synthetic oligonucleotide
guagaccuugaacaggggu

SEQ ID NO: 2437376 - RNA, 19 nt, Artificial Sequence
  Description of Artificial Sequence: Synthetic oligonucleotide
ugagaucuaggguccucau

SEQ ID NO: 2437377 - RNA, 19 nt, Artificial Sequence
  Description of Artificial Sequence: Synthetic oligonucleotide
agggguacaggauccuuuu

SEQ ID NO: 2437378 - RNA, 19 nt, Artificial Sequence
  Description of Artificial Sequence: Synthetic oligonucleotide
agcgagcgcaagaagugag

SEQ ID NO: 2437379 - RNA, 19 nt, Artificial Sequence
  Description of Artificial Sequence: Synthetic oligonucleotide
aguucccgagugaacagcu

SEQ ID NO: 2437380 - RNA, 19 nt, Artificial Sequence
  Description of Artificial Sequence: Synthetic oligonucleotide
ugaacagcugaggcuucca

SEQ ID NO: 2437381 - RNA, 19 nt, Artificial Sequence
  Description of Artificial Sequence: Synthetic oligonucleotide
aggccaacccacucugccu

SEQ ID NO: 2437382 - RNA, 19 nt, Artificial Sequence
  Description of Artificial Sequence: Synthetic oligonucleotide
cuccucuacguagaccuug

SEQ ID NO: 2437383 - RNA, 19 nt, Artificial Sequence
  Description of Artificial Sequence: Synthetic oligonucleotide
ccaaaaucacgcccucucc

SEQ ID NO: 2437384 - RNA, 19 nt, Artificial Sequence
  Description of Artificial Sequence: Synthetic oligonucleotide
caucaaugagaucuagggu

SEQ ID NO: 2437385 - RNA, 19 nt, Artificial Sequence
  Description of Artificial Sequence: Synthetic oligonucleotide
gcuuccacaccuucuuuac

SEQ ID NO: 2437386 - RNA, 19 nt, Artificial Sequence
  Description of Artificial Sequence: Synthetic oligonucleotide
cucaacgcguucgcgcugc

SEQ ID NO: 2437387 - RNA, 19 nt, Artificial Sequence
  Description of Artificial Sequence: Synthetic oligonucleotide
guaguaaauuggaaugggu

SEQ ID NO: 2437388 - RNA, 19 nt, Artificial Sequence
  Description of Artificial Sequence: Synthetic oligonucleotide
gagccucuguuucucuaca

SEQ ID NO: 2437389 - RNA, 19 nt, Artificial Sequence
  Description of Artificial Sequence: Synthetic oligonucleotide
uggacagaaccugcuccug

SEQ ID NO: 2437390 - RNA, 19 nt, Artificial Sequence
  Description of Artificial Sequence: Synthetic oligonucleotide
cuccguucagggucaucag

SEQ ID NO: 2437391 - RNA, 19 nt, Artificial Sequence
  Description of Artificial Sequence: Synthetic oligonucleotide
cacagucacggugaacuuc

SEQ ID NO: 2437392 - RNA, 19 nt, Artificial Sequence
  Description of Artificial Sequence: Synthetic oligonucleotide
acgcgcguagaugccuugc

SEQ ID NO: 2437393 - RNA, 19 nt, Artificial Sequence
  Description of Artificial Sequence: Synthetic oligonucleotide
cauaucuguagcccaaaau

SEQ ID NO: 2437394 - RNA, 19 nt, Artificial Sequence
  Description of Artificial Sequence: Synthetic oligonucleotide
ccucugggaugacaaaacc

SEQ ID NO: 2437395 - RNA, 19 nt, Artificial Sequence
  Description of Artificial Sequence: Synthetic oligonucleotide
ggagccucuguuucucuac

SEQ ID NO: 2437396 - RNA, 19 nt, Artificial Sequence
  Description of Artificial Sequence: Synthetic oligonucleotide
cuguaaaguucccgaguga

SEQ ID NO: 2437397 - RNA, 19 nt, Artificial Sequence
  Description of Artificial Sequence: Synthetic oligonucleotide
caagaagugagcgggcaaa

SEQ ID NO: 2437398 - RNA, 19 nt, Artificial Sequence
  Description of Artificial Sequence: Synthetic oligonucleotide
cccaaaaucacgcccucuc

SEQ ID NO: 2437399 - RNA, 19 nt, Artificial Sequence
  Description of Artificial Sequence: Synthetic oligonucleotide
uccgccccaaagccccugc

SEQ ID NO: 2437400 - RNA, 19 nt, Artificial Sequence
  Description of Artificial Sequence: Synthetic oligonucleotide
ggaucucacuguaaaguuc

SEQ ID NO: 2437401 - RNA, 19 nt, Artificial Sequence
  Description of Artificial Sequence: Synthetic oligonucleotide
cacagggaaggcugagcuc

SEQ ID NO: 2437402 - RNA, 19 nt, Artificial Sequence
  Description of Artificial Sequence: Synthetic oligonucleotide
cugaggcuuccacaccuuc

SEQ ID NO: 2437403 - RNA, 19 nt, Artificial Sequence
  Description of Artificial Sequence: Synthetic oligonucleotide
cagguguacaggauacuua

SEQ ID NO: 2437404 - RNA, 19 nt, Artificial Sequence
  Description of Artificial Sequence: Synthetic oligonucleotide
guccuggcgagcaagccuc

SEQ ID NO: 2437405 - RNA, 19 nt, Artificial Sequence
  Description of Artificial Sequence: Synthetic oligonucleotide
uucgcgcugcccguucuug

SEQ ID NO: 2437406 - RNA, 19 nt, Artificial Sequence
  Description of Artificial Sequence: Synthetic oligonucleotide
gcgcguagaugccuugccg

SEQ ID NO: 2437407 - RNA, 19 nt, Artificial Sequence
  Description of Artificial Sequence: Synthetic oligonucleotide
gugaacagcugaggcuucc

SEQ ID NO: 2437408 - RNA, 19 nt, Artificial Sequence
  Description of Artificial Sequence: Synthetic oligonucleotide
auacuuaugcagaggcauu

SEQ ID NO: 2437409 - RNA, 19 nt, Artificial Sequence
  Description of Artificial Sequence: Synthetic oligonucleotide
caucaggguguagcugggg

SEQ ID NO: 2437410 - RNA, 19 nt, Artificial Sequence
  Description of Artificial Sequence: Synthetic oligonucleotide
ccuugaacagggguacagg

SEQ ID NO: 2437411 - RNA, 19 nt, Artificial Sequence
  Description of Artificial Sequence: Synthetic oligonucleotide
cuuuggggucuugagaaua

SEQ ID NO: 2437412 - RNA, 19 nt, Artificial Sequence
  Description of Artificial Sequence: Synthetic oligonucleotide
cuucuuuacccucguugaa

SEQ ID NO: 2437413 - RNA, 19 nt, Artificial Sequence
  Description of Artificial Sequence: Synthetic oligonucleotide
cuuggccccgugaggcuug

SEQ ID NO: 2437414 - RNA, 19 nt, Artificial Sequence
  Description of Artificial Sequence: Synthetic oligonucleotide
ccaagcaacccacagggaa

SEQ ID NO: 2437415 - RNA, 19 nt, Artificial Sequence
  Description of Artificial Sequence: Synthetic oligonucleotide
gaucuaggguccucauggu

SEQ ID NO: 2437416 - RNA, 19 nt, Artificial Sequence
  Description of Artificial Sequence: Synthetic oligonucleotide
caccagcucucuucugcac

SEQ ID NO: 2437417 - RNA, 19 nt, Artificial Sequence
  Description of Artificial Sequence: Synthetic oligonucleotide
ccuuguauuugucauagau

SEQ ID NO: 2437418 - RNA, 19 nt, Artificial Sequence
  Description of Artificial Sequence: Synthetic oligonucleotide
aggagccucuguuucucua

SEQ ID NO: 2437419 - RNA, 19 nt, Artificial Sequence
  Description of Artificial Sequence: Synthetic oligonucleotide
cguucguucuuccuccagc

SEQ ID NO: 2437420 - RNA, 19 nt, Artificial Sequence
  Description of Artificial Sequence: Synthetic oligonucleotide
ucaacgcguucgcgcugcc

SEQ ID NO: 2437421 - RNA, 19 nt, Artificial Sequence
  Description of Artificial Sequence: Synthetic oligonucleotide
aaacgcgcguagaugccuu

SEQ ID NO: 2437422 - RNA, 19 nt, Artificial Sequence
  Description of Artificial Sequence: Synthetic oligonucleotide
acucuggaggguaguaaau

SEQ ID NO: 2437423 - RNA, 19 nt, Artificial Sequence
  Description of Artificial Sequence: Synthetic oligonucleotide
gagucggcguucguucuuc

SEQ ID NO: 2437424 - RNA, 19 nt, Artificial Sequence
  Description of Artificial Sequence: Synthetic oligonucleotide
ggacagaaccugcuccuga

SEQ ID NO: 2437425 - RNA, 19 nt, Artificial Sequence
  Description of Artificial Sequence: Synthetic oligonucleotide
cguucuuccuccagcgagc

SEQ ID NO: 2437426 - RNA, 19 nt, Artificial Sequence
  Description of Artificial Sequence: Synthetic oligonucleotide
gguguacaggauacuuaug

SEQ ID NO: 2437427 - RNA, 19 nt, Artificial Sequence
  Description of Artificial Sequence: Synthetic oligonucleotide
uccuggcgagcaagccuca

SEQ ID NO: 2437428 - RNA, 19 nt, Artificial Sequence
  Description of Artificial Sequence: Synthetic oligonucleotide
ggauacuuaugcagaggca

SEQ ID NO: 2437429 - RNA, 19 nt, Artificial Sequence
  Description of Artificial Sequence: Synthetic oligonucleotide
cgagcgcaagaagugagcg

SEQ ID NO: 2437430 - RNA, 19 nt, Artificial Sequence
  Description of Artificial Sequence: Synthetic oligonucleotide
uuggggucuugagaauaua

SEQ ID NO: 2437431 - RNA, 19 nt, Artificial Sequence
  Description of Artificial Sequence: Synthetic oligonucleotide
ggcgagcaagccucagcag

SEQ ID NO: 2437432 - RNA, 19 nt, Artificial Sequence
  Description of Artificial Sequence: Synthetic oligonucleotide
cguugaaagcuugucguug

SEQ ID NO: 2437433 - RNA, 19 nt, Artificial Sequence
  Description of Artificial Sequence: Synthetic oligonucleotide
uugucguuguuggcauauc

SEQ ID NO: 2437434 - RNA, 19 nt, Artificial Sequence
  Description of Artificial Sequence: Synthetic oligonucleotide
gccacagguguacaggaua

SEQ ID NO: 2437435 - RNA, 19 nt, Artificial Sequence
  Description of Artificial Sequence: Synthetic oligonucleotide
aucuugaacuuggccccgu

SEQ ID NO: 2437436 - RNA, 19 nt, Artificial Sequence
  Description of Artificial Sequence: Synthetic oligonucleotide
ccucauggucacagucacg

SEQ ID NO: 2437437 - RNA, 19 nt, Artificial Sequence
  Description of Artificial Sequence: Synthetic oligonucleotide
ccccgugaggcuuguagug

SEQ ID NO: 2437438 - RNA, 19 nt, Artificial Sequence
  Description of Artificial Sequence: Synthetic oligonucleotide
ggcuuguagugcacuggag

SEQ ID NO: 2437439 - RNA, 19 nt, Artificial Sequence
  Description of Artificial Sequence: Synthetic oligonucleotide
ggaauggguacguccucaa

SEQ ID NO: 2437440 - RNA, 19 nt, Artificial Sequence
  Description of Artificial Sequence: Synthetic oligonucleotide
ggaggguaguaaauuggaa

SEQ ID NO: 2437441 - RNA, 19 nt, Artificial Sequence
  Description of Artificial Sequence: Synthetic oligonucleotide
gggcaaacgcgcguagaug

SEQ ID NO: 2437442 - RNA, 19 nt, Artificial Sequence
  Description of Artificial Sequence: Synthetic oligonucleotide
ugcugggacucuggagggu

SEQ ID NO: 2437443 - RNA, 19 nt, Artificial Sequence
  Description of Artificial Sequence: Synthetic oligonucleotide
gcauaucuguagcccaaaa

SEQ ID NO: 2437444 - RNA, 19 nt, Artificial Sequence
  Description of Artificial Sequence: Synthetic oligonucleotide
cuugucguuguuggcauau

SEQ ID NO: 2437445 - RNA, 19 nt, Artificial Sequence
  Description of Artificial Sequence: Synthetic oligonucleotide
gcaagaagugagcgggcaa

SEQ ID NO: 2437446 - RNA, 19 nt, Artificial Sequence
  Description of Artificial Sequence: Synthetic oligonucleotide
ucuccgccccaaagccccu

SEQ ID NO: 2437447 - RNA, 19 nt, Artificial Sequence
  Description of Artificial Sequence: Synthetic oligonucleotide
acagggguacaggauccuu

SEQ ID NO: 2437448 - RNA, 19 nt, Artificial Sequence
  Description of Artificial Sequence: Synthetic oligonucleotide
gcaaacgcgcguagaugcc

SEQ ID NO: 2437449 - RNA, 19 nt, Artificial Sequence
  Description of Artificial Sequence: Synthetic oligonucleotide
gcgcugcccguucuugggg

SEQ ID NO: 2437450 - RNA, 19 nt, Artificial Sequence
  Description of Artificial Sequence: Synthetic oligonucleotide
caacgcguucgcgcugccc

SEQ ID NO: 2437451 - RNA, 19 nt, Artificial Sequence
  Description of Artificial Sequence: Synthetic oligonucleotide
acuuggccccgugaggcuu

SEQ ID NO: 2437452 - RNA, 19 nt, Artificial Sequence
  Description of Artificial Sequence: Synthetic oligonucleotide
cugcccguucuugggguug

SEQ ID NO: 2437453 - RNA, 19 nt, Artificial Sequence
  Description of Artificial Sequence: Synthetic oligonucleotide
cugcaccacugcuggccug

SEQ ID NO: 2437454 - RNA, 19 nt, Artificial Sequence
  Description of Artificial Sequence: Synthetic oligonucleotide
guggucaggcguggucacc

SEQ ID NO: 2437455 - RNA, 19 nt, Artificial Sequence
  Description of Artificial Sequence: Synthetic oligonucleotide
ggucaggcguggucaccag

SEQ ID NO: 2437456 - RNA, 19 nt, Artificial Sequence
  Description of Artificial Sequence: Synthetic oligonucleotide
acgcguucgcgcugcccgu

SEQ ID NO: 2437457 - RNA, 19 nt, Artificial Sequence
  Description of Artificial Sequence: Synthetic oligonucleotide
gcgagcgcaagaagugagc

SEQ ID NO: 2437458 - RNA, 19 nt, Artificial Sequence
  Description of Artificial Sequence: Synthetic oligonucleotide
gcguucguucuuccuccag

SEQ ID NO: 2437459 - RNA, 19 nt, Artificial Sequence
  Description of Artificial Sequence: Synthetic oligonucleotide
guacguccucaacgcguuc

SEQ ID NO: 2437460 - RNA, 19 nt, Artificial Sequence
  Description of Artificial Sequence: Synthetic oligonucleotide
cagcgagcgcaagaaguga

SEQ ID NO: 2437461 - RNA, 19 nt, Artificial Sequence
  Description of Artificial Sequence: Synthetic oligonucleotide
gguccuggcgagcaagccu

SEQ ID NO: 2437462 - RNA, 19 nt, Artificial Sequence
  Description of Artificial Sequence: Synthetic oligonucleotide
acccucguugaaagcuugu

SEQ ID NO: 2437463 - RNA, 19 nt, Artificial Sequence
  Description of Artificial Sequence: Synthetic oligonucleotide
gcacuggagucggcguucg

SEQ ID NO: 2437464 - RNA, 19 nt, Artificial Sequence
  Description of Artificial Sequence: Synthetic oligonucleotide
cgagcaagccucagcagca

SEQ ID NO: 2437465 - RNA, 19 nt, Artificial Sequence
  Description of Artificial Sequence: Synthetic oligonucleotide
ggcguggucaccagcucuc

SEQ ID NO: 2437466 - RNA, 19 nt, Artificial Sequence
  Description of Artificial Sequence: Synthetic oligonucleotide
caaacgcgcguagaugccu

SEQ ID NO: 2437467 - RNA, 19 nt, Artificial Sequence
  Description of Artificial Sequence: Synthetic oligonucleotide
cugggaugacaaaacccuu

SEQ ID NO: 2437468 - RNA, 19 nt, Artificial Sequence
  Description of Artificial Sequence: Synthetic oligonucleotide
ggacucuggaggguaguaa

SEQ ID NO: 2437469 - RNA, 19 nt, Artificial Sequence
  Description of Artificial Sequence: Synthetic oligonucleotide
cagggguacaggauccuuu

SEQ ID NO: 2437470 - RNA, 19 nt, Artificial Sequence
  Description of Artificial Sequence: Synthetic oligonucleotide
cccacagggaaggcugagc

SEQ ID NO: 2437471 - RNA, 19 nt, Artificial Sequence
  Description of Artificial Sequence: Synthetic oligonucleotide
ccgugaggcuuguagugca

SEQ ID NO: 2437472 - RNA, 19 nt, Artificial Sequence
  Description of Artificial Sequence: Synthetic oligonucleotide
cgcgcugcccguucuuggg

SEQ ID NO: 2437473 - RNA, 19 nt, Artificial Sequence
  Description of Artificial Sequence: Synthetic oligonucleotide
agcuucugccacaggugua

SEQ ID NO: 2437474 - RNA, 19 nt, Artificial Sequence
  Description of Artificial Sequence: Synthetic oligonucleotide
gagcgggcaaacgcgcgua

SEQ ID NO: 2437475 - RNA, 19 nt, Artificial Sequence
  Description of Artificial Sequence: Synthetic oligonucleotide
cccucguugaaagcuuguc

SEQ ID NO: 2437476 - RNA, 19 nt, Artificial Sequence
  Description of Artificial Sequence: Synthetic oligonucleotide
ggguacguccucaacgcgu

SEQ ID NO: 2437477 - RNA, 19 nt, Artificial Sequence
  Description of Artificial Sequence: Synthetic oligonucleotide
gucggcguucguucuuccu

SEQ ID NO: 2437478 - RNA, 19 nt, Artificial Sequence
  Description of Artificial Sequence: Synthetic oligonucleotide
cgcgcguagaugccuugcc

SEQ ID NO: 2437479 - RNA, 19 nt, Artificial Sequence
  Description of Artificial Sequence: Synthetic oligonucleotide
ggcauaucuguagcccaaa

SEQ ID NO: 2437480 - RNA, 19 nt, Artificial Sequence
  Description of Artificial Sequence: Synthetic oligonucleotide
gcuugucuccguucagggu

SEQ ID NO: 2437481 - RNA, 19 nt, Artificial Sequence
  Description of Artificial Sequence: Synthetic oligonucleotide
cagggucaucaggguguag

SEQ ID NO: 2437482 - RNA, 19 nt, Artificial Sequence
  Description of Artificial Sequence: Synthetic oligonucleotide
cgugaggcuuguagugcac

SEQ ID NO: 2437483 - RNA, 19 nt, Artificial Sequence
  Description of Artificial Sequence: Synthetic oligonucleotide
ggcguucguucuuccucca

SEQ ID NO: 2437484 - RNA, 19 nt, Artificial Sequence
  Description of Artificial Sequence: Synthetic oligonucleotide
gugcacuggagucggcguu

SEQ ID NO: 2437485 - RNA, 19 nt, Artificial Sequence
  Description of Artificial Sequence: Synthetic oligonucleotide
ucgaacccauaggccucau

SEQ ID NO: 2437486 - RNA, 19 nt, Artificial Sequence
  Description of Artificial Sequence: Synthetic oligonucleotide
gcgcaagaagugagcgggc

SEQ ID NO: 2437487 - RNA, 19 nt, Artificial Sequence
  Description of Artificial Sequence: Synthetic oligonucleotide
ccucaacgcguucgcgcug

SEQ ID NO: 2437488 - RNA, 19 nt, Artificial Sequence
  Description of Artificial Sequence: Synthetic oligonucleotide
gguacguccucaacgcguu

SEQ ID NO: 2437489 - RNA, 19 nt, Artificial Sequence
  Description of Artificial Sequence: Synthetic oligonucleotide
cuccgccccaaagccccug

SEQ ID NO: 2437490 - RNA, 19 nt, Artificial Sequence
  Description of Artificial Sequence: Synthetic oligonucleotide
ccucagcagcaucccucgc

SEQ ID NO: 2437491 - RNA, 19 nt, Artificial Sequence
  Description of Artificial Sequence: Synthetic oligonucleotide
cgccccaaagccccugcug

SEQ ID NO: 2437492 - RNA, 19 nt, Artificial Sequence
  Description of Artificial Sequence: Synthetic oligonucleotide
gggacucuggaggguagua

SEQ ID NO: 2437493 - RNA, 19 nt, Artificial Sequence
  Description of Artificial Sequence: Synthetic oligonucleotide
acgcccucuccgccccaaa

SEQ ID NO: 2437494 - RNA, 19 nt, Artificial Sequence
  Description of Artificial Sequence: Synthetic oligonucleotide
gcuugucguuguuggcaua

SEQ ID NO: 2437495 - RNA, 19 nt, Artificial Sequence
  Description of Artificial Sequence: Synthetic oligonucleotide
cccuuguauuugucauaga

SEQ ID NO: 2437496 - RNA, 19 nt, Artificial Sequence
  Description of Artificial Sequence: Synthetic oligonucleotide
ccuggcgagcaagccucag

SEQ ID NO: 2437497 - RNA, 19 nt, Artificial Sequence
  Description of Artificial Sequence: Synthetic oligonucleotide
cgcaagaagugagcgggca

SEQ ID NO: 2437498 - RNA, 19 nt, Artificial Sequence
  Description of Artificial Sequence: Synthetic oligonucleotide
cgcccucuccgccccaaag

SEQ ID NO: 2437499 - RNA, 19 nt, Artificial Sequence
  Description of Artificial Sequence: Synthetic oligonucleotide
cccguucuugggguugauc

SEQ ID NO: 2437500 - RNA, 19 nt, Artificial Sequence
  Description of Artificial Sequence: Synthetic oligonucleotide
cuugccgcagccgcagcuu

SEQ ID NO: 2437501 - RNA, 19 nt, Artificial Sequence
  Description of Artificial Sequence: Synthetic oligonucleotide
gcgggcaaacgcgcguaga

SEQ ID NO: 2437502 - RNA, 19 nt, Artificial Sequence
  Description of Artificial Sequence: Synthetic oligonucleotide
gcguucgcgcugcccguuc

SEQ ID NO: 2437503 - RNA, 19 nt, Artificial Sequence
  Description of Artificial Sequence: Synthetic oligonucleotide
guucgcgcugcccguucuu

SEQ ID NO: 2437504 - RNA, 19 nt, Artificial Sequence
  Description of Artificial Sequence: Synthetic oligonucleotide
ggagucggcguucguucuu

SEQ ID NO: 2437505 - RNA, 19 nt, Artificial Sequence
  Description of Artificial Sequence: Synthetic oligonucleotide
cacgcccucuccgccccaa

SEQ ID NO: 2437506 - RNA, 19 nt, Artificial Sequence
  Description of Artificial Sequence: Synthetic oligonucleotide
cacuggagucggcguucgu

SEQ ID NO: 2437507 - RNA, 19 nt, Artificial Sequence
  Description of Artificial Sequence: Synthetic oligonucleotide
cagucacggugaacuucuu

SEQ ID NO: 2437508 - RNA, 19 nt, Artificial Sequence
  Description of Artificial Sequence: Synthetic oligonucleotide
ccacucugccucugccucu

SEQ ID NO: 2437509 - RNA, 19 nt, Artificial Sequence
  Description of Artificial Sequence: Synthetic oligonucleotide
cgggcaaacgcgcguagau

SEQ ID NO: 2437510 - RNA, 19 nt, Artificial Sequence
  Description of Artificial Sequence: Synthetic oligonucleotide
gcugcccguucuugggguu

SEQ ID NO: 2437511 - RNA, 19 nt, Artificial Sequence
  Description of Artificial Sequence: Synthetic oligonucleotide
gcguggucaccagcucucu

SEQ ID NO: 2437512 - RNA, 19 nt, Artificial Sequence
  Description of Artificial Sequence: Synthetic oligonucleotide
gcuccucuacguagaccuu

SEQ ID NO: 2437513 - RNA, 19 nt, Artificial Sequence
  Description of Artificial Sequence: Synthetic oligonucleotide
cguucgcgcugcccguucu

SEQ ID NO: 2437514 - RNA, 19 nt, Artificial Sequence
  Description of Artificial Sequence: Synthetic oligonucleotide
ccgccccaaagccccugcu

SEQ ID NO: 2437515 - RNA, 19 nt, Artificial Sequence
  Description of Artificial Sequence: Synthetic oligonucleotide
gcccguucuugggguugau

SEQ ID NO: 2437516 - RNA, 19 nt, Artificial Sequence
  Description of Artificial Sequence: Synthetic oligonucleotide
cgcguucgcgcugcccguu

SEQ ID NO: 2437517 - RNA, 19 nt, Artificial Sequence
  Description of Artificial Sequence: Synthetic oligonucleotide
aauguaucuaaguuuauac

SEQ ID NO: 2437518 - RNA, 19 nt, Artificial Sequence
  Description of Artificial Sequence: Synthetic oligonucleotide
uauuauaagacaaauucag

SEQ ID NO: 2437519 - RNA, 19 nt, Artificial Sequence
  Description of Artificial Sequence: Synthetic oligonucleotide
  modified_base (8)..(8): a, c, u, g, unknown or other
aauuucunaaguuucaucu

SEQ ID NO: 2437520 - RNA, 19 nt, Artificial Sequence
  Description of Artificial Sequence: Synthetic oligonucleotide
uuacaaugcagauugaugg

SEQ ID NO: 2437521 - RNA, 19 nt, Artificial Sequence
  Description of Artificial Sequence: Synthetic oligonucleotide
aauuugacuuauuugauug

SEQ ID NO: 2437522 - RNA, 19 nt, Artificial Sequence
  Description of Artificial Sequence: Synthetic oligonucleotide
uucaauuugacuuauuuga

SEQ ID NO: 2437523 - RNA, 19 nt, Artificial Sequence
  Description of Artificial Sequence: Synthetic oligonucleotide
auacuaucuauacaguuac

SEQ ID NO: 2437524 - RNA, 19 nt, Artificial Sequence
  Description of Artificial Sequence: Synthetic oligonucleotide
agaagaaacuaaguuaucc

SEQ ID NO: 2437525 - RNA, 19 nt, Artificial Sequence
  Description of Artificial Sequence: Synthetic oligonucleotide
aaguuuauacuucagucca

SEQ ID NO: 2437526 - RNA, 19 nt, Artificial Sequence
  Description of Artificial Sequence: Synthetic oligonucleotide
uuucaucucauucugauaa

SEQ ID NO: 2437527 - RNA, 19 nt, Artificial Sequence
  Description of Artificial Sequence: Synthetic oligonucleotide
uguucuuacaaucuaagau

SEQ ID NO: 2437528 - RNA, 19 nt, Artificial Sequence
  Description of Artificial Sequence: Synthetic oligonucleotide
acuaagaucauuuauguua

SEQ ID NO: 2437529 - RNA, 19 nt, Artificial Sequence
  Description of Artificial Sequence: Synthetic oligonucleotide
aaaacauuaucuuccggug

SEQ ID NO: 2437530 - RNA, 19 nt, Artificial Sequence
  Description of Artificial Sequence: Synthetic oligonucleotide
gauuugauuaucuaauuuc

SEQ ID NO: 2437531 - RNA, 19 nt, Artificial Sequence
  Description of Artificial Sequence: Synthetic oligonucleotide
aucuaagauucucaguugc

SEQ ID NO: 2437532 - RNA, 19 nt, Artificial Sequence
  Description of Artificial Sequence: Synthetic oligonucleotide
  modified_base (2)..(2): a, c, u, g, unknown or other
unaaguuucaucucauucu

SEQ ID NO: 2437533 - RNA, 19 nt, Artificial Sequence
  Description of Artificial Sequence: Synthetic oligonucleotide
ugguagauuaucuaugacc

SEQ ID NO: 2437534 - RNA, 19 nt, Artificial Sequence
  Description of Artificial Sequence: Synthetic oligonucleotide
acaguuacuauguagguca

SEQ ID NO: 2437535 - RNA, 19 nt, Artificial Sequence
  Description of Artificial Sequence: Synthetic oligonucleotide
ugaaucuaaagauaacucu

SEQ ID NO: 2437536 - RNA, 19 nt, Artificial Sequence
  Description of Artificial Sequence: Synthetic oligonucleotide
uuugucaauguguuuagcc

SEQ ID NO: 2437537 - RNA, 19 nt, Artificial Sequence
  Description of Artificial Sequence: Synthetic oligonucleotide
uaagugauggauacuaucu

SEQ ID NO: 2437538 - RNA, 19 nt, Artificial Sequence
  Description of Artificial Sequence: Synthetic oligonucleotide
uuauuugauuggaugacag

SEQ ID NO: 2437539 - RNA, 19 nt, Artificial Sequence
  Description of Artificial Sequence: Synthetic oligonucleotide
  modified_base (7)..(7): a, c, u, g, unknown or other
auuucunaaguuucaucuc

SEQ ID NO: 2437540 - RNA, 19 nt, Artificial Sequence
  Description of Artificial Sequence: Synthetic oligonucleotide
agauugauggcaugaaggg

SEQ ID NO: 2437541 - RNA, 19 nt, Artificial Sequence
  Description of Artificial Sequence: Synthetic oligonucleotide
cuaaguuuauacuucaguc

SEQ ID NO: 2437542 - RNA, 19 nt, Artificial Sequence
  Description of Artificial Sequence: Synthetic oligonucleotide
uucacuuauauucgagggg

SEQ ID NO: 2437543 - RNA, 19 nt, Artificial Sequence
  Description of Artificial Sequence: Synthetic oligonucleotide
cuaaguuauccaaaagucc

SEQ ID NO: 2437544 - RNA, 19 nt, Artificial Sequence
  Description of Artificial Sequence: Synthetic oligonucleotide
uacucuugugaucaaauug

SEQ ID NO: 2437545 - RNA, 19 nt, Artificial Sequence
  Description of Artificial Sequence: Synthetic oligonucleotide
  modified_base (6)..(6): a, c, u, g, unknown or other
uuucunaaguuucaucuca

SEQ ID NO: 2437546 - RNA, 19 nt, Artificial Sequence
  Description of Artificial Sequence: Synthetic oligonucleotide
acuaaguuauccaaaaguc

SEQ ID NO: 2437547 - RNA, 19 nt, Artificial Sequence
  Description of Artificial Sequence: Synthetic oligonucleotide
uauguucuuacaaucuaag

SEQ ID NO: 2437548 - RNA, 19 nt, Artificial Sequence
  Description of Artificial Sequence: Synthetic oligonucleotide
auuaucuaugaccucaucu

SEQ ID NO: 2437549 - RNA, 19 nt, Artificial Sequence
  Description of Artificial Sequence: Synthetic oligonucleotide
ucuucacuuauauucgagg

SEQ ID NO: 2437550 - RNA, 19 nt, Artificial Sequence
  Description of Artificial Sequence: Synthetic oligonucleotide
auaacucugauauacucug

SEQ ID NO: 2437551 - RNA, 19 nt, Artificial Sequence
  Description of Artificial Sequence: Synthetic oligonucleotide
ucuaaguuuauacuucagu

SEQ ID NO: 2437552 - RNA, 19 nt, Artificial Sequence
  Description of Artificial Sequence: Synthetic oligonucleotide
agauaacucugauauacuc

SEQ ID NO: 2437553 - RNA, 19 nt, Artificial Sequence
  Description of Artificial Sequence: Synthetic oligonucleotide
gauguuauuacaaugcaga

SEQ ID NO: 2437554 - RNA, 19 nt, Artificial Sequence
  Description of Artificial Sequence: Synthetic oligonucleotide
cugauaaucguuuucauga

SEQ ID NO: 2437555 - RNA, 19 nt, Artificial Sequence
  Description of Artificial Sequence: Synthetic oligonucleotide
ugaaguaagugauggauac

SEQ ID NO: 2437556 - RNA, 19 nt, Artificial Sequence
  Description of Artificial Sequence: Synthetic oligonucleotide
uguaucuaaguuuauacuu

SEQ ID NO: 2437557 - RNA, 19 nt, Artificial Sequence
  Description of Artificial Sequence: Synthetic oligonucleotide
acaucaacccacuaagauc

SEQ ID NO: 2437558 - RNA, 19 nt, Artificial Sequence
  Description of Artificial Sequence: Synthetic oligonucleotide
cuucaguccaugaagagac

SEQ ID NO: 2437559 - RNA, 19 nt, Artificial Sequence
  Description of Artificial Sequence: Synthetic oligonucleotide
aaguuuaaagugcauaguu

SEQ ID NO: 2437560 - RNA, 19 nt, Artificial Sequence
  Description of Artificial Sequence: Synthetic oligonucleotide
  modified_base (11)..(11): a, c, u, g, unknown or other
ucuaauuucunaaguuuca

SEQ ID NO: 2437561 - RNA, 19 nt, Artificial Sequence
  Description of Artificial Sequence: Synthetic oligonucleotide
gaaucuaaagauaacucug

SEQ ID NO: 2437562 - RNA, 19 nt, Artificial Sequence
  Description of Artificial Sequence: Synthetic oligonucleotide
  modified_base (18)..(18): a, c, u, g, unknown or other
uugauuaucuaauuucuna

SEQ ID NO: 2437563 - RNA, 19 nt, Artificial Sequence
  Description of Artificial Sequence: Synthetic oligonucleotide
gaaggguugaaucuaaaga

SEQ ID NO: 2437564 - RNA, 19 nt, Artificial Sequence
  Description of Artificial Sequence: Synthetic oligonucleotide
uuguccauuaagcacacgu

SEQ ID NO: 2437565 - RNA, 19 nt, Artificial Sequence
  Description of Artificial Sequence: Synthetic oligonucleotide
uugaaucuaaagauaacuc

SEQ ID NO: 2437566 - RNA, 19 nt, Artificial Sequence
  Description of Artificial Sequence: Synthetic oligonucleotide
ugacuuauuugauuggaug

SEQ ID NO: 2437567 - RNA, 19 nt, Artificial Sequence
  Description of Artificial Sequence: Synthetic oligonucleotide
ucaguugcggcaaagucug

SEQ ID NO: 2437568 - RNA, 19 nt, Artificial Sequence
  Description of Artificial Sequence: Synthetic oligonucleotide
uuuaaagugcauaguuuug

SEQ ID NO: 2437569 - RNA, 19 nt, Artificial Sequence
  Description of Artificial Sequence: Synthetic oligonucleotide
cuaaagauaacucugauau

SEQ ID NO: 2437570 - RNA, 19 nt, Artificial Sequence
  Description of Artificial Sequence: Synthetic oligonucleotide
aggucaaaacauuaucuuc

SEQ ID NO: 2437571 - RNA, 19 nt, Artificial Sequence
  Description of Artificial Sequence: Synthetic oligonucleotide
caaugugggcaauauaucc

SEQ ID NO: 2437572 - RNA, 19 nt, Artificial Sequence
  Description of Artificial Sequence: Synthetic oligonucleotide
uugucaauguguuuagccc

SEQ ID NO: 2437573 - RNA, 19 nt, Artificial Sequence
  Description of Artificial Sequence: Synthetic oligonucleotide
auaaacuccuccaaugugg

SEQ ID NO: 2437574 - RNA, 19 nt, Artificial Sequence
  Description of Artificial Sequence: Synthetic oligonucleotide
acacagauaaaagagaggu

SEQ ID NO: 2437575 - RNA, 19 nt, Artificial Sequence
  Description of Artificial Sequence: Synthetic oligonucleotide
caaauauguucuuacaauc

SEQ ID NO: 2437576 - RNA, 19 nt, Artificial Sequence
  Description of Artificial Sequence: Synthetic oligonucleotide
aaucuaagauucucaguug

SEQ ID NO: 2437577 - RNA, 19 nt, Artificial Sequence
  Description of Artificial Sequence: Synthetic oligonucleotide
uccuucuaagcacuguagg

SEQ ID NO: 2437578 - RNA, 19 nt, Artificial Sequence
  Description of Artificial Sequence: Synthetic oligonucleotide
aaagugcauaguuuuguca

SEQ ID NO: 2437579 - RNA, 19 nt, Artificial Sequence
  Description of Artificial Sequence: Synthetic oligonucleotide
uucuuacaaucuaagauuc

SEQ ID NO: 2437580 - RNA, 19 nt, Artificial Sequence
  Description of Artificial Sequence: Synthetic oligonucleotide
  modified_base (13)..(13): a, c, u, g, unknown or other
uaucuaauuucunaaguuu

SEQ ID NO: 2437581 - RNA, 19 nt, Artificial Sequence
  Description of Artificial Sequence: Synthetic oligonucleotide
caucucauucugauaaucg

SEQ ID NO: 2437582 - RNA, 19 nt, Artificial Sequence
  Description of Artificial Sequence: Synthetic oligonucleotide
cuauacaguuacuauguag

SEQ ID NO: 2437583 - RNA, 19 nt, Artificial Sequence
  Description of Artificial Sequence: Synthetic oligonucleotide
ucugguucgacuucgacau

SEQ ID NO: 2437584 - RNA, 19 nt, Artificial Sequence
  Description of Artificial Sequence: Synthetic oligonucleotide
  modified_base (3)..(3): a, c, u, g, unknown or other
cunaaguuucaucucauuc

SEQ ID NO: 2437585 - RNA, 19 nt, Artificial Sequence
  Description of Artificial Sequence: Synthetic oligonucleotide
uuacaaucuaagauucuca

SEQ ID NO: 2437586 - RNA, 19 nt, Artificial Sequence
  Description of Artificial Sequence: Synthetic oligonucleotide
ucugauaaucguuuucaug

SEQ ID NO: 2437587 - RNA, 19 nt, Artificial Sequence
  Description of Artificial Sequence: Synthetic oligonucleotide
ugauauacucugcaggccu

SEQ ID NO: 2437588 - RNA, 19 nt, Artificial Sequence
  Description of Artificial Sequence: Synthetic oligonucleotide
uagauuaucuaugaccuca

SEQ ID NO: 2437589 - RNA, 19 nt, Artificial Sequence
  Description of Artificial Sequence: Synthetic oligonucleotide
ugauaaacuccuccaaugu

SEQ ID NO: 2437590 - RNA, 19 nt, Artificial Sequence
  Description of Artificial Sequence: Synthetic oligonucleotide
aaugucguagguuccaaau

SEQ ID NO: 2437591 - RNA, 19 nt, Artificial Sequence
  Description of Artificial Sequence: Synthetic oligonucleotide
uguuuagcccuucaauuug

SEQ ID NO: 2437592 - RNA, 19 nt, Artificial Sequence
  Description of Artificial Sequence: Synthetic oligonucleotide
  modified_base (17)..(17): a, c, u, g, unknown or other
ugauuaucuaauuucunaa

SEQ ID NO: 2437593 - RNA, 19 nt, Artificial Sequence
  Description of Artificial Sequence: Synthetic oligonucleotide
uccaugaagagacaucaac

SEQ ID NO: 2437594 - RNA, 19 nt, Artificial Sequence
  Description of Artificial Sequence: Synthetic oligonucleotide
aacucugauauacucugca

SEQ ID NO: 2437595 - RNA, 19 nt, Artificial Sequence
  Description of Artificial Sequence: Synthetic oligonucleotide
aaauauguucuuacaaucu

SEQ ID NO: 2437596 - RNA, 19 nt, Artificial Sequence
  Description of Artificial Sequence: Synthetic oligonucleotide
cucugauauacucugcagg

SEQ ID NO: 2437597 - RNA, 19 nt, Artificial Sequence
  Description of Artificial Sequence: Synthetic oligonucleotide
agucuagucagguuaacca

SEQ ID NO: 2437598 - RNA, 19 nt, Artificial Sequence
  Description of Artificial Sequence: Synthetic oligonucleotide
gacuuauuugauuggauga

SEQ ID NO: 2437599 - RNA, 19 nt, Artificial Sequence
  Description of Artificial Sequence: Synthetic oligonucleotide
ucaaaacauuaucuuccgg

SEQ ID NO: 2437600 - RNA, 19 nt, Artificial Sequence
  Description of Artificial Sequence: Synthetic oligonucleotide
caucaacccacuaagauca

SEQ ID NO: 2437601 - RNA, 19 nt, Artificial Sequence
  Description of Artificial Sequence: Synthetic oligonucleotide
aaacauuaucuuccggugu

SEQ ID NO: 2437602 - RNA, 19 nt, Artificial Sequence
  Description of Artificial Sequence: Synthetic oligonucleotide
auuugacuuauuugauugg

SEQ ID NO: 2437603 - RNA, 19 nt, Artificial Sequence
  Description of Artificial Sequence: Synthetic oligonucleotide
uuaucuaugaccucaucuu

SEQ ID NO: 2437604 - RNA, 19 nt, Artificial Sequence
  Description of Artificial Sequence: Synthetic oligonucleotide
uucgacuucgacauccacc

SEQ ID NO: 2437605 - RNA, 19 nt, Artificial Sequence
  Description of Artificial Sequence: Synthetic oligonucleotide
auugguagauuaucuauga

SEQ ID NO: 2437606 - RNA, 19 nt, Artificial Sequence
  Description of Artificial Sequence: Synthetic oligonucleotide
acuuauuugauuggaugac

SEQ ID NO: 2437607 - RNA, 19 nt, Artificial Sequence
  Description of Artificial Sequence: Synthetic oligonucleotide
uguaggucaauguaucuaa

SEQ ID NO: 2437608 - RNA, 19 nt, Artificial Sequence
  Description of Artificial Sequence: Synthetic oligonucleotide
cuucuaagcacuguaggcg

SEQ ID NO: 2437609 - RNA, 19 nt, Artificial Sequence
  Description of Artificial Sequence: Synthetic oligonucleotide
uaagauucucaguugcggc

SEQ ID NO: 2437610 - RNA, 19 nt, Artificial Sequence
  Description of Artificial Sequence: Synthetic oligonucleotide
uaucuaaguuuauacuuca

SEQ ID NO: 2437611 - RNA, 19 nt, Artificial Sequence
  Description of Artificial Sequence: Synthetic oligonucleotide
ugauggauacuaucuauac

SEQ ID NO: 2437612 - RNA, 19 nt, Artificial Sequence
  Description of Artificial Sequence: Synthetic oligonucleotide
uccauuaagcacacguccc

SEQ ID NO: 2437613 - RNA, 19 nt, Artificial Sequence
  Description of Artificial Sequence: Synthetic oligonucleotide
aaucuguacacugaaguaa

SEQ ID NO: 2437614 - RNA, 19 nt, Artificial Sequence
  Description of Artificial Sequence: Synthetic oligonucleotide
aagauucucaguugcggca

SEQ ID NO: 2437615 - RNA, 19 nt, Artificial Sequence
  Description of Artificial Sequence: Synthetic oligonucleotide
guuacuauguaggucaaug

SEQ ID NO: 2437616 - RNA, 19 nt, Artificial Sequence
  Description of Artificial Sequence: Synthetic oligonucleotide
uuauacuucaguccaugaa

SEQ ID NO: 2437617 - RNA, 19 nt, Artificial Sequence
  Description of Artificial Sequence: Synthetic oligonucleotide
agacaaauucagucuaguc

SEQ ID NO: 2437618 - RNA, 19 nt, Artificial Sequence
  Description of Artificial Sequence: Synthetic oligonucleotide
uuaaccagugcuucaaguc

SEQ ID NO: 2437619 - RNA, 19 nt, Artificial Sequence
  Description of Artificial Sequence: Synthetic oligonucleotide
auuaagcacacguccccgc

SEQ ID NO: 2437620 - RNA, 19 nt, Artificial Sequence
  Description of Artificial Sequence: Synthetic oligonucleotide
ugacagaucuaaaugucgu

SEQ ID NO: 2437621 - RNA, 19 nt, Artificial Sequence
  Description of Artificial Sequence: Synthetic oligonucleotide
caggacaaguuuaaagugc

SEQ ID NO: 2437622 - RNA, 19 nt, Artificial Sequence
  Description of Artificial Sequence: Synthetic oligonucleotide
ugucaauguguuuagcccu

SEQ ID NO: 2437623 - RNA, 19 nt, Artificial Sequence
  Description of Artificial Sequence: Synthetic oligonucleotide
agucagguuaaccagugcu

SEQ ID NO: 2437624 - RNA, 19 nt, Artificial Sequence
  Description of Artificial Sequence: Synthetic oligonucleotide
aagcacacguccccgcagc

SEQ ID NO: 2437625 - RNA, 19 nt, Artificial Sequence
  Description of Artificial Sequence: Synthetic oligonucleotide
uuaaagugcauaguuuugu

SEQ ID NO: 2437626 - RNA, 19 nt, Artificial Sequence
  Description of Artificial Sequence: Synthetic oligonucleotide
aaucuaaagauaacucuga

SEQ ID NO: 2437627 - RNA, 19 nt, Artificial Sequence
  Description of Artificial Sequence: Synthetic oligonucleotide
  modified_base (9)..(9): a, c, u, g, unknown or other
uaauuucunaaguuucauc

SEQ ID NO: 2437628 - RNA, 19 nt, Artificial Sequence
  Description of Artificial Sequence: Synthetic oligonucleotide
uguguuuagcccuucaauu

SEQ ID NO: 2437629 - RNA, 19 nt, Artificial Sequence
  Description of Artificial Sequence: Synthetic oligonucleotide
uaugaccucaucuucacuu

SEQ ID NO: 2437630 - RNA, 19 nt, Artificial Sequence
  Description of Artificial Sequence: Synthetic oligonucleotide
ucaccaaauauguucuuac

SEQ ID NO: 2437631 - RNA, 19 nt, Artificial Sequence
  Description of Artificial Sequence: Synthetic oligonucleotide
cauugguagauuaucuaug

SEQ ID NO: 2437632 - RNA, 19 nt, Artificial Sequence
  Description of Artificial Sequence: Synthetic oligonucleotide
ucaaauugcaggacaaguu

SEQ ID NO: 2437633 - RNA, 19 nt, Artificial Sequence
  Description of Artificial Sequence: Synthetic oligonucleotide
cuaagauucucaguugcgg

SEQ ID NO: 2437634 - RNA, 19 nt, Artificial Sequence
  Description of Artificial Sequence: Synthetic oligonucleotide
auguaucuaaguuuauacu

SEQ ID NO: 2437635 - RNA, 19 nt, Artificial Sequence
  Description of Artificial Sequence: Synthetic oligonucleotide
uucuuccagauuuauuggc

SEQ ID NO: 2437636 - RNA, 19 nt, Artificial Sequence
  Description of Artificial Sequence: Synthetic oligonucleotide
auuugauuaucuaauuucu

SEQ ID NO: 2437637 - RNA, 19 nt, Artificial Sequence
  Description of Artificial Sequence: Synthetic oligonucleotide
ucaauuugacuuauuugau

SEQ ID NO: 2437638 - RNA, 19 nt, Artificial Sequence
  Description of Artificial Sequence: Synthetic oligonucleotide
guccauuaagcacacgucc

SEQ ID NO: 2437639 - RNA, 19 nt, Artificial Sequence
  Description of Artificial Sequence: Synthetic oligonucleotide
aagauuugauuaucuaauu

SEQ ID NO: 2437640 - RNA, 19 nt, Artificial Sequence
  Description of Artificial Sequence: Synthetic oligonucleotide
ucuaaagauaacucugaua

SEQ ID NO: 2437641 - RNA, 19 nt, Artificial Sequence
  Description of Artificial Sequence: Synthetic oligonucleotide
uacuauguaggucaaugua

SEQ ID NO: 2437642 - RNA, 19 nt, Artificial Sequence
  Description of Artificial Sequence: Synthetic oligonucleotide
gacuucgacauccaccgcc

SEQ ID NO: 2437643 - RNA, 19 nt, Artificial Sequence
  Description of Artificial Sequence: Synthetic oligonucleotide
ucuuccgguguacugauaa

SEQ ID NO: 2437644 - RNA, 19 nt, Artificial Sequence
  Description of Artificial Sequence: Synthetic oligonucleotide
accaaauauguucuuacaa

SEQ ID NO: 2437645 - RNA, 19 nt, Artificial Sequence
  Description of Artificial Sequence: Synthetic oligonucleotide
caaaugugaucaauggcug

SEQ ID NO: 2437646 - RNA, 19 nt, Artificial Sequence
  Description of Artificial Sequence: Synthetic oligonucleotide
cagaucuaaaugucguagg

SEQ ID NO: 2437647 - RNA, 19 nt, Artificial Sequence
  Description of Artificial Sequence: Synthetic oligonucleotide
  modified_base (19)..(19): a, c, u, g, unknown or other
uuugauuaucuaauuucun

SEQ ID NO: 2437648 - RNA, 19 nt, Artificial Sequence
  Description of Artificial Sequence: Synthetic oligonucleotide
aaguaagugauggauacua

SEQ ID NO: 2437649 - RNA, 19 nt, Artificial Sequence
  Description of Artificial Sequence: Synthetic oligonucleotide
aauguguuuagcccuucaa

SEQ ID NO: 2437650 - RNA, 19 nt, Artificial Sequence
  Description of Artificial Sequence: Synthetic oligonucleotide
auucagucuagucagguua

SEQ ID NO: 2437651 - RNA, 19 nt, Artificial Sequence
  Description of Artificial Sequence: Synthetic oligonucleotide
auuacaaugcagauugaug

SEQ ID NO: 2437652 - RNA, 19 nt, Artificial Sequence
  Description of Artificial Sequence: Synthetic oligonucleotide
uguaagauuugauuaucua

SEQ ID NO: 2437653 - RNA, 19 nt, Artificial Sequence
  Description of Artificial Sequence: Synthetic oligonucleotide
auucugauaaucguuuuca

SEQ ID NO: 2437654 - RNA, 19 nt, Artificial Sequence
  Description of Artificial Sequence: Synthetic oligonucleotide
uuuauacuucaguccauga

SEQ ID NO: 2437655 - RNA, 19 nt, Artificial Sequence
  Description of Artificial Sequence: Synthetic oligonucleotide
cuauguaggucaauguauc

SEQ ID NO: 2437656 - RNA, 19 nt, Artificial Sequence
  Description of Artificial Sequence: Synthetic oligonucleotide
ugguucagaagauggacac

SEQ ID NO: 2437657 - RNA, 19 nt, Artificial Sequence
  Description of Artificial Sequence: Synthetic oligonucleotide
uggcucaccaaauauguuc

SEQ ID NO: 2437658 - RNA, 19 nt, Artificial Sequence
  Description of Artificial Sequence: Synthetic oligonucleotide
uuacuauguaggucaaugu

SEQ ID NO: 2437659 - RNA, 19 nt, Artificial Sequence
  Description of Artificial Sequence: Synthetic oligonucleotide
agcacuguaggcgugauga

SEQ ID NO: 2437660 - RNA, 19 nt, Artificial Sequence
  Description of Artificial Sequence: Synthetic oligonucleotide
ggucaaaacauuaucuucc

SEQ ID NO: 2437661 - RNA, 19 nt, Artificial Sequence
  Description of Artificial Sequence: Synthetic oligonucleotide
uaucuaugaccucaucuuc

SEQ ID NO: 2437662 - RNA, 19 nt, Artificial Sequence
  Description of Artificial Sequence: Synthetic oligonucleotide
agauuugauuaucuaauuu

SEQ ID NO: 2437663 - RNA, 19 nt, Artificial Sequence
  Description of Artificial Sequence: Synthetic oligonucleotide
uuaucuuccgguguacuga

SEQ ID NO: 2437664 - RNA, 19 nt, Artificial Sequence
  Description of Artificial Sequence: Synthetic oligonucleotide
ggagauguuauuacaaugc

SEQ ID NO: 2437665 - RNA, 19 nt, Artificial Sequence
  Description of Artificial Sequence: Synthetic oligonucleotide
gauuggaugacagaucuaa

SEQ ID NO: 2437666 - RNA, 19 nt, Artificial Sequence
  Description of Artificial Sequence: Synthetic oligonucleotide
aucucauucugauaaucgu

SEQ ID NO: 2437667 - RNA, 19 nt, Artificial Sequence
  Description of Artificial Sequence: Synthetic oligonucleotide
aguuauccaaaaguccuuc

SEQ ID NO: 2437668 - RNA, 19 nt, Artificial Sequence
  Description of Artificial Sequence: Synthetic oligonucleotide
gagaggucaaaacauuauc

SEQ ID NO: 2437669 - RNA, 19 nt, Artificial Sequence
  Description of Artificial Sequence: Synthetic oligonucleotide
uauuugauuggaugacaga

SEQ ID NO: 2437670 - RNA, 19 nt, Artificial Sequence
  Description of Artificial Sequence: Synthetic oligonucleotide
uggagaaucuguacacuga

SEQ ID NO: 2437671 - RNA, 19 nt, Artificial Sequence
  Description of Artificial Sequence: Synthetic oligonucleotide
aguccaugaagagacauca

SEQ ID NO: 2437672 - RNA, 19 nt, Artificial Sequence
  Description of Artificial Sequence: Synthetic oligonucleotide
gucuagucagguuaaccag

SEQ ID NO: 2437673 - RNA, 19 nt, Artificial Sequence
  Description of Artificial Sequence: Synthetic oligonucleotide
guuuugucaauguguuuag

SEQ ID NO: 2437674 - RNA, 19 nt, Artificial Sequence
  Description of Artificial Sequence: Synthetic oligonucleotide
agugauggauacuaucuau

SEQ ID NO: 2437675 - RNA, 19 nt, Artificial Sequence
  Description of Artificial Sequence: Synthetic oligonucleotide
ugggcaauauauccgugga

SEQ ID NO: 2437676 - RNA, 19 nt, Artificial Sequence
  Description of Artificial Sequence: Synthetic oligonucleotide
uucuaagcacuguaggcgu

SEQ ID NO: 2437677 - RNA, 19 nt, Artificial Sequence
  Description of Artificial Sequence: Synthetic oligonucleotide
agaggucaaaacauuaucu

SEQ ID NO: 2437678 - RNA, 19 nt, Artificial Sequence
  Description of Artificial Sequence: Synthetic oligonucleotide
aggucaauguaucuaaguu

SEQ ID NO: 2437679 - RNA, 19 nt, Artificial Sequence
  Description of Artificial Sequence: Synthetic oligonucleotide
acucugauauacucugcag

SEQ ID NO: 2437680 - RNA, 19 nt, Artificial Sequence
  Description of Artificial Sequence: Synthetic oligonucleotide
ucuaugaccucaucuucac

SEQ ID NO: 2437681 - RNA, 19 nt, Artificial Sequence
  Description of Artificial Sequence: Synthetic oligonucleotide
uccgguguacugauaaacu

SEQ ID NO: 2437682 - RNA, 19 nt, Artificial Sequence
  Description of Artificial Sequence: Synthetic oligonucleotide
gauacuaucuauacaguua

SEQ ID NO: 2437683 - RNA, 19 nt, Artificial Sequence
  Description of Artificial Sequence: Synthetic oligonucleotide
uguccauuaagcacacguc

SEQ ID NO: 2437684 - RNA, 19 nt, Artificial Sequence
  Description of Artificial Sequence: Synthetic oligonucleotide
ugccauugguagauuaucu

SEQ ID NO: 2437685 - RNA, 19 nt, Artificial Sequence
  Description of Artificial Sequence: Synthetic oligonucleotide
gaugacagaucuaaauguc

SEQ ID NO: 2437686 - RNA, 19 nt, Artificial Sequence
  Description of Artificial Sequence: Synthetic oligonucleotide
aucaaauugcaggacaagu

SEQ ID NO: 2437687 - RNA, 19 nt, Artificial Sequence
  Description of Artificial Sequence: Synthetic oligonucleotide
gcaauauauccguggaugg

SEQ ID NO: 2437688 - RNA, 19 nt, Artificial Sequence
  Description of Artificial Sequence: Synthetic oligonucleotide
guaagugauggauacuauc

SEQ ID NO: 2437689 - RNA, 19 nt, Artificial Sequence
  Description of Artificial Sequence: Synthetic oligonucleotide
uaaagugcauaguuuuguc

SEQ ID NO: 2437690 - RNA, 19 nt, Artificial Sequence
  Description of Artificial Sequence: Synthetic oligonucleotide
agauguuauuacaaugcag

SEQ ID NO: 2437691 - RNA, 19 nt, Artificial Sequence
  Description of Artificial Sequence: Synthetic oligonucleotide
ucucaguugcggcaaaguc

SEQ ID NO: 2437692 - RNA, 19 nt, Artificial Sequence
  Description of Artificial Sequence: Synthetic oligonucleotide
ugaugaguuuuauuucuuc

SEQ ID NO: 2437693 - RNA, 19 nt, Artificial Sequence
  Description of Artificial Sequence: Synthetic oligonucleotide
auacaguuacuauguaggu

SEQ ID NO: 2437694 - RNA, 19 nt, Artificial Sequence
  Description of Artificial Sequence: Synthetic oligonucleotide
auaaucguuuucaugauua

SEQ ID NO: 2437695 - RNA, 19 nt, Artificial Sequence
  Description of Artificial Sequence: Synthetic oligonucleotide
caaaacauuaucuuccggu

SEQ ID NO: 2437696 - RNA, 19 nt, Artificial Sequence
  Description of Artificial Sequence: Synthetic oligonucleotide
uacuucaguccaugaagag

SEQ ID NO: 2437697 - RNA, 19 nt, Artificial Sequence
  Description of Artificial Sequence: Synthetic oligonucleotide
aagacaaauucagucuagu

SEQ ID NO: 2437698 - RNA, 19 nt, Artificial Sequence
  Description of Artificial Sequence: Synthetic oligonucleotide
auuauaagacaaauucagu

SEQ ID NO: 2437699 - RNA, 19 nt, Artificial Sequence
  Description of Artificial Sequence: Synthetic oligonucleotide
auuggcucaccaaauaugu

SEQ ID NO: 2437700 - RNA, 19 nt, Artificial Sequence
  Description of Artificial Sequence: Synthetic oligonucleotide
aagugauggauacuaucua

SEQ ID NO: 2437701 - RNA, 19 nt, Artificial Sequence
  Description of Artificial Sequence: Synthetic oligonucleotide
uuuucugguucagaagaug

SEQ ID NO: 2437702 - RNA, 19 nt, Artificial Sequence
  Description of Artificial Sequence: Synthetic oligonucleotide
ucuuacaaucuaagauucu

SEQ ID NO: 2437703 - RNA, 19 nt, Artificial Sequence
  Description of Artificial Sequence: Synthetic oligonucleotide
aauucagucuagucagguu

SEQ ID NO: 2437704 - RNA, 19 nt, Artificial Sequence
  Description of Artificial Sequence: Synthetic oligonucleotide
uggcaugaaggguugaauc

SEQ ID NO: 2437705 - RNA, 19 nt, Artificial Sequence
  Description of Artificial Sequence: Synthetic oligonucleotide
agauuuauuggcucaccaa

SEQ ID NO: 2437706 - RNA, 19 nt, Artificial Sequence
  Description of Artificial Sequence: Synthetic oligonucleotide
uuggagauguuauuacaau

SEQ ID NO: 2437707 - RNA, 19 nt, Artificial Sequence
  Description of Artificial Sequence: Synthetic oligonucleotide
uuaagcacacguccccgca

SEQ ID NO: 2437708 - RNA, 19 nt, Artificial Sequence
  Description of Artificial Sequence: Synthetic oligonucleotide
  modified_base (5)..(5): a, c, u, g, unknown or other
uucunaaguuucaucucau

SEQ ID NO: 2437709 - RNA, 19 nt, Artificial Sequence
  Description of Artificial Sequence: Synthetic oligonucleotide
uggauacuaucuauacagu

SEQ ID NO: 2437710 - RNA, 19 nt, Artificial Sequence
  Description of Artificial Sequence: Synthetic oligonucleotide
cuagucagguuaaccagug

SEQ ID NO: 2437711 - RNA, 19 nt, Artificial Sequence
  Description of Artificial Sequence: Synthetic oligonucleotide
uugacuuauuugauuggau

SEQ ID NO: 2437712 - RNA, 19 nt, Artificial Sequence
  Description of Artificial Sequence: Synthetic oligonucleotide
guugaaucuaaagauaacu

SEQ ID NO: 2437713 - RNA, 19 nt, Artificial Sequence
  Description of Artificial Sequence: Synthetic oligonucleotide
acuaucuauacaguuacua

SEQ ID NO: 2437714 - RNA, 19 nt, Artificial Sequence
  Description of Artificial Sequence: Synthetic oligonucleotide
ugguucgacuucgacaucc

SEQ ID NO: 2437715 - RNA, 19 nt, Artificial Sequence
  Description of Artificial Sequence: Synthetic oligonucleotide
augucguagguuccaaaug

SEQ ID NO: 2437716 - RNA, 19 nt, Artificial Sequence
  Description of Artificial Sequence: Synthetic oligonucleotide
uugguagauuaucuaugac

SEQ ID NO: 2437717 - RNA, 19 nt, Artificial Sequence
  Description of Artificial Sequence: Synthetic oligonucleotide
aaucguuuucaugauuaau

SEQ ID NO: 2437718 - RNA, 19 nt, Artificial Sequence
  Description of Artificial Sequence: Synthetic oligonucleotide
augugggcaauauauccgu

SEQ ID NO: 2437719 - RNA, 19 nt, Artificial Sequence
  Description of Artificial Sequence: Synthetic oligonucleotide
acuauguaggucaauguau

SEQ ID NO: 2437720 - RNA, 19 nt, Artificial Sequence
  Description of Artificial Sequence: Synthetic oligonucleotide
auguguuuagcccuucaau

SEQ ID NO: 2437721 - RNA, 19 nt, Artificial Sequence
  Description of Artificial Sequence: Synthetic oligonucleotide
ggcaauauauccguggaug

SEQ ID NO: 2437722 - RNA, 19 nt, Artificial Sequence
  Description of Artificial Sequence: Synthetic oligonucleotide
guacugauaaacuccucca

SEQ ID NO: 2437723 - RNA, 19 nt, Artificial Sequence
  Description of Artificial Sequence: Synthetic oligonucleotide
gaagcuguaagauuugauu

SEQ ID NO: 2437724 - RNA, 19 nt, Artificial Sequence
  Description of Artificial Sequence: Synthetic oligonucleotide
gaucaaauugcaggacaag

SEQ ID NO: 2437725 - RNA, 19 nt, Artificial Sequence
  Description of Artificial Sequence: Synthetic oligonucleotide
ugcggcaaagucuggagaa

SEQ ID NO: 2437726 - RNA, 19 nt, Artificial Sequence
  Description of Artificial Sequence: Synthetic oligonucleotide
uaacucugauauacucugc

SEQ ID NO: 2437727 - RNA, 19 nt, Artificial Sequence
  Description of Artificial Sequence: Synthetic oligonucleotide
guuuauacuucaguccaug

SEQ ID NO: 2437728 - RNA, 19 nt, Artificial Sequence
  Description of Artificial Sequence: Synthetic oligonucleotide
uucagucuagucagguuaa

SEQ ID NO: 2437729 - RNA, 19 nt, Artificial Sequence
  Description of Artificial Sequence: Synthetic oligonucleotide
cuuggagauguuauuacaa

SEQ ID NO: 2437730 - RNA, 19 nt, Artificial Sequence
  Description of Artificial Sequence: Synthetic oligonucleotide
auugauggcaugaaggguu

SEQ ID NO: 2437731 - RNA, 19 nt, Artificial Sequence
  Description of Artificial Sequence: Synthetic oligonucleotide
aagauaacucugauauacu

SEQ ID NO: 2437732 - RNA, 19 nt, Artificial Sequence
  Description of Artificial Sequence: Synthetic oligonucleotide
guuuaaagugcauaguuuu

SEQ ID NO: 2437733 - RNA, 19 nt, Artificial Sequence
  Description of Artificial Sequence: Synthetic oligonucleotide
cauucugauaaucguuuuc

SEQ ID NO: 2437734 - RNA, 19 nt, Artificial Sequence
  Description of Artificial Sequence: Synthetic oligonucleotide
uauccguggaugguguugc

SEQ ID NO: 2437735 - RNA, 19 nt, Artificial Sequence
  Description of Artificial Sequence: Synthetic oligonucleotide
ugauaaucguuuucaugau

SEQ ID NO: 2437736 - RNA, 19 nt, Artificial Sequence
  Description of Artificial Sequence: Synthetic oligonucleotide
uucgacauccaccgccgcc

SEQ ID NO: 2437737 - RNA, 19 nt, Artificial Sequence
  Description of Artificial Sequence: Synthetic oligonucleotide
caaucuaagauucucaguu

SEQ ID NO: 2437738 - RNA, 19 nt, Artificial Sequence
  Description of Artificial Sequence: Synthetic oligonucleotide
  modified_base (4)..(4): a, c, u, g, unknown or other
ucunaaguuucaucucauu

SEQ ID NO: 2437739 - RNA, 19 nt, Artificial Sequence
  Description of Artificial Sequence: Synthetic oligonucleotide
guugcggcaaagucuggag

SEQ ID NO: 2437740 - RNA, 19 nt, Artificial Sequence
  Description of Artificial Sequence: Synthetic oligonucleotide
uaagcacacguccccgcag

SEQ ID NO: 2437741 - RNA, 19 nt, Artificial Sequence
  Description of Artificial Sequence: Synthetic oligonucleotide
auaguuuugucaauguguu

SEQ ID NO: 2437742 - RNA, 19 nt, Artificial Sequence
  Description of Artificial Sequence: Synthetic oligonucleotide
aaagagaggucaaaacauu

SEQ ID NO: 2437743 - RNA, 19 nt, Artificial Sequence
  Description of Artificial Sequence: Synthetic oligonucleotide
uacaguuacuauguagguc

SEQ ID NO: 2437744 - RNA, 19 nt, Artificial Sequence
  Description of Artificial Sequence: Synthetic oligonucleotide
uuuagcccuucaauuugac

SEQ ID NO: 2437745 - RNA, 19 nt, Artificial Sequence
  Description of Artificial Sequence: Synthetic oligonucleotide
aaauugcaggacaaguuua

SEQ ID NO: 2437746 - RNA, 19 nt, Artificial Sequence
  Description of Artificial Sequence: Synthetic oligonucleotide
cauuaagcacacguccccg

SEQ ID NO: 2437747 - RNA, 19 nt, Artificial Sequence
  Description of Artificial Sequence: Synthetic oligonucleotide
uuccgguguacugauaaac

SEQ ID NO: 2437748 - RNA, 19 nt, Artificial Sequence
  Description of Artificial Sequence: Synthetic oligonucleotide
ucuaagcacuguaggcgug

SEQ ID NO: 2437749 - RNA, 19 nt, Artificial Sequence
  Description of Artificial Sequence: Synthetic oligonucleotide
uuauuacaaugcagauuga

SEQ ID NO: 2437750 - RNA, 19 nt, Artificial Sequence
  Description of Artificial Sequence: Synthetic oligonucleotide
ucagguuaaccagugcuuc

SEQ ID NO: 2437751 - RNA, 19 nt, Artificial Sequence
  Description of Artificial Sequence: Synthetic oligonucleotide
gauaacucugauauacucu

SEQ ID NO: 2437752 - RNA, 19 nt, Artificial Sequence
  Description of Artificial Sequence: Synthetic oligonucleotide
acuucaguccaugaagaga

SEQ ID NO: 2437753 - RNA, 19 nt, Artificial Sequence
  Description of Artificial Sequence: Synthetic oligonucleotide
uaaucguuuucaugauuaa

SEQ ID NO: 2437754 - RNA, 19 nt, Artificial Sequence
  Description of Artificial Sequence: Synthetic oligonucleotide
uaaagauaacucugauaua

SEQ ID NO: 2437755 - RNA, 19 nt, Artificial Sequence
  Description of Artificial Sequence: Synthetic oligonucleotide
ucuauacaguuacuaugua

SEQ ID NO: 2437756 - RNA, 19 nt, Artificial Sequence
  Description of Artificial Sequence: Synthetic oligonucleotide
uuuugucaauguguuuagc

SEQ ID NO: 2437757 - RNA, 19 nt, Artificial Sequence
  Description of Artificial Sequence: Synthetic oligonucleotide
gacaaguuuaaagugcaua

SEQ ID NO: 2437758 - RNA, 19 nt, Artificial Sequence
  Description of Artificial Sequence: Synthetic oligonucleotide
aaagucuggagaaucugua

SEQ ID NO: 2437759 - RNA, 19 nt, Artificial Sequence
  Description of Artificial Sequence: Synthetic oligonucleotide
ugugggcaauauauccgug

SEQ ID NO: 2437760 - RNA, 19 nt, Artificial Sequence
  Description of Artificial Sequence: Synthetic oligonucleotide
gguagauuaucuaugaccu

SEQ ID NO: 2437761 - RNA, 19 nt, Artificial Sequence
  Description of Artificial Sequence: Synthetic oligonucleotide
ccuucuaagcacuguaggc

SEQ ID NO: 2437762 - RNA, 19 nt, Artificial Sequence
  Description of Artificial Sequence: Synthetic oligonucleotide
gacaucaacccacuaagau

SEQ ID NO: 2437763 - RNA, 19 nt, Artificial Sequence
  Description of Artificial Sequence: Synthetic oligonucleotide
cacacguccccgcagcugc

SEQ ID NO: 2437764 - RNA, 19 nt, Artificial Sequence
  Description of Artificial Sequence: Synthetic oligonucleotide
cacagauaaaagagagguc

SEQ ID NO: 2437765 - RNA, 19 nt, Artificial Sequence
  Description of Artificial Sequence: Synthetic oligonucleotide
uugcggcaaagucuggaga

SEQ ID NO: 2437766 - RNA, 19 nt, Artificial Sequence
  Description of Artificial Sequence: Synthetic oligonucleotide
aggacaaguuuaaagugca

SEQ ID NO: 2437767 - RNA, 19 nt, Artificial Sequence
  Description of Artificial Sequence: Synthetic oligonucleotide
uguugccauugguagauua

SEQ ID NO: 2437768 - RNA, 19 nt, Artificial Sequence
  Description of Artificial Sequence: Synthetic oligonucleotide
ugugaucaauggcugugau

SEQ ID NO: 2437769 - RNA, 19 nt, Artificial Sequence
  Description of Artificial Sequence: Synthetic oligonucleotide
aguuuaaagugcauaguuu

SEQ ID NO: 2437770 - RNA, 19 nt, Artificial Sequence
  Description of Artificial Sequence: Synthetic oligonucleotide
uucugauaaucguuuucau

SEQ ID NO: 2437771 - RNA, 19 nt, Artificial Sequence
  Description of Artificial Sequence: Synthetic oligonucleotide
aucuucacuuauauucgag

SEQ ID NO: 2437772 - RNA, 19 nt, Artificial Sequence
  Description of Artificial Sequence: Synthetic oligonucleotide
acuucgacauccaccgccg

SEQ ID NO: 2437773 - RNA, 19 nt, Artificial Sequence
  Description of Artificial Sequence: Synthetic oligonucleotide
ugugaucuuggagauguua

SEQ ID NO: 2437774 - RNA, 19 nt, Artificial Sequence
  Description of Artificial Sequence: Synthetic oligonucleotide
cuuuguccauuaagcacac

SEQ ID NO: 2437775 - RNA, 19 nt, Artificial Sequence
  Description of Artificial Sequence: Synthetic oligonucleotide
cuaagaucauuuauguuau

SEQ ID NO: 2437776 - RNA, 19 nt, Artificial Sequence
  Description of Artificial Sequence: Synthetic oligonucleotide
acccacuaagaucauuuau

SEQ ID NO: 2437777 - RNA, 19 nt, Artificial Sequence
  Description of Artificial Sequence: Synthetic oligonucleotide
cucugguucgacuucgaca

SEQ ID NO: 2437778 - RNA, 19 nt, Artificial Sequence
  Description of Artificial Sequence: Synthetic oligonucleotide
uagucagguuaaccagugc

SEQ ID NO: 2437779 - RNA, 19 nt, Artificial Sequence
  Description of Artificial Sequence: Synthetic oligonucleotide
gauuaucuaugaccucauc

SEQ ID NO: 2437780 - RNA, 19 nt, Artificial Sequence
  Description of Artificial Sequence: Synthetic oligonucleotide
gaugguguugccauuggua

SEQ ID NO: 2437781 - RNA, 19 nt, Artificial Sequence
  Description of Artificial Sequence: Synthetic oligonucleotide
ccuuuguccauuaagcaca

SEQ ID NO: 2437782 - RNA, 19 nt, Artificial Sequence
  Description of Artificial Sequence: Synthetic oligonucleotide
aacccacuaagaucauuua

SEQ ID NO: 2437783 - RNA, 19 nt, Artificial Sequence
  Description of Artificial Sequence: Synthetic oligonucleotide
aucuaugaccucaucuuca

SEQ ID NO: 2437784 - RNA, 19 nt, Artificial Sequence
  Description of Artificial Sequence: Synthetic oligonucleotide
cugguucagaagauggaca

SEQ ID NO: 2437785 - RNA, 19 nt, Artificial Sequence
  Description of Artificial Sequence: Synthetic oligonucleotide
cagucuagucagguuaacc

SEQ ID NO: 2437786 - RNA, 19 nt, Artificial Sequence
  Description of Artificial Sequence: Synthetic oligonucleotide
uccagauuuauuggcucac

SEQ ID NO: 2437787 - RNA, 19 nt, Artificial Sequence
  Description of Artificial Sequence: Synthetic oligonucleotide
ggaugacagaucuaaaugu

SEQ ID NO: 2437788 - RNA, 19 nt, Artificial Sequence
  Description of Artificial Sequence: Synthetic oligonucleotide
agugcauaguuuugucaau

SEQ ID NO: 2437789 - RNA, 19 nt, Artificial Sequence
  Description of Artificial Sequence: Synthetic oligonucleotide
uugccauugguagauuauc

SEQ ID NO: 2437790 - RNA, 19 nt, Artificial Sequence
  Description of Artificial Sequence: Synthetic oligonucleotide
uaucuuccgguguacugau

SEQ ID NO: 2437791 - RNA, 19 nt, Artificial Sequence
  Description of Artificial Sequence: Synthetic oligonucleotide
agauaaaagagaggucaaa

SEQ ID NO: 2437792 - RNA, 19 nt, Artificial Sequence
  Description of Artificial Sequence: Synthetic oligonucleotide
cagauuuauuggcucacca

SEQ ID NO: 2437793 - RNA, 19 nt, Artificial Sequence
  Description of Artificial Sequence: Synthetic oligonucleotide
auauccguggaugguguug

SEQ ID NO: 2437794 - RNA, 19 nt, Artificial Sequence
  Description of Artificial Sequence: Synthetic oligonucleotide
gaggucaaaacauuaucuu

SEQ ID NO: 2437795 - RNA, 19 nt, Artificial Sequence
  Description of Artificial Sequence: Synthetic oligonucleotide
accgccgccuccaugguac

SEQ ID NO: 2437796 - RNA, 19 nt, Artificial Sequence
  Description of Artificial Sequence: Synthetic oligonucleotide
aaaguccuucuaagcacug

SEQ ID NO: 2437797 - RNA, 19 nt, Artificial Sequence
  Description of Artificial Sequence: Synthetic oligonucleotide
ucgacauccaccgccgccu

SEQ ID NO: 2437798 - RNA, 19 nt, Artificial Sequence
  Description of Artificial Sequence: Synthetic oligonucleotide
gcagauugauggcaugaag

SEQ ID NO: 2437799 - RNA, 19 nt, Artificial Sequence
  Description of Artificial Sequence: Synthetic oligonucleotide
aucuaaguuuauacuucag

SEQ ID NO: 2437800 - RNA, 19 nt, Artificial Sequence
  Description of Artificial Sequence: Synthetic oligonucleotide
cuaucuauacaguuacuau

SEQ ID NO: 2437801 - RNA, 19 nt, Artificial Sequence
  Description of Artificial Sequence: Synthetic oligonucleotide
agagaggucaaaacauuau

SEQ ID NO: 2437802 - RNA, 19 nt, Artificial Sequence
  Description of Artificial Sequence: Synthetic oligonucleotide
cucaguugcggcaaagucu

SEQ ID NO: 2437803 - RNA, 19 nt, Artificial Sequence
  Description of Artificial Sequence: Synthetic oligonucleotide
auauauccguggauggugu

SEQ ID NO: 2437804 - RNA, 19 nt, Artificial Sequence
  Description of Artificial Sequence: Synthetic oligonucleotide
guuaaccagugcuucaagu

SEQ ID NO: 2437805 - RNA, 19 nt, Artificial Sequence
  Description of Artificial Sequence: Synthetic oligonucleotide
uucucaguugcggcaaagu

SEQ ID NO: 2437806 - RNA, 19 nt, Artificial Sequence
  Description of Artificial Sequence: Synthetic oligonucleotide
aaguuauccaaaaguccuu

SEQ ID NO: 2437807 - RNA, 19 nt, Artificial Sequence
  Description of Artificial Sequence: Synthetic oligonucleotide
caguccaugaagagacauc

SEQ ID NO: 2437808 - RNA, 19 nt, Artificial Sequence
  Description of Artificial Sequence: Synthetic oligonucleotide
acuguaggcgugaugaguu

SEQ ID NO: 2437809 - RNA, 19 nt, Artificial Sequence
  Description of Artificial Sequence: Synthetic oligonucleotide
ugcugucgccauccucugg

SEQ ID NO: 2437810 - RNA, 19 nt, Artificial Sequence
  Description of Artificial Sequence: Synthetic oligonucleotide
gugaucaauggcugugauc

SEQ ID NO: 2437811 - RNA, 19 nt, Artificial Sequence
  Description of Artificial Sequence: Synthetic oligonucleotide
auacucugcaggccuuugu

SEQ ID NO: 2437812 - RNA, 19 nt, Artificial Sequence
  Description of Artificial Sequence: Synthetic oligonucleotide
caccaaauauguucuuaca

SEQ ID NO: 2437813 - RNA, 19 nt, Artificial Sequence
  Description of Artificial Sequence: Synthetic oligonucleotide
ggcgugaugaguuuuauuu

SEQ ID NO: 2437814 - RNA, 19 nt, Artificial Sequence
  Description of Artificial Sequence: Synthetic oligonucleotide
auguaggucaauguaucua

SEQ ID NO: 2437815 - RNA, 19 nt, Artificial Sequence
  Description of Artificial Sequence: Synthetic oligonucleotide
uuuguccauuaagcacacg

SEQ ID NO: 2437816 - RNA, 19 nt, Artificial Sequence
  Description of Artificial Sequence: Synthetic oligonucleotide
caugaaggguugaaucuaa

SEQ ID NO: 2437817 - RNA, 19 nt, Artificial Sequence
  Description of Artificial Sequence: Synthetic oligonucleotide
auccguggaugguguugcc

SEQ ID NO: 2437818 - RNA, 19 nt, Artificial Sequence
  Description of Artificial Sequence: Synthetic oligonucleotide
uucuacucuugugaucaaa

SEQ ID NO: 2437819 - RNA, 19 nt, Artificial Sequence
  Description of Artificial Sequence: Synthetic oligonucleotide
gguuaaccagugcuucaag

SEQ ID NO: 2437820 - RNA, 19 nt, Artificial Sequence
  Description of Artificial Sequence: Synthetic oligonucleotide
ccauuaagcacacgucccc

SEQ ID NO: 2437821 - RNA, 19 nt, Artificial Sequence
  Description of Artificial Sequence: Synthetic oligonucleotide
aguugcggcaaagucugga

SEQ ID NO: 2437822 - RNA, 19 nt, Artificial Sequence
  Description of Artificial Sequence: Synthetic oligonucleotide
ugauuggaugacagaucua

SEQ ID NO: 2437823 - RNA, 19 nt, Artificial Sequence
  Description of Artificial Sequence: Synthetic oligonucleotide
gauaaucguuuucaugauu

SEQ ID NO: 2437824 - RNA, 19 nt, Artificial Sequence
  Description of Artificial Sequence: Synthetic oligonucleotide
caaauugcaggacaaguuu

SEQ ID NO: 2437825 - RNA, 19 nt, Artificial Sequence
  Description of Artificial Sequence: Synthetic oligonucleotide
cuguaagauuugauuaucu

SEQ ID NO: 2437826 - RNA, 19 nt, Artificial Sequence
  Description of Artificial Sequence: Synthetic oligonucleotide
gucguagguuccaaaugug

SEQ ID NO: 2437827 - RNA, 19 nt, Artificial Sequence
  Description of Artificial Sequence: Synthetic oligonucleotide
agauucucaguugcggcaa

SEQ ID NO: 2437828 - RNA, 19 nt, Artificial Sequence
  Description of Artificial Sequence: Synthetic oligonucleotide
agaagcuguaagauuugau

SEQ ID NO: 2437829 - RNA, 19 nt, Artificial Sequence
  Description of Artificial Sequence: Synthetic oligonucleotide
gauugauggcaugaagggu

SEQ ID NO: 2437830 - RNA, 19 nt, Artificial Sequence
  Description of Artificial Sequence: Synthetic oligonucleotide
  modified_base (10)..(10): a, c, u, g, unknown or other
cuaauuucunaaguuucau

SEQ ID NO: 2437831 - RNA, 19 nt, Artificial Sequence
  Description of Artificial Sequence: Synthetic oligonucleotide
ccuucuacucuugugauca

SEQ ID NO: 2437832 - RNA, 19 nt, Artificial Sequence
  Description of Artificial Sequence: Synthetic oligonucleotide
guuuagcccuucaauuuga

SEQ ID NO: 2437833 - RNA, 19 nt, Artificial Sequence
  Description of Artificial Sequence: Synthetic oligonucleotide
uuggcucaccaaauauguu

SEQ ID NO: 2437834 - RNA, 19 nt, Artificial Sequence
  Description of Artificial Sequence: Synthetic oligonucleotide
aguaagugauggauacuau

SEQ ID NO: 2437835 - RNA, 19 nt, Artificial Sequence
  Description of Artificial Sequence: Synthetic oligonucleotide
caauguaucuaaguuuaua

SEQ ID NO: 2437836 - RNA, 19 nt, Artificial Sequence
  Description of Artificial Sequence: Synthetic oligonucleotide
gauggcaugaaggguugaa

SEQ ID NO: 2437837 - RNA, 19 nt, Artificial Sequence
  Description of Artificial Sequence: Synthetic oligonucleotide
uguaggcgugaugaguuuu

SEQ ID NO: 2437838 - RNA, 19 nt, Artificial Sequence
  Description of Artificial Sequence: Synthetic oligonucleotide
agguuaaccagugcuucaa

SEQ ID NO: 2437839 - RNA, 19 nt, Artificial Sequence
  Description of Artificial Sequence: Synthetic oligonucleotide
uccguggaugguguugcca

SEQ ID NO: 2437840 - RNA, 19 nt, Artificial Sequence
  Description of Artificial Sequence: Synthetic oligonucleotide
uaagaucauuuauguuauu

SEQ ID NO: 2437841 - RNA, 19 nt, Artificial Sequence
  Description of Artificial Sequence: Synthetic oligonucleotide
ggcaugaaggguugaaucu

SEQ ID NO: 2437842 - RNA, 19 nt, Artificial Sequence
  Description of Artificial Sequence: Synthetic oligonucleotide
auugcaggacaaguuuaaa

SEQ ID NO: 2437843 - RNA, 19 nt, Artificial Sequence
  Description of Artificial Sequence: Synthetic oligonucleotide
caacccacuaagaucauuu

SEQ ID NO: 2437844 - RNA, 19 nt, Artificial Sequence
  Description of Artificial Sequence: Synthetic oligonucleotide
agauuaucuaugaccucau

SEQ ID NO: 2437845 - RNA, 19 nt, Artificial Sequence
  Description of Artificial Sequence: Synthetic oligonucleotide
ggucaauguaucuaaguuu

SEQ ID NO: 2437846 - RNA, 19 nt, Artificial Sequence
  Description of Artificial Sequence: Synthetic oligonucleotide
gugauggauacuaucuaua

SEQ ID NO: 2437847 - RNA, 19 nt, Artificial Sequence
  Description of Artificial Sequence: Synthetic oligonucleotide
ucagucuagucagguuaac

SEQ ID NO: 2437848 - RNA, 19 nt, Artificial Sequence
  Description of Artificial Sequence: Synthetic oligonucleotide
caauuugacuuauuugauu

SEQ ID NO: 2437849 - RNA, 19 nt, Artificial Sequence
  Description of Artificial Sequence: Synthetic oligonucleotide
cagguuaaccagugcuuca

SEQ ID NO: 2437850 - RNA, 19 nt, Artificial Sequence
  Description of Artificial Sequence: Synthetic oligonucleotide
guucgacuucgacauccac

SEQ ID NO: 2437851 - RNA, 19 nt, Artificial Sequence
  Description of Artificial Sequence: Synthetic oligonucleotide
aguuuauacuucaguccau

SEQ ID NO: 2437852 - RNA, 19 nt, Artificial Sequence
  Description of Artificial Sequence: Synthetic oligonucleotide
gcuguaagauuugauuauc

SEQ ID NO: 2437853 - RNA, 19 nt, Artificial Sequence
  Description of Artificial Sequence: Synthetic oligonucleotide
gcgugaugaguuuuauuuc

SEQ ID NO: 2437854 - RNA, 19 nt, Artificial Sequence
  Description of Artificial Sequence: Synthetic oligonucleotide
cacugaaguaagugaugga

SEQ ID NO: 2437855 - RNA, 19 nt, Artificial Sequence
  Description of Artificial Sequence: Synthetic oligonucleotide
gaagagacaucaacccacu

SEQ ID NO: 2437856 - RNA, 19 nt, Artificial Sequence
  Description of Artificial Sequence: Synthetic oligonucleotide
ucaauguguuuagcccuuc

SEQ ID NO: 2437857 - RNA, 19 nt, Artificial Sequence
  Description of Artificial Sequence: Synthetic oligonucleotide
auuggaugacagaucuaaa

SEQ ID NO: 2437858 - RNA, 19 nt, Artificial Sequence
  Description of Artificial Sequence: Synthetic oligonucleotide
ccaaauauguucuuacaau

SEQ ID NO: 2437859 - RNA, 19 nt, Artificial Sequence
  Description of Artificial Sequence: Synthetic oligonucleotide
ucaacccacuaagaucauu

SEQ ID NO: 2437860 - RNA, 19 nt, Artificial Sequence
  Description of Artificial Sequence: Synthetic oligonucleotide
gaaguaagugauggauacu

SEQ ID NO: 2437861 - RNA, 19 nt, Artificial Sequence
  Description of Artificial Sequence: Synthetic oligonucleotide
cuucgacauccaccgccgc

SEQ ID NO: 2437862 - RNA, 19 nt, Artificial Sequence
  Description of Artificial Sequence: Synthetic oligonucleotide
aguuacuauguaggucaau

SEQ ID NO: 2437863 - RNA, 19 nt, Artificial Sequence
  Description of Artificial Sequence: Synthetic oligonucleotide
ugauggcaugaaggguuga

SEQ ID NO: 2437864 - RNA, 19 nt, Artificial Sequence
  Description of Artificial Sequence: Synthetic oligonucleotide
gguguacugauaaacuccu

SEQ ID NO: 2437865 - RNA, 19 nt, Artificial Sequence
  Description of Artificial Sequence: Synthetic oligonucleotide
uaggcgugaugaguuuuau

SEQ ID NO: 2437866 - RNA, 19 nt, Artificial Sequence
  Description of Artificial Sequence: Synthetic oligonucleotide
aggcgugaugaguuuuauu

SEQ ID NO: 2437867 - RNA, 19 nt, Artificial Sequence
  Description of Artificial Sequence: Synthetic oligonucleotide
uaagcacuguaggcgugau

SEQ ID NO: 2437868 - RNA, 19 nt, Artificial Sequence
  Description of Artificial Sequence: Synthetic oligonucleotide
auauacucugcaggccuuu

SEQ ID NO: 2437869 - RNA, 19 nt, Artificial Sequence
  Description of Artificial Sequence: Synthetic oligonucleotide
uccuccaaugugggcaaua

SEQ ID NO: 2437870 - RNA, 19 nt, Artificial Sequence
  Description of Artificial Sequence: Synthetic oligonucleotide
caguugcggcaaagucugg

SEQ ID NO: 2437871 - RNA, 19 nt, Artificial Sequence
  Description of Artificial Sequence: Synthetic oligonucleotide
gccauugguagauuaucua

SEQ ID NO: 2437872 - RNA, 19 nt, Artificial Sequence
  Description of Artificial Sequence: Synthetic oligonucleotide
ccagauuuauuggcucacc

SEQ ID NO: 2437873 - RNA, 19 nt, Artificial Sequence
  Description of Artificial Sequence: Synthetic oligonucleotide
cuuccgguguacugauaaa

SEQ ID NO: 2437874 - RNA, 19 nt, Artificial Sequence
  Description of Artificial Sequence: Synthetic oligonucleotide
cuacucuugugaucaaauu

SEQ ID NO: 2437875 - RNA, 19 nt, Artificial Sequence
  Description of Artificial Sequence: Synthetic oligonucleotide
gcacuguaggcgugaugag

SEQ ID NO: 2437876 - RNA, 19 nt, Artificial Sequence
  Description of Artificial Sequence: Synthetic oligonucleotide
caguuacuauguaggucaa

SEQ ID NO: 2437877 - RNA, 19 nt, Artificial Sequence
  Description of Artificial Sequence: Synthetic oligonucleotide
guaggcgugaugaguuuua

SEQ ID NO: 2437878 - RNA, 19 nt, Artificial Sequence
  Description of Artificial Sequence: Synthetic oligonucleotide
ccauugguagauuaucuau

SEQ ID NO: 2437879 - RNA, 19 nt, Artificial Sequence
  Description of Artificial Sequence: Synthetic oligonucleotide
acguccccgcagcugcugu

SEQ ID NO: 2437880 - RNA, 19 nt, Artificial Sequence
  Description of Artificial Sequence: Synthetic oligonucleotide
gauauacucugcaggccuu

SEQ ID NO: 2437881 - RNA, 19 nt, Artificial Sequence
  Description of Artificial Sequence: Synthetic oligonucleotide
guguacugauaaacuccuc

SEQ ID NO: 2437882 - RNA, 19 nt, Artificial Sequence
  Description of Artificial Sequence: Synthetic oligonucleotide
gcugucgccauccucuggu

SEQ ID NO: 2437883 - RNA, 19 nt, Artificial Sequence
  Description of Artificial Sequence: Synthetic oligonucleotide
gcaugaaggguugaaucua

SEQ ID NO: 2437884 - RNA, 19 nt, Artificial Sequence
  Description of Artificial Sequence: Synthetic oligonucleotide
gucagguuaaccagugcuu

SEQ ID NO: 2437885 - RNA, 19 nt, Artificial Sequence
  Description of Artificial Sequence: Synthetic oligonucleotide
cauuaucuuccgguguacu

SEQ ID NO: 2437886 - RNA, 19 nt, Artificial Sequence
  Description of Artificial Sequence: Synthetic oligonucleotide
cuccaaugugggcaauaua

SEQ ID NO: 2437887 - RNA, 19 nt, Artificial Sequence
  Description of Artificial Sequence: Synthetic oligonucleotide
cacuguaggcgugaugagu

SEQ ID NO: 2437888 - RNA, 19 nt, Artificial Sequence
  Description of Artificial Sequence: Synthetic oligonucleotide
cuaugaccucaucuucacu

SEQ ID NO: 2437889 - RNA, 19 nt, Artificial Sequence
  Description of Artificial Sequence: Synthetic oligonucleotide
cugguucgacuucgacauc

SEQ ID NO: 2437890 - RNA, 19 nt, Artificial Sequence
  Description of Artificial Sequence: Synthetic oligonucleotide
gugaugaguuuuauuucuu

SEQ ID NO: 2437891 - RNA, 19 nt, Artificial Sequence
  Description of Artificial Sequence: Synthetic oligonucleotide
gaucaauggcugugaucuu

SEQ ID NO: 2437892 - RNA, 19 nt, Artificial Sequence
  Description of Artificial Sequence: Synthetic oligonucleotide
gucaauguguuuagcccuu

SEQ ID NO: 2437893 - RNA, 19 nt, Artificial Sequence
  Description of Artificial Sequence: Synthetic oligonucleotide
gguucgacuucgacaucca

SEQ ID NO: 2437894 - RNA, 19 nt, Artificial Sequence
  Description of Artificial Sequence: Synthetic oligonucleotide
ggaugguguugccauuggu

SEQ ID NO: 2437895 - RNA, 19 nt, Artificial Sequence
  Description of Artificial Sequence: Synthetic oligonucleotide
aucaacccacuaagaucau

SEQ ID NO: 2437896 - RNA, 19 nt, Artificial Sequence
  Description of Artificial Sequence: Synthetic oligonucleotide
gcacacguccccgcagcug

SEQ ID NO: 2437897 - RNA, 19 nt, Artificial Sequence
  Description of Artificial Sequence: Synthetic oligonucleotide
ccgccuccaugguaccggc

SEQ ID NO: 2437898 - RNA, 19 nt, Artificial Sequence
  Description of Artificial Sequence: Synthetic oligonucleotide
cuguaggcgugaugaguuu

SEQ ID NO: 2437899 - RNA, 19 nt, Artificial Sequence
  Description of Artificial Sequence: Synthetic oligonucleotide
acacguccccgcagcugcu

SEQ ID NO: 2437900 - RNA, 19 nt, Artificial Sequence
  Description of Artificial Sequence: Synthetic oligonucleotide
aucuuccgguguacugaua

SEQ ID NO: 2437901 - RNA, 19 nt, Artificial Sequence
  Description of Artificial Sequence: Synthetic oligonucleotide
ccguggaugguguugccau

SEQ ID NO: 2437902 - RNA, 19 nt, Artificial Sequence
  Description of Artificial Sequence: Synthetic oligonucleotide
ggacaaguuuaaagugcau

SEQ ID NO: 2437903 - RNA, 19 nt, Artificial Sequence
  Description of Artificial Sequence: Synthetic oligonucleotide
ccuccaaugugggcaauau

SEQ ID NO: 2437904 - RNA, 19 nt, Artificial Sequence
  Description of Artificial Sequence: Synthetic oligonucleotide
ccgccgccuccaugguacc

SEQ ID NO: 2437905 - RNA, 19 nt, Artificial Sequence
  Description of Artificial Sequence: Synthetic oligonucleotide
gcggcaaagucuggagaau

SEQ ID NO: 2437906 - RNA, 19 nt, Artificial Sequence
  Description of Artificial Sequence: Synthetic oligonucleotide
cguccccgcagcugcuguc

SEQ ID NO: 2437907 - RNA, 19 nt, Artificial Sequence
  Description of Artificial Sequence: Synthetic oligonucleotide
cgccgccuccaugguaccg

SEQ ID NO: 2437908 - RNA, 19 nt, Artificial Sequence
  Description of Artificial Sequence: Synthetic oligonucleotide
cccuucaauuugacuuauu

SEQ ID NO: 2437909 - RNA, 19 nt, Artificial Sequence
  Description of Artificial Sequence: Synthetic oligonucleotide
cuccuccaaugugggcaau

SEQ ID NO: 2437910 - RNA, 19 nt, Artificial Sequence
  Description of Artificial Sequence: Synthetic oligonucleotide
cguggaugguguugccauu

SEQ ID NO: 2437911 - RNA, 19 nt, Artificial Sequence
  Description of Artificial Sequence: Synthetic oligonucleotide
uauguuacagacacggugg

SEQ ID NO: 2437912 - RNA, 19 nt, Artificial Sequence
  Description of Artificial Sequence: Synthetic oligonucleotide
aauuaaggagguucgcugg

SEQ ID NO: 2437913 - RNA, 19 nt, Artificial Sequence
  Description of Artificial Sequence: Synthetic oligonucleotide
gucaguuuaauuaaggagg

SEQ ID NO: 2437914 - RNA, 19 nt, Artificial Sequence
  Description of Artificial Sequence: Synthetic oligonucleotide
acugaauacgaucagcagg

SEQ ID NO: 2437915 - RNA, 19 nt, Artificial Sequence
  Description of Artificial Sequence: Synthetic oligonucleotide
aaaucuguauuuauguaac

SEQ ID NO: 2437916 - RNA, 19 nt, Artificial Sequence
  Description of Artificial Sequence: Synthetic oligonucleotide
cuaaacaacaccauuccgc

SEQ ID NO: 2437917 - RNA, 19 nt, Artificial Sequence
  Description of Artificial Sequence: Synthetic oligonucleotide
aauacgaucagcaggcacg

SEQ ID NO: 2437918 - RNA, 19 nt, Artificial Sequence
  Description of Artificial Sequence: Synthetic oligonucleotide
aguuuaauuaaggagguuc

SEQ ID NO: 2437919 - RNA, 19 nt, Artificial Sequence
  Description of Artificial Sequence: Synthetic oligonucleotide
cuguauuuauguaacaccc

SEQ ID NO: 2437920 - RNA, 19 nt, Artificial Sequence
  Description of Artificial Sequence: Synthetic oligonucleotide
ugaaaagauggccaagucc

SEQ ID NO: 2437921 - RNA, 19 nt, Artificial Sequence
  Description of Artificial Sequence: Synthetic oligonucleotide
agucaguuuaauuaaggag

SEQ ID NO: 2437922 - RNA, 19 nt, Artificial Sequence
  Description of Artificial Sequence: Synthetic oligonucleotide
gacacuaguggcuugcugg

SEQ ID NO: 2437923 - RNA, 19 nt, Artificial Sequence
  Description of Artificial Sequence: Synthetic oligonucleotide
aaacgauccauaguccucc

SEQ ID NO: 2437924 - RNA, 19 nt, Artificial Sequence
  Description of Artificial Sequence: Synthetic oligonucleotide
ucagucaguuuaauuaagg

SEQ ID NO: 2437925 - RNA, 19 nt, Artificial Sequence
  Description of Artificial Sequence: Synthetic oligonucleotide
cugaauacgaucagcaggc

SEQ ID NO: 2437926 - RNA, 19 nt, Artificial Sequence
  Description of Artificial Sequence: Synthetic oligonucleotide
uuacugaauacgaucagca

SEQ ID NO: 2437927 - RNA, 19 nt, Artificial Sequence
  Description of Artificial Sequence: Synthetic oligonucleotide
uaauuaaggagguucgcug

SEQ ID NO: 2437928 - RNA, 19 nt, Artificial Sequence
  Description of Artificial Sequence: Synthetic oligonucleotide
auaaggaugacgucggugu

SEQ ID NO: 2437929 - RNA, 19 nt, Artificial Sequence
  Description of Artificial Sequence: Synthetic oligonucleotide
gucuauguuacagacacgg

SEQ ID NO: 2437930 - RNA, 19 nt, Artificial Sequence
  Description of Artificial Sequence: Synthetic oligonucleotide
ucaaccccaagucaguugc

SEQ ID NO: 2437931 - RNA, 19 nt, Artificial Sequence
  Description of Artificial Sequence: Synthetic oligonucleotide
uccuuacugaauacgauca

SEQ ID NO: 2437932 - RNA, 19 nt, Artificial Sequence
  Description of Artificial Sequence: Synthetic oligonucleotide
aagagagcggccguaaacg

SEQ ID NO: 2437933 - RNA, 19 nt, Artificial Sequence
  Description of Artificial Sequence: Synthetic oligonucleotide
guuuaauuaaggagguucg

SEQ ID NO: 2437934 - RNA, 19 nt, Artificial Sequence
  Description of Artificial Sequence: Synthetic oligonucleotide
uguauuuauguaacacccc

SEQ ID NO: 2437935 - RNA, 19 nt, Artificial Sequence
  Description of Artificial Sequence: Synthetic oligonucleotide
augggagggcaccugaucc

SEQ ID NO: 2437936 - RNA, 19 nt, Artificial Sequence
  Description of Artificial Sequence: Synthetic oligonucleotide
ucaguuuaauuaaggaggu

SEQ ID NO: 2437937 - RNA, 19 nt, Artificial Sequence
  Description of Artificial Sequence: Synthetic oligonucleotide
cuauguuacagacacggug

SEQ ID NO: 2437938 - RNA, 19 nt, Artificial Sequence
  Description of Artificial Sequence: Synthetic oligonucleotide
acuaaacaacaccauuccg

SEQ ID NO: 2437939 - RNA, 19 nt, Artificial Sequence
  Description of Artificial Sequence: Synthetic oligonucleotide
aggaugugaaaagauggcc

SEQ ID NO: 2437940 - RNA, 19 nt, Artificial Sequence
  Description of Artificial Sequence: Synthetic oligonucleotide
aggggucuauguuacagac

SEQ ID NO: 2437941 - RNA, 19 nt, Artificial Sequence
  Description of Artificial Sequence: Synthetic oligonucleotide
cucgauguccgccacauag

SEQ ID NO: 2437942 - RNA, 19 nt, Artificial Sequence
  Description of Artificial Sequence: Synthetic oligonucleotide
acauaguucucgaacacgg

SEQ ID NO: 2437943 - RNA, 19 nt, Artificial Sequence
  Description of Artificial Sequence: Synthetic oligonucleotide
auguccgccacauaguucu

SEQ ID NO: 2437944 - RNA, 19 nt, Artificial Sequence
  Description of Artificial Sequence: Synthetic oligonucleotide
cacuaaacaacaccauucc

SEQ ID NO: 2437945 - RNA, 19 nt, Artificial Sequence
  Description of Artificial Sequence: Synthetic oligonucleotide
uuaauuaaggagguucgcu

SEQ ID NO: 2437946 - RNA, 19 nt, Artificial Sequence
  Description of Artificial Sequence: Synthetic oligonucleotide
auuaaggagguucgcuggg

SEQ ID NO: 2437947 - RNA, 19 nt, Artificial Sequence
  Description of Artificial Sequence: Synthetic oligonucleotide
gagacuaucuggaagccgc

SEQ ID NO: 2437948 - RNA, 19 nt, Artificial Sequence
  Description of Artificial Sequence: Synthetic oligonucleotide
acuaucuggaagccgcuuc

SEQ ID NO: 2437949 - RNA, 19 nt, Artificial Sequence
  Description of Artificial Sequence: Synthetic oligonucleotide
aaucuguauuuauguaaca

SEQ ID NO: 2437950 - RNA, 19 nt, Artificial Sequence
  Description of Artificial Sequence: Synthetic oligonucleotide
uccgaaaauaaaaucugua

SEQ ID NO: 2437951 - RNA, 19 nt, Artificial Sequence
  Description of Artificial Sequence: Synthetic oligonucleotide
aagucaguugcaaaugucu

SEQ ID NO: 2437952 - RNA, 19 nt, Artificial Sequence
  Description of Artificial Sequence: Synthetic oligonucleotide
aaugagcucaccgggcgcg

SEQ ID NO: 2437953 - RNA, 19 nt, Artificial Sequence
  Description of Artificial Sequence: Synthetic oligonucleotide
uaaaaucuguauuuaugua

SEQ ID NO: 2437954 - RNA, 19 nt, Artificial Sequence
  Description of Artificial Sequence: Synthetic oligonucleotide
ugugaaaagauggccaagu

SEQ ID NO: 2437955 - RNA, 19 nt, Artificial Sequence
  Description of Artificial Sequence: Synthetic oligonucleotide
aacucguccuuacugaaua

SEQ ID NO: 2437956 - RNA, 19 nt, Artificial Sequence
  Description of Artificial Sequence: Synthetic oligonucleotide
uuuaauuaaggagguucgc

SEQ ID NO: 2437957 - RNA, 19 nt, Artificial Sequence
  Description of Artificial Sequence: Synthetic oligonucleotide
uaagagagcggccguaaac

SEQ ID NO: 2437958 - RNA, 19 nt, Artificial Sequence
  Description of Artificial Sequence: Synthetic oligonucleotide
cuuacugaauacgaucagc

SEQ ID NO: 2437959 - RNA, 19 nt, Artificial Sequence
  Description of Artificial Sequence: Synthetic oligonucleotide
uacugaauacgaucagcag

SEQ ID NO: 2437960 - RNA, 19 nt, Artificial Sequence
  Description of Artificial Sequence: Synthetic oligonucleotide
ucguccuuacugaauacga

SEQ ID NO: 2437961 - RNA, 19 nt, Artificial Sequence
  Description of Artificial Sequence: Synthetic oligonucleotide
uccgccuccgaaaauaaaa

SEQ ID NO: 2437962 - RNA, 19 nt, Artificial Sequence
  Description of Artificial Sequence: Synthetic oligonucleotide
aggaucgcuagcugcaccg

SEQ ID NO: 2437963 - RNA, 19 nt, Artificial Sequence
  Description of Artificial Sequence: Synthetic oligonucleotide
caccgagaagcacauaagg

SEQ ID NO: 2437964 - RNA, 19 nt, Artificial Sequence
  Description of Artificial Sequence: Synthetic oligonucleotide
gggucuauguuacagacac

SEQ ID NO: 2437965 - RNA, 19 nt, Artificial Sequence
  Description of Artificial Sequence: Synthetic oligonucleotide
acggugggacacuaguggc

SEQ ID NO: 2437966 - RNA, 19 nt, Artificial Sequence
  Description of Artificial Sequence: Synthetic oligonucleotide
ugggucacaccacucacca

SEQ ID NO: 2437967 - RNA, 19 nt, Artificial Sequence
  Description of Artificial Sequence: Synthetic oligonucleotide
ucaugcucggaugggaggg

SEQ ID NO: 2437968 - RNA, 19 nt, Artificial Sequence
  Description of Artificial Sequence: Synthetic oligonucleotide
uucaugcucggaugggagg

SEQ ID NO: 2437969 - RNA, 19 nt, Artificial Sequence
  Description of Artificial Sequence: Synthetic oligonucleotide
uucucgaacacggugggca

SEQ ID NO: 2437970 - RNA, 19 nt, Artificial Sequence
  Description of Artificial Sequence: Synthetic oligonucleotide
uaaacgauccauaguccuc

SEQ ID NO: 2437971 - RNA, 19 nt, Artificial Sequence
  Description of Artificial Sequence: Synthetic oligonucleotide
ucaguugcaaaugucuuuc

SEQ ID NO: 2437972 - RNA, 19 nt, Artificial Sequence
  Description of Artificial Sequence: Synthetic oligonucleotide
cacggugggacacuagugg

SEQ ID NO: 2437973 - RNA, 19 nt, Artificial Sequence
  Description of Artificial Sequence: Synthetic oligonucleotide
gaugugaaaagauggccaa

SEQ ID NO: 2437974 - RNA, 19 nt, Artificial Sequence
  Description of Artificial Sequence: Synthetic oligonucleotide
caggaugugaaaagauggc

SEQ ID NO: 2437975 - RNA, 19 nt, Artificial Sequence
  Description of Artificial Sequence: Synthetic oligonucleotide
guuacagacacggugggac

SEQ ID NO: 2437976 - RNA, 19 nt, Artificial Sequence
  Description of Artificial Sequence: Synthetic oligonucleotide
guguucuccagagaguccg

SEQ ID NO: 2437977 - RNA, 19 nt, Artificial Sequence
  Description of Artificial Sequence: Synthetic oligonucleotide
agccgcuuccucucaaccc

SEQ ID NO: 2437978 - RNA, 19 nt, Artificial Sequence
  Description of Artificial Sequence: Synthetic oligonucleotide
acgaucagcaggcacgucu

SEQ ID NO: 2437979 - RNA, 19 nt, Artificial Sequence
  Description of Artificial Sequence: Synthetic oligonucleotide
uccaguucaugcucggaug

SEQ ID NO: 2437980 - RNA, 19 nt, Artificial Sequence
  Description of Artificial Sequence: Synthetic oligonucleotide
agcacauaaggaugacguc

SEQ ID NO: 2437981 - RNA, 19 nt, Artificial Sequence
  Description of Artificial Sequence: Synthetic oligonucleotide
gaauacgaucagcaggcac

SEQ ID NO: 2437982 - RNA, 19 nt, Artificial Sequence
  Description of Artificial Sequence: Synthetic oligonucleotide
auguuacagacacgguggg

SEQ ID NO: 2437983 - RNA, 19 nt, Artificial Sequence
  Description of Artificial Sequence: Synthetic oligonucleotide
gcacauaaggaugacgucg

SEQ ID NO: 2437984 - RNA, 19 nt, Artificial Sequence
  Description of Artificial Sequence: Synthetic oligonucleotide
ugcucuugcgcccuggguc

SEQ ID NO: 2437985 - RNA, 19 nt, Artificial Sequence
  Description of Artificial Sequence: Synthetic oligonucleotide
acuaguggcuugcuggugu

SEQ ID NO: 2437986 - RNA, 19 nt, Artificial Sequence
  Description of Artificial Sequence: Synthetic oligonucleotide
acaacaccauuccgccucc

SEQ ID NO: 2437987 - RNA, 19 nt, Artificial Sequence
  Description of Artificial Sequence: Synthetic oligonucleotide
gauccauaguccuccuggc

SEQ ID NO: 2437988 - RNA, 19 nt, Artificial Sequence
  Description of Artificial Sequence: Synthetic oligonucleotide
ucuauguuacagacacggu

SEQ ID NO: 2437989 - RNA, 19 nt, Artificial Sequence
  Description of Artificial Sequence: Synthetic oligonucleotide
uccucucaaccccaaguca

SEQ ID NO: 2437990 - RNA, 19 nt, Artificial Sequence
  Description of Artificial Sequence: Synthetic oligonucleotide
guccuuacugaauacgauc

SEQ ID NO: 2437991 - RNA, 19 nt, Artificial Sequence
  Description of Artificial Sequence: Synthetic oligonucleotide
accugauccagccugggaa

SEQ ID NO: 2437992 - RNA, 19 nt, Artificial Sequence
  Description of Artificial Sequence: Synthetic oligonucleotide
ugcgcccugggucacacca

SEQ ID NO: 2437993 - RNA, 19 nt, Artificial Sequence
  Description of Artificial Sequence: Synthetic oligonucleotide
ccguaaacgauccauaguc

SEQ ID NO: 2437994 - RNA, 19 nt, Artificial Sequence
  Description of Artificial Sequence: Synthetic oligonucleotide
uacaccucggggaacucgu

SEQ ID NO: 2437995 - RNA, 19 nt, Artificial Sequence
  Description of Artificial Sequence: Synthetic oligonucleotide
accacuaaacaacaccauu

SEQ ID NO: 2437996 - RNA, 19 nt, Artificial Sequence
  Description of Artificial Sequence: Synthetic oligonucleotide
aggagacuaucuggaagcc

SEQ ID NO: 2437997 - RNA, 19 nt, Artificial Sequence
  Description of Artificial Sequence: Synthetic oligonucleotide
uaaggagguucgcuggggu

SEQ ID NO: 2437998 - RNA, 19 nt, Artificial Sequence
  Description of Artificial Sequence: Synthetic oligonucleotide
uugucaucagucaguuuaa

SEQ ID NO: 2437999 - RNA, 19 nt, Artificial Sequence
  Description of Artificial Sequence: Synthetic oligonucleotide
gagaagcacauaaggauga

SEQ ID NO: 2438000 - RNA, 19 nt, Artificial Sequence
  Description of Artificial Sequence: Synthetic oligonucleotide
ucucucggggcucucuggc

SEQ ID NO: 2438001 - RNA, 19 nt, Artificial Sequence
  Description of Artificial Sequence: Synthetic oligonucleotide
agagaguccgggcugucca

SEQ ID NO: 2438002 - RNA, 19 nt, Artificial Sequence
  Description of Artificial Sequence: Synthetic oligonucleotide
caagucaguugcaaauguc

SEQ ID NO: 2438003 - RNA, 19 nt, Artificial Sequence
  Description of Artificial Sequence: Synthetic oligonucleotide
cucguccuuacugaauacg

SEQ ID NO: 2438004 - RNA, 19 nt, Artificial Sequence
  Description of Artificial Sequence: Synthetic oligonucleotide
agagcggccguaaacgauc

SEQ ID NO: 2438005 - RNA, 19 nt, Artificial Sequence
  Description of Artificial Sequence: Synthetic oligonucleotide
ugucuuucccaggauguga

SEQ ID NO: 2438006 - RNA, 19 nt, Artificial Sequence
  Description of Artificial Sequence: Synthetic oligonucleotide
ccacuaaacaacaccauuc

SEQ ID NO: 2438007 - RNA, 19 nt, Artificial Sequence
  Description of Artificial Sequence: Synthetic oligonucleotide
cauaaggaugacgucggug

SEQ ID NO: 2438008 - RNA, 19 nt, Artificial Sequence
  Description of Artificial Sequence: Synthetic oligonucleotide
ucgguguccggguaagaga

SEQ ID NO: 2438009 - RNA, 19 nt, Artificial Sequence
  Description of Artificial Sequence: Synthetic oligonucleotide
aucuggaagccgcuuccuc

SEQ ID NO: 2438010 - RNA, 19 nt, Artificial Sequence
  Description of Artificial Sequence: Synthetic oligonucleotide
uucucucggggcucucugg

SEQ ID NO: 2438011 - RNA, 19 nt, Artificial Sequence
  Description of Artificial Sequence: Synthetic oligonucleotide
guaaacgauccauaguccu

SEQ ID NO: 2438012 - RNA, 19 nt, Artificial Sequence
  Description of Artificial Sequence: Synthetic oligonucleotide
ucgauguccgccacauagu

SEQ ID NO: 2438013 - RNA, 19 nt, Artificial Sequence
  Description of Artificial Sequence: Synthetic oligonucleotide
aacacggugggcacguaca

SEQ ID NO: 2438014 - RNA, 19 nt, Artificial Sequence
  Description of Artificial Sequence: Synthetic oligonucleotide
uaggaucgcuagcugcacc

SEQ ID NO: 2438015 - RNA, 19 nt, Artificial Sequence
  Description of Artificial Sequence: Synthetic oligonucleotide
ucccaggaugugaaaagau

SEQ ID NO: 2438016 - RNA, 19 nt, Artificial Sequence
  Description of Artificial Sequence: Synthetic oligonucleotide
ccuccgaaaauaaaaucug

SEQ ID NO: 2438017 - RNA, 19 nt, Artificial Sequence
  Description of Artificial Sequence: Synthetic oligonucleotide
ugcaccgguacuccgcggu

SEQ ID NO: 2438018 - RNA, 19 nt, Artificial Sequence
  Description of Artificial Sequence: Synthetic oligonucleotide
acucaccaccacuaaacaa

SEQ ID NO: 2438019 - RNA, 19 nt, Artificial Sequence
  Description of Artificial Sequence: Synthetic oligonucleotide
accgagaagcacauaagga

SEQ ID NO: 2438020 - RNA, 19 nt, Artificial Sequence
  Description of Artificial Sequence: Synthetic oligonucleotide
acacuaguggcuugcuggu

SEQ ID NO: 2438021 - RNA, 19 nt, Artificial Sequence
  Description of Artificial Sequence: Synthetic oligonucleotide
cugggucacaccacucacc

SEQ ID NO: 2438022 - RNA, 19 nt, Artificial Sequence
  Description of Artificial Sequence: Synthetic oligonucleotide
ggccaaguccaguucaugc

SEQ ID NO: 2438023 - RNA, 19 nt, Artificial Sequence
  Description of Artificial Sequence: Synthetic oligonucleotide
uccgccacauaguucucga

SEQ ID NO: 2438024 - RNA, 19 nt, Artificial Sequence
  Description of Artificial Sequence: Synthetic oligonucleotide
agagagcggccguaaacga

SEQ ID NO: 2438025 - RNA, 19 nt, Artificial Sequence
  Description of Artificial Sequence: Synthetic oligonucleotide
cucaaccccaagucaguug

SEQ ID NO: 2438026 - RNA, 19 nt, Artificial Sequence
  Description of Artificial Sequence: Synthetic oligonucleotide
guucaugcucggaugggag

SEQ ID NO: 2438027 - RNA, 19 nt, Artificial Sequence
  Description of Artificial Sequence: Synthetic oligonucleotide
cacgucuugccgcacgcgc

SEQ ID NO: 2438028 - RNA, 19 nt, Artificial Sequence
  Description of Artificial Sequence: Synthetic oligonucleotide
aacgauccauaguccuccu

SEQ ID NO: 2438029 - RNA, 19 nt, Artificial Sequence
  Description of Artificial Sequence: Synthetic oligonucleotide
guugcucuugcgcccuggg

SEQ ID NO: 2438030 - RNA, 19 nt, Artificial Sequence
  Description of Artificial Sequence: Synthetic oligonucleotide
cuagcugcaccgguacucc

SEQ ID NO: 2438031 - RNA, 19 nt, Artificial Sequence
  Description of Artificial Sequence: Synthetic oligonucleotide
ggaugugaaaagauggcca

SEQ ID NO: 2438032 - RNA, 19 nt, Artificial Sequence
  Description of Artificial Sequence: Synthetic oligonucleotide
ggccguaaacgauccauag

SEQ ID NO: 2438033 - RNA, 19 nt, Artificial Sequence
  Description of Artificial Sequence: Synthetic oligonucleotide
ccacucaccaccacuaaac

SEQ ID NO: 2438034 - RNA, 19 nt, Artificial Sequence
  Description of Artificial Sequence: Synthetic oligonucleotide
ugcgggcuaggaucgcuag

SEQ ID NO: 2438035 - RNA, 19 nt, Artificial Sequence
  Description of Artificial Sequence: Synthetic oligonucleotide
ggaaaggaguugcucuugc

SEQ ID NO: 2438036 - RNA, 19 nt, Artificial Sequence
  Description of Artificial Sequence: Synthetic oligonucleotide
uggugcguucucucggggc

SEQ ID NO: 2438037 - RNA, 19 nt, Artificial Sequence
  Description of Artificial Sequence: Synthetic oligonucleotide
guuccaggggucuauguua

SEQ ID NO: 2438038 - RNA, 19 nt, Artificial Sequence
  Description of Artificial Sequence: Synthetic oligonucleotide
cgauccauaguccuccugg

SEQ ID NO: 2438039 - RNA, 19 nt, Artificial Sequence
  Description of Artificial Sequence: Synthetic oligonucleotide
ugcggauggccgccaauga

SEQ ID NO: 2438040 - RNA, 19 nt, Artificial Sequence
  Description of Artificial Sequence: Synthetic oligonucleotide
ucgcuagcugcaccgguac

SEQ ID NO: 2438041 - RNA, 19 nt, Artificial Sequence
  Description of Artificial Sequence: Synthetic oligonucleotide
aguucaugcucggauggga

SEQ ID NO: 2438042 - RNA, 19 nt, Artificial Sequence
  Description of Artificial Sequence: Synthetic oligonucleotide
ucucgaacacggugggcac

SEQ ID NO: 2438043 - RNA, 19 nt, Artificial Sequence
  Description of Artificial Sequence: Synthetic oligonucleotide
gccgccaaugagcucaccg

SEQ ID NO: 2438044 - RNA, 19 nt, Artificial Sequence
  Description of Artificial Sequence: Synthetic oligonucleotide
accauuccgccuccgaaaa

SEQ ID NO: 2438045 - RNA, 19 nt, Artificial Sequence
  Description of Artificial Sequence: Synthetic oligonucleotide
ccaguucaugcucggaugg

SEQ ID NO: 2438046 - RNA, 19 nt, Artificial Sequence
  Description of Artificial Sequence: Synthetic oligonucleotide
uguuacagacacgguggga

SEQ ID NO: 2438047 - RNA, 19 nt, Artificial Sequence
  Description of Artificial Sequence: Synthetic oligonucleotide
ggcuaggaucgcuagcugc

SEQ ID NO: 2438048 - RNA, 19 nt, Artificial Sequence
  Description of Artificial Sequence: Synthetic oligonucleotide
agcgccucgccgccguccc

SEQ ID NO: 2438049 - RNA, 19 nt, Artificial Sequence
  Description of Artificial Sequence: Synthetic oligonucleotide
gucgguguccggguaagag

SEQ ID NO: 2438050 - RNA, 19 nt, Artificial Sequence
  Description of Artificial Sequence: Synthetic oligonucleotide
uacagacacggugggacac

SEQ ID NO: 2438051 - RNA, 19 nt, Artificial Sequence
  Description of Artificial Sequence: Synthetic oligonucleotide
uccggguaagagagcggcc

SEQ ID NO: 2438052 - RNA, 19 nt, Artificial Sequence
  Description of Artificial Sequence: Synthetic oligonucleotide
acgucuugccgcacgcgcc

SEQ ID NO: 2438053 - RNA, 19 nt, Artificial Sequence
  Description of Artificial Sequence: Synthetic oligonucleotide
gguggugcguucucucggg

SEQ ID NO: 2438054 - RNA, 19 nt, Artificial Sequence
  Description of Artificial Sequence: Synthetic oligonucleotide
guacaccucggggaacucg

SEQ ID NO: 2438055 - RNA, 19 nt, Artificial Sequence
  Description of Artificial Sequence: Synthetic oligonucleotide
gacacggugggacacuagu

SEQ ID NO: 2438056 - RNA, 19 nt, Artificial Sequence
  Description of Artificial Sequence: Synthetic oligonucleotide
uggcuugcugguguucucc

SEQ ID NO: 2438057 - RNA, 19 nt, Artificial Sequence
  Description of Artificial Sequence: Synthetic oligonucleotide
aggcacgucuugccgcacg

SEQ ID NO: 2438058 - RNA, 19 nt, Artificial Sequence
  Description of Artificial Sequence: Synthetic oligonucleotide
agguucgcugggguuggcc

SEQ ID NO: 2438059 - RNA, 19 nt, Artificial Sequence
  Description of Artificial Sequence: Synthetic oligonucleotide
auacgaucagcaggcacgu

SEQ ID NO: 2438060 - RNA, 19 nt, Artificial Sequence
  Description of Artificial Sequence: Synthetic oligonucleotide
caccucggggaacucgucc

SEQ ID NO: 2438061 - RNA, 19 nt, Artificial Sequence
  Description of Artificial Sequence: Synthetic oligonucleotide
accacucaccaccacuaaa

SEQ ID NO: 2438062 - RNA, 19 nt, Artificial Sequence
  Description of Artificial Sequence: Synthetic oligonucleotide
guucucucggggcucucug

SEQ ID NO: 2438063 - RNA, 19 nt, Artificial Sequence
  Description of Artificial Sequence: Synthetic oligonucleotide
ucgaacacggugggcacgu

SEQ ID NO: 2438064 - RNA, 19 nt, Artificial Sequence
  Description of Artificial Sequence: Synthetic oligonucleotide
ugaauacgaucagcaggca

SEQ ID NO: 2438065 - RNA, 19 nt, Artificial Sequence
  Description of Artificial Sequence: Synthetic oligonucleotide
cguaaacgauccauagucc

SEQ ID NO: 2438066 - RNA, 19 nt, Artificial Sequence
  Description of Artificial Sequence: Synthetic oligonucleotide
ggagacuaucuggaagccg

SEQ ID NO: 2438067 - RNA, 19 nt, Artificial Sequence
  Description of Artificial Sequence: Synthetic oligonucleotide
acauaaggaugacgucggu

SEQ ID NO: 2438068 - RNA, 19 nt, Artificial Sequence
  Description of Artificial Sequence: Synthetic oligonucleotide
uugcucuugcgcccugggu

SEQ ID NO: 2438069 - RNA, 19 nt, Artificial Sequence
  Description of Artificial Sequence: Synthetic oligonucleotide
gccgcuuccucucaacccc

SEQ ID NO: 2438070 - RNA, 19 nt, Artificial Sequence
  Description of Artificial Sequence: Synthetic oligonucleotide
cccgccgugucccacagcg

SEQ ID NO: 2438071 - RNA, 19 nt, Artificial Sequence
  Description of Artificial Sequence: Synthetic oligonucleotide
ucuuucccaggaugugaaa

SEQ ID NO: 2438072 - RNA, 19 nt, Artificial Sequence
  Description of Artificial Sequence: Synthetic oligonucleotide
ucggggaacucguccuuac

SEQ ID NO: 2438073 - RNA, 19 nt, Artificial Sequence
  Description of Artificial Sequence: Synthetic oligonucleotide
caguucaugcucggauggg

SEQ ID NO: 2438074 - RNA, 19 nt, Artificial Sequence
  Description of Artificial Sequence: Synthetic oligonucleotide
agucaguugcaaaugucuu

SEQ ID NO: 2438075 - RNA, 19 nt, Artificial Sequence
  Description of Artificial Sequence: Synthetic oligonucleotide
gauguccgccacauaguuc

SEQ ID NO: 2438076 - RNA, 19 nt, Artificial Sequence
  Description of Artificial Sequence: Synthetic oligonucleotide
cuccgaaaauaaaaucugu

SEQ ID NO: 2438077 - RNA, 19 nt, Artificial Sequence
  Description of Artificial Sequence: Synthetic oligonucleotide
acgauccauaguccuccug

SEQ ID NO: 2438078 - RNA, 19 nt, Artificial Sequence
  Description of Artificial Sequence: Synthetic oligonucleotide
aguugcucuugcgcccugg

SEQ ID NO: 2438079 - RNA, 19 nt, Artificial Sequence
  Description of Artificial Sequence: Synthetic oligonucleotide
ccgccaaugagcucaccgg

SEQ ID NO: 2438080 - RNA, 19 nt, Artificial Sequence
  Description of Artificial Sequence: Synthetic oligonucleotide
gcugcaccgguacuccgcg

SEQ ID NO: 2438081 - RNA, 19 nt, Artificial Sequence
  Description of Artificial Sequence: Synthetic oligonucleotide
guccgccacauaguucucg

SEQ ID NO: 2438082 - RNA, 19 nt, Artificial Sequence
  Description of Artificial Sequence: Synthetic oligonucleotide
cacucaccaccacuaaaca

SEQ ID NO: 2438083 - RNA, 19 nt, Artificial Sequence
  Description of Artificial Sequence: Synthetic oligonucleotide
guggugcguucucucgggg

SEQ ID NO: 2438084 - RNA, 19 nt, Artificial Sequence
  Description of Artificial Sequence: Synthetic oligonucleotide
gguacuccgcgguggugcg

SEQ ID NO: 2438085 - RNA, 19 nt, Artificial Sequence
  Description of Artificial Sequence: Synthetic oligonucleotide
uuccgccuccgaaaauaaa

SEQ ID NO: 2438086 - RNA, 19 nt, Artificial Sequence
  Description of Artificial Sequence: Synthetic oligonucleotide
acguacaccucggggaacu

SEQ ID NO: 2438087 - RNA, 19 nt, Artificial Sequence
  Description of Artificial Sequence: Synthetic oligonucleotide
uccagagaguccgggcugu

SEQ ID NO: 2438088 - RNA, 19 nt, Artificial Sequence
  Description of Artificial Sequence: Synthetic oligonucleotide
ccguccaccucgauguccg

SEQ ID NO: 2438089 - RNA, 19 nt, Artificial Sequence
  Description of Artificial Sequence: Synthetic oligonucleotide
ccuuacugaauacgaucag

SEQ ID NO: 2438090 - RNA, 19 nt, Artificial Sequence
  Description of Artificial Sequence: Synthetic oligonucleotide
acacggugggacacuagug

SEQ ID NO: 2438091 - RNA, 19 nt, Artificial Sequence
  Description of Artificial Sequence: Synthetic oligonucleotide
caggggucuauguuacaga

SEQ ID NO: 2438092 - RNA, 19 nt, Artificial Sequence
  Description of Artificial Sequence: Synthetic oligonucleotide
gccuccgaaaauaaaaucu

SEQ ID NO: 2438093 - RNA, 19 nt, Artificial Sequence
  Description of Artificial Sequence: Synthetic oligonucleotide
cuaggaucgcuagcugcac

SEQ ID NO: 2438094 - RNA, 19 nt, Artificial Sequence
  Description of Artificial Sequence: Synthetic oligonucleotide
uggccaaguccaguucaug

SEQ ID NO: 2438095 - RNA, 19 nt, Artificial Sequence
  Description of Artificial Sequence: Synthetic oligonucleotide
ccaaguccaguucaugcuc

SEQ ID NO: 2438096 - RNA, 19 nt, Artificial Sequence
  Description of Artificial Sequence: Synthetic oligonucleotide
cauuccgccuccgaaaaua

SEQ ID NO: 2438097 - RNA, 19 nt, Artificial Sequence
  Description of Artificial Sequence: Synthetic oligonucleotide
caucuuccccaacccuccc

SEQ ID NO: 2438098 - RNA, 19 nt, Artificial Sequence
  Description of Artificial Sequence: Synthetic oligonucleotide
ggcgcgggcagcaggaggg

SEQ ID NO: 2438099 - RNA, 19 nt, Artificial Sequence
  Description of Artificial Sequence: Synthetic oligonucleotide
cgguguccggguaagagag

SEQ ID NO: 2438100 - RNA, 19 nt, Artificial Sequence
  Description of Artificial Sequence: Synthetic oligonucleotide
gagcggccguaaacgaucc

SEQ ID NO: 2438101 - RNA, 19 nt, Artificial Sequence
  Description of Artificial Sequence: Synthetic oligonucleotide
ccaggggucuauguuacag

SEQ ID NO: 2438102 - RNA, 19 nt, Artificial Sequence
  Description of Artificial Sequence: Synthetic oligonucleotide
acaccacucaccaccacua

SEQ ID NO: 2438103 - RNA, 19 nt, Artificial Sequence
  Description of Artificial Sequence: Synthetic oligonucleotide
cggauggccgccaaugagc

SEQ ID NO: 2438104 - RNA, 19 nt, Artificial Sequence
  Description of Artificial Sequence: Synthetic oligonucleotide
cagagaguccgggcugucc

SEQ ID NO: 2438105 - RNA, 19 nt, Artificial Sequence
  Description of Artificial Sequence: Synthetic oligonucleotide
caccauuccgccuccgaaa

SEQ ID NO: 2438106 - RNA, 19 nt, Artificial Sequence
  Description of Artificial Sequence: Synthetic oligonucleotide
ccgaaaauaaaaucuguau

SEQ ID NO: 2438107 - RNA, 19 nt, Artificial Sequence
  Description of Artificial Sequence: Synthetic oligonucleotide
ccggguaagagagcggccg

SEQ ID NO: 2438108 - RNA, 19 nt, Artificial Sequence
  Description of Artificial Sequence: Synthetic oligonucleotide
gagcucaccgggcgcgggc

SEQ ID NO: 2438109 - RNA, 19 nt, Artificial Sequence
  Description of Artificial Sequence: Synthetic oligonucleotide
caccgguacuccgcggugg

SEQ ID NO: 2438110 - RNA, 19 nt, Artificial Sequence
  Description of Artificial Sequence: Synthetic oligonucleotide
ggacacuaguggcuugcug

SEQ ID NO: 2438111 - RNA, 19 nt, Artificial Sequence
  Description of Artificial Sequence: Synthetic oligonucleotide
gucaguugcaaaugucuuu

SEQ ID NO: 2438112 - RNA, 19 nt, Artificial Sequence
  Description of Artificial Sequence: Synthetic oligonucleotide
accgguacuccgcgguggu

SEQ ID NO: 2438113 - RNA, 19 nt, Artificial Sequence
  Description of Artificial Sequence: Synthetic oligonucleotide
guucgcugggguuggccca

SEQ ID NO: 2438114 - RNA, 19 nt, Artificial Sequence
  Description of Artificial Sequence: Synthetic oligonucleotide
uccgggcuguccaccgaga

SEQ ID NO: 2438115 - RNA, 19 nt, Artificial Sequence
  Description of Artificial Sequence: Synthetic oligonucleotide
gcggauggccgccaaugag

SEQ ID NO: 2438116 - RNA, 19 nt, Artificial Sequence
  Description of Artificial Sequence: Synthetic oligonucleotide
ucggaugggagggcaccug

SEQ ID NO: 2438117 - RNA, 19 nt, Artificial Sequence
  Description of Artificial Sequence: Synthetic oligonucleotide
ggaacucguccuuacugaa

SEQ ID NO: 2438118 - RNA, 19 nt, Artificial Sequence
  Description of Artificial Sequence: Synthetic oligonucleotide
caugcucggaugggagggc

SEQ ID NO: 2438119 - RNA, 19 nt, Artificial Sequence
  Description of Artificial Sequence: Synthetic oligonucleotide
gcgguggugcguucucucg

SEQ ID NO: 2438120 - RNA, 19 nt, Artificial Sequence
  Description of Artificial Sequence: Synthetic oligonucleotide
gacgucgguguccggguaa

SEQ ID NO: 2438121 - RNA, 19 nt, Artificial Sequence
  Description of Artificial Sequence: Synthetic oligonucleotide
ggucuauguuacagacacg

SEQ ID NO: 2438122 - RNA, 19 nt, Artificial Sequence
  Description of Artificial Sequence: Synthetic oligonucleotide
acagacacggugggacacu

SEQ ID NO: 2438123 - RNA, 19 nt, Artificial Sequence
  Description of Artificial Sequence: Synthetic oligonucleotide
ugcuugccguccaccucga

SEQ ID NO: 2438124 - RNA, 19 nt, Artificial Sequence
  Description of Artificial Sequence: Synthetic oligonucleotide
ucccgugguuccagggguc

SEQ ID NO: 2438125 - RNA, 19 nt, Artificial Sequence
  Description of Artificial Sequence: Synthetic oligonucleotide
ggagguucgcugggguugg

SEQ ID NO: 2438126 - RNA, 19 nt, Artificial Sequence
  Description of Artificial Sequence: Synthetic oligonucleotide
augagcucaccgggcgcgg

SEQ ID NO: 2438127 - RNA, 19 nt, Artificial Sequence
  Description of Artificial Sequence: Synthetic oligonucleotide
auuccgccuccgaaaauaa

SEQ ID NO: 2438128 - RNA, 19 nt, Artificial Sequence
  Description of Artificial Sequence: Synthetic oligonucleotide
cauaguucucgaacacggu

SEQ ID NO: 2438129 - RNA, 19 nt, Artificial Sequence
  Description of Artificial Sequence: Synthetic oligonucleotide
gugggacacuaguggcuug

SEQ ID NO: 2438130 - RNA, 19 nt, Artificial Sequence
  Description of Artificial Sequence: Synthetic oligonucleotide
gaucgcuagcugcaccggu

SEQ ID NO: 2438131 - RNA, 19 nt, Artificial Sequence
  Description of Artificial Sequence: Synthetic oligonucleotide
gucacaccacucaccacca

SEQ ID NO: 2438132 - RNA, 19 nt, Artificial Sequence
  Description of Artificial Sequence: Synthetic oligonucleotide
uugccgcacgcgccgucgc

SEQ ID NO: 2438133 - RNA, 19 nt, Artificial Sequence
  Description of Artificial Sequence: Synthetic oligonucleotide
ugccgcacgcgccgucgcc

SEQ ID NO: 2438134 - RNA, 19 nt, Artificial Sequence
  Description of Artificial Sequence: Synthetic oligonucleotide
cuugcgcccugggucacac

SEQ ID NO: 2438135 - RNA, 19 nt, Artificial Sequence
  Description of Artificial Sequence: Synthetic oligonucleotide
cgccaaugagcucaccggg

SEQ ID NO: 2438136 - RNA, 19 nt, Artificial Sequence
  Description of Artificial Sequence: Synthetic oligonucleotide
agacuaucuggaagccgcu

SEQ ID NO: 2438137 - RNA, 19 nt, Artificial Sequence
  Description of Artificial Sequence: Synthetic oligonucleotide
gggaaaggaguugcucuug

SEQ ID NO: 2438138 - RNA, 19 nt, Artificial Sequence
  Description of Artificial Sequence: Synthetic oligonucleotide
guucucgaacacggugggc

SEQ ID NO: 2438139 - RNA, 19 nt, Artificial Sequence
  Description of Artificial Sequence: Synthetic oligonucleotide
cccaagucaguugcaaaug

SEQ ID NO: 2438140 - RNA, 19 nt, Artificial Sequence
  Description of Artificial Sequence: Synthetic oligonucleotide
gcuagcugcaccgguacuc

SEQ ID NO: 2438141 - RNA, 19 nt, Artificial Sequence
  Description of Artificial Sequence: Synthetic oligonucleotide
ccucccgugguuccagggg

SEQ ID NO: 2438142 - RNA, 19 nt, Artificial Sequence
  Description of Artificial Sequence: Synthetic oligonucleotide
cacaccacucaccaccacu

SEQ ID NO: 2438143 - RNA, 19 nt, Artificial Sequence
  Description of Artificial Sequence: Synthetic oligonucleotide
uccgcgguggugcguucuc

SEQ ID NO: 2438144 - RNA, 19 nt, Artificial Sequence
  Description of Artificial Sequence: Synthetic oligonucleotide
gcucuugcgcccuggguca

SEQ ID NO: 2438145 - RNA, 19 nt, Artificial Sequence
  Description of Artificial Sequence: Synthetic oligonucleotide
ugcguucucucggggcucu

SEQ ID NO: 2438146 - RNA, 19 nt, Artificial Sequence
  Description of Artificial Sequence: Synthetic oligonucleotide
gauggccgccaaugagcuc

SEQ ID NO: 2438147 - RNA, 19 nt, Artificial Sequence
  Description of Artificial Sequence: Synthetic oligonucleotide
ggaucgcuagcugcaccgg

SEQ ID NO: 2438148 - RNA, 19 nt, Artificial Sequence
  Description of Artificial Sequence: Synthetic oligonucleotide
gccaaugagcucaccgggc

SEQ ID NO: 2438149 - RNA, 19 nt, Artificial Sequence
  Description of Artificial Sequence: Synthetic oligonucleotide
cugcaccgguacuccgcgg

SEQ ID NO: 2438150 - RNA, 19 nt, Artificial Sequence
  Description of Artificial Sequence: Synthetic oligonucleotide
uguccgccacauaguucuc

SEQ ID NO: 2438151 - RNA, 19 nt, Artificial Sequence
  Description of Artificial Sequence: Synthetic oligonucleotide
gcuuccucucaaccccaag

SEQ ID NO: 2438152 - RNA, 19 nt, Artificial Sequence
  Description of Artificial Sequence: Synthetic oligonucleotide
cacuaguggcuugcuggug

SEQ ID NO: 2438153 - RNA, 19 nt, Artificial Sequence
  Description of Artificial Sequence: Synthetic oligonucleotide
uacuccgcgguggugcguu

SEQ ID NO: 2438154 - RNA, 19 nt, Artificial Sequence
  Description of Artificial Sequence: Synthetic oligonucleotide
uccccucccgugguuccag

SEQ ID NO: 2438155 - RNA, 19 nt, Artificial Sequence
  Description of Artificial Sequence: Synthetic oligonucleotide
guuggcccaggagacuauc

SEQ ID NO: 2438156 - RNA, 19 nt, Artificial Sequence
  Description of Artificial Sequence: Synthetic oligonucleotide
gaguugcucuugcgcccug

SEQ ID NO: 2438157 - RNA, 19 nt, Artificial Sequence
  Description of Artificial Sequence: Synthetic oligonucleotide
augcucggaugggagggca

SEQ ID NO: 2438158 - RNA, 19 nt, Artificial Sequence
  Description of Artificial Sequence: Synthetic oligonucleotide
ggugcguucucucggggcu

SEQ ID NO: 2438159 - RNA, 19 nt, Artificial Sequence
  Description of Artificial Sequence: Synthetic oligonucleotide
ggcucucuggcugccgcgg

SEQ ID NO: 2438160 - RNA, 19 nt, Artificial Sequence
  Description of Artificial Sequence: Synthetic oligonucleotide
aucgcuagcugcaccggua

SEQ ID NO: 2438161 - RNA, 19 nt, Artificial Sequence
  Description of Artificial Sequence: Synthetic oligonucleotide
agacacggugggacacuag

SEQ ID NO: 2438162 - RNA, 19 nt, Artificial Sequence
  Description of Artificial Sequence: Synthetic oligonucleotide
gugguuccaggggucuaug

SEQ ID NO: 2438163 - RNA, 19 nt, Artificial Sequence
  Description of Artificial Sequence: Synthetic oligonucleotide
acuccgcgguggugcguuc

SEQ ID NO: 2438164 - RNA, 19 nt, Artificial Sequence
  Description of Artificial Sequence: Synthetic oligonucleotide
cucucaaccccaagucagu

SEQ ID NO: 2438165 - RNA, 19 nt, Artificial Sequence
  Description of Artificial Sequence: Synthetic oligonucleotide
acaccucggggaacucguc

SEQ ID NO: 2438166 - RNA, 19 nt, Artificial Sequence
  Description of Artificial Sequence: Synthetic oligonucleotide
uaguggcuugcugguguuc

SEQ ID NO: 2438167 - RNA, 19 nt, Artificial Sequence
  Description of Artificial Sequence: Synthetic oligonucleotide
auggccaaguccaguucau

SEQ ID NO: 2438168 - RNA, 19 nt, Artificial Sequence
  Description of Artificial Sequence: Synthetic oligonucleotide
cccgcgagcgccucgccgc

SEQ ID NO: 2438169 - RNA, 19 nt, Artificial Sequence
  Description of Artificial Sequence: Synthetic oligonucleotide
gggcucucuggcugccgcg

SEQ ID NO: 2438170 - RNA, 19 nt, Artificial Sequence
  Description of Artificial Sequence: Synthetic oligonucleotide
gaacucguccuuacugaau

SEQ ID NO: 2438171 - RNA, 19 nt, Artificial Sequence
  Description of Artificial Sequence: Synthetic oligonucleotide
uggccgccaaugagcucac

SEQ ID NO: 2438172 - RNA, 19 nt, Artificial Sequence
  Description of Artificial Sequence: Synthetic oligonucleotide
cgccgugucccacagcgcc

SEQ ID NO: 2438173 - RNA, 19 nt, Artificial Sequence
  Description of Artificial Sequence: Synthetic oligonucleotide
caccugauccagccuggga

SEQ ID NO: 2438174 - RNA, 19 nt, Artificial Sequence
  Description of Artificial Sequence: Synthetic oligonucleotide
gagcgccucgccgccgucc

SEQ ID NO: 2438175 - RNA, 19 nt, Artificial Sequence
  Description of Artificial Sequence: Synthetic oligonucleotide
caaccccaagucaguugca

SEQ ID NO: 2438176 - RNA, 19 nt, Artificial Sequence
  Description of Artificial Sequence: Synthetic oligonucleotide
cgccuccgaaaauaaaauc

SEQ ID NO: 2438177 - RNA, 19 nt, Artificial Sequence
  Description of Artificial Sequence: Synthetic oligonucleotide
cacguacaccucggggaac

SEQ ID NO: 2438178 - RNA, 19 nt, Artificial Sequence
  Description of Artificial Sequence: Synthetic oligonucleotide
gggcuaggaucgcuagcug

SEQ ID NO: 2438179 - RNA, 19 nt, Artificial Sequence
  Description of Artificial Sequence: Synthetic oligonucleotide
agcggccguaaacgaucca

SEQ ID NO: 2438180 - RNA, 19 nt, Artificial Sequence
  Description of Artificial Sequence: Synthetic oligonucleotide
gcucggaugggagggcacc

SEQ ID NO: 2438181 - RNA, 19 nt, Artificial Sequence
  Description of Artificial Sequence: Synthetic oligonucleotide
ugccguccaccucgauguc

SEQ ID NO: 2438182 - RNA, 19 nt, Artificial Sequence
  Description of Artificial Sequence: Synthetic oligonucleotide
agcucaccgggcgcgggca

SEQ ID NO: 2438183 - RNA, 19 nt, Artificial Sequence
  Description of Artificial Sequence: Synthetic oligonucleotide
cucaccgggcgcgggcagc

SEQ ID NO: 2438184 - RNA, 19 nt, Artificial Sequence
  Description of Artificial Sequence: Synthetic oligonucleotide
gccguaaacgauccauagu

SEQ ID NO: 2438185 - RNA, 19 nt, Artificial Sequence
  Description of Artificial Sequence: Synthetic oligonucleotide
cucccgugguuccaggggu

SEQ ID NO: 2438186 - RNA, 19 nt, Artificial Sequence
  Description of Artificial Sequence: Synthetic oligonucleotide
gguuccaggggucuauguu

SEQ ID NO: 2438187 - RNA, 19 nt, Artificial Sequence
  Description of Artificial Sequence: Synthetic oligonucleotide
ggggucuauguuacagaca

SEQ ID NO: 2438188 - RNA, 19 nt, Artificial Sequence
  Description of Artificial Sequence: Synthetic oligonucleotide
uugcgcccugggucacacc

SEQ ID NO: 2438189 - RNA, 19 nt, Artificial Sequence
  Description of Artificial Sequence: Synthetic oligonucleotide
gcgcugcgggcuaggaucg

SEQ ID NO: 2438190 - RNA, 19 nt, Artificial Sequence
  Description of Artificial Sequence: Synthetic oligonucleotide
ccaagucaguugcaaaugu

SEQ ID NO: 2438191 - RNA, 19 nt, Artificial Sequence
  Description of Artificial Sequence: Synthetic oligonucleotide
gagagcggccguaaacgau

SEQ ID NO: 2438192 - RNA, 19 nt, Artificial Sequence
  Description of Artificial Sequence: Synthetic oligonucleotide
uacgaucagcaggcacguc

SEQ ID NO: 2438193 - RNA, 19 nt, Artificial Sequence
  Description of Artificial Sequence: Synthetic oligonucleotide
gcgggcuaggaucgcuagc

SEQ ID NO: 2438194 - RNA, 19 nt, Artificial Sequence
  Description of Artificial Sequence: Synthetic oligonucleotide
cccucccgugguuccaggg

SEQ ID NO: 2438195 - RNA, 19 nt, Artificial Sequence
  Description of Artificial Sequence: Synthetic oligonucleotide
cgguggugcguucucucgg

SEQ ID NO: 2438196 - RNA, 19 nt, Artificial Sequence
  Description of Artificial Sequence: Synthetic oligonucleotide
cccgcucccugcuugccac

SEQ ID NO: 2438197 - RNA, 19 nt, Artificial Sequence
  Description of Artificial Sequence: Synthetic oligonucleotide
cgguacuccgcgguggugc

SEQ ID NO: 2438198 - RNA, 19 nt, Artificial Sequence
  Description of Artificial Sequence: Synthetic oligonucleotide
gcaccgguacuccgcggug

SEQ ID NO: 2438199 - RNA, 19 nt, Artificial Sequence
  Description of Artificial Sequence: Synthetic oligonucleotide
caccacucaccaccacuaa

SEQ ID NO: 2438200 - RNA, 19 nt, Artificial Sequence
  Description of Artificial Sequence: Synthetic oligonucleotide
gcacgucuugccgcacgcg

SEQ ID NO: 2438201 - RNA, 19 nt, Artificial Sequence
  Description of Artificial Sequence: Synthetic oligonucleotide
ggauggccgccaaugagcu

SEQ ID NO: 2438202 - RNA, 19 nt, Artificial Sequence
  Description of Artificial Sequence: Synthetic oligonucleotide
cugcgggcuaggaucgcua

SEQ ID NO: 2438203 - RNA, 19 nt, Artificial Sequence
  Description of Artificial Sequence: Synthetic oligonucleotide
gagguucgcugggguuggc

SEQ ID NO: 2438204 - RNA, 19 nt, Artificial Sequence
  Description of Artificial Sequence: Synthetic oligonucleotide
gcuguccaccgagaagcac

SEQ ID NO: 2438205 - RNA, 19 nt, Artificial Sequence
  Description of Artificial Sequence: Synthetic oligonucleotide
gacuaucuggaagccgcuu

SEQ ID NO: 2438206 - RNA, 19 nt, Artificial Sequence
  Description of Artificial Sequence: Synthetic oligonucleotide
gugcguucucucggggcuc

SEQ ID NO: 2438207 - RNA, 19 nt, Artificial Sequence
  Description of Artificial Sequence: Synthetic oligonucleotide
ggguuggcccaggagacua

SEQ ID NO: 2438208 - RNA, 19 nt, Artificial Sequence
  Description of Artificial Sequence: Synthetic oligonucleotide
cucuugcgcccugggucac

SEQ ID NO: 2438209 - RNA, 19 nt, Artificial Sequence
  Description of Artificial Sequence: Synthetic oligonucleotide
ccccaagucaguugcaaau

SEQ ID NO: 2438210 - RNA, 19 nt, Artificial Sequence
  Description of Artificial Sequence: Synthetic oligonucleotide
cuaguggcuugcugguguu

SEQ ID NO: 2438211 - RNA, 19 nt, Artificial Sequence
  Description of Artificial Sequence: Synthetic oligonucleotide
gcucaccgggcgcgggcag

SEQ ID NO: 2438212 - RNA, 19 nt, Artificial Sequence
  Description of Artificial Sequence: Synthetic oligonucleotide
ccgucccgcucccugcuug

SEQ ID NO: 2438213 - RNA, 19 nt, Artificial Sequence
  Description of Artificial Sequence: Synthetic oligonucleotide
cacgcgccgucgcccacca

SEQ ID NO: 2438214 - RNA, 19 nt, Artificial Sequence
  Description of Artificial Sequence: Synthetic oligonucleotide
aggggcccgcgagcgccuc

SEQ ID NO: 2438215 - RNA, 19 nt, Artificial Sequence
  Description of Artificial Sequence: Synthetic oligonucleotide
caggcacgucuugccgcac

SEQ ID NO: 2438216 - RNA, 19 nt, Artificial Sequence
  Description of Artificial Sequence: Synthetic oligonucleotide
gccgcacgcgccgucgccc

SEQ ID NO: 2438217 - RNA, 19 nt, Artificial Sequence
  Description of Artificial Sequence: Synthetic oligonucleotide
caguuuaauuaaggagguu

SEQ ID NO: 2438218 - RNA, 19 nt, Artificial Sequence
  Description of Artificial Sequence: Synthetic oligonucleotide
cuugcggauggccgccaau

SEQ ID NO: 2438219 - RNA, 19 nt, Artificial Sequence
  Description of Artificial Sequence: Synthetic oligonucleotide
gcggccguaaacgauccau

SEQ ID NO: 2438220 - RNA, 19 nt, Artificial Sequence
  Description of Artificial Sequence: Synthetic oligonucleotide
cucggaugggagggcaccu

SEQ ID NO: 2438221 - RNA, 19 nt, Artificial Sequence
  Description of Artificial Sequence: Synthetic oligonucleotide
ccgccgucccgcucccugc

SEQ ID NO: 2438222 - RNA, 19 nt, Artificial Sequence
  Description of Artificial Sequence: Synthetic oligonucleotide
cgucccgcucccugcuugc

SEQ ID NO: 2438223 - RNA, 19 nt, Artificial Sequence
  Description of Artificial Sequence: Synthetic oligonucleotide
cgcgguggugcguucucuc

SEQ ID NO: 2438224 - RNA, 19 nt, Artificial Sequence
  Description of Artificial Sequence: Synthetic oligonucleotide
ccccucccgugguuccagg

SEQ ID NO: 2438225 - RNA, 19 nt, Artificial Sequence
  Description of Artificial Sequence: Synthetic oligonucleotide
ccgccgugucccacagcgc

SEQ ID NO: 2438226 - RNA, 19 nt, Artificial Sequence
  Description of Artificial Sequence: Synthetic oligonucleotide
gcacgcgccgucgcccacc

SEQ ID NO: 2438227 - RNA, 19 nt, Artificial Sequence
  Description of Artificial Sequence: Synthetic oligonucleotide
gcgcgggcagcaggagggg

SEQ ID NO: 2438228 - RNA, 19 nt, Artificial Sequence
  Description of Artificial Sequence: Synthetic oligonucleotide
gggcccgcgagcgccucgc

SEQ ID NO: 2438229 - RNA, 19 nt, Artificial Sequence
  Description of Artificial Sequence: Synthetic oligonucleotide
cguccuuacugaauacgau

SEQ ID NO: 2438230 - RNA, 19 nt, Artificial Sequence
  Description of Artificial Sequence: Synthetic oligonucleotide
ccgcuuccucucaacccca

SEQ ID NO: 2438231 - RNA, 19 nt, Artificial Sequence
  Description of Artificial Sequence: Synthetic oligonucleotide
gccgugucccacagcgcca

SEQ ID NO: 2438232 - RNA, 19 nt, Artificial Sequence
  Description of Artificial Sequence: Synthetic oligonucleotide
cgggcuaggaucgcuagcu

SEQ ID NO: 2438233 - RNA, 19 nt, Artificial Sequence
  Description of Artificial Sequence: Synthetic oligonucleotide
caccgggcgcgggcagcag

SEQ ID NO: 2438234 - RNA, 19 nt, Artificial Sequence
  Description of Artificial Sequence: Synthetic oligonucleotide
cccuccccucccgugguuc

SEQ ID NO: 2438235 - RNA, 19 nt, Artificial Sequence
  Description of Artificial Sequence: Synthetic oligonucleotide
gcgccucgccgccgucccg

SEQ ID NO: 2438236 - RNA, 19 nt, Artificial Sequence
  Description of Artificial Sequence: Synthetic oligonucleotide
cggccguaaacgauccaua

SEQ ID NO: 2438237 - RNA, 19 nt, Artificial Sequence
  Description of Artificial Sequence: Synthetic oligonucleotide
cguccaccucgauguccgc

SEQ ID NO: 2438238 - RNA, 19 nt, Artificial Sequence
  Description of Artificial Sequence: Synthetic oligonucleotide
gggacacuaguggcuugcu

SEQ ID NO: 2438239 - RNA, 19 nt, Artificial Sequence
  Description of Artificial Sequence: Synthetic oligonucleotide
gcgcccugggucacaccac

SEQ ID NO: 2438240 - RNA, 19 nt, Artificial Sequence
  Description of Artificial Sequence: Synthetic oligonucleotide
gcugcgggcuaggaucgcu

SEQ ID NO: 2438241 - RNA, 19 nt, Artificial Sequence
  Description of Artificial Sequence: Synthetic oligonucleotide
gcccugggucacaccacuc

SEQ ID NO: 2438242 - RNA, 19 nt, Artificial Sequence
  Description of Artificial Sequence: Synthetic oligonucleotide
ccgccacauaguucucgaa

SEQ ID NO: 2438243 - RNA, 19 nt, Artificial Sequence
  Description of Artificial Sequence: Synthetic oligonucleotide
cgauguccgccacauaguu

SEQ ID NO: 2438244 - RNA, 19 nt, Artificial Sequence
  Description of Artificial Sequence: Synthetic oligonucleotide
guacuccgcgguggugcgu

SEQ ID NO: 2438245 - RNA, 19 nt, Artificial Sequence
  Description of Artificial Sequence: Synthetic oligonucleotide
cgccucgccgccgucccgc

SEQ ID NO: 2438246 - RNA, 19 nt, Artificial Sequence
  Description of Artificial Sequence: Synthetic oligonucleotide
cuccgcgguggugcguucu

SEQ ID NO: 2438247 - RNA, 19 nt, Artificial Sequence
  Description of Artificial Sequence: Synthetic oligonucleotide
ccgguacuccgcgguggug

SEQ ID NO: 2438248 - RNA, 19 nt, Artificial Sequence
  Description of Artificial Sequence: Synthetic oligonucleotide
ggcgcgcugcgggcuagga

SEQ ID NO: 2438249 - RNA, 19 nt, Artificial Sequence
  Description of Artificial Sequence: Synthetic oligonucleotide
gggguuggcccaggagacu

SEQ ID NO: 2438250 - RNA, 19 nt, Artificial Sequence
  Description of Artificial Sequence: Synthetic oligonucleotide
ggccgccaaugagcucacc

SEQ ID NO: 2438251 - RNA, 19 nt, Artificial Sequence
  Description of Artificial Sequence: Synthetic oligonucleotide
cguacaccucggggaacuc

SEQ ID NO: 2438252 - RNA, 19 nt, Artificial Sequence
  Description of Artificial Sequence: Synthetic oligonucleotide
gcccgccgugucccacagc

SEQ ID NO: 2438253 - RNA, 19 nt, Artificial Sequence
  Description of Artificial Sequence: Synthetic oligonucleotide
gcggcgcgcugcgggcuag

SEQ ID NO: 2438254 - RNA, 19 nt, Artificial Sequence
  Description of Artificial Sequence: Synthetic oligonucleotide
gcgagcgccucgccgccgu

SEQ ID NO: 2438255 - RNA, 19 nt, Artificial Sequence
  Description of Artificial Sequence: Synthetic oligonucleotide
ccgcacgcgccgucgccca

SEQ ID NO: 2438256 - RNA, 19 nt, Artificial Sequence
  Description of Artificial Sequence: Synthetic oligonucleotide
cggggcucucuggcugccg

SEQ ID NO: 2438257 - RNA, 19 nt, Artificial Sequence
  Description of Artificial Sequence: Synthetic oligonucleotide
gcgcgcugcgggcuaggau

SEQ ID NO: 2438258 - RNA, 19 nt, Artificial Sequence
  Description of Artificial Sequence: Synthetic oligonucleotide
ccauuccgccuccgaaaau

SEQ ID NO: 2438259 - RNA, 19 nt, Artificial Sequence
  Description of Artificial Sequence: Synthetic oligonucleotide
cccaacccuccccucccgu

SEQ ID NO: 2438260 - RNA, 19 nt, Artificial Sequence
  Description of Artificial Sequence: Synthetic oligonucleotide
cccgugguuccaggggucu

SEQ ID NO: 2438261 - RNA, 19 nt, Artificial Sequence
  Description of Artificial Sequence: Synthetic oligonucleotide
gcguucucucggggcucuc

SEQ ID NO: 2438262 - RNA, 19 nt, Artificial Sequence
  Description of Artificial Sequence: Synthetic oligonucleotide
cgugguuccaggggucuau

SEQ ID NO: 2438263 - RNA, 19 nt, Artificial Sequence
  Description of Artificial Sequence: Synthetic oligonucleotide
cgcugcgggcuaggaucgc

SEQ ID NO: 2438264 - RNA, 19 nt, Artificial Sequence
  Description of Artificial Sequence: Synthetic oligonucleotide
cguucucucggggcucucu

SEQ ID NO: 2438265 - RNA, 19 nt, Artificial Sequence
  Description of Artificial Sequence: Synthetic oligonucleotide
cgcacgcgccgucgcccac

SEQ ID NO: 2438266 - RNA, 19 nt, Artificial Sequence
  Description of Artificial Sequence: Synthetic oligonucleotide
cgucgguguccggguaaga

SEQ ID NO: 2438267 - RNA, 19 nt, Artificial Sequence
  Description of Artificial Sequence: Synthetic oligonucleotide
cgcuagcugcaccgguacu

SEQ ID NO: 2438268 - RNA, 19 nt, Artificial Sequence
  Description of Artificial Sequence: Synthetic oligonucleotide
ccgugguuccaggggucua

SEQ ID NO: 2438269 - RNA, 19 nt, Artificial Sequence
  Description of Artificial Sequence: Synthetic oligonucleotide
cgagcgccucgccgccguc

SEQ ID NO: 2438270 - RNA, 19 nt, Artificial Sequence
  Description of Artificial Sequence: Synthetic oligonucleotide
cggcgcgcugcgggcuagg

SEQ ID NO: 2438271 - RNA, 19 nt, Artificial Sequence
  Description of Artificial Sequence: Synthetic oligonucleotide
gccgucccgcucccugcuu

SEQ ID NO: 2438272 - RNA, 19 nt, Artificial Sequence
  Description of Artificial Sequence: Synthetic oligonucleotide
ccccggcggcgcgcugcgg

SEQ ID NO: 2438273 - RNA, 19 nt, Artificial Sequence
  Description of Artificial Sequence: Synthetic oligonucleotide
ccgcgguggugcguucucu

SEQ ID NO: 2438274 - RNA, 19 nt, Artificial Sequence
  Description of Artificial Sequence: Synthetic oligonucleotide
cgccgucccgcucccugcu

SEQ ID NO: 2438275 - RNA, 19 nt, Artificial Sequence
  Description of Artificial Sequence: Synthetic oligonucleotide
cgaacacggugggcacgua

SEQ ID NO: 2438276 - RNA, 19 nt, Artificial Sequence
  Description of Artificial Sequence: Synthetic oligonucleotide
cggcggcgcgcugcgggcu

SEQ ID NO: 2438277 - RNA, 19 nt, Artificial Sequence
  Description of Artificial Sequence: Synthetic oligonucleotide
cgccgccgucccgcucccu

SEQ ID NO: 2438278 - RNA, 19 nt, Artificial Sequence
  Description of Artificial Sequence: Synthetic oligonucleotide
aaagcuucuuccucgaucg

SEQ ID NO: 2438279 - RNA, 19 nt, Artificial Sequence
  Description of Artificial Sequence: Synthetic oligonucleotide
uucugauacaguuugaaga

SEQ ID NO: 2438280 - RNA, 19 nt, Artificial Sequence
  Description of Artificial Sequence: Synthetic oligonucleotide
ucugauacaguuugaagag

SEQ ID NO: 2438281 - RNA, 19 nt, Artificial Sequence
  Description of Artificial Sequence: Synthetic oligonucleotide
auuguaagaaagcuucuuc

SEQ ID NO: 2438282 - RNA, 19 nt, Artificial Sequence
  Description of Artificial Sequence: Synthetic oligonucleotide
guugaagccgauuaggagc

SEQ ID NO: 2438283 - RNA, 19 nt, Artificial Sequence
  Description of Artificial Sequence: Synthetic oligonucleotide
aagucuuugaaauccacau

SEQ ID NO: 2438284 - RNA, 19 nt, Artificial Sequence
  Description of Artificial Sequence: Synthetic oligonucleotide
uuguaagaaagcuucuucc

SEQ ID NO: 2438285 - RNA, 19 nt, Artificial Sequence
  Description of Artificial Sequence: Synthetic oligonucleotide
gacauucuguuccacagag

SEQ ID NO: 2438286 - RNA, 19 nt, Artificial Sequence
  Description of Artificial Sequence: Synthetic oligonucleotide
cugggaguaagguugaagc

SEQ ID NO: 2438287 - RNA, 19 nt, Artificial Sequence
  Description of Artificial Sequence: Synthetic oligonucleotide
uugacgucggcacucauca

SEQ ID NO: 2438288 - RNA, 19 nt, Artificial Sequence
  Description of Artificial Sequence: Synthetic oligonucleotide
ugagaauuguaagaaagcu

SEQ ID NO: 2438289 - RNA, 19 nt, Artificial Sequence
  Description of Artificial Sequence: Synthetic oligonucleotide
auaaggacucuguagguug

SEQ ID NO: 2438290 - RNA, 19 nt, Artificial Sequence
  Description of Artificial Sequence: Synthetic oligonucleotide
aguaguuugugaucucuuc

SEQ ID NO: 2438291 - RNA, 19 nt, Artificial Sequence
  Description of Artificial Sequence: Synthetic oligonucleotide
uguaagaaagcuucuuccu

SEQ ID NO: 2438292 - RNA, 19 nt, Artificial Sequence
  Description of Artificial Sequence: Synthetic oligonucleotide
ggcauaaggacucuguagg

SEQ ID NO: 2438293 - RNA, 19 nt, Artificial Sequence
  Description of Artificial Sequence: Synthetic oligonucleotide
ucugguaguaguuugugau

SEQ ID NO: 2438294 - RNA, 19 nt, Artificial Sequence
  Description of Artificial Sequence: Synthetic oligonucleotide
uauggucucuacuugguga

SEQ ID NO: 2438295 - RNA, 19 nt, Artificial Sequence
  Description of Artificial Sequence: Synthetic oligonucleotide
uaagguugaagccgauuag

SEQ ID NO: 2438296 - RNA, 19 nt, Artificial Sequence
  Description of Artificial Sequence: Synthetic oligonucleotide
aggacauucuguuccacag

SEQ ID NO: 2438297 - RNA, 19 nt, Artificial Sequence
  Description of Artificial Sequence: Synthetic oligonucleotide
auaguucaggcuucucucg

SEQ ID NO: 2438298 - RNA, 19 nt, Artificial Sequence
  Description of Artificial Sequence: Synthetic oligonucleotide
gacgucggcacucaucagg

SEQ ID NO: 2438299 - RNA, 19 nt, Artificial Sequence
  Description of Artificial Sequence: Synthetic oligonucleotide
uugaagccgauuaggagca

SEQ ID NO: 2438300 - RNA, 19 nt, Artificial Sequence
  Description of Artificial Sequence: Synthetic oligonucleotide
uacuuggugagaauuguaa

SEQ ID NO: 2438301 - RNA, 19 nt, Artificial Sequence
  Description of Artificial Sequence: Synthetic oligonucleotide
acugauccagcacaggaug

SEQ ID NO: 2438302 - RNA, 19 nt, Artificial Sequence
  Description of Artificial Sequence: Synthetic oligonucleotide
cauucuguuccacagagca

SEQ ID NO: 2438303 - RNA, 19 nt, Artificial Sequence
  Description of Artificial Sequence: Synthetic oligonucleotide
uggucugacccacacuggg

SEQ ID NO: 2438304 - RNA, 19 nt, Artificial Sequence
  Description of Artificial Sequence: Synthetic oligonucleotide
uaaggacucuguagguugg

SEQ ID NO: 2438305 - RNA, 19 nt, Artificial Sequence
  Description of Artificial Sequence: Synthetic oligonucleotide
aaagaacaguguguagggg

SEQ ID NO: 2438306 - RNA, 19 nt, Artificial Sequence
  Description of Artificial Sequence: Synthetic oligonucleotide
auccacaugaccaucuccg

SEQ ID NO: 2438307 - RNA, 19 nt, Artificial Sequence
  Description of Artificial Sequence: Synthetic oligonucleotide
augaccaucuccguugacg

SEQ ID NO: 2438308 - RNA, 19 nt, Artificial Sequence
  Description of Artificial Sequence: Synthetic oligonucleotide
cucuauggucucuacuugg

SEQ ID NO: 2438309 - RNA, 19 nt, Artificial Sequence
  Description of Artificial Sequence: Synthetic oligonucleotide
gacaggacugagcuagggg

SEQ ID NO: 2438310 - RNA, 19 nt, Artificial Sequence
  Description of Artificial Sequence: Synthetic oligonucleotide
cacaugaccaucuccguug

SEQ ID NO: 2438311 - RNA, 19 nt, Artificial Sequence
  Description of Artificial Sequence: Synthetic oligonucleotide
uguucuugaggcuccgagc

SEQ ID NO: 2438312 - RNA, 19 nt, Artificial Sequence
  Description of Artificial Sequence: Synthetic oligonucleotide
cuuggugagaauuguaaga

SEQ ID NO: 2438313 - RNA, 19 nt, Artificial Sequence
  Description of Artificial Sequence: Synthetic oligonucleotide
accaucuccguugacgucg

SEQ ID NO: 2438314 - RNA, 19 nt, Artificial Sequence
  Description of Artificial Sequence: Synthetic oligonucleotide
ugggaguaagguugaagcc

SEQ ID NO: 2438315 - RNA, 19 nt, Artificial Sequence
  Description of Artificial Sequence: Synthetic oligonucleotide
agcacaggaugguuauggc

SEQ ID NO: 2438316 - RNA, 19 nt, Artificial Sequence
  Description of Artificial Sequence: Synthetic oligonucleotide
ucuauggucucuacuuggu

SEQ ID NO: 2438317 - RNA, 19 nt, Artificial Sequence
  Description of Artificial Sequence: Synthetic oligonucleotide
ucucucgcugcucuggggc

SEQ ID NO: 2438318 - RNA, 19 nt, Artificial Sequence
  Description of Artificial Sequence: Synthetic oligonucleotide
ugguaguaguuugugaucu

SEQ ID NO: 2438319 - RNA, 19 nt, Artificial Sequence
  Description of Artificial Sequence: Synthetic oligonucleotide
ucuagggccaccuccggca

SEQ ID NO: 2438320 - RNA, 19 nt, Artificial Sequence
  Description of Artificial Sequence: Synthetic oligonucleotide
agacacacugauccagcac

SEQ ID NO: 2438321 - RNA, 19 nt, Artificial Sequence
  Description of Artificial Sequence: Synthetic oligonucleotide
auggucucuacuuggugag

SEQ ID NO: 2438322 - RNA, 19 nt, Artificial Sequence
  Description of Artificial Sequence: Synthetic oligonucleotide
uacaguuugaagaggccau

SEQ ID NO: 2438323 - RNA, 19 nt, Artificial Sequence
  Description of Artificial Sequence: Synthetic oligonucleotide
cagggcuucuucuaccugg

SEQ ID NO: 2438324 - RNA, 19 nt, Artificial Sequence
  Description of Artificial Sequence: Synthetic oligonucleotide
cuuucgacggaccaccuuc

SEQ ID NO: 2438325 - RNA, 19 nt, Artificial Sequence
  Description of Artificial Sequence: Synthetic oligonucleotide
uggggcaagaacucuggcc

SEQ ID NO: 2438326 - RNA, 19 nt, Artificial Sequence
  Description of Artificial Sequence: Synthetic oligonucleotide
ugaccaucuccguugacgu

SEQ ID NO: 2438327 - RNA, 19 nt, Artificial Sequence
  Description of Artificial Sequence: Synthetic oligonucleotide
guaagaaagcuucuuccuc

SEQ ID NO: 2438328 - RNA, 19 nt, Artificial Sequence
  Description of Artificial Sequence: Synthetic oligonucleotide
gugagaauuguaagaaagc

SEQ ID NO: 2438329 - RNA, 19 nt, Artificial Sequence
  Description of Artificial Sequence: Synthetic oligonucleotide
ucuacuuggugagaauugu

SEQ ID NO: 2438330 - RNA, 19 nt, Artificial Sequence
  Description of Artificial Sequence: Synthetic oligonucleotide
guaagguugaagccgauua

SEQ ID NO: 2438331 - RNA, 19 nt, Artificial Sequence
  Description of Artificial Sequence: Synthetic oligonucleotide
ucuccguugacgucggcac

SEQ ID NO: 2438332 - RNA, 19 nt, Artificial Sequence
  Description of Artificial Sequence: Synthetic oligonucleotide
auacaguuugaagaggcca

SEQ ID NO: 2438333 - RNA, 19 nt, Artificial Sequence
  Description of Artificial Sequence: Synthetic oligonucleotide
cucuacuuggugagaauug

SEQ ID NO: 2438334 - RNA, 19 nt, Artificial Sequence
  Description of Artificial Sequence: Synthetic oligonucleotide
uaguucaggcuucucucgc

SEQ ID NO: 2438335 - RNA, 19 nt, Artificial Sequence
  Description of Artificial Sequence: Synthetic oligonucleotide
gauacaguuugaagaggcc

SEQ ID NO: 2438336 - RNA, 19 nt, Artificial Sequence
  Description of Artificial Sequence: Synthetic oligonucleotide
agagaggaucucaaagaac

SEQ ID NO: 2438337 - RNA, 19 nt, Artificial Sequence
  Description of Artificial Sequence: Synthetic oligonucleotide
caugauguucuugaggcuc

SEQ ID NO: 2438338 - RNA, 19 nt, Artificial Sequence
  Description of Artificial Sequence: Synthetic oligonucleotide
gggaguaagguugaagccg

SEQ ID NO: 2438339 - RNA, 19 nt, Artificial Sequence
  Description of Artificial Sequence: Synthetic oligonucleotide
ggcuuguagagacacacug

SEQ ID NO: 2438340 - RNA, 19 nt, Artificial Sequence
  Description of Artificial Sequence: Synthetic oligonucleotide
guugacuccgugucucggg

SEQ ID NO: 2438341 - RNA, 19 nt, Artificial Sequence
  Description of Artificial Sequence: Synthetic oligonucleotide
gcugacaggacugagcuag

SEQ ID NO: 2438342 - RNA, 19 nt, Artificial Sequence
  Description of Artificial Sequence: Synthetic oligonucleotide
cugauccagcacaggaugg

SEQ ID NO: 2438343 - RNA, 19 nt, Artificial Sequence
  Description of Artificial Sequence: Synthetic oligonucleotide
aggaugguuauggcguacc

SEQ ID NO: 2438344 - RNA, 19 nt, Artificial Sequence
  Description of Artificial Sequence: Synthetic oligonucleotide
cuguagguuggcagcauag

SEQ ID NO: 2438345 - RNA, 19 nt, Artificial Sequence
  Description of Artificial Sequence: Synthetic oligonucleotide
ugagcuaggggaccccaca

SEQ ID NO: 2438346 - RNA, 19 nt, Artificial Sequence
  Description of Artificial Sequence: Synthetic oligonucleotide
gauuaggagcaugauguuc

SEQ ID NO: 2438347 - RNA, 19 nt, Artificial Sequence
  Description of Artificial Sequence: Synthetic oligonucleotide
ucuucugacuccugccgug

SEQ ID NO: 2438348 - RNA, 19 nt, Artificial Sequence
  Description of Artificial Sequence: Synthetic oligonucleotide
gaugcagggcaccugggca

SEQ ID NO: 2438349 - RNA, 19 nt, Artificial Sequence
  Description of Artificial Sequence: Synthetic oligonucleotide
cucaaagaacaguguguag

SEQ ID NO: 2438350 - RNA, 19 nt, Artificial Sequence
  Description of Artificial Sequence: Synthetic oligonucleotide
acggaccaccuucuucucc

SEQ ID NO: 2438351 - RNA, 19 nt, Artificial Sequence
  Description of Artificial Sequence: Synthetic oligonucleotide
auauccaucaggacauucu

SEQ ID NO: 2438352 - RNA, 19 nt, Artificial Sequence
  Description of Artificial Sequence: Synthetic oligonucleotide
ucuuccucgaucgcagccc

SEQ ID NO: 2438353 - RNA, 19 nt, Artificial Sequence
  Description of Artificial Sequence: Synthetic oligonucleotide
ucguucugggaccucuaug

SEQ ID NO: 2438354 - RNA, 19 nt, Artificial Sequence
  Description of Artificial Sequence: Synthetic oligonucleotide
gacccuucguucugggacc

SEQ ID NO: 2438355 - RNA, 19 nt, Artificial Sequence
  Description of Artificial Sequence: Synthetic oligonucleotide
acucaucagggcuucuucu

SEQ ID NO: 2438356 - RNA, 19 nt, Artificial Sequence
  Description of Artificial Sequence: Synthetic oligonucleotide
cugauacaguuugaagagg

SEQ ID NO: 2438357 - RNA, 19 nt, Artificial Sequence
  Description of Artificial Sequence: Synthetic oligonucleotide
agggcaccugggcauaagg

SEQ ID NO: 2438358 - RNA, 19 nt, Artificial Sequence
  Description of Artificial Sequence: Synthetic oligonucleotide
cguucugggaccucuaugg

SEQ ID NO: 2438359 - RNA, 19 nt, Artificial Sequence
  Description of Artificial Sequence: Synthetic oligonucleotide
uuggcauaguucaggcuuc

SEQ ID NO: 2438360 - RNA, 19 nt, Artificial Sequence
  Description of Artificial Sequence: Synthetic oligonucleotide
aggacugagcuaggggacc

SEQ ID NO: 2438361 - RNA, 19 nt, Artificial Sequence
  Description of Artificial Sequence: Synthetic oligonucleotide
uucagccggcucaggaucc

SEQ ID NO: 2438362 - RNA, 19 nt, Artificial Sequence
  Description of Artificial Sequence: Synthetic oligonucleotide
cacagagcagaagaagcgc

SEQ ID NO: 2438363 - RNA, 19 nt, Artificial Sequence
  Description of Artificial Sequence: Synthetic oligonucleotide
uugacuccgugucucgggu

SEQ ID NO: 2438364 - RNA, 19 nt, Artificial Sequence
  Description of Artificial Sequence: Synthetic oligonucleotide
uucuagggccaccuccggc

SEQ ID NO: 2438365 - RNA, 19 nt, Artificial Sequence
  Description of Artificial Sequence: Synthetic oligonucleotide
aagccgauuaggagcauga

SEQ ID NO: 2438366 - RNA, 19 nt, Artificial Sequence
  Description of Artificial Sequence: Synthetic oligonucleotide
cugguaguaguuugugauc

SEQ ID NO: 2438367 - RNA, 19 nt, Artificial Sequence
  Description of Artificial Sequence: Synthetic oligonucleotide
cacacugggacaguagaug

SEQ ID NO: 2438368 - RNA, 19 nt, Artificial Sequence
  Description of Artificial Sequence: Synthetic oligonucleotide
uuauggcguacccugcuuu

SEQ ID NO: 2438369 - RNA, 19 nt, Artificial Sequence
  Description of Artificial Sequence: Synthetic oligonucleotide
cuaggggaccccacagagg

SEQ ID NO: 2438370 - RNA, 19 nt, Artificial Sequence
  Description of Artificial Sequence: Synthetic oligonucleotide
uuguagagacacacugauc

SEQ ID NO: 2438371 - RNA, 19 nt, Artificial Sequence
  Description of Artificial Sequence: Synthetic oligonucleotide
gucugacccacacugggac

SEQ ID NO: 2438372 - RNA, 19 nt, Artificial Sequence
  Description of Artificial Sequence: Synthetic oligonucleotide
ucucuacuuggugagaauu

SEQ ID NO: 2438373 - RNA, 19 nt, Artificial Sequence
  Description of Artificial Sequence: Synthetic oligonucleotide
uuucgacggaccaccuucu

SEQ ID NO: 2438374 - RNA, 19 nt, Artificial Sequence
  Description of Artificial Sequence: Synthetic oligonucleotide
gggcauaaggacucuguag

SEQ ID NO: 2438375 - RNA, 19 nt, Artificial Sequence
  Description of Artificial Sequence: Synthetic oligonucleotide
ucucgggucuuggaggugc

SEQ ID NO: 2438376 - RNA, 19 nt, Artificial Sequence
  Description of Artificial Sequence: Synthetic oligonucleotide
gacauauccaucaggacau

SEQ ID NO: 2438377 - RNA, 19 nt, Artificial Sequence
  Description of Artificial Sequence: Synthetic oligonucleotide
uggaggugccuuccuuuag

SEQ ID NO: 2438378 - RNA, 19 nt, Artificial Sequence
  Description of Artificial Sequence: Synthetic oligonucleotide
ugaaauccacaugaccauc

SEQ ID NO: 2438379 - RNA, 19 nt, Artificial Sequence
  Description of Artificial Sequence: Synthetic oligonucleotide
acauucuguuccacagagc

SEQ ID NO: 2438380 - RNA, 19 nt, Artificial Sequence
  Description of Artificial Sequence: Synthetic oligonucleotide
aucacugccaagaagucuu

SEQ ID NO: 2438381 - RNA, 19 nt, Artificial Sequence
  Description of Artificial Sequence: Synthetic oligonucleotide
uuggcagcauaguucugcu

SEQ ID NO: 2438382 - RNA, 19 nt, Artificial Sequence
  Description of Artificial Sequence: Synthetic oligonucleotide
uucucucgcugcucugggg

SEQ ID NO: 2438383 - RNA, 19 nt, Artificial Sequence
  Description of Artificial Sequence: Synthetic oligonucleotide
ugaggacccuucguucugg

SEQ ID NO: 2438384 - RNA, 19 nt, Artificial Sequence
  Description of Artificial Sequence: Synthetic oligonucleotide
uguagguuggcagcauagu

SEQ ID NO: 2438385 - RNA, 19 nt, Artificial Sequence
  Description of Artificial Sequence: Synthetic oligonucleotide
ugggcauaaggacucugua

SEQ ID NO: 2438386 - RNA, 19 nt, Artificial Sequence
  Description of Artificial Sequence: Synthetic oligonucleotide
ccacagagcagaagaagcg

SEQ ID NO: 2438387 - RNA, 19 nt, Artificial Sequence
  Description of Artificial Sequence: Synthetic oligonucleotide
cuuccucgaucgcagcccg

SEQ ID NO: 2438388 - RNA, 19 nt, Artificial Sequence
  Description of Artificial Sequence: Synthetic oligonucleotide
cuauggucucuacuuggug

SEQ ID NO: 2438389 - RNA, 19 nt, Artificial Sequence
  Description of Artificial Sequence: Synthetic oligonucleotide
cacaggaugguuauggcgu

SEQ ID NO: 2438390 - RNA, 19 nt, Artificial Sequence
  Description of Artificial Sequence: Synthetic oligonucleotide
uucaggcuucucucgcugc

SEQ ID NO: 2438391 - RNA, 19 nt, Artificial Sequence
  Description of Artificial Sequence: Synthetic oligonucleotide
cugcuuucgacggaccacc

SEQ ID NO: 2438392 - RNA, 19 nt, Artificial Sequence
  Description of Artificial Sequence: Synthetic oligonucleotide
ggacccuucguucugggac

SEQ ID NO: 2438393 - RNA, 19 nt, Artificial Sequence
  Description of Artificial Sequence: Synthetic oligonucleotide
ucuguagguuggcagcaua

SEQ ID NO: 2438394 - RNA, 19 nt, Artificial Sequence
  Description of Artificial Sequence: Synthetic oligonucleotide
uuagcuucuucugguagua

SEQ ID NO: 2438395 - RNA, 19 nt, Artificial Sequence
  Description of Artificial Sequence: Synthetic oligonucleotide
guaguuugugaucucuucu

SEQ ID NO: 2438396 - RNA, 19 nt, Artificial Sequence
  Description of Artificial Sequence: Synthetic oligonucleotide
uauggcguacccugcuuuc

SEQ ID NO: 2438397 - RNA, 19 nt, Artificial Sequence
  Description of Artificial Sequence: Synthetic oligonucleotide
ucgacggaccaccuucuuc

SEQ ID NO: 2438398 - RNA, 19 nt, Artificial Sequence
  Description of Artificial Sequence: Synthetic oligonucleotide
ggacucuguagguuggcag

SEQ ID NO: 2438399 - RNA, 19 nt, Artificial Sequence
  Description of Artificial Sequence: Synthetic oligonucleotide
cuucucucgcugcucuggg

SEQ ID NO: 2438400 - RNA, 19 nt, Artificial Sequence
  Description of Artificial Sequence: Synthetic oligonucleotide
cucgaucgcagcccgcccg

SEQ ID NO: 2438401 - RNA, 19 nt, Artificial Sequence
  Description of Artificial Sequence: Synthetic oligonucleotide
acgucggcacucaucaggg

SEQ ID NO: 2438402 - RNA, 19 nt, Artificial Sequence
  Description of Artificial Sequence: Synthetic oligonucleotide
guucaggcuucucucgcug

SEQ ID NO: 2438403 - RNA, 19 nt, Artificial Sequence
  Description of Artificial Sequence: Synthetic oligonucleotide
agggcuucuucuaccuggc

SEQ ID NO: 2438404 - RNA, 19 nt, Artificial Sequence
  Description of Artificial Sequence: Synthetic oligonucleotide
uccacaugaccaucuccgu

SEQ ID NO: 2438405 - RNA, 19 nt, Artificial Sequence
  Description of Artificial Sequence: Synthetic oligonucleotide
ccgauuaggagcaugaugu

SEQ ID NO: 2438406 - RNA, 19 nt, Artificial Sequence
  Description of Artificial Sequence: Synthetic oligonucleotide
gaggacccuucguucuggg

SEQ ID NO: 2438407 - RNA, 19 nt, Artificial Sequence
  Description of Artificial Sequence: Synthetic oligonucleotide
agguugaagccgauuagga

SEQ ID NO: 2438408 - RNA, 19 nt, Artificial Sequence
  Description of Artificial Sequence: Synthetic oligonucleotide
ggugucugucaucacugcc

SEQ ID NO: 2438409 - RNA, 19 nt, Artificial Sequence
  Description of Artificial Sequence: Synthetic oligonucleotide
cuccgagcacuccucagac

SEQ ID NO: 2438410 - RNA, 19 nt, Artificial Sequence
  Description of Artificial Sequence: Synthetic oligonucleotide
gccgauuaggagcaugaug

SEQ ID NO: 2438411 - RNA, 19 nt, Artificial Sequence
  Description of Artificial Sequence: Synthetic oligonucleotide
uggcguacccugcuuucga

SEQ ID NO: 2438412 - RNA, 19 nt, Artificial Sequence
  Description of Artificial Sequence: Synthetic oligonucleotide
gaucgcagcccgcccgccg

SEQ ID NO: 2438413 - RNA, 19 nt, Artificial Sequence
  Description of Artificial Sequence: Synthetic oligonucleotide
gaaauccacaugaccaucu

SEQ ID NO: 2438414 - RNA, 19 nt, Artificial Sequence
  Description of Artificial Sequence: Synthetic oligonucleotide
uccucgaucgcagcccgcc

SEQ ID NO: 2438415 - RNA, 19 nt, Artificial Sequence
  Description of Artificial Sequence: Synthetic oligonucleotide
gacaguagauggagcugag

SEQ ID NO: 2438416 - RNA, 19 nt, Artificial Sequence
  Description of Artificial Sequence: Synthetic oligonucleotide
auucuguuccacagagcag

SEQ ID NO: 2438417 - RNA, 19 nt, Artificial Sequence
  Description of Artificial Sequence: Synthetic oligonucleotide
caccugggcauaaggacuc

SEQ ID NO: 2438418 - RNA, 19 nt, Artificial Sequence
  Description of Artificial Sequence: Synthetic oligonucleotide
ggcgacauauccaucagga

SEQ ID NO: 2438419 - RNA, 19 nt, Artificial Sequence
  Description of Artificial Sequence: Synthetic oligonucleotide
ucgaucgcagcccgcccgc

SEQ ID NO: 2438420 - RNA, 19 nt, Artificial Sequence
  Description of Artificial Sequence: Synthetic oligonucleotide
ggauccugaggacccuucg

SEQ ID NO: 2438421 - RNA, 19 nt, Artificial Sequence
  Description of Artificial Sequence: Synthetic oligonucleotide
aguucagguccuggguggg

SEQ ID NO: 2438422 - RNA, 19 nt, Artificial Sequence
  Description of Artificial Sequence: Synthetic oligonucleotide
ucggcacucaucagggcuu

SEQ ID NO: 2438423 - RNA, 19 nt, Artificial Sequence
  Description of Artificial Sequence: Synthetic oligonucleotide
auggcguacccugcuuucg

SEQ ID NO: 2438424 - RNA, 19 nt, Artificial Sequence
  Description of Artificial Sequence: Synthetic oligonucleotide
uccggcagggccagcauuu

SEQ ID NO: 2438425 - RNA, 19 nt, Artificial Sequence
  Description of Artificial Sequence: Synthetic oligonucleotide
cuugcccaggggccggugg

SEQ ID NO: 2438426 - RNA, 19 nt, Artificial Sequence
  Description of Artificial Sequence: Synthetic oligonucleotide
uggccaucuccaguucagg

SEQ ID NO: 2438427 - RNA, 19 nt, Artificial Sequence
  Description of Artificial Sequence: Synthetic oligonucleotide
cuuggugucugucaucacu

SEQ ID NO: 2438428 - RNA, 19 nt, Artificial Sequence
  Description of Artificial Sequence: Synthetic oligonucleotide
gagaauuguaagaaagcuu

SEQ ID NO: 2438429 - RNA, 19 nt, Artificial Sequence
  Description of Artificial Sequence: Synthetic oligonucleotide
cuucuagggccaccuccgg

SEQ ID NO: 2438430 - RNA, 19 nt, Artificial Sequence
  Description of Artificial Sequence: Synthetic oligonucleotide
uccgagcacuccucagacc

SEQ ID NO: 2438431 - RNA, 19 nt, Artificial Sequence
  Description of Artificial Sequence: Synthetic oligonucleotide
agaccgcuccucccaguuc

SEQ ID NO: 2438432 - RNA, 19 nt, Artificial Sequence
  Description of Artificial Sequence: Synthetic oligonucleotide
cuaccuggcugggaguaag

SEQ ID NO: 2438433 - RNA, 19 nt, Artificial Sequence
  Description of Artificial Sequence: Synthetic oligonucleotide
agcuaggggaccccacaga

SEQ ID NO: 2438434 - RNA, 19 nt, Artificial Sequence
  Description of Artificial Sequence: Synthetic oligonucleotide
aucuccguugacgucggca

SEQ ID NO: 2438435 - RNA, 19 nt, Artificial Sequence
  Description of Artificial Sequence: Synthetic oligonucleotide
caggacauucuguuccaca

SEQ ID NO: 2438436 - RNA, 19 nt, Artificial Sequence
  Description of Artificial Sequence: Synthetic oligonucleotide
agaacaguguguagggguu

SEQ ID NO: 2438437 - RNA, 19 nt, Artificial Sequence
  Description of Artificial Sequence: Synthetic oligonucleotide
cuugaggcuccgagcacuc

SEQ ID NO: 2438438 - RNA, 19 nt, Artificial Sequence
  Description of Artificial Sequence: Synthetic oligonucleotide
ggaugguuauggcguaccc

SEQ ID NO: 2438439 - RNA, 19 nt, Artificial Sequence
  Description of Artificial Sequence: Synthetic oligonucleotide
uggcagcauaguucugcug

SEQ ID NO: 2438440 - RNA, 19 nt, Artificial Sequence
  Description of Artificial Sequence: Synthetic oligonucleotide
aggccaugcucuucugacu

SEQ ID NO: 2438441 - RNA, 19 nt, Artificial Sequence
  Description of Artificial Sequence: Synthetic oligonucleotide
cguacccugcuuucgacgg

SEQ ID NO: 2438442 - RNA, 19 nt, Artificial Sequence
  Description of Artificial Sequence: Synthetic oligonucleotide
uuaggagcaugauguucuu

SEQ ID NO: 2438443 - RNA, 19 nt, Artificial Sequence
  Description of Artificial Sequence: Synthetic oligonucleotide
uccguugacgucggcacuc

SEQ ID NO: 2438444 - RNA, 19 nt, Artificial Sequence
  Description of Artificial Sequence: Synthetic oligonucleotide
uccgugucucgggucuugg

SEQ ID NO: 2438445 - RNA, 19 nt, Artificial Sequence
  Description of Artificial Sequence: Synthetic oligonucleotide
cuucuucuaccuggcuggg

SEQ ID NO: 2438446 - RNA, 19 nt, Artificial Sequence
  Description of Artificial Sequence: Synthetic oligonucleotide
gggcgacauauccaucagg

SEQ ID NO: 2438447 - RNA, 19 nt, Artificial Sequence
  Description of Artificial Sequence: Synthetic oligonucleotide
guaguaguuugugaucucu

SEQ ID NO: 2438448 - RNA, 19 nt, Artificial Sequence
  Description of Artificial Sequence: Synthetic oligonucleotide
gaccccacagaggcugggg

SEQ ID NO: 2438449 - RNA, 19 nt, Artificial Sequence
  Description of Artificial Sequence: Synthetic oligonucleotide
guugacgucggcacucauc

SEQ ID NO: 2438450 - RNA, 19 nt, Artificial Sequence
  Description of Artificial Sequence: Synthetic oligonucleotide
ggggccgguggucugaccc

SEQ ID NO: 2438451 - RNA, 19 nt, Artificial Sequence
  Description of Artificial Sequence: Synthetic oligonucleotide
cuggggcaagaacucuggc

SEQ ID NO: 2438452 - RNA, 19 nt, Artificial Sequence
  Description of Artificial Sequence: Synthetic oligonucleotide
cucagaccgcuccucccag

SEQ ID NO: 2438453 - RNA, 19 nt, Artificial Sequence
  Description of Artificial Sequence: Synthetic oligonucleotide
aguaagguugaagccgauu

SEQ ID NO: 2438454 - RNA, 19 nt, Artificial Sequence
  Description of Artificial Sequence: Synthetic oligonucleotide
ugacgucggcacucaucag

SEQ ID NO: 2438455 - RNA, 19 nt, Artificial Sequence
  Description of Artificial Sequence: Synthetic oligonucleotide
ggaguaagguugaagccga

SEQ ID NO: 2438456 - RNA, 19 nt, Artificial Sequence
  Description of Artificial Sequence: Synthetic oligonucleotide
gaacaguguguagggguuc

SEQ ID NO: 2438457 - RNA, 19 nt, Artificial Sequence
  Description of Artificial Sequence: Synthetic oligonucleotide
gcguacccugcuuucgacg

SEQ ID NO: 2438458 - RNA, 19 nt, Artificial Sequence
  Description of Artificial Sequence: Synthetic oligonucleotide
gucggcacucaucagggcu

SEQ ID NO: 2438459 - RNA, 19 nt, Artificial Sequence
  Description of Artificial Sequence: Synthetic oligonucleotide
agcagagagaggaucucaa

SEQ ID NO: 2438460 - RNA, 19 nt, Artificial Sequence
  Description of Artificial Sequence: Synthetic oligonucleotide
gacuccgugucucgggucu

SEQ ID NO: 2438461 - RNA, 19 nt, Artificial Sequence
  Description of Artificial Sequence: Synthetic oligonucleotide
gauccugaggacccuucgu

SEQ ID NO: 2438462 - RNA, 19 nt, Artificial Sequence
  Description of Artificial Sequence: Synthetic oligonucleotide
agaagcgcuuggugucugu

SEQ ID NO: 2438463 - RNA, 19 nt, Artificial Sequence
  Description of Artificial Sequence: Synthetic oligonucleotide
cuacuuggugagaauugua

SEQ ID NO: 2438464 - RNA, 19 nt, Artificial Sequence
  Description of Artificial Sequence: Synthetic oligonucleotide
gaagcgcuuggugucuguc

SEQ ID NO: 2438465 - RNA, 19 nt, Artificial Sequence
  Description of Artificial Sequence: Synthetic oligonucleotide
uccugccgugucuuggcau

SEQ ID NO: 2438466 - RNA, 19 nt, Artificial Sequence
  Description of Artificial Sequence: Synthetic oligonucleotide
ucagaccgcuccucccagu

SEQ ID NO: 2438467 - RNA, 19 nt, Artificial Sequence
  Description of Artificial Sequence: Synthetic oligonucleotide
aucgcagcccgcccgccgu

SEQ ID NO: 2438468 - RNA, 19 nt, Artificial Sequence
  Description of Artificial Sequence: Synthetic oligonucleotide
ugacuccugccgugucuug

SEQ ID NO: 2438469 - RNA, 19 nt, Artificial Sequence
  Description of Artificial Sequence: Synthetic oligonucleotide
acugagcuaggggacccca

SEQ ID NO: 2438470 - RNA, 19 nt, Artificial Sequence
  Description of Artificial Sequence: Synthetic oligonucleotide
aggacccuucguucuggga

SEQ ID NO: 2438471 - RNA, 19 nt, Artificial Sequence
  Description of Artificial Sequence: Synthetic oligonucleotide
cucgggucuuggaggugcc

SEQ ID NO: 2438472 - RNA, 19 nt, Artificial Sequence
  Description of Artificial Sequence: Synthetic oligonucleotide
gaccaucuccguugacguc

SEQ ID NO: 2438473 - RNA, 19 nt, Artificial Sequence
  Description of Artificial Sequence: Synthetic oligonucleotide
ccucuauggucucuacuug

SEQ ID NO: 2438474 - RNA, 19 nt, Artificial Sequence
  Description of Artificial Sequence: Synthetic oligonucleotide
gaccucuauggucucuacu

SEQ ID NO: 2438475 - RNA, 19 nt, Artificial Sequence
  Description of Artificial Sequence: Synthetic oligonucleotide
ggggcgacauauccaucag

SEQ ID NO: 2438476 - RNA, 19 nt, Artificial Sequence
  Description of Artificial Sequence: Synthetic oligonucleotide
uggcauaguucaggcuucu

SEQ ID NO: 2438477 - RNA, 19 nt, Artificial Sequence
  Description of Artificial Sequence: Synthetic oligonucleotide
uuccucgaucgcagcccgc

SEQ ID NO: 2438478 - RNA, 19 nt, Artificial Sequence
  Description of Artificial Sequence: Synthetic oligonucleotide
uggucucuacuuggugaga

SEQ ID NO: 2438479 - RNA, 19 nt, Artificial Sequence
  Description of Artificial Sequence: Synthetic oligonucleotide
gcgacauauccaucaggac

SEQ ID NO: 2438480 - RNA, 19 nt, Artificial Sequence
  Description of Artificial Sequence: Synthetic oligonucleotide
gacggaccaccuucuucuc

SEQ ID NO: 2438481 - RNA, 19 nt, Artificial Sequence
  Description of Artificial Sequence: Synthetic oligonucleotide
uugaggcuccgagcacucc

SEQ ID NO: 2438482 - RNA, 19 nt, Artificial Sequence
  Description of Artificial Sequence: Synthetic oligonucleotide
gcuuguagagacacacuga

SEQ ID NO: 2438483 - RNA, 19 nt, Artificial Sequence
  Description of Artificial Sequence: Synthetic oligonucleotide
ucuaccuggcugggaguaa

SEQ ID NO: 2438484 - RNA, 19 nt, Artificial Sequence
  Description of Artificial Sequence: Synthetic oligonucleotide
uucgacggaccaccuucuu

SEQ ID NO: 2438485 - RNA, 19 nt, Artificial Sequence
  Description of Artificial Sequence: Synthetic oligonucleotide
ggggaccccacagaggcug

SEQ ID NO: 2438486 - RNA, 19 nt, Artificial Sequence
  Description of Artificial Sequence: Synthetic oligonucleotide
caugaccaucuccguugac

SEQ ID NO: 2438487 - RNA, 19 nt, Artificial Sequence
  Description of Artificial Sequence: Synthetic oligonucleotide
aggcuccgagcacuccuca

SEQ ID NO: 2438488 - RNA, 19 nt, Artificial Sequence
  Description of Artificial Sequence: Synthetic oligonucleotide
cacugccaagaagucuuug

SEQ ID NO: 2438489 - RNA, 19 nt, Artificial Sequence
  Description of Artificial Sequence: Synthetic oligonucleotide
aggcuuguagagacacacu

SEQ ID NO: 2438490 - RNA, 19 nt, Artificial Sequence
  Description of Artificial Sequence: Synthetic oligonucleotide
auccagcacaggaugguua

SEQ ID NO: 2438491 - RNA, 19 nt, Artificial Sequence
  Description of Artificial Sequence: Synthetic oligonucleotide
ggucucuacuuggugagaa

SEQ ID NO: 2438492 - RNA, 19 nt, Artificial Sequence
  Description of Artificial Sequence: Synthetic oligonucleotide
gcuccgagcacuccucaga

SEQ ID NO: 2438493 - RNA, 19 nt, Artificial Sequence
  Description of Artificial Sequence: Synthetic oligonucleotide
ggacugagcuaggggaccc

SEQ ID NO: 2438494 - RNA, 19 nt, Artificial Sequence
  Description of Artificial Sequence: Synthetic oligonucleotide
ccaucuccguugacgucgg

SEQ ID NO: 2438495 - RNA, 19 nt, Artificial Sequence
  Description of Artificial Sequence: Synthetic oligonucleotide
cugccgugucuuggcauag

SEQ ID NO: 2438496 - RNA, 19 nt, Artificial Sequence
  Description of Artificial Sequence: Synthetic oligonucleotide
guacccugcuuucgacgga

SEQ ID NO: 2438497 - RNA, 19 nt, Artificial Sequence
  Description of Artificial Sequence: Synthetic oligonucleotide
cauaaggacucuguagguu

SEQ ID NO: 2438498 - RNA, 19 nt, Artificial Sequence
  Description of Artificial Sequence: Synthetic oligonucleotide
ggcguacccugcuuucgac

SEQ ID NO: 2438499 - RNA, 19 nt, Artificial Sequence
  Description of Artificial Sequence: Synthetic oligonucleotide
gcauaaggacucuguaggu

SEQ ID NO: 2438500 - RNA, 19 nt, Artificial Sequence
  Description of Artificial Sequence: Synthetic oligonucleotide
gccggcucaggauccugag

SEQ ID NO: 2438501 - RNA, 19 nt, Artificial Sequence
  Description of Artificial Sequence: Synthetic oligonucleotide
agccgauuaggagcaugau

SEQ ID NO: 2438502 - RNA, 19 nt, Artificial Sequence
  Description of Artificial Sequence: Synthetic oligonucleotide
ggaccucuauggucucuac

SEQ ID NO: 2438503 - RNA, 19 nt, Artificial Sequence
  Description of Artificial Sequence: Synthetic oligonucleotide
guuauggcguacccugcuu

SEQ ID NO: 2438504 - RNA, 19 nt, Artificial Sequence
  Description of Artificial Sequence: Synthetic oligonucleotide
cugggaccucuauggucuc

SEQ ID NO: 2438505 - RNA, 19 nt, Artificial Sequence
  Description of Artificial Sequence: Synthetic oligonucleotide
ugccgugucuuggcauagu

SEQ ID NO: 2438506 - RNA, 19 nt, Artificial Sequence
  Description of Artificial Sequence: Synthetic oligonucleotide
ggaucucaaagaacagugu

SEQ ID NO: 2438507 - RNA, 19 nt, Artificial Sequence
  Description of Artificial Sequence: Synthetic oligonucleotide
ucgggucuuggaggugccu

SEQ ID NO: 2438508 - RNA, 19 nt, Artificial Sequence
  Description of Artificial Sequence: Synthetic oligonucleotide
ccgccguugacuccguguc

SEQ ID NO: 2438509 - RNA, 19 nt, Artificial Sequence
  Description of Artificial Sequence: Synthetic oligonucleotide
cuucguucugggaccucua

SEQ ID NO: 2438510 - RNA, 19 nt, Artificial Sequence
  Description of Artificial Sequence: Synthetic oligonucleotide
gccguugacuccgugucuc

SEQ ID NO: 2438511 - RNA, 19 nt, Artificial Sequence
  Description of Artificial Sequence: Synthetic oligonucleotide
ggcaagaacucuggccauc

SEQ ID NO: 2438512 - RNA, 19 nt, Artificial Sequence
  Description of Artificial Sequence: Synthetic oligonucleotide
gucucuacuuggugagaau

SEQ ID NO: 2438513 - RNA, 19 nt, Artificial Sequence
  Description of Artificial Sequence: Synthetic oligonucleotide
cuucuaccuggcugggagu

SEQ ID NO: 2438514 - RNA, 19 nt, Artificial Sequence
  Description of Artificial Sequence: Synthetic oligonucleotide
cuccgugucucgggucuug

SEQ ID NO: 2438515 - RNA, 19 nt, Artificial Sequence
  Description of Artificial Sequence: Synthetic oligonucleotide
cagggcaccugggcauaag

SEQ ID NO: 2438516 - RNA, 19 nt, Artificial Sequence
  Description of Artificial Sequence: Synthetic oligonucleotide
ugaagccgauuaggagcau

SEQ ID NO: 2438517 - RNA, 19 nt, Artificial Sequence
  Description of Artificial Sequence: Synthetic oligonucleotide
gacccacacugggacagua

SEQ ID NO: 2438518 - RNA, 19 nt, Artificial Sequence
  Description of Artificial Sequence: Synthetic oligonucleotide
caucuccguugacgucggc

SEQ ID NO: 2438519 - RNA, 19 nt, Artificial Sequence
  Description of Artificial Sequence: Synthetic oligonucleotide
ccgguggucugacccacac

SEQ ID NO: 2438520 - RNA, 19 nt, Artificial Sequence
  Description of Artificial Sequence: Synthetic oligonucleotide
gcaccugggcauaaggacu

SEQ ID NO: 2438521 - RNA, 19 nt, Artificial Sequence
  Description of Artificial Sequence: Synthetic oligonucleotide
agcccgcccgccguugacu

SEQ ID NO: 2438522 - RNA, 19 nt, Artificial Sequence
  Description of Artificial Sequence: Synthetic oligonucleotide
gcaugauguucuugaggcu

SEQ ID NO: 2438523 - RNA, 19 nt, Artificial Sequence
  Description of Artificial Sequence: Synthetic oligonucleotide
ggaccccacagaggcuggg

SEQ ID NO: 2438524 - RNA, 19 nt, Artificial Sequence
  Description of Artificial Sequence: Synthetic oligonucleotide
ccuuuagcuucuucuggua

SEQ ID NO: 2438525 - RNA, 19 nt, Artificial Sequence
  Description of Artificial Sequence: Synthetic oligonucleotide
ccucgggcagagugggaug

SEQ ID NO: 2438526 - RNA, 19 nt, Artificial Sequence
  Description of Artificial Sequence: Synthetic oligonucleotide
cguugacuccgugucucgg

SEQ ID NO: 2438527 - RNA, 19 nt, Artificial Sequence
  Description of Artificial Sequence: Synthetic oligonucleotide
cgacggaccaccuucuucu

SEQ ID NO: 2438528 - RNA, 19 nt, Artificial Sequence
  Description of Artificial Sequence: Synthetic oligonucleotide
cuucugacuccugccgugu

SEQ ID NO: 2438529 - RNA, 19 nt, Artificial Sequence
  Description of Artificial Sequence: Synthetic oligonucleotide
ccucgaucgcagcccgccc

SEQ ID NO: 2438530 - RNA, 19 nt, Artificial Sequence
  Description of Artificial Sequence: Synthetic oligonucleotide
cgagcacuccucagaccgc

SEQ ID NO: 2438531 - RNA, 19 nt, Artificial Sequence
  Description of Artificial Sequence: Synthetic oligonucleotide
aggggaccccacagaggcu

SEQ ID NO: 2438532 - RNA, 19 nt, Artificial Sequence
  Description of Artificial Sequence: Synthetic oligonucleotide
ccugccgugucuuggcaua

SEQ ID NO: 2438533 - RNA, 19 nt, Artificial Sequence
  Description of Artificial Sequence: Synthetic oligonucleotide
gggccgguggucugaccca

SEQ ID NO: 2438534 - RNA, 19 nt, Artificial Sequence
  Description of Artificial Sequence: Synthetic oligonucleotide
cagcccgcccgccguugac

SEQ ID NO: 2438535 - RNA, 19 nt, Artificial Sequence
  Description of Artificial Sequence: Synthetic oligonucleotide
cuccguugacgucggcacu

SEQ ID NO: 2438536 - RNA, 19 nt, Artificial Sequence
  Description of Artificial Sequence: Synthetic oligonucleotide
gggcuugcccaggggccgg

SEQ ID NO: 2438537 - RNA, 19 nt, Artificial Sequence
  Description of Artificial Sequence: Synthetic oligonucleotide
cagaccgcuccucccaguu

SEQ ID NO: 2438538 - RNA, 19 nt, Artificial Sequence
  Description of Artificial Sequence: Synthetic oligonucleotide
gaguaagguugaagccgau

SEQ ID NO: 2438539 - RNA, 19 nt, Artificial Sequence
  Description of Artificial Sequence: Synthetic oligonucleotide
acuccgugucucgggucuu

SEQ ID NO: 2438540 - RNA, 19 nt, Artificial Sequence
  Description of Artificial Sequence: Synthetic oligonucleotide
ggccgguggucugacccac

SEQ ID NO: 2438541 - RNA, 19 nt, Artificial Sequence
  Description of Artificial Sequence: Synthetic oligonucleotide
cgucggcacucaucagggc

SEQ ID NO: 2438542 - RNA, 19 nt, Artificial Sequence
  Description of Artificial Sequence: Synthetic oligonucleotide
gcccgcccgccguugacuc

SEQ ID NO: 2438543 - RNA, 19 nt, Artificial Sequence
  Description of Artificial Sequence: Synthetic oligonucleotide
gccgugucuuggcauaguu

SEQ ID NO: 2438544 - RNA, 19 nt, Artificial Sequence
  Description of Artificial Sequence: Synthetic oligonucleotide
cgggcagagugggaugcag

SEQ ID NO: 2438545 - RNA, 19 nt, Artificial Sequence
  Description of Artificial Sequence: Synthetic oligonucleotide
gggcaagaacucuggccau

SEQ ID NO: 2438546 - RNA, 19 nt, Artificial Sequence
  Description of Artificial Sequence: Synthetic oligonucleotide
ccacacugggacaguagau

SEQ ID NO: 2438547 - RNA, 19 nt, Artificial Sequence
  Description of Artificial Sequence: Synthetic oligonucleotide
ccuucguucugggaccucu

SEQ ID NO: 2438548 - RNA, 19 nt, Artificial Sequence
  Description of Artificial Sequence: Synthetic oligonucleotide
agccucgggcagaguggga

SEQ ID NO: 2438549 - RNA, 19 nt, Artificial Sequence
  Description of Artificial Sequence: Synthetic oligonucleotide
ccaccuccggcagggccag

SEQ ID NO: 2438550 - RNA, 19 nt, Artificial Sequence
  Description of Artificial Sequence: Synthetic oligonucleotide
gcucuggggcaagaacucu

SEQ ID NO: 2438551 - RNA, 19 nt, Artificial Sequence
  Description of Artificial Sequence: Synthetic oligonucleotide
gcuuucgacggaccaccuu

SEQ ID NO: 2438552 - RNA, 19 nt, Artificial Sequence
  Description of Artificial Sequence: Synthetic oligonucleotide
ccgugucucgggucuugga

SEQ ID NO: 2438553 - RNA, 19 nt, Artificial Sequence
  Description of Artificial Sequence: Synthetic oligonucleotide
gcagcccgcccgccguuga

SEQ ID NO: 2438554 - RNA, 19 nt, Artificial Sequence
  Description of Artificial Sequence: Synthetic oligonucleotide
cuccggcagggccagcauu

SEQ ID NO: 2438555 - RNA, 19 nt, Artificial Sequence
  Description of Artificial Sequence: Synthetic oligonucleotide
cccgccguugacuccgugu

SEQ ID NO: 2438556 - RNA, 19 nt, Artificial Sequence
  Description of Artificial Sequence: Synthetic oligonucleotide
gcacucaucagggcuucuu

SEQ ID NO: 2438557 - RNA, 19 nt, Artificial Sequence
  Description of Artificial Sequence: Synthetic oligonucleotide
caggauccugaggacccuu

SEQ ID NO: 2438558 - RNA, 19 nt, Artificial Sequence
  Description of Artificial Sequence: Synthetic oligonucleotide
ggcugggaguaagguugaa

SEQ ID NO: 2438559 - RNA, 19 nt, Artificial Sequence
  Description of Artificial Sequence: Synthetic oligonucleotide
ccguugacgucggcacuca

SEQ ID NO: 2438560 - RNA, 19 nt, Artificial Sequence
  Description of Artificial Sequence: Synthetic oligonucleotide
ccggcagggccagcauuuc

SEQ ID NO: 2438561 - RNA, 19 nt, Artificial Sequence
  Description of Artificial Sequence: Synthetic oligonucleotide
caccuccggcagggccagc

SEQ ID NO: 2438562 - RNA, 19 nt, Artificial Sequence
  Description of Artificial Sequence: Synthetic oligonucleotide
cgauuaggagcaugauguu

SEQ ID NO: 2438563 - RNA, 19 nt, Artificial Sequence
  Description of Artificial Sequence: Synthetic oligonucleotide
cggcacucaucagggcuuc

SEQ ID NO: 2438564 - RNA, 19 nt, Artificial Sequence
  Description of Artificial Sequence: Synthetic oligonucleotide
cgaucgcagcccgcccgcc

SEQ ID NO: 2438565 - RNA, 19 nt, Artificial Sequence
  Description of Artificial Sequence: Synthetic oligonucleotide
gccgguggucugacccaca

SEQ ID NO: 2438566 - RNA, 19 nt, Artificial Sequence
  Description of Artificial Sequence: Synthetic oligonucleotide
cgcagcccgcccgccguug

SEQ ID NO: 2438567 - RNA, 19 nt, Artificial Sequence
  Description of Artificial Sequence: Synthetic oligonucleotide
cgguggucugacccacacu

SEQ ID NO: 2438568 - RNA, 19 nt, Artificial Sequence
  Description of Artificial Sequence: Synthetic oligonucleotide
cgccguugacuccgugucu

SEQ ID NO: 2438569 - RNA, 19 nt, Artificial Sequence
  Description of Artificial Sequence: Synthetic oligonucleotide
cguugacgucggcacucau

SEQ ID NO: 2438570 - RNA, 19 nt, Artificial Sequence
  Description of Artificial Sequence: Synthetic oligonucleotide
auuaauuauuauuugagac

SEQ ID NO: 2438571 - RNA, 19 nt, Artificial Sequence
  Description of Artificial Sequence: Synthetic oligonucleotide
aaagaaacugaauagagug

SEQ ID NO: 2438572 - RNA, 19 nt, Artificial Sequence
  Description of Artificial Sequence: Synthetic oligonucleotide
auagaaagggaucagacuc

SEQ ID NO: 2438573 - RNA, 19 nt, Artificial Sequence
  Description of Artificial Sequence: Synthetic oligonucleotide
uucacaaugucccagagug

SEQ ID NO: 2438574 - RNA, 19 nt, Artificial Sequence
  Description of Artificial Sequence: Synthetic oligonucleotide
uauuauuugagacagguuu

SEQ ID NO: 2438575 - RNA, 19 nt, Artificial Sequence
  Description of Artificial Sequence: Synthetic oligonucleotide
aacugaauagagugggacc

SEQ ID NO: 2438576 - RNA, 19 nt, Artificial Sequence
  Description of Artificial Sequence: Synthetic oligonucleotide
ucaguaagagacaauacgc

SEQ ID NO: 2438577 - RNA, 19 nt, Artificial Sequence
  Description of Artificial Sequence: Synthetic oligonucleotide
uuuucuauuugucuucccg

SEQ ID NO: 2438578 - RNA, 19 nt, Artificial Sequence
  Description of Artificial Sequence: Synthetic oligonucleotide
uuuagaggcauauucauac

SEQ ID NO: 2438579 - RNA, 19 nt, Artificial Sequence
  Description of Artificial Sequence: Synthetic oligonucleotide
uguguuuuccaaaugccgg

SEQ ID NO: 2438580 - RNA, 19 nt, Artificial Sequence
  Description of Artificial Sequence: Synthetic oligonucleotide
aaugccggaauacugcagg

SEQ ID NO: 2438581 - RNA, 19 nt, Artificial Sequence
  Description of Artificial Sequence: Synthetic oligonucleotide
aauguguuuuccaaaugcc

SEQ ID NO: 2438582 - RNA, 19 nt, Artificial Sequence
  Description of Artificial Sequence: Synthetic oligonucleotide
auagagugggaccaguagc

SEQ ID NO: 2438583 - RNA, 19 nt, Artificial Sequence
  Description of Artificial Sequence: Synthetic oligonucleotide
aagguuugcuccccaaacc

SEQ ID NO: 2438584 - RNA, 19 nt, Artificial Sequence
  Description of Artificial Sequence: Synthetic oligonucleotide
acuauguggaccaucaagc

SEQ ID NO: 2438585 - RNA, 19 nt, Artificial Sequence
  Description of Artificial Sequence: Synthetic oligonucleotide
uucgaaaugcccagggucg

SEQ ID NO: 2438586 - RNA, 19 nt, Artificial Sequence
  Description of Artificial Sequence: Synthetic oligonucleotide
aauagagugggaccaguag

SEQ ID NO: 2438587 - RNA, 19 nt, Artificial Sequence
  Description of Artificial Sequence: Synthetic oligonucleotide
uagguacucaguaagagac

SEQ ID NO: 2438588 - RNA, 19 nt, Artificial Sequence
  Description of Artificial Sequence: Synthetic oligonucleotide
cucaguaagagacaauacg

SEQ ID NO: 2438589 - RNA, 19 nt, Artificial Sequence
  Description of Artificial Sequence: Synthetic oligonucleotide
ugcgaaaagaaacugaaua

SEQ ID NO: 2438590 - RNA, 19 nt, Artificial Sequence
  Description of Artificial Sequence: Synthetic oligonucleotide
ugugcauagacucucggug

SEQ ID NO: 2438591 - RNA, 19 nt, Artificial Sequence
  Description of Artificial Sequence: Synthetic oligonucleotide
aggauaaguccucauaccg

SEQ ID NO: 2438592 - RNA, 19 nt, Artificial Sequence
  Description of Artificial Sequence: Synthetic oligonucleotide
ucacaguuaggaaauaaca

SEQ ID NO: 2438593 - RNA, 19 nt, Artificial Sequence
  Description of Artificial Sequence: Synthetic oligonucleotide
uguguccucaggaagcugg

SEQ ID NO: 2438594 - RNA, 19 nt, Artificial Sequence
  Description of Artificial Sequence: Synthetic oligonucleotide
aguaagagacaauacgcag

SEQ ID NO: 2438595 - RNA, 19 nt, Artificial Sequence
  Description of Artificial Sequence: Synthetic oligonucleotide
agaaacugaauagaguggg

SEQ ID NO: 2438596 - RNA, 19 nt, Artificial Sequence
  Description of Artificial Sequence: Synthetic oligonucleotide
ucggccucgugaaagaugg

SEQ ID NO: 2438597 - RNA, 19 nt, Artificial Sequence
  Description of Artificial Sequence: Synthetic oligonucleotide
cugguggccacauagaaag

SEQ ID NO: 2438598 - RNA, 19 nt, Artificial Sequence
  Description of Artificial Sequence: Synthetic oligonucleotide
agagacaauacgcagguga

SEQ ID NO: 2438599 - RNA, 19 nt, Artificial Sequence
  Description of Artificial Sequence: Synthetic oligonucleotide
uggaccaucaagcuugcag

SEQ ID NO: 2438600 - RNA, 19 nt, Artificial Sequence
  Description of Artificial Sequence: Synthetic oligonucleotide
acgaagauuccuuuagagg

SEQ ID NO: 2438601 - RNA, 19 nt, Artificial Sequence
  Description of Artificial Sequence: Synthetic oligonucleotide
uaagagacaauacgcaggu

SEQ ID NO: 2438602 - RNA, 19 nt, Artificial Sequence
  Description of Artificial Sequence: Synthetic oligonucleotide
uauacugugcgaaaagaaa

SEQ ID NO: 2438603 - RNA, 19 nt, Artificial Sequence
  Description of Artificial Sequence: Synthetic oligonucleotide
ggugcagucacacuggugg

SEQ ID NO: 2438604 - RNA, 19 nt, Artificial Sequence
  Description of Artificial Sequence: Synthetic oligonucleotide
uuucgaaaugcccaggguc

SEQ ID NO: 2438605 - RNA, 19 nt, Artificial Sequence
  Description of Artificial Sequence: Synthetic oligonucleotide
ugcacgaagauuccuuuag

SEQ ID NO: 2438606 - RNA, 19 nt, Artificial Sequence
  Description of Artificial Sequence: Synthetic oligonucleotide
uuccuuuagaggcauauuc

SEQ ID NO: 2438607 - RNA, 19 nt, Artificial Sequence
  Description of Artificial Sequence: Synthetic oligonucleotide
aagggaucagacucugcac

SEQ ID NO: 2438608 - RNA, 19 nt, Artificial Sequence
  Description of Artificial Sequence: Synthetic oligonucleotide
augaacauuaauuauuauu

SEQ ID NO: 2438609 - RNA, 19 nt, Artificial Sequence
  Description of Artificial Sequence: Synthetic oligonucleotide
aagaaacugaauagagugg

SEQ ID NO: 2438610 - RNA, 19 nt, Artificial Sequence
  Description of Artificial Sequence: Synthetic oligonucleotide
auauucauacugcagggcu

SEQ ID NO: 2438611 - RNA, 19 nt, Artificial Sequence
  Description of Artificial Sequence: Synthetic oligonucleotide
auacugugcgaaaagaaac

SEQ ID NO: 2438612 - RNA, 19 nt, Artificial Sequence
  Description of Artificial Sequence: Synthetic oligonucleotide
uguggugugggcuugcagc

SEQ ID NO: 2438613 - RNA, 19 nt, Artificial Sequence
  Description of Artificial Sequence: Synthetic oligonucleotide
uucacaguuaggaaauaac

SEQ ID NO: 2438614 - RNA, 19 nt, Artificial Sequence
  Description of Artificial Sequence: Synthetic oligonucleotide
uuaggaaauaacacuuuuc

SEQ ID NO: 2438615 - RNA, 19 nt, Artificial Sequence
  Description of Artificial Sequence: Synthetic oligonucleotide
uagccugugguccuuuucg

SEQ ID NO: 2438616 - RNA, 19 nt, Artificial Sequence
  Description of Artificial Sequence: Synthetic oligonucleotide
uagagugggaccaguagcc

SEQ ID NO: 2438617 - RNA, 19 nt, Artificial Sequence
  Description of Artificial Sequence: Synthetic oligonucleotide
agggaucagacucugcacg

SEQ ID NO: 2438618 - RNA, 19 nt, Artificial Sequence
  Description of Artificial Sequence: Synthetic oligonucleotide
uagaggcauauucauacug

SEQ ID NO: 2438619 - RNA, 19 nt, Artificial Sequence
  Description of Artificial Sequence: Synthetic oligonucleotide
ugggccgaaauacugcggg

SEQ ID NO: 2438620 - RNA, 19 nt, Artificial Sequence
  Description of Artificial Sequence: Synthetic oligonucleotide
guaagagacaauacgcagg

SEQ ID NO: 2438621 - RNA, 19 nt, Artificial Sequence
  Description of Artificial Sequence: Synthetic oligonucleotide
acacuagguacucaguaag

SEQ ID NO: 2438622 - RNA, 19 nt, Artificial Sequence
  Description of Artificial Sequence: Synthetic oligonucleotide
uccuuuagaggcauauuca

SEQ ID NO: 2438623 - RNA, 19 nt, Artificial Sequence
  Description of Artificial Sequence: Synthetic oligonucleotide
aacccagagccacucgggc

SEQ ID NO: 2438624 - RNA, 19 nt, Artificial Sequence
  Description of Artificial Sequence: Synthetic oligonucleotide
aaaugcccagggucgacac

SEQ ID NO: 2438625 - RNA, 19 nt, Artificial Sequence
  Description of Artificial Sequence: Synthetic oligonucleotide
guccucauaccguagagag

SEQ ID NO: 2438626 - RNA, 19 nt, Artificial Sequence
  Description of Artificial Sequence: Synthetic oligonucleotide
acgcaggugaacuaaaugu

SEQ ID NO: 2438627 - RNA, 19 nt, Artificial Sequence
  Description of Artificial Sequence: Synthetic oligonucleotide
uucccgaugaacauuaauu

SEQ ID NO: 2438628 - RNA, 19 nt, Artificial Sequence
  Description of Artificial Sequence: Synthetic oligonucleotide
agccgcaauguucacauuc

SEQ ID NO: 2438629 - RNA, 19 nt, Artificial Sequence
  Description of Artificial Sequence: Synthetic oligonucleotide
aaagucggccucgugaaag

SEQ ID NO: 2438630 - RNA, 19 nt, Artificial Sequence
  Description of Artificial Sequence: Synthetic oligonucleotide
cuuuucgaaaugcccaggg

SEQ ID NO: 2438631 - RNA, 19 nt, Artificial Sequence
  Description of Artificial Sequence: Synthetic oligonucleotide
gacacugugaugauggcac

SEQ ID NO: 2438632 - RNA, 19 nt, Artificial Sequence
  Description of Artificial Sequence: Synthetic oligonucleotide
auaacacuuuucuauuugu

SEQ ID NO: 2438633 - RNA, 19 nt, Artificial Sequence
  Description of Artificial Sequence: Synthetic oligonucleotide
augcagaaaaggcagccag

SEQ ID NO: 2438634 - RNA, 19 nt, Artificial Sequence
  Description of Artificial Sequence: Synthetic oligonucleotide
cacgaagauuccuuuagag

SEQ ID NO: 2438635 - RNA, 19 nt, Artificial Sequence
  Description of Artificial Sequence: Synthetic oligonucleotide
uacugugcgaaaagaaacu

SEQ ID NO: 2438636 - RNA, 19 nt, Artificial Sequence
  Description of Artificial Sequence: Synthetic oligonucleotide
gcugaagugguccagguag

SEQ ID NO: 2438637 - RNA, 19 nt, Artificial Sequence
  Description of Artificial Sequence: Synthetic oligonucleotide
aaguccucauaccguagag

SEQ ID NO: 2438638 - RNA, 19 nt, Artificial Sequence
  Description of Artificial Sequence: Synthetic oligonucleotide
uacgcaggugaacuaaaug

SEQ ID NO: 2438639 - RNA, 19 nt, Artificial Sequence
  Description of Artificial Sequence: Synthetic oligonucleotide
ucccggaagcacuaugugg

SEQ ID NO: 2438640 - RNA, 19 nt, Artificial Sequence
  Description of Artificial Sequence: Synthetic oligonucleotide
cuguucucaggcuucgugg

SEQ ID NO: 2438641 - RNA, 19 nt, Artificial Sequence
  Description of Artificial Sequence: Synthetic oligonucleotide
aauuauuauuugagacagg

SEQ ID NO: 2438642 - RNA, 19 nt, Artificial Sequence
  Description of Artificial Sequence: Synthetic oligonucleotide
ucuauuugucuucccgaug

SEQ ID NO: 2438643 - RNA, 19 nt, Artificial Sequence
  Description of Artificial Sequence: Synthetic oligonucleotide
uccggauucaggcuuggca

SEQ ID NO: 2438644 - RNA, 19 nt, Artificial Sequence
  Description of Artificial Sequence: Synthetic oligonucleotide
uccuuuucgaaaugcccag

SEQ ID NO: 2438645 - RNA, 19 nt, Artificial Sequence
  Description of Artificial Sequence: Synthetic oligonucleotide
acuagguacucaguaagag

SEQ ID NO: 2438646 - RNA, 19 nt, Artificial Sequence
  Description of Artificial Sequence: Synthetic oligonucleotide
uacucaguaagagacaaua

SEQ ID NO: 2438647 - RNA, 19 nt, Artificial Sequence
  Description of Artificial Sequence: Synthetic oligonucleotide
auucauacugcagggcucg

SEQ ID NO: 2438648 - RNA, 19 nt, Artificial Sequence
  Description of Artificial Sequence: Synthetic oligonucleotide
auguggaccaucaagcuug

SEQ ID NO: 2438649 - RNA, 19 nt, Artificial Sequence
  Description of Artificial Sequence: Synthetic oligonucleotide
uaaguccucauaccguaga

SEQ ID NO: 2438650 - RNA, 19 nt, Artificial Sequence
  Description of Artificial Sequence: Synthetic oligonucleotide
auguguuuuccaaaugccg

SEQ ID NO: 2438651 - RNA, 19 nt, Artificial Sequence
  Description of Artificial Sequence: Synthetic oligonucleotide
uagaaagggaucagacucu

SEQ ID NO: 2438652 - RNA, 19 nt, Artificial Sequence
  Description of Artificial Sequence: Synthetic oligonucleotide
cauagacucucggugaagg

SEQ ID NO: 2438653 - RNA, 19 nt, Artificial Sequence
  Description of Artificial Sequence: Synthetic oligonucleotide
ugaaagucggccucgugaa

SEQ ID NO: 2438654 - RNA, 19 nt, Artificial Sequence
  Description of Artificial Sequence: Synthetic oligonucleotide
gauggcaacacacuaggua

SEQ ID NO: 2438655 - RNA, 19 nt, Artificial Sequence
  Description of Artificial Sequence: Synthetic oligonucleotide
ucccgaugaacauuaauua

SEQ ID NO: 2438656 - RNA, 19 nt, Artificial Sequence
  Description of Artificial Sequence: Synthetic oligonucleotide
caaacccagagccacucgg

SEQ ID NO: 2438657 - RNA, 19 nt, Artificial Sequence
  Description of Artificial Sequence: Synthetic oligonucleotide
gauaaguccucauaccgua

SEQ ID NO: 2438658 - RNA, 19 nt, Artificial Sequence
  Description of Artificial Sequence: Synthetic oligonucleotide
uuuucgaaaugcccagggu

SEQ ID NO: 2438659 - RNA, 19 nt, Artificial Sequence
  Description of Artificial Sequence: Synthetic oligonucleotide
ccucauaccguagagagcg

SEQ ID NO: 2438660 - RNA, 19 nt, Artificial Sequence
  Description of Artificial Sequence: Synthetic oligonucleotide
caggauaaguccucauacc

SEQ ID NO: 2438661 - RNA, 19 nt, Artificial Sequence
  Description of Artificial Sequence: Synthetic oligonucleotide
uuuccaaaugccggaauac

SEQ ID NO: 2438662 - RNA, 19 nt, Artificial Sequence
  Description of Artificial Sequence: Synthetic oligonucleotide
ugguccuuuucgaaaugcc

SEQ ID NO: 2438663 - RNA, 19 nt, Artificial Sequence
  Description of Artificial Sequence: Synthetic oligonucleotide
gugaaagauggcaacacac

SEQ ID NO: 2438664 - RNA, 19 nt, Artificial Sequence
  Description of Artificial Sequence: Synthetic oligonucleotide
caagcuugcagccgcaaug

SEQ ID NO: 2438665 - RNA, 19 nt, Artificial Sequence
  Description of Artificial Sequence: Synthetic oligonucleotide
guagagagcgguugagaag

SEQ ID NO: 2438666 - RNA, 19 nt, Artificial Sequence
  Description of Artificial Sequence: Synthetic oligonucleotide
aaugcccagggucgacacg

SEQ ID NO: 2438667 - RNA, 19 nt, Artificial Sequence
  Description of Artificial Sequence: Synthetic oligonucleotide
ggaccaucaagcuugcagc

SEQ ID NO: 2438668 - RNA, 19 nt, Artificial Sequence
  Description of Artificial Sequence: Synthetic oligonucleotide
uucucuccaccauucccgg

SEQ ID NO: 2438669 - RNA, 19 nt, Artificial Sequence
  Description of Artificial Sequence: Synthetic oligonucleotide
acagacugaaagucggccu

SEQ ID NO: 2438670 - RNA, 19 nt, Artificial Sequence
  Description of Artificial Sequence: Synthetic oligonucleotide
uucuauuugucuucccgau

SEQ ID NO: 2438671 - RNA, 19 nt, Artificial Sequence
  Description of Artificial Sequence: Synthetic oligonucleotide
acucaguaagagacaauac

SEQ ID NO: 2438672 - RNA, 19 nt, Artificial Sequence
  Description of Artificial Sequence: Synthetic oligonucleotide
agcaggagccggaagacac

SEQ ID NO: 2438673 - RNA, 19 nt, Artificial Sequence
  Description of Artificial Sequence: Synthetic oligonucleotide
gaccaucaagcuugcagcc

SEQ ID NO: 2438674 - RNA, 19 nt, Artificial Sequence
  Description of Artificial Sequence: Synthetic oligonucleotide
uagacucucggugaaggug

SEQ ID NO: 2438675 - RNA, 19 nt, Artificial Sequence
  Description of Artificial Sequence: Synthetic oligonucleotide
aaacccagagccacucggg

SEQ ID NO: 2438676 - RNA, 19 nt, Artificial Sequence
  Description of Artificial Sequence: Synthetic oligonucleotide
gaggcauauucauacugca

SEQ ID NO: 2438677 - RNA, 19 nt, Artificial Sequence
  Description of Artificial Sequence: Synthetic oligonucleotide
uuagaggcauauucauacu

SEQ ID NO: 2438678 - RNA, 19 nt, Artificial Sequence
  Description of Artificial Sequence: Synthetic oligonucleotide
uuucuguucucaggcuucg

SEQ ID NO: 2438679 - RNA, 19 nt, Artificial Sequence
  Description of Artificial Sequence: Synthetic oligonucleotide
cauauucauacugcagggc

SEQ ID NO: 2438680 - RNA, 19 nt, Artificial Sequence
  Description of Artificial Sequence: Synthetic oligonucleotide
ugcugugcauagacucucg

SEQ ID NO: 2438681 - RNA, 19 nt, Artificial Sequence
  Description of Artificial Sequence: Synthetic oligonucleotide
caguaagagacaauacgca

SEQ ID NO: 2438682 - RNA, 19 nt, Artificial Sequence
  Description of Artificial Sequence: Synthetic oligonucleotide
ccuuggaugcagaaaaggc

SEQ ID NO: 2438683 - RNA, 19 nt, Artificial Sequence
  Description of Artificial Sequence: Synthetic oligonucleotide
ucagacucugcacgaagau

SEQ ID NO: 2438684 - RNA, 19 nt, Artificial Sequence
  Description of Artificial Sequence: Synthetic oligonucleotide
cacucgggcauauacugug

SEQ ID NO: 2438685 - RNA, 19 nt, Artificial Sequence
  Description of Artificial Sequence: Synthetic oligonucleotide
acuguggcugggccaagcg

SEQ ID NO: 2438686 - RNA, 19 nt, Artificial Sequence
  Description of Artificial Sequence: Synthetic oligonucleotide
acugugcgaaaagaaacug

SEQ ID NO: 2438687 - RNA, 19 nt, Artificial Sequence
  Description of Artificial Sequence: Synthetic oligonucleotide
cuagguacucaguaagaga

SEQ ID NO: 2438688 - RNA, 19 nt, Artificial Sequence
  Description of Artificial Sequence: Synthetic oligonucleotide
cugaaagucggccucguga

SEQ ID NO: 2438689 - RNA, 19 nt, Artificial Sequence
  Description of Artificial Sequence: Synthetic oligonucleotide
uugcuccccaaacccagag

SEQ ID NO: 2438690 - RNA, 19 nt, Artificial Sequence
  Description of Artificial Sequence: Synthetic oligonucleotide
agacaauacgcaggugaac

SEQ ID NO: 2438691 - RNA, 19 nt, Artificial Sequence
  Description of Artificial Sequence: Synthetic oligonucleotide
augcccagggucgacacgg

SEQ ID NO: 2438692 - RNA, 19 nt, Artificial Sequence
  Description of Artificial Sequence: Synthetic oligonucleotide
cuuuucuauuugucuuccc

SEQ ID NO: 2438693 - RNA, 19 nt, Artificial Sequence
  Description of Artificial Sequence: Synthetic oligonucleotide
uucaggcuuggcaggauaa

SEQ ID NO: 2438694 - RNA, 19 nt, Artificial Sequence
  Description of Artificial Sequence: Synthetic oligonucleotide
gacaauacgcaggugaacu

SEQ ID NO: 2438695 - RNA, 19 nt, Artificial Sequence
  Description of Artificial Sequence: Synthetic oligonucleotide
uccucauaccguagagagc

SEQ ID NO: 2438696 - RNA, 19 nt, Artificial Sequence
  Description of Artificial Sequence: Synthetic oligonucleotide
ugugguccuuuucgaaaug

SEQ ID NO: 2438697 - RNA, 19 nt, Artificial Sequence
  Description of Artificial Sequence: Synthetic oligonucleotide
uucccggaagcacuaugug

SEQ ID NO: 2438698 - RNA, 19 nt, Artificial Sequence
  Description of Artificial Sequence: Synthetic oligonucleotide
aagcuugcagccgcaaugu

SEQ ID NO: 2438699 - RNA, 19 nt, Artificial Sequence
  Description of Artificial Sequence: Synthetic oligonucleotide
auauacugugcgaaaagaa

SEQ ID NO: 2438700 - RNA, 19 nt, Artificial Sequence
  Description of Artificial Sequence: Synthetic oligonucleotide
gugaaggugccagccaugg

SEQ ID NO: 2438701 - RNA, 19 nt, Artificial Sequence
  Description of Artificial Sequence: Synthetic oligonucleotide
ugcacucacaguucacagu

SEQ ID NO: 2438702 - RNA, 19 nt, Artificial Sequence
  Description of Artificial Sequence: Synthetic oligonucleotide
gaagauuccuuuagaggca

SEQ ID NO: 2438703 - RNA, 19 nt, Artificial Sequence
  Description of Artificial Sequence: Synthetic oligonucleotide
gaccaguagccuguggucc

SEQ ID NO: 2438704 - RNA, 19 nt, Artificial Sequence
  Description of Artificial Sequence: Synthetic oligonucleotide
cucgggcauauacugugcg

SEQ ID NO: 2438705 - RNA, 19 nt, Artificial Sequence
  Description of Artificial Sequence: Synthetic oligonucleotide
aaaugccggaauacugcag

SEQ ID NO: 2438706 - RNA, 19 nt, Artificial Sequence
  Description of Artificial Sequence: Synthetic oligonucleotide
gcuccccaaacccagagcc

SEQ ID NO: 2438707 - RNA, 19 nt, Artificial Sequence
  Description of Artificial Sequence: Synthetic oligonucleotide
gagccacucgggcauauac

SEQ ID NO: 2438708 - RNA, 19 nt, Artificial Sequence
  Description of Artificial Sequence: Synthetic oligonucleotide
aagcacuauguggaccauc

SEQ ID NO: 2438709 - RNA, 19 nt, Artificial Sequence
  Description of Artificial Sequence: Synthetic oligonucleotide
ucgugaaagauggcaacac

SEQ ID NO: 2438710 - RNA, 19 nt, Artificial Sequence
  Description of Artificial Sequence: Synthetic oligonucleotide
aagucggccucgugaaaga

SEQ ID NO: 2438711 - RNA, 19 nt, Artificial Sequence
  Description of Artificial Sequence: Synthetic oligonucleotide
agcugggccgaaauacugc

SEQ ID NO: 2438712 - RNA, 19 nt, Artificial Sequence
  Description of Artificial Sequence: Synthetic oligonucleotide
cauauacugugcgaaaaga

SEQ ID NO: 2438713 - RNA, 19 nt, Artificial Sequence
  Description of Artificial Sequence: Synthetic oligonucleotide
cacggcaugcugugcauag

SEQ ID NO: 2438714 - RNA, 19 nt, Artificial Sequence
  Description of Artificial Sequence: Synthetic oligonucleotide
auaccguagagagcgguug

SEQ ID NO: 2438715 - RNA, 19 nt, Artificial Sequence
  Description of Artificial Sequence: Synthetic oligonucleotide
ucugcacgaagauuccuuu

SEQ ID NO: 2438716 - RNA, 19 nt, Artificial Sequence
  Description of Artificial Sequence: Synthetic oligonucleotide
cagacugaaagucggccuc

SEQ ID NO: 2438717 - RNA, 19 nt, Artificial Sequence
  Description of Artificial Sequence: Synthetic oligonucleotide
ugaauagagugggaccagu

SEQ ID NO: 2438718 - RNA, 19 nt, Artificial Sequence
  Description of Artificial Sequence: Synthetic oligonucleotide
uaccguagagagcgguuga

SEQ ID NO: 2438719 - RNA, 19 nt, Artificial Sequence
  Description of Artificial Sequence: Synthetic oligonucleotide
aggugaacuaaauguguuu

SEQ ID NO: 2438720 - RNA, 19 nt, Artificial Sequence
  Description of Artificial Sequence: Synthetic oligonucleotide
agaaagggaucagacucug

SEQ ID NO: 2438721 - RNA, 19 nt, Artificial Sequence
  Description of Artificial Sequence: Synthetic oligonucleotide
ugaagugguccagguaggc

SEQ ID NO: 2438722 - RNA, 19 nt, Artificial Sequence
  Description of Artificial Sequence: Synthetic oligonucleotide
augcugugcauagacucuc

SEQ ID NO: 2438723 - RNA, 19 nt, Artificial Sequence
  Description of Artificial Sequence: Synthetic oligonucleotide
agacugaaagucggccucg

SEQ ID NO: 2438724 - RNA, 19 nt, Artificial Sequence
  Description of Artificial Sequence: Synthetic oligonucleotide
accaucaagcuugcagccg

SEQ ID NO: 2438725 - RNA, 19 nt, Artificial Sequence
  Description of Artificial Sequence: Synthetic oligonucleotide
aauacgcaggugaacuaaa

SEQ ID NO: 2438726 - RNA, 19 nt, Artificial Sequence
  Description of Artificial Sequence: Synthetic oligonucleotide
cgagcuuccggauucaggc

SEQ ID NO: 2438727 - RNA, 19 nt, Artificial Sequence
  Description of Artificial Sequence: Synthetic oligonucleotide
caaaugccggaauacugca

SEQ ID NO: 2438728 - RNA, 19 nt, Artificial Sequence
  Description of Artificial Sequence: Synthetic oligonucleotide
uguggaccaucaagcuugc

SEQ ID NO: 2438729 - RNA, 19 nt, Artificial Sequence
  Description of Artificial Sequence: Synthetic oligonucleotide
ucgggcauauacugugcga

SEQ ID NO: 2438730 - RNA, 19 nt, Artificial Sequence
  Description of Artificial Sequence: Synthetic oligonucleotide
ggaagcugggccgaaauac

SEQ ID NO: 2438731 - RNA, 19 nt, Artificial Sequence
  Description of Artificial Sequence: Synthetic oligonucleotide
aagcugggccgaaauacug

SEQ ID NO: 2438732 - RNA, 19 nt, Artificial Sequence
  Description of Artificial Sequence: Synthetic oligonucleotide
gcugggccgaaauacugcg

SEQ ID NO: 2438733 - RNA, 19 nt, Artificial Sequence
  Description of Artificial Sequence: Synthetic oligonucleotide
agcgguugagaagguuugc

SEQ ID NO: 2438734 - RNA, 19 nt, Artificial Sequence
  Description of Artificial Sequence: Synthetic oligonucleotide
ucaagcuugcagccgcaau

SEQ ID NO: 2438735 - RNA, 19 nt, Artificial Sequence
  Description of Artificial Sequence: Synthetic oligonucleotide
cugugcgaaaagaaacuga

SEQ ID NO: 2438736 - RNA, 19 nt, Artificial Sequence
  Description of Artificial Sequence: Synthetic oligonucleotide
ugggccaagcgucucccga

SEQ ID NO: 2438737 - RNA, 19 nt, Artificial Sequence
  Description of Artificial Sequence: Synthetic oligonucleotide
aaggugccagccaugggca

SEQ ID NO: 2438738 - RNA, 19 nt, Artificial Sequence
  Description of Artificial Sequence: Synthetic oligonucleotide
aacacacuagguacucagu

SEQ ID NO: 2438739 - RNA, 19 nt, Artificial Sequence
  Description of Artificial Sequence: Synthetic oligonucleotide
cauagaaagggaucagacu

SEQ ID NO: 2438740 - RNA, 19 nt, Artificial Sequence
  Description of Artificial Sequence: Synthetic oligonucleotide
ucaggcuuggcaggauaag

SEQ ID NO: 2438741 - RNA, 19 nt, Artificial Sequence
  Description of Artificial Sequence: Synthetic oligonucleotide
ccggauucaggcuuggcag

SEQ ID NO: 2438742 - RNA, 19 nt, Artificial Sequence
  Description of Artificial Sequence: Synthetic oligonucleotide
ucauaccguagagagcggu

SEQ ID NO: 2438743 - RNA, 19 nt, Artificial Sequence
  Description of Artificial Sequence: Synthetic oligonucleotide
gugcauagacucucgguga

SEQ ID NO: 2438744 - RNA, 19 nt, Artificial Sequence
  Description of Artificial Sequence: Synthetic oligonucleotide
agccaugggcaucugugca

SEQ ID NO: 2438745 - RNA, 19 nt, Artificial Sequence
  Description of Artificial Sequence: Synthetic oligonucleotide
ucggugaaggugccagcca

SEQ ID NO: 2438746 - RNA, 19 nt, Artificial Sequence
  Description of Artificial Sequence: Synthetic oligonucleotide
gccgaaauacugcgggugg

SEQ ID NO: 2438747 - RNA, 19 nt, Artificial Sequence
  Description of Artificial Sequence: Synthetic oligonucleotide
cucggugaaggugccagcc

SEQ ID NO: 2438748 - RNA, 19 nt, Artificial Sequence
  Description of Artificial Sequence: Synthetic oligonucleotide
cagccaugggcaucugugc

SEQ ID NO: 2438749 - RNA, 19 nt, Artificial Sequence
  Description of Artificial Sequence: Synthetic oligonucleotide
gucgacacggcaugcugug

SEQ ID NO: 2438750 - RNA, 19 nt, Artificial Sequence
  Description of Artificial Sequence: Synthetic oligonucleotide
acucgggcauauacugugc

SEQ ID NO: 2438751 - RNA, 19 nt, Artificial Sequence
  Description of Artificial Sequence: Synthetic oligonucleotide
gagcgguugagaagguuug

SEQ ID NO: 2438752 - RNA, 19 nt, Artificial Sequence
  Description of Artificial Sequence: Synthetic oligonucleotide
cuuuagaggcauauucaua

SEQ ID NO: 2438753 - RNA, 19 nt, Artificial Sequence
  Description of Artificial Sequence: Synthetic oligonucleotide
aggcauauucauacugcag

SEQ ID NO: 2438754 - RNA, 19 nt, Artificial Sequence
  Description of Artificial Sequence: Synthetic oligonucleotide
gccacucgggcauauacug

SEQ ID NO: 2438755 - RNA, 19 nt, Artificial Sequence
  Description of Artificial Sequence: Synthetic oligonucleotide
guuaggaaauaacacuuuu

SEQ ID NO: 2438756 - RNA, 19 nt, Artificial Sequence
  Description of Artificial Sequence: Synthetic oligonucleotide
agacacugugaugauggca

SEQ ID NO: 2438757 - RNA, 19 nt, Artificial Sequence
  Description of Artificial Sequence: Synthetic oligonucleotide
gagacaauacgcaggugaa

SEQ ID NO: 2438758 - RNA, 19 nt, Artificial Sequence
  Description of Artificial Sequence: Synthetic oligonucleotide
auaaguccucauaccguag

SEQ ID NO: 2438759 - RNA, 19 nt, Artificial Sequence
  Description of Artificial Sequence: Synthetic oligonucleotide
agccagguguggugugggc

SEQ ID NO: 2438760 - RNA, 19 nt, Artificial Sequence
  Description of Artificial Sequence: Synthetic oligonucleotide
acaauacgcaggugaacua

SEQ ID NO: 2438761 - RNA, 19 nt, Artificial Sequence
  Description of Artificial Sequence: Synthetic oligonucleotide
cugcaggauacuguggcug

SEQ ID NO: 2438762 - RNA, 19 nt, Artificial Sequence
  Description of Artificial Sequence: Synthetic oligonucleotide
cauucccggaagcacuaug

SEQ ID NO: 2438763 - RNA, 19 nt, Artificial Sequence
  Description of Artificial Sequence: Synthetic oligonucleotide
ggagccggaagacacugug

SEQ ID NO: 2438764 - RNA, 19 nt, Artificial Sequence
  Description of Artificial Sequence: Synthetic oligonucleotide
auacugcagggcucggcug

SEQ ID NO: 2438765 - RNA, 19 nt, Artificial Sequence
  Description of Artificial Sequence: Synthetic oligonucleotide
ggaauacugcaggauacug

SEQ ID NO: 2438766 - RNA, 19 nt, Artificial Sequence
  Description of Artificial Sequence: Synthetic oligonucleotide
uuggcaggauaaguccuca

SEQ ID NO: 2438767 - RNA, 19 nt, Artificial Sequence
  Description of Artificial Sequence: Synthetic oligonucleotide
acugaaagucggccucgug

SEQ ID NO: 2438768 - RNA, 19 nt, Artificial Sequence
  Description of Artificial Sequence: Synthetic oligonucleotide
cugggccgaaauacugcgg

SEQ ID NO: 2438769 - RNA, 19 nt, Artificial Sequence
  Description of Artificial Sequence: Synthetic oligonucleotide
cacugugaugauggcaccc

SEQ ID NO: 2438770 - RNA, 19 nt, Artificial Sequence
  Description of Artificial Sequence: Synthetic oligonucleotide
gguagaaugcacccacguc

SEQ ID NO: 2438771 - RNA, 19 nt, Artificial Sequence
  Description of Artificial Sequence: Synthetic oligonucleotide
aguccucauaccguagaga

SEQ ID NO: 2438772 - RNA, 19 nt, Artificial Sequence
  Description of Artificial Sequence: Synthetic oligonucleotide
ugggaccaguagccugugg

SEQ ID NO: 2438773 - RNA, 19 nt, Artificial Sequence
  Description of Artificial Sequence: Synthetic oligonucleotide
agagcgguugagaagguuu

SEQ ID NO: 2438774 - RNA, 19 nt, Artificial Sequence
  Description of Artificial Sequence: Synthetic oligonucleotide
gaaaugcccagggucgaca

SEQ ID NO: 2438775 - RNA, 19 nt, Artificial Sequence
  Description of Artificial Sequence: Synthetic oligonucleotide
ccaucaagcuugcagccgc

SEQ ID NO: 2438776 - RNA, 19 nt, Artificial Sequence
  Description of Artificial Sequence: Synthetic oligonucleotide
gauuccuuuagaggcauau

SEQ ID NO: 2438777 - RNA, 19 nt, Artificial Sequence
  Description of Artificial Sequence: Synthetic oligonucleotide
cacuagguacucaguaaga

SEQ ID NO: 2438778 - RNA, 19 nt, Artificial Sequence
  Description of Artificial Sequence: Synthetic oligonucleotide
cugaauagagugggaccag

SEQ ID NO: 2438779 - RNA, 19 nt, Artificial Sequence
  Description of Artificial Sequence: Synthetic oligonucleotide
cucauaccguagagagcgg

SEQ ID NO: 2438780 - RNA, 19 nt, Artificial Sequence
  Description of Artificial Sequence: Synthetic oligonucleotide
gccacauagaaagggauca

SEQ ID NO: 2438781 - RNA, 19 nt, Artificial Sequence
  Description of Artificial Sequence: Synthetic oligonucleotide
ugcccugggccacccaugu

SEQ ID NO: 2438782 - RNA, 19 nt, Artificial Sequence
  Description of Artificial Sequence: Synthetic oligonucleotide
caagcgucucccgagcuuc

SEQ ID NO: 2438783 - RNA, 19 nt, Artificial Sequence
  Description of Artificial Sequence: Synthetic oligonucleotide
aagcgucucccgagcuucc

SEQ ID NO: 2438784 - RNA, 19 nt, Artificial Sequence
  Description of Artificial Sequence: Synthetic oligonucleotide
ucccugagguuuucucaca

SEQ ID NO: 2438785 - RNA, 19 nt, Artificial Sequence
  Description of Artificial Sequence: Synthetic oligonucleotide
ucaggcuucguggcugugu

SEQ ID NO: 2438786 - RNA, 19 nt, Artificial Sequence
  Description of Artificial Sequence: Synthetic oligonucleotide
gguacucaguaagagacaa

SEQ ID NO: 2438787 - RNA, 19 nt, Artificial Sequence
  Description of Artificial Sequence: Synthetic oligonucleotide
gcugugcauagacucucgg

SEQ ID NO: 2438788 - RNA, 19 nt, Artificial Sequence
  Description of Artificial Sequence: Synthetic oligonucleotide
ccggaauacugcaggauac

SEQ ID NO: 2438789 - RNA, 19 nt, Artificial Sequence
  Description of Artificial Sequence: Synthetic oligonucleotide
ucgaaaugcccagggucga

SEQ ID NO: 2438790 - RNA, 19 nt, Artificial Sequence
  Description of Artificial Sequence: Synthetic oligonucleotide
cucccgagcuuccggauuc

SEQ ID NO: 2438791 - RNA, 19 nt, Artificial Sequence
  Description of Artificial Sequence: Synthetic oligonucleotide
caggauacuguggcugggc

SEQ ID NO: 2438792 - RNA, 19 nt, Artificial Sequence
  Description of Artificial Sequence: Synthetic oligonucleotide
gugcagucacacugguggc

SEQ ID NO: 2438793 - RNA, 19 nt, Artificial Sequence
  Description of Artificial Sequence: Synthetic oligonucleotide
cucgugaaagauggcaaca

SEQ ID NO: 2438794 - RNA, 19 nt, Artificial Sequence
  Description of Artificial Sequence: Synthetic oligonucleotide
accguagagagcgguugag

SEQ ID NO: 2438795 - RNA, 19 nt, Artificial Sequence
  Description of Artificial Sequence: Synthetic oligonucleotide
ggcuucguggcugugugcc

SEQ ID NO: 2438796 - RNA, 19 nt, Artificial Sequence
  Description of Artificial Sequence: Synthetic oligonucleotide
cagaguguguccucaggaa

SEQ ID NO: 2438797 - RNA, 19 nt, Artificial Sequence
  Description of Artificial Sequence: Synthetic oligonucleotide
caauacgcaggugaacuaa

SEQ ID NO: 2438798 - RNA, 19 nt, Artificial Sequence
  Description of Artificial Sequence: Synthetic oligonucleotide
cccggaagcacuaugugga

SEQ ID NO: 2438799 - RNA, 19 nt, Artificial Sequence
  Description of Artificial Sequence: Synthetic oligonucleotide
guagccugugguccuuuuc

SEQ ID NO: 2438800 - RNA, 19 nt, Artificial Sequence
  Description of Artificial Sequence: Synthetic oligonucleotide
ucucccgagcuuccggauu

SEQ ID NO: 2438801 - RNA, 19 nt, Artificial Sequence
  Description of Artificial Sequence: Synthetic oligonucleotide
guguggugugggcuugcag

SEQ ID NO: 2438802 - RNA, 19 nt, Artificial Sequence
  Description of Artificial Sequence: Synthetic oligonucleotide
guguccucaggaagcuggg

SEQ ID NO: 2438803 - RNA, 19 nt, Artificial Sequence
  Description of Artificial Sequence: Synthetic oligonucleotide
uacuguggcugggccaagc

SEQ ID NO: 2438804 - RNA, 19 nt, Artificial Sequence
  Description of Artificial Sequence: Synthetic oligonucleotide
caggagccggaagacacug

SEQ ID NO: 2438805 - RNA, 19 nt, Artificial Sequence
  Description of Artificial Sequence: Synthetic oligonucleotide
ucuucccgaugaacauuaa

SEQ ID NO: 2438806 - RNA, 19 nt, Artificial Sequence
  Description of Artificial Sequence: Synthetic oligonucleotide
cuccaccauucccggaagc

SEQ ID NO: 2438807 - RNA, 19 nt, Artificial Sequence
  Description of Artificial Sequence: Synthetic oligonucleotide
cacccuucuuucucuccac

SEQ ID NO: 2438808 - RNA, 19 nt, Artificial Sequence
  Description of Artificial Sequence: Synthetic oligonucleotide
aggaagcugggccgaaaua

SEQ ID NO: 2438809 - RNA, 19 nt, Artificial Sequence
  Description of Artificial Sequence: Synthetic oligonucleotide
ucucuccaccauucccgga

SEQ ID NO: 2438810 - RNA, 19 nt, Artificial Sequence
  Description of Artificial Sequence: Synthetic oligonucleotide
cacugguggccacauagaa

SEQ ID NO: 2438811 - RNA, 19 nt, Artificial Sequence
  Description of Artificial Sequence: Synthetic oligonucleotide
ccucgugaaagauggcaac

SEQ ID NO: 2438812 - RNA, 19 nt, Artificial Sequence
  Description of Artificial Sequence: Synthetic oligonucleotide
uucguggcugugugcccug

SEQ ID NO: 2438813 - RNA, 19 nt, Artificial Sequence
  Description of Artificial Sequence: Synthetic oligonucleotide
gaaagucggccucgugaaa

SEQ ID NO: 2438814 - RNA, 19 nt, Artificial Sequence
  Description of Artificial Sequence: Synthetic oligonucleotide
gucuucccgaugaacauua

SEQ ID NO: 2438815 - RNA, 19 nt, Artificial Sequence
  Description of Artificial Sequence: Synthetic oligonucleotide
ggaccaguagccugugguc

SEQ ID NO: 2438816 - RNA, 19 nt, Artificial Sequence
  Description of Artificial Sequence: Synthetic oligonucleotide
auuccuuuagaggcauauu

SEQ ID NO: 2438817 - RNA, 19 nt, Artificial Sequence
  Description of Artificial Sequence: Synthetic oligonucleotide
ggccgaaauacugcgggug

SEQ ID NO: 2438818 - RNA, 19 nt, Artificial Sequence
  Description of Artificial Sequence: Synthetic oligonucleotide
gggaucagacucugcacga

SEQ ID NO: 2438819 - RNA, 19 nt, Artificial Sequence
  Description of Artificial Sequence: Synthetic oligonucleotide
gucggccucgugaaagaug

SEQ ID NO: 2438820 - RNA, 19 nt, Artificial Sequence
  Description of Artificial Sequence: Synthetic oligonucleotide
agguguggugugggcuugc

SEQ ID NO: 2438821 - RNA, 19 nt, Artificial Sequence
  Description of Artificial Sequence: Synthetic oligonucleotide
ggcauauacugugcgaaaa

SEQ ID NO: 2438822 - RNA, 19 nt, Artificial Sequence
  Description of Artificial Sequence: Synthetic oligonucleotide
agccacucgggcauauacu

SEQ ID NO: 2438823 - RNA, 19 nt, Artificial Sequence
  Description of Artificial Sequence: Synthetic oligonucleotide
cuuccggauucaggcuugg

SEQ ID NO: 2438824 - RNA, 19 nt, Artificial Sequence
  Description of Artificial Sequence: Synthetic oligonucleotide
auacgcaggugaacuaaau

SEQ ID NO: 2438825 - RNA, 19 nt, Artificial Sequence
  Description of Artificial Sequence: Synthetic oligonucleotide
ggcaggauaaguccucaua

SEQ ID NO: 2438826 - RNA, 19 nt, Artificial Sequence
  Description of Artificial Sequence: Synthetic oligonucleotide
gacucucggugaaggugcc

SEQ ID NO: 2438827 - RNA, 19 nt, Artificial Sequence
  Description of Artificial Sequence: Synthetic oligonucleotide
gggucgacacggcaugcug

SEQ ID NO: 2438828 - RNA, 19 nt, Artificial Sequence
  Description of Artificial Sequence: Synthetic oligonucleotide
agauggcaacacacuaggu

SEQ ID NO: 2438829 - RNA, 19 nt, Artificial Sequence
  Description of Artificial Sequence: Synthetic oligonucleotide
ucgacacggcaugcugugc

SEQ ID NO: 2438830 - RNA, 19 nt, Artificial Sequence
  Description of Artificial Sequence: Synthetic oligonucleotide
ccgagcuuccggauucagg

SEQ ID NO: 2438831 - RNA, 19 nt, Artificial Sequence
  Description of Artificial Sequence: Synthetic oligonucleotide
cugggccaagcgucucccg

SEQ ID NO: 2438832 - RNA, 19 nt, Artificial Sequence
  Description of Artificial Sequence: Synthetic oligonucleotide
uggcaggauaaguccucau

SEQ ID NO: 2438833 - RNA, 19 nt, Artificial Sequence
  Description of Artificial Sequence: Synthetic oligonucleotide
cugugcauagacucucggu

SEQ ID NO: 2438834 - RNA, 19 nt, Artificial Sequence
  Description of Artificial Sequence: Synthetic oligonucleotide
acacugguggccacauaga

SEQ ID NO: 2438835 - RNA, 19 nt, Artificial Sequence
  Description of Artificial Sequence: Synthetic oligonucleotide
gggccaagcgucucccgag

SEQ ID NO: 2438836 - RNA, 19 nt, Artificial Sequence
  Description of Artificial Sequence: Synthetic oligonucleotide
cagccaggugugguguggg

SEQ ID NO: 2438837 - RNA, 19 nt, Artificial Sequence
  Description of Artificial Sequence: Synthetic oligonucleotide
agcgucucccgagcuuccg

SEQ ID NO: 2438838 - RNA, 19 nt, Artificial Sequence
  Description of Artificial Sequence: Synthetic oligonucleotide
gcuugcagccgcaauguuc

SEQ ID NO: 2438839 - RNA, 19 nt, Artificial Sequence
  Description of Artificial Sequence: Synthetic oligonucleotide
cccugagguuuucucacag

SEQ ID NO: 2438840 - RNA, 19 nt, Artificial Sequence
  Description of Artificial Sequence: Synthetic oligonucleotide
gggaccaguagccuguggu

SEQ ID NO: 2438841 - RNA, 19 nt, Artificial Sequence
  Description of Artificial Sequence: Synthetic oligonucleotide
gagccggaagacacuguga

SEQ ID NO: 2438842 - RNA, 19 nt, Artificial Sequence
  Description of Artificial Sequence: Synthetic oligonucleotide
aguagccugugguccuuuu

SEQ ID NO: 2438843 - RNA, 19 nt, Artificial Sequence
  Description of Artificial Sequence: Synthetic oligonucleotide
ggccucgugaaagauggca

SEQ ID NO: 2438844 - RNA, 19 nt, Artificial Sequence
  Description of Artificial Sequence: Synthetic oligonucleotide
uuccggauucaggcuuggc

SEQ ID NO: 2438845 - RNA, 19 nt, Artificial Sequence
  Description of Artificial Sequence: Synthetic oligonucleotide
caggugaacuaaauguguu

SEQ ID NO: 2438846 - RNA, 19 nt, Artificial Sequence
  Description of Artificial Sequence: Synthetic oligonucleotide
gccggaauacugcaggaua

SEQ ID NO: 2438847 - RNA, 19 nt, Artificial Sequence
  Description of Artificial Sequence: Synthetic oligonucleotide
ucguggcugugugcccugg

SEQ ID NO: 2438848 - RNA, 19 nt, Artificial Sequence
  Description of Artificial Sequence: Synthetic oligonucleotide
caccauucccggaagcacu

SEQ ID NO: 2438849 - RNA, 19 nt, Artificial Sequence
  Description of Artificial Sequence: Synthetic oligonucleotide
ccuuuucgaaaugcccagg

SEQ ID NO: 2438850 - RNA, 19 nt, Artificial Sequence
  Description of Artificial Sequence: Synthetic oligonucleotide
ggccacauagaaagggauc

SEQ ID NO: 2438851 - RNA, 19 nt, Artificial Sequence
  Description of Artificial Sequence: Synthetic oligonucleotide
caucaagcuugcagccgca

SEQ ID NO: 2438852 - RNA, 19 nt, Artificial Sequence
  Description of Artificial Sequence: Synthetic oligonucleotide
cggauucaggcuuggcagg

SEQ ID NO: 2438853 - RNA, 19 nt, Artificial Sequence
  Description of Artificial Sequence: Synthetic oligonucleotide
aguucacaguuaggaaaua

SEQ ID NO: 2438854 - RNA, 19 nt, Artificial Sequence
  Description of Artificial Sequence: Synthetic oligonucleotide
gguuugcuccccaaaccca

SEQ ID NO: 2438855 - RNA, 19 nt, Artificial Sequence
  Description of Artificial Sequence: Synthetic oligonucleotide
ggcaacacacuagguacuc

SEQ ID NO: 2438856 - RNA, 19 nt, Artificial Sequence
  Description of Artificial Sequence: Synthetic oligonucleotide
ggauaaguccucauaccgu

SEQ ID NO: 2438857 - RNA, 19 nt, Artificial Sequence
  Description of Artificial Sequence: Synthetic oligonucleotide
ccgaaauacugcggguggg

SEQ ID NO: 2438858 - RNA, 19 nt, Artificial Sequence
  Description of Artificial Sequence: Synthetic oligonucleotide
ccagggucgacacggcaug

SEQ ID NO: 2438859 - RNA, 19 nt, Artificial Sequence
  Description of Artificial Sequence: Synthetic oligonucleotide
agggucgacacggcaugcu

SEQ ID NO: 2438860 - RNA, 19 nt, Artificial Sequence
  Description of Artificial Sequence: Synthetic oligonucleotide
gcaggauacuguggcuggg

SEQ ID NO: 2438861 - RNA, 19 nt, Artificial Sequence
  Description of Artificial Sequence: Synthetic oligonucleotide
ggugaaggugccagccaug

SEQ ID NO: 2438862 - RNA, 19 nt, Artificial Sequence
  Description of Artificial Sequence: Synthetic oligonucleotide
cguagagagcgguugagaa

SEQ ID NO: 2438863 - RNA, 19 nt, Artificial Sequence
  Description of Artificial Sequence: Synthetic oligonucleotide
cugcacgaagauuccuuua

SEQ ID NO: 2438864 - RNA, 19 nt, Artificial Sequence
  Description of Artificial Sequence: Synthetic oligonucleotide
gcauagacucucggugaag

SEQ ID NO: 2438865 - RNA, 19 nt, Artificial Sequence
  Description of Artificial Sequence: Synthetic oligonucleotide
gcgucucccgagcuuccgg

SEQ ID NO: 2438866 - RNA, 19 nt, Artificial Sequence
  Description of Artificial Sequence: Synthetic oligonucleotide
aucaagcuugcagccgcaa

SEQ ID NO: 2438867 - RNA, 19 nt, Artificial Sequence
  Description of Artificial Sequence: Synthetic oligonucleotide
ggguagaaugcacccacgu

SEQ ID NO: 2438868 - RNA, 19 nt, Artificial Sequence
  Description of Artificial Sequence: Synthetic oligonucleotide
ggccuuggaugcagaaaag

SEQ ID NO: 2438869 - RNA, 19 nt, Artificial Sequence
  Description of Artificial Sequence: Synthetic oligonucleotide
ggccaagcgucucccgagc

SEQ ID NO: 2438870 - RNA, 19 nt, Artificial Sequence
  Description of Artificial Sequence: Synthetic oligonucleotide
cucugcacgaagauuccuu

SEQ ID NO: 2438871 - RNA, 19 nt, Artificial Sequence
  Description of Artificial Sequence: Synthetic oligonucleotide
cagggucgacacggcaugc

SEQ ID NO: 2438872 - RNA, 19 nt, Artificial Sequence
  Description of Artificial Sequence: Synthetic oligonucleotide
gccgcaauguucacauuca

SEQ ID NO: 2438873 - RNA, 19 nt, Artificial Sequence
  Description of Artificial Sequence: Synthetic oligonucleotide
cgcaauguucacauucaca

SEQ ID NO: 2438874 - RNA, 19 nt, Artificial Sequence
  Description of Artificial Sequence: Synthetic oligonucleotide
cuucccgaugaacauuaau

SEQ ID NO: 2438875 - RNA, 19 nt, Artificial Sequence
  Description of Artificial Sequence: Synthetic oligonucleotide
cgguugagaagguuugcuc

SEQ ID NO: 2438876 - RNA, 19 nt, Artificial Sequence
  Description of Artificial Sequence: Synthetic oligonucleotide
ccuuuagaggcauauucau

SEQ ID NO: 2438877 - RNA, 19 nt, Artificial Sequence
  Description of Artificial Sequence: Synthetic oligonucleotide
gggcauauacugugcgaaa

SEQ ID NO: 2438878 - RNA, 19 nt, Artificial Sequence
  Description of Artificial Sequence: Synthetic oligonucleotide
gcuucguggcugugugccc

SEQ ID NO: 2438879 - RNA, 19 nt, Artificial Sequence
  Description of Artificial Sequence: Synthetic oligonucleotide
cagguguggugugggcuug

SEQ ID NO: 2438880 - RNA, 19 nt, Artificial Sequence
  Description of Artificial Sequence: Synthetic oligonucleotide
gacacggcaugcugugcau

SEQ ID NO: 2438881 - RNA, 19 nt, Artificial Sequence
  Description of Artificial Sequence: Synthetic oligonucleotide
cggcaugcugugcauagac

SEQ ID NO: 2438882 - RNA, 19 nt, Artificial Sequence
  Description of Artificial Sequence: Synthetic oligonucleotide
cauaccguagagagcgguu

SEQ ID NO: 2438883 - RNA, 19 nt, Artificial Sequence
  Description of Artificial Sequence: Synthetic oligonucleotide
auacuguggcugggccaag

SEQ ID NO: 2438884 - RNA, 19 nt, Artificial Sequence
  Description of Artificial Sequence: Synthetic oligonucleotide
acggcaugcugugcauaga

SEQ ID NO: 2438885 - RNA, 19 nt, Artificial Sequence
  Description of Artificial Sequence: Synthetic oligonucleotide
ccgcaauguucacauucac

SEQ ID NO: 2438886 - RNA, 19 nt, Artificial Sequence
  Description of Artificial Sequence: Synthetic oligonucleotide
gcuuccggauucaggcuug

SEQ ID NO: 2438887 - RNA, 19 nt, Artificial Sequence
  Description of Artificial Sequence: Synthetic oligonucleotide
cgugaaagauggcaacaca

SEQ ID NO: 2438888 - RNA, 19 nt, Artificial Sequence
  Description of Artificial Sequence: Synthetic oligonucleotide
ucccgagcuuccggauuca

SEQ ID NO: 2438889 - RNA, 19 nt, Artificial Sequence
  Description of Artificial Sequence: Synthetic oligonucleotide
cacucacaguucacaguua

SEQ ID NO: 2438890 - RNA, 19 nt, Artificial Sequence
  Description of Artificial Sequence: Synthetic oligonucleotide
gccucgugaaagauggcaa

SEQ ID NO: 2438891 - RNA, 19 nt, Artificial Sequence
  Description of Artificial Sequence: Synthetic oligonucleotide
ccggaagcacuauguggac

SEQ ID NO: 2438892 - RNA, 19 nt, Artificial Sequence
  Description of Artificial Sequence: Synthetic oligonucleotide
acucucggugaaggugcca

SEQ ID NO: 2438893 - RNA, 19 nt, Artificial Sequence
  Description of Artificial Sequence: Synthetic oligonucleotide
cugugugcccugggccacc

SEQ ID NO: 2438894 - RNA, 19 nt, Artificial Sequence
  Description of Artificial Sequence: Synthetic oligonucleotide
gugcccugggccacccaug

SEQ ID NO: 2438895 - RNA, 19 nt, Artificial Sequence
  Description of Artificial Sequence: Synthetic oligonucleotide
cccgaugaacauuaauuau

SEQ ID NO: 2438896 - RNA, 19 nt, Artificial Sequence
  Description of Artificial Sequence: Synthetic oligonucleotide
gacugaaagucggccucgu

SEQ ID NO: 2438897 - RNA, 19 nt, Artificial Sequence
  Description of Artificial Sequence: Synthetic oligonucleotide
acacggcaugcugugcaua

SEQ ID NO: 2438898 - RNA, 19 nt, Artificial Sequence
  Description of Artificial Sequence: Synthetic oligonucleotide
cuucguggcugugugcccu

SEQ ID NO: 2438899 - RNA, 19 nt, Artificial Sequence
  Description of Artificial Sequence: Synthetic oligonucleotide
gccugugguccuuuucgaa

SEQ ID NO: 2438900 - RNA, 19 nt, Artificial Sequence
  Description of Artificial Sequence: Synthetic oligonucleotide
ggaucagacucugcacgaa

SEQ ID NO: 2438901 - RNA, 19 nt, Artificial Sequence
  Description of Artificial Sequence: Synthetic oligonucleotide
gauucaggcuuggcaggau

SEQ ID NO: 2438902 - RNA, 19 nt, Artificial Sequence
  Description of Artificial Sequence: Synthetic oligonucleotide
gaagcacuauguggaccau

SEQ ID NO: 2438903 - RNA, 19 nt, Artificial Sequence
  Description of Artificial Sequence: Synthetic oligonucleotide
ggucgacacggcaugcugu

SEQ ID NO: 2438904 - RNA, 19 nt, Artificial Sequence
  Description of Artificial Sequence: Synthetic oligonucleotide
cgacacggcaugcugugca

SEQ ID NO: 2438905 - RNA, 19 nt, Artificial Sequence
  Description of Artificial Sequence: Synthetic oligonucleotide
caggugcagucacacuggu

SEQ ID NO: 2438906 - RNA, 19 nt, Artificial Sequence
  Description of Artificial Sequence: Synthetic oligonucleotide
gcgguugagaagguuugcu

SEQ ID NO: 2438907 - RNA, 19 nt, Artificial Sequence
  Description of Artificial Sequence: Synthetic oligonucleotide
gagagcgguugagaagguu

SEQ ID NO: 2438908 - RNA, 19 nt, Artificial Sequence
  Description of Artificial Sequence: Synthetic oligonucleotide
ggcaugcugugcauagacu

SEQ ID NO: 2438909 - RNA, 19 nt, Artificial Sequence
  Description of Artificial Sequence: Synthetic oligonucleotide
ggcaucugugcaggaagcu

SEQ ID NO: 2438910 - RNA, 19 nt, Artificial Sequence
  Description of Artificial Sequence: Synthetic oligonucleotide
gguguggugugggcuugca

SEQ ID NO: 2438911 - RNA, 19 nt, Artificial Sequence
  Description of Artificial Sequence: Synthetic oligonucleotide
ccguagagagcgguugaga

SEQ ID NO: 2438912 - RNA, 19 nt, Artificial Sequence
  Description of Artificial Sequence: Synthetic oligonucleotide
gggccgaaauacugcgggu

SEQ ID NO: 2438913 - RNA, 19 nt, Artificial Sequence
  Description of Artificial Sequence: Synthetic oligonucleotide
ugccagccaugggcaucug

SEQ ID NO: 2438914 - RNA, 19 nt, Artificial Sequence
  Description of Artificial Sequence: Synthetic oligonucleotide
guggaccaucaagcuugca

SEQ ID NO: 2438915 - RNA, 19 nt, Artificial Sequence
  Description of Artificial Sequence: Synthetic oligonucleotide
cgaaaugcccagggucgac

SEQ ID NO: 2438916 - RNA, 19 nt, Artificial Sequence
  Description of Artificial Sequence: Synthetic oligonucleotide
gccaagcgucucccgagcu

SEQ ID NO: 2438917 - RNA, 19 nt, Artificial Sequence
  Description of Artificial Sequence: Synthetic oligonucleotide
cccgagcuuccggauucag

SEQ ID NO: 2438918 - RNA, 19 nt, Artificial Sequence
  Description of Artificial Sequence: Synthetic oligonucleotide
cccagggucgacacggcau

SEQ ID NO: 2438919 - RNA, 19 nt, Artificial Sequence
  Description of Artificial Sequence: Synthetic oligonucleotide
ccacucgggcauauacugu

SEQ ID NO: 2438920 - RNA, 19 nt, Artificial Sequence
  Description of Artificial Sequence: Synthetic oligonucleotide
ccagguguggugugggcuu

SEQ ID NO: 2438921 - RNA, 19 nt, Artificial Sequence
  Description of Artificial Sequence: Synthetic oligonucleotide
gccagccaugggcaucugu

SEQ ID NO: 2438922 - RNA, 19 nt, Artificial Sequence
  Description of Artificial Sequence: Synthetic oligonucleotide
cggccucgugaaagauggc

SEQ ID NO: 2438923 - RNA, 19 nt, Artificial Sequence
  Description of Artificial Sequence: Synthetic oligonucleotide
gggcucggcugaagugguc

SEQ ID NO: 2438924 - RNA, 19 nt, Artificial Sequence
  Description of Artificial Sequence: Synthetic oligonucleotide
cggugaaggugccagccau

SEQ ID NO: 2438925 - RNA, 19 nt, Artificial Sequence
  Description of Artificial Sequence: Synthetic oligonucleotide
cagagccacucgggcauau

SEQ ID NO: 2438926 - RNA, 19 nt, Artificial Sequence
  Description of Artificial Sequence: Synthetic oligonucleotide
ccaagcgucucccgagcuu

SEQ ID NO: 2438927 - RNA, 19 nt, Artificial Sequence
  Description of Artificial Sequence: Synthetic oligonucleotide
cagccgcaauguucacauu

SEQ ID NO: 2438928 - RNA, 19 nt, Artificial Sequence
  Description of Artificial Sequence: Synthetic oligonucleotide
caguagccugugguccuuu

SEQ ID NO: 2438929 - RNA, 19 nt, Artificial Sequence
  Description of Artificial Sequence: Synthetic oligonucleotide
ccauucccggaagcacuau

SEQ ID NO: 2438930 - RNA, 19 nt, Artificial Sequence
  Description of Artificial Sequence: Synthetic oligonucleotide
ccaguagccugugguccuu

SEQ ID NO: 2438931 - RNA, 19 nt, Artificial Sequence
  Description of Artificial Sequence: Synthetic oligonucleotide
aauguauggauacaguuca

SEQ ID NO: 2438932 - RNA, 19 nt, Artificial Sequence
  Description of Artificial Sequence: Synthetic oligonucleotide
ugugauuccagaaaguuau

SEQ ID NO: 2438933 - RNA, 19 nt, Artificial Sequence
  Description of Artificial Sequence: Synthetic oligonucleotide
uuauccuuaaucacuacca

SEQ ID NO: 2438934 - RNA, 19 nt, Artificial Sequence
  Description of Artificial Sequence: Synthetic oligonucleotide
cuuguggcaacgaagaggc

SEQ ID NO: 2438935 - RNA, 19 nt, Artificial Sequence
  Description of Artificial Sequence: Synthetic oligonucleotide
uuuaguucaggacugcgug

SEQ ID NO: 2438936 - RNA, 19 nt, Artificial Sequence
  Description of Artificial Sequence: Synthetic oligonucleotide
uaaaccugcauuuuggggu

SEQ ID NO: 2438937 - RNA, 19 nt, Artificial Sequence
  Description of Artificial Sequence: Synthetic oligonucleotide
ucuguauugaaagaauucc

SEQ ID NO: 2438938 - RNA, 19 nt, Artificial Sequence
  Description of Artificial Sequence: Synthetic oligonucleotide
ucauagaaaucuucaagcc

SEQ ID NO: 2438939 - RNA, 19 nt, Artificial Sequence
  Description of Artificial Sequence: Synthetic oligonucleotide
auagaaaucuucaagccuc

SEQ ID NO: 2438940 - RNA, 19 nt, Artificial Sequence
  Description of Artificial Sequence: Synthetic oligonucleotide
uuuguaaaccugcauuuug

SEQ ID NO: 2438941 - RNA, 19 nt, Artificial Sequence
  Description of Artificial Sequence: Synthetic oligonucleotide
uguauugaaagaauuccaa

SEQ ID NO: 2438942 - RNA, 19 nt, Artificial Sequence
  Description of Artificial Sequence: Synthetic oligonucleotide
uuaaucacuaccaccacau

SEQ ID NO: 2438943 - RNA, 19 nt, Artificial Sequence
  Description of Artificial Sequence: Synthetic oligonucleotide
auccuuaaucacuaccacc

SEQ ID NO: 2438944 - RNA, 19 nt, Artificial Sequence
  Description of Artificial Sequence: Synthetic oligonucleotide
uacagugugcauauguuug

SEQ ID NO: 2438945 - RNA, 19 nt, Artificial Sequence
  Description of Artificial Sequence: Synthetic oligonucleotide
auuuuggggucuuucauag

SEQ ID NO: 2438946 - RNA, 19 nt, Artificial Sequence
  Description of Artificial Sequence: Synthetic oligonucleotide
agaaaguuauucuguauug

SEQ ID NO: 2438947 - RNA, 19 nt, Artificial Sequence
  Description of Artificial Sequence: Synthetic oligonucleotide
uguguuuaguucaggacug

SEQ ID NO: 2438948 - RNA, 19 nt, Artificial Sequence
  Description of Artificial Sequence: Synthetic oligonucleotide
augacgacugagucaaugc

SEQ ID NO: 2438949 - RNA, 19 nt, Artificial Sequence
  Description of Artificial Sequence: Synthetic oligonucleotide
uauugaaagaauuccaauu

SEQ ID NO: 2438950 - RNA, 19 nt, Artificial Sequence
  Description of Artificial Sequence: Synthetic oligonucleotide
  modified_base (4)..(4): a, c, u, g, unknown or other
cuunugaacagucacucuc

SEQ ID NO: 2438951 - RNA, 19 nt, Artificial Sequence
  Description of Artificial Sequence: Synthetic oligonucleotide
  modified_base (14)..(14): a, c, u, g, unknown or other
ucagaagucccuunugaac

SEQ ID NO: 2438952 - RNA, 19 nt, Artificial Sequence
  Description of Artificial Sequence: Synthetic oligonucleotide
ucagacuggaaauggaggc

SEQ ID NO: 2438953 - RNA, 19 nt, Artificial Sequence
  Description of Artificial Sequence: Synthetic oligonucleotide
agguguacauggcucaugc

SEQ ID NO: 2438954 - RNA, 19 nt, Artificial Sequence
  Description of Artificial Sequence: Synthetic oligonucleotide
aauggcaucgguaacccag

SEQ ID NO: 2438955 - RNA, 19 nt, Artificial Sequence
  Description of Artificial Sequence: Synthetic oligonucleotide
agcucaguuugcuggaucc

SEQ ID NO: 2438956 - RNA, 19 nt, Artificial Sequence
  Description of Artificial Sequence: Synthetic oligonucleotide
uauggauacaguucauuca

SEQ ID NO: 2438957 - RNA, 19 nt, Artificial Sequence
  Description of Artificial Sequence: Synthetic oligonucleotide
aaaccugcauuuugggguc

SEQ ID NO: 2438958 - RNA, 19 nt, Artificial Sequence
  Description of Artificial Sequence: Synthetic oligonucleotide
ucagcugcgggauggaagg

SEQ ID NO: 2438959 - RNA, 19 nt, Artificial Sequence
  Description of Artificial Sequence: Synthetic oligonucleotide
uguacauggcucaugcgug

SEQ ID NO: 2438960 - RNA, 19 nt, Artificial Sequence
  Description of Artificial Sequence: Synthetic oligonucleotide
uugaaagaauuccaauugu

SEQ ID NO: 2438961 - RNA, 19 nt, Artificial Sequence
  Description of Artificial Sequence: Synthetic oligonucleotide
aagaccagccaauggugac

SEQ ID NO: 2438962 - RNA, 19 nt, Artificial Sequence
  Description of Artificial Sequence: Synthetic oligonucleotide
  modified_base (3)..(3): a, c, u, g, unknown or other
uunugaacagucacucucu

SEQ ID NO: 2438963 - RNA, 19 nt, Artificial Sequence
  Description of Artificial Sequence: Synthetic oligonucleotide
cuuccuuuguguuucuagg

SEQ ID NO: 2438964 - RNA, 19 nt, Artificial Sequence
  Description of Artificial Sequence: Synthetic oligonucleotide
agcuugugauuccagaaag

SEQ ID NO: 2438965 - RNA, 19 nt, Artificial Sequence
  Description of Artificial Sequence: Synthetic oligonucleotide
guaaaccugcauuuugggg

SEQ ID NO: 2438966 - RNA, 19 nt, Artificial Sequence
  Description of Artificial Sequence: Synthetic oligonucleotide
ugguccuucccaaugacga

SEQ ID NO: 2438967 - RNA, 19 nt, Artificial Sequence
  Description of Artificial Sequence: Synthetic oligonucleotide
uguggcaacgaagaggcag

SEQ ID NO: 2438968 - RNA, 19 nt, Artificial Sequence
  Description of Artificial Sequence: Synthetic oligonucleotide
cagacaaaugcagacagcc

SEQ ID NO: 2438969 - RNA, 19 nt, Artificial Sequence
  Description of Artificial Sequence: Synthetic oligonucleotide
aaaugcagacagcccuggc

SEQ ID NO: 2438970 - RNA, 19 nt, Artificial Sequence
  Description of Artificial Sequence: Synthetic oligonucleotide
uuaguucaggacugcgugg

SEQ ID NO: 2438971 - RNA, 19 nt, Artificial Sequence
  Description of Artificial Sequence: Synthetic oligonucleotide
aauggugacgggccuuggg

SEQ ID NO: 2438972 - RNA, 19 nt, Artificial Sequence
  Description of Artificial Sequence: Synthetic oligonucleotide
ugaggugcuucuuucagcu

SEQ ID NO: 2438973 - RNA, 19 nt, Artificial Sequence
  Description of Artificial Sequence: Synthetic oligonucleotide
ugugcauauguuugagaag

SEQ ID NO: 2438974 - RNA, 19 nt, Artificial Sequence
  Description of Artificial Sequence: Synthetic oligonucleotide
cauauguuugagaaguuca

SEQ ID NO: 2438975 - RNA, 19 nt, Artificial Sequence
  Description of Artificial Sequence: Synthetic oligonucleotide
ucuuuguaaaccugcauuu

SEQ ID NO: 2438976 - RNA, 19 nt, Artificial Sequence
  Description of Artificial Sequence: Synthetic oligonucleotide
uguguguuuaguucaggac

SEQ ID NO: 2438977 - RNA, 19 nt, Artificial Sequence
  Description of Artificial Sequence: Synthetic oligonucleotide
acuuguggcaacgaagagg

SEQ ID NO: 2438978 - RNA, 19 nt, Artificial Sequence
  Description of Artificial Sequence: Synthetic oligonucleotide
aaugacgacugagucaaug

SEQ ID NO: 2438979 - RNA, 19 nt, Artificial Sequence
  Description of Artificial Sequence: Synthetic oligonucleotide
  modified_base (10)..(10): a, c, u, g, unknown or other
aagucccuunugaacaguc

SEQ ID NO: 2438980 - RNA, 19 nt, Artificial Sequence
  Description of Artificial Sequence: Synthetic oligonucleotide
ucaagguguucacugguca

SEQ ID NO: 2438981 - RNA, 19 nt, Artificial Sequence
  Description of Artificial Sequence: Synthetic oligonucleotide
uguuucuaggucaggacuc

SEQ ID NO: 2438982 - RNA, 19 nt, Artificial Sequence
  Description of Artificial Sequence: Synthetic oligonucleotide
caguucauucaccaugugg

SEQ ID NO: 2438983 - RNA, 19 nt, Artificial Sequence
  Description of Artificial Sequence: Synthetic oligonucleotide
acaauguauggauacaguu

SEQ ID NO: 2438984 - RNA, 19 nt, Artificial Sequence
  Description of Artificial Sequence: Synthetic oligonucleotide
aucuuuguaaaccugcauu

SEQ ID NO: 2438985 - RNA, 19 nt, Artificial Sequence
  Description of Artificial Sequence: Synthetic oligonucleotide
guauggauacaguucauuc

SEQ ID NO: 2438986 - RNA, 19 nt, Artificial Sequence
  Description of Artificial Sequence: Synthetic oligonucleotide
uauccuuaaucacuaccac

SEQ ID NO: 2438987 - RNA, 19 nt, Artificial Sequence
  Description of Artificial Sequence: Synthetic oligonucleotide
uacaauguauggauacagu

SEQ ID NO: 2438988 - RNA, 19 nt, Artificial Sequence
  Description of Artificial Sequence: Synthetic oligonucleotide
auucaccauguggagaacc

SEQ ID NO: 2438989 - RNA, 19 nt, Artificial Sequence
  Description of Artificial Sequence: Synthetic oligonucleotide
auagucugaccucuuucuc

SEQ ID NO: 2438990 - RNA, 19 nt, Artificial Sequence
  Description of Artificial Sequence: Synthetic oligonucleotide
uaagaccagccaaugguga

SEQ ID NO: 2438991 - RNA, 19 nt, Artificial Sequence
  Description of Artificial Sequence: Synthetic oligonucleotide
ugggauugaccccaccugc

SEQ ID NO: 2438992 - RNA, 19 nt, Artificial Sequence
  Description of Artificial Sequence: Synthetic oligonucleotide
  modified_base (7)..(7): a, c, u, g, unknown or other
ucccuunugaacagucacu

SEQ ID NO: 2438993 - RNA, 19 nt, Artificial Sequence
  Description of Artificial Sequence: Synthetic oligonucleotide
auggugacgggccuugggg

SEQ ID NO: 2438994 - RNA, 19 nt, Artificial Sequence
  Description of Artificial Sequence: Synthetic oligonucleotide
uguuuaguucaggacugcg

SEQ ID NO: 2438995 - RNA, 19 nt, Artificial Sequence
  Description of Artificial Sequence: Synthetic oligonucleotide
aaaggagaaucaaaauccu

SEQ ID NO: 2438996 - RNA, 19 nt, Artificial Sequence
  Description of Artificial Sequence: Synthetic oligonucleotide
gcaucgguaacccagccgg

SEQ ID NO: 2438997 - RNA, 19 nt, Artificial Sequence
  Description of Artificial Sequence: Synthetic oligonucleotide
cuacaauguauggauacag

SEQ ID NO: 2438998 - RNA, 19 nt, Artificial Sequence
  Description of Artificial Sequence: Synthetic oligonucleotide
  modified_base (13)..(13): a, c, u, g, unknown or other
cagaagucccuunugaaca

SEQ ID NO: 2438999 - RNA, 19 nt, Artificial Sequence
  Description of Artificial Sequence: Synthetic oligonucleotide
uagaaaucuucaagccucc

SEQ ID NO: 2439000 - RNA, 19 nt, Artificial Sequence
  Description of Artificial Sequence: Synthetic oligonucleotide
ugcauuuuggggucuuuca

SEQ ID NO: 2439001 - RNA, 19 nt, Artificial Sequence
  Description of Artificial Sequence: Synthetic oligonucleotide
uggggcacagacaaaugca

SEQ ID NO: 2439002 - RNA, 19 nt, Artificial Sequence
  Description of Artificial Sequence: Synthetic oligonucleotide
gaaauggaggcccagggua

SEQ ID NO: 2439003 - RNA, 19 nt, Artificial Sequence
  Description of Artificial Sequence: Synthetic oligonucleotide
gaucacaugaagguguaca

SEQ ID NO: 2439004 - RNA, 19 nt, Artificial Sequence
  Description of Artificial Sequence: Synthetic oligonucleotide
  modified_base (12)..(12): a, c, u, g, unknown or other
agaagucccuunugaacag

SEQ ID NO: 2439005 - RNA, 19 nt, Artificial Sequence
  Description of Artificial Sequence: Synthetic oligonucleotide
caguuugcuggauccagcg

SEQ ID NO: 2439006 - RNA, 19 nt, Artificial Sequence
  Description of Artificial Sequence: Synthetic oligonucleotide
ucuacaauguauggauaca

SEQ ID NO: 2439007 - RNA, 19 nt, Artificial Sequence
  Description of Artificial Sequence: Synthetic oligonucleotide
uugugauuccagaaaguua

SEQ ID NO: 2439008 - RNA, 19 nt, Artificial Sequence
  Description of Artificial Sequence: Synthetic oligonucleotide
ucaugcgugggaauggcau

SEQ ID NO: 2439009 - RNA, 19 nt, Artificial Sequence
  Description of Artificial Sequence: Synthetic oligonucleotide
uagucugaccucuuucucu

SEQ ID NO: 2439010 - RNA, 19 nt, Artificial Sequence
  Description of Artificial Sequence: Synthetic oligonucleotide
acgacugagucaaugcugg

SEQ ID NO: 2439011 - RNA, 19 nt, Artificial Sequence
  Description of Artificial Sequence: Synthetic oligonucleotide
  modified_base (15)..(15): a, c, u, g, unknown or other
uucagaagucccuunugaa

SEQ ID NO: 2439012 - RNA, 19 nt, Artificial Sequence
  Description of Artificial Sequence: Synthetic oligonucleotide
  modified_base (17)..(17): a, c, u, g, unknown or other
aguucagaagucccuunug

SEQ ID NO: 2439013 - RNA, 19 nt, Artificial Sequence
  Description of Artificial Sequence: Synthetic oligonucleotide
ggagaaucaaaauccuggc

SEQ ID NO: 2439014 - RNA, 19 nt, Artificial Sequence
  Description of Artificial Sequence: Synthetic oligonucleotide
uggauacaguucauucacc

SEQ ID NO: 2439015 - RNA, 19 nt, Artificial Sequence
  Description of Artificial Sequence: Synthetic oligonucleotide
agacaaaugcagacagccc

SEQ ID NO: 2439016 - RNA, 19 nt, Artificial Sequence
  Description of Artificial Sequence: Synthetic oligonucleotide
uguacuccgucuccgggga

SEQ ID NO: 2439017 - RNA, 19 nt, Artificial Sequence
  Description of Artificial Sequence: Synthetic oligonucleotide
ggucacagccuucagacug

SEQ ID NO: 2439018 - RNA, 19 nt, Artificial Sequence
  Description of Artificial Sequence: Synthetic oligonucleotide
cugcaaucaccuuuucccc

SEQ ID NO: 2439019 - RNA, 19 nt, Artificial Sequence
  Description of Artificial Sequence: Synthetic oligonucleotide
uccagcgaaaucugcaauc

SEQ ID NO: 2439020 - RNA, 19 nt, Artificial Sequence
  Description of Artificial Sequence: Synthetic oligonucleotide
agugucacccgccccagug

SEQ ID NO: 2439021 - RNA, 19 nt, Artificial Sequence
  Description of Artificial Sequence: Synthetic oligonucleotide
guacauggcucaugcgugg

SEQ ID NO: 2439022 - RNA, 19 nt, Artificial Sequence
  Description of Artificial Sequence: Synthetic oligonucleotide
guguguuuaguucaggacu

SEQ ID NO: 2439023 - RNA, 19 nt, Artificial Sequence
  Description of Artificial Sequence: Synthetic oligonucleotide
ucgguaacccagccggaag

SEQ ID NO: 2439024 - RNA, 19 nt, Artificial Sequence
  Description of Artificial Sequence: Synthetic oligonucleotide
cuguacuccgucuccgggg

SEQ ID NO: 2439025 - RNA, 19 nt, Artificial Sequence
  Description of Artificial Sequence: Synthetic oligonucleotide
ggguacuuauccuuaauca

SEQ ID NO: 2439026 - RNA, 19 nt, Artificial Sequence
  Description of Artificial Sequence: Synthetic oligonucleotide
uucaagguguucacugguc

SEQ ID NO: 2439027 - RNA, 19 nt, Artificial Sequence
  Description of Artificial Sequence: Synthetic oligonucleotide
uucauucaccauguggaga

SEQ ID NO: 2439028 - RNA, 19 nt, Artificial Sequence
  Description of Artificial Sequence: Synthetic oligonucleotide
  modified_base (8)..(8): a, c, u, g, unknown or other
gucccuunugaacagucac

SEQ ID NO: 2439029 - RNA, 19 nt, Artificial Sequence
  Description of Artificial Sequence: Synthetic oligonucleotide
ugcaaucaccuuuuccccu

SEQ ID NO: 2439030 - RNA, 19 nt, Artificial Sequence
  Description of Artificial Sequence: Synthetic oligonucleotide
uugcuacuuccucaaacuc

SEQ ID NO: 2439031 - RNA, 19 nt, Artificial Sequence
  Description of Artificial Sequence: Synthetic oligonucleotide
uguguguguguguuuaguu

SEQ ID NO: 2439032 - RNA, 19 nt, Artificial Sequence
  Description of Artificial Sequence: Synthetic oligonucleotide
cuuaaucacuaccaccaca

SEQ ID NO: 2439033 - RNA, 19 nt, Artificial Sequence
  Description of Artificial Sequence: Synthetic oligonucleotide
cuaggucaggacucuuugc

SEQ ID NO: 2439034 - RNA, 19 nt, Artificial Sequence
  Description of Artificial Sequence: Synthetic oligonucleotide
gaccagccaauggugacgg

SEQ ID NO: 2439035 - RNA, 19 nt, Artificial Sequence
  Description of Artificial Sequence: Synthetic oligonucleotide
guguguguguguuuaguuc

SEQ ID NO: 2439036 - RNA, 19 nt, Artificial Sequence
  Description of Artificial Sequence: Synthetic oligonucleotide
acacuuguggcaacgaaga

SEQ ID NO: 2439037 - RNA, 19 nt, Artificial Sequence
  Description of Artificial Sequence: Synthetic oligonucleotide
uccggggagagugucaccc

SEQ ID NO: 2439038 - RNA, 19 nt, Artificial Sequence
  Description of Artificial Sequence: Synthetic oligonucleotide
uccgucuccggggagagug

SEQ ID NO: 2439039 - RNA, 19 nt, Artificial Sequence
  Description of Artificial Sequence: Synthetic oligonucleotide
cugaggugcuucuuucagc

SEQ ID NO: 2439040 - RNA, 19 nt, Artificial Sequence
  Description of Artificial Sequence: Synthetic oligonucleotide
uguguguguguguguuuag

SEQ ID NO: 2439041 - RNA, 19 nt, Artificial Sequence
  Description of Artificial Sequence: Synthetic oligonucleotide
gagagugucacccgcccca

SEQ ID NO: 2439042 - RNA, 19 nt, Artificial Sequence
  Description of Artificial Sequence: Synthetic oligonucleotide
gugggaauggcaucgguaa

SEQ ID NO: 2439043 - RNA, 19 nt, Artificial Sequence
  Description of Artificial Sequence: Synthetic oligonucleotide
cuucccaaugacgacugag

SEQ ID NO: 2439044 - RNA, 19 nt, Artificial Sequence
  Description of Artificial Sequence: Synthetic oligonucleotide
ugacacuuguggcaacgaa

SEQ ID NO: 2439045 - RNA, 19 nt, Artificial Sequence
  Description of Artificial Sequence: Synthetic oligonucleotide
uuuuaaggcaaaggagaau

SEQ ID NO: 2439046 - RNA, 19 nt, Artificial Sequence
  Description of Artificial Sequence: Synthetic oligonucleotide
augcgugggaauggcaucg

SEQ ID NO: 2439047 - RNA, 19 nt, Artificial Sequence
  Description of Artificial Sequence: Synthetic oligonucleotide
gauccagcgaaaucugcaa

SEQ ID NO: 2439048 - RNA, 19 nt, Artificial Sequence
  Description of Artificial Sequence: Synthetic oligonucleotide
acgaagaggcagcuucaag

SEQ ID NO: 2439049 - RNA, 19 nt, Artificial Sequence
  Description of Artificial Sequence: Synthetic oligonucleotide
  modified_base (2)..(2): a, c, u, g, unknown or other
unugaacagucacucucuu

SEQ ID NO: 2439050 - RNA, 19 nt, Artificial Sequence
  Description of Artificial Sequence: Synthetic oligonucleotide
aauggaggcccaggguaag

SEQ ID NO: 2439051 - RNA, 19 nt, Artificial Sequence
  Description of Artificial Sequence: Synthetic oligonucleotide
guguguguuuaguucagga

SEQ ID NO: 2439052 - RNA, 19 nt, Artificial Sequence
  Description of Artificial Sequence: Synthetic oligonucleotide
caagguguucacuggucac

SEQ ID NO: 2439053 - RNA, 19 nt, Artificial Sequence
  Description of Artificial Sequence: Synthetic oligonucleotide
guguacauggcucaugcgu

SEQ ID NO: 2439054 - RNA, 19 nt, Artificial Sequence
  Description of Artificial Sequence: Synthetic oligonucleotide
gguaagaccagccaauggu

SEQ ID NO: 2439055 - RNA, 19 nt, Artificial Sequence
  Description of Artificial Sequence: Synthetic oligonucleotide
auggcaucgguaacccagc

SEQ ID NO: 2439056 - RNA, 19 nt, Artificial Sequence
  Description of Artificial Sequence: Synthetic oligonucleotide
cugagucaaugcugguggg

SEQ ID NO: 2439057 - RNA, 19 nt, Artificial Sequence
  Description of Artificial Sequence: Synthetic oligonucleotide
gaaagaauuccaauuguuu

SEQ ID NO: 2439058 - RNA, 19 nt, Artificial Sequence
  Description of Artificial Sequence: Synthetic oligonucleotide
cagccggaagcucaguuug

SEQ ID NO: 2439059 - RNA, 19 nt, Artificial Sequence
  Description of Artificial Sequence: Synthetic oligonucleotide
uccccuacagugugcauau

SEQ ID NO: 2439060 - RNA, 19 nt, Artificial Sequence
  Description of Artificial Sequence: Synthetic oligonucleotide
agucugaccucuuucucuu

SEQ ID NO: 2439061 - RNA, 19 nt, Artificial Sequence
  Description of Artificial Sequence: Synthetic oligonucleotide
gagaaucaaaauccuggcu

SEQ ID NO: 2439062 - RNA, 19 nt, Artificial Sequence
  Description of Artificial Sequence: Synthetic oligonucleotide
uuggggucuuucauagaaa

SEQ ID NO: 2439063 - RNA, 19 nt, Artificial Sequence
  Description of Artificial Sequence: Synthetic oligonucleotide
ugucacccgccccagugcu

SEQ ID NO: 2439064 - RNA, 19 nt, Artificial Sequence
  Description of Artificial Sequence: Synthetic oligonucleotide
ucucuugaucacagcuugu

SEQ ID NO: 2439065 - RNA, 19 nt, Artificial Sequence
  Description of Artificial Sequence: Synthetic oligonucleotide
ggucaggacucuuugcuac

SEQ ID NO: 2439066 - RNA, 19 nt, Artificial Sequence
  Description of Artificial Sequence: Synthetic oligonucleotide
aaauggaggcccaggguaa

SEQ ID NO: 2439067 - RNA, 19 nt, Artificial Sequence
  Description of Artificial Sequence: Synthetic oligonucleotide
guauugaaagaauuccaau

SEQ ID NO: 2439068 - RNA, 19 nt, Artificial Sequence
  Description of Artificial Sequence: Synthetic oligonucleotide
ugggaauggcaucgguaac

SEQ ID NO: 2439069 - RNA, 19 nt, Artificial Sequence
  Description of Artificial Sequence: Synthetic oligonucleotide
cuugguccuucccaaugac

SEQ ID NO: 2439070 - RNA, 19 nt, Artificial Sequence
  Description of Artificial Sequence: Synthetic oligonucleotide
acaaaugcagacagcccug

SEQ ID NO: 2439071 - RNA, 19 nt, Artificial Sequence
  Description of Artificial Sequence: Synthetic oligonucleotide
uggagaaccuggccaggcu

SEQ ID NO: 2439072 - RNA, 19 nt, Artificial Sequence
  Description of Artificial Sequence: Synthetic oligonucleotide
cuugaucacagcuugugau

SEQ ID NO: 2439073 - RNA, 19 nt, Artificial Sequence
  Description of Artificial Sequence: Synthetic oligonucleotide
ugugugugugugugugugu

SEQ ID NO: 2439074 - RNA, 19 nt, Artificial Sequence
  Description of Artificial Sequence: Synthetic oligonucleotide
uuuuggggucuuucauaga

SEQ ID NO: 2439075 - RNA, 19 nt, Artificial Sequence
  Description of Artificial Sequence: Synthetic oligonucleotide
ugcuggauccagcgaaauc

SEQ ID NO: 2439076 - RNA, 19 nt, Artificial Sequence
  Description of Artificial Sequence: Synthetic oligonucleotide
aguuugcuggauccagcga

SEQ ID NO: 2439077 - RNA, 19 nt, Artificial Sequence
  Description of Artificial Sequence: Synthetic oligonucleotide
ugcgggauggaaggcagca

SEQ ID NO: 2439078 - RNA, 19 nt, Artificial Sequence
  Description of Artificial Sequence: Synthetic oligonucleotide
gaaaucuucaagccuccau

SEQ ID NO: 2439079 - RNA, 19 nt, Artificial Sequence
  Description of Artificial Sequence: Synthetic oligonucleotide
cacuguacuccgucuccgg

SEQ ID NO: 2439080 - RNA, 19 nt, Artificial Sequence
  Description of Artificial Sequence: Synthetic oligonucleotide
uggugacgggccuuggggu

SEQ ID NO: 2439081 - RNA, 19 nt, Artificial Sequence
  Description of Artificial Sequence: Synthetic oligonucleotide
ucacuaccaccacaucauc

SEQ ID NO: 2439082 - RNA, 19 nt, Artificial Sequence
  Description of Artificial Sequence: Synthetic oligonucleotide
guggcaacgaagaggcagc

SEQ ID NO: 2439083 - RNA, 19 nt, Artificial Sequence
  Description of Artificial Sequence: Synthetic oligonucleotide
uggcucaugcgugggaaug

SEQ ID NO: 2439084 - RNA, 19 nt, Artificial Sequence
  Description of Artificial Sequence: Synthetic oligonucleotide
gugugugugugugugugug

SEQ ID NO: 2439085 - RNA, 19 nt, Artificial Sequence
  Description of Artificial Sequence: Synthetic oligonucleotide
caugcgugggaauggcauc

SEQ ID NO: 2439086 - RNA, 19 nt, Artificial Sequence
  Description of Artificial Sequence: Synthetic oligonucleotide
  modified_base (19)..(19): a, c, u, g, unknown or other
agaguucagaagucccuun

SEQ ID NO: 2439087 - RNA, 19 nt, Artificial Sequence
  Description of Artificial Sequence: Synthetic oligonucleotide
auugaccccaccugcuuua

SEQ ID NO: 2439088 - RNA, 19 nt, Artificial Sequence
  Description of Artificial Sequence: Synthetic oligonucleotide
uuccccuacagugugcaua

SEQ ID NO: 2439089 - RNA, 19 nt, Artificial Sequence
  Description of Artificial Sequence: Synthetic oligonucleotide
ucuuugcuacuuccucaaa

SEQ ID NO: 2439090 - RNA, 19 nt, Artificial Sequence
  Description of Artificial Sequence: Synthetic oligonucleotide
gguguacauggcucaugcg

SEQ ID NO: 2439091 - RNA, 19 nt, Artificial Sequence
  Description of Artificial Sequence: Synthetic oligonucleotide
cacuuguggcaacgaagag

SEQ ID NO: 2439092 - RNA, 19 nt, Artificial Sequence
  Description of Artificial Sequence: Synthetic oligonucleotide
gugggugugugugugugug

SEQ ID NO: 2439093 - RNA, 19 nt, Artificial Sequence
  Description of Artificial Sequence: Synthetic oligonucleotide
ucuccggggagagugucac

SEQ ID NO: 2439094 - RNA, 19 nt, Artificial Sequence
  Description of Artificial Sequence: Synthetic oligonucleotide
ggcaucgguaacccagccg

SEQ ID NO: 2439095 - RNA, 19 nt, Artificial Sequence
  Description of Artificial Sequence: Synthetic oligonucleotide
auccagcgaaaucugcaau

SEQ ID NO: 2439096 - RNA, 19 nt, Artificial Sequence
  Description of Artificial Sequence: Synthetic oligonucleotide
aacgaagaggcagcuucaa

SEQ ID NO: 2439097 - RNA, 19 nt, Artificial Sequence
  Description of Artificial Sequence: Synthetic oligonucleotide
  modified_base (9)..(9): a, c, u, g, unknown or other
agucccuunugaacaguca

SEQ ID NO: 2439098 - RNA, 19 nt, Artificial Sequence
  Description of Artificial Sequence: Synthetic oligonucleotide
cacucucuugaucacagcu

SEQ ID NO: 2439099 - RNA, 19 nt, Artificial Sequence
  Description of Artificial Sequence: Synthetic oligonucleotide
cugcguggggcacagacaa

SEQ ID NO: 2439100 - RNA, 19 nt, Artificial Sequence
  Description of Artificial Sequence: Synthetic oligonucleotide
uggaggcccaggguaagac

SEQ ID NO: 2439101 - RNA, 19 nt, Artificial Sequence
  Description of Artificial Sequence: Synthetic oligonucleotide
ccuuuguguuucuagguca

SEQ ID NO: 2439102 - RNA, 19 nt, Artificial Sequence
  Description of Artificial Sequence: Synthetic oligonucleotide
uggucacagccuucagacu

SEQ ID NO: 2439103 - RNA, 19 nt, Artificial Sequence
  Description of Artificial Sequence: Synthetic oligonucleotide
gcugacacuuguggcaacg

SEQ ID NO: 2439104 - RNA, 19 nt, Artificial Sequence
  Description of Artificial Sequence: Synthetic oligonucleotide
ugcgugggaauggcaucgg

SEQ ID NO: 2439105 - RNA, 19 nt, Artificial Sequence
  Description of Artificial Sequence: Synthetic oligonucleotide
uacuccgucuccggggaga

SEQ ID NO: 2439106 - RNA, 19 nt, Artificial Sequence
  Description of Artificial Sequence: Synthetic oligonucleotide
guucaagguguucacuggu

SEQ ID NO: 2439107 - RNA, 19 nt, Artificial Sequence
  Description of Artificial Sequence: Synthetic oligonucleotide
cagcgaaaucugcaaucac

SEQ ID NO: 2439108 - RNA, 19 nt, Artificial Sequence
  Description of Artificial Sequence: Synthetic oligonucleotide
uguguguguguguguguuu

SEQ ID NO: 2439109 - RNA, 19 nt, Artificial Sequence
  Description of Artificial Sequence: Synthetic oligonucleotide
aggucaggacucuuugcua

SEQ ID NO: 2439110 - RNA, 19 nt, Artificial Sequence
  Description of Artificial Sequence: Synthetic oligonucleotide
caccaucauagucugaccu

SEQ ID NO: 2439111 - RNA, 19 nt, Artificial Sequence
  Description of Artificial Sequence: Synthetic oligonucleotide
caacgaagaggcagcuuca

SEQ ID NO: 2439112 - RNA, 19 nt, Artificial Sequence
  Description of Artificial Sequence: Synthetic oligonucleotide
cuacuuccucaaacucuac

SEQ ID NO: 2439113 - RNA, 19 nt, Artificial Sequence
  Description of Artificial Sequence: Synthetic oligonucleotide
ugaucacaugaagguguac

SEQ ID NO: 2439114 - RNA, 19 nt, Artificial Sequence
  Description of Artificial Sequence: Synthetic oligonucleotide
gugucacccgccccagugc

SEQ ID NO: 2439115 - RNA, 19 nt, Artificial Sequence
  Description of Artificial Sequence: Synthetic oligonucleotide
ccaaugacgacugagucaa

SEQ ID NO: 2439116 - RNA, 19 nt, Artificial Sequence
  Description of Artificial Sequence: Synthetic oligonucleotide
guuuaguucaggacugcgu

SEQ ID NO: 2439117 - RNA, 19 nt, Artificial Sequence
  Description of Artificial Sequence: Synthetic oligonucleotide
guguuuaguucaggacugc

SEQ ID NO: 2439118 - RNA, 19 nt, Artificial Sequence
  Description of Artificial Sequence: Synthetic oligonucleotide
cagcuugugauuccagaaa

SEQ ID NO: 2439119 - RNA, 19 nt, Artificial Sequence
  Description of Artificial Sequence: Synthetic oligonucleotide
agucaaugcuggugggauu

SEQ ID NO: 2439120 - RNA, 19 nt, Artificial Sequence
  Description of Artificial Sequence: Synthetic oligonucleotide
  modified_base (6)..(6): a, c, u, g, unknown or other
cccuunugaacagucacuc

SEQ ID NO: 2439121 - RNA, 19 nt, Artificial Sequence
  Description of Artificial Sequence: Synthetic oligonucleotide
cuugugauuccagaaaguu

SEQ ID NO: 2439122 - RNA, 19 nt, Artificial Sequence
  Description of Artificial Sequence: Synthetic oligonucleotide
cugcauuuuggggucuuuc

SEQ ID NO: 2439123 - RNA, 19 nt, Artificial Sequence
  Description of Artificial Sequence: Synthetic oligonucleotide
ugggugugugugugugugu

SEQ ID NO: 2439124 - RNA, 19 nt, Artificial Sequence
  Description of Artificial Sequence: Synthetic oligonucleotide
cuucaagccuccaucuccu

SEQ ID NO: 2439125 - RNA, 19 nt, Artificial Sequence
  Description of Artificial Sequence: Synthetic oligonucleotide
ggauccagcgaaaucugca

SEQ ID NO: 2439126 - RNA, 19 nt, Artificial Sequence
  Description of Artificial Sequence: Synthetic oligonucleotide
uggugggauugaccccacc

SEQ ID NO: 2439127 - RNA, 19 nt, Artificial Sequence
  Description of Artificial Sequence: Synthetic oligonucleotide
agagugucacccgccccag

SEQ ID NO: 2439128 - RNA, 19 nt, Artificial Sequence
  Description of Artificial Sequence: Synthetic oligonucleotide
cagcuucaagaguucagaa

SEQ ID NO: 2439129 - RNA, 19 nt, Artificial Sequence
  Description of Artificial Sequence: Synthetic oligonucleotide
ggcucaugcgugggaaugg

SEQ ID NO: 2439130 - RNA, 19 nt, Artificial Sequence
  Description of Artificial Sequence: Synthetic oligonucleotide
ucacccgccccagugcuuc

SEQ ID NO: 2439131 - RNA, 19 nt, Artificial Sequence
  Description of Artificial Sequence: Synthetic oligonucleotide
cugaucacaugaaggugua

SEQ ID NO: 2439132 - RNA, 19 nt, Artificial Sequence
  Description of Artificial Sequence: Synthetic oligonucleotide
gcugaucacaugaaggugu

SEQ ID NO: 2439133 - RNA, 19 nt, Artificial Sequence
  Description of Artificial Sequence: Synthetic oligonucleotide
cuacagugugcauauguuu

SEQ ID NO: 2439134 - RNA, 19 nt, Artificial Sequence
  Description of Artificial Sequence: Synthetic oligonucleotide
uucaagccuccaucuccuc

SEQ ID NO: 2439135 - RNA, 19 nt, Artificial Sequence
  Description of Artificial Sequence: Synthetic oligonucleotide
caaugcuggugggauugac

SEQ ID NO: 2439136 - RNA, 19 nt, Artificial Sequence
  Description of Artificial Sequence: Synthetic oligonucleotide
gggugugugugugugugug

SEQ ID NO: 2439137 - RNA, 19 nt, Artificial Sequence
  Description of Artificial Sequence: Synthetic oligonucleotide
cacuaccaccacaucaucu

SEQ ID NO: 2439138 - RNA, 19 nt, Artificial Sequence
  Description of Artificial Sequence: Synthetic oligonucleotide
guguguguguguguguuua

SEQ ID NO: 2439139 - RNA, 19 nt, Artificial Sequence
  Description of Artificial Sequence: Synthetic oligonucleotide
ggugggauugaccccaccu

SEQ ID NO: 2439140 - RNA, 19 nt, Artificial Sequence
  Description of Artificial Sequence: Synthetic oligonucleotide
gauugaccccaccugcuuu

SEQ ID NO: 2439141 - RNA, 19 nt, Artificial Sequence
  Description of Artificial Sequence: Synthetic oligonucleotide
aucgguaacccagccggaa

SEQ ID NO: 2439142 - RNA, 19 nt, Artificial Sequence
  Description of Artificial Sequence: Synthetic oligonucleotide
gcuacuuccucaaacucua

SEQ ID NO: 2439143 - RNA, 19 nt, Artificial Sequence
  Description of Artificial Sequence: Synthetic oligonucleotide
acucuacaauguauggaua

SEQ ID NO: 2439144 - RNA, 19 nt, Artificial Sequence
  Description of Artificial Sequence: Synthetic oligonucleotide
ugcugacacuuguggcaac

SEQ ID NO: 2439145 - RNA, 19 nt, Artificial Sequence
  Description of Artificial Sequence: Synthetic oligonucleotide
accagccaauggugacggg

SEQ ID NO: 2439146 - RNA, 19 nt, Artificial Sequence
  Description of Artificial Sequence: Synthetic oligonucleotide
gcacuguacuccgucuccg

SEQ ID NO: 2439147 - RNA, 19 nt, Artificial Sequence
  Description of Artificial Sequence: Synthetic oligonucleotide
cucaugcgugggaauggca

SEQ ID NO: 2439148 - RNA, 19 nt, Artificial Sequence
  Description of Artificial Sequence: Synthetic oligonucleotide
cccaaugacgacugaguca

SEQ ID NO: 2439149 - RNA, 19 nt, Artificial Sequence
  Description of Artificial Sequence: Synthetic oligonucleotide
uugcuggauccagcgaaau

SEQ ID NO: 2439150 - RNA, 19 nt, Artificial Sequence
  Description of Artificial Sequence: Synthetic oligonucleotide
ccuuaaucacuaccaccac

SEQ ID NO: 2439151 - RNA, 19 nt, Artificial Sequence
  Description of Artificial Sequence: Synthetic oligonucleotide
gcuggugggauugacccca

SEQ ID NO: 2439152 - RNA, 19 nt, Artificial Sequence
  Description of Artificial Sequence: Synthetic oligonucleotide
cauggcucaugcgugggaa

SEQ ID NO: 2439153 - RNA, 19 nt, Artificial Sequence
  Description of Artificial Sequence: Synthetic oligonucleotide
aggcagcuucaagaguuca

SEQ ID NO: 2439154 - RNA, 19 nt, Artificial Sequence
  Description of Artificial Sequence: Synthetic oligonucleotide
uugaccccaccugcuuuac

SEQ ID NO: 2439155 - RNA, 19 nt, Artificial Sequence
  Description of Artificial Sequence: Synthetic oligonucleotide
cauucaccauguggagaac

SEQ ID NO: 2439156 - RNA, 19 nt, Artificial Sequence
  Description of Artificial Sequence: Synthetic oligonucleotide
guucacuggucacagccuu

SEQ ID NO: 2439157 - RNA, 19 nt, Artificial Sequence
  Description of Artificial Sequence: Synthetic oligonucleotide
guuucuaggucaggacucu

SEQ ID NO: 2439158 - RNA, 19 nt, Artificial Sequence
  Description of Artificial Sequence: Synthetic oligonucleotide
gcaaucaccuuuuccccua

SEQ ID NO: 2439159 - RNA, 19 nt, Artificial Sequence
  Description of Artificial Sequence: Synthetic oligonucleotide
guacuccgucuccggggag

SEQ ID NO: 2439160 - RNA, 19 nt, Artificial Sequence
  Description of Artificial Sequence: Synthetic oligonucleotide
auguauggauacaguucau

SEQ ID NO: 2439161 - RNA, 19 nt, Artificial Sequence
  Description of Artificial Sequence: Synthetic oligonucleotide
guccuucccaaugacgacu

SEQ ID NO: 2439162 - RNA, 19 nt, Artificial Sequence
  Description of Artificial Sequence: Synthetic oligonucleotide
caucgguaacccagccgga

SEQ ID NO: 2439163 - RNA, 19 nt, Artificial Sequence
  Description of Artificial Sequence: Synthetic oligonucleotide
cuccggggagagugucacc

SEQ ID NO: 2439164 - RNA, 19 nt, Artificial Sequence
  Description of Artificial Sequence: Synthetic oligonucleotide
gugacgggccuugggguac

SEQ ID NO: 2439165 - RNA, 19 nt, Artificial Sequence
  Description of Artificial Sequence: Synthetic oligonucleotide
  modified_base (11)..(11): a, c, u, g, unknown or other
gaagucccuunugaacagu

SEQ ID NO: 2439166 - RNA, 19 nt, Artificial Sequence
  Description of Artificial Sequence: Synthetic oligonucleotide
ccagcgaaaucugcaauca

SEQ ID NO: 2439167 - RNA, 19 nt, Artificial Sequence
  Description of Artificial Sequence: Synthetic oligonucleotide
cuggugggauugaccccac

SEQ ID NO: 2439168 - RNA, 19 nt, Artificial Sequence
  Description of Artificial Sequence: Synthetic oligonucleotide
gcucaugcgugggaauggc

SEQ ID NO: 2439169 - RNA, 19 nt, Artificial Sequence
  Description of Artificial Sequence: Synthetic oligonucleotide
cugacacuuguggcaacga

SEQ ID NO: 2439170 - RNA, 19 nt, Artificial Sequence
  Description of Artificial Sequence: Synthetic oligonucleotide
guguguguguguguuuagu

SEQ ID NO: 2439171 - RNA, 19 nt, Artificial Sequence
  Description of Artificial Sequence: Synthetic oligonucleotide
agacagcccuggcacugua

SEQ ID NO: 2439172 - RNA, 19 nt, Artificial Sequence
  Description of Artificial Sequence: Synthetic oligonucleotide
ccaauggugacgggccuug

SEQ ID NO: 2439173 - RNA, 19 nt, Artificial Sequence
  Description of Artificial Sequence: Synthetic oligonucleotide
ccccaccugcuuuacuuug

SEQ ID NO: 2439174 - RNA, 19 nt, Artificial Sequence
  Description of Artificial Sequence: Synthetic oligonucleotide
gaagguguacauggcucau

SEQ ID NO: 2439175 - RNA, 19 nt, Artificial Sequence
  Description of Artificial Sequence: Synthetic oligonucleotide
ggggagagugucacccgcc

SEQ ID NO: 2439176 - RNA, 19 nt, Artificial Sequence
  Description of Artificial Sequence: Synthetic oligonucleotide
cuuucagcugcgggaugga

SEQ ID NO: 2439177 - RNA, 19 nt, Artificial Sequence
  Description of Artificial Sequence: Synthetic oligonucleotide
ggugacgggccuuggggua

SEQ ID NO: 2439178 - RNA, 19 nt, Artificial Sequence
  Description of Artificial Sequence: Synthetic oligonucleotide
ccggggagagugucacccg

SEQ ID NO: 2439179 - RNA, 19 nt, Artificial Sequence
  Description of Artificial Sequence: Synthetic oligonucleotide
ugacgggccuugggguacu

SEQ ID NO: 2439180 - RNA, 19 nt, Artificial Sequence
  Description of Artificial Sequence: Synthetic oligonucleotide
cagcugcgggauggaaggc

SEQ ID NO: 2439181 - RNA, 19 nt, Artificial Sequence
  Description of Artificial Sequence: Synthetic oligonucleotide
guguguguguguguguguu

SEQ ID NO: 2439182 - RNA, 19 nt, Artificial Sequence
  Description of Artificial Sequence: Synthetic oligonucleotide
cccuacagugugcauaugu

SEQ ID NO: 2439183 - RNA, 19 nt, Artificial Sequence
  Description of Artificial Sequence: Synthetic oligonucleotide
ggcccaggguaagaccagc

SEQ ID NO: 2439184 - RNA, 19 nt, Artificial Sequence
  Description of Artificial Sequence: Synthetic oligonucleotide
cuaccaccacaucaucuuu

SEQ ID NO: 2439185 - RNA, 19 nt, Artificial Sequence
  Description of Artificial Sequence: Synthetic oligonucleotide
ggugugugugugugugugu

SEQ ID NO: 2439186 - RNA, 19 nt, Artificial Sequence
  Description of Artificial Sequence: Synthetic oligonucleotide
gcuugugauuccagaaagu

SEQ ID NO: 2439187 - RNA, 19 nt, Artificial Sequence
  Description of Artificial Sequence: Synthetic oligonucleotide
  modified_base (5)..(5): a, c, u, g, unknown or other
ccuunugaacagucacucu

SEQ ID NO: 2439188 - RNA, 19 nt, Artificial Sequence
  Description of Artificial Sequence: Synthetic oligonucleotide
cacccgccccagugcuucc

SEQ ID NO: 2439189 - RNA, 19 nt, Artificial Sequence
  Description of Artificial Sequence: Synthetic oligonucleotide
ccuacagugugcauauguu

SEQ ID NO: 2439190 - RNA, 19 nt, Artificial Sequence
  Description of Artificial Sequence: Synthetic oligonucleotide
gguaacccagccggaagcu

SEQ ID NO: 2439191 - RNA, 19 nt, Artificial Sequence
  Description of Artificial Sequence: Synthetic oligonucleotide
gggauggaaggcagcaacu

SEQ ID NO: 2439192 - RNA, 19 nt, Artificial Sequence
  Description of Artificial Sequence: Synthetic oligonucleotide
accugcauuuuggggucuu

SEQ ID NO: 2439193 - RNA, 19 nt, Artificial Sequence
  Description of Artificial Sequence: Synthetic oligonucleotide
ggauugaccccaccugcuu

SEQ ID NO: 2439194 - RNA, 19 nt, Artificial Sequence
  Description of Artificial Sequence: Synthetic oligonucleotide
ggugggugugugugugugu

SEQ ID NO: 2439195 - RNA, 19 nt, Artificial Sequence
  Description of Artificial Sequence: Synthetic oligonucleotide
gggauugaccccaccugcu

SEQ ID NO: 2439196 - RNA, 19 nt, Artificial Sequence
  Description of Artificial Sequence: Synthetic oligonucleotide
gagugucacccgccccagu

SEQ ID NO: 2439197 - RNA, 19 nt, Artificial Sequence
  Description of Artificial Sequence: Synthetic oligonucleotide
gcguggggcacagacaaau

SEQ ID NO: 2439198 - RNA, 19 nt, Artificial Sequence
  Description of Artificial Sequence: Synthetic oligonucleotide
acccgccccagugcuuccu

SEQ ID NO: 2439199 - RNA, 19 nt, Artificial Sequence
  Description of Artificial Sequence: Synthetic oligonucleotide
acccagccggaagcucagu

SEQ ID NO: 2439200 - RNA, 19 nt, Artificial Sequence
  Description of Artificial Sequence: Synthetic oligonucleotide
acgggccuugggguacuua

SEQ ID NO: 2439201 - RNA, 19 nt, Artificial Sequence
  Description of Artificial Sequence: Synthetic oligonucleotide
cagacagcccuggcacugu

SEQ ID NO: 2439202 - RNA, 19 nt, Artificial Sequence
  Description of Artificial Sequence: Synthetic oligonucleotide
ccucaccaucauagucuga

SEQ ID NO: 2439203 - RNA, 19 nt, Artificial Sequence
  Description of Artificial Sequence: Synthetic oligonucleotide
ccagccggaagcucaguuu

SEQ ID NO: 2439204 - RNA, 19 nt, Artificial Sequence
  Description of Artificial Sequence: Synthetic oligonucleotide
gcgugggaauggcaucggu

SEQ ID NO: 2439205 - RNA, 19 nt, Artificial Sequence
  Description of Artificial Sequence: Synthetic oligonucleotide
caaugacgacugagucaau

SEQ ID NO: 2439206 - RNA, 19 nt, Artificial Sequence
  Description of Artificial Sequence: Synthetic oligonucleotide
gcgggauggaaggcagcaa

SEQ ID NO: 2439207 - RNA, 19 nt, Artificial Sequence
  Description of Artificial Sequence: Synthetic oligonucleotide
ccuucccaaugacgacuga

SEQ ID NO: 2439208 - RNA, 19 nt, Artificial Sequence
  Description of Artificial Sequence: Synthetic oligonucleotide
cgucuccggggagaguguc

SEQ ID NO: 2439209 - RNA, 19 nt, Artificial Sequence
  Description of Artificial Sequence: Synthetic oligonucleotide
ccgccccagugcuuccuga

SEQ ID NO: 2439210 - RNA, 19 nt, Artificial Sequence
  Description of Artificial Sequence: Synthetic oligonucleotide
ccccuacagugugcauaug

SEQ ID NO: 2439211 - RNA, 19 nt, Artificial Sequence
  Description of Artificial Sequence: Synthetic oligonucleotide
gccaauggugacgggccuu

SEQ ID NO: 2439212 - RNA, 19 nt, Artificial Sequence
  Description of Artificial Sequence: Synthetic oligonucleotide
gacgggccuugggguacuu

SEQ ID NO: 2439213 - RNA, 19 nt, Artificial Sequence
  Description of Artificial Sequence: Synthetic oligonucleotide
ccgucuccggggagagugu

SEQ ID NO: 2439214 - RNA, 19 nt, Artificial Sequence
  Description of Artificial Sequence: Synthetic oligonucleotide
cuccgucuccggggagagu

SEQ ID NO: 2439215 - RNA, 19 nt, Artificial Sequence
  Description of Artificial Sequence: Synthetic oligonucleotide
ccugcauuuuggggucuuu

SEQ ID NO: 2439216 - RNA, 19 nt, Artificial Sequence
  Description of Artificial Sequence: Synthetic oligonucleotide
  modified_base (1)..(1): a, c, u, g, unknown or other
nugaacagucacucucuug

SEQ ID NO: 2439217 - RNA, 19 nt, Artificial Sequence
  Description of Artificial Sequence: Synthetic oligonucleotide
uuauuaguggugaaaauca

SEQ ID NO: 2439218 - RNA, 19 nt, Artificial Sequence
  Description of Artificial Sequence: Synthetic oligonucleotide
ucgaacaauguaaaguugg

SEQ ID NO: 2439219 - RNA, 19 nt, Artificial Sequence
  Description of Artificial Sequence: Synthetic oligonucleotide
uaugucagguucaaugucg

SEQ ID NO: 2439220 - RNA, 19 nt, Artificial Sequence
  Description of Artificial Sequence: Synthetic oligonucleotide
gaccaaaugauguacuugg

SEQ ID NO: 2439221 - RNA, 19 nt, Artificial Sequence
  Description of Artificial Sequence: Synthetic oligonucleotide
agagauaacgccaucaugg

SEQ ID NO: 2439222 - RNA, 19 nt, Artificial Sequence
  Description of Artificial Sequence: Synthetic oligonucleotide
uuaguggugaaaaucaccu

SEQ ID NO: 2439223 - RNA, 19 nt, Artificial Sequence
  Description of Artificial Sequence: Synthetic oligonucleotide
aacaauguaaaguuggguu

SEQ ID NO: 2439224 - RNA, 19 nt, Artificial Sequence
  Description of Artificial Sequence: Synthetic oligonucleotide
aaaucaccuuuguuuaggc

SEQ ID NO: 2439225 - RNA, 19 nt, Artificial Sequence
  Description of Artificial Sequence: Synthetic oligonucleotide
uucuaugucagguucaaug

SEQ ID NO: 2439226 - RNA, 19 nt, Artificial Sequence
  Description of Artificial Sequence: Synthetic oligonucleotide
aacuucucaaaguuccagg

SEQ ID NO: 2439227 - RNA, 19 nt, Artificial Sequence
  Description of Artificial Sequence: Synthetic oligonucleotide
gauaacgccaucauggaag

SEQ ID NO: 2439228 - RNA, 19 nt, Artificial Sequence
  Description of Artificial Sequence: Synthetic oligonucleotide
acauucagcacuuuauuag

SEQ ID NO: 2439229 - RNA, 19 nt, Artificial Sequence
  Description of Artificial Sequence: Synthetic oligonucleotide
uauacuugagggaauucag

SEQ ID NO: 2439230 - RNA, 19 nt, Artificial Sequence
  Description of Artificial Sequence: Synthetic oligonucleotide
aaaaucaccuuuguuuagg

SEQ ID NO: 2439231 - RNA, 19 nt, Artificial Sequence
  Description of Artificial Sequence: Synthetic oligonucleotide
gucguuguuccucagaggg

SEQ ID NO: 2439232 - RNA, 19 nt, Artificial Sequence
  Description of Artificial Sequence: Synthetic oligonucleotide
cuugagggaauucagaauc

SEQ ID NO: 2439233 - RNA, 19 nt, Artificial Sequence
  Description of Artificial Sequence: Synthetic oligonucleotide
aaaguuccaggcaaugucg

SEQ ID NO: 2439234 - RNA, 19 nt, Artificial Sequence
  Description of Artificial Sequence: Synthetic oligonucleotide
aaaguuggguucgaacccc

SEQ ID NO: 2439235 - RNA, 19 nt, Artificial Sequence
  Description of Artificial Sequence: Synthetic oligonucleotide
uuucgaacaauguaaaguu

SEQ ID NO: 2439236 - RNA, 19 nt, Artificial Sequence
  Description of Artificial Sequence: Synthetic oligonucleotide
gaggcguuucugcagaucg

SEQ ID NO: 2439237 - RNA, 19 nt, Artificial Sequence
  Description of Artificial Sequence: Synthetic oligonucleotide
uucagaaucucuucguucu

SEQ ID NO: 2439238 - RNA, 19 nt, Artificial Sequence
  Description of Artificial Sequence: Synthetic oligonucleotide
auuaguggugaaaaucacc

SEQ ID NO: 2439239 - RNA, 19 nt, Artificial Sequence
  Description of Artificial Sequence: Synthetic oligonucleotide
ucuaugucagguucaaugu

SEQ ID NO: 2439240 - RNA, 19 nt, Artificial Sequence
  Description of Artificial Sequence: Synthetic oligonucleotide
uguccgaacugauugcacg

SEQ ID NO: 2439241 - RNA, 19 nt, Artificial Sequence
  Description of Artificial Sequence: Synthetic oligonucleotide
accgcaggcaccuugcccc

SEQ ID NO: 2439242 - RNA, 19 nt, Artificial Sequence
  Description of Artificial Sequence: Synthetic oligonucleotide
agaucguucaucucggugu

SEQ ID NO: 2439243 - RNA, 19 nt, Artificial Sequence
  Description of Artificial Sequence: Synthetic oligonucleotide
ggucggauauacuugaggg

SEQ ID NO: 2439244 - RNA, 19 nt, Artificial Sequence
  Description of Artificial Sequence: Synthetic oligonucleotide
uucaucucgguguaguccc

SEQ ID NO: 2439245 - RNA, 19 nt, Artificial Sequence
  Description of Artificial Sequence: Synthetic oligonucleotide
uacacgguggacugcaccg

SEQ ID NO: 2439246 - RNA, 19 nt, Artificial Sequence
  Description of Artificial Sequence: Synthetic oligonucleotide
uguaccugcgcacuggaac

SEQ ID NO: 2439247 - RNA, 19 nt, Artificial Sequence
  Description of Artificial Sequence: Synthetic oligonucleotide
uguaaaguuggguucgaac

SEQ ID NO: 2439248 - RNA, 19 nt, Artificial Sequence
  Description of Artificial Sequence: Synthetic oligonucleotide
augucgauggugcgaaagc

SEQ ID NO: 2439249 - RNA, 19 nt, Artificial Sequence
  Description of Artificial Sequence: Synthetic oligonucleotide
cugcagaucguucaucucg

SEQ ID NO: 2439250 - RNA, 19 nt, Artificial Sequence
  Description of Artificial Sequence: Synthetic oligonucleotide
ugcagaucguucaucucgg

SEQ ID NO: 2439251 - RNA, 19 nt, Artificial Sequence
  Description of Artificial Sequence: Synthetic oligonucleotide
gagucguuguuccucagag

SEQ ID NO: 2439252 - RNA, 19 nt, Artificial Sequence
  Description of Artificial Sequence: Synthetic oligonucleotide
uguacuuggggucugucau

SEQ ID NO: 2439253 - RNA, 19 nt, Artificial Sequence
  Description of Artificial Sequence: Synthetic oligonucleotide
aaugucgauggugcgaaag

SEQ ID NO: 2439254 - RNA, 19 nt, Artificial Sequence
  Description of Artificial Sequence: Synthetic oligonucleotide
ugaugcagaagcuggugag

SEQ ID NO: 2439255 - RNA, 19 nt, Artificial Sequence
  Description of Artificial Sequence: Synthetic oligonucleotide
agucccgagucguuguucc

SEQ ID NO: 2439256 - RNA, 19 nt, Artificial Sequence
  Description of Artificial Sequence: Synthetic oligonucleotide
uuguuuaggcagaaaggca

SEQ ID NO: 2439257 - RNA, 19 nt, Artificial Sequence
  Description of Artificial Sequence: Synthetic oligonucleotide
ucaccauugaccucgcacu

SEQ ID NO: 2439258 - RNA, 19 nt, Artificial Sequence
  Description of Artificial Sequence: Synthetic oligonucleotide
uucucaacugaccgcaggc

SEQ ID NO: 2439259 - RNA, 19 nt, Artificial Sequence
  Description of Artificial Sequence: Synthetic oligonucleotide
uucgaacaauguaaaguug

SEQ ID NO: 2439260 - RNA, 19 nt, Artificial Sequence
  Description of Artificial Sequence: Synthetic oligonucleotide
aagguaaagagcgggugag

SEQ ID NO: 2439261 - RNA, 19 nt, Artificial Sequence
  Description of Artificial Sequence: Synthetic oligonucleotide
uauuaguggugaaaaucac

SEQ ID NO: 2439262 - RNA, 19 nt, Artificial Sequence
  Description of Artificial Sequence: Synthetic oligonucleotide
auacacgguggacugcacc

SEQ ID NO: 2439263 - RNA, 19 nt, Artificial Sequence
  Description of Artificial Sequence: Synthetic oligonucleotide
uucuccaugcaaauuuaga

SEQ ID NO: 2439264 - RNA, 19 nt, Artificial Sequence
  Description of Artificial Sequence: Synthetic oligonucleotide
augucguugcggcacaccg

SEQ ID NO: 2439265 - RNA, 19 nt, Artificial Sequence
  Description of Artificial Sequence: Synthetic oligonucleotide
gauggugcgaaagcggcgg

SEQ ID NO: 2439266 - RNA, 19 nt, Artificial Sequence
  Description of Artificial Sequence: Synthetic oligonucleotide
uuuaggcagaaaggcagcg

SEQ ID NO: 2439267 - RNA, 19 nt, Artificial Sequence
  Description of Artificial Sequence: Synthetic oligonucleotide
ucgauggugcgaaagcggc

SEQ ID NO: 2439268 - RNA, 19 nt, Artificial Sequence
  Description of Artificial Sequence: Synthetic oligonucleotide
gcaaauuuagagauaacgc

SEQ ID NO: 2439269 - RNA, 19 nt, Artificial Sequence
  Description of Artificial Sequence: Synthetic oligonucleotide
ucggauauacuugagggaa

SEQ ID NO: 2439270 - RNA, 19 nt, Artificial Sequence
  Description of Artificial Sequence: Synthetic oligonucleotide
ugucgauggugcgaaagcg

SEQ ID NO: 2439271 - RNA, 19 nt, Artificial Sequence
  Description of Artificial Sequence: Synthetic oligonucleotide
gauugcacgggaaaccgag

SEQ ID NO: 2439272 - RNA, 19 nt, Artificial Sequence
  Description of Artificial Sequence: Synthetic oligonucleotide
uucguucuuggcauucucc

SEQ ID NO: 2439273 - RNA, 19 nt, Artificial Sequence
  Description of Artificial Sequence: Synthetic oligonucleotide
auauacuugagggaauuca

SEQ ID NO: 2439274 - RNA, 19 nt, Artificial Sequence
  Description of Artificial Sequence: Synthetic oligonucleotide
gacauucucaacugaccgc

SEQ ID NO: 2439275 - RNA, 19 nt, Artificial Sequence
  Description of Artificial Sequence: Synthetic oligonucleotide
aauuuagagauaacgccau

SEQ ID NO: 2439276 - RNA, 19 nt, Artificial Sequence
  Description of Artificial Sequence: Synthetic oligonucleotide
aagaccagcgccaucugag

SEQ ID NO: 2439277 - RNA, 19 nt, Artificial Sequence
  Description of Artificial Sequence: Synthetic oligonucleotide
aaugucguugcggcacacc

SEQ ID NO: 2439278 - RNA, 19 nt, Artificial Sequence
  Description of Artificial Sequence: Synthetic oligonucleotide
ucaacugaccgcaggcacc

SEQ ID NO: 2439279 - RNA, 19 nt, Artificial Sequence
  Description of Artificial Sequence: Synthetic oligonucleotide
aaucaccuuuguuuaggca

SEQ ID NO: 2439280 - RNA, 19 nt, Artificial Sequence
  Description of Artificial Sequence: Synthetic oligonucleotide
agugggaucgucacugggc

SEQ ID NO: 2439281 - RNA, 19 nt, Artificial Sequence
  Description of Artificial Sequence: Synthetic oligonucleotide
cuuuucgaacaauguaaag

SEQ ID NO: 2439282 - RNA, 19 nt, Artificial Sequence
  Description of Artificial Sequence: Synthetic oligonucleotide
auucucaacugaccgcagg

SEQ ID NO: 2439283 - RNA, 19 nt, Artificial Sequence
  Description of Artificial Sequence: Synthetic oligonucleotide
caggcaaugucguugcggc

SEQ ID NO: 2439284 - RNA, 19 nt, Artificial Sequence
  Description of Artificial Sequence: Synthetic oligonucleotide
gcggagaaggcauacacgg

SEQ ID NO: 2439285 - RNA, 19 nt, Artificial Sequence
  Description of Artificial Sequence: Synthetic oligonucleotide
aauuucccuggaaaucagg

SEQ ID NO: 2439286 - RNA, 19 nt, Artificial Sequence
  Description of Artificial Sequence: Synthetic oligonucleotide
ccaggaaugccuuaggagc

SEQ ID NO: 2439287 - RNA, 19 nt, Artificial Sequence
  Description of Artificial Sequence: Synthetic oligonucleotide
cacuuuucgaacaauguaa

SEQ ID NO: 2439288 - RNA, 19 nt, Artificial Sequence
  Description of Artificial Sequence: Synthetic oligonucleotide
cugucaugagcgcaguggg

SEQ ID NO: 2439289 - RNA, 19 nt, Artificial Sequence
  Description of Artificial Sequence: Synthetic oligonucleotide
agcggggauggacaagacc

SEQ ID NO: 2439290 - RNA, 19 nt, Artificial Sequence
  Description of Artificial Sequence: Synthetic oligonucleotide
agcacuuuauuagugguga

SEQ ID NO: 2439291 - RNA, 19 nt, Artificial Sequence
  Description of Artificial Sequence: Synthetic oligonucleotide
caggaaugccuuaggagcc

SEQ ID NO: 2439292 - RNA, 19 nt, Artificial Sequence
  Description of Artificial Sequence: Synthetic oligonucleotide
gugggaucgucacugggcg

SEQ ID NO: 2439293 - RNA, 19 nt, Artificial Sequence
  Description of Artificial Sequence: Synthetic oligonucleotide
uugcacgggaaaccgagca

SEQ ID NO: 2439294 - RNA, 19 nt, Artificial Sequence
  Description of Artificial Sequence: Synthetic oligonucleotide
agcgcagugggaucgucac

SEQ ID NO: 2439295 - RNA, 19 nt, Artificial Sequence
  Description of Artificial Sequence: Synthetic oligonucleotide
gaugccaggaaugccuuag

SEQ ID NO: 2439296 - RNA, 19 nt, Artificial Sequence
  Description of Artificial Sequence: Synthetic oligonucleotide
gacgcgacauucucaacug

SEQ ID NO: 2439297 - RNA, 19 nt, Artificial Sequence
  Description of Artificial Sequence: Synthetic oligonucleotide
cucaccauugaccucgcac

SEQ ID NO: 2439298 - RNA, 19 nt, Artificial Sequence
  Description of Artificial Sequence: Synthetic oligonucleotide
agagggacgcgacauucuc

SEQ ID NO: 2439299 - RNA, 19 nt, Artificial Sequence
  Description of Artificial Sequence: Synthetic oligonucleotide
uugagggaauucagaaucu

SEQ ID NO: 2439300 - RNA, 19 nt, Artificial Sequence
  Description of Artificial Sequence: Synthetic oligonucleotide
ugauguccgaacugauugc

SEQ ID NO: 2439301 - RNA, 19 nt, Artificial Sequence
  Description of Artificial Sequence: Synthetic oligonucleotide
cacuaggaacuucucaaag

SEQ ID NO: 2439302 - RNA, 19 nt, Artificial Sequence
  Description of Artificial Sequence: Synthetic oligonucleotide
ucguucuuggcauucuccu

SEQ ID NO: 2439303 - RNA, 19 nt, Artificial Sequence
  Description of Artificial Sequence: Synthetic oligonucleotide
gguucaaugucgauggugc

SEQ ID NO: 2439304 - RNA, 19 nt, Artificial Sequence
  Description of Artificial Sequence: Synthetic oligonucleotide
uucuccugauguccgaacu

SEQ ID NO: 2439305 - RNA, 19 nt, Artificial Sequence
  Description of Artificial Sequence: Synthetic oligonucleotide
guccgaacugauugcacgg

SEQ ID NO: 2439306 - RNA, 19 nt, Artificial Sequence
  Description of Artificial Sequence: Synthetic oligonucleotide
cugauugcacgggaaaccg

SEQ ID NO: 2439307 - RNA, 19 nt, Artificial Sequence
  Description of Artificial Sequence: Synthetic oligonucleotide
ugagccuucucaccauuga

SEQ ID NO: 2439308 - RNA, 19 nt, Artificial Sequence
  Description of Artificial Sequence: Synthetic oligonucleotide
ggagaaggcauacacggug

SEQ ID NO: 2439309 - RNA, 19 nt, Artificial Sequence
  Description of Artificial Sequence: Synthetic oligonucleotide
uugaccucgcacuuuucga

SEQ ID NO: 2439310 - RNA, 19 nt, Artificial Sequence
  Description of Artificial Sequence: Synthetic oligonucleotide
aaacccggaugccaggaau

SEQ ID NO: 2439311 - RNA, 19 nt, Artificial Sequence
  Description of Artificial Sequence: Synthetic oligonucleotide
cacuggaacaccgucgggg

SEQ ID NO: 2439312 - RNA, 19 nt, Artificial Sequence
  Description of Artificial Sequence: Synthetic oligonucleotide
ucaaugucgauggugcgaa

SEQ ID NO: 2439313 - RNA, 19 nt, Artificial Sequence
  Description of Artificial Sequence: Synthetic oligonucleotide
auaacgccaucauggaaga

SEQ ID NO: 2439314 - RNA, 19 nt, Artificial Sequence
  Description of Artificial Sequence: Synthetic oligonucleotide
acagcagggcuucuauguc

SEQ ID NO: 2439315 - RNA, 19 nt, Artificial Sequence
  Description of Artificial Sequence: Synthetic oligonucleotide
ucgguguagucccgagucg

SEQ ID NO: 2439316 - RNA, 19 nt, Artificial Sequence
  Description of Artificial Sequence: Synthetic oligonucleotide
agcgggugagccuucucac

SEQ ID NO: 2439317 - RNA, 19 nt, Artificial Sequence
  Description of Artificial Sequence: Synthetic oligonucleotide
agucguuguuccucagagg

SEQ ID NO: 2439318 - RNA, 19 nt, Artificial Sequence
  Description of Artificial Sequence: Synthetic oligonucleotide
agccggagcucaccaaacc

SEQ ID NO: 2439319 - RNA, 19 nt, Artificial Sequence
  Description of Artificial Sequence: Synthetic oligonucleotide
agggaauuucccuggaaau

SEQ ID NO: 2439320 - RNA, 19 nt, Artificial Sequence
  Description of Artificial Sequence: Synthetic oligonucleotide
acugggcgcuggcagagac

SEQ ID NO: 2439321 - RNA, 19 nt, Artificial Sequence
  Description of Artificial Sequence: Synthetic oligonucleotide
guucaaugucgauggugcg

SEQ ID NO: 2439322 - RNA, 19 nt, Artificial Sequence
  Description of Artificial Sequence: Synthetic oligonucleotide
cucgguguagucccgaguc

SEQ ID NO: 2439323 - RNA, 19 nt, Artificial Sequence
  Description of Artificial Sequence: Synthetic oligonucleotide
caugagcgcagugggaucg

SEQ ID NO: 2439324 - RNA, 19 nt, Artificial Sequence
  Description of Artificial Sequence: Synthetic oligonucleotide
aaagcggcggcuguaccug

SEQ ID NO: 2439325 - RNA, 19 nt, Artificial Sequence
  Description of Artificial Sequence: Synthetic oligonucleotide
agaccaaaugauguacuug

SEQ ID NO: 2439326 - RNA, 19 nt, Artificial Sequence
  Description of Artificial Sequence: Synthetic oligonucleotide
gagauaacgccaucaugga

SEQ ID NO: 2439327 - RNA, 19 nt, Artificial Sequence
  Description of Artificial Sequence: Synthetic oligonucleotide
uggcauucuccugaugucc

SEQ ID NO: 2439328 - RNA, 19 nt, Artificial Sequence
  Description of Artificial Sequence: Synthetic oligonucleotide
cucaacugaccgcaggcac

SEQ ID NO: 2439329 - RNA, 19 nt, Artificial Sequence
  Description of Artificial Sequence: Synthetic oligonucleotide
ugaccucgcacuuuucgaa

SEQ ID NO: 2439330 - RNA, 19 nt, Artificial Sequence
  Description of Artificial Sequence: Synthetic oligonucleotide
agaccagcgccaucugagg

SEQ ID NO: 2439331 - RNA, 19 nt, Artificial Sequence
  Description of Artificial Sequence: Synthetic oligonucleotide
uaaagagcgggugagccuu

SEQ ID NO: 2439332 - RNA, 19 nt, Artificial Sequence
  Description of Artificial Sequence: Synthetic oligonucleotide
cuuggcauucuccugaugu

SEQ ID NO: 2439333 - RNA, 19 nt, Artificial Sequence
  Description of Artificial Sequence: Synthetic oligonucleotide
aggcauacacgguggacug

SEQ ID NO: 2439334 - RNA, 19 nt, Artificial Sequence
  Description of Artificial Sequence: Synthetic oligonucleotide
gguaaagagcgggugagcc

SEQ ID NO: 2439335 - RNA, 19 nt, Artificial Sequence
  Description of Artificial Sequence: Synthetic oligonucleotide
cacaccggagaccaaauga

SEQ ID NO: 2439336 - RNA, 19 nt, Artificial Sequence
  Description of Artificial Sequence: Synthetic oligonucleotide
aauguaaaguuggguucga

SEQ ID NO: 2439337 - RNA, 19 nt, Artificial Sequence
  Description of Artificial Sequence: Synthetic oligonucleotide
accgucggggcccacuagg

SEQ ID NO: 2439338 - RNA, 19 nt, Artificial Sequence
  Description of Artificial Sequence: Synthetic oligonucleotide
uuguuccucagagggacgc

SEQ ID NO: 2439339 - RNA, 19 nt, Artificial Sequence
  Description of Artificial Sequence: Synthetic oligonucleotide
uggcagagacucccgcagg

SEQ ID NO: 2439340 - RNA, 19 nt, Artificial Sequence
  Description of Artificial Sequence: Synthetic oligonucleotide
uggaaaucagguguuucuc

SEQ ID NO: 2439341 - RNA, 19 nt, Artificial Sequence
  Description of Artificial Sequence: Synthetic oligonucleotide
gucgauggugcgaaagcgg

SEQ ID NO: 2439342 - RNA, 19 nt, Artificial Sequence
  Description of Artificial Sequence: Synthetic oligonucleotide
ugauugcacgggaaaccga

SEQ ID NO: 2439343 - RNA, 19 nt, Artificial Sequence
  Description of Artificial Sequence: Synthetic oligonucleotide
uggaacaccgucggggccc

SEQ ID NO: 2439344 - RNA, 19 nt, Artificial Sequence
  Description of Artificial Sequence: Synthetic oligonucleotide
ucaucucgguguagucccg

SEQ ID NO: 2439345 - RNA, 19 nt, Artificial Sequence
  Description of Artificial Sequence: Synthetic oligonucleotide
cuggcagagacucccgcag

SEQ ID NO: 2439346 - RNA, 19 nt, Artificial Sequence
  Description of Artificial Sequence: Synthetic oligonucleotide
ugucaugagcgcaguggga

SEQ ID NO: 2439347 - RNA, 19 nt, Artificial Sequence
  Description of Artificial Sequence: Synthetic oligonucleotide
agguucaaugucgauggug

SEQ ID NO: 2439348 - RNA, 19 nt, Artificial Sequence
  Description of Artificial Sequence: Synthetic oligonucleotide
ugcggcacaccggagacca

SEQ ID NO: 2439349 - RNA, 19 nt, Artificial Sequence
  Description of Artificial Sequence: Synthetic oligonucleotide
agugcagccggagcucacc

SEQ ID NO: 2439350 - RNA, 19 nt, Artificial Sequence
  Description of Artificial Sequence: Synthetic oligonucleotide
agguaaagagcgggugagc

SEQ ID NO: 2439351 - RNA, 19 nt, Artificial Sequence
  Description of Artificial Sequence: Synthetic oligonucleotide
agcucaccaaacccggaug

SEQ ID NO: 2439352 - RNA, 19 nt, Artificial Sequence
  Description of Artificial Sequence: Synthetic oligonucleotide
cagcacuuuauuaguggug

SEQ ID NO: 2439353 - RNA, 19 nt, Artificial Sequence
  Description of Artificial Sequence: Synthetic oligonucleotide
caccaaacccggaugccag

SEQ ID NO: 2439354 - RNA, 19 nt, Artificial Sequence
  Description of Artificial Sequence: Synthetic oligonucleotide
ucggggcccacuaggaacu

SEQ ID NO: 2439355 - RNA, 19 nt, Artificial Sequence
  Description of Artificial Sequence: Synthetic oligonucleotide
uuggcauucuccugauguc

SEQ ID NO: 2439356 - RNA, 19 nt, Artificial Sequence
  Description of Artificial Sequence: Synthetic oligonucleotide
agauaacgccaucauggaa

SEQ ID NO: 2439357 - RNA, 19 nt, Artificial Sequence
  Description of Artificial Sequence: Synthetic oligonucleotide
gggucggauauacuugagg

SEQ ID NO: 2439358 - RNA, 19 nt, Artificial Sequence
  Description of Artificial Sequence: Synthetic oligonucleotide
gauauacuugagggaauuc

SEQ ID NO: 2439359 - RNA, 19 nt, Artificial Sequence
  Description of Artificial Sequence: Synthetic oligonucleotide
ucagagggacgcgacauuc

SEQ ID NO: 2439360 - RNA, 19 nt, Artificial Sequence
  Description of Artificial Sequence: Synthetic oligonucleotide
acugaccgcaggcaccuug

SEQ ID NO: 2439361 - RNA, 19 nt, Artificial Sequence
  Description of Artificial Sequence: Synthetic oligonucleotide
aggcucacgggcuccccgc

SEQ ID NO: 2439362 - RNA, 19 nt, Artificial Sequence
  Description of Artificial Sequence: Synthetic oligonucleotide
gauguccgaacugauugca

SEQ ID NO: 2439363 - RNA, 19 nt, Artificial Sequence
  Description of Artificial Sequence: Synthetic oligonucleotide
acuuuucgaacaauguaaa

SEQ ID NO: 2439364 - RNA, 19 nt, Artificial Sequence
  Description of Artificial Sequence: Synthetic oligonucleotide
cagaucguucaucucggug

SEQ ID NO: 2439365 - RNA, 19 nt, Artificial Sequence
  Description of Artificial Sequence: Synthetic oligonucleotide
gagccuucucaccauugac

SEQ ID NO: 2439366 - RNA, 19 nt, Artificial Sequence
  Description of Artificial Sequence: Synthetic oligonucleotide
ucguuguuccucagaggga

SEQ ID NO: 2439367 - RNA, 19 nt, Artificial Sequence
  Description of Artificial Sequence: Synthetic oligonucleotide
accggagaccaaaugaugu

SEQ ID NO: 2439368 - RNA, 19 nt, Artificial Sequence
  Description of Artificial Sequence: Synthetic oligonucleotide
accaaaugauguacuuggg

SEQ ID NO: 2439369 - RNA, 19 nt, Artificial Sequence
  Description of Artificial Sequence: Synthetic oligonucleotide
ugcacgggaaaccgagcac

SEQ ID NO: 2439370 - RNA, 19 nt, Artificial Sequence
  Description of Artificial Sequence: Synthetic oligonucleotide
agggacgcgacauucucaa

SEQ ID NO: 2439371 - RNA, 19 nt, Artificial Sequence
  Description of Artificial Sequence: Synthetic oligonucleotide
guaccugcgcacuggaaca

SEQ ID NO: 2439372 - RNA, 19 nt, Artificial Sequence
  Description of Artificial Sequence: Synthetic oligonucleotide
gucggauauacuugaggga

SEQ ID NO: 2439373 - RNA, 19 nt, Artificial Sequence
  Description of Artificial Sequence: Synthetic oligonucleotide
ccgagcaccaccaagccac

SEQ ID NO: 2439374 - RNA, 19 nt, Artificial Sequence
  Description of Artificial Sequence: Synthetic oligonucleotide
ucucaacugaccgcaggca

SEQ ID NO: 2439375 - RNA, 19 nt, Artificial Sequence
  Description of Artificial Sequence: Synthetic oligonucleotide
acccggaugccaggaaugc

SEQ ID NO: 2439376 - RNA, 19 nt, Artificial Sequence
  Description of Artificial Sequence: Synthetic oligonucleotide
accaaacccggaugccagg

SEQ ID NO: 2439377 - RNA, 19 nt, Artificial Sequence
  Description of Artificial Sequence: Synthetic oligonucleotide
ugcgcacuggaacaccguc

SEQ ID NO: 2439378 - RNA, 19 nt, Artificial Sequence
  Description of Artificial Sequence: Synthetic oligonucleotide
guugcggcacaccggagac

SEQ ID NO: 2439379 - RNA, 19 nt, Artificial Sequence
  Description of Artificial Sequence: Synthetic oligonucleotide
gaccucgcacuuuucgaac

SEQ ID NO: 2439380 - RNA, 19 nt, Artificial Sequence
  Description of Artificial Sequence: Synthetic oligonucleotide
auggugcgaaagcggcggc

SEQ ID NO: 2439381 - RNA, 19 nt, Artificial Sequence
  Description of Artificial Sequence: Synthetic oligonucleotide
aacccggaugccaggaaug

SEQ ID NO: 2439382 - RNA, 19 nt, Artificial Sequence
  Description of Artificial Sequence: Synthetic oligonucleotide
caugaugcagaagcuggug

SEQ ID NO: 2439383 - RNA, 19 nt, Artificial Sequence
  Description of Artificial Sequence: Synthetic oligonucleotide
ggauggacaagaccagcgc

SEQ ID NO: 2439384 - RNA, 19 nt, Artificial Sequence
  Description of Artificial Sequence: Synthetic oligonucleotide
aaguuccaggcaaugucgu

SEQ ID NO: 2439385 - RNA, 19 nt, Artificial Sequence
  Description of Artificial Sequence: Synthetic oligonucleotide
gggauggacaagaccagcg

SEQ ID NO: 2439386 - RNA, 19 nt, Artificial Sequence
  Description of Artificial Sequence: Synthetic oligonucleotide
ugagggaauucagaaucuc

SEQ ID NO: 2439387 - RNA, 19 nt, Artificial Sequence
  Description of Artificial Sequence: Synthetic oligonucleotide
cgacauucucaacugaccg

SEQ ID NO: 2439388 - RNA, 19 nt, Artificial Sequence
  Description of Artificial Sequence: Synthetic oligonucleotide
auacuugagggaauucaga

SEQ ID NO: 2439389 - RNA, 19 nt, Artificial Sequence
  Description of Artificial Sequence: Synthetic oligonucleotide
agccgggcugcacacauga

SEQ ID NO: 2439390 - RNA, 19 nt, Artificial Sequence
  Description of Artificial Sequence: Synthetic oligonucleotide
gucggggcccacuaggaac

SEQ ID NO: 2439391 - RNA, 19 nt, Artificial Sequence
  Description of Artificial Sequence: Synthetic oligonucleotide
gagcgggugagccuucuca

SEQ ID NO: 2439392 - RNA, 19 nt, Artificial Sequence
  Description of Artificial Sequence: Synthetic oligonucleotide
ucucgguguagucccgagu

SEQ ID NO: 2439393 - RNA, 19 nt, Artificial Sequence
  Description of Artificial Sequence: Synthetic oligonucleotide
caagccacggggcccgagg

SEQ ID NO: 2439394 - RNA, 19 nt, Artificial Sequence
  Description of Artificial Sequence: Synthetic oligonucleotide
accucgcacuuuucgaaca

SEQ ID NO: 2439395 - RNA, 19 nt, Artificial Sequence
  Description of Artificial Sequence: Synthetic oligonucleotide
caccggagaccaaaugaug

SEQ ID NO: 2439396 - RNA, 19 nt, Artificial Sequence
  Description of Artificial Sequence: Synthetic oligonucleotide
gucguugcggcacaccgga

SEQ ID NO: 2439397 - RNA, 19 nt, Artificial Sequence
  Description of Artificial Sequence: Synthetic oligonucleotide
auggacaagaccagcgcca

SEQ ID NO: 2439398 - RNA, 19 nt, Artificial Sequence
  Description of Artificial Sequence: Synthetic oligonucleotide
gaccgcaggcaccuugccc

SEQ ID NO: 2439399 - RNA, 19 nt, Artificial Sequence
  Description of Artificial Sequence: Synthetic oligonucleotide
acacgguggacugcaccgc

SEQ ID NO: 2439400 - RNA, 19 nt, Artificial Sequence
  Description of Artificial Sequence: Synthetic oligonucleotide
augcaaauuuagagauaac

SEQ ID NO: 2439401 - RNA, 19 nt, Artificial Sequence
  Description of Artificial Sequence: Synthetic oligonucleotide
gaacaauguaaaguugggu

SEQ ID NO: 2439402 - RNA, 19 nt, Artificial Sequence
  Description of Artificial Sequence: Synthetic oligonucleotide
guacuuggggucugucaug

SEQ ID NO: 2439403 - RNA, 19 nt, Artificial Sequence
  Description of Artificial Sequence: Synthetic oligonucleotide
gcucaccaaacccggaugc

SEQ ID NO: 2439404 - RNA, 19 nt, Artificial Sequence
  Description of Artificial Sequence: Synthetic oligonucleotide
cauucucaacugaccgcag

SEQ ID NO: 2439405 - RNA, 19 nt, Artificial Sequence
  Description of Artificial Sequence: Synthetic oligonucleotide
aucucgguguagucccgag

SEQ ID NO: 2439406 - RNA, 19 nt, Artificial Sequence
  Description of Artificial Sequence: Synthetic oligonucleotide
auguccgaacugauugcac

SEQ ID NO: 2439407 - RNA, 19 nt, Artificial Sequence
  Description of Artificial Sequence: Synthetic oligonucleotide
cagugggaucgucacuggg

SEQ ID NO: 2439408 - RNA, 19 nt, Artificial Sequence
  Description of Artificial Sequence: Synthetic oligonucleotide
ggaagguaaagagcgggug

SEQ ID NO: 2439409 - RNA, 19 nt, Artificial Sequence
  Description of Artificial Sequence: Synthetic oligonucleotide
ugggcgcuggcagagacuc

SEQ ID NO: 2439410 - RNA, 19 nt, Artificial Sequence
  Description of Artificial Sequence: Synthetic oligonucleotide
ucuucguucuuggcauucu

SEQ ID NO: 2439411 - RNA, 19 nt, Artificial Sequence
  Description of Artificial Sequence: Synthetic oligonucleotide
ucaugagcgcagugggauc

SEQ ID NO: 2439412 - RNA, 19 nt, Artificial Sequence
  Description of Artificial Sequence: Synthetic oligonucleotide
agagccgggcugcacacau

SEQ ID NO: 2439413 - RNA, 19 nt, Artificial Sequence
  Description of Artificial Sequence: Synthetic oligonucleotide
ggcauucuccugauguccg

SEQ ID NO: 2439414 - RNA, 19 nt, Artificial Sequence
  Description of Artificial Sequence: Synthetic oligonucleotide
gcggggauggacaagacca

SEQ ID NO: 2439415 - RNA, 19 nt, Artificial Sequence
  Description of Artificial Sequence: Synthetic oligonucleotide
cuucguucuuggcauucuc

SEQ ID NO: 2439416 - RNA, 19 nt, Artificial Sequence
  Description of Artificial Sequence: Synthetic oligonucleotide
gaucguucaucucggugua

SEQ ID NO: 2439417 - RNA, 19 nt, Artificial Sequence
  Description of Artificial Sequence: Synthetic oligonucleotide
cucacgggcuccccgcccg

SEQ ID NO: 2439418 - RNA, 19 nt, Artificial Sequence
  Description of Artificial Sequence: Synthetic oligonucleotide
uccugauguccgaacugau

SEQ ID NO: 2439419 - RNA, 19 nt, Artificial Sequence
  Description of Artificial Sequence: Synthetic oligonucleotide
uaguggugaaaaucaccuu

SEQ ID NO: 2439420 - RNA, 19 nt, Artificial Sequence
  Description of Artificial Sequence: Synthetic oligonucleotide
acaccggagaccaaaugau

SEQ ID NO: 2439421 - RNA, 19 nt, Artificial Sequence
  Description of Artificial Sequence: Synthetic oligonucleotide
cucaccaaacccggaugcc

SEQ ID NO: 2439422 - RNA, 19 nt, Artificial Sequence
  Description of Artificial Sequence: Synthetic oligonucleotide
agggcuucuaugucagguu

SEQ ID NO: 2439423 - RNA, 19 nt, Artificial Sequence
  Description of Artificial Sequence: Synthetic oligonucleotide
aaagagcgggugagccuuc

SEQ ID NO: 2439424 - RNA, 19 nt, Artificial Sequence
  Description of Artificial Sequence: Synthetic oligonucleotide
accugcgcacuggaacacc

SEQ ID NO: 2439425 - RNA, 19 nt, Artificial Sequence
  Description of Artificial Sequence: Synthetic oligonucleotide
ggcaaugucguugcggcac

SEQ ID NO: 2439426 - RNA, 19 nt, Artificial Sequence
  Description of Artificial Sequence: Synthetic oligonucleotide
accgggucggauauacuug

SEQ ID NO: 2439427 - RNA, 19 nt, Artificial Sequence
  Description of Artificial Sequence: Synthetic oligonucleotide
cacgguggacugcaccgcc

SEQ ID NO: 2439428 - RNA, 19 nt, Artificial Sequence
  Description of Artificial Sequence: Synthetic oligonucleotide
agcgggcgcgcggagaagg

SEQ ID NO: 2439429 - RNA, 19 nt, Artificial Sequence
  Description of Artificial Sequence: Synthetic oligonucleotide
gagggaauucagaaucucu

SEQ ID NO: 2439430 - RNA, 19 nt, Artificial Sequence
  Description of Artificial Sequence: Synthetic oligonucleotide
accgagcaccaccaagcca

SEQ ID NO: 2439431 - RNA, 19 nt, Artificial Sequence
  Description of Artificial Sequence: Synthetic oligonucleotide
cacuuuauuaguggugaaa

SEQ ID NO: 2439432 - RNA, 19 nt, Artificial Sequence
  Description of Artificial Sequence: Synthetic oligonucleotide
cuggaacaccgucggggcc

SEQ ID NO: 2439433 - RNA, 19 nt, Artificial Sequence
  Description of Artificial Sequence: Synthetic oligonucleotide
agagcgggugagccuucuc

SEQ ID NO: 2439434 - RNA, 19 nt, Artificial Sequence
  Description of Artificial Sequence: Synthetic oligonucleotide
gcacuuuucgaacaaugua

SEQ ID NO: 2439435 - RNA, 19 nt, Artificial Sequence
  Description of Artificial Sequence: Synthetic oligonucleotide
aacaccgucggggcccacu

SEQ ID NO: 2439436 - RNA, 19 nt, Artificial Sequence
  Description of Artificial Sequence: Synthetic oligonucleotide
augucagguucaaugucga

SEQ ID NO: 2439437 - RNA, 19 nt, Artificial Sequence
  Description of Artificial Sequence: Synthetic oligonucleotide
gccggagcucaccaaaccc

SEQ ID NO: 2439438 - RNA, 19 nt, Artificial Sequence
  Description of Artificial Sequence: Synthetic oligonucleotide
agccacggggcccgaggcg

SEQ ID NO: 2439439 - RNA, 19 nt, Artificial Sequence
  Description of Artificial Sequence: Synthetic oligonucleotide
caggcucacgggcuccccg

SEQ ID NO: 2439440 - RNA, 19 nt, Artificial Sequence
  Description of Artificial Sequence: Synthetic oligonucleotide
ccugcgcacuggaacaccg

SEQ ID NO: 2439441 - RNA, 19 nt, Artificial Sequence
  Description of Artificial Sequence: Synthetic oligonucleotide
gcacgggaaaccgagcacc

SEQ ID NO: 2439442 - RNA, 19 nt, Artificial Sequence
  Description of Artificial Sequence: Synthetic oligonucleotide
acgggaaaccgagcaccac

SEQ ID NO: 2439443 - RNA, 19 nt, Artificial Sequence
  Description of Artificial Sequence: Synthetic oligonucleotide
cauacacgguggacugcac

SEQ ID NO: 2439444 - RNA, 19 nt, Artificial Sequence
  Description of Artificial Sequence: Synthetic oligonucleotide
cuccugauguccgaacuga

SEQ ID NO: 2439445 - RNA, 19 nt, Artificial Sequence
  Description of Artificial Sequence: Synthetic oligonucleotide
ggacgcgacauucucaacu

SEQ ID NO: 2439446 - RNA, 19 nt, Artificial Sequence
  Description of Artificial Sequence: Synthetic oligonucleotide
caucugagggaauuucccu

SEQ ID NO: 2439447 - RNA, 19 nt, Artificial Sequence
  Description of Artificial Sequence: Synthetic oligonucleotide
gcgacauucucaacugacc

SEQ ID NO: 2439448 - RNA, 19 nt, Artificial Sequence
  Description of Artificial Sequence: Synthetic oligonucleotide
gacucccgcaggaagguaa

SEQ ID NO: 2439449 - RNA, 19 nt, Artificial Sequence
  Description of Artificial Sequence: Synthetic oligonucleotide
aggaaugccuuaggagccu

SEQ ID NO: 2439450 - RNA, 19 nt, Artificial Sequence
  Description of Artificial Sequence: Synthetic oligonucleotide
cagccggagcucaccaaac

SEQ ID NO: 2439451 - RNA, 19 nt, Artificial Sequence
  Description of Artificial Sequence: Synthetic oligonucleotide
gccaucugagggaauuucc

SEQ ID NO: 2439452 - RNA, 19 nt, Artificial Sequence
  Description of Artificial Sequence: Synthetic oligonucleotide
acgcgacauucucaacuga

SEQ ID NO: 2439453 - RNA, 19 nt, Artificial Sequence
  Description of Artificial Sequence: Synthetic oligonucleotide
ucguugcggcacaccggag

SEQ ID NO: 2439454 - RNA, 19 nt, Artificial Sequence
  Description of Artificial Sequence: Synthetic oligonucleotide
agagugcagccggagcuca

SEQ ID NO: 2439455 - RNA, 19 nt, Artificial Sequence
  Description of Artificial Sequence: Synthetic oligonucleotide
ggcgcuggcagagacuccc

SEQ ID NO: 2439456 - RNA, 19 nt, Artificial Sequence
  Description of Artificial Sequence: Synthetic oligonucleotide
cuaggcugcugggacagca

SEQ ID NO: 2439457 - RNA, 19 nt, Artificial Sequence
  Description of Artificial Sequence: Synthetic oligonucleotide
gagcaccaccaagccacgg

SEQ ID NO: 2439458 - RNA, 19 nt, Artificial Sequence
  Description of Artificial Sequence: Synthetic oligonucleotide
cauugaccucgcacuuuuc

SEQ ID NO: 2439459 - RNA, 19 nt, Artificial Sequence
  Description of Artificial Sequence: Synthetic oligonucleotide
aggcaaugucguugcggca

SEQ ID NO: 2439460 - RNA, 19 nt, Artificial Sequence
  Description of Artificial Sequence: Synthetic oligonucleotide
agcgccaucugagggaauu

SEQ ID NO: 2439461 - RNA, 19 nt, Artificial Sequence
  Description of Artificial Sequence: Synthetic oligonucleotide
gcgcggagaaggcauacac

SEQ ID NO: 2439462 - RNA, 19 nt, Artificial Sequence
  Description of Artificial Sequence: Synthetic oligonucleotide
gagggacgcgacauucuca

SEQ ID NO: 2439463 - RNA, 19 nt, Artificial Sequence
  Description of Artificial Sequence: Synthetic oligonucleotide
aagagcgggugagccuucu

SEQ ID NO: 2439464 - RNA, 19 nt, Artificial Sequence
  Description of Artificial Sequence: Synthetic oligonucleotide
gccuucucaccauugaccu

SEQ ID NO: 2439465 - RNA, 19 nt, Artificial Sequence
  Description of Artificial Sequence: Synthetic oligonucleotide
cacgggaaaccgagcacca

SEQ ID NO: 2439466 - RNA, 19 nt, Artificial Sequence
  Description of Artificial Sequence: Synthetic oligonucleotide
ggcuguaccugcgcacugg

SEQ ID NO: 2439467 - RNA, 19 nt, Artificial Sequence
  Description of Artificial Sequence: Synthetic oligonucleotide
gcagugggaucgucacugg

SEQ ID NO: 2439468 - RNA, 19 nt, Artificial Sequence
  Description of Artificial Sequence: Synthetic oligonucleotide
auguaaaguuggguucgaa

SEQ ID NO: 2439469 - RNA, 19 nt, Artificial Sequence
  Description of Artificial Sequence: Synthetic oligonucleotide
uaccugcgcacuggaacac

SEQ ID NO: 2439470 - RNA, 19 nt, Artificial Sequence
  Description of Artificial Sequence: Synthetic oligonucleotide
uggugcgaaagcggcggcu

SEQ ID NO: 2439471 - RNA, 19 nt, Artificial Sequence
  Description of Artificial Sequence: Synthetic oligonucleotide
gucaugagcgcagugggau

SEQ ID NO: 2439472 - RNA, 19 nt, Artificial Sequence
  Description of Artificial Sequence: Synthetic oligonucleotide
uagucccgagucguuguuc

SEQ ID NO: 2439473 - RNA, 19 nt, Artificial Sequence
  Description of Artificial Sequence: Synthetic oligonucleotide
ugcagccggagcucaccaa

SEQ ID NO: 2439474 - RNA, 19 nt, Artificial Sequence
  Description of Artificial Sequence: Synthetic oligonucleotide
cgcgacauucucaacugac

SEQ ID NO: 2439475 - RNA, 19 nt, Artificial Sequence
  Description of Artificial Sequence: Synthetic oligonucleotide
cgggaaaccgagcaccacc

SEQ ID NO: 2439476 - RNA, 19 nt, Artificial Sequence
  Description of Artificial Sequence: Synthetic oligonucleotide
ucucuucguucuuggcauu

SEQ ID NO: 2439477 - RNA, 19 nt, Artificial Sequence
  Description of Artificial Sequence: Synthetic oligonucleotide
ggcagaaaggcagcgggga

SEQ ID NO: 2439478 - RNA, 19 nt, Artificial Sequence
  Description of Artificial Sequence: Synthetic oligonucleotide
ccgggcugcacacaugaug

SEQ ID NO: 2439479 - RNA, 19 nt, Artificial Sequence
  Description of Artificial Sequence: Synthetic oligonucleotide
gguggacugcaccgccgcg

SEQ ID NO: 2439480 - RNA, 19 nt, Artificial Sequence
  Description of Artificial Sequence: Synthetic oligonucleotide
acgguggacugcaccgccg

SEQ ID NO: 2439481 - RNA, 19 nt, Artificial Sequence
  Description of Artificial Sequence: Synthetic oligonucleotide
cgcggagaaggcauacacg

SEQ ID NO: 2439482 - RNA, 19 nt, Artificial Sequence
  Description of Artificial Sequence: Synthetic oligonucleotide
gcgcacuggaacaccgucg

SEQ ID NO: 2439483 - RNA, 19 nt, Artificial Sequence
  Description of Artificial Sequence: Synthetic oligonucleotide
gggaaaccgagcaccacca

SEQ ID NO: 2439484 - RNA, 19 nt, Artificial Sequence
  Description of Artificial Sequence: Synthetic oligonucleotide
gcauacacgguggacugca

SEQ ID NO: 2439485 - RNA, 19 nt, Artificial Sequence
  Description of Artificial Sequence: Synthetic oligonucleotide
ggugaaaaucaccuuuguu

SEQ ID NO: 2439486 - RNA, 19 nt, Artificial Sequence
  Description of Artificial Sequence: Synthetic oligonucleotide
gagcgcagugggaucguca

SEQ ID NO: 2439487 - RNA, 19 nt, Artificial Sequence
  Description of Artificial Sequence: Synthetic oligonucleotide
ugcgaaagcggcggcugua

SEQ ID NO: 2439488 - RNA, 19 nt, Artificial Sequence
  Description of Artificial Sequence: Synthetic oligonucleotide
gguguuucuccaugcaaau

SEQ ID NO: 2439489 - RNA, 19 nt, Artificial Sequence
  Description of Artificial Sequence: Synthetic oligonucleotide
acaccgucggggcccacua

SEQ ID NO: 2439490 - RNA, 19 nt, Artificial Sequence
  Description of Artificial Sequence: Synthetic oligonucleotide
ucuaggcugcugggacagc

SEQ ID NO: 2439491 - RNA, 19 nt, Artificial Sequence
  Description of Artificial Sequence: Synthetic oligonucleotide
gcacaccggagaccaaaug

SEQ ID NO: 2439492 - RNA, 19 nt, Artificial Sequence
  Description of Artificial Sequence: Synthetic oligonucleotide
gcccacuaggaacuucuca

SEQ ID NO: 2439493 - RNA, 19 nt, Artificial Sequence
  Description of Artificial Sequence: Synthetic oligonucleotide
accauugaccucgcacuuu

SEQ ID NO: 2439494 - RNA, 19 nt, Artificial Sequence
  Description of Artificial Sequence: Synthetic oligonucleotide
gcgggugagccuucucacc

SEQ ID NO: 2439495 - RNA, 19 nt, Artificial Sequence
  Description of Artificial Sequence: Synthetic oligonucleotide
uccccgcccgucagcgggc

SEQ ID NO: 2439496 - RNA, 19 nt, Artificial Sequence
  Description of Artificial Sequence: Synthetic oligonucleotide
aggcagcggggauggacaa

SEQ ID NO: 2439497 - RNA, 19 nt, Artificial Sequence
  Description of Artificial Sequence: Synthetic oligonucleotide
gagacucccgcaggaaggu

SEQ ID NO: 2439498 - RNA, 19 nt, Artificial Sequence
  Description of Artificial Sequence: Synthetic oligonucleotide
caccgggucggauauacuu

SEQ ID NO: 2439499 - RNA, 19 nt, Artificial Sequence
  Description of Artificial Sequence: Synthetic oligonucleotide
cccagagugcagccggagc

SEQ ID NO: 2439500 - RNA, 19 nt, Artificial Sequence
  Description of Artificial Sequence: Synthetic oligonucleotide
gcacuggaacaccgucggg

SEQ ID NO: 2439501 - RNA, 19 nt, Artificial Sequence
  Description of Artificial Sequence: Synthetic oligonucleotide
caaugucguugcggcacac

SEQ ID NO: 2439502 - RNA, 19 nt, Artificial Sequence
  Description of Artificial Sequence: Synthetic oligonucleotide
ggcuucuaugucagguuca

SEQ ID NO: 2439503 - RNA, 19 nt, Artificial Sequence
  Description of Artificial Sequence: Synthetic oligonucleotide
uaacgccaucauggaagaa

SEQ ID NO: 2439504 - RNA, 19 nt, Artificial Sequence
  Description of Artificial Sequence: Synthetic oligonucleotide
cagcggggauggacaagac

SEQ ID NO: 2439505 - RNA, 19 nt, Artificial Sequence
  Description of Artificial Sequence: Synthetic oligonucleotide
gcagccggagcucaccaaa

SEQ ID NO: 2439506 - RNA, 19 nt, Artificial Sequence
  Description of Artificial Sequence: Synthetic oligonucleotide
ggcggcuguaccugcgcac

SEQ ID NO: 2439507 - RNA, 19 nt, Artificial Sequence
  Description of Artificial Sequence: Synthetic oligonucleotide
ggagaccaaaugauguacu

SEQ ID NO: 2439508 - RNA, 19 nt, Artificial Sequence
  Description of Artificial Sequence: Synthetic oligonucleotide
gcaaugucguugcggcaca

SEQ ID NO: 2439509 - RNA, 19 nt, Artificial Sequence
  Description of Artificial Sequence: Synthetic oligonucleotide
cucccgcaggaagguaaag

SEQ ID NO: 2439510 - RNA, 19 nt, Artificial Sequence
  Description of Artificial Sequence: Synthetic oligonucleotide
caaacccggaugccaggaa

SEQ ID NO: 2439511 - RNA, 19 nt, Artificial Sequence
  Description of Artificial Sequence: Synthetic oligonucleotide
gcuguaccugcgcacugga

SEQ ID NO: 2439512 - RNA, 19 nt, Artificial Sequence
  Description of Artificial Sequence: Synthetic oligonucleotide
gccgcggagagccgggcug

SEQ ID NO: 2439513 - RNA, 19 nt, Artificial Sequence
  Description of Artificial Sequence: Synthetic oligonucleotide
gcuucuaugucagguucaa

SEQ ID NO: 2439514 - RNA, 19 nt, Artificial Sequence
  Description of Artificial Sequence: Synthetic oligonucleotide
acucccgcaggaagguaaa

SEQ ID NO: 2439515 - RNA, 19 nt, Artificial Sequence
  Description of Artificial Sequence: Synthetic oligonucleotide
gcauucuccugauguccga

SEQ ID NO: 2439516 - RNA, 19 nt, Artificial Sequence
  Description of Artificial Sequence: Synthetic oligonucleotide
ccgggucggauauacuuga

SEQ ID NO: 2439517 - RNA, 19 nt, Artificial Sequence
  Description of Artificial Sequence: Synthetic oligonucleotide
ggcauacacgguggacugc

SEQ ID NO: 2439518 - RNA, 19 nt, Artificial Sequence
  Description of Artificial Sequence: Synthetic oligonucleotide
caccgccgcggagagccgg

SEQ ID NO: 2439519 - RNA, 19 nt, Artificial Sequence
  Description of Artificial Sequence: Synthetic oligonucleotide
cccaccgggucggauauac

SEQ ID NO: 2439520 - RNA, 19 nt, Artificial Sequence
  Description of Artificial Sequence: Synthetic oligonucleotide
ggauauacuugagggaauu

SEQ ID NO: 2439521 - RNA, 19 nt, Artificial Sequence
  Description of Artificial Sequence: Synthetic oligonucleotide
caacugaccgcaggcaccu

SEQ ID NO: 2439522 - RNA, 19 nt, Artificial Sequence
  Description of Artificial Sequence: Synthetic oligonucleotide
caccgucggggcccacuag

SEQ ID NO: 2439523 - RNA, 19 nt, Artificial Sequence
  Description of Artificial Sequence: Synthetic oligonucleotide
augagcgcagugggaucgu

SEQ ID NO: 2439524 - RNA, 19 nt, Artificial Sequence
  Description of Artificial Sequence: Synthetic oligonucleotide
cuguaccugcgcacuggaa

SEQ ID NO: 2439525 - RNA, 19 nt, Artificial Sequence
  Description of Artificial Sequence: Synthetic oligonucleotide
ccagagugcagccggagcu

SEQ ID NO: 2439526 - RNA, 19 nt, Artificial Sequence
  Description of Artificial Sequence: Synthetic oligonucleotide
cguucaucucgguguaguc

SEQ ID NO: 2439527 - RNA, 19 nt, Artificial Sequence
  Description of Artificial Sequence: Synthetic oligonucleotide
caucucgguguagucccga

SEQ ID NO: 2439528 - RNA, 19 nt, Artificial Sequence
  Description of Artificial Sequence: Synthetic oligonucleotide
gagugcagccggagcucac

SEQ ID NO: 2439529 - RNA, 19 nt, Artificial Sequence
  Description of Artificial Sequence: Synthetic oligonucleotide
gagccgggcugcacacaug

SEQ ID NO: 2439530 - RNA, 19 nt, Artificial Sequence
  Description of Artificial Sequence: Synthetic oligonucleotide
gggaucgucacugggcgcu

SEQ ID NO: 2439531 - RNA, 19 nt, Artificial Sequence
  Description of Artificial Sequence: Synthetic oligonucleotide
ccgcagggagcccaggcuc

SEQ ID NO: 2439532 - RNA, 19 nt, Artificial Sequence
  Description of Artificial Sequence: Synthetic oligonucleotide
ggaaaccgagcaccaccaa

SEQ ID NO: 2439533 - RNA, 19 nt, Artificial Sequence
  Description of Artificial Sequence: Synthetic oligonucleotide
acggggcccgaggcguuuc

SEQ ID NO: 2439534 - RNA, 19 nt, Artificial Sequence
  Description of Artificial Sequence: Synthetic oligonucleotide
ccgaacugauugcacggga

SEQ ID NO: 2439535 - RNA, 19 nt, Artificial Sequence
  Description of Artificial Sequence: Synthetic oligonucleotide
ccaccaagccacggggccc

SEQ ID NO: 2439536 - RNA, 19 nt, Artificial Sequence
  Description of Artificial Sequence: Synthetic oligonucleotide
cgaacugauugcacgggaa

SEQ ID NO: 2439537 - RNA, 19 nt, Artificial Sequence
  Description of Artificial Sequence: Synthetic oligonucleotide
caaugucgauggugcgaaa

SEQ ID NO: 2439538 - RNA, 19 nt, Artificial Sequence
  Description of Artificial Sequence: Synthetic oligonucleotide
cuugccccgcagggagccc

SEQ ID NO: 2439539 - RNA, 19 nt, Artificial Sequence
  Description of Artificial Sequence: Synthetic oligonucleotide
gcucacgggcuccccgccc

SEQ ID NO: 2439540 - RNA, 19 nt, Artificial Sequence
  Description of Artificial Sequence: Synthetic oligonucleotide
gggacgcgacauucucaac

SEQ ID NO: 2439541 - RNA, 19 nt, Artificial Sequence
  Description of Artificial Sequence: Synthetic oligonucleotide
cgaaagcggcggcuguacc

SEQ ID NO: 2439542 - RNA, 19 nt, Artificial Sequence
  Description of Artificial Sequence: Synthetic oligonucleotide
caccuuuguuuaggcagaa

SEQ ID NO: 2439543 - RNA, 19 nt, Artificial Sequence
  Description of Artificial Sequence: Synthetic oligonucleotide
ccggagaccaaaugaugua

SEQ ID NO: 2439544 - RNA, 19 nt, Artificial Sequence
  Description of Artificial Sequence: Synthetic oligonucleotide
cccggaugccaggaaugcc

SEQ ID NO: 2439545 - RNA, 19 nt, Artificial Sequence
  Description of Artificial Sequence: Synthetic oligonucleotide
cccgaggcguuucugcaga

SEQ ID NO: 2439546 - RNA, 19 nt, Artificial Sequence
  Description of Artificial Sequence: Synthetic oligonucleotide
guagucccgagucguuguu

SEQ ID NO: 2439547 - RNA, 19 nt, Artificial Sequence
  Description of Artificial Sequence: Synthetic oligonucleotide
gucagcgggcgcgcggaga

SEQ ID NO: 2439548 - RNA, 19 nt, Artificial Sequence
  Description of Artificial Sequence: Synthetic oligonucleotide
gcaggcaccuugccccgca

SEQ ID NO: 2439549 - RNA, 19 nt, Artificial Sequence
  Description of Artificial Sequence: Synthetic oligonucleotide
ggacugcaccgccgcggag

SEQ ID NO: 2439550 - RNA, 19 nt, Artificial Sequence
  Description of Artificial Sequence: Synthetic oligonucleotide
ggaucgucacugggcgcug

SEQ ID NO: 2439551 - RNA, 19 nt, Artificial Sequence
  Description of Artificial Sequence: Synthetic oligonucleotide
gggcccacuaggaacuucu

SEQ ID NO: 2439552 - RNA, 19 nt, Artificial Sequence
  Description of Artificial Sequence: Synthetic oligonucleotide
ccgcaggcaccuugccccg

SEQ ID NO: 2439553 - RNA, 19 nt, Artificial Sequence
  Description of Artificial Sequence: Synthetic oligonucleotide
caccauugaccucgcacuu

SEQ ID NO: 2439554 - RNA, 19 nt, Artificial Sequence
  Description of Artificial Sequence: Synthetic oligonucleotide
cguugcggcacaccggaga

SEQ ID NO: 2439555 - RNA, 19 nt, Artificial Sequence
  Description of Artificial Sequence: Synthetic oligonucleotide
cgguggacugcaccgccgc

SEQ ID NO: 2439556 - RNA, 19 nt, Artificial Sequence
  Description of Artificial Sequence: Synthetic oligonucleotide
agacucccgcaggaaggua

SEQ ID NO: 2439557 - RNA, 19 nt, Artificial Sequence
  Description of Artificial Sequence: Synthetic oligonucleotide
ccaaacccggaugccagga

SEQ ID NO: 2439558 - RNA, 19 nt, Artificial Sequence
  Description of Artificial Sequence: Synthetic oligonucleotide
ccgagucguuguuccucag

SEQ ID NO: 2439559 - RNA, 19 nt, Artificial Sequence
  Description of Artificial Sequence: Synthetic oligonucleotide
cccgucagcgggcgcgcgg

SEQ ID NO: 2439560 - RNA, 19 nt, Artificial Sequence
  Description of Artificial Sequence: Synthetic oligonucleotide
gcagaaaggcagcggggau

SEQ ID NO: 2439561 - RNA, 19 nt, Artificial Sequence
  Description of Artificial Sequence: Synthetic oligonucleotide
ccgcccgucagcgggcgcg

SEQ ID NO: 2439562 - RNA, 19 nt, Artificial Sequence
  Description of Artificial Sequence: Synthetic oligonucleotide
cgggucggauauacuugag

SEQ ID NO: 2439563 - RNA, 19 nt, Artificial Sequence
  Description of Artificial Sequence: Synthetic oligonucleotide
gucccgagucguuguuccu

SEQ ID NO: 2439564 - RNA, 19 nt, Artificial Sequence
  Description of Artificial Sequence: Synthetic oligonucleotide
ccucgcacuuuucgaacaa

SEQ ID NO: 2439565 - RNA, 19 nt, Artificial Sequence
  Description of Artificial Sequence: Synthetic oligonucleotide
cugcgcacuggaacaccgu

SEQ ID NO: 2439566 - RNA, 19 nt, Artificial Sequence
  Description of Artificial Sequence: Synthetic oligonucleotide
gcgcuggcagagacucccg

SEQ ID NO: 2439567 - RNA, 19 nt, Artificial Sequence
  Description of Artificial Sequence: Synthetic oligonucleotide
cucagagggacgcgacauu

SEQ ID NO: 2439568 - RNA, 19 nt, Artificial Sequence
  Description of Artificial Sequence: Synthetic oligonucleotide
cgccaucugagggaauuuc

SEQ ID NO: 2439569 - RNA, 19 nt, Artificial Sequence
  Description of Artificial Sequence: Synthetic oligonucleotide
cagguucaaugucgauggu

SEQ ID NO: 2439570 - RNA, 19 nt, Artificial Sequence
  Description of Artificial Sequence: Synthetic oligonucleotide
cuucuaugucagguucaau

SEQ ID NO: 2439571 - RNA, 19 nt, Artificial Sequence
  Description of Artificial Sequence: Synthetic oligonucleotide
ccugauguccgaacugauu

SEQ ID NO: 2439572 - RNA, 19 nt, Artificial Sequence
  Description of Artificial Sequence: Synthetic oligonucleotide
ccauugaccucgcacuuuu

SEQ ID NO: 2439573 - RNA, 19 nt, Artificial Sequence
  Description of Artificial Sequence: Synthetic oligonucleotide
ccgucggggcccacuagga

SEQ ID NO: 2439574 - RNA, 19 nt, Artificial Sequence
  Description of Artificial Sequence: Synthetic oligonucleotide
ggcccacuaggaacuucuc

SEQ ID NO: 2439575 - RNA, 19 nt, Artificial Sequence
  Description of Artificial Sequence: Synthetic oligonucleotide
ccgcggagagccgggcugc

SEQ ID NO: 2439576 - RNA, 19 nt, Artificial Sequence
  Description of Artificial Sequence: Synthetic oligonucleotide
ggggcccacuaggaacuuc

SEQ ID NO: 2439577 - RNA, 19 nt, Artificial Sequence
  Description of Artificial Sequence: Synthetic oligonucleotide
gcggcuguaccugcgcacu

SEQ ID NO: 2439578 - RNA, 19 nt, Artificial Sequence
  Description of Artificial Sequence: Synthetic oligonucleotide
gcgcgcggagaaggcauac

SEQ ID NO: 2439579 - RNA, 19 nt, Artificial Sequence
  Description of Artificial Sequence: Synthetic oligonucleotide
accaagccacggggcccga

SEQ ID NO: 2439580 - RNA, 19 nt, Artificial Sequence
  Description of Artificial Sequence: Synthetic oligonucleotide
cacugggcgcuggcagaga

SEQ ID NO: 2439581 - RNA, 19 nt, Artificial Sequence
  Description of Artificial Sequence: Synthetic oligonucleotide
ccaggcucacgggcucccc

SEQ ID NO: 2439582 - RNA, 19 nt, Artificial Sequence
  Description of Artificial Sequence: Synthetic oligonucleotide
ggcacaccggagaccaaau

SEQ ID NO: 2439583 - RNA, 19 nt, Artificial Sequence
  Description of Artificial Sequence: Synthetic oligonucleotide
gaacaccgucggggcccac

SEQ ID NO: 2439584 - RNA, 19 nt, Artificial Sequence
  Description of Artificial Sequence: Synthetic oligonucleotide
gccacggggcccgaggcgu

SEQ ID NO: 2439585 - RNA, 19 nt, Artificial Sequence
  Description of Artificial Sequence: Synthetic oligonucleotide
gguguagucccgagucguu

SEQ ID NO: 2439586 - RNA, 19 nt, Artificial Sequence
  Description of Artificial Sequence: Synthetic oligonucleotide
gggcgcuggcagagacucc

SEQ ID NO: 2439587 - RNA, 19 nt, Artificial Sequence
  Description of Artificial Sequence: Synthetic oligonucleotide
ccaagccacggggcccgag

SEQ ID NO: 2439588 - RNA, 19 nt, Artificial Sequence
  Description of Artificial Sequence: Synthetic oligonucleotide
cggcuguaccugcgcacug

SEQ ID NO: 2439589 - RNA, 19 nt, Artificial Sequence
  Description of Artificial Sequence: Synthetic oligonucleotide
cggauauacuugagggaau

SEQ ID NO: 2439590 - RNA, 19 nt, Artificial Sequence
  Description of Artificial Sequence: Synthetic oligonucleotide
gcaccgccgcggagagccg

SEQ ID NO: 2439591 - RNA, 19 nt, Artificial Sequence
  Description of Artificial Sequence: Synthetic oligonucleotide
gcgcagugggaucgucacu

SEQ ID NO: 2439592 - RNA, 19 nt, Artificial Sequence
  Description of Artificial Sequence: Synthetic oligonucleotide
gcccgucagcgggcgcgcg

SEQ ID NO: 2439593 - RNA, 19 nt, Artificial Sequence
  Description of Artificial Sequence: Synthetic oligonucleotide
ccgucagcgggcgcgcgga

SEQ ID NO: 2439594 - RNA, 19 nt, Artificial Sequence
  Description of Artificial Sequence: Synthetic oligonucleotide
ggcgcgcggagaaggcaua

SEQ ID NO: 2439595 - RNA, 19 nt, Artificial Sequence
  Description of Artificial Sequence: Synthetic oligonucleotide
cgguguagucccgagucgu

SEQ ID NO: 2439596 - RNA, 19 nt, Artificial Sequence
  Description of Artificial Sequence: Synthetic oligonucleotide
ccccgcccgucagcgggcg

SEQ ID NO: 2439597 - RNA, 19 nt, Artificial Sequence
  Description of Artificial Sequence: Synthetic oligonucleotide
cgucggggcccacuaggaa

SEQ ID NO: 2439598 - RNA, 19 nt, Artificial Sequence
  Description of Artificial Sequence: Synthetic oligonucleotide
cgucagcgggcgcgcggag

SEQ ID NO: 2439599 - RNA, 19 nt, Artificial Sequence
  Description of Artificial Sequence: Synthetic oligonucleotide
cccgcccgucagcgggcgc

SEQ ID NO: 2439600 - RNA, 19 nt, Artificial Sequence
  Description of Artificial Sequence: Synthetic oligonucleotide
cgcgcggagaaggcauaca

SEQ ID NO: 2439601 - RNA, 19 nt, Artificial Sequence
  Description of Artificial Sequence: Synthetic oligonucleotide
ccaccgggucggauauacu

SEQ ID NO: 2439602 - RNA, 19 nt, Artificial Sequence
  Description of Artificial Sequence: Synthetic oligonucleotide
gcgccaucugagggaauuu

SEQ ID NO: 2439603 - RNA, 19 nt, Artificial Sequence
  Description of Artificial Sequence: Synthetic oligonucleotide
cagcgccaucugagggaau

SEQ ID NO: 2439604 - RNA, 19 nt, Artificial Sequence
  Description of Artificial Sequence: Synthetic oligonucleotide
cgcccgucagcgggcgcgc

SEQ ID NO: 2439605 - RNA, 19 nt, Artificial Sequence
  Description of Artificial Sequence: Synthetic oligonucleotide
ccgaggcguuucugcagau

SEQ ID NO: 2439606 - RNA, 19 nt, Artificial Sequence
  Description of Artificial Sequence: Synthetic oligonucleotide
cgggcgcgcggagaaggca

SEQ ID NO: 2439607 - RNA, 19 nt, Artificial Sequence
  Description of Artificial Sequence: Synthetic oligonucleotide
cacggggcccgaggcguuu

SEQ ID NO: 2439608 - RNA, 19 nt, Artificial Sequence
  Description of Artificial Sequence: Synthetic oligonucleotide
gcggcacaccggagaccaa

SEQ ID NO: 2439609 - RNA, 19 nt, Artificial Sequence
  Description of Artificial Sequence: Synthetic oligonucleotide
cgcggagagccgggcugca

SEQ ID NO: 2439610 - RNA, 19 nt, Artificial Sequence
  Description of Artificial Sequence: Synthetic oligonucleotide
ccacggggcccgaggcguu

SEQ ID NO: 2439611 - RNA, 19 nt, Artificial Sequence
  Description of Artificial Sequence: Synthetic oligonucleotide
cggggcccgaggcguuucu

SEQ ID NO: 2439612 - RNA, 19 nt, Artificial Sequence
  Description of Artificial Sequence: Synthetic oligonucleotide
ccccaccgggucggauaua

SEQ ID NO: 2439613 - RNA, 19 nt, Artificial Sequence
  Description of Artificial Sequence: Synthetic oligonucleotide
uucccaaugaggcagaccc

SEQ ID NO: 2439614 - RNA, 19 nt, Artificial Sequence
  Description of Artificial Sequence: Synthetic oligonucleotide
gaggaagugacucagggag

SEQ ID NO: 2439615 - RNA, 19 nt, Artificial Sequence
  Description of Artificial Sequence: Synthetic oligonucleotide
ugaagaaccagcagauucg

SEQ ID NO: 2439616 - RNA, 19 nt, Artificial Sequence
  Description of Artificial Sequence: Synthetic oligonucleotide
ucuggauuucccaaugagg

SEQ ID NO: 2439617 - RNA, 19 nt, Artificial Sequence
  Description of Artificial Sequence: Synthetic oligonucleotide
aacacgucugcagacaggc

SEQ ID NO: 2439618 - RNA, 19 nt, Artificial Sequence
  Description of Artificial Sequence: Synthetic oligonucleotide
guagaaggaauccugaggc

SEQ ID NO: 2439619 - RNA, 19 nt, Artificial Sequence
  Description of Artificial Sequence: Synthetic oligonucleotide
agagugauuaccaaucagc

SEQ ID NO: 2439620 - RNA, 19 nt, Artificial Sequence
  Description of Artificial Sequence: Synthetic oligonucleotide
cuggauuucccaaugaggc

SEQ ID NO: 2439621 - RNA, 19 nt, Artificial Sequence
  Description of Artificial Sequence: Synthetic oligonucleotide
agcacgaagucccagguac

SEQ ID NO: 2439622 - RNA, 19 nt, Artificial Sequence
  Description of Artificial Sequence: Synthetic oligonucleotide
aaugacaggggauccgagg

SEQ ID NO: 2439623 - RNA, 19 nt, Artificial Sequence
  Description of Artificial Sequence: Synthetic oligonucleotide
uucagaacuucaaacaccu

SEQ ID NO: 2439624 - RNA, 19 nt, Artificial Sequence
  Description of Artificial Sequence: Synthetic oligonucleotide
uuaccaaucagccaaucaa

SEQ ID NO: 2439625 - RNA, 19 nt, Artificial Sequence
  Description of Artificial Sequence: Synthetic oligonucleotide
cagggaaggaugaagaacc

SEQ ID NO: 2439626 - RNA, 19 nt, Artificial Sequence
  Description of Artificial Sequence: Synthetic oligonucleotide
aacucgcccauucagaacu

SEQ ID NO: 2439627 - RNA, 19 nt, Artificial Sequence
  Description of Artificial Sequence: Synthetic oligonucleotide
aguaucgccccacaaaguc

SEQ ID NO: 2439628 - RNA, 19 nt, Artificial Sequence
  Description of Artificial Sequence: Synthetic oligonucleotide
uauugugucuuccugcucu

SEQ ID NO: 2439629 - RNA, 19 nt, Artificial Sequence
  Description of Artificial Sequence: Synthetic oligonucleotide
ugugaacucgcccauucag

SEQ ID NO: 2439630 - RNA, 19 nt, Artificial Sequence
  Description of Artificial Sequence: Synthetic oligonucleotide
aguucuugccgccagucac

SEQ ID NO: 2439631 - RNA, 19 nt, Artificial Sequence
  Description of Artificial Sequence: Synthetic oligonucleotide
ucagccaaucaacaucagg

SEQ ID NO: 2439632 - RNA, 19 nt, Artificial Sequence
  Description of Artificial Sequence: Synthetic oligonucleotide
aagcguagcuccucaggcc

SEQ ID NO: 2439633 - RNA, 19 nt, Artificial Sequence
  Description of Artificial Sequence: Synthetic oligonucleotide
ucaaagaagcagcagggaa

SEQ ID NO: 2439634 - RNA, 19 nt, Artificial Sequence
  Description of Artificial Sequence: Synthetic oligonucleotide
aucacugaggaagugacuc

SEQ ID NO: 2439635 - RNA, 19 nt, Artificial Sequence
  Description of Artificial Sequence: Synthetic oligonucleotide
aaugaggcagacccgcuug

SEQ ID NO: 2439636 - RNA, 19 nt, Artificial Sequence
  Description of Artificial Sequence: Synthetic oligonucleotide
augguuauuccugaguagg

SEQ ID NO: 2439637 - RNA, 19 nt, Artificial Sequence
  Description of Artificial Sequence: Synthetic oligonucleotide
ucaagcguagcuccucagg

SEQ ID NO: 2439638 - RNA, 19 nt, Artificial Sequence
  Description of Artificial Sequence: Synthetic oligonucleotide
agauauguucuggauuucc

SEQ ID NO: 2439639 - RNA, 19 nt, Artificial Sequence
  Description of Artificial Sequence: Synthetic oligonucleotide
agaaccagcagauucgcgu

SEQ ID NO: 2439640 - RNA, 19 nt, Artificial Sequence
  Description of Artificial Sequence: Synthetic oligonucleotide
gugauuaccaaucagccaa

SEQ ID NO: 2439641 - RNA, 19 nt, Artificial Sequence
  Description of Artificial Sequence: Synthetic oligonucleotide
cuugguagaaggaauccug

SEQ ID NO: 2439642 - RNA, 19 nt, Artificial Sequence
  Description of Artificial Sequence: Synthetic oligonucleotide
uaggccuccacacuccccg

SEQ ID NO: 2439643 - RNA, 19 nt, Artificial Sequence
  Description of Artificial Sequence: Synthetic oligonucleotide
aucagagugauuaccaauc

SEQ ID NO: 2439644 - RNA, 19 nt, Artificial Sequence
  Description of Artificial Sequence: Synthetic oligonucleotide
ugguuauuccugaguaggg

SEQ ID NO: 2439645 - RNA, 19 nt, Artificial Sequence
  Description of Artificial Sequence: Synthetic oligonucleotide
gaugguuauuccugaguag

SEQ ID NO: 2439646 - RNA, 19 nt, Artificial Sequence
  Description of Artificial Sequence: Synthetic oligonucleotide
uuauuccugaguagggucu

SEQ ID NO: 2439647 - RNA, 19 nt, Artificial Sequence
  Description of Artificial Sequence: Synthetic oligonucleotide
ugaacacgucugcagacag

SEQ ID NO: 2439648 - RNA, 19 nt, Artificial Sequence
  Description of Artificial Sequence: Synthetic oligonucleotide
agauucgcgucuugaacac

SEQ ID NO: 2439649 - RNA, 19 nt, Artificial Sequence
  Description of Artificial Sequence: Synthetic oligonucleotide
gugaagaaccagcagauuc

SEQ ID NO: 2439650 - RNA, 19 nt, Artificial Sequence
  Description of Artificial Sequence: Synthetic oligonucleotide
gguagaaggaauccugagg

SEQ ID NO: 2439651 - RNA, 19 nt, Artificial Sequence
  Description of Artificial Sequence: Synthetic oligonucleotide
cugaguagggucuguaggc

SEQ ID NO: 2439652 - RNA, 19 nt, Artificial Sequence
  Description of Artificial Sequence: Synthetic oligonucleotide
agucaaagaagcagcaggg

SEQ ID NO: 2439653 - RNA, 19 nt, Artificial Sequence
  Description of Artificial Sequence: Synthetic oligonucleotide
aggggcaacaggcagcagg

SEQ ID NO: 2439654 - RNA, 19 nt, Artificial Sequence
  Description of Artificial Sequence: Synthetic oligonucleotide
uaccaaucagccaaucaac

SEQ ID NO: 2439655 - RNA, 19 nt, Artificial Sequence
  Description of Artificial Sequence: Synthetic oligonucleotide
agcuagagaucacugagga

SEQ ID NO: 2439656 - RNA, 19 nt, Artificial Sequence
  Description of Artificial Sequence: Synthetic oligonucleotide
agaucacugaggaagugac

SEQ ID NO: 2439657 - RNA, 19 nt, Artificial Sequence
  Description of Artificial Sequence: Synthetic oligonucleotide
caaucagccaaucaacauc

SEQ ID NO: 2439658 - RNA, 19 nt, Artificial Sequence
  Description of Artificial Sequence: Synthetic oligonucleotide
auuaccaaucagccaauca

SEQ ID NO: 2439659 - RNA, 19 nt, Artificial Sequence
  Description of Artificial Sequence: Synthetic oligonucleotide
agaaggaauccugaggcag

SEQ ID NO: 2439660 - RNA, 19 nt, Artificial Sequence
  Description of Artificial Sequence: Synthetic oligonucleotide
gauauguucuggauuuccc

SEQ ID NO: 2439661 - RNA, 19 nt, Artificial Sequence
  Description of Artificial Sequence: Synthetic oligonucleotide
agacccgcuugguagaagg

SEQ ID NO: 2439662 - RNA, 19 nt, Artificial Sequence
  Description of Artificial Sequence: Synthetic oligonucleotide
auauguucuggauuuccca

SEQ ID NO: 2439663 - RNA, 19 nt, Artificial Sequence
  Description of Artificial Sequence: Synthetic oligonucleotide
uugaggucugggucaagcg

SEQ ID NO: 2439664 - RNA, 19 nt, Artificial Sequence
  Description of Artificial Sequence: Synthetic oligonucleotide
aaccggcagguguaggagg

SEQ ID NO: 2439665 - RNA, 19 nt, Artificial Sequence
  Description of Artificial Sequence: Synthetic oligonucleotide
cuggguucaguucugcagc

SEQ ID NO: 2439666 - RNA, 19 nt, Artificial Sequence
  Description of Artificial Sequence: Synthetic oligonucleotide
acggaugugaacucgccca

SEQ ID NO: 2439667 - RNA, 19 nt, Artificial Sequence
  Description of Artificial Sequence: Synthetic oligonucleotide
ugaggucugggucaagcgu

SEQ ID NO: 2439668 - RNA, 19 nt, Artificial Sequence
  Description of Artificial Sequence: Synthetic oligonucleotide
ugguagaaggaauccugag

SEQ ID NO: 2439669 - RNA, 19 nt, Artificial Sequence
  Description of Artificial Sequence: Synthetic oligonucleotide
cuucauuccaggucuucag

SEQ ID NO: 2439670 - RNA, 19 nt, Artificial Sequence
  Description of Artificial Sequence: Synthetic oligonucleotide
guuauuccugaguaggguc

SEQ ID NO: 2439671 - RNA, 19 nt, Artificial Sequence
  Description of Artificial Sequence: Synthetic oligonucleotide
ugcaguaucgccccacaaa

SEQ ID NO: 2439672 - RNA, 19 nt, Artificial Sequence
  Description of Artificial Sequence: Synthetic oligonucleotide
ugaacucgcccauucagaa

SEQ ID NO: 2439673 - RNA, 19 nt, Artificial Sequence
  Description of Artificial Sequence: Synthetic oligonucleotide
gaugugaacucgcccauuc

SEQ ID NO: 2439674 - RNA, 19 nt, Artificial Sequence
  Description of Artificial Sequence: Synthetic oligonucleotide
aggugcauguccccucacc

SEQ ID NO: 2439675 - RNA, 19 nt, Artificial Sequence
  Description of Artificial Sequence: Synthetic oligonucleotide
aaggaauccugaggcaguc

SEQ ID NO: 2439676 - RNA, 19 nt, Artificial Sequence
  Description of Artificial Sequence: Synthetic oligonucleotide
cuugaacacgucugcagac

SEQ ID NO: 2439677 - RNA, 19 nt, Artificial Sequence
  Description of Artificial Sequence: Synthetic oligonucleotide
agcucaucagagugauuac

SEQ ID NO: 2439678 - RNA, 19 nt, Artificial Sequence
  Description of Artificial Sequence: Synthetic oligonucleotide
uaucgccccacaaagucaa

SEQ ID NO: 2439679 - RNA, 19 nt, Artificial Sequence
  Description of Artificial Sequence: Synthetic oligonucleotide
agcaucgugggcagcagcc

SEQ ID NO: 2439680 - RNA, 19 nt, Artificial Sequence
  Description of Artificial Sequence: Synthetic oligonucleotide
aaaggggcaacaggcagca

SEQ ID NO: 2439681 - RNA, 19 nt, Artificial Sequence
  Description of Artificial Sequence: Synthetic oligonucleotide
acaccugaugguuauuccu

SEQ ID NO: 2439682 - RNA, 19 nt, Artificial Sequence
  Description of Artificial Sequence: Synthetic oligonucleotide
cugggucaagcguagcucc

SEQ ID NO: 2439683 - RNA, 19 nt, Artificial Sequence
  Description of Artificial Sequence: Synthetic oligonucleotide
gcaguaucgccccacaaag

SEQ ID NO: 2439684 - RNA, 19 nt, Artificial Sequence
  Description of Artificial Sequence: Synthetic oligonucleotide
uucugccagagaaaggcuc

SEQ ID NO: 2439685 - RNA, 19 nt, Artificial Sequence
  Description of Artificial Sequence: Synthetic oligonucleotide
ggaaggaugaagaaccggc

SEQ ID NO: 2439686 - RNA, 19 nt, Artificial Sequence
  Description of Artificial Sequence: Synthetic oligonucleotide
uccugcauguggaagccac

SEQ ID NO: 2439687 - RNA, 19 nt, Artificial Sequence
  Description of Artificial Sequence: Synthetic oligonucleotide
gagcucaucagagugauua

SEQ ID NO: 2439688 - RNA, 19 nt, Artificial Sequence
  Description of Artificial Sequence: Synthetic oligonucleotide
cagauucgcgucuugaaca

SEQ ID NO: 2439689 - RNA, 19 nt, Artificial Sequence
  Description of Artificial Sequence: Synthetic oligonucleotide
gaagaaccagcagauucgc

SEQ ID NO: 2439690 - RNA, 19 nt, Artificial Sequence
  Description of Artificial Sequence: Synthetic oligonucleotide
ugcaaugacaggggauccg

SEQ ID NO: 2439691 - RNA, 19 nt, Artificial Sequence
  Description of Artificial Sequence: Synthetic oligonucleotide
caccugaugguuauuccug

SEQ ID NO: 2439692 - RNA, 19 nt, Artificial Sequence
  Description of Artificial Sequence: Synthetic oligonucleotide
agaaccggcagguguagga

SEQ ID NO: 2439693 - RNA, 19 nt, Artificial Sequence
  Description of Artificial Sequence: Synthetic oligonucleotide
ugaguagggucuguaggcc

SEQ ID NO: 2439694 - RNA, 19 nt, Artificial Sequence
  Description of Artificial Sequence: Synthetic oligonucleotide
gacucagggagccugucuc

SEQ ID NO: 2439695 - RNA, 19 nt, Artificial Sequence
  Description of Artificial Sequence: Synthetic oligonucleotide
uguggagguaccguguccu

SEQ ID NO: 2439696 - RNA, 19 nt, Artificial Sequence
  Description of Artificial Sequence: Synthetic oligonucleotide
aaccucccagcacgaaguc

SEQ ID NO: 2439697 - RNA, 19 nt, Artificial Sequence
  Description of Artificial Sequence: Synthetic oligonucleotide
aggaccuggcugcaaugac

SEQ ID NO: 2439698 - RNA, 19 nt, Artificial Sequence
  Description of Artificial Sequence: Synthetic oligonucleotide
gugagugaagaaccagcag

SEQ ID NO: 2439699 - RNA, 19 nt, Artificial Sequence
  Description of Artificial Sequence: Synthetic oligonucleotide
gaaccagcagauucgcguc

SEQ ID NO: 2439700 - RNA, 19 nt, Artificial Sequence
  Description of Artificial Sequence: Synthetic oligonucleotide
ucacggaugugaacucgcc

SEQ ID NO: 2439701 - RNA, 19 nt, Artificial Sequence
  Description of Artificial Sequence: Synthetic oligonucleotide
cacgucugcagacaggcuc

SEQ ID NO: 2439702 - RNA, 19 nt, Artificial Sequence
  Description of Artificial Sequence: Synthetic oligonucleotide
acgucugcagacaggcucc

SEQ ID NO: 2439703 - RNA, 19 nt, Artificial Sequence
  Description of Artificial Sequence: Synthetic oligonucleotide
gcagaaggcagauauguuc

SEQ ID NO: 2439704 - RNA, 19 nt, Artificial Sequence
  Description of Artificial Sequence: Synthetic oligonucleotide
uguaggccuccacacuccc

SEQ ID NO: 2439705 - RNA, 19 nt, Artificial Sequence
  Description of Artificial Sequence: Synthetic oligonucleotide
agaacuucaaacaccugau

SEQ ID NO: 2439706 - RNA, 19 nt, Artificial Sequence
  Description of Artificial Sequence: Synthetic oligonucleotide
aagucccagguaccucccg

SEQ ID NO: 2439707 - RNA, 19 nt, Artificial Sequence
  Description of Artificial Sequence: Synthetic oligonucleotide
ucgcccauucagaacuuca

SEQ ID NO: 2439708 - RNA, 19 nt, Artificial Sequence
  Description of Artificial Sequence: Synthetic oligonucleotide
aggcccaugggcaaagggg

SEQ ID NO: 2439709 - RNA, 19 nt, Artificial Sequence
  Description of Artificial Sequence: Synthetic oligonucleotide
uugaacacgucugcagaca

SEQ ID NO: 2439710 - RNA, 19 nt, Artificial Sequence
  Description of Artificial Sequence: Synthetic oligonucleotide
cuccgcuugacuucuggug

SEQ ID NO: 2439711 - RNA, 19 nt, Artificial Sequence
  Description of Artificial Sequence: Synthetic oligonucleotide
aagaaccagcagauucgcg

SEQ ID NO: 2439712 - RNA, 19 nt, Artificial Sequence
  Description of Artificial Sequence: Synthetic oligonucleotide
aaggugcauguccccucac

SEQ ID NO: 2439713 - RNA, 19 nt, Artificial Sequence
  Description of Artificial Sequence: Synthetic oligonucleotide
agucacggaugugaacucg

SEQ ID NO: 2439714 - RNA, 19 nt, Artificial Sequence
  Description of Artificial Sequence: Synthetic oligonucleotide
augaggcagacccgcuugg

SEQ ID NO: 2439715 - RNA, 19 nt, Artificial Sequence
  Description of Artificial Sequence: Synthetic oligonucleotide
agaaaggcucccuccuuca

SEQ ID NO: 2439716 - RNA, 19 nt, Artificial Sequence
  Description of Artificial Sequence: Synthetic oligonucleotide
gagaucacugaggaaguga

SEQ ID NO: 2439717 - RNA, 19 nt, Artificial Sequence
  Description of Artificial Sequence: Synthetic oligonucleotide
ugauuaccaaucagccaau

SEQ ID NO: 2439718 - RNA, 19 nt, Artificial Sequence
  Description of Artificial Sequence: Synthetic oligonucleotide
ucugggucaagcguagcuc

SEQ ID NO: 2439719 - RNA, 19 nt, Artificial Sequence
  Description of Artificial Sequence: Synthetic oligonucleotide
ucgcgucuugaacacgucu

SEQ ID NO: 2439720 - RNA, 19 nt, Artificial Sequence
  Description of Artificial Sequence: Synthetic oligonucleotide
uucuugccgccagucacgg

SEQ ID NO: 2439721 - RNA, 19 nt, Artificial Sequence
  Description of Artificial Sequence: Synthetic oligonucleotide
cucgggguggcucugucug

SEQ ID NO: 2439722 - RNA, 19 nt, Artificial Sequence
  Description of Artificial Sequence: Synthetic oligonucleotide
cacggaugugaacucgccc

SEQ ID NO: 2439723 - RNA, 19 nt, Artificial Sequence
  Description of Artificial Sequence: Synthetic oligonucleotide
accugaugguuauuccuga

SEQ ID NO: 2439724 - RNA, 19 nt, Artificial Sequence
  Description of Artificial Sequence: Synthetic oligonucleotide
aagaaccggcagguguagg

SEQ ID NO: 2439725 - RNA, 19 nt, Artificial Sequence
  Description of Artificial Sequence: Synthetic oligonucleotide
cacuucugccagagaaagg

SEQ ID NO: 2439726 - RNA, 19 nt, Artificial Sequence
  Description of Artificial Sequence: Synthetic oligonucleotide
aguagggucuguaggccuc

SEQ ID NO: 2439727 - RNA, 19 nt, Artificial Sequence
  Description of Artificial Sequence: Synthetic oligonucleotide
agcagauucgcgucuugaa

SEQ ID NO: 2439728 - RNA, 19 nt, Artificial Sequence
  Description of Artificial Sequence: Synthetic oligonucleotide
accaaucagccaaucaaca

SEQ ID NO: 2439729 - RNA, 19 nt, Artificial Sequence
  Description of Artificial Sequence: Synthetic oligonucleotide
cacugaggaagugacucag

SEQ ID NO: 2439730 - RNA, 19 nt, Artificial Sequence
  Description of Artificial Sequence: Synthetic oligonucleotide
gauucgcgucuugaacacg

SEQ ID NO: 2439731 - RNA, 19 nt, Artificial Sequence
  Description of Artificial Sequence: Synthetic oligonucleotide
gaacucgcccauucagaac

SEQ ID NO: 2439732 - RNA, 19 nt, Artificial Sequence
  Description of Artificial Sequence: Synthetic oligonucleotide
ucagggagccugucucugc

SEQ ID NO: 2439733 - RNA, 19 nt, Artificial Sequence
  Description of Artificial Sequence: Synthetic oligonucleotide
ucgccccacaaagucaaag

SEQ ID NO: 2439734 - RNA, 19 nt, Artificial Sequence
  Description of Artificial Sequence: Synthetic oligonucleotide
ggaagugacucagggagcc

SEQ ID NO: 2439735 - RNA, 19 nt, Artificial Sequence
  Description of Artificial Sequence: Synthetic oligonucleotide
gguaccucccgguauugug

SEQ ID NO: 2439736 - RNA, 19 nt, Artificial Sequence
  Description of Artificial Sequence: Synthetic oligonucleotide
auucgcgucuugaacacgu

SEQ ID NO: 2439737 - RNA, 19 nt, Artificial Sequence
  Description of Artificial Sequence: Synthetic oligonucleotide
cacacuccccgcuuccagc

SEQ ID NO: 2439738 - RNA, 19 nt, Artificial Sequence
  Description of Artificial Sequence: Synthetic oligonucleotide
auuucccaaugaggcagac

SEQ ID NO: 2439739 - RNA, 19 nt, Artificial Sequence
  Description of Artificial Sequence: Synthetic oligonucleotide
gugcauguccccucaccag

SEQ ID NO: 2439740 - RNA, 19 nt, Artificial Sequence
  Description of Artificial Sequence: Synthetic oligonucleotide
agggaaggaugaagaaccg

SEQ ID NO: 2439741 - RNA, 19 nt, Artificial Sequence
  Description of Artificial Sequence: Synthetic oligonucleotide
augugaacucgcccauuca

SEQ ID NO: 2439742 - RNA, 19 nt, Artificial Sequence
  Description of Artificial Sequence: Synthetic oligonucleotide
gcagauucgcgucuugaac

SEQ ID NO: 2439743 - RNA, 19 nt, Artificial Sequence
  Description of Artificial Sequence: Synthetic oligonucleotide
caggcccaugggcaaaggg

SEQ ID NO: 2439744 - RNA, 19 nt, Artificial Sequence
  Description of Artificial Sequence: Synthetic oligonucleotide
aggcagauauguucuggau

SEQ ID NO: 2439745 - RNA, 19 nt, Artificial Sequence
  Description of Artificial Sequence: Synthetic oligonucleotide
acacuccccgcuuccagcu

SEQ ID NO: 2439746 - RNA, 19 nt, Artificial Sequence
  Description of Artificial Sequence: Synthetic oligonucleotide
cucugcagaaggcagauau

SEQ ID NO: 2439747 - RNA, 19 nt, Artificial Sequence
  Description of Artificial Sequence: Synthetic oligonucleotide
gauccgaggggagugagcu

SEQ ID NO: 2439748 - RNA, 19 nt, Artificial Sequence
  Description of Artificial Sequence: Synthetic oligonucleotide
guucuggauuucccaauga

SEQ ID NO: 2439749 - RNA, 19 nt, Artificial Sequence
  Description of Artificial Sequence: Synthetic oligonucleotide
cuggguugcagaaggugca

SEQ ID NO: 2439750 - RNA, 19 nt, Artificial Sequence
  Description of Artificial Sequence: Synthetic oligonucleotide
ugggucaagcguagcuccu

SEQ ID NO: 2439751 - RNA, 19 nt, Artificial Sequence
  Description of Artificial Sequence: Synthetic oligonucleotide
ggugcauguccccucacca

SEQ ID NO: 2439752 - RNA, 19 nt, Artificial Sequence
  Description of Artificial Sequence: Synthetic oligonucleotide
gauuaccaaucagccaauc

SEQ ID NO: 2439753 - RNA, 19 nt, Artificial Sequence
  Description of Artificial Sequence: Synthetic oligonucleotide
guaccguguccucugcuca

SEQ ID NO: 2439754 - RNA, 19 nt, Artificial Sequence
  Description of Artificial Sequence: Synthetic oligonucleotide
gucaagcguagcuccucag

SEQ ID NO: 2439755 - RNA, 19 nt, Artificial Sequence
  Description of Artificial Sequence: Synthetic oligonucleotide
agagaucacugaggaagug

SEQ ID NO: 2439756 - RNA, 19 nt, Artificial Sequence
  Description of Artificial Sequence: Synthetic oligonucleotide
gggaaggaugaagaaccgg

SEQ ID NO: 2439757 - RNA, 19 nt, Artificial Sequence
  Description of Artificial Sequence: Synthetic oligonucleotide
ggagguaccguguccucug

SEQ ID NO: 2439758 - RNA, 19 nt, Artificial Sequence
  Description of Artificial Sequence: Synthetic oligonucleotide
gguggcuuuuccuucugca

SEQ ID NO: 2439759 - RNA, 19 nt, Artificial Sequence
  Description of Artificial Sequence: Synthetic oligonucleotide
caucgugggcagcagccug

SEQ ID NO: 2439760 - RNA, 19 nt, Artificial Sequence
  Description of Artificial Sequence: Synthetic oligonucleotide
cugcaaugacaggggaucc

SEQ ID NO: 2439761 - RNA, 19 nt, Artificial Sequence
  Description of Artificial Sequence: Synthetic oligonucleotide
uugccgccagucacggaug

SEQ ID NO: 2439762 - RNA, 19 nt, Artificial Sequence
  Description of Artificial Sequence: Synthetic oligonucleotide
uaccucccgguauuguguc

SEQ ID NO: 2439763 - RNA, 19 nt, Artificial Sequence
  Description of Artificial Sequence: Synthetic oligonucleotide
aucgugggcagcagccugg

SEQ ID NO: 2439764 - RNA, 19 nt, Artificial Sequence
  Description of Artificial Sequence: Synthetic oligonucleotide
cgaagucccagguaccucc

SEQ ID NO: 2439765 - RNA, 19 nt, Artificial Sequence
  Description of Artificial Sequence: Synthetic oligonucleotide
gaagucccagguaccuccc

SEQ ID NO: 2439766 - RNA, 19 nt, Artificial Sequence
  Description of Artificial Sequence: Synthetic oligonucleotide
agcagccuggguugcagaa

SEQ ID NO: 2439767 - RNA, 19 nt, Artificial Sequence
  Description of Artificial Sequence: Synthetic oligonucleotide
acgaagucccagguaccuc

SEQ ID NO: 2439768 - RNA, 19 nt, Artificial Sequence
  Description of Artificial Sequence: Synthetic oligonucleotide
gucaaagaagcagcaggga

SEQ ID NO: 2439769 - RNA, 19 nt, Artificial Sequence
  Description of Artificial Sequence: Synthetic oligonucleotide
agacaggcuccgcuugacu

SEQ ID NO: 2439770 - RNA, 19 nt, Artificial Sequence
  Description of Artificial Sequence: Synthetic oligonucleotide
gagguaccguguccucugc

SEQ ID NO: 2439771 - RNA, 19 nt, Artificial Sequence
  Description of Artificial Sequence: Synthetic oligonucleotide
gguaccguguccucugcuc

SEQ ID NO: 2439772 - RNA, 19 nt, Artificial Sequence
  Description of Artificial Sequence: Synthetic oligonucleotide
uccucaggcccaugggcaa

SEQ ID NO: 2439773 - RNA, 19 nt, Artificial Sequence
  Description of Artificial Sequence: Synthetic oligonucleotide
ucucgggguggcucugucu

SEQ ID NO: 2439774 - RNA, 19 nt, Artificial Sequence
  Description of Artificial Sequence: Synthetic oligonucleotide
gugaacucgcccauucaga

SEQ ID NO: 2439775 - RNA, 19 nt, Artificial Sequence
  Description of Artificial Sequence: Synthetic oligonucleotide
gaggucugggucaagcgua

SEQ ID NO: 2439776 - RNA, 19 nt, Artificial Sequence
  Description of Artificial Sequence: Synthetic oligonucleotide
guaucgccccacaaaguca

SEQ ID NO: 2439777 - RNA, 19 nt, Artificial Sequence
  Description of Artificial Sequence: Synthetic oligonucleotide
guauugugucuuccugcuc

SEQ ID NO: 2439778 - RNA, 19 nt, Artificial Sequence
  Description of Artificial Sequence: Synthetic oligonucleotide
aggggauccgaggggagug

SEQ ID NO: 2439779 - RNA, 19 nt, Artificial Sequence
  Description of Artificial Sequence: Synthetic oligonucleotide
gcgucuugaacacgucugc

SEQ ID NO: 2439780 - RNA, 19 nt, Artificial Sequence
  Description of Artificial Sequence: Synthetic oligonucleotide
uucgcgucuugaacacguc

SEQ ID NO: 2439781 - RNA, 19 nt, Artificial Sequence
  Description of Artificial Sequence: Synthetic oligonucleotide
cauccagaccucugcagaa

SEQ ID NO: 2439782 - RNA, 19 nt, Artificial Sequence
  Description of Artificial Sequence: Synthetic oligonucleotide
cuugccgccagucacggau

SEQ ID NO: 2439783 - RNA, 19 nt, Artificial Sequence
  Description of Artificial Sequence: Synthetic oligonucleotide
gcaacaggcagcaggcagc

SEQ ID NO: 2439784 - RNA, 19 nt, Artificial Sequence
  Description of Artificial Sequence: Synthetic oligonucleotide
ccaaccucccagcacgaag

SEQ ID NO: 2439785 - RNA, 19 nt, Artificial Sequence
  Description of Artificial Sequence: Synthetic oligonucleotide
cagaccucugcagaaggca

SEQ ID NO: 2439786 - RNA, 19 nt, Artificial Sequence
  Description of Artificial Sequence: Synthetic oligonucleotide
ucccgguauugugucuucc

SEQ ID NO: 2439787 - RNA, 19 nt, Artificial Sequence
  Description of Artificial Sequence: Synthetic oligonucleotide
gaguagggucuguaggccu

SEQ ID NO: 2439788 - RNA, 19 nt, Artificial Sequence
  Description of Artificial Sequence: Synthetic oligonucleotide
cgguauugugucuuccugc

SEQ ID NO: 2439789 - RNA, 19 nt, Artificial Sequence
  Description of Artificial Sequence: Synthetic oligonucleotide
ggggcaacaggcagcaggc

SEQ ID NO: 2439790 - RNA, 19 nt, Artificial Sequence
  Description of Artificial Sequence: Synthetic oligonucleotide
ucgugggcagcagccuggg

SEQ ID NO: 2439791 - RNA, 19 nt, Artificial Sequence
  Description of Artificial Sequence: Synthetic oligonucleotide
cauuccaggucuucagacu

SEQ ID NO: 2439792 - RNA, 19 nt, Artificial Sequence
  Description of Artificial Sequence: Synthetic oligonucleotide
ugccgccagucacggaugu

SEQ ID NO: 2439793 - RNA, 19 nt, Artificial Sequence
  Description of Artificial Sequence: Synthetic oligonucleotide
cucaccaggugggcucucg

SEQ ID NO: 2439794 - RNA, 19 nt, Artificial Sequence
  Description of Artificial Sequence: Synthetic oligonucleotide
cccaaugaggcagacccgc

SEQ ID NO: 2439795 - RNA, 19 nt, Artificial Sequence
  Description of Artificial Sequence: Synthetic oligonucleotide
uaccguguccucugcucau

SEQ ID NO: 2439796 - RNA, 19 nt, Artificial Sequence
  Description of Artificial Sequence: Synthetic oligonucleotide
aggucugggucaagcguag

SEQ ID NO: 2439797 - RNA, 19 nt, Artificial Sequence
  Description of Artificial Sequence: Synthetic oligonucleotide
accguguccucugcucauc

SEQ ID NO: 2439798 - RNA, 19 nt, Artificial Sequence
  Description of Artificial Sequence: Synthetic oligonucleotide
gcagaaggugcaugucccc

SEQ ID NO: 2439799 - RNA, 19 nt, Artificial Sequence
  Description of Artificial Sequence: Synthetic oligonucleotide
guagggucuguaggccucc

SEQ ID NO: 2439800 - RNA, 19 nt, Artificial Sequence
  Description of Artificial Sequence: Synthetic oligonucleotide
accucugcagaaggcagau

SEQ ID NO: 2439801 - RNA, 19 nt, Artificial Sequence
  Description of Artificial Sequence: Synthetic oligonucleotide
cucaggcccaugggcaaag

SEQ ID NO: 2439802 - RNA, 19 nt, Artificial Sequence
  Description of Artificial Sequence: Synthetic oligonucleotide
ucccagcacgaagucccag

SEQ ID NO: 2439803 - RNA, 19 nt, Artificial Sequence
  Description of Artificial Sequence: Synthetic oligonucleotide
ugggcucucgggguggcuc

SEQ ID NO: 2439804 - RNA, 19 nt, Artificial Sequence
  Description of Artificial Sequence: Synthetic oligonucleotide
acccgcuugguagaaggaa

SEQ ID NO: 2439805 - RNA, 19 nt, Artificial Sequence
  Description of Artificial Sequence: Synthetic oligonucleotide
uuccugaguagggucugua

SEQ ID NO: 2439806 - RNA, 19 nt, Artificial Sequence
  Description of Artificial Sequence: Synthetic oligonucleotide
gccccacaaagucaaagaa

SEQ ID NO: 2439807 - RNA, 19 nt, Artificial Sequence
  Description of Artificial Sequence: Synthetic oligonucleotide
ggucaagcguagcuccuca

SEQ ID NO: 2439808 - RNA, 19 nt, Artificial Sequence
  Description of Artificial Sequence: Synthetic oligonucleotide
gccgccugcaguaucgccc

SEQ ID NO: 2439809 - RNA, 19 nt, Artificial Sequence
  Description of Artificial Sequence: Synthetic oligonucleotide
cgcgucuugaacacgucug

SEQ ID NO: 2439810 - RNA, 19 nt, Artificial Sequence
  Description of Artificial Sequence: Synthetic oligonucleotide
ccgguauugugucuuccug

SEQ ID NO: 2439811 - RNA, 19 nt, Artificial Sequence
  Description of Artificial Sequence: Synthetic oligonucleotide
gggagccugucucugcuuc

SEQ ID NO: 2439812 - RNA, 19 nt, Artificial Sequence
  Description of Artificial Sequence: Synthetic oligonucleotide
ggcagauauguucuggauu

SEQ ID NO: 2439813 - RNA, 19 nt, Artificial Sequence
  Description of Artificial Sequence: Synthetic oligonucleotide
ucugucugcuguggaggua

SEQ ID NO: 2439814 - RNA, 19 nt, Artificial Sequence
  Description of Artificial Sequence: Synthetic oligonucleotide
accucccgguauugugucu

SEQ ID NO: 2439815 - RNA, 19 nt, Artificial Sequence
  Description of Artificial Sequence: Synthetic oligonucleotide
guaggccuccacacucccc

SEQ ID NO: 2439816 - RNA, 19 nt, Artificial Sequence
  Description of Artificial Sequence: Synthetic oligonucleotide
gaucacugaggaagugacu

SEQ ID NO: 2439817 - RNA, 19 nt, Artificial Sequence
  Description of Artificial Sequence: Synthetic oligonucleotide
gguuauuccugaguagggu

SEQ ID NO: 2439818 - RNA, 19 nt, Artificial Sequence
  Description of Artificial Sequence: Synthetic oligonucleotide
guguccucugcucauccau

SEQ ID NO: 2439819 - RNA, 19 nt, Artificial Sequence
  Description of Artificial Sequence: Synthetic oligonucleotide
cucccgguauugugucuuc

SEQ ID NO: 2439820 - RNA, 19 nt, Artificial Sequence
  Description of Artificial Sequence: Synthetic oligonucleotide
ucuugccgccagucacgga

SEQ ID NO: 2439821 - RNA, 19 nt, Artificial Sequence
  Description of Artificial Sequence: Synthetic oligonucleotide
aggcagcgcacagccauca

SEQ ID NO: 2439822 - RNA, 19 nt, Artificial Sequence
  Description of Artificial Sequence: Synthetic oligonucleotide
ccgcuugguagaaggaauc

SEQ ID NO: 2439823 - RNA, 19 nt, Artificial Sequence
  Description of Artificial Sequence: Synthetic oligonucleotide
guaccucccgguauugugu

SEQ ID NO: 2439824 - RNA, 19 nt, Artificial Sequence
  Description of Artificial Sequence: Synthetic oligonucleotide
guggagguaccguguccuc

SEQ ID NO: 2439825 - RNA, 19 nt, Artificial Sequence
  Description of Artificial Sequence: Synthetic oligonucleotide
ccuccuucauuccaggucu

SEQ ID NO: 2439826 - RNA, 19 nt, Artificial Sequence
  Description of Artificial Sequence: Synthetic oligonucleotide
ccagucacggaugugaacu

SEQ ID NO: 2439827 - RNA, 19 nt, Artificial Sequence
  Description of Artificial Sequence: Synthetic oligonucleotide
ggcaaaggggcaacaggca

SEQ ID NO: 2439828 - RNA, 19 nt, Artificial Sequence
  Description of Artificial Sequence: Synthetic oligonucleotide
gaaaggcucccuccuucau

SEQ ID NO: 2439829 - RNA, 19 nt, Artificial Sequence
  Description of Artificial Sequence: Synthetic oligonucleotide
agguaccucccgguauugu

SEQ ID NO: 2439830 - RNA, 19 nt, Artificial Sequence
  Description of Artificial Sequence: Synthetic oligonucleotide
cagcagauucgcgucuuga

SEQ ID NO: 2439831 - RNA, 19 nt, Artificial Sequence
  Description of Artificial Sequence: Synthetic oligonucleotide
ggcagacccgcuugguaga

SEQ ID NO: 2439832 - RNA, 19 nt, Artificial Sequence
  Description of Artificial Sequence: Synthetic oligonucleotide
gacccgcuugguagaagga

SEQ ID NO: 2439833 - RNA, 19 nt, Artificial Sequence
  Description of Artificial Sequence: Synthetic oligonucleotide
gcuagagaucacugaggaa

SEQ ID NO: 2439834 - RNA, 19 nt, Artificial Sequence
  Description of Artificial Sequence: Synthetic oligonucleotide
gccuggguugcagaaggug

SEQ ID NO: 2439835 - RNA, 19 nt, Artificial Sequence
  Description of Artificial Sequence: Synthetic oligonucleotide
ccgccugcaguaucgcccc

SEQ ID NO: 2439836 - RNA, 19 nt, Artificial Sequence
  Description of Artificial Sequence: Synthetic oligonucleotide
ccgcuugacuucugguggc

SEQ ID NO: 2439837 - RNA, 19 nt, Artificial Sequence
  Description of Artificial Sequence: Synthetic oligonucleotide
cagguaccucccgguauug

SEQ ID NO: 2439838 - RNA, 19 nt, Artificial Sequence
  Description of Artificial Sequence: Synthetic oligonucleotide
cucgcccauucagaacuuc

SEQ ID NO: 2439839 - RNA, 19 nt, Artificial Sequence
  Description of Artificial Sequence: Synthetic oligonucleotide
cucucgggguggcucuguc

SEQ ID NO: 2439840 - RNA, 19 nt, Artificial Sequence
  Description of Artificial Sequence: Synthetic oligonucleotide
cagacccgcuugguagaag

SEQ ID NO: 2439841 - RNA, 19 nt, Artificial Sequence
  Description of Artificial Sequence: Synthetic oligonucleotide
cgcuugguagaaggaaucc

SEQ ID NO: 2439842 - RNA, 19 nt, Artificial Sequence
  Description of Artificial Sequence: Synthetic oligonucleotide
accagcagauucgcgucuu

SEQ ID NO: 2439843 - RNA, 19 nt, Artificial Sequence
  Description of Artificial Sequence: Synthetic oligonucleotide
caguaucgccccacaaagu

SEQ ID NO: 2439844 - RNA, 19 nt, Artificial Sequence
  Description of Artificial Sequence: Synthetic oligonucleotide
uaggaggaccuggcugcaa

SEQ ID NO: 2439845 - RNA, 19 nt, Artificial Sequence
  Description of Artificial Sequence: Synthetic oligonucleotide
ccguguccucugcucaucc

SEQ ID NO: 2439846 - RNA, 19 nt, Artificial Sequence
  Description of Artificial Sequence: Synthetic oligonucleotide
gcacgaagucccagguacc

SEQ ID NO: 2439847 - RNA, 19 nt, Artificial Sequence
  Description of Artificial Sequence: Synthetic oligonucleotide
gggauccgaggggagugag

SEQ ID NO: 2439848 - RNA, 19 nt, Artificial Sequence
  Description of Artificial Sequence: Synthetic oligonucleotide
guaggaggaccuggcugca

SEQ ID NO: 2439849 - RNA, 19 nt, Artificial Sequence
  Description of Artificial Sequence: Synthetic oligonucleotide
agggagccugucucugcuu

SEQ ID NO: 2439850 - RNA, 19 nt, Artificial Sequence
  Description of Artificial Sequence: Synthetic oligonucleotide
ggauccgaggggagugagc

SEQ ID NO: 2439851 - RNA, 19 nt, Artificial Sequence
  Description of Artificial Sequence: Synthetic oligonucleotide
cacuccccgcuuccagcug

SEQ ID NO: 2439852 - RNA, 19 nt, Artificial Sequence
  Description of Artificial Sequence: Synthetic oligonucleotide
cugcaguaucgccccacaa

SEQ ID NO: 2439853 - RNA, 19 nt, Artificial Sequence
  Description of Artificial Sequence: Synthetic oligonucleotide
gcuugguagaaggaauccu

SEQ ID NO: 2439854 - RNA, 19 nt, Artificial Sequence
  Description of Artificial Sequence: Synthetic oligonucleotide
cacgaagucccagguaccu

SEQ ID NO: 2439855 - RNA, 19 nt, Artificial Sequence
  Description of Artificial Sequence: Synthetic oligonucleotide
cagaaggugcauguccccu

SEQ ID NO: 2439856 - RNA, 19 nt, Artificial Sequence
  Description of Artificial Sequence: Synthetic oligonucleotide
acacgucugcagacaggcu

SEQ ID NO: 2439857 - RNA, 19 nt, Artificial Sequence
  Description of Artificial Sequence: Synthetic oligonucleotide
gaagugacucagggagccu

SEQ ID NO: 2439858 - RNA, 19 nt, Artificial Sequence
  Description of Artificial Sequence: Synthetic oligonucleotide
ccaaucagccaaucaacau

SEQ ID NO: 2439859 - RNA, 19 nt, Artificial Sequence
  Description of Artificial Sequence: Synthetic oligonucleotide
agccuggguugcagaaggu

SEQ ID NO: 2439860 - RNA, 19 nt, Artificial Sequence
  Description of Artificial Sequence: Synthetic oligonucleotide
ccgccagucacggauguga

SEQ ID NO: 2439861 - RNA, 19 nt, Artificial Sequence
  Description of Artificial Sequence: Synthetic oligonucleotide
gggucaagcguagcuccuc

SEQ ID NO: 2439862 - RNA, 19 nt, Artificial Sequence
  Description of Artificial Sequence: Synthetic oligonucleotide
ccagcagauucgcgucuug

SEQ ID NO: 2439863 - RNA, 19 nt, Artificial Sequence
  Description of Artificial Sequence: Synthetic oligonucleotide
ccugcauguggaagccaca

SEQ ID NO: 2439864 - RNA, 19 nt, Artificial Sequence
  Description of Artificial Sequence: Synthetic oligonucleotide
uccccgcuuccagcugcug

SEQ ID NO: 2439865 - RNA, 19 nt, Artificial Sequence
  Description of Artificial Sequence: Synthetic oligonucleotide
ccugcaguaucgccccaca

SEQ ID NO: 2439866 - RNA, 19 nt, Artificial Sequence
  Description of Artificial Sequence: Synthetic oligonucleotide
ccaucaggauggugaguga

SEQ ID NO: 2439867 - RNA, 19 nt, Artificial Sequence
  Description of Artificial Sequence: Synthetic oligonucleotide
acucgcccauucagaacuu

SEQ ID NO: 2439868 - RNA, 19 nt, Artificial Sequence
  Description of Artificial Sequence: Synthetic oligonucleotide
gcuccgcuugacuucuggu

SEQ ID NO: 2439869 - RNA, 19 nt, Artificial Sequence
  Description of Artificial Sequence: Synthetic oligonucleotide
gagccugucucugcuucuu

SEQ ID NO: 2439870 - RNA, 19 nt, Artificial Sequence
  Description of Artificial Sequence: Synthetic oligonucleotide
cccgcuugguagaaggaau

SEQ ID NO: 2439871 - RNA, 19 nt, Artificial Sequence
  Description of Artificial Sequence: Synthetic oligonucleotide
cgcccauucagaacuucaa

SEQ ID NO: 2439872 - RNA, 19 nt, Artificial Sequence
  Description of Artificial Sequence: Synthetic oligonucleotide
cccgguauugugucuuccu

SEQ ID NO: 2439873 - RNA, 19 nt, Artificial Sequence
  Description of Artificial Sequence: Synthetic oligonucleotide
aucgccccacaaagucaaa

SEQ ID NO: 2439874 - RNA, 19 nt, Artificial Sequence
  Description of Artificial Sequence: Synthetic oligonucleotide
ggggauccgaggggaguga

SEQ ID NO: 2439875 - RNA, 19 nt, Artificial Sequence
  Description of Artificial Sequence: Synthetic oligonucleotide
ggcugcaaugacaggggau

SEQ ID NO: 2439876 - RNA, 19 nt, Artificial Sequence
  Description of Artificial Sequence: Synthetic oligonucleotide
gcccaugggcaaaggggca

SEQ ID NO: 2439877 - RNA, 19 nt, Artificial Sequence
  Description of Artificial Sequence: Synthetic oligonucleotide
gggcaacaggcagcaggca

SEQ ID NO: 2439878 - RNA, 19 nt, Artificial Sequence
  Description of Artificial Sequence: Synthetic oligonucleotide
gcagacccgcuugguagaa

SEQ ID NO: 2439879 - RNA, 19 nt, Artificial Sequence
  Description of Artificial Sequence: Synthetic oligonucleotide
ggcucucgggguggcucug

SEQ ID NO: 2439880 - RNA, 19 nt, Artificial Sequence
  Description of Artificial Sequence: Synthetic oligonucleotide
cuccuucauuccaggucuu

SEQ ID NO: 2439881 - RNA, 19 nt, Artificial Sequence
  Description of Artificial Sequence: Synthetic oligonucleotide
cagacuccugcagcaucgu

SEQ ID NO: 2439882 - RNA, 19 nt, Artificial Sequence
  Description of Artificial Sequence: Synthetic oligonucleotide
cuccccgcuuccagcugcu

SEQ ID NO: 2439883 - RNA, 19 nt, Artificial Sequence
  Description of Artificial Sequence: Synthetic oligonucleotide
gccgccagucacggaugug

SEQ ID NO: 2439884 - RNA, 19 nt, Artificial Sequence
  Description of Artificial Sequence: Synthetic oligonucleotide
ccagguaccucccgguauu

SEQ ID NO: 2439885 - RNA, 19 nt, Artificial Sequence
  Description of Artificial Sequence: Synthetic oligonucleotide
ccggcagguguaggaggac

SEQ ID NO: 2439886 - RNA, 19 nt, Artificial Sequence
  Description of Artificial Sequence: Synthetic oligonucleotide
cccagguaccucccgguau

SEQ ID NO: 2439887 - RNA, 19 nt, Artificial Sequence
  Description of Artificial Sequence: Synthetic oligonucleotide
ccccaaccucccagcacga

SEQ ID NO: 2439888 - RNA, 19 nt, Artificial Sequence
  Description of Artificial Sequence: Synthetic oligonucleotide
ggaugugaacucgcccauu

SEQ ID NO: 2439889 - RNA, 19 nt, Artificial Sequence
  Description of Artificial Sequence: Synthetic oligonucleotide
cgccagucacggaugugaa

SEQ ID NO: 2439890 - RNA, 19 nt, Artificial Sequence
  Description of Artificial Sequence: Synthetic oligonucleotide
ccucaggcccaugggcaaa

SEQ ID NO: 2439891 - RNA, 19 nt, Artificial Sequence
  Description of Artificial Sequence: Synthetic oligonucleotide
ccucccgguauugugucuu

SEQ ID NO: 2439892 - RNA, 19 nt, Artificial Sequence
  Description of Artificial Sequence: Synthetic oligonucleotide
cgaggggagugagcucauc

SEQ ID NO: 2439893 - RNA, 19 nt, Artificial Sequence
  Description of Artificial Sequence: Synthetic oligonucleotide
cggaugugaacucgcccau

SEQ ID NO: 2439894 - RNA, 19 nt, Artificial Sequence
  Description of Artificial Sequence: Synthetic oligonucleotide
cccaaccucccagcacgaa

SEQ ID NO: 2439895 - RNA, 19 nt, Artificial Sequence
  Description of Artificial Sequence: Synthetic oligonucleotide
cccucaccaggugggcucu

SEQ ID NO: 2439896 - RNA, 19 nt, Artificial Sequence
  Description of Artificial Sequence: Synthetic oligonucleotide
ccgaggggagugagcucau

SEQ ID NO: 2439897 - RNA, 19 nt, Artificial Sequence
  Description of Artificial Sequence: Synthetic oligonucleotide
cgccugcaguaucgcccca

SEQ ID NO: 2439898 - RNA, 19 nt, Artificial Sequence
  Description of Artificial Sequence: Synthetic oligonucleotide
uccauauacaaucagagcu

SEQ ID NO: 2439899 - RNA, 19 nt, Artificial Sequence
  Description of Artificial Sequence: Synthetic oligonucleotide
agaaccaaaagacaguggg

SEQ ID NO: 2439900 - RNA, 19 nt, Artificial Sequence
  Description of Artificial Sequence: Synthetic oligonucleotide
ucuccauauacaaucagag

SEQ ID NO: 2439901 - RNA, 19 nt, Artificial Sequence
  Description of Artificial Sequence: Synthetic oligonucleotide
aaaagacagugggagaucc

SEQ ID NO: 2439902 - RNA, 19 nt, Artificial Sequence
  Description of Artificial Sequence: Synthetic oligonucleotide
uauacaaucagagcugggg

SEQ ID NO: 2439903 - RNA, 19 nt, Artificial Sequence
  Description of Artificial Sequence: Synthetic oligonucleotide
gauaccaugcaacagcagc

SEQ ID NO: 2439904 - RNA, 19 nt, Artificial Sequence
  Description of Artificial Sequence: Synthetic oligonucleotide
agauuucuccccuugaauc

SEQ ID NO: 2439905 - RNA, 19 nt, Artificial Sequence
  Description of Artificial Sequence: Synthetic oligonucleotide
agauguugaaagcuggagg

SEQ ID NO: 2439906 - RNA, 19 nt, Artificial Sequence
  Description of Artificial Sequence: Synthetic oligonucleotide
uuuuccaugaccagcacuc

SEQ ID NO: 2439907 - RNA, 19 nt, Artificial Sequence
  Description of Artificial Sequence: Synthetic oligonucleotide
aaugcccaagaccugguag

SEQ ID NO: 2439908 - RNA, 19 nt, Artificial Sequence
  Description of Artificial Sequence: Synthetic oligonucleotide
gauuguaccuccuugaucu

SEQ ID NO: 2439909 - RNA, 19 nt, Artificial Sequence
  Description of Artificial Sequence: Synthetic oligonucleotide
gauguugaaagcuggagga

SEQ ID NO: 2439910 - RNA, 19 nt, Artificial Sequence
  Description of Artificial Sequence: Synthetic oligonucleotide
ugauggacugaucacaacu

SEQ ID NO: 2439911 - RNA, 19 nt, Artificial Sequence
  Description of Artificial Sequence: Synthetic oligonucleotide
uccacacuggccaugcucg

SEQ ID NO: 2439912 - RNA, 19 nt, Artificial Sequence
  Description of Artificial Sequence: Synthetic oligonucleotide
auacaugccacuuagugau

SEQ ID NO: 2439913 - RNA, 19 nt, Artificial Sequence
  Description of Artificial Sequence: Synthetic oligonucleotide
guauagacagaccuguugc

SEQ ID NO: 2439914 - RNA, 19 nt, Artificial Sequence
  Description of Artificial Sequence: Synthetic oligonucleotide
caagcaaggagccuguagg

SEQ ID NO: 2439915 - RNA, 19 nt, Artificial Sequence
  Description of Artificial Sequence: Synthetic oligonucleotide
agguucaagccagagaacc

SEQ ID NO: 2439916 - RNA, 19 nt, Artificial Sequence
  Description of Artificial Sequence: Synthetic oligonucleotide
gaagaagagucccuggccc

SEQ ID NO: 2439917 - RNA, 19 nt, Artificial Sequence
  Description of Artificial Sequence: Synthetic oligonucleotide
ucagagauuacccgaaauc

SEQ ID NO: 2439918 - RNA, 19 nt, Artificial Sequence
  Description of Artificial Sequence: Synthetic oligonucleotide
auuacccgaaaucagauuu

SEQ ID NO: 2439919 - RNA, 19 nt, Artificial Sequence
  Description of Artificial Sequence: Synthetic oligonucleotide
ucugaucugucacugcaag

SEQ ID NO: 2439920 - RNA, 19 nt, Artificial Sequence
  Description of Artificial Sequence: Synthetic oligonucleotide
uguccagguagcaaggaug

SEQ ID NO: 2439921 - RNA, 19 nt, Artificial Sequence
  Description of Artificial Sequence: Synthetic oligonucleotide
agacagaccuguugcaggc

SEQ ID NO: 2439922 - RNA, 19 nt, Artificial Sequence
  Description of Artificial Sequence: Synthetic oligonucleotide
agugggagaucccagagca

SEQ ID NO: 2439923 - RNA, 19 nt, Artificial Sequence
  Description of Artificial Sequence: Synthetic oligonucleotide
aaucagauuucuccccuug

SEQ ID NO: 2439924 - RNA, 19 nt, Artificial Sequence
  Description of Artificial Sequence: Synthetic oligonucleotide
gagaaaagcagaaaugaca

SEQ ID NO: 2439925 - RNA, 19 nt, Artificial Sequence
  Description of Artificial Sequence: Synthetic oligonucleotide
agaguacccagguucugcc

SEQ ID NO: 2439926 - RNA, 19 nt, Artificial Sequence
  Description of Artificial Sequence: Synthetic oligonucleotide
cuugauuuugucugugcag

SEQ ID NO: 2439927 - RNA, 19 nt, Artificial Sequence
  Description of Artificial Sequence: Synthetic oligonucleotide
uagacagaccuguugcagg

SEQ ID NO: 2439928 - RNA, 19 nt, Artificial Sequence
  Description of Artificial Sequence: Synthetic oligonucleotide
agaugggagccacugguac

SEQ ID NO: 2439929 - RNA, 19 nt, Artificial Sequence
  Description of Artificial Sequence: Synthetic oligonucleotide
cacugcaagagaaaagcag

SEQ ID NO: 2439930 - RNA, 19 nt, Artificial Sequence
  Description of Artificial Sequence: Synthetic oligonucleotide
uugauuuugucugugcaga

SEQ ID NO: 2439931 - RNA, 19 nt, Artificial Sequence
  Description of Artificial Sequence: Synthetic oligonucleotide
ucugguuccacuugauugu

SEQ ID NO: 2439932 - RNA, 19 nt, Artificial Sequence
  Description of Artificial Sequence: Synthetic oligonucleotide
agaaaugacaggaacccag

SEQ ID NO: 2439933 - RNA, 19 nt, Artificial Sequence
  Description of Artificial Sequence: Synthetic oligonucleotide
cuuaacacuggcauaguca

SEQ ID NO: 2439934 - RNA, 19 nt, Artificial Sequence
  Description of Artificial Sequence: Synthetic oligonucleotide
cauauacaaucagagcugg

SEQ ID NO: 2439935 - RNA, 19 nt, Artificial Sequence
  Description of Artificial Sequence: Synthetic oligonucleotide
auggacugaucacaacugg

SEQ ID NO: 2439936 - RNA, 19 nt, Artificial Sequence
  Description of Artificial Sequence: Synthetic oligonucleotide
cucaugcugauccacacug

SEQ ID NO: 2439937 - RNA, 19 nt, Artificial Sequence
  Description of Artificial Sequence: Synthetic oligonucleotide
aggaguagcggauaccaug

SEQ ID NO: 2439938 - RNA, 19 nt, Artificial Sequence
  Description of Artificial Sequence: Synthetic oligonucleotide
uacauagccccggaguugg

SEQ ID NO: 2439939 - RNA, 19 nt, Artificial Sequence
  Description of Artificial Sequence: Synthetic oligonucleotide
auacaaucagagcuggggu

SEQ ID NO: 2439940 - RNA, 19 nt, Artificial Sequence
  Description of Artificial Sequence: Synthetic oligonucleotide
ugguacauagccccggagu

SEQ ID NO: 2439941 - RNA, 19 nt, Artificial Sequence
  Description of Artificial Sequence: Synthetic oligonucleotide
cagaaaaccgagcagccug

SEQ ID NO: 2439942 - RNA, 19 nt, Artificial Sequence
  Description of Artificial Sequence: Synthetic oligonucleotide
uauagacagaccuguugca

SEQ ID NO: 2439943 - RNA, 19 nt, Artificial Sequence
  Description of Artificial Sequence: Synthetic oligonucleotide
ggaguugggacccaggagc

SEQ ID NO: 2439944 - RNA, 19 nt, Artificial Sequence
  Description of Artificial Sequence: Synthetic oligonucleotide
uaccuccuugaucugaucu

SEQ ID NO: 2439945 - RNA, 19 nt, Artificial Sequence
  Description of Artificial Sequence: Synthetic oligonucleotide
gauggacugaucacaacug

SEQ ID NO: 2439946 - RNA, 19 nt, Artificial Sequence
  Description of Artificial Sequence: Synthetic oligonucleotide
cccgaaaucagauuucucc

SEQ ID NO: 2439947 - RNA, 19 nt, Artificial Sequence
  Description of Artificial Sequence: Synthetic oligonucleotide
aguacccagguucugccag

SEQ ID NO: 2439948 - RNA, 19 nt, Artificial Sequence
  Description of Artificial Sequence: Synthetic oligonucleotide
ucaugcugauccacacugg

SEQ ID NO: 2439949 - RNA, 19 nt, Artificial Sequence
  Description of Artificial Sequence: Synthetic oligonucleotide
auagccccggaguugggac

SEQ ID NO: 2439950 - RNA, 19 nt, Artificial Sequence
  Description of Artificial Sequence: Synthetic oligonucleotide
ucuuaacacuggcauaguc

SEQ ID NO: 2439951 - RNA, 19 nt, Artificial Sequence
  Description of Artificial Sequence: Synthetic oligonucleotide
uccccuugaaucugguucc

SEQ ID NO: 2439952 - RNA, 19 nt, Artificial Sequence
  Description of Artificial Sequence: Synthetic oligonucleotide
aaagacagugggagauccc

SEQ ID NO: 2439953 - RNA, 19 nt, Artificial Sequence
  Description of Artificial Sequence: Synthetic oligonucleotide
uuggguagcugcuucagau

SEQ ID NO: 2439954 - RNA, 19 nt, Artificial Sequence
  Description of Artificial Sequence: Synthetic oligonucleotide
auccacacuggccaugcuc

SEQ ID NO: 2439955 - RNA, 19 nt, Artificial Sequence
  Description of Artificial Sequence: Synthetic oligonucleotide
caagccagagaaccaaaag

SEQ ID NO: 2439956 - RNA, 19 nt, Artificial Sequence
  Description of Artificial Sequence: Synthetic oligonucleotide
uguugaaagcuggaggaac

SEQ ID NO: 2439957 - RNA, 19 nt, Artificial Sequence
  Description of Artificial Sequence: Synthetic oligonucleotide
ugccacuuagugauggacu

SEQ ID NO: 2439958 - RNA, 19 nt, Artificial Sequence
  Description of Artificial Sequence: Synthetic oligonucleotide
ucacugcaagagaaaagca

SEQ ID NO: 2439959 - RNA, 19 nt, Artificial Sequence
  Description of Artificial Sequence: Synthetic oligonucleotide
cuccccuugaaucugguuc

SEQ ID NO: 2439960 - RNA, 19 nt, Artificial Sequence
  Description of Artificial Sequence: Synthetic oligonucleotide
auagucagcagccuugauu

SEQ ID NO: 2439961 - RNA, 19 nt, Artificial Sequence
  Description of Artificial Sequence: Synthetic oligonucleotide
acugcaagagaaaagcaga

SEQ ID NO: 2439962 - RNA, 19 nt, Artificial Sequence
  Description of Artificial Sequence: Synthetic oligonucleotide
ggucuuaacacuggcauag

SEQ ID NO: 2439963 - RNA, 19 nt, Artificial Sequence
  Description of Artificial Sequence: Synthetic oligonucleotide
gcauacaugccacuuagug

SEQ ID NO: 2439964 - RNA, 19 nt, Artificial Sequence
  Description of Artificial Sequence: Synthetic oligonucleotide
ugcuaggaagcugcuaggg

SEQ ID NO: 2439965 - RNA, 19 nt, Artificial Sequence
  Description of Artificial Sequence: Synthetic oligonucleotide
uacaaucagagcugggguc

SEQ ID NO: 2439966 - RNA, 19 nt, Artificial Sequence
  Description of Artificial Sequence: Synthetic oligonucleotide
agaaaaccgagcagccugc

SEQ ID NO: 2439967 - RNA, 19 nt, Artificial Sequence
  Description of Artificial Sequence: Synthetic oligonucleotide
gagaagcucagagauuacc

SEQ ID NO: 2439968 - RNA, 19 nt, Artificial Sequence
  Description of Artificial Sequence: Synthetic oligonucleotide
agagauuacccgaaaucag

SEQ ID NO: 2439969 - RNA, 19 nt, Artificial Sequence
  Description of Artificial Sequence: Synthetic oligonucleotide
auccacgacaggcugcuag

SEQ ID NO: 2439970 - RNA, 19 nt, Artificial Sequence
  Description of Artificial Sequence: Synthetic oligonucleotide
auagacagaccuguugcag

SEQ ID NO: 2439971 - RNA, 19 nt, Artificial Sequence
  Description of Artificial Sequence: Synthetic oligonucleotide
ucagaggaguagcggauac

SEQ ID NO: 2439972 - RNA, 19 nt, Artificial Sequence
  Description of Artificial Sequence: Synthetic oligonucleotide
guugaaagcuggaggaacc

SEQ ID NO: 2439973 - RNA, 19 nt, Artificial Sequence
  Description of Artificial Sequence: Synthetic oligonucleotide
agaggaguagcggauacca

SEQ ID NO: 2439974 - RNA, 19 nt, Artificial Sequence
  Description of Artificial Sequence: Synthetic oligonucleotide
uuccuuggaaugcccaaga

SEQ ID NO: 2439975 - RNA, 19 nt, Artificial Sequence
  Description of Artificial Sequence: Synthetic oligonucleotide
ucaagccagagaaccaaaa

SEQ ID NO: 2439976 - RNA, 19 nt, Artificial Sequence
  Description of Artificial Sequence: Synthetic oligonucleotide
gagauuacccgaaaucaga

SEQ ID NO: 2439977 - RNA, 19 nt, Artificial Sequence
  Description of Artificial Sequence: Synthetic oligonucleotide
acaugccacuuagugaugg

SEQ ID NO: 2439978 - RNA, 19 nt, Artificial Sequence
  Description of Artificial Sequence: Synthetic oligonucleotide
gauuuugucugugcagaug

SEQ ID NO: 2439979 - RNA, 19 nt, Artificial Sequence
  Description of Artificial Sequence: Synthetic oligonucleotide
agcuccaaggcauccacga

SEQ ID NO: 2439980 - RNA, 19 nt, Artificial Sequence
  Description of Artificial Sequence: Synthetic oligonucleotide
gagaaccaaaagacagugg

SEQ ID NO: 2439981 - RNA, 19 nt, Artificial Sequence
  Description of Artificial Sequence: Synthetic oligonucleotide
uuacccgaaaucagauuuc

SEQ ID NO: 2439982 - RNA, 19 nt, Artificial Sequence
  Description of Artificial Sequence: Synthetic oligonucleotide
cagagauuacccgaaauca

SEQ ID NO: 2439983 - RNA, 19 nt, Artificial Sequence
  Description of Artificial Sequence: Synthetic oligonucleotide
aagaccugguaggucaaug

SEQ ID NO: 2439984 - RNA, 19 nt, Artificial Sequence
  Description of Artificial Sequence: Synthetic oligonucleotide
gguuccacuugauuguacc

SEQ ID NO: 2439985 - RNA, 19 nt, Artificial Sequence
  Description of Artificial Sequence: Synthetic oligonucleotide
gccacugguacauagcccc

SEQ ID NO: 2439986 - RNA, 19 nt, Artificial Sequence
  Description of Artificial Sequence: Synthetic oligonucleotide
uguaccuccuugaucugau

SEQ ID NO: 2439987 - RNA, 19 nt, Artificial Sequence
  Description of Artificial Sequence: Synthetic oligonucleotide
agugccacucaucaggcuu

SEQ ID NO: 2439988 - RNA, 19 nt, Artificial Sequence
  Description of Artificial Sequence: Synthetic oligonucleotide
uuccccaauaggagcagga

SEQ ID NO: 2439989 - RNA, 19 nt, Artificial Sequence
  Description of Artificial Sequence: Synthetic oligonucleotide
aaagcagaaaugacaggaa

SEQ ID NO: 2439990 - RNA, 19 nt, Artificial Sequence
  Description of Artificial Sequence: Synthetic oligonucleotide
aggagaagcucagagauua

SEQ ID NO: 2439991 - RNA, 19 nt, Artificial Sequence
  Description of Artificial Sequence: Synthetic oligonucleotide
gcugcuaggggccaauucc

SEQ ID NO: 2439992 - RNA, 19 nt, Artificial Sequence
  Description of Artificial Sequence: Synthetic oligonucleotide
caggcgagguucaagccag

SEQ ID NO: 2439993 - RNA, 19 nt, Artificial Sequence
  Description of Artificial Sequence: Synthetic oligonucleotide
aauaggagcaggagcugcu

SEQ ID NO: 2439994 - RNA, 19 nt, Artificial Sequence
  Description of Artificial Sequence: Synthetic oligonucleotide
uugaaagcuggaggaaccc

SEQ ID NO: 2439995 - RNA, 19 nt, Artificial Sequence
  Description of Artificial Sequence: Synthetic oligonucleotide
cagauguauagacagaccu

SEQ ID NO: 2439996 - RNA, 19 nt, Artificial Sequence
  Description of Artificial Sequence: Synthetic oligonucleotide
uagcggauaccaugcaaca

SEQ ID NO: 2439997 - RNA, 19 nt, Artificial Sequence
  Description of Artificial Sequence: Synthetic oligonucleotide
guagcggauaccaugcaac

SEQ ID NO: 2439998 - RNA, 19 nt, Artificial Sequence
  Description of Artificial Sequence: Synthetic oligonucleotide
aauuccccaauaggagcag

SEQ ID NO: 2439999 - RNA, 19 nt, Artificial Sequence
  Description of Artificial Sequence: Synthetic oligonucleotide
augccacuuagugauggac

SEQ ID NO: 2440000 - RNA, 19 nt, Artificial Sequence
  Description of Artificial Sequence: Synthetic oligonucleotide
ggcuuguccagguagcaag

SEQ ID NO: 2440001 - RNA, 19 nt, Artificial Sequence
  Description of Artificial Sequence: Synthetic oligonucleotide
ugaucugaucugucacugc

SEQ ID NO: 2440002 - RNA, 19 nt, Artificial Sequence
  Description of Artificial Sequence: Synthetic oligonucleotide
acaaucagagcuggggucu

SEQ ID NO: 2440003 - RNA, 19 nt, Artificial Sequence
  Description of Artificial Sequence: Synthetic oligonucleotide
cugcuaggggccaauuccc

SEQ ID NO: 2440004 - RNA, 19 nt, Artificial Sequence
  Description of Artificial Sequence: Synthetic oligonucleotide
cagccuaugcagaguaccc

SEQ ID NO: 2440005 - RNA, 19 nt, Artificial Sequence
  Description of Artificial Sequence: Synthetic oligonucleotide
agcugcuaggggccaauuc

SEQ ID NO: 2440006 - RNA, 19 nt, Artificial Sequence
  Description of Artificial Sequence: Synthetic oligonucleotide
uggggucuuaacacuggca

SEQ ID NO: 2440007 - RNA, 19 nt, Artificial Sequence
  Description of Artificial Sequence: Synthetic oligonucleotide
ccgaaaucagauuucuccc

SEQ ID NO: 2440008 - RNA, 19 nt, Artificial Sequence
  Description of Artificial Sequence: Synthetic oligonucleotide
caugaccagcacucugugg

SEQ ID NO: 2440009 - RNA, 19 nt, Artificial Sequence
  Description of Artificial Sequence: Synthetic oligonucleotide
ugauccacacuggccaugc

SEQ ID NO: 2440010 - RNA, 19 nt, Artificial Sequence
  Description of Artificial Sequence: Synthetic oligonucleotide
auaccaugcaacagcagca

SEQ ID NO: 2440011 - RNA, 19 nt, Artificial Sequence
  Description of Artificial Sequence: Synthetic oligonucleotide
ucggccagccuaugcagag

SEQ ID NO: 2440012 - RNA, 19 nt, Artificial Sequence
  Description of Artificial Sequence: Synthetic oligonucleotide
gcggauaccaugcaacagc

SEQ ID NO: 2440013 - RNA, 19 nt, Artificial Sequence
  Description of Artificial Sequence: Synthetic oligonucleotide
aucagauuucuccccuuga

SEQ ID NO: 2440014 - RNA, 19 nt, Artificial Sequence
  Description of Artificial Sequence: Synthetic oligonucleotide
uaacacuggcauagucagc

SEQ ID NO: 2440015 - RNA, 19 nt, Artificial Sequence
  Description of Artificial Sequence: Synthetic oligonucleotide
ugcuaggggccaauucccc

SEQ ID NO: 2440016 - RNA, 19 nt, Artificial Sequence
  Description of Artificial Sequence: Synthetic oligonucleotide
agugcauacaugccacuua

SEQ ID NO: 2440017 - RNA, 19 nt, Artificial Sequence
  Description of Artificial Sequence: Synthetic oligonucleotide
uccuuggaaugcccaagac

SEQ ID NO: 2440018 - RNA, 19 nt, Artificial Sequence
  Description of Artificial Sequence: Synthetic oligonucleotide
gaugggagccacugguaca

SEQ ID NO: 2440019 - RNA, 19 nt, Artificial Sequence
  Description of Artificial Sequence: Synthetic oligonucleotide
uacccgaaaucagauuucu

SEQ ID NO: 2440020 - RNA, 19 nt, Artificial Sequence
  Description of Artificial Sequence: Synthetic oligonucleotide
acagaccuguugcaggcga

SEQ ID NO: 2440021 - RNA, 19 nt, Artificial Sequence
  Description of Artificial Sequence: Synthetic oligonucleotide
ugcaggcgagguucaagcc

SEQ ID NO: 2440022 - RNA, 19 nt, Artificial Sequence
  Description of Artificial Sequence: Synthetic oligonucleotide
uggaggaacccaugggguc

SEQ ID NO: 2440023 - RNA, 19 nt, Artificial Sequence
  Description of Artificial Sequence: Synthetic oligonucleotide
uccccaauaggagcaggag

SEQ ID NO: 2440024 - RNA, 19 nt, Artificial Sequence
  Description of Artificial Sequence: Synthetic oligonucleotide
ggaguagcggauaccaugc

SEQ ID NO: 2440025 - RNA, 19 nt, Artificial Sequence
  Description of Artificial Sequence: Synthetic oligonucleotide
ccaugcaacagcagcacag

SEQ ID NO: 2440026 - RNA, 19 nt, Artificial Sequence
  Description of Artificial Sequence: Synthetic oligonucleotide
auauacaaucagagcuggg

SEQ ID NO: 2440027 - RNA, 19 nt, Artificial Sequence
  Description of Artificial Sequence: Synthetic oligonucleotide
uggauggugcccucaugcu

SEQ ID NO: 2440028 - RNA, 19 nt, Artificial Sequence
  Description of Artificial Sequence: Synthetic oligonucleotide
cagaguacccagguucugc

SEQ ID NO: 2440029 - RNA, 19 nt, Artificial Sequence
  Description of Artificial Sequence: Synthetic oligonucleotide
agauuacccgaaaucagau

SEQ ID NO: 2440030 - RNA, 19 nt, Artificial Sequence
  Description of Artificial Sequence: Synthetic oligonucleotide
gccacuuagugauggacug

SEQ ID NO: 2440031 - RNA, 19 nt, Artificial Sequence
  Description of Artificial Sequence: Synthetic oligonucleotide
gaguugggacccaggagcc

SEQ ID NO: 2440032 - RNA, 19 nt, Artificial Sequence
  Description of Artificial Sequence: Synthetic oligonucleotide
guacccagguucugccagg

SEQ ID NO: 2440033 - RNA, 19 nt, Artificial Sequence
  Description of Artificial Sequence: Synthetic oligonucleotide
uaccaugcaacagcagcac

SEQ ID NO: 2440034 - RNA, 19 nt, Artificial Sequence
  Description of Artificial Sequence: Synthetic oligonucleotide
acugguacauagccccgga

SEQ ID NO: 2440035 - RNA, 19 nt, Artificial Sequence
  Description of Artificial Sequence: Synthetic oligonucleotide
agcggauaccaugcaacag

SEQ ID NO: 2440036 - RNA, 19 nt, Artificial Sequence
  Description of Artificial Sequence: Synthetic oligonucleotide
cagugggagaucccagagc

SEQ ID NO: 2440037 - RNA, 19 nt, Artificial Sequence
  Description of Artificial Sequence: Synthetic oligonucleotide
cccauugccaggccgagcc

SEQ ID NO: 2440038 - RNA, 19 nt, Artificial Sequence
  Description of Artificial Sequence: Synthetic oligonucleotide
ugguuggguagcugcuuca

SEQ ID NO: 2440039 - RNA, 19 nt, Artificial Sequence
  Description of Artificial Sequence: Synthetic oligonucleotide
ugguuccacuugauuguac

SEQ ID NO: 2440040 - RNA, 19 nt, Artificial Sequence
  Description of Artificial Sequence: Synthetic oligonucleotide
agccugcccauugccaggc

SEQ ID NO: 2440041 - RNA, 19 nt, Artificial Sequence
  Description of Artificial Sequence: Synthetic oligonucleotide
guugcaggcgagguucaag

SEQ ID NO: 2440042 - RNA, 19 nt, Artificial Sequence
  Description of Artificial Sequence: Synthetic oligonucleotide
ggggccaauuccccaauag

SEQ ID NO: 2440043 - RNA, 19 nt, Artificial Sequence
  Description of Artificial Sequence: Synthetic oligonucleotide
uaggagaagcucagagauu

SEQ ID NO: 2440044 - RNA, 19 nt, Artificial Sequence
  Description of Artificial Sequence: Synthetic oligonucleotide
cgaaaucagauuucucccc

SEQ ID NO: 2440045 - RNA, 19 nt, Artificial Sequence
  Description of Artificial Sequence: Synthetic oligonucleotide
caaggagccuguaggagaa

SEQ ID NO: 2440046 - RNA, 19 nt, Artificial Sequence
  Description of Artificial Sequence: Synthetic oligonucleotide
agcccuguagccagccucg

SEQ ID NO: 2440047 - RNA, 19 nt, Artificial Sequence
  Description of Artificial Sequence: Synthetic oligonucleotide
gaaaaccgagcagccugcc

SEQ ID NO: 2440048 - RNA, 19 nt, Artificial Sequence
  Description of Artificial Sequence: Synthetic oligonucleotide
caaaagacagugggagauc

SEQ ID NO: 2440049 - RNA, 19 nt, Artificial Sequence
  Description of Artificial Sequence: Synthetic oligonucleotide
caggaagggcagugcauac

SEQ ID NO: 2440050 - RNA, 19 nt, Artificial Sequence
  Description of Artificial Sequence: Synthetic oligonucleotide
guacauagccccggaguug

SEQ ID NO: 2440051 - RNA, 19 nt, Artificial Sequence
  Description of Artificial Sequence: Synthetic oligonucleotide
agguagcaaggaugccccg

SEQ ID NO: 2440052 - RNA, 19 nt, Artificial Sequence
  Description of Artificial Sequence: Synthetic oligonucleotide
uuuccaugaccagcacucu

SEQ ID NO: 2440053 - RNA, 19 nt, Artificial Sequence
  Description of Artificial Sequence: Synthetic oligonucleotide
gggagccacugguacauag

SEQ ID NO: 2440054 - RNA, 19 nt, Artificial Sequence
  Description of Artificial Sequence: Synthetic oligonucleotide
cacugguacauagccccgg

SEQ ID NO: 2440055 - RNA, 19 nt, Artificial Sequence
  Description of Artificial Sequence: Synthetic oligonucleotide
guugggacccaggagccac

SEQ ID NO: 2440056 - RNA, 19 nt, Artificial Sequence
  Description of Artificial Sequence: Synthetic oligonucleotide
ggucucagaggaguagcgg

SEQ ID NO: 2440057 - RNA, 19 nt, Artificial Sequence
  Description of Artificial Sequence: Synthetic oligonucleotide
gaccagcacucugugguug

SEQ ID NO: 2440058 - RNA, 19 nt, Artificial Sequence
  Description of Artificial Sequence: Synthetic oligonucleotide
agccuguaggagaagcuca

SEQ ID NO: 2440059 - RNA, 19 nt, Artificial Sequence
  Description of Artificial Sequence: Synthetic oligonucleotide
cgagguucaagccagagaa

SEQ ID NO: 2440060 - RNA, 19 nt, Artificial Sequence
  Description of Artificial Sequence: Synthetic oligonucleotide
auaggagcaggagcugcug

SEQ ID NO: 2440061 - RNA, 19 nt, Artificial Sequence
  Description of Artificial Sequence: Synthetic oligonucleotide
uagccccggaguugggacc

SEQ ID NO: 2440062 - RNA, 19 nt, Artificial Sequence
  Description of Artificial Sequence: Synthetic oligonucleotide
uugggacccaggagccacc

SEQ ID NO: 2440063 - RNA, 19 nt, Artificial Sequence
  Description of Artificial Sequence: Synthetic oligonucleotide
caggaacccaggcagaugu

SEQ ID NO: 2440064 - RNA, 19 nt, Artificial Sequence
  Description of Artificial Sequence: Synthetic oligonucleotide
gugauggacugaucacaac

SEQ ID NO: 2440065 - RNA, 19 nt, Artificial Sequence
  Description of Artificial Sequence: Synthetic oligonucleotide
aggccgagccucucugaag

SEQ ID NO: 2440066 - RNA, 19 nt, Artificial Sequence
  Description of Artificial Sequence: Synthetic oligonucleotide
cugcuuccuuggaaugccc

SEQ ID NO: 2440067 - RNA, 19 nt, Artificial Sequence
  Description of Artificial Sequence: Synthetic oligonucleotide
cagaccuguugcaggcgag

SEQ ID NO: 2440068 - RNA, 19 nt, Artificial Sequence
  Description of Artificial Sequence: Synthetic oligonucleotide
ggaggaacccauggggucc

SEQ ID NO: 2440069 - RNA, 19 nt, Artificial Sequence
  Description of Artificial Sequence: Synthetic oligonucleotide
cugaucugucacugcaaga

SEQ ID NO: 2440070 - RNA, 19 nt, Artificial Sequence
  Description of Artificial Sequence: Synthetic oligonucleotide
guuggguagcugcuucaga

SEQ ID NO: 2440071 - RNA, 19 nt, Artificial Sequence
  Description of Artificial Sequence: Synthetic oligonucleotide
cagagaaccaaaagacagu

SEQ ID NO: 2440072 - RNA, 19 nt, Artificial Sequence
  Description of Artificial Sequence: Synthetic oligonucleotide
gaguacccagguucugcca

SEQ ID NO: 2440073 - RNA, 19 nt, Artificial Sequence
  Description of Artificial Sequence: Synthetic oligonucleotide
gagguucaagccagagaac

SEQ ID NO: 2440074 - RNA, 19 nt, Artificial Sequence
  Description of Artificial Sequence: Synthetic oligonucleotide
cagaggaguagcggauacc

SEQ ID NO: 2440075 - RNA, 19 nt, Artificial Sequence
  Description of Artificial Sequence: Synthetic oligonucleotide
ugcccaagaccugguaggu

SEQ ID NO: 2440076 - RNA, 19 nt, Artificial Sequence
  Description of Artificial Sequence: Synthetic oligonucleotide
ccagccuaugcagaguacc

SEQ ID NO: 2440077 - RNA, 19 nt, Artificial Sequence
  Description of Artificial Sequence: Synthetic oligonucleotide
ccaagcaaggagccuguag

SEQ ID NO: 2440078 - RNA, 19 nt, Artificial Sequence
  Description of Artificial Sequence: Synthetic oligonucleotide
cuccuugaucugaucuguc

SEQ ID NO: 2440079 - RNA, 19 nt, Artificial Sequence
  Description of Artificial Sequence: Synthetic oligonucleotide
gugccacucaucaggcuug

SEQ ID NO: 2440080 - RNA, 19 nt, Artificial Sequence
  Description of Artificial Sequence: Synthetic oligonucleotide
cuaugcagaguacccaggu

SEQ ID NO: 2440081 - RNA, 19 nt, Artificial Sequence
  Description of Artificial Sequence: Synthetic oligonucleotide
gauuacccgaaaucagauu

SEQ ID NO: 2440082 - RNA, 19 nt, Artificial Sequence
  Description of Artificial Sequence: Synthetic oligonucleotide
acccgaaaucagauuucuc

SEQ ID NO: 2440083 - RNA, 19 nt, Artificial Sequence
  Description of Artificial Sequence: Synthetic oligonucleotide
gaguagcggauaccaugca

SEQ ID NO: 2440084 - RNA, 19 nt, Artificial Sequence
  Description of Artificial Sequence: Synthetic oligonucleotide
aaggagccuguaggagaag

SEQ ID NO: 2440085 - RNA, 19 nt, Artificial Sequence
  Description of Artificial Sequence: Synthetic oligonucleotide
cauugccaggccgagccuc

SEQ ID NO: 2440086 - RNA, 19 nt, Artificial Sequence
  Description of Artificial Sequence: Synthetic oligonucleotide
ggccgagccucucugaaga

SEQ ID NO: 2440087 - RNA, 19 nt, Artificial Sequence
  Description of Artificial Sequence: Synthetic oligonucleotide
agcucagagauuacccgaa

SEQ ID NO: 2440088 - RNA, 19 nt, Artificial Sequence
  Description of Artificial Sequence: Synthetic oligonucleotide
cccaauaggagcaggagcu

SEQ ID NO: 2440089 - RNA, 19 nt, Artificial Sequence
  Description of Artificial Sequence: Synthetic oligonucleotide
ugugguuggguagcugcuu

SEQ ID NO: 2440090 - RNA, 19 nt, Artificial Sequence
  Description of Artificial Sequence: Synthetic oligonucleotide
gaacccaugggguccuggu

SEQ ID NO: 2440091 - RNA, 19 nt, Artificial Sequence
  Description of Artificial Sequence: Synthetic oligonucleotide
gguuggguagcugcuucag

SEQ ID NO: 2440092 - RNA, 19 nt, Artificial Sequence
  Description of Artificial Sequence: Synthetic oligonucleotide
cuggaggaacccauggggu

SEQ ID NO: 2440093 - RNA, 19 nt, Artificial Sequence
  Description of Artificial Sequence: Synthetic oligonucleotide
ugcccauugccaggccgag

SEQ ID NO: 2440094 - RNA, 19 nt, Artificial Sequence
  Description of Artificial Sequence: Synthetic oligonucleotide
cagaaaugacaggaaccca

SEQ ID NO: 2440095 - RNA, 19 nt, Artificial Sequence
  Description of Artificial Sequence: Synthetic oligonucleotide
caugccacuuagugaugga

SEQ ID NO: 2440096 - RNA, 19 nt, Artificial Sequence
  Description of Artificial Sequence: Synthetic oligonucleotide
cugcccauugccaggccga

SEQ ID NO: 2440097 - RNA, 19 nt, Artificial Sequence
  Description of Artificial Sequence: Synthetic oligonucleotide
gagcuggggucuuaacacu

SEQ ID NO: 2440098 - RNA, 19 nt, Artificial Sequence
  Description of Artificial Sequence: Synthetic oligonucleotide
uacccagguucugccaggu

SEQ ID NO: 2440099 - RNA, 19 nt, Artificial Sequence
  Description of Artificial Sequence: Synthetic oligonucleotide
aucagagcuggggucuuaa

SEQ ID NO: 2440100 - RNA, 19 nt, Artificial Sequence
  Description of Artificial Sequence: Synthetic oligonucleotide
cugauccacacuggccaug

SEQ ID NO: 2440101 - RNA, 19 nt, Artificial Sequence
  Description of Artificial Sequence: Synthetic oligonucleotide
gguacauagccccggaguu

SEQ ID NO: 2440102 - RNA, 19 nt, Artificial Sequence
  Description of Artificial Sequence: Synthetic oligonucleotide
cucagagauuacccgaaau

SEQ ID NO: 2440103 - RNA, 19 nt, Artificial Sequence
  Description of Artificial Sequence: Synthetic oligonucleotide
ugggacccaggagccacca

SEQ ID NO: 2440104 - RNA, 19 nt, Artificial Sequence
  Description of Artificial Sequence: Synthetic oligonucleotide
gagcaggcagugccacuca

SEQ ID NO: 2440105 - RNA, 19 nt, Artificial Sequence
  Description of Artificial Sequence: Synthetic oligonucleotide
cucggccagccuaugcaga

SEQ ID NO: 2440106 - RNA, 19 nt, Artificial Sequence
  Description of Artificial Sequence: Synthetic oligonucleotide
ggauaccaugcaacagcag

SEQ ID NO: 2440107 - RNA, 19 nt, Artificial Sequence
  Description of Artificial Sequence: Synthetic oligonucleotide
guaccuccuugaucugauc

SEQ ID NO: 2440108 - RNA, 19 nt, Artificial Sequence
  Description of Artificial Sequence: Synthetic oligonucleotide
guagccagccucggccagc

SEQ ID NO: 2440109 - RNA, 19 nt, Artificial Sequence
  Description of Artificial Sequence: Synthetic oligonucleotide
ggaugccccgccuuuucca

SEQ ID NO: 2440110 - RNA, 19 nt, Artificial Sequence
  Description of Artificial Sequence: Synthetic oligonucleotide
ccacugguacauagccccg

SEQ ID NO: 2440111 - RNA, 19 nt, Artificial Sequence
  Description of Artificial Sequence: Synthetic oligonucleotide
gaugccccgccuuuuccau

SEQ ID NO: 2440112 - RNA, 19 nt, Artificial Sequence
  Description of Artificial Sequence: Synthetic oligonucleotide
gcuaggggccaauucccca

SEQ ID NO: 2440113 - RNA, 19 nt, Artificial Sequence
  Description of Artificial Sequence: Synthetic oligonucleotide
ggcgagguucaagccagag

SEQ ID NO: 2440114 - RNA, 19 nt, Artificial Sequence
  Description of Artificial Sequence: Synthetic oligonucleotide
uguugcaggcgagguucaa

SEQ ID NO: 2440115 - RNA, 19 nt, Artificial Sequence
  Description of Artificial Sequence: Synthetic oligonucleotide
auguauagacagaccuguu

SEQ ID NO: 2440116 - RNA, 19 nt, Artificial Sequence
  Description of Artificial Sequence: Synthetic oligonucleotide
cauagccccggaguuggga

SEQ ID NO: 2440117 - RNA, 19 nt, Artificial Sequence
  Description of Artificial Sequence: Synthetic oligonucleotide
ugccacucaucaggcuugu

SEQ ID NO: 2440118 - RNA, 19 nt, Artificial Sequence
  Description of Artificial Sequence: Synthetic oligonucleotide
gccucggccagccuaugca

SEQ ID NO: 2440119 - RNA, 19 nt, Artificial Sequence
  Description of Artificial Sequence: Synthetic oligonucleotide
cacuuagugauggacugau

SEQ ID NO: 2440120 - RNA, 19 nt, Artificial Sequence
  Description of Artificial Sequence: Synthetic oligonucleotide
ggcauccacgacaggcugc

SEQ ID NO: 2440121 - RNA, 19 nt, Artificial Sequence
  Description of Artificial Sequence: Synthetic oligonucleotide
gggucuuaacacuggcaua

SEQ ID NO: 2440122 - RNA, 19 nt, Artificial Sequence
  Description of Artificial Sequence: Synthetic oligonucleotide
aagcugcuaggggccaauu

SEQ ID NO: 2440123 - RNA, 19 nt, Artificial Sequence
  Description of Artificial Sequence: Synthetic oligonucleotide
ggccagccuaugcagagua

SEQ ID NO: 2440124 - RNA, 19 nt, Artificial Sequence
  Description of Artificial Sequence: Synthetic oligonucleotide
aggggccaauuccccaaua

SEQ ID NO: 2440125 - RNA, 19 nt, Artificial Sequence
  Description of Artificial Sequence: Synthetic oligonucleotide
gaccuguugcaggcgaggu

SEQ ID NO: 2440126 - RNA, 19 nt, Artificial Sequence
  Description of Artificial Sequence: Synthetic oligonucleotide
ccuugaaucugguuccacu

SEQ ID NO: 2440127 - RNA, 19 nt, Artificial Sequence
  Description of Artificial Sequence: Synthetic oligonucleotide
cggauaccaugcaacagca

SEQ ID NO: 2440128 - RNA, 19 nt, Artificial Sequence
  Description of Artificial Sequence: Synthetic oligonucleotide
ccaaaagacagugggagau

SEQ ID NO: 2440129 - RNA, 19 nt, Artificial Sequence
  Description of Artificial Sequence: Synthetic oligonucleotide
cucagaggaguagcggaua

SEQ ID NO: 2440130 - RNA, 19 nt, Artificial Sequence
  Description of Artificial Sequence: Synthetic oligonucleotide
ccgagccucucugaagaag

SEQ ID NO: 2440131 - RNA, 19 nt, Artificial Sequence
  Description of Artificial Sequence: Synthetic oligonucleotide
ccgagcagccugcccauug

SEQ ID NO: 2440132 - RNA, 19 nt, Artificial Sequence
  Description of Artificial Sequence: Synthetic oligonucleotide
ccgccuuuuccaugaccag

SEQ ID NO: 2440133 - RNA, 19 nt, Artificial Sequence
  Description of Artificial Sequence: Synthetic oligonucleotide
cccggaguugggacccagg

SEQ ID NO: 2440134 - RNA, 19 nt, Artificial Sequence
  Description of Artificial Sequence: Synthetic oligonucleotide
gcucagagauuacccgaaa

SEQ ID NO: 2440135 - RNA, 19 nt, Artificial Sequence
  Description of Artificial Sequence: Synthetic oligonucleotide
cgagcagccugcccauugc

SEQ ID NO: 2440136 - RNA, 19 nt, Artificial Sequence
  Description of Artificial Sequence: Synthetic oligonucleotide
gcagaguacccagguucug

SEQ ID NO: 2440137 - RNA, 19 nt, Artificial Sequence
  Description of Artificial Sequence: Synthetic oligonucleotide
cugguuccacuugauugua

SEQ ID NO: 2440138 - RNA, 19 nt, Artificial Sequence
  Description of Artificial Sequence: Synthetic oligonucleotide
ccuggauggugcccucaug

SEQ ID NO: 2440139 - RNA, 19 nt, Artificial Sequence
  Description of Artificial Sequence: Synthetic oligonucleotide
gauccacacuggccaugcu

SEQ ID NO: 2440140 - RNA, 19 nt, Artificial Sequence
  Description of Artificial Sequence: Synthetic oligonucleotide
gaggaacccaugggguccu

SEQ ID NO: 2440141 - RNA, 19 nt, Artificial Sequence
  Description of Artificial Sequence: Synthetic oligonucleotide
gaggaguagcggauaccau

SEQ ID NO: 2440142 - RNA, 19 nt, Artificial Sequence
  Description of Artificial Sequence: Synthetic oligonucleotide
gucuuaacacuggcauagu

SEQ ID NO: 2440143 - RNA, 19 nt, Artificial Sequence
  Description of Artificial Sequence: Synthetic oligonucleotide
cccuguagccagccucggc

SEQ ID NO: 2440144 - RNA, 19 nt, Artificial Sequence
  Description of Artificial Sequence: Synthetic oligonucleotide
cagugcauacaugccacuu

SEQ ID NO: 2440145 - RNA, 19 nt, Artificial Sequence
  Description of Artificial Sequence: Synthetic oligonucleotide
aggcugcuaggaagcugcu

SEQ ID NO: 2440146 - RNA, 19 nt, Artificial Sequence
  Description of Artificial Sequence: Synthetic oligonucleotide
gcauccacgacaggcugcu

SEQ ID NO: 2440147 - RNA, 19 nt, Artificial Sequence
  Description of Artificial Sequence: Synthetic oligonucleotide
aggaacccaugggguccug

SEQ ID NO: 2440148 - RNA, 19 nt, Artificial Sequence
  Description of Artificial Sequence: Synthetic oligonucleotide
caccuggauggugcccuca

SEQ ID NO: 2440149 - RNA, 19 nt, Artificial Sequence
  Description of Artificial Sequence: Synthetic oligonucleotide
gcccuguagccagccucgg

SEQ ID NO: 2440150 - RNA, 19 nt, Artificial Sequence
  Description of Artificial Sequence: Synthetic oligonucleotide
cagugccacucaucaggcu

SEQ ID NO: 2440151 - RNA, 19 nt, Artificial Sequence
  Description of Artificial Sequence: Synthetic oligonucleotide
gccagccuaugcagaguac

SEQ ID NO: 2440152 - RNA, 19 nt, Artificial Sequence
  Description of Artificial Sequence: Synthetic oligonucleotide
gcugauccacacuggccau

SEQ ID NO: 2440153 - RNA, 19 nt, Artificial Sequence
  Description of Artificial Sequence: Synthetic oligonucleotide
ccuguaggagaagcucaga

SEQ ID NO: 2440154 - RNA, 19 nt, Artificial Sequence
  Description of Artificial Sequence: Synthetic oligonucleotide
aggcgagguucaagccaga

SEQ ID NO: 2440155 - RNA, 19 nt, Artificial Sequence
  Description of Artificial Sequence: Synthetic oligonucleotide
ggaagcugcuaggggccaa

SEQ ID NO: 2440156 - RNA, 19 nt, Artificial Sequence
  Description of Artificial Sequence: Synthetic oligonucleotide
gccgagccucucugaagaa

SEQ ID NO: 2440157 - RNA, 19 nt, Artificial Sequence
  Description of Artificial Sequence: Synthetic oligonucleotide
ccucaugcugauccacacu

SEQ ID NO: 2440158 - RNA, 19 nt, Artificial Sequence
  Description of Artificial Sequence: Synthetic oligonucleotide
ccacacuggccaugcucga

SEQ ID NO: 2440159 - RNA, 19 nt, Artificial Sequence
  Description of Artificial Sequence: Synthetic oligonucleotide
ccaggccgagccucucuga

SEQ ID NO: 2440160 - RNA, 19 nt, Artificial Sequence
  Description of Artificial Sequence: Synthetic oligonucleotide
ccacgacaggcugcuagga

SEQ ID NO: 2440161 - RNA, 19 nt, Artificial Sequence
  Description of Artificial Sequence: Synthetic oligonucleotide
accgagcagccugcccauu

SEQ ID NO: 2440162 - RNA, 19 nt, Artificial Sequence
  Description of Artificial Sequence: Synthetic oligonucleotide
ccacuugauuguaccuccu

SEQ ID NO: 2440163 - RNA, 19 nt, Artificial Sequence
  Description of Artificial Sequence: Synthetic oligonucleotide
caaucagagcuggggucuu

SEQ ID NO: 2440164 - RNA, 19 nt, Artificial Sequence
  Description of Artificial Sequence: Synthetic oligonucleotide
ccagccucggccagccuau

SEQ ID NO: 2440165 - RNA, 19 nt, Artificial Sequence
  Description of Artificial Sequence: Synthetic oligonucleotide
caggagcugcugcuuccuu

SEQ ID NO: 2440166 - RNA, 19 nt, Artificial Sequence
  Description of Artificial Sequence: Synthetic oligonucleotide
ccccggaguugggacccag

SEQ ID NO: 2440167 - RNA, 19 nt, Artificial Sequence
  Description of Artificial Sequence: Synthetic oligonucleotide
ccccuugaaucugguucca

SEQ ID NO: 2440168 - RNA, 19 nt, Artificial Sequence
  Description of Artificial Sequence: Synthetic oligonucleotide
gccccgccuuuuccaugac

SEQ ID NO: 2440169 - RNA, 19 nt, Artificial Sequence
  Description of Artificial Sequence: Synthetic oligonucleotide
cauccacgacaggcugcua

SEQ ID NO: 2440170 - RNA, 19 nt, Artificial Sequence
  Description of Artificial Sequence: Synthetic oligonucleotide
ccauugccaggccgagccu

SEQ ID NO: 2440171 - RNA, 19 nt, Artificial Sequence
  Description of Artificial Sequence: Synthetic oligonucleotide
aagaauuucagguucauac

SEQ ID NO: 2440172 - RNA, 19 nt, Artificial Sequence
  Description of Artificial Sequence: Synthetic oligonucleotide
aaauauucagucaugaggc

SEQ ID NO: 2440173 - RNA, 19 nt, Artificial Sequence
  Description of Artificial Sequence: Synthetic oligonucleotide
aaugguaucuauuacuuca

SEQ ID NO: 2440174 - RNA, 19 nt, Artificial Sequence
  Description of Artificial Sequence: Synthetic oligonucleotide
uguuuuaaugcaaaaguag

SEQ ID NO: 2440175 - RNA, 19 nt, Artificial Sequence
  Description of Artificial Sequence: Synthetic oligonucleotide
uauuacuucaaaaugagau

SEQ ID NO: 2440176 - RNA, 19 nt, Artificial Sequence
  Description of Artificial Sequence: Synthetic oligonucleotide
uuacauucaguucugaccc

SEQ ID NO: 2440177 - RNA, 19 nt, Artificial Sequence
  Description of Artificial Sequence: Synthetic oligonucleotide
aaagauaugugauuccuug

SEQ ID NO: 2440178 - RNA, 19 nt, Artificial Sequence
  Description of Artificial Sequence: Synthetic oligonucleotide
aaucgauuuacaugugagc

SEQ ID NO: 2440179 - RNA, 19 nt, Artificial Sequence
  Description of Artificial Sequence: Synthetic oligonucleotide
agauucauaguccagauca

SEQ ID NO: 2440180 - RNA, 19 nt, Artificial Sequence
  Description of Artificial Sequence: Synthetic oligonucleotide
ugaaauauaucauuaagau

SEQ ID NO: 2440181 - RNA, 19 nt, Artificial Sequence
  Description of Artificial Sequence: Synthetic oligonucleotide
cuaugauucacaaagugag

SEQ ID NO: 2440182 - RNA, 19 nt, Artificial Sequence
  Description of Artificial Sequence: Synthetic oligonucleotide
uuugauaaucgaaagucag

SEQ ID NO: 2440183 - RNA, 19 nt, Artificial Sequence
  Description of Artificial Sequence: Synthetic oligonucleotide
uuauaccugaaauauauca

SEQ ID NO: 2440184 - RNA, 19 nt, Artificial Sequence
  Description of Artificial Sequence: Synthetic oligonucleotide
aacucuuaagaauuucagg

SEQ ID NO: 2440185 - RNA, 19 nt, Artificial Sequence
  Description of Artificial Sequence: Synthetic oligonucleotide
ucuauuacuucaaaaugag

SEQ ID NO: 2440186 - RNA, 19 nt, Artificial Sequence
  Description of Artificial Sequence: Synthetic oligonucleotide
gaugccaauguuuuaaugc

SEQ ID NO: 2440187 - RNA, 19 nt, Artificial Sequence
  Description of Artificial Sequence: Synthetic oligonucleotide
aagaguaucaagugaaacu

SEQ ID NO: 2440188 - RNA, 19 nt, Artificial Sequence
  Description of Artificial Sequence: Synthetic oligonucleotide
uaucuauuacuucaaaaug

SEQ ID NO: 2440189 - RNA, 19 nt, Artificial Sequence
  Description of Artificial Sequence: Synthetic oligonucleotide
aauuguuuagauuccuuug

SEQ ID NO: 2440190 - RNA, 19 nt, Artificial Sequence
  Description of Artificial Sequence: Synthetic oligonucleotide
ucaaagaagcauaauggcc

SEQ ID NO: 2440191 - RNA, 19 nt, Artificial Sequence
  Description of Artificial Sequence: Synthetic oligonucleotide
ugucauauaauuguccacg

SEQ ID NO: 2440192 - RNA, 19 nt, Artificial Sequence
  Description of Artificial Sequence: Synthetic oligonucleotide
ucgaugaaaacauuaaaga

SEQ ID NO: 2440193 - RNA, 19 nt, Artificial Sequence
  Description of Artificial Sequence: Synthetic oligonucleotide
auuucuuuaaguuucaguu

SEQ ID NO: 2440194 - RNA, 19 nt, Artificial Sequence
  Description of Artificial Sequence: Synthetic oligonucleotide
uuccaaucgauuuacaugu

SEQ ID NO: 2440195 - RNA, 19 nt, Artificial Sequence
  Description of Artificial Sequence: Synthetic oligonucleotide
cuaucaaagaagcauaaug

SEQ ID NO: 2440196 - RNA, 19 nt, Artificial Sequence
  Description of Artificial Sequence: Synthetic oligonucleotide
agaucaagcugaaagaagc

SEQ ID NO: 2440197 - RNA, 19 nt, Artificial Sequence
  Description of Artificial Sequence: Synthetic oligonucleotide
uuuaaguuucaguugaggu

SEQ ID NO: 2440198 - RNA, 19 nt, Artificial Sequence
  Description of Artificial Sequence: Synthetic oligonucleotide
auaaucgaaagucagcucu

SEQ ID NO: 2440199 - RNA, 19 nt, Artificial Sequence
  Description of Artificial Sequence: Synthetic oligonucleotide
uauguccuaucaaagaagc

SEQ ID NO: 2440200 - RNA, 19 nt, Artificial Sequence
  Description of Artificial Sequence: Synthetic oligonucleotide
uuucauuugauaaucgaaa

SEQ ID NO: 2440201 - RNA, 19 nt, Artificial Sequence
  Description of Artificial Sequence: Synthetic oligonucleotide
uguaaugguaucuauuacu

SEQ ID NO: 2440202 - RNA, 19 nt, Artificial Sequence
  Description of Artificial Sequence: Synthetic oligonucleotide
ucaagugaaacuaggcaag

SEQ ID NO: 2440203 - RNA, 19 nt, Artificial Sequence
  Description of Artificial Sequence: Synthetic oligonucleotide
uaucaagugaaacuaggca

SEQ ID NO: 2440204 - RNA, 19 nt, Artificial Sequence
  Description of Artificial Sequence: Synthetic oligonucleotide
cuuguagucacacaaguac

SEQ ID NO: 2440205 - RNA, 19 nt, Artificial Sequence
  Description of Artificial Sequence: Synthetic oligonucleotide
uucauuugauaaucgaaag

SEQ ID NO: 2440206 - RNA, 19 nt, Artificial Sequence
  Description of Artificial Sequence: Synthetic oligonucleotide
aagauaugugauuccuugg

SEQ ID NO: 2440207 - RNA, 19 nt, Artificial Sequence
  Description of Artificial Sequence: Synthetic oligonucleotide
ugugaauucaucagauuca

SEQ ID NO: 2440208 - RNA, 19 nt, Artificial Sequence
  Description of Artificial Sequence: Synthetic oligonucleotide
uuuguaaugguaucuauua

SEQ ID NO: 2440209 - RNA, 19 nt, Artificial Sequence
  Description of Artificial Sequence: Synthetic oligonucleotide
uugguugucauauaauugu

SEQ ID NO: 2440210 - RNA, 19 nt, Artificial Sequence
  Description of Artificial Sequence: Synthetic oligonucleotide
uuauguccuaucaaagaag

SEQ ID NO: 2440211 - RNA, 19 nt, Artificial Sequence
  Description of Artificial Sequence: Synthetic oligonucleotide
uuuuaaugcaaaaguagaa

SEQ ID NO: 2440212 - RNA, 19 nt, Artificial Sequence
  Description of Artificial Sequence: Synthetic oligonucleotide
agauuuuccuuuaacaggg

SEQ ID NO: 2440213 - RNA, 19 nt, Artificial Sequence
  Description of Artificial Sequence: Synthetic oligonucleotide
auuccaaucgauuuacaug

SEQ ID NO: 2440214 - RNA, 19 nt, Artificial Sequence
  Description of Artificial Sequence: Synthetic oligonucleotide
augauucacaaagugagac

SEQ ID NO: 2440215 - RNA, 19 nt, Artificial Sequence
  Description of Artificial Sequence: Synthetic oligonucleotide
agaaucugaagauaauucu

SEQ ID NO: 2440216 - RNA, 19 nt, Artificial Sequence
  Description of Artificial Sequence: Synthetic oligonucleotide
agaaccuuucauuugauaa

SEQ ID NO: 2440217 - RNA, 19 nt, Artificial Sequence
  Description of Artificial Sequence: Synthetic oligonucleotide
aucauuaagaugccaaugu

SEQ ID NO: 2440218 - RNA, 19 nt, Artificial Sequence
  Description of Artificial Sequence: Synthetic oligonucleotide
agaccugaagauuuggguc

SEQ ID NO: 2440219 - RNA, 19 nt, Artificial Sequence
  Description of Artificial Sequence: Synthetic oligonucleotide
aaugcaaaaguagaaaaua

SEQ ID NO: 2440220 - RNA, 19 nt, Artificial Sequence
  Description of Artificial Sequence: Synthetic oligonucleotide
uccauaucgagcugcaucc

SEQ ID NO: 2440221 - RNA, 19 nt, Artificial Sequence
  Description of Artificial Sequence: Synthetic oligonucleotide
accucggcaagucucagcc

SEQ ID NO: 2440222 - RNA, 19 nt, Artificial Sequence
  Description of Artificial Sequence: Synthetic oligonucleotide
ucacauuuacuuuuauacc

SEQ ID NO: 2440223 - RNA, 19 nt, Artificial Sequence
  Description of Artificial Sequence: Synthetic oligonucleotide
ugauaaucgaaagucagcu

SEQ ID NO: 2440224 - RNA, 19 nt, Artificial Sequence
  Description of Artificial Sequence: Synthetic oligonucleotide
aaaguagaaaauauaguaa

SEQ ID NO: 2440225 - RNA, 19 nt, Artificial Sequence
  Description of Artificial Sequence: Synthetic oligonucleotide
aucgaugaaaacauuaaag

SEQ ID NO: 2440226 - RNA, 19 nt, Artificial Sequence
  Description of Artificial Sequence: Synthetic oligonucleotide
uuaucgaugaaaacauuaa

SEQ ID NO: 2440227 - RNA, 19 nt, Artificial Sequence
  Description of Artificial Sequence: Synthetic oligonucleotide
aagaccugaagauuugggu

SEQ ID NO: 2440228 - RNA, 19 nt, Artificial Sequence
  Description of Artificial Sequence: Synthetic oligonucleotide
uugugauuaccccuuguag

SEQ ID NO: 2440229 - RNA, 19 nt, Artificial Sequence
  Description of Artificial Sequence: Synthetic oligonucleotide
ugugauuaccccuuguagu

SEQ ID NO: 2440230 - RNA, 19 nt, Artificial Sequence
  Description of Artificial Sequence: Synthetic oligonucleotide
aacagugcuauccugggaa

SEQ ID NO: 2440231 - RNA, 19 nt, Artificial Sequence
  Description of Artificial Sequence: Synthetic oligonucleotide
uugauaaucgaaagucagc

SEQ ID NO: 2440232 - RNA, 19 nt, Artificial Sequence
  Description of Artificial Sequence: Synthetic oligonucleotide
ucauaauuguuuagauucc

SEQ ID NO: 2440233 - RNA, 19 nt, Artificial Sequence
  Description of Artificial Sequence: Synthetic oligonucleotide
uguuauguccuaucaaaga

SEQ ID NO: 2440234 - RNA, 19 nt, Artificial Sequence
  Description of Artificial Sequence: Synthetic oligonucleotide
acuauggacuucuagagaa

SEQ ID NO: 2440235 - RNA, 19 nt, Artificial Sequence
  Description of Artificial Sequence: Synthetic oligonucleotide
ucauuugauaaucgaaagu

SEQ ID NO: 2440236 - RNA, 19 nt, Artificial Sequence
  Description of Artificial Sequence: Synthetic oligonucleotide
aucaagugaaacuaggcaa

SEQ ID NO: 2440237 - RNA, 19 nt, Artificial Sequence
  Description of Artificial Sequence: Synthetic oligonucleotide
acuuuuauaccugaaauau

SEQ ID NO: 2440238 - RNA, 19 nt, Artificial Sequence
  Description of Artificial Sequence: Synthetic oligonucleotide
caaagaagcauaauggcca

SEQ ID NO: 2440239 - RNA, 19 nt, Artificial Sequence
  Description of Artificial Sequence: Synthetic oligonucleotide
agugaaacuaggcaaggca

SEQ ID NO: 2440240 - RNA, 19 nt, Artificial Sequence
  Description of Artificial Sequence: Synthetic oligonucleotide
gauucacaaagugagacac

SEQ ID NO: 2440241 - RNA, 19 nt, Artificial Sequence
  Description of Artificial Sequence: Synthetic oligonucleotide
uagucauauuguuaugucc

SEQ ID NO: 2440242 - RNA, 19 nt, Artificial Sequence
  Description of Artificial Sequence: Synthetic oligonucleotide
uuaaguuucaguugaggua

SEQ ID NO: 2440243 - RNA, 19 nt, Artificial Sequence
  Description of Artificial Sequence: Synthetic oligonucleotide
uccagaaccuuucauuuga

SEQ ID NO: 2440244 - RNA, 19 nt, Artificial Sequence
  Description of Artificial Sequence: Synthetic oligonucleotide
uauggacuucuagagaagg

SEQ ID NO: 2440245 - RNA, 19 nt, Artificial Sequence
  Description of Artificial Sequence: Synthetic oligonucleotide
caaucgauuuacaugugag

SEQ ID NO: 2440246 - RNA, 19 nt, Artificial Sequence
  Description of Artificial Sequence: Synthetic oligonucleotide
agcugaaagaagcuuucac

SEQ ID NO: 2440247 - RNA, 19 nt, Artificial Sequence
  Description of Artificial Sequence: Synthetic oligonucleotide
uggucaauagaaucugaag

SEQ ID NO: 2440248 - RNA, 19 nt, Artificial Sequence
  Description of Artificial Sequence: Synthetic oligonucleotide
cuugguugucauauaauug

SEQ ID NO: 2440249 - RNA, 19 nt, Artificial Sequence
  Description of Artificial Sequence: Synthetic oligonucleotide
gaagcuuucacauuuacuu

SEQ ID NO: 2440250 - RNA, 19 nt, Artificial Sequence
  Description of Artificial Sequence: Synthetic oligonucleotide
uuaaagaccugaagauuug

SEQ ID NO: 2440251 - RNA, 19 nt, Artificial Sequence
  Description of Artificial Sequence: Synthetic oligonucleotide
auauuguuauguccuauca

SEQ ID NO: 2440252 - RNA, 19 nt, Artificial Sequence
  Description of Artificial Sequence: Synthetic oligonucleotide
ucauauaauuguccacgcc

SEQ ID NO: 2440253 - RNA, 19 nt, Artificial Sequence
  Description of Artificial Sequence: Synthetic oligonucleotide
uaauggccagccacuaugg

SEQ ID NO: 2440254 - RNA, 19 nt, Artificial Sequence
  Description of Artificial Sequence: Synthetic oligonucleotide
guucuuguggaaaacagug

SEQ ID NO: 2440255 - RNA, 19 nt, Artificial Sequence
  Description of Artificial Sequence: Synthetic oligonucleotide
aguaucaagugaaacuagg

SEQ ID NO: 2440256 - RNA, 19 nt, Artificial Sequence
  Description of Artificial Sequence: Synthetic oligonucleotide
ugaaacuaggcaaggcaca

SEQ ID NO: 2440257 - RNA, 19 nt, Artificial Sequence
  Description of Artificial Sequence: Synthetic oligonucleotide
aucgauuuacaugugagcu

SEQ ID NO: 2440258 - RNA, 19 nt, Artificial Sequence
  Description of Artificial Sequence: Synthetic oligonucleotide
uaucgaugaaaacauuaaa

SEQ ID NO: 2440259 - RNA, 19 nt, Artificial Sequence
  Description of Artificial Sequence: Synthetic oligonucleotide
agauaugugauuccuuggu

SEQ ID NO: 2440260 - RNA, 19 nt, Artificial Sequence
  Description of Artificial Sequence: Synthetic oligonucleotide
guugucauauaauugucca

SEQ ID NO: 2440261 - RNA, 19 nt, Artificial Sequence
  Description of Artificial Sequence: Synthetic oligonucleotide
aauauucagucaugaggcu

SEQ ID NO: 2440262 - RNA, 19 nt, Artificial Sequence
  Description of Artificial Sequence: Synthetic oligonucleotide
aucuauuacuucaaaauga

SEQ ID NO: 2440263 - RNA, 19 nt, Artificial Sequence
  Description of Artificial Sequence: Synthetic oligonucleotide
uguccuaucaaagaagcau

SEQ ID NO: 2440264 - RNA, 19 nt, Artificial Sequence
  Description of Artificial Sequence: Synthetic oligonucleotide
ugaagauaauucuccagaa

SEQ ID NO: 2440265 - RNA, 19 nt, Artificial Sequence
  Description of Artificial Sequence: Synthetic oligonucleotide
gaagauaauucuccagaac

SEQ ID NO: 2440266 - RNA, 19 nt, Artificial Sequence
  Description of Artificial Sequence: Synthetic oligonucleotide
agugcuauccugggaagcc

SEQ ID NO: 2440267 - RNA, 19 nt, Artificial Sequence
  Description of Artificial Sequence: Synthetic oligonucleotide
ggucaauagaaucugaaga

SEQ ID NO: 2440268 - RNA, 19 nt, Artificial Sequence
  Description of Artificial Sequence: Synthetic oligonucleotide
agaauuucagguucauaca

SEQ ID NO: 2440269 - RNA, 19 nt, Artificial Sequence
  Description of Artificial Sequence: Synthetic oligonucleotide
ucaagcugaaagaagcuuu

SEQ ID NO: 2440270 - RNA, 19 nt, Artificial Sequence
  Description of Artificial Sequence: Synthetic oligonucleotide
auggccagccacuauggac

SEQ ID NO: 2440271 - RNA, 19 nt, Artificial Sequence
  Description of Artificial Sequence: Synthetic oligonucleotide
uaugugauuccuugguugu

SEQ ID NO: 2440272 - RNA, 19 nt, Artificial Sequence
  Description of Artificial Sequence: Synthetic oligonucleotide
uguagucacacaaguacuc

SEQ ID NO: 2440273 - RNA, 19 nt, Artificial Sequence
  Description of Artificial Sequence: Synthetic oligonucleotide
uaugauucacaaagugaga

SEQ ID NO: 2440274 - RNA, 19 nt, Artificial Sequence
  Description of Artificial Sequence: Synthetic oligonucleotide
guuuuaaugcaaaaguaga

SEQ ID NO: 2440275 - RNA, 19 nt, Artificial Sequence
  Description of Artificial Sequence: Synthetic oligonucleotide
uuccauaucgagcugcauc

SEQ ID NO: 2440276 - RNA, 19 nt, Artificial Sequence
  Description of Artificial Sequence: Synthetic oligonucleotide
ugaucagagauuuuccuuu

SEQ ID NO: 2440277 - RNA, 19 nt, Artificial Sequence
  Description of Artificial Sequence: Synthetic oligonucleotide
guuauguccuaucaaagaa

SEQ ID NO: 2440278 - RNA, 19 nt, Artificial Sequence
  Description of Artificial Sequence: Synthetic oligonucleotide
uacuuuuauaccugaaaua

SEQ ID NO: 2440279 - RNA, 19 nt, Artificial Sequence
  Description of Artificial Sequence: Synthetic oligonucleotide
guaucaagguuaucgauga

SEQ ID NO: 2440280 - RNA, 19 nt, Artificial Sequence
  Description of Artificial Sequence: Synthetic oligonucleotide
ugauucacaaagugagaca

SEQ ID NO: 2440281 - RNA, 19 nt, Artificial Sequence
  Description of Artificial Sequence: Synthetic oligonucleotide
cuuuaaguuucaguugagg

SEQ ID NO: 2440282 - RNA, 19 nt, Artificial Sequence
  Description of Artificial Sequence: Synthetic oligonucleotide
agucauauuguuauguccu

SEQ ID NO: 2440283 - RNA, 19 nt, Artificial Sequence
  Description of Artificial Sequence: Synthetic oligonucleotide
uuguaaugguaucuauuac

SEQ ID NO: 2440284 - RNA, 19 nt, Artificial Sequence
  Description of Artificial Sequence: Synthetic oligonucleotide
auaauuccugaagaguauc

SEQ ID NO: 2440285 - RNA, 19 nt, Artificial Sequence
  Description of Artificial Sequence: Synthetic oligonucleotide
auuaaagaccugaagauuu

SEQ ID NO: 2440286 - RNA, 19 nt, Artificial Sequence
  Description of Artificial Sequence: Synthetic oligonucleotide
ucuuuaaguuucaguugag

SEQ ID NO: 2440287 - RNA, 19 nt, Artificial Sequence
  Description of Artificial Sequence: Synthetic oligonucleotide
uacuccaccucauaauugu

SEQ ID NO: 2440288 - RNA, 19 nt, Artificial Sequence
  Description of Artificial Sequence: Synthetic oligonucleotide
cuuucuacauaauuccuga

SEQ ID NO: 2440289 - RNA, 19 nt, Artificial Sequence
  Description of Artificial Sequence: Synthetic oligonucleotide
ucgagcugcauccacugug

SEQ ID NO: 2440290 - RNA, 19 nt, Artificial Sequence
  Description of Artificial Sequence: Synthetic oligonucleotide
cugaagauaauucuccaga

SEQ ID NO: 2440291 - RNA, 19 nt, Artificial Sequence
  Description of Artificial Sequence: Synthetic oligonucleotide
uggacuucuagagaaggug

SEQ ID NO: 2440292 - RNA, 19 nt, Artificial Sequence
  Description of Artificial Sequence: Synthetic oligonucleotide
ugagcuuucuuucuacaua

SEQ ID NO: 2440293 - RNA, 19 nt, Artificial Sequence
  Description of Artificial Sequence: Synthetic oligonucleotide
auaccugaaauauaucauu

SEQ ID NO: 2440294 - RNA, 19 nt, Artificial Sequence
  Description of Artificial Sequence: Synthetic oligonucleotide
acuaugauucacaaaguga

SEQ ID NO: 2440295 - RNA, 19 nt, Artificial Sequence
  Description of Artificial Sequence: Synthetic oligonucleotide
aaccucggcaagucucagc

SEQ ID NO: 2440296 - RNA, 19 nt, Artificial Sequence
  Description of Artificial Sequence: Synthetic oligonucleotide
aaguacuccaccucauaau

SEQ ID NO: 2440297 - RNA, 19 nt, Artificial Sequence
  Description of Artificial Sequence: Synthetic oligonucleotide
uuuggugauuccaaucgau

SEQ ID NO: 2440298 - RNA, 19 nt, Artificial Sequence
  Description of Artificial Sequence: Synthetic oligonucleotide
cuucacuugugauuacccc

SEQ ID NO: 2440299 - RNA, 19 nt, Artificial Sequence
  Description of Artificial Sequence: Synthetic oligonucleotide
uccaaugguccucuuaguc

SEQ ID NO: 2440300 - RNA, 19 nt, Artificial Sequence
  Description of Artificial Sequence: Synthetic oligonucleotide
cauauuguuauguccuauc

SEQ ID NO: 2440301 - RNA, 19 nt, Artificial Sequence
  Description of Artificial Sequence: Synthetic oligonucleotide
agaguaucaagugaaacua

SEQ ID NO: 2440302 - RNA, 19 nt, Artificial Sequence
  Description of Artificial Sequence: Synthetic oligonucleotide
uuuccuuuaacaggguuaa

SEQ ID NO: 2440303 - RNA, 19 nt, Artificial Sequence
  Description of Artificial Sequence: Synthetic oligonucleotide
acuucaaaaugagaucaag

SEQ ID NO: 2440304 - RNA, 19 nt, Artificial Sequence
  Description of Artificial Sequence: Synthetic oligonucleotide
ugggaagccgaguaucaag

SEQ ID NO: 2440305 - RNA, 19 nt, Artificial Sequence
  Description of Artificial Sequence: Synthetic oligonucleotide
auuugggucacaacuauga

SEQ ID NO: 2440306 - RNA, 19 nt, Artificial Sequence
  Description of Artificial Sequence: Synthetic oligonucleotide
uauggucaauagaaucuga

SEQ ID NO: 2440307 - RNA, 19 nt, Artificial Sequence
  Description of Artificial Sequence: Synthetic oligonucleotide
gagaucaagcugaaagaag

SEQ ID NO: 2440308 - RNA, 19 nt, Artificial Sequence
  Description of Artificial Sequence: Synthetic oligonucleotide
gucauauaauuguccacgc

SEQ ID NO: 2440309 - RNA, 19 nt, Artificial Sequence
  Description of Artificial Sequence: Synthetic oligonucleotide
aguugagguaaccucggca

SEQ ID NO: 2440310 - RNA, 19 nt, Artificial Sequence
  Description of Artificial Sequence: Synthetic oligonucleotide
auaauuguccacgccuuuc

SEQ ID NO: 2440311 - RNA, 19 nt, Artificial Sequence
  Description of Artificial Sequence: Synthetic oligonucleotide
gguccucuuagucauauug

SEQ ID NO: 2440312 - RNA, 19 nt, Artificial Sequence
  Description of Artificial Sequence: Synthetic oligonucleotide
ucauuaagaugccaauguu

SEQ ID NO: 2440313 - RNA, 19 nt, Artificial Sequence
  Description of Artificial Sequence: Synthetic oligonucleotide
agggcuauggucaauagaa

SEQ ID NO: 2440314 - RNA, 19 nt, Artificial Sequence
  Description of Artificial Sequence: Synthetic oligonucleotide
guaucaagugaaacuaggc

SEQ ID NO: 2440315 - RNA, 19 nt, Artificial Sequence
  Description of Artificial Sequence: Synthetic oligonucleotide
aagucucagccccacauuu

SEQ ID NO: 2440316 - RNA, 19 nt, Artificial Sequence
  Description of Artificial Sequence: Synthetic oligonucleotide
ccuuuggugauuccaaucg

SEQ ID NO: 2440317 - RNA, 19 nt, Artificial Sequence
  Description of Artificial Sequence: Synthetic oligonucleotide
uuccuugguugucauauaa

SEQ ID NO: 2440318 - RNA, 19 nt, Artificial Sequence
  Description of Artificial Sequence: Synthetic oligonucleotide
ccgaguaucaagguuaucg

SEQ ID NO: 2440319 - RNA, 19 nt, Artificial Sequence
  Description of Artificial Sequence: Synthetic oligonucleotide
ucgaaagucagcucuucuc

SEQ ID NO: 2440320 - RNA, 19 nt, Artificial Sequence
  Description of Artificial Sequence: Synthetic oligonucleotide
acacaaguacuccaccuca

SEQ ID NO: 2440321 - RNA, 19 nt, Artificial Sequence
  Description of Artificial Sequence: Synthetic oligonucleotide
uccuaucaaagaagcauaa

SEQ ID NO: 2440322 - RNA, 19 nt, Artificial Sequence
  Description of Artificial Sequence: Synthetic oligonucleotide
gauaaucgaaagucagcuc

SEQ ID NO: 2440323 - RNA, 19 nt, Artificial Sequence
  Description of Artificial Sequence: Synthetic oligonucleotide
aagaagcauaauggccagc

SEQ ID NO: 2440324 - RNA, 19 nt, Artificial Sequence
  Description of Artificial Sequence: Synthetic oligonucleotide
uucuagagaaggugaucag

SEQ ID NO: 2440325 - RNA, 19 nt, Artificial Sequence
  Description of Artificial Sequence: Synthetic oligonucleotide
auuugauaaucgaaaguca

SEQ ID NO: 2440326 - RNA, 19 nt, Artificial Sequence
  Description of Artificial Sequence: Synthetic oligonucleotide
cauauaauuguccacgccu

SEQ ID NO: 2440327 - RNA, 19 nt, Artificial Sequence
  Description of Artificial Sequence: Synthetic oligonucleotide
acauaauuccugaagagua

SEQ ID NO: 2440328 - RNA, 19 nt, Artificial Sequence
  Description of Artificial Sequence: Synthetic oligonucleotide
cucggcaagucucagcccc

SEQ ID NO: 2440329 - RNA, 19 nt, Artificial Sequence
  Description of Artificial Sequence: Synthetic oligonucleotide
aguuucaguugagguaacc

SEQ ID NO: 2440330 - RNA, 19 nt, Artificial Sequence
  Description of Artificial Sequence: Synthetic oligonucleotide
agaugccaauguuuuaaug

SEQ ID NO: 2440331 - RNA, 19 nt, Artificial Sequence
  Description of Artificial Sequence: Synthetic oligonucleotide
cacauuuccauaucgagcu

SEQ ID NO: 2440332 - RNA, 19 nt, Artificial Sequence
  Description of Artificial Sequence: Synthetic oligonucleotide
guugagguaaccucggcaa

SEQ ID NO: 2440333 - RNA, 19 nt, Artificial Sequence
  Description of Artificial Sequence: Synthetic oligonucleotide
uugagguaaccucggcaag

SEQ ID NO: 2440334 - RNA, 19 nt, Artificial Sequence
  Description of Artificial Sequence: Synthetic oligonucleotide
ucagucaugaggcuccauu

SEQ ID NO: 2440335 - RNA, 19 nt, Artificial Sequence
  Description of Artificial Sequence: Synthetic oligonucleotide
ucaauagaaucugaagaua

SEQ ID NO: 2440336 - RNA, 19 nt, Artificial Sequence
  Description of Artificial Sequence: Synthetic oligonucleotide
uauccugggaagccgagua

SEQ ID NO: 2440337 - RNA, 19 nt, Artificial Sequence
  Description of Artificial Sequence: Synthetic oligonucleotide
agauaauucuccagaaccu

SEQ ID NO: 2440338 - RNA, 19 nt, Artificial Sequence
  Description of Artificial Sequence: Synthetic oligonucleotide
uggugauuccaaucgauuu

SEQ ID NO: 2440339 - RNA, 19 nt, Artificial Sequence
  Description of Artificial Sequence: Synthetic oligonucleotide
cuucuagagaaggugauca

SEQ ID NO: 2440340 - RNA, 19 nt, Artificial Sequence
  Description of Artificial Sequence: Synthetic oligonucleotide
ugaagauuugggucacaac

SEQ ID NO: 2440341 - RNA, 19 nt, Artificial Sequence
  Description of Artificial Sequence: Synthetic oligonucleotide
ugguugucauauaauuguc

SEQ ID NO: 2440342 - RNA, 19 nt, Artificial Sequence
  Description of Artificial Sequence: Synthetic oligonucleotide
uuuuaugguucuuguggaa

SEQ ID NO: 2440343 - RNA, 19 nt, Artificial Sequence
  Description of Artificial Sequence: Synthetic oligonucleotide
aaacagugcuauccuggga

SEQ ID NO: 2440344 - RNA, 19 nt, Artificial Sequence
  Description of Artificial Sequence: Synthetic oligonucleotide
gaguaucaagugaaacuag

SEQ ID NO: 2440345 - RNA, 19 nt, Artificial Sequence
  Description of Artificial Sequence: Synthetic oligonucleotide
cuauggucaauagaaucug

SEQ ID NO: 2440346 - RNA, 19 nt, Artificial Sequence
  Description of Artificial Sequence: Synthetic oligonucleotide
uucuucacuugugauuacc

SEQ ID NO: 2440347 - RNA, 19 nt, Artificial Sequence
  Description of Artificial Sequence: Synthetic oligonucleotide
uuucagguucauacauaca

SEQ ID NO: 2440348 - RNA, 19 nt, Artificial Sequence
  Description of Artificial Sequence: Synthetic oligonucleotide
accucauaauuguuuagau

SEQ ID NO: 2440349 - RNA, 19 nt, Artificial Sequence
  Description of Artificial Sequence: Synthetic oligonucleotide
caagguuaucgaugaaaac

SEQ ID NO: 2440350 - RNA, 19 nt, Artificial Sequence
  Description of Artificial Sequence: Synthetic oligonucleotide
guuaucgaugaaaacauua

SEQ ID NO: 2440351 - RNA, 19 nt, Artificial Sequence
  Description of Artificial Sequence: Synthetic oligonucleotide
uugggucacaacuaugauu

SEQ ID NO: 2440352 - RNA, 19 nt, Artificial Sequence
  Description of Artificial Sequence: Synthetic oligonucleotide
gucaauagaaucugaagau

SEQ ID NO: 2440353 - RNA, 19 nt, Artificial Sequence
  Description of Artificial Sequence: Synthetic oligonucleotide
gugaaacuaggcaaggcac

SEQ ID NO: 2440354 - RNA, 19 nt, Artificial Sequence
  Description of Artificial Sequence: Synthetic oligonucleotide
ugaaagaagcuuucacauu

SEQ ID NO: 2440355 - RNA, 19 nt, Artificial Sequence
  Description of Artificial Sequence: Synthetic oligonucleotide
cuauggacuucuagagaag

SEQ ID NO: 2440356 - RNA, 19 nt, Artificial Sequence
  Description of Artificial Sequence: Synthetic oligonucleotide
uccucuuagucauauuguu

SEQ ID NO: 2440357 - RNA, 19 nt, Artificial Sequence
  Description of Artificial Sequence: Synthetic oligonucleotide
uuugggucacaacuaugau

SEQ ID NO: 2440358 - RNA, 19 nt, Artificial Sequence
  Description of Artificial Sequence: Synthetic oligonucleotide
accccuuguagucacacaa

SEQ ID NO: 2440359 - RNA, 19 nt, Artificial Sequence
  Description of Artificial Sequence: Synthetic oligonucleotide
uagagaaggugaucagaga

SEQ ID NO: 2440360 - RNA, 19 nt, Artificial Sequence
  Description of Artificial Sequence: Synthetic oligonucleotide
gaaagucagcucuucucca

SEQ ID NO: 2440361 - RNA, 19 nt, Artificial Sequence
  Description of Artificial Sequence: Synthetic oligonucleotide
gcugaaagaagcuuucaca

SEQ ID NO: 2440362 - RNA, 19 nt, Artificial Sequence
  Description of Artificial Sequence: Synthetic oligonucleotide
caagugaaacuaggcaagg

SEQ ID NO: 2440363 - RNA, 19 nt, Artificial Sequence
  Description of Artificial Sequence: Synthetic oligonucleotide
aagauuugggucacaacua

SEQ ID NO: 2440364 - RNA, 19 nt, Artificial Sequence
  Description of Artificial Sequence: Synthetic oligonucleotide
cagccccacauuuacauuc

SEQ ID NO: 2440365 - RNA, 19 nt, Artificial Sequence
  Description of Artificial Sequence: Synthetic oligonucleotide
uuggugauuccaaucgauu

SEQ ID NO: 2440366 - RNA, 19 nt, Artificial Sequence
  Description of Artificial Sequence: Synthetic oligonucleotide
agguuaucgaugaaaacau

SEQ ID NO: 2440367 - RNA, 19 nt, Artificial Sequence
  Description of Artificial Sequence: Synthetic oligonucleotide
acaugugagcuuucuuucu

SEQ ID NO: 2440368 - RNA, 19 nt, Artificial Sequence
  Description of Artificial Sequence: Synthetic oligonucleotide
ugaaaacauuaaagaccug

SEQ ID NO: 2440369 - RNA, 19 nt, Artificial Sequence
  Description of Artificial Sequence: Synthetic oligonucleotide
aaaagauaugugauuccuu

SEQ ID NO: 2440370 - RNA, 19 nt, Artificial Sequence
  Description of Artificial Sequence: Synthetic oligonucleotide
gauuccaaucgauuuacau

SEQ ID NO: 2440371 - RNA, 19 nt, Artificial Sequence
  Description of Artificial Sequence: Synthetic oligonucleotide
guagucacacaaguacucc

SEQ ID NO: 2440372 - RNA, 19 nt, Artificial Sequence
  Description of Artificial Sequence: Synthetic oligonucleotide
ugccaauguuuuaaugcaa

SEQ ID NO: 2440373 - RNA, 19 nt, Artificial Sequence
  Description of Artificial Sequence: Synthetic oligonucleotide
uauaauuguccacgccuuu

SEQ ID NO: 2440374 - RNA, 19 nt, Artificial Sequence
  Description of Artificial Sequence: Synthetic oligonucleotide
aauggccagccacuaugga

SEQ ID NO: 2440375 - RNA, 19 nt, Artificial Sequence
  Description of Artificial Sequence: Synthetic oligonucleotide
auacagucuuuguaauggu

SEQ ID NO: 2440376 - RNA, 19 nt, Artificial Sequence
  Description of Artificial Sequence: Synthetic oligonucleotide
uuaagaugccaauguuuua

SEQ ID NO: 2440377 - RNA, 19 nt, Artificial Sequence
  Description of Artificial Sequence: Synthetic oligonucleotide
acagugcuauccugggaag

SEQ ID NO: 2440378 - RNA, 19 nt, Artificial Sequence
  Description of Artificial Sequence: Synthetic oligonucleotide
uaaucgaaagucagcucuu

SEQ ID NO: 2440379 - RNA, 19 nt, Artificial Sequence
  Description of Artificial Sequence: Synthetic oligonucleotide
gugauuccaaucgauuuac

SEQ ID NO: 2440380 - RNA, 19 nt, Artificial Sequence
  Description of Artificial Sequence: Synthetic oligonucleotide
ucgauuuacaugugagcuu

SEQ ID NO: 2440381 - RNA, 19 nt, Artificial Sequence
  Description of Artificial Sequence: Synthetic oligonucleotide
cucuuagucauauuguuau

SEQ ID NO: 2440382 - RNA, 19 nt, Artificial Sequence
  Description of Artificial Sequence: Synthetic oligonucleotide
gauuccuugguugucauau

SEQ ID NO: 2440383 - RNA, 19 nt, Artificial Sequence
  Description of Artificial Sequence: Synthetic oligonucleotide
ugagguaaccucggcaagu

SEQ ID NO: 2440384 - RNA, 19 nt, Artificial Sequence
  Description of Artificial Sequence: Synthetic oligonucleotide
ugauuccaaucgauuuaca

SEQ ID NO: 2440385 - RNA, 19 nt, Artificial Sequence
  Description of Artificial Sequence: Synthetic oligonucleotide
aucgaaagucagcucuucu

SEQ ID NO: 2440386 - RNA, 19 nt, Artificial Sequence
  Description of Artificial Sequence: Synthetic oligonucleotide
agccacuauggacuucuag

SEQ ID NO: 2440387 - RNA, 19 nt, Artificial Sequence
  Description of Artificial Sequence: Synthetic oligonucleotide
gucacacaaguacuccacc

SEQ ID NO: 2440388 - RNA, 19 nt, Artificial Sequence
  Description of Artificial Sequence: Synthetic oligonucleotide
gauuugggucacaacuaug

SEQ ID NO: 2440389 - RNA, 19 nt, Artificial Sequence
  Description of Artificial Sequence: Synthetic oligonucleotide
ugcuauccugggaagccga

SEQ ID NO: 2440390 - RNA, 19 nt, Artificial Sequence
  Description of Artificial Sequence: Synthetic oligonucleotide
cugaaagaagcuuucacau

SEQ ID NO: 2440391 - RNA, 19 nt, Artificial Sequence
  Description of Artificial Sequence: Synthetic oligonucleotide
ccacuauggacuucuagag

SEQ ID NO: 2440392 - RNA, 19 nt, Artificial Sequence
  Description of Artificial Sequence: Synthetic oligonucleotide
cauaucgagcugcauccac

SEQ ID NO: 2440393 - RNA, 19 nt, Artificial Sequence
  Description of Artificial Sequence: Synthetic oligonucleotide
uccaaucgauuuacaugug

SEQ ID NO: 2440394 - RNA, 19 nt, Artificial Sequence
  Description of Artificial Sequence: Synthetic oligonucleotide
ggcuauggucaauagaauc

SEQ ID NO: 2440395 - RNA, 19 nt, Artificial Sequence
  Description of Artificial Sequence: Synthetic oligonucleotide
cacacaaguacuccaccuc

SEQ ID NO: 2440396 - RNA, 19 nt, Artificial Sequence
  Description of Artificial Sequence: Synthetic oligonucleotide
gggaagccgaguaucaagg

SEQ ID NO: 2440397 - RNA, 19 nt, Artificial Sequence
  Description of Artificial Sequence: Synthetic oligonucleotide
gucucagccccacauuuac

SEQ ID NO: 2440398 - RNA, 19 nt, Artificial Sequence
  Description of Artificial Sequence: Synthetic oligonucleotide
aaguuucaguugagguaac

SEQ ID NO: 2440399 - RNA, 19 nt, Artificial Sequence
  Description of Artificial Sequence: Synthetic oligonucleotide
cuccagaaccuuucauuug

SEQ ID NO: 2440400 - RNA, 19 nt, Artificial Sequence
  Description of Artificial Sequence: Synthetic oligonucleotide
acuugugauuaccccuugu

SEQ ID NO: 2440401 - RNA, 19 nt, Artificial Sequence
  Description of Artificial Sequence: Synthetic oligonucleotide
caaguacuccaccucauaa

SEQ ID NO: 2440402 - RNA, 19 nt, Artificial Sequence
  Description of Artificial Sequence: Synthetic oligonucleotide
ucucagccccacauuuaca

SEQ ID NO: 2440403 - RNA, 19 nt, Artificial Sequence
  Description of Artificial Sequence: Synthetic oligonucleotide
auauaauuguccacgccuu

SEQ ID NO: 2440404 - RNA, 19 nt, Artificial Sequence
  Description of Artificial Sequence: Synthetic oligonucleotide
agacacauuuccauaucga

SEQ ID NO: 2440405 - RNA, 19 nt, Artificial Sequence
  Description of Artificial Sequence: Synthetic oligonucleotide
uaagaauuucagguucaua

SEQ ID NO: 2440406 - RNA, 19 nt, Artificial Sequence
  Description of Artificial Sequence: Synthetic oligonucleotide
cgaaagucagcucuucucc

SEQ ID NO: 2440407 - RNA, 19 nt, Artificial Sequence
  Description of Artificial Sequence: Synthetic oligonucleotide
cuugugauuaccccuugua

SEQ ID NO: 2440408 - RNA, 19 nt, Artificial Sequence
  Description of Artificial Sequence: Synthetic oligonucleotide
uuaccccuuguagucacac

SEQ ID NO: 2440409 - RNA, 19 nt, Artificial Sequence
  Description of Artificial Sequence: Synthetic oligonucleotide
cauuaagaugccaauguuu

SEQ ID NO: 2440410 - RNA, 19 nt, Artificial Sequence
  Description of Artificial Sequence: Synthetic oligonucleotide
gaucagagauuuuccuuua

SEQ ID NO: 2440411 - RNA, 19 nt, Artificial Sequence
  Description of Artificial Sequence: Synthetic oligonucleotide
uuccuuuggugauuccaau

SEQ ID NO: 2440412 - RNA, 19 nt, Artificial Sequence
  Description of Artificial Sequence: Synthetic oligonucleotide
aaagaagcuuucacauuua

SEQ ID NO: 2440413 - RNA, 19 nt, Artificial Sequence
  Description of Artificial Sequence: Synthetic oligonucleotide
auuccuuuggugauuccaa

SEQ ID NO: 2440414 - RNA, 19 nt, Artificial Sequence
  Description of Artificial Sequence: Synthetic oligonucleotide
acaaguacuccaccucaua

SEQ ID NO: 2440415 - RNA, 19 nt, Artificial Sequence
  Description of Artificial Sequence: Synthetic oligonucleotide
cuuuggugauuccaaucga

SEQ ID NO: 2440416 - RNA, 19 nt, Artificial Sequence
  Description of Artificial Sequence: Synthetic oligonucleotide
cagauucauaguccagauc

SEQ ID NO: 2440417 - RNA, 19 nt, Artificial Sequence
  Description of Artificial Sequence: Synthetic oligonucleotide
augugauuccuugguuguc

SEQ ID NO: 2440418 - RNA, 19 nt, Artificial Sequence
  Description of Artificial Sequence: Synthetic oligonucleotide
auuuccauaucgagcugca

SEQ ID NO: 2440419 - RNA, 19 nt, Artificial Sequence
  Description of Artificial Sequence: Synthetic oligonucleotide
uccugggaagccgaguauc

SEQ ID NO: 2440420 - RNA, 19 nt, Artificial Sequence
  Description of Artificial Sequence: Synthetic oligonucleotide
ggugauuccaaucgauuua

SEQ ID NO: 2440421 - RNA, 19 nt, Artificial Sequence
  Description of Artificial Sequence: Synthetic oligonucleotide
gaguaucaagguuaucgau

SEQ ID NO: 2440422 - RNA, 19 nt, Artificial Sequence
  Description of Artificial Sequence: Synthetic oligonucleotide
agcugcauccacugugaau

SEQ ID NO: 2440423 - RNA, 19 nt, Artificial Sequence
  Description of Artificial Sequence: Synthetic oligonucleotide
gauucauaguccagaucaa

SEQ ID NO: 2440424 - RNA, 19 nt, Artificial Sequence
  Description of Artificial Sequence: Synthetic oligonucleotide
gguaaccucggcaagucuc

SEQ ID NO: 2440425 - RNA, 19 nt, Artificial Sequence
  Description of Artificial Sequence: Synthetic oligonucleotide
gugcuauccugggaagccg

SEQ ID NO: 2440426 - RNA, 19 nt, Artificial Sequence
  Description of Artificial Sequence: Synthetic oligonucleotide
guaaccucggcaagucuca

SEQ ID NO: 2440427 - RNA, 19 nt, Artificial Sequence
  Description of Artificial Sequence: Synthetic oligonucleotide
uaccccuuguagucacaca

SEQ ID NO: 2440428 - RNA, 19 nt, Artificial Sequence
  Description of Artificial Sequence: Synthetic oligonucleotide
gcuauggucaauagaaucu

SEQ ID NO: 2440429 - RNA, 19 nt, Artificial Sequence
  Description of Artificial Sequence: Synthetic oligonucleotide
cauaauuccugaagaguau

SEQ ID NO: 2440430 - RNA, 19 nt, Artificial Sequence
  Description of Artificial Sequence: Synthetic oligonucleotide
guccuaucaaagaagcaua

SEQ ID NO: 2440431 - RNA, 19 nt, Artificial Sequence
  Description of Artificial Sequence: Synthetic oligonucleotide
ggucacaacuaugauucac

SEQ ID NO: 2440432 - RNA, 19 nt, Artificial Sequence
  Description of Artificial Sequence: Synthetic oligonucleotide
ucggcaagucucagcccca

SEQ ID NO: 2440433 - RNA, 19 nt, Artificial Sequence
  Description of Artificial Sequence: Synthetic oligonucleotide
cuucuucacuugugauuac

SEQ ID NO: 2440434 - RNA, 19 nt, Artificial Sequence
  Description of Artificial Sequence: Synthetic oligonucleotide
gaucaagcugaaagaagcu

SEQ ID NO: 2440435 - RNA, 19 nt, Artificial Sequence
  Description of Artificial Sequence: Synthetic oligonucleotide
gucauauuguuauguccua

SEQ ID NO: 2440436 - RNA, 19 nt, Artificial Sequence
  Description of Artificial Sequence: Synthetic oligonucleotide
cagugcuauccugggaagc

SEQ ID NO: 2440437 - RNA, 19 nt, Artificial Sequence
  Description of Artificial Sequence: Synthetic oligonucleotide
caaugguccucuuagucau

SEQ ID NO: 2440438 - RNA, 19 nt, Artificial Sequence
  Description of Artificial Sequence: Synthetic oligonucleotide
agguaaccucggcaagucu

SEQ ID NO: 2440439 - RNA, 19 nt, Artificial Sequence
  Description of Artificial Sequence: Synthetic oligonucleotide
gaagccgaguaucaagguu

SEQ ID NO: 2440440 - RNA, 19 nt, Artificial Sequence
  Description of Artificial Sequence: Synthetic oligonucleotide
ggacuucuagagaagguga

SEQ ID NO: 2440441 - RNA, 19 nt, Artificial Sequence
  Description of Artificial Sequence: Synthetic oligonucleotide
uaaccucggcaagucucag

SEQ ID NO: 2440442 - RNA, 19 nt, Artificial Sequence
  Description of Artificial Sequence: Synthetic oligonucleotide
ggugaucagagauuuuccu

SEQ ID NO: 2440443 - RNA, 19 nt, Artificial Sequence
  Description of Artificial Sequence: Synthetic oligonucleotide
caugugagcuuucuuucua

SEQ ID NO: 2440444 - RNA, 19 nt, Artificial Sequence
  Description of Artificial Sequence: Synthetic oligonucleotide
cugaagauuugggucacaa

SEQ ID NO: 2440445 - RNA, 19 nt, Artificial Sequence
  Description of Artificial Sequence: Synthetic oligonucleotide
ugauuccuugguugucaua

SEQ ID NO: 2440446 - RNA, 19 nt, Artificial Sequence
  Description of Artificial Sequence: Synthetic oligonucleotide
cacugugaauucaucagau

SEQ ID NO: 2440447 - RNA, 19 nt, Artificial Sequence
  Description of Artificial Sequence: Synthetic oligonucleotide
aucgagcugcauccacugu

SEQ ID NO: 2440448 - RNA, 19 nt, Artificial Sequence
  Description of Artificial Sequence: Synthetic oligonucleotide
auguccuaucaaagaagca

SEQ ID NO: 2440449 - RNA, 19 nt, Artificial Sequence
  Description of Artificial Sequence: Synthetic oligonucleotide
caacuaugauucacaaagu

SEQ ID NO: 2440450 - RNA, 19 nt, Artificial Sequence
  Description of Artificial Sequence: Synthetic oligonucleotide
cacuugugauuaccccuug

SEQ ID NO: 2440451 - RNA, 19 nt, Artificial Sequence
  Description of Artificial Sequence: Synthetic oligonucleotide
acauucaguucugacccuu

SEQ ID NO: 2440452 - RNA, 19 nt, Artificial Sequence
  Description of Artificial Sequence: Synthetic oligonucleotide
cagggcuauggucaauaga

SEQ ID NO: 2440453 - RNA, 19 nt, Artificial Sequence
  Description of Artificial Sequence: Synthetic oligonucleotide
gauuuacaugugagcuuuc

SEQ ID NO: 2440454 - RNA, 19 nt, Artificial Sequence
  Description of Artificial Sequence: Synthetic oligonucleotide
auccugggaagccgaguau

SEQ ID NO: 2440455 - RNA, 19 nt, Artificial Sequence
  Description of Artificial Sequence: Synthetic oligonucleotide
gugagcuuucuuucuacau

SEQ ID NO: 2440456 - RNA, 19 nt, Artificial Sequence
  Description of Artificial Sequence: Synthetic oligonucleotide
cauuaaagaccugaagauu

SEQ ID NO: 2440457 - RNA, 19 nt, Artificial Sequence
  Description of Artificial Sequence: Synthetic oligonucleotide
ccaaucgauuuacauguga

SEQ ID NO: 2440458 - RNA, 19 nt, Artificial Sequence
  Description of Artificial Sequence: Synthetic oligonucleotide
gcagggcuauggucaauag

SEQ ID NO: 2440459 - RNA, 19 nt, Artificial Sequence
  Description of Artificial Sequence: Synthetic oligonucleotide
cagaaccuuucauuugaua

SEQ ID NO: 2440460 - RNA, 19 nt, Artificial Sequence
  Description of Artificial Sequence: Synthetic oligonucleotide
gccaauguuuuaaugcaaa

SEQ ID NO: 2440461 - RNA, 19 nt, Artificial Sequence
  Description of Artificial Sequence: Synthetic oligonucleotide
gagaaggugaucagagauu

SEQ ID NO: 2440462 - RNA, 19 nt, Artificial Sequence
  Description of Artificial Sequence: Synthetic oligonucleotide
gacuucuagagaaggugau

SEQ ID NO: 2440463 - RNA, 19 nt, Artificial Sequence
  Description of Artificial Sequence: Synthetic oligonucleotide
ccccuuguagucacacaag

SEQ ID NO: 2440464 - RNA, 19 nt, Artificial Sequence
  Description of Artificial Sequence: Synthetic oligonucleotide
cgaguaucaagguuaucga

SEQ ID NO: 2440465 - RNA, 19 nt, Artificial Sequence
  Description of Artificial Sequence: Synthetic oligonucleotide
gauuuuccuuuaacagggu

SEQ ID NO: 2440466 - RNA, 19 nt, Artificial Sequence
  Description of Artificial Sequence: Synthetic oligonucleotide
auuaccccuuguagucaca

SEQ ID NO: 2440467 - RNA, 19 nt, Artificial Sequence
  Description of Artificial Sequence: Synthetic oligonucleotide
ccucuuagucauauuguua

SEQ ID NO: 2440468 - RNA, 19 nt, Artificial Sequence
  Description of Artificial Sequence: Synthetic oligonucleotide
agccgaguaucaagguuau

SEQ ID NO: 2440469 - RNA, 19 nt, Artificial Sequence
  Description of Artificial Sequence: Synthetic oligonucleotide
ccuugguugucauauaauu

SEQ ID NO: 2440470 - RNA, 19 nt, Artificial Sequence
  Description of Artificial Sequence: Synthetic oligonucleotide
gcaagucucagccccacau

SEQ ID NO: 2440471 - RNA, 19 nt, Artificial Sequence
  Description of Artificial Sequence: Synthetic oligonucleotide
ugguccucuuagucauauu

SEQ ID NO: 2440472 - RNA, 19 nt, Artificial Sequence
  Description of Artificial Sequence: Synthetic oligonucleotide
gagcugcauccacugugaa

SEQ ID NO: 2440473 - RNA, 19 nt, Artificial Sequence
  Description of Artificial Sequence: Synthetic oligonucleotide
caugaggcuccauuucuuu

SEQ ID NO: 2440474 - RNA, 19 nt, Artificial Sequence
  Description of Artificial Sequence: Synthetic oligonucleotide
cacaaguacuccaccucau

SEQ ID NO: 2440475 - RNA, 19 nt, Artificial Sequence
  Description of Artificial Sequence: Synthetic oligonucleotide
uucagucaugaggcuccau

SEQ ID NO: 2440476 - RNA, 19 nt, Artificial Sequence
  Description of Artificial Sequence: Synthetic oligonucleotide
gggucacaacuaugauuca

SEQ ID NO: 2440477 - RNA, 19 nt, Artificial Sequence
  Description of Artificial Sequence: Synthetic oligonucleotide
caagucucagccccacauu

SEQ ID NO: 2440478 - RNA, 19 nt, Artificial Sequence
  Description of Artificial Sequence: Synthetic oligonucleotide
ggcaagucucagccccaca

SEQ ID NO: 2440479 - RNA, 19 nt, Artificial Sequence
  Description of Artificial Sequence: Synthetic oligonucleotide
cuauccugggaagccgagu

SEQ ID NO: 2440480 - RNA, 19 nt, Artificial Sequence
  Description of Artificial Sequence: Synthetic oligonucleotide
gaaggugaucagagauuuu

SEQ ID NO: 2440481 - RNA, 19 nt, Artificial Sequence
  Description of Artificial Sequence: Synthetic oligonucleotide
ggcacuccaaugguccucu

SEQ ID NO: 2440482 - RNA, 19 nt, Artificial Sequence
  Description of Artificial Sequence: Synthetic oligonucleotide
gguuaucgaugaaaacauu

SEQ ID NO: 2440483 - RNA, 19 nt, Artificial Sequence
  Description of Artificial Sequence: Synthetic oligonucleotide
gccuggcacuccaaugguc

SEQ ID NO: 2440484 - RNA, 19 nt, Artificial Sequence
  Description of Artificial Sequence: Synthetic oligonucleotide
ccuaucaaagaagcauaau

SEQ ID NO: 2440485 - RNA, 19 nt, Artificial Sequence
  Description of Artificial Sequence: Synthetic oligonucleotide
ccauaucgagcugcaucca

SEQ ID NO: 2440486 - RNA, 19 nt, Artificial Sequence
  Description of Artificial Sequence: Synthetic oligonucleotide
gggcuauggucaauagaau

SEQ ID NO: 2440487 - RNA, 19 nt, Artificial Sequence
  Description of Artificial Sequence: Synthetic oligonucleotide
cagccacuauggacuucua

SEQ ID NO: 2440488 - RNA, 19 nt, Artificial Sequence
  Description of Artificial Sequence: Synthetic oligonucleotide
ccagaaccuuucauuugau

SEQ ID NO: 2440489 - RNA, 19 nt, Artificial Sequence
  Description of Artificial Sequence: Synthetic oligonucleotide
gccgaguaucaagguuauc

SEQ ID NO: 2440490 - RNA, 19 nt, Artificial Sequence
  Description of Artificial Sequence: Synthetic oligonucleotide
ccugaagauuugggucaca

SEQ ID NO: 2440491 - RNA, 19 nt, Artificial Sequence
  Description of Artificial Sequence: Synthetic oligonucleotide
ugauuauuaauuuugacca

SEQ ID NO: 2440492 - RNA, 19 nt, Artificial Sequence
  Description of Artificial Sequence: Synthetic oligonucleotide
auuaauuuugaccacagug

SEQ ID NO: 2440493 - RNA, 19 nt, Artificial Sequence
  Description of Artificial Sequence: Synthetic oligonucleotide
acugguauaggauaacugc

SEQ ID NO: 2440494 - RNA, 19 nt, Artificial Sequence
  Description of Artificial Sequence: Synthetic oligonucleotide
aaucgaaugcucuugauca

SEQ ID NO: 2440495 - RNA, 19 nt, Artificial Sequence
  Description of Artificial Sequence: Synthetic oligonucleotide
aauguauugccauuccacg

SEQ ID NO: 2440496 - RNA, 19 nt, Artificial Sequence
  Description of Artificial Sequence: Synthetic oligonucleotide
ugucguacaagucaguagg

SEQ ID NO: 2440497 - RNA, 19 nt, Artificial Sequence
  Description of Artificial Sequence: Synthetic oligonucleotide
gaauaggaagcauugacag

SEQ ID NO: 2440498 - RNA, 19 nt, Artificial Sequence
  Description of Artificial Sequence: Synthetic oligonucleotide
gugauuauuaauuuugacc

SEQ ID NO: 2440499 - RNA, 19 nt, Artificial Sequence
  Description of Artificial Sequence: Synthetic oligonucleotide
uucaacuguaaucagaggu

SEQ ID NO: 2440500 - RNA, 19 nt, Artificial Sequence
  Description of Artificial Sequence: Synthetic oligonucleotide
aacgugauaagauacucug

SEQ ID NO: 2440501 - RNA, 19 nt, Artificial Sequence
  Description of Artificial Sequence: Synthetic oligonucleotide
aauaggaagcauugacagc

SEQ ID NO: 2440502 - RNA, 19 nt, Artificial Sequence
  Description of Artificial Sequence: Synthetic oligonucleotide
uugaucauuaucuacgaca

SEQ ID NO: 2440503 - RNA, 19 nt, Artificial Sequence
  Description of Artificial Sequence: Synthetic oligonucleotide
agcaaaauagguucccugc

SEQ ID NO: 2440504 - RNA, 19 nt, Artificial Sequence
  Description of Artificial Sequence: Synthetic oligonucleotide
aguaucaccgccuaaacgu

SEQ ID NO: 2440505 - RNA, 19 nt, Artificial Sequence
  Description of Artificial Sequence: Synthetic oligonucleotide
aacacuacaaauauacuug

SEQ ID NO: 2440506 - RNA, 19 nt, Artificial Sequence
  Description of Artificial Sequence: Synthetic oligonucleotide
auuuugaucauuaucuacg

SEQ ID NO: 2440507 - RNA, 19 nt, Artificial Sequence
  Description of Artificial Sequence: Synthetic oligonucleotide
aagucaguaggguuuagag

SEQ ID NO: 2440508 - RNA, 19 nt, Artificial Sequence
  Description of Artificial Sequence: Synthetic oligonucleotide
ucuuuagccaaucgaaugc

SEQ ID NO: 2440509 - RNA, 19 nt, Artificial Sequence
  Description of Artificial Sequence: Synthetic oligonucleotide
uuauuaauuuugaccacag

SEQ ID NO: 2440510 - RNA, 19 nt, Artificial Sequence
  Description of Artificial Sequence: Synthetic oligonucleotide
aaaacuguaugugacguug

SEQ ID NO: 2440511 - RNA, 19 nt, Artificial Sequence
  Description of Artificial Sequence: Synthetic oligonucleotide
uucacuaugaaguugugau

SEQ ID NO: 2440512 - RNA, 19 nt, Artificial Sequence
  Description of Artificial Sequence: Synthetic oligonucleotide
ucauuaaagucucggauac

SEQ ID NO: 2440513 - RNA, 19 nt, Artificial Sequence
  Description of Artificial Sequence: Synthetic oligonucleotide
ucugcuaauuccuucaacu

SEQ ID NO: 2440514 - RNA, 19 nt, Artificial Sequence
  Description of Artificial Sequence: Synthetic oligonucleotide
ucaacuguaaucagaggug

SEQ ID NO: 2440515 - RNA, 19 nt, Artificial Sequence
  Description of Artificial Sequence: Synthetic oligonucleotide
cauagcugcgguuaaaccc

SEQ ID NO: 2440516 - RNA, 19 nt, Artificial Sequence
  Description of Artificial Sequence: Synthetic oligonucleotide
aaguaucaccgccuaaacg

SEQ ID NO: 2440517 - RNA, 19 nt, Artificial Sequence
  Description of Artificial Sequence: Synthetic oligonucleotide
uaaagucucggauacauuc

SEQ ID NO: 2440518 - RNA, 19 nt, Artificial Sequence
  Description of Artificial Sequence: Synthetic oligonucleotide
agcauugacagcaaaauag

SEQ ID NO: 2440519 - RNA, 19 nt, Artificial Sequence
  Description of Artificial Sequence: Synthetic oligonucleotide
aacacguagcauucuuccc

SEQ ID NO: 2440520 - RNA, 19 nt, Artificial Sequence
  Description of Artificial Sequence: Synthetic oligonucleotide
acguguagaauacagcuag

SEQ ID NO: 2440521 - RNA, 19 nt, Artificial Sequence
  Description of Artificial Sequence: Synthetic oligonucleotide
aaacccauggcuguugacg

SEQ ID NO: 2440522 - RNA, 19 nt, Artificial Sequence
  Description of Artificial Sequence: Synthetic oligonucleotide
ucuagcucguaccacaucu

SEQ ID NO: 2440523 - RNA, 19 nt, Artificial Sequence
  Description of Artificial Sequence: Synthetic oligonucleotide
uagaauacagcuagccucc

SEQ ID NO: 2440524 - RNA, 19 nt, Artificial Sequence
  Description of Artificial Sequence: Synthetic oligonucleotide
ugacguguagaauacagcu

SEQ ID NO: 2440525 - RNA, 19 nt, Artificial Sequence
  Description of Artificial Sequence: Synthetic oligonucleotide
uucaaucucaucucuagcu

SEQ ID NO: 2440526 - RNA, 19 nt, Artificial Sequence
  Description of Artificial Sequence: Synthetic oligonucleotide
uuugucaaaacuguaugug

SEQ ID NO: 2440527 - RNA, 19 nt, Artificial Sequence
  Description of Artificial Sequence: Synthetic oligonucleotide
guagaauacagcuagccuc

SEQ ID NO: 2440528 - RNA, 19 nt, Artificial Sequence
  Description of Artificial Sequence: Synthetic oligonucleotide
uguccaacuguguaguucc

SEQ ID NO: 2440529 - RNA, 19 nt, Artificial Sequence
  Description of Artificial Sequence: Synthetic oligonucleotide
uggaguaugugucacuggc

SEQ ID NO: 2440530 - RNA, 19 nt, Artificial Sequence
  Description of Artificial Sequence: Synthetic oligonucleotide
ugucaaaacuguaugugac

SEQ ID NO: 2440531 - RNA, 19 nt, Artificial Sequence
  Description of Artificial Sequence: Synthetic oligonucleotide
ucugguuuggaguaugugu

SEQ ID NO: 2440532 - RNA, 19 nt, Artificial Sequence
  Description of Artificial Sequence: Synthetic oligonucleotide
acuacaaauauacuuggau

SEQ ID NO: 2440533 - RNA, 19 nt, Artificial Sequence
  Description of Artificial Sequence: Synthetic oligonucleotide
acacuacaaauauacuugg

SEQ ID NO: 2440534 - RNA, 19 nt, Artificial Sequence
  Description of Artificial Sequence: Synthetic oligonucleotide
uuuagagggucccuugaag

SEQ ID NO: 2440535 - RNA, 19 nt, Artificial Sequence
  Description of Artificial Sequence: Synthetic oligonucleotide
auaggaagcauugacagca

SEQ ID NO: 2440536 - RNA, 19 nt, Artificial Sequence
  Description of Artificial Sequence: Synthetic oligonucleotide
ugcgguuaaacccauggcu

SEQ ID NO: 2440537 - RNA, 19 nt, Artificial Sequence
  Description of Artificial Sequence: Synthetic oligonucleotide
uguagaauacagcuagccu

SEQ ID NO: 2440538 - RNA, 19 nt, Artificial Sequence
  Description of Artificial Sequence: Synthetic oligonucleotide
uaacacguagcauucuucc

SEQ ID NO: 2440539 - RNA, 19 nt, Artificial Sequence
  Description of Artificial Sequence: Synthetic oligonucleotide
uuuugucaaaacuguaugu

SEQ ID NO: 2440540 - RNA, 19 nt, Artificial Sequence
  Description of Artificial Sequence: Synthetic oligonucleotide
uccuccaacuccauguuag

SEQ ID NO: 2440541 - RNA, 19 nt, Artificial Sequence
  Description of Artificial Sequence: Synthetic oligonucleotide
agucaguaggguuuagagg

SEQ ID NO: 2440542 - RNA, 19 nt, Artificial Sequence
  Description of Artificial Sequence: Synthetic oligonucleotide
ucucauuaaagucucggau

SEQ ID NO: 2440543 - RNA, 19 nt, Artificial Sequence
  Description of Artificial Sequence: Synthetic oligonucleotide
uccaggucaaugaugauau

SEQ ID NO: 2440544 - RNA, 19 nt, Artificial Sequence
  Description of Artificial Sequence: Synthetic oligonucleotide
uugucauaaaacacuacaa

SEQ ID NO: 2440545 - RNA, 19 nt, Artificial Sequence
  Description of Artificial Sequence: Synthetic oligonucleotide
guuguugucaauguauugc

SEQ ID NO: 2440546 - RNA, 19 nt, Artificial Sequence
  Description of Artificial Sequence: Synthetic oligonucleotide
aauauacuuggauuuugau

SEQ ID NO: 2440547 - RNA, 19 nt, Artificial Sequence
  Description of Artificial Sequence: Synthetic oligonucleotide
ugagacucugucuuccagg

SEQ ID NO: 2440548 - RNA, 19 nt, Artificial Sequence
  Description of Artificial Sequence: Synthetic oligonucleotide
ugaugaguguccaacugug

SEQ ID NO: 2440549 - RNA, 19 nt, Artificial Sequence
  Description of Artificial Sequence: Synthetic oligonucleotide
ggagacauagucugcaugg

SEQ ID NO: 2440550 - RNA, 19 nt, Artificial Sequence
  Description of Artificial Sequence: Synthetic oligonucleotide
uuuugaucauuaucuacga

SEQ ID NO: 2440551 - RNA, 19 nt, Artificial Sequence
  Description of Artificial Sequence: Synthetic oligonucleotide
caauguauugccauuccac

SEQ ID NO: 2440552 - RNA, 19 nt, Artificial Sequence
  Description of Artificial Sequence: Synthetic oligonucleotide
auuuugaccacaguguucu

SEQ ID NO: 2440553 - RNA, 19 nt, Artificial Sequence
  Description of Artificial Sequence: Synthetic oligonucleotide
ugugauuauuaauuuugac

SEQ ID NO: 2440554 - RNA, 19 nt, Artificial Sequence
  Description of Artificial Sequence: Synthetic oligonucleotide
ugcuaauuccuucaacugu

SEQ ID NO: 2440555 - RNA, 19 nt, Artificial Sequence
  Description of Artificial Sequence: Synthetic oligonucleotide
ucauucaguuucuuguacc

SEQ ID NO: 2440556 - RNA, 19 nt, Artificial Sequence
  Description of Artificial Sequence: Synthetic oligonucleotide
gauauucagucucuccugc

SEQ ID NO: 2440557 - RNA, 19 nt, Artificial Sequence
  Description of Artificial Sequence: Synthetic oligonucleotide
gagacucugucuuccaggg

SEQ ID NO: 2440558 - RNA, 19 nt, Artificial Sequence
  Description of Artificial Sequence: Synthetic oligonucleotide
gucaaaacuguaugugacg

SEQ ID NO: 2440559 - RNA, 19 nt, Artificial Sequence
  Description of Artificial Sequence: Synthetic oligonucleotide
uugugauuauuaauuuuga

SEQ ID NO: 2440560 - RNA, 19 nt, Artificial Sequence
  Description of Artificial Sequence: Synthetic oligonucleotide
uuagccaaucgaaugcucu

SEQ ID NO: 2440561 - RNA, 19 nt, Artificial Sequence
  Description of Artificial Sequence: Synthetic oligonucleotide
uguauugccauuccacgaa

SEQ ID NO: 2440562 - RNA, 19 nt, Artificial Sequence
  Description of Artificial Sequence: Synthetic oligonucleotide
auuauuaauuuugaccaca

SEQ ID NO: 2440563 - RNA, 19 nt, Artificial Sequence
  Description of Artificial Sequence: Synthetic oligonucleotide
ugauugucauaaaacacua

SEQ ID NO: 2440564 - RNA, 19 nt, Artificial Sequence
  Description of Artificial Sequence: Synthetic oligonucleotide
aauuuugaccacaguguuc

SEQ ID NO: 2440565 - RNA, 19 nt, Artificial Sequence
  Description of Artificial Sequence: Synthetic oligonucleotide
ugugcucaaguucacuaug

SEQ ID NO: 2440566 - RNA, 19 nt, Artificial Sequence
  Description of Artificial Sequence: Synthetic oligonucleotide
uagccauuuugucaaaacu

SEQ ID NO: 2440567 - RNA, 19 nt, Artificial Sequence
  Description of Artificial Sequence: Synthetic oligonucleotide
gauuauuaauuuugaccac

SEQ ID NO: 2440568 - RNA, 19 nt, Artificial Sequence
  Description of Artificial Sequence: Synthetic oligonucleotide
uuuggaguaugugucacug

SEQ ID NO: 2440569 - RNA, 19 nt, Artificial Sequence
  Description of Artificial Sequence: Synthetic oligonucleotide
ucaauguauugccauucca

SEQ ID NO: 2440570 - RNA, 19 nt, Artificial Sequence
  Description of Artificial Sequence: Synthetic oligonucleotide
auuaucuacgacagugucg

SEQ ID NO: 2440571 - RNA, 19 nt, Artificial Sequence
  Description of Artificial Sequence: Synthetic oligonucleotide
agugagaacccgugcauag

SEQ ID NO: 2440572 - RNA, 19 nt, Artificial Sequence
  Description of Artificial Sequence: Synthetic oligonucleotide
uugacguguagaauacagc

SEQ ID NO: 2440573 - RNA, 19 nt, Artificial Sequence
  Description of Artificial Sequence: Synthetic oligonucleotide
auuccacgaauguggagac

SEQ ID NO: 2440574 - RNA, 19 nt, Artificial Sequence
  Description of Artificial Sequence: Synthetic oligonucleotide
ucauuaucuacgacagugu

SEQ ID NO: 2440575 - RNA, 19 nt, Artificial Sequence
  Description of Artificial Sequence: Synthetic oligonucleotide
aaguugugauuauuaauuu

SEQ ID NO: 2440576 - RNA, 19 nt, Artificial Sequence
  Description of Artificial Sequence: Synthetic oligonucleotide
ugaggcgcugaacagugag

SEQ ID NO: 2440577 - RNA, 19 nt, Artificial Sequence
  Description of Artificial Sequence: Synthetic oligonucleotide
caaaauagguucccugccc

SEQ ID NO: 2440578 - RNA, 19 nt, Artificial Sequence
  Description of Artificial Sequence: Synthetic oligonucleotide
aaauauacuuggauuuuga

SEQ ID NO: 2440579 - RNA, 19 nt, Artificial Sequence
  Description of Artificial Sequence: Synthetic oligonucleotide
ucaucucuagcucguacca

SEQ ID NO: 2440580 - RNA, 19 nt, Artificial Sequence
  Description of Artificial Sequence: Synthetic oligonucleotide
ucuacgacagugucguaca

SEQ ID NO: 2440581 - RNA, 19 nt, Artificial Sequence
  Description of Artificial Sequence: Synthetic oligonucleotide
aucuacgacagugucguac

SEQ ID NO: 2440582 - RNA, 19 nt, Artificial Sequence
  Description of Artificial Sequence: Synthetic oligonucleotide
guugacguguagaauacag

SEQ ID NO: 2440583 - RNA, 19 nt, Artificial Sequence
  Description of Artificial Sequence: Synthetic oligonucleotide
cucggauacauucaucaug

SEQ ID NO: 2440584 - RNA, 19 nt, Artificial Sequence
  Description of Artificial Sequence: Synthetic oligonucleotide
aacuguaaucagaggugcc

SEQ ID NO: 2440585 - RNA, 19 nt, Artificial Sequence
  Description of Artificial Sequence: Synthetic oligonucleotide
agugaugaguguccaacug

SEQ ID NO: 2440586 - RNA, 19 nt, Artificial Sequence
  Description of Artificial Sequence: Synthetic oligonucleotide
acgacagugucguacaagu

SEQ ID NO: 2440587 - RNA, 19 nt, Artificial Sequence
  Description of Artificial Sequence: Synthetic oligonucleotide
cugguuuggaguauguguc

SEQ ID NO: 2440588 - RNA, 19 nt, Artificial Sequence
  Description of Artificial Sequence: Synthetic oligonucleotide
aacccauggcuguugacgu

SEQ ID NO: 2440589 - RNA, 19 nt, Artificial Sequence
  Description of Artificial Sequence: Synthetic oligonucleotide
auugccauuccacgaaugu

SEQ ID NO: 2440590 - RNA, 19 nt, Artificial Sequence
  Description of Artificial Sequence: Synthetic oligonucleotide
uauuaauuuugaccacagu

SEQ ID NO: 2440591 - RNA, 19 nt, Artificial Sequence
  Description of Artificial Sequence: Synthetic oligonucleotide
uuugaucauuaucuacgac

SEQ ID NO: 2440592 - RNA, 19 nt, Artificial Sequence
  Description of Artificial Sequence: Synthetic oligonucleotide
ugguauaggauaacugcuc

SEQ ID NO: 2440593 - RNA, 19 nt, Artificial Sequence
  Description of Artificial Sequence: Synthetic oligonucleotide
ugacagcaaaauagguucc

SEQ ID NO: 2440594 - RNA, 19 nt, Artificial Sequence
  Description of Artificial Sequence: Synthetic oligonucleotide
acacguagcauucuuccca

SEQ ID NO: 2440595 - RNA, 19 nt, Artificial Sequence
  Description of Artificial Sequence: Synthetic oligonucleotide
ucugguauguuugauuguc

SEQ ID NO: 2440596 - RNA, 19 nt, Artificial Sequence
  Description of Artificial Sequence: Synthetic oligonucleotide
uucucauuucuuccaugag

SEQ ID NO: 2440597 - RNA, 19 nt, Artificial Sequence
  Description of Artificial Sequence: Synthetic oligonucleotide
uaugugacguuguugucaa

SEQ ID NO: 2440598 - RNA, 19 nt, Artificial Sequence
  Description of Artificial Sequence: Synthetic oligonucleotide
uaaacgugauaagauacuc

SEQ ID NO: 2440599 - RNA, 19 nt, Artificial Sequence
  Description of Artificial Sequence: Synthetic oligonucleotide
gucucggauacauucauca

SEQ ID NO: 2440600 - RNA, 19 nt, Artificial Sequence
  Description of Artificial Sequence: Synthetic oligonucleotide
uggagacauagucugcaug

SEQ ID NO: 2440601 - RNA, 19 nt, Artificial Sequence
  Description of Artificial Sequence: Synthetic oligonucleotide
uguugucaauguauugcca

SEQ ID NO: 2440602 - RNA, 19 nt, Artificial Sequence
  Description of Artificial Sequence: Synthetic oligonucleotide
ucaugacugguauaggaua

SEQ ID NO: 2440603 - RNA, 19 nt, Artificial Sequence
  Description of Artificial Sequence: Synthetic oligonucleotide
ugucuuccagggccuaugg

SEQ ID NO: 2440604 - RNA, 19 nt, Artificial Sequence
  Description of Artificial Sequence: Synthetic oligonucleotide
agaauaggaagcauugaca

SEQ ID NO: 2440605 - RNA, 19 nt, Artificial Sequence
  Description of Artificial Sequence: Synthetic oligonucleotide
uuaaacccauggcuguuga

SEQ ID NO: 2440606 - RNA, 19 nt, Artificial Sequence
  Description of Artificial Sequence: Synthetic oligonucleotide
gaaguugugauuauuaauu

SEQ ID NO: 2440607 - RNA, 19 nt, Artificial Sequence
  Description of Artificial Sequence: Synthetic oligonucleotide
ccuaaacgugauaagauac

SEQ ID NO: 2440608 - RNA, 19 nt, Artificial Sequence
  Description of Artificial Sequence: Synthetic oligonucleotide
uauugccauuccacgaaug

SEQ ID NO: 2440609 - RNA, 19 nt, Artificial Sequence
  Description of Artificial Sequence: Synthetic oligonucleotide
aaacgugauaagauacucu

SEQ ID NO: 2440610 - RNA, 19 nt, Artificial Sequence
  Description of Artificial Sequence: Synthetic oligonucleotide
agcauagcugcgguuaaac

SEQ ID NO: 2440611 - RNA, 19 nt, Artificial Sequence
  Description of Artificial Sequence: Synthetic oligonucleotide
guucccugcccauaacacg

SEQ ID NO: 2440612 - RNA, 19 nt, Artificial Sequence
  Description of Artificial Sequence: Synthetic oligonucleotide
auguauugccauuccacga

SEQ ID NO: 2440613 - RNA, 19 nt, Artificial Sequence
  Description of Artificial Sequence: Synthetic oligonucleotide
caaucgaaugcucuugauc

SEQ ID NO: 2440614 - RNA, 19 nt, Artificial Sequence
  Description of Artificial Sequence: Synthetic oligonucleotide
aguugugauuauuaauuuu

SEQ ID NO: 2440615 - RNA, 19 nt, Artificial Sequence
  Description of Artificial Sequence: Synthetic oligonucleotide
gauacucugguauguuuga

SEQ ID NO: 2440616 - RNA, 19 nt, Artificial Sequence
  Description of Artificial Sequence: Synthetic oligonucleotide
caugaggcgcugaacagug

SEQ ID NO: 2440617 - RNA, 19 nt, Artificial Sequence
  Description of Artificial Sequence: Synthetic oligonucleotide
cauuaucuacgacaguguc

SEQ ID NO: 2440618 - RNA, 19 nt, Artificial Sequence
  Description of Artificial Sequence: Synthetic oligonucleotide
cuucaaucucaucucuagc

SEQ ID NO: 2440619 - RNA, 19 nt, Artificial Sequence
  Description of Artificial Sequence: Synthetic oligonucleotide
aagucucggauacauucau

SEQ ID NO: 2440620 - RNA, 19 nt, Artificial Sequence
  Description of Artificial Sequence: Synthetic oligonucleotide
aucucuagcucguaccaca

SEQ ID NO: 2440621 - RNA, 19 nt, Artificial Sequence
  Description of Artificial Sequence: Synthetic oligonucleotide
auaacacguagcauucuuc

SEQ ID NO: 2440622 - RNA, 19 nt, Artificial Sequence
  Description of Artificial Sequence: Synthetic oligonucleotide
ugagaacccgugcauagua

SEQ ID NO: 2440623 - RNA, 19 nt, Artificial Sequence
  Description of Artificial Sequence: Synthetic oligonucleotide
caacuguaaucagaggugc

SEQ ID NO: 2440624 - RNA, 19 nt, Artificial Sequence
  Description of Artificial Sequence: Synthetic oligonucleotide
cugcuaauuccuucaacug

SEQ ID NO: 2440625 - RNA, 19 nt, Artificial Sequence
  Description of Artificial Sequence: Synthetic oligonucleotide
agauacucugguauguuug

SEQ ID NO: 2440626 - RNA, 19 nt, Artificial Sequence
  Description of Artificial Sequence: Synthetic oligonucleotide
uguguaguucccagugaga

SEQ ID NO: 2440627 - RNA, 19 nt, Artificial Sequence
  Description of Artificial Sequence: Synthetic oligonucleotide
guguagaauacagcuagcc

SEQ ID NO: 2440628 - RNA, 19 nt, Artificial Sequence
  Description of Artificial Sequence: Synthetic oligonucleotide
uagagggucccuugaagga

SEQ ID NO: 2440629 - RNA, 19 nt, Artificial Sequence
  Description of Artificial Sequence: Synthetic oligonucleotide
uacagcuagccuccguccc

SEQ ID NO: 2440630 - RNA, 19 nt, Artificial Sequence
  Description of Artificial Sequence: Synthetic oligonucleotide
cuucaacuguaaucagagg

SEQ ID NO: 2440631 - RNA, 19 nt, Artificial Sequence
  Description of Artificial Sequence: Synthetic oligonucleotide
uugcucuuugccuuccgug

SEQ ID NO: 2440632 - RNA, 19 nt, Artificial Sequence
  Description of Artificial Sequence: Synthetic oligonucleotide
uaaucagaggugccuuucu

SEQ ID NO: 2440633 - RNA, 19 nt, Artificial Sequence
  Description of Artificial Sequence: Synthetic oligonucleotide
gcugcgguuaaacccaugg

SEQ ID NO: 2440634 - RNA, 19 nt, Artificial Sequence
  Description of Artificial Sequence: Synthetic oligonucleotide
cacgaauguggagacauag

SEQ ID NO: 2440635 - RNA, 19 nt, Artificial Sequence
  Description of Artificial Sequence: Synthetic oligonucleotide
ugauucucauuucuuccau

SEQ ID NO: 2440636 - RNA, 19 nt, Artificial Sequence
  Description of Artificial Sequence: Synthetic oligonucleotide
ugguauguuugauugucau

SEQ ID NO: 2440637 - RNA, 19 nt, Artificial Sequence
  Description of Artificial Sequence: Synthetic oligonucleotide
cauuccacgaauguggaga

SEQ ID NO: 2440638 - RNA, 19 nt, Artificial Sequence
  Description of Artificial Sequence: Synthetic oligonucleotide
gugucguacaagucaguag

SEQ ID NO: 2440639 - RNA, 19 nt, Artificial Sequence
  Description of Artificial Sequence: Synthetic oligonucleotide
uuguaccucccucucauua

SEQ ID NO: 2440640 - RNA, 19 nt, Artificial Sequence
  Description of Artificial Sequence: Synthetic oligonucleotide
uuuagccaaucgaaugcuc

SEQ ID NO: 2440641 - RNA, 19 nt, Artificial Sequence
  Description of Artificial Sequence: Synthetic oligonucleotide
auugacagcaaaauagguu

SEQ ID NO: 2440642 - RNA, 19 nt, Artificial Sequence
  Description of Artificial Sequence: Synthetic oligonucleotide
agacauagucugcauggcu

SEQ ID NO: 2440643 - RNA, 19 nt, Artificial Sequence
  Description of Artificial Sequence: Synthetic oligonucleotide
acuguaaucagaggugccu

SEQ ID NO: 2440644 - RNA, 19 nt, Artificial Sequence
  Description of Artificial Sequence: Synthetic oligonucleotide
cuguugacguguagaauac

SEQ ID NO: 2440645 - RNA, 19 nt, Artificial Sequence
  Description of Artificial Sequence: Synthetic oligonucleotide
uucccagugagaacccgug

SEQ ID NO: 2440646 - RNA, 19 nt, Artificial Sequence
  Description of Artificial Sequence: Synthetic oligonucleotide
uccacgaauguggagacau

SEQ ID NO: 2440647 - RNA, 19 nt, Artificial Sequence
  Description of Artificial Sequence: Synthetic oligonucleotide
cucauuaaagucucggaua

SEQ ID NO: 2440648 - RNA, 19 nt, Artificial Sequence
  Description of Artificial Sequence: Synthetic oligonucleotide
cacuggcagaauaggaagc

SEQ ID NO: 2440649 - RNA, 19 nt, Artificial Sequence
  Description of Artificial Sequence: Synthetic oligonucleotide
uguaguucccagugagaac

SEQ ID NO: 2440650 - RNA, 19 nt, Artificial Sequence
  Description of Artificial Sequence: Synthetic oligonucleotide
ucuuccaugaggcgcugaa

SEQ ID NO: 2440651 - RNA, 19 nt, Artificial Sequence
  Description of Artificial Sequence: Synthetic oligonucleotide
auagcugcgguuaaaccca

SEQ ID NO: 2440652 - RNA, 19 nt, Artificial Sequence
  Description of Artificial Sequence: Synthetic oligonucleotide
acagcuagccuccgucccg

SEQ ID NO: 2440653 - RNA, 19 nt, Artificial Sequence
  Description of Artificial Sequence: Synthetic oligonucleotide
aucgaaugcucuugaucag

SEQ ID NO: 2440654 - RNA, 19 nt, Artificial Sequence
  Description of Artificial Sequence: Synthetic oligonucleotide
uagcucguaccacaucucu

SEQ ID NO: 2440655 - RNA, 19 nt, Artificial Sequence
  Description of Artificial Sequence: Synthetic oligonucleotide
gacagcaaaauagguuccc

SEQ ID NO: 2440656 - RNA, 19 nt, Artificial Sequence
  Description of Artificial Sequence: Synthetic oligonucleotide
ccuauggccauguuugugc

SEQ ID NO: 2440657 - RNA, 19 nt, Artificial Sequence
  Description of Artificial Sequence: Synthetic oligonucleotide
aaucagugaugagugucca

SEQ ID NO: 2440658 - RNA, 19 nt, Artificial Sequence
  Description of Artificial Sequence: Synthetic oligonucleotide
uguaccucccucucauuaa

SEQ ID NO: 2440659 - RNA, 19 nt, Artificial Sequence
  Description of Artificial Sequence: Synthetic oligonucleotide
acuguaugugacguuguug

SEQ ID NO: 2440660 - RNA, 19 nt, Artificial Sequence
  Description of Artificial Sequence: Synthetic oligonucleotide
aaauagguucccugcccau

SEQ ID NO: 2440661 - RNA, 19 nt, Artificial Sequence
  Description of Artificial Sequence: Synthetic oligonucleotide
cagcaaaauagguucccug

SEQ ID NO: 2440662 - RNA, 19 nt, Artificial Sequence
  Description of Artificial Sequence: Synthetic oligonucleotide
uaucaccgccuaaacguga

SEQ ID NO: 2440663 - RNA, 19 nt, Artificial Sequence
  Description of Artificial Sequence: Synthetic oligonucleotide
ugacugguauaggauaacu

SEQ ID NO: 2440664 - RNA, 19 nt, Artificial Sequence
  Description of Artificial Sequence: Synthetic oligonucleotide
agacucugucuuccagggc

SEQ ID NO: 2440665 - RNA, 19 nt, Artificial Sequence
  Description of Artificial Sequence: Synthetic oligonucleotide
aaucucaucucuagcucgu

SEQ ID NO: 2440666 - RNA, 19 nt, Artificial Sequence
  Description of Artificial Sequence: Synthetic oligonucleotide
uggcagaauaggaagcauu

SEQ ID NO: 2440667 - RNA, 19 nt, Artificial Sequence
  Description of Artificial Sequence: Synthetic oligonucleotide
ugcucaaguucacuaugaa

SEQ ID NO: 2440668 - RNA, 19 nt, Artificial Sequence
  Description of Artificial Sequence: Synthetic oligonucleotide
uacgacagugucguacaag

SEQ ID NO: 2440669 - RNA, 19 nt, Artificial Sequence
  Description of Artificial Sequence: Synthetic oligonucleotide
cacguagcauucuucccag

SEQ ID NO: 2440670 - RNA, 19 nt, Artificial Sequence
  Description of Artificial Sequence: Synthetic oligonucleotide
acccgugcauaguacaugu

SEQ ID NO: 2440671 - RNA, 19 nt, Artificial Sequence
  Description of Artificial Sequence: Synthetic oligonucleotide
aggaggcacaaucagugau

SEQ ID NO: 2440672 - RNA, 19 nt, Artificial Sequence
  Description of Artificial Sequence: Synthetic oligonucleotide
guaugugacguuguuguca

SEQ ID NO: 2440673 - RNA, 19 nt, Artificial Sequence
  Description of Artificial Sequence: Synthetic oligonucleotide
uuaaagucucggauacauu

SEQ ID NO: 2440674 - RNA, 19 nt, Artificial Sequence
  Description of Artificial Sequence: Synthetic oligonucleotide
gcaaaauagguucccugcc

SEQ ID NO: 2440675 - RNA, 19 nt, Artificial Sequence
  Description of Artificial Sequence: Synthetic oligonucleotide
uugugcucaaguucacuau

SEQ ID NO: 2440676 - RNA, 19 nt, Artificial Sequence
  Description of Artificial Sequence: Synthetic oligonucleotide
uugccauuccacgaaugug

SEQ ID NO: 2440677 - RNA, 19 nt, Artificial Sequence
  Description of Artificial Sequence: Synthetic oligonucleotide
auagguucccugcccauaa

SEQ ID NO: 2440678 - RNA, 19 nt, Artificial Sequence
  Description of Artificial Sequence: Synthetic oligonucleotide
aacuccauguuagccauuu

SEQ ID NO: 2440679 - RNA, 19 nt, Artificial Sequence
  Description of Artificial Sequence: Synthetic oligonucleotide
augacugguauaggauaac

SEQ ID NO: 2440680 - RNA, 19 nt, Artificial Sequence
  Description of Artificial Sequence: Synthetic oligonucleotide
uggcuguugacguguagaa

SEQ ID NO: 2440681 - RNA, 19 nt, Artificial Sequence
  Description of Artificial Sequence: Synthetic oligonucleotide
aacccgugcauaguacaug

SEQ ID NO: 2440682 - RNA, 19 nt, Artificial Sequence
  Description of Artificial Sequence: Synthetic oligonucleotide
acgugauaagauacucugg

SEQ ID NO: 2440683 - RNA, 19 nt, Artificial Sequence
  Description of Artificial Sequence: Synthetic oligonucleotide
uguuugugcucaaguucac

SEQ ID NO: 2440684 - RNA, 19 nt, Artificial Sequence
  Description of Artificial Sequence: Synthetic oligonucleotide
cauuuugucaaaacuguau

SEQ ID NO: 2440685 - RNA, 19 nt, Artificial Sequence
  Description of Artificial Sequence: Synthetic oligonucleotide
accgccuaaacgugauaag

SEQ ID NO: 2440686 - RNA, 19 nt, Artificial Sequence
  Description of Artificial Sequence: Synthetic oligonucleotide
ucacuaugaaguugugauu

SEQ ID NO: 2440687 - RNA, 19 nt, Artificial Sequence
  Description of Artificial Sequence: Synthetic oligonucleotide
cucucauuaaagucucgga

SEQ ID NO: 2440688 - RNA, 19 nt, Artificial Sequence
  Description of Artificial Sequence: Synthetic oligonucleotide
cacuaugaaguugugauua

SEQ ID NO: 2440689 - RNA, 19 nt, Artificial Sequence
  Description of Artificial Sequence: Synthetic oligonucleotide
gcuguugacguguagaaua

SEQ ID NO: 2440690 - RNA, 19 nt, Artificial Sequence
  Description of Artificial Sequence: Synthetic oligonucleotide
uguaaucagaggugccuuu

SEQ ID NO: 2440691 - RNA, 19 nt, Artificial Sequence
  Description of Artificial Sequence: Synthetic oligonucleotide
gagacauagucugcauggc

SEQ ID NO: 2440692 - RNA, 19 nt, Artificial Sequence
  Description of Artificial Sequence: Synthetic oligonucleotide
ucgaaugcucuugaucagu

SEQ ID NO: 2440693 - RNA, 19 nt, Artificial Sequence
  Description of Artificial Sequence: Synthetic oligonucleotide
uccgucccguggaagagcu

SEQ ID NO: 2440694 - RNA, 19 nt, Artificial Sequence
  Description of Artificial Sequence: Synthetic oligonucleotide
uagucugcauggcuuuccu

SEQ ID NO: 2440695 - RNA, 19 nt, Artificial Sequence
  Description of Artificial Sequence: Synthetic oligonucleotide
aaacuguaugugacguugu

SEQ ID NO: 2440696 - RNA, 19 nt, Artificial Sequence
  Description of Artificial Sequence: Synthetic oligonucleotide
ucguacaagucaguagggu

SEQ ID NO: 2440697 - RNA, 19 nt, Artificial Sequence
  Description of Artificial Sequence: Synthetic oligonucleotide
guuaaacccauggcuguug

SEQ ID NO: 2440698 - RNA, 19 nt, Artificial Sequence
  Description of Artificial Sequence: Synthetic oligonucleotide
ugacguuguugucaaugua

SEQ ID NO: 2440699 - RNA, 19 nt, Artificial Sequence
  Description of Artificial Sequence: Synthetic oligonucleotide
gucguacaagucaguaggg

SEQ ID NO: 2440700 - RNA, 19 nt, Artificial Sequence
  Description of Artificial Sequence: Synthetic oligonucleotide
auggcuguugacguguaga

SEQ ID NO: 2440701 - RNA, 19 nt, Artificial Sequence
  Description of Artificial Sequence: Synthetic oligonucleotide
gaauguggagacauagucu

SEQ ID NO: 2440702 - RNA, 19 nt, Artificial Sequence
  Description of Artificial Sequence: Synthetic oligonucleotide
gcacaaucagugaugagug

SEQ ID NO: 2440703 - RNA, 19 nt, Artificial Sequence
  Description of Artificial Sequence: Synthetic oligonucleotide
uuccgugcuuccuccaacu

SEQ ID NO: 2440704 - RNA, 19 nt, Artificial Sequence
  Description of Artificial Sequence: Synthetic oligonucleotide
caguguucuugcucuuugc

SEQ ID NO: 2440705 - RNA, 19 nt, Artificial Sequence
  Description of Artificial Sequence: Synthetic oligonucleotide
ucucggauacauucaucau

SEQ ID NO: 2440706 - RNA, 19 nt, Artificial Sequence
  Description of Artificial Sequence: Synthetic oligonucleotide
cugcgguuaaacccauggc

SEQ ID NO: 2440707 - RNA, 19 nt, Artificial Sequence
  Description of Artificial Sequence: Synthetic oligonucleotide
gggccuauggccauguuug

SEQ ID NO: 2440708 - RNA, 19 nt, Artificial Sequence
  Description of Artificial Sequence: Synthetic oligonucleotide
cuaaacgugauaagauacu

SEQ ID NO: 2440709 - RNA, 19 nt, Artificial Sequence
  Description of Artificial Sequence: Synthetic oligonucleotide
uaguucccagugagaaccc

SEQ ID NO: 2440710 - RNA, 19 nt, Artificial Sequence
  Description of Artificial Sequence: Synthetic oligonucleotide
aucaugacugguauaggau

SEQ ID NO: 2440711 - RNA, 19 nt, Artificial Sequence
  Description of Artificial Sequence: Synthetic oligonucleotide
ucucuagcucguaccacau

SEQ ID NO: 2440712 - RNA, 19 nt, Artificial Sequence
  Description of Artificial Sequence: Synthetic oligonucleotide
acauagucugcauggcuuu

SEQ ID NO: 2440713 - RNA, 19 nt, Artificial Sequence
  Description of Artificial Sequence: Synthetic oligonucleotide
ccgugcauaguacaugugc

SEQ ID NO: 2440714 - RNA, 19 nt, Artificial Sequence
  Description of Artificial Sequence: Synthetic oligonucleotide
augaugauauucagucucu

SEQ ID NO: 2440715 - RNA, 19 nt, Artificial Sequence
  Description of Artificial Sequence: Synthetic oligonucleotide
uucccagcauagcugcggu

SEQ ID NO: 2440716 - RNA, 19 nt, Artificial Sequence
  Description of Artificial Sequence: Synthetic oligonucleotide
aauagguucccugcccaua

SEQ ID NO: 2440717 - RNA, 19 nt, Artificial Sequence
  Description of Artificial Sequence: Synthetic oligonucleotide
acguagcauucuucccagc

SEQ ID NO: 2440718 - RNA, 19 nt, Artificial Sequence
  Description of Artificial Sequence: Synthetic oligonucleotide
guaggguuuagaggguccc

SEQ ID NO: 2440719 - RNA, 19 nt, Artificial Sequence
  Description of Artificial Sequence: Synthetic oligonucleotide
cuuccagggccuauggcca

SEQ ID NO: 2440720 - RNA, 19 nt, Artificial Sequence
  Description of Artificial Sequence: Synthetic oligonucleotide
acuuggauuuugaucauua

SEQ ID NO: 2440721 - RNA, 19 nt, Artificial Sequence
  Description of Artificial Sequence: Synthetic oligonucleotide
uacauucaucaugacuggu

SEQ ID NO: 2440722 - RNA, 19 nt, Artificial Sequence
  Description of Artificial Sequence: Synthetic oligonucleotide
guguaguucccagugagaa

SEQ ID NO: 2440723 - RNA, 19 nt, Artificial Sequence
  Description of Artificial Sequence: Synthetic oligonucleotide
acagcaaaauagguucccu

SEQ ID NO: 2440724 - RNA, 19 nt, Artificial Sequence
  Description of Artificial Sequence: Synthetic oligonucleotide
uaagauacucugguauguu

SEQ ID NO: 2440725 - RNA, 19 nt, Artificial Sequence
  Description of Artificial Sequence: Synthetic oligonucleotide
cugguauaggauaacugcu

SEQ ID NO: 2440726 - RNA, 19 nt, Artificial Sequence
  Description of Artificial Sequence: Synthetic oligonucleotide
cagugagacucugucuucc

SEQ ID NO: 2440727 - RNA, 19 nt, Artificial Sequence
  Description of Artificial Sequence: Synthetic oligonucleotide
uaaacccauggcuguugac

SEQ ID NO: 2440728 - RNA, 19 nt, Artificial Sequence
  Description of Artificial Sequence: Synthetic oligonucleotide
agugucguacaagucagua

SEQ ID NO: 2440729 - RNA, 19 nt, Artificial Sequence
  Description of Artificial Sequence: Synthetic oligonucleotide
guaucaccgccuaaacgug

SEQ ID NO: 2440730 - RNA, 19 nt, Artificial Sequence
  Description of Artificial Sequence: Synthetic oligonucleotide
gacguuguugucaauguau

SEQ ID NO: 2440731 - RNA, 19 nt, Artificial Sequence
  Description of Artificial Sequence: Synthetic oligonucleotide
ggauacauucaucaugacu

SEQ ID NO: 2440732 - RNA, 19 nt, Artificial Sequence
  Description of Artificial Sequence: Synthetic oligonucleotide
uguugacguguagaauaca

SEQ ID NO: 2440733 - RNA, 19 nt, Artificial Sequence
  Description of Artificial Sequence: Synthetic oligonucleotide
agccaaucgaaugcucuug

SEQ ID NO: 2440734 - RNA, 19 nt, Artificial Sequence
  Description of Artificial Sequence: Synthetic oligonucleotide
cacuacaaauauacuugga

SEQ ID NO: 2440735 - RNA, 19 nt, Artificial Sequence
  Description of Artificial Sequence: Synthetic oligonucleotide
acauucaucaugacuggua

SEQ ID NO: 2440736 - RNA, 19 nt, Artificial Sequence
  Description of Artificial Sequence: Synthetic oligonucleotide
guucacuaugaaguuguga

SEQ ID NO: 2440737 - RNA, 19 nt, Artificial Sequence
  Description of Artificial Sequence: Synthetic oligonucleotide
ucccacuggcaucugguuu

SEQ ID NO: 2440738 - RNA, 19 nt, Artificial Sequence
  Description of Artificial Sequence: Synthetic oligonucleotide
agaauacagcuagccuccg

SEQ ID NO: 2440739 - RNA, 19 nt, Artificial Sequence
  Description of Artificial Sequence: Synthetic oligonucleotide
uagccaaucgaaugcucuu

SEQ ID NO: 2440740 - RNA, 19 nt, Artificial Sequence
  Description of Artificial Sequence: Synthetic oligonucleotide
guuuagagggucccuugaa

SEQ ID NO: 2440741 - RNA, 19 nt, Artificial Sequence
  Description of Artificial Sequence: Synthetic oligonucleotide
guaaucagaggugccuuuc

SEQ ID NO: 2440742 - RNA, 19 nt, Artificial Sequence
  Description of Artificial Sequence: Synthetic oligonucleotide
ccucucauuaaagucucgg

SEQ ID NO: 2440743 - RNA, 19 nt, Artificial Sequence
  Description of Artificial Sequence: Synthetic oligonucleotide
aucugguuuggaguaugug

SEQ ID NO: 2440744 - RNA, 19 nt, Artificial Sequence
  Description of Artificial Sequence: Synthetic oligonucleotide
ggcacaaucagugaugagu

SEQ ID NO: 2440745 - RNA, 19 nt, Artificial Sequence
  Description of Artificial Sequence: Synthetic oligonucleotide
agggccuauggccauguuu

SEQ ID NO: 2440746 - RNA, 19 nt, Artificial Sequence
  Description of Artificial Sequence: Synthetic oligonucleotide
agucucggauacauucauc

SEQ ID NO: 2440747 - RNA, 19 nt, Artificial Sequence
  Description of Artificial Sequence: Synthetic oligonucleotide
cauugacagcaaaauaggu

SEQ ID NO: 2440748 - RNA, 19 nt, Artificial Sequence
  Description of Artificial Sequence: Synthetic oligonucleotide
auacuuggauuuugaucau

SEQ ID NO: 2440749 - RNA, 19 nt, Artificial Sequence
  Description of Artificial Sequence: Synthetic oligonucleotide
gcgguuaaacccauggcug

SEQ ID NO: 2440750 - RNA, 19 nt, Artificial Sequence
  Description of Artificial Sequence: Synthetic oligonucleotide
gagaacccgugcauaguac

SEQ ID NO: 2440751 - RNA, 19 nt, Artificial Sequence
  Description of Artificial Sequence: Synthetic oligonucleotide
gugaugaguguccaacugu

SEQ ID NO: 2440752 - RNA, 19 nt, Artificial Sequence
  Description of Artificial Sequence: Synthetic oligonucleotide
cauucaucaugacugguau

SEQ ID NO: 2440753 - RNA, 19 nt, Artificial Sequence
  Description of Artificial Sequence: Synthetic oligonucleotide
uguuagccauuuugucaaa

SEQ ID NO: 2440754 - RNA, 19 nt, Artificial Sequence
  Description of Artificial Sequence: Synthetic oligonucleotide
cuaauuccuucaacuguaa

SEQ ID NO: 2440755 - RNA, 19 nt, Artificial Sequence
  Description of Artificial Sequence: Synthetic oligonucleotide
ggaggcacaaucagugaug

SEQ ID NO: 2440756 - RNA, 19 nt, Artificial Sequence
  Description of Artificial Sequence: Synthetic oligonucleotide
cccauaacacguagcauuc

SEQ ID NO: 2440757 - RNA, 19 nt, Artificial Sequence
  Description of Artificial Sequence: Synthetic oligonucleotide
gccuuucuuguccagguca

SEQ ID NO: 2440758 - RNA, 19 nt, Artificial Sequence
  Description of Artificial Sequence: Synthetic oligonucleotide
ucguaccacaucucugcua

SEQ ID NO: 2440759 - RNA, 19 nt, Artificial Sequence
  Description of Artificial Sequence: Synthetic oligonucleotide
guguccaacuguguaguuc

SEQ ID NO: 2440760 - RNA, 19 nt, Artificial Sequence
  Description of Artificial Sequence: Synthetic oligonucleotide
gcgcugaacagugagacuc

SEQ ID NO: 2440761 - RNA, 19 nt, Artificial Sequence
  Description of Artificial Sequence: Synthetic oligonucleotide
ccauguuagccauuuuguc

SEQ ID NO: 2440762 - RNA, 19 nt, Artificial Sequence
  Description of Artificial Sequence: Synthetic oligonucleotide
gacguguagaauacagcua

SEQ ID NO: 2440763 - RNA, 19 nt, Artificial Sequence
  Description of Artificial Sequence: Synthetic oligonucleotide
ggauuuugaucauuaucua

SEQ ID NO: 2440764 - RNA, 19 nt, Artificial Sequence
  Description of Artificial Sequence: Synthetic oligonucleotide
gaggugccuuucuugucca

SEQ ID NO: 2440765 - RNA, 19 nt, Artificial Sequence
  Description of Artificial Sequence: Synthetic oligonucleotide
cuagccuccgucccgugga

SEQ ID NO: 2440766 - RNA, 19 nt, Artificial Sequence
  Description of Artificial Sequence: Synthetic oligonucleotide
acgaauguggagacauagu

SEQ ID NO: 2440767 - RNA, 19 nt, Artificial Sequence
  Description of Artificial Sequence: Synthetic oligonucleotide
ccucccucucauuaaaguc

SEQ ID NO: 2440768 - RNA, 19 nt, Artificial Sequence
  Description of Artificial Sequence: Synthetic oligonucleotide
uccgugcuuccuccaacuc

SEQ ID NO: 2440769 - RNA, 19 nt, Artificial Sequence
  Description of Artificial Sequence: Synthetic oligonucleotide
gguuuagagggucccuuga

SEQ ID NO: 2440770 - RNA, 19 nt, Artificial Sequence
  Description of Artificial Sequence: Synthetic oligonucleotide
ggaagcauugacagcaaaa

SEQ ID NO: 2440771 - RNA, 19 nt, Artificial Sequence
  Description of Artificial Sequence: Synthetic oligonucleotide
uagguucccugcccauaac

SEQ ID NO: 2440772 - RNA, 19 nt, Artificial Sequence
  Description of Artificial Sequence: Synthetic oligonucleotide
gugcucaaguucacuauga

SEQ ID NO: 2440773 - RNA, 19 nt, Artificial Sequence
  Description of Artificial Sequence: Synthetic oligonucleotide
agcucguaccacaucucug

SEQ ID NO: 2440774 - RNA, 19 nt, Artificial Sequence
  Description of Artificial Sequence: Synthetic oligonucleotide
ggguuuagagggucccuug

SEQ ID NO: 2440775 - RNA, 19 nt, Artificial Sequence
  Description of Artificial Sequence: Synthetic oligonucleotide
uaggguuuagagggucccu

SEQ ID NO: 2440776 - RNA, 19 nt, Artificial Sequence
  Description of Artificial Sequence: Synthetic oligonucleotide
caucucuagcucguaccac

SEQ ID NO: 2440777 - RNA, 19 nt, Artificial Sequence
  Description of Artificial Sequence: Synthetic oligonucleotide
guaccucccucucauuaaa

SEQ ID NO: 2440778 - RNA, 19 nt, Artificial Sequence
  Description of Artificial Sequence: Synthetic oligonucleotide
gguuuggaguaugugucac

SEQ ID NO: 2440779 - RNA, 19 nt, Artificial Sequence
  Description of Artificial Sequence: Synthetic oligonucleotide
gguauguuugauugucaua

SEQ ID NO: 2440780 - RNA, 19 nt, Artificial Sequence
  Description of Artificial Sequence: Synthetic oligonucleotide
acguuguugucaauguauu

SEQ ID NO: 2440781 - RNA, 19 nt, Artificial Sequence
  Description of Artificial Sequence: Synthetic oligonucleotide
gaguguccaacuguguagu

SEQ ID NO: 2440782 - RNA, 19 nt, Artificial Sequence
  Description of Artificial Sequence: Synthetic oligonucleotide
uacuuggauuuugaucauu

SEQ ID NO: 2440783 - RNA, 19 nt, Artificial Sequence
  Description of Artificial Sequence: Synthetic oligonucleotide
gccuaaacgugauaagaua

SEQ ID NO: 2440784 - RNA, 19 nt, Artificial Sequence
  Description of Artificial Sequence: Synthetic oligonucleotide
aguucacuaugaaguugug

SEQ ID NO: 2440785 - RNA, 19 nt, Artificial Sequence
  Description of Artificial Sequence: Synthetic oligonucleotide
acccauggcuguugacgug

SEQ ID NO: 2440786 - RNA, 19 nt, Artificial Sequence
  Description of Artificial Sequence: Synthetic oligonucleotide
ugcccauaacacguagcau

SEQ ID NO: 2440787 - RNA, 19 nt, Artificial Sequence
  Description of Artificial Sequence: Synthetic oligonucleotide
cauagucugcauggcuuuc

SEQ ID NO: 2440788 - RNA, 19 nt, Artificial Sequence
  Description of Artificial Sequence: Synthetic oligonucleotide
ccgugcuuccuccaacucc

SEQ ID NO: 2440789 - RNA, 19 nt, Artificial Sequence
  Description of Artificial Sequence: Synthetic oligonucleotide
auacucugguauguuugau

SEQ ID NO: 2440790 - RNA, 19 nt, Artificial Sequence
  Description of Artificial Sequence: Synthetic oligonucleotide
ucccuugaaggaggcacaa

SEQ ID NO: 2440791 - RNA, 19 nt, Artificial Sequence
  Description of Artificial Sequence: Synthetic oligonucleotide
gcuagccuccgucccgugg

SEQ ID NO: 2440792 - RNA, 19 nt, Artificial Sequence
  Description of Artificial Sequence: Synthetic oligonucleotide
ccugcccauaacacguagc

SEQ ID NO: 2440793 - RNA, 19 nt, Artificial Sequence
  Description of Artificial Sequence: Synthetic oligonucleotide
cauaacacguagcauucuu

SEQ ID NO: 2440794 - RNA, 19 nt, Artificial Sequence
  Description of Artificial Sequence: Synthetic oligonucleotide
caccgccuaaacgugauaa

SEQ ID NO: 2440795 - RNA, 19 nt, Artificial Sequence
  Description of Artificial Sequence: Synthetic oligonucleotide
aggugccuuucuuguccag

SEQ ID NO: 2440796 - RNA, 19 nt, Artificial Sequence
  Description of Artificial Sequence: Synthetic oligonucleotide
cccguggaagagcugauuc

SEQ ID NO: 2440797 - RNA, 19 nt, Artificial Sequence
  Description of Artificial Sequence: Synthetic oligonucleotide
aguguccaacuguguaguu

SEQ ID NO: 2440798 - RNA, 19 nt, Artificial Sequence
  Description of Artificial Sequence: Synthetic oligonucleotide
aggguuuagagggucccuu

SEQ ID NO: 2440799 - RNA, 19 nt, Artificial Sequence
  Description of Artificial Sequence: Synthetic oligonucleotide
cucuagcucguaccacauc

SEQ ID NO: 2440800 - RNA, 19 nt, Artificial Sequence
  Description of Artificial Sequence: Synthetic oligonucleotide
cuuggauuuugaucauuau

SEQ ID NO: 2440801 - RNA, 19 nt, Artificial Sequence
  Description of Artificial Sequence: Synthetic oligonucleotide
cauuaaagucucggauaca

SEQ ID NO: 2440802 - RNA, 19 nt, Artificial Sequence
  Description of Artificial Sequence: Synthetic oligonucleotide
uuccacgaauguggagaca

SEQ ID NO: 2440803 - RNA, 19 nt, Artificial Sequence
  Description of Artificial Sequence: Synthetic oligonucleotide
gaggcgcugaacagugaga

SEQ ID NO: 2440804 - RNA, 19 nt, Artificial Sequence
  Description of Artificial Sequence: Synthetic oligonucleotide
gccaaucgaaugcucuuga

SEQ ID NO: 2440805 - RNA, 19 nt, Artificial Sequence
  Description of Artificial Sequence: Synthetic oligonucleotide
ucaccgccuaaacgugaua

SEQ ID NO: 2440806 - RNA, 19 nt, Artificial Sequence
  Description of Artificial Sequence: Synthetic oligonucleotide
gcccauaacacguagcauu

SEQ ID NO: 2440807 - RNA, 19 nt, Artificial Sequence
  Description of Artificial Sequence: Synthetic oligonucleotide
ccuccaacuccauguuagc

SEQ ID NO: 2440808 - RNA, 19 nt, Artificial Sequence
  Description of Artificial Sequence: Synthetic oligonucleotide
uuuugaccacaguguucuu

SEQ ID NO: 2440809 - RNA, 19 nt, Artificial Sequence
  Description of Artificial Sequence: Synthetic oligonucleotide
aucaccgccuaaacgugau

SEQ ID NO: 2440810 - RNA, 19 nt, Artificial Sequence
  Description of Artificial Sequence: Synthetic oligonucleotide
uagcugcgguuaaacccau

SEQ ID NO: 2440811 - RNA, 19 nt, Artificial Sequence
  Description of Artificial Sequence: Synthetic oligonucleotide
cuccgucccguggaagagc

SEQ ID NO: 2440812 - RNA, 19 nt, Artificial Sequence
  Description of Artificial Sequence: Synthetic oligonucleotide
ggaguaugugucacuggca

SEQ ID NO: 2440813 - RNA, 19 nt, Artificial Sequence
  Description of Artificial Sequence: Synthetic oligonucleotide
gcaucugguuuggaguaug

SEQ ID NO: 2440814 - RNA, 19 nt, Artificial Sequence
  Description of Artificial Sequence: Synthetic oligonucleotide
cguguagaauacagcuagc

SEQ ID NO: 2440815 - RNA, 19 nt, Artificial Sequence
  Description of Artificial Sequence: Synthetic oligonucleotide
gcagaauaggaagcauuga

SEQ ID NO: 2440816 - RNA, 19 nt, Artificial Sequence
  Description of Artificial Sequence: Synthetic oligonucleotide
guauugccauuccacgaau

SEQ ID NO: 2440817 - RNA, 19 nt, Artificial Sequence
  Description of Artificial Sequence: Synthetic oligonucleotide
gucccuugaaggaggcaca

SEQ ID NO: 2440818 - RNA, 19 nt, Artificial Sequence
  Description of Artificial Sequence: Synthetic oligonucleotide
ccauuccacgaauguggag

SEQ ID NO: 2440819 - RNA, 19 nt, Artificial Sequence
  Description of Artificial Sequence: Synthetic oligonucleotide
cguagcauucuucccagca

SEQ ID NO: 2440820 - RNA, 19 nt, Artificial Sequence
  Description of Artificial Sequence: Synthetic oligonucleotide
uagccuccgucccguggaa

SEQ ID NO: 2440821 - RNA, 19 nt, Artificial Sequence
  Description of Artificial Sequence: Synthetic oligonucleotide
guuugugcucaaguucacu

SEQ ID NO: 2440822 - RNA, 19 nt, Artificial Sequence
  Description of Artificial Sequence: Synthetic oligonucleotide
cuugcucuuugccuuccgu

SEQ ID NO: 2440823 - RNA, 19 nt, Artificial Sequence
  Description of Artificial Sequence: Synthetic oligonucleotide
gaacccgugcauaguacau

SEQ ID NO: 2440824 - RNA, 19 nt, Artificial Sequence
  Description of Artificial Sequence: Synthetic oligonucleotide
caacuguguaguucccagu

SEQ ID NO: 2440825 - RNA, 19 nt, Artificial Sequence
  Description of Artificial Sequence: Synthetic oligonucleotide
cucugguauguuugauugu

SEQ ID NO: 2440826 - RNA, 19 nt, Artificial Sequence
  Description of Artificial Sequence: Synthetic oligonucleotide
uaucuacgacagugucgua

SEQ ID NO: 2440827 - RNA, 19 nt, Artificial Sequence
  Description of Artificial Sequence: Synthetic oligonucleotide
cacaaucagugaugagugu

SEQ ID NO: 2440828 - RNA, 19 nt, Artificial Sequence
  Description of Artificial Sequence: Synthetic oligonucleotide
gccuauggccauguuugug

SEQ ID NO: 2440829 - RNA, 19 nt, Artificial Sequence
  Description of Artificial Sequence: Synthetic oligonucleotide
caucugguuuggaguaugu

SEQ ID NO: 2440830 - RNA, 19 nt, Artificial Sequence
  Description of Artificial Sequence: Synthetic oligonucleotide
ccauuuugucaaaacugua

SEQ ID NO: 2440831 - RNA, 19 nt, Artificial Sequence
  Description of Artificial Sequence: Synthetic oligonucleotide
ucccagcauagcugcgguu

SEQ ID NO: 2440832 - RNA, 19 nt, Artificial Sequence
  Description of Artificial Sequence: Synthetic oligonucleotide
guucccagugagaacccgu

SEQ ID NO: 2440833 - RNA, 19 nt, Artificial Sequence
  Description of Artificial Sequence: Synthetic oligonucleotide
ucccguggaagagcugauu

SEQ ID NO: 2440834 - RNA, 19 nt, Artificial Sequence
  Description of Artificial Sequence: Synthetic oligonucleotide
ccgccuaaacgugauaaga

SEQ ID NO: 2440835 - RNA, 19 nt, Artificial Sequence
  Description of Artificial Sequence: Synthetic oligonucleotide
cuacgacagugucguacaa

SEQ ID NO: 2440836 - RNA, 19 nt, Artificial Sequence
  Description of Artificial Sequence: Synthetic oligonucleotide
agcuagccuccgucccgug

SEQ ID NO: 2440837 - RNA, 19 nt, Artificial Sequence
  Description of Artificial Sequence: Synthetic oligonucleotide
cuaugaaguugugauuauu

SEQ ID NO: 2440838 - RNA, 19 nt, Artificial Sequence
  Description of Artificial Sequence: Synthetic oligonucleotide
ggccauguuugugcucaag

SEQ ID NO: 2440839 - RNA, 19 nt, Artificial Sequence
  Description of Artificial Sequence: Synthetic oligonucleotide
aucucaucucuagcucgua

SEQ ID NO: 2440840 - RNA, 19 nt, Artificial Sequence
  Description of Artificial Sequence: Synthetic oligonucleotide
cgugcauaguacaugugcu

SEQ ID NO: 2440841 - RNA, 19 nt, Artificial Sequence
  Description of Artificial Sequence: Synthetic oligonucleotide
cagugagaacccgugcaua

SEQ ID NO: 2440842 - RNA, 19 nt, Artificial Sequence
  Description of Artificial Sequence: Synthetic oligonucleotide
gugagaacccgugcauagu

SEQ ID NO: 2440843 - RNA, 19 nt, Artificial Sequence
  Description of Artificial Sequence: Synthetic oligonucleotide
augaggcgcugaacaguga

SEQ ID NO: 2440844 - RNA, 19 nt, Artificial Sequence
  Description of Artificial Sequence: Synthetic oligonucleotide
cuuccuccaacuccauguu

SEQ ID NO: 2440845 - RNA, 19 nt, Artificial Sequence
  Description of Artificial Sequence: Synthetic oligonucleotide
agcugcgguuaaacccaug

SEQ ID NO: 2440846 - RNA, 19 nt, Artificial Sequence
  Description of Artificial Sequence: Synthetic oligonucleotide
cccgugcauaguacaugug

SEQ ID NO: 2440847 - RNA, 19 nt, Artificial Sequence
  Description of Artificial Sequence: Synthetic oligonucleotide
cgacagugucguacaaguc

SEQ ID NO: 2440848 - RNA, 19 nt, Artificial Sequence
  Description of Artificial Sequence: Synthetic oligonucleotide
cccagcauagcugcgguua

SEQ ID NO: 2440849 - RNA, 19 nt, Artificial Sequence
  Description of Artificial Sequence: Synthetic oligonucleotide
ccuccgucccguggaagag

SEQ ID NO: 2440850 - RNA, 19 nt, Artificial Sequence
  Description of Artificial Sequence: Synthetic oligonucleotide
cagugucguacaagucagu

SEQ ID NO: 2440851 - RNA, 19 nt, Artificial Sequence
  Description of Artificial Sequence: Synthetic oligonucleotide
cagcauagcugcgguuaaa

SEQ ID NO: 2440852 - RNA, 19 nt, Artificial Sequence
  Description of Artificial Sequence: Synthetic oligonucleotide
cucuuugccuuccgugcuu

SEQ ID NO: 2440853 - RNA, 19 nt, Artificial Sequence
  Description of Artificial Sequence: Synthetic oligonucleotide
ccguggaagagcugauucu

SEQ ID NO: 2440854 - RNA, 19 nt, Artificial Sequence
  Description of Artificial Sequence: Synthetic oligonucleotide
ggcgcugaacagugagacu

SEQ ID NO: 2440855 - RNA, 19 nt, Artificial Sequence
  Description of Artificial Sequence: Synthetic oligonucleotide
ccagcauagcugcgguuaa

SEQ ID NO: 2440856 - RNA, 19 nt, Artificial Sequence
  Description of Artificial Sequence: Synthetic oligonucleotide
cgccuaaacgugauaagau

SEQ ID NO: 2440857 - RNA, 19 nt, Artificial Sequence
  Description of Artificial Sequence: Synthetic oligonucleotide
guaccacaucucugcuaau

SEQ ID NO: 2440858 - RNA, 19 nt, Artificial Sequence
  Description of Artificial Sequence: Synthetic oligonucleotide
ggccuauggccauguuugu

SEQ ID NO: 2440859 - RNA, 19 nt, Artificial Sequence
  Description of Artificial Sequence: Synthetic oligonucleotide
cacaguguucuugcucuuu

SEQ ID NO: 2440860 - RNA, 19 nt, Artificial Sequence
  Description of Artificial Sequence: Synthetic oligonucleotide
cgguuaaacccauggcugu

SEQ ID NO: 2440861 - RNA, 19 nt, Artificial Sequence
  Description of Artificial Sequence: Synthetic oligonucleotide
ggcuguugacguguagaau

SEQ ID NO: 2440862 - RNA, 19 nt, Artificial Sequence
  Description of Artificial Sequence: Synthetic oligonucleotide
ccaaucgaaugcucuugau

SEQ ID NO: 2440863 - RNA, 19 nt, Artificial Sequence
  Description of Artificial Sequence: Synthetic oligonucleotide
cagcuagccuccgucccgu

SEQ ID NO: 2440864 - RNA, 19 nt, Artificial Sequence
  Description of Artificial Sequence: Synthetic oligonucleotide
ccacgaauguggagacaua

SEQ ID NO: 2440865 - RNA, 19 nt, Artificial Sequence
  Description of Artificial Sequence: Synthetic oligonucleotide
cgaaugcucuugaucaguu

SEQ ID NO: 2440866 - RNA, 19 nt, Artificial Sequence
  Description of Artificial Sequence: Synthetic oligonucleotide
caacuccauguuagccauu

SEQ ID NO: 2440867 - RNA, 19 nt, Artificial Sequence
  Description of Artificial Sequence: Synthetic oligonucleotide
ggcaucugguuuggaguau

SEQ ID NO: 2440868 - RNA, 19 nt, Artificial Sequence
  Description of Artificial Sequence: Synthetic oligonucleotide
ccauaacacguagcauucu

SEQ ID NO: 2440869 - RNA, 19 nt, Artificial Sequence
  Description of Artificial Sequence: Synthetic oligonucleotide
ccauggcuguugacgugua

SEQ ID NO: 2440870 - RNA, 19 nt, Artificial Sequence
  Description of Artificial Sequence: Synthetic oligonucleotide
ccgucccguggaagagcug

SEQ ID NO: 2440871 - RNA, 19 nt, Artificial Sequence
  Description of Artificial Sequence: Synthetic oligonucleotide
ccagggccuauggccaugu

SEQ ID NO: 2440872 - RNA, 19 nt, Artificial Sequence
  Description of Artificial Sequence: Synthetic oligonucleotide
cagggccuauggccauguu

SEQ ID NO: 2440873 - RNA, 19 nt, Artificial Sequence
  Description of Artificial Sequence: Synthetic oligonucleotide
cccuugaaggaggcacaau

SEQ ID NO: 2440874 - RNA, 19 nt, Artificial Sequence
  Description of Artificial Sequence: Synthetic oligonucleotide
aacaagaucaugcugauga

SEQ ID NO: 2440875 - RNA, 19 nt, Artificial Sequence
  Description of Artificial Sequence: Synthetic oligonucleotide
aaauggacggucuuggugg

SEQ ID NO: 2440876 - RNA, 19 nt, Artificial Sequence
  Description of Artificial Sequence: Synthetic oligonucleotide
gaacugguuagcuagagcc

SEQ ID NO: 2440877 - RNA, 19 nt, Artificial Sequence
  Description of Artificial Sequence: Synthetic oligonucleotide
agaaaguccaccuuccgcg

SEQ ID NO: 2440878 - RNA, 19 nt, Artificial Sequence
  Description of Artificial Sequence: Synthetic oligonucleotide
acucugauaaacaagauca

SEQ ID NO: 2440879 - RNA, 19 nt, Artificial Sequence
  Description of Artificial Sequence: Synthetic oligonucleotide
ugcugaugaacacaaagca

SEQ ID NO: 2440880 - RNA, 19 nt, Artificial Sequence
  Description of Artificial Sequence: Synthetic oligonucleotide
uuuuacuucagccggggca

SEQ ID NO: 2440881 - RNA, 19 nt, Artificial Sequence
  Description of Artificial Sequence: Synthetic oligonucleotide
ucuugagagagugugacag

SEQ ID NO: 2440882 - RNA, 19 nt, Artificial Sequence
  Description of Artificial Sequence: Synthetic oligonucleotide
acgacgaugagcauggccc

SEQ ID NO: 2440883 - RNA, 19 nt, Artificial Sequence
  Description of Artificial Sequence: Synthetic oligonucleotide
accagguucaacuccaguc

SEQ ID NO: 2440884 - RNA, 19 nt, Artificial Sequence
  Description of Artificial Sequence: Synthetic oligonucleotide
gaggaggucaauuucucag

SEQ ID NO: 2440885 - RNA, 19 nt, Artificial Sequence
  Description of Artificial Sequence: Synthetic oligonucleotide
aagaucaugcugaugaaca

SEQ ID NO: 2440886 - RNA, 19 nt, Artificial Sequence
  Description of Artificial Sequence: Synthetic oligonucleotide
aggaggucaauuucucagc

SEQ ID NO: 2440887 - RNA, 19 nt, Artificial Sequence
  Description of Artificial Sequence: Synthetic oligonucleotide
aauggacggucuugguggc

SEQ ID NO: 2440888 - RNA, 19 nt, Artificial Sequence
  Description of Artificial Sequence: Synthetic oligonucleotide
gaggacaaggucgagcucg

SEQ ID NO: 2440889 - RNA, 19 nt, Artificial Sequence
  Description of Artificial Sequence: Synthetic oligonucleotide
agguuugcucgcuuggacc

SEQ ID NO: 2440890 - RNA, 19 nt, Artificial Sequence
  Description of Artificial Sequence: Synthetic oligonucleotide
aaccgcaccagguucaacu

SEQ ID NO: 2440891 - RNA, 19 nt, Artificial Sequence
  Description of Artificial Sequence: Synthetic oligonucleotide
uccagaugaguccaugccc

SEQ ID NO: 2440892 - RNA, 19 nt, Artificial Sequence
  Description of Artificial Sequence: Synthetic oligonucleotide
ucugauaaacaagaucaug

SEQ ID NO: 2440893 - RNA, 19 nt, Artificial Sequence
  Description of Artificial Sequence: Synthetic oligonucleotide
uugaugacacucugggcgg

SEQ ID NO: 2440894 - RNA, 19 nt, Artificial Sequence
  Description of Artificial Sequence: Synthetic oligonucleotide
ucggaggcagguuugcucg

SEQ ID NO: 2440895 - RNA, 19 nt, Artificial Sequence
  Description of Artificial Sequence: Synthetic oligonucleotide
ucucacgcucuccagauga

SEQ ID NO: 2440896 - RNA, 19 nt, Artificial Sequence
  Description of Artificial Sequence: Synthetic oligonucleotide
cacacgacgaugagcaugg

SEQ ID NO: 2440897 - RNA, 19 nt, Artificial Sequence
  Description of Artificial Sequence: Synthetic oligonucleotide
aacacaaagcacacgacga

SEQ ID NO: 2440898 - RNA, 19 nt, Artificial Sequence
  Description of Artificial Sequence: Synthetic oligonucleotide
uaugcgcugccucaugucc

SEQ ID NO: 2440899 - RNA, 19 nt, Artificial Sequence
  Description of Artificial Sequence: Synthetic oligonucleotide
agaggaggaggucaauuuc

SEQ ID NO: 2440900 - RNA, 19 nt, Artificial Sequence
  Description of Artificial Sequence: Synthetic oligonucleotide
uuugcuaugcgcugccuca

SEQ ID NO: 2440901 - RNA, 19 nt, Artificial Sequence
  Description of Artificial Sequence: Synthetic oligonucleotide
uucgcagcgacacaacaac

SEQ ID NO: 2440902 - RNA, 19 nt, Artificial Sequence
  Description of Artificial Sequence: Synthetic oligonucleotide
ucagaaaguccaccuuccg

SEQ ID NO: 2440903 - RNA, 19 nt, Artificial Sequence
  Description of Artificial Sequence: Synthetic oligonucleotide
caccgaaugcuucucaucc

SEQ ID NO: 2440904 - RNA, 19 nt, Artificial Sequence
  Description of Artificial Sequence: Synthetic oligonucleotide
cacauacuucuccagacgc

SEQ ID NO: 2440905 - RNA, 19 nt, Artificial Sequence
  Description of Artificial Sequence: Synthetic oligonucleotide
uggaggacaaggucgagcu

SEQ ID NO: 2440906 - RNA, 19 nt, Artificial Sequence
  Description of Artificial Sequence: Synthetic oligonucleotide
auuugcuaugcgcugccuc

SEQ ID NO: 2440907 - RNA, 19 nt, Artificial Sequence
  Description of Artificial Sequence: Synthetic oligonucleotide
uuuucugccgccaucgauu

SEQ ID NO: 2440908 - RNA, 19 nt, Artificial Sequence
  Description of Artificial Sequence: Synthetic oligonucleotide
acugguguaacgugcccgg

SEQ ID NO: 2440909 - RNA, 19 nt, Artificial Sequence
  Description of Artificial Sequence: Synthetic oligonucleotide
uguaacgugcccgggauug

SEQ ID NO: 2440910 - RNA, 19 nt, Artificial Sequence
  Description of Artificial Sequence: Synthetic oligonucleotide
ugcccagcagcucacuccg

SEQ ID NO: 2440911 - RNA, 19 nt, Artificial Sequence
  Description of Artificial Sequence: Synthetic oligonucleotide
cagcaugcccuucagaaag

SEQ ID NO: 2440912 - RNA, 19 nt, Artificial Sequence
  Description of Artificial Sequence: Synthetic oligonucleotide
uggucuugaggcuucuugc

SEQ ID NO: 2440913 - RNA, 19 nt, Artificial Sequence
  Description of Artificial Sequence: Synthetic oligonucleotide
gaugaguccaugcccagca

SEQ ID NO: 2440914 - RNA, 19 nt, Artificial Sequence
  Description of Artificial Sequence: Synthetic oligonucleotide
aacuccagucgcgacgucg

SEQ ID NO: 2440915 - RNA, 19 nt, Artificial Sequence
  Description of Artificial Sequence: Synthetic oligonucleotide
acgcucuccagaugagucc

SEQ ID NO: 2440916 - RNA, 19 nt, Artificial Sequence
  Description of Artificial Sequence: Synthetic oligonucleotide
aggccuagcaucuccuccg

SEQ ID NO: 2440917 - RNA, 19 nt, Artificial Sequence
  Description of Artificial Sequence: Synthetic oligonucleotide
caggucuggacccauuugc

SEQ ID NO: 2440918 - RNA, 19 nt, Artificial Sequence
  Description of Artificial Sequence: Synthetic oligonucleotide
caguguguuggucuugagg

SEQ ID NO: 2440919 - RNA, 19 nt, Artificial Sequence
  Description of Artificial Sequence: Synthetic oligonucleotide
cucgcugaugacuucggag

SEQ ID NO: 2440920 - RNA, 19 nt, Artificial Sequence
  Description of Artificial Sequence: Synthetic oligonucleotide
aaaguccaccuuccgcgag

SEQ ID NO: 2440921 - RNA, 19 nt, Artificial Sequence
  Description of Artificial Sequence: Synthetic oligonucleotide
ugcccgggauugcaaaugg

SEQ ID NO: 2440922 - RNA, 19 nt, Artificial Sequence
  Description of Artificial Sequence: Synthetic oligonucleotide
cagaaaguccaccuuccgc

SEQ ID NO: 2440923 - RNA, 19 nt, Artificial Sequence
  Description of Artificial Sequence: Synthetic oligonucleotide
gacaaggucgagcucggac

SEQ ID NO: 2440924 - RNA, 19 nt, Artificial Sequence
  Description of Artificial Sequence: Synthetic oligonucleotide
uucgguucccgcuuuucug

SEQ ID NO: 2440925 - RNA, 19 nt, Artificial Sequence
  Description of Artificial Sequence: Synthetic oligonucleotide
uuuacuucagccggggcau

SEQ ID NO: 2440926 - RNA, 19 nt, Artificial Sequence
  Description of Artificial Sequence: Synthetic oligonucleotide
ucgguucccgcuuuucugc

SEQ ID NO: 2440927 - RNA, 19 nt, Artificial Sequence
  Description of Artificial Sequence: Synthetic oligonucleotide
acaccgaaugcuucucauc

SEQ ID NO: 2440928 - RNA, 19 nt, Artificial Sequence
  Description of Artificial Sequence: Synthetic oligonucleotide
agcgacacaacaaccgcac

SEQ ID NO: 2440929 - RNA, 19 nt, Artificial Sequence
  Description of Artificial Sequence: Synthetic oligonucleotide
ccaggaacugguuagcuag

SEQ ID NO: 2440930 - RNA, 19 nt, Artificial Sequence
  Description of Artificial Sequence: Synthetic oligonucleotide
agggcacccacauacuucu

SEQ ID NO: 2440931 - RNA, 19 nt, Artificial Sequence
  Description of Artificial Sequence: Synthetic oligonucleotide
ucuuaggagagggcggaag

SEQ ID NO: 2440932 - RNA, 19 nt, Artificial Sequence
  Description of Artificial Sequence: Synthetic oligonucleotide
uacucgcugaugacuucgg

SEQ ID NO: 2440933 - RNA, 19 nt, Artificial Sequence
  Description of Artificial Sequence: Synthetic oligonucleotide
caugcccuucagaaagucc

SEQ ID NO: 2440934 - RNA, 19 nt, Artificial Sequence
  Description of Artificial Sequence: Synthetic oligonucleotide
acaacaaccgcaccagguu

SEQ ID NO: 2440935 - RNA, 19 nt, Artificial Sequence
  Description of Artificial Sequence: Synthetic oligonucleotide
ucuggacccauuugcuaug

SEQ ID NO: 2440936 - RNA, 19 nt, Artificial Sequence
  Description of Artificial Sequence: Synthetic oligonucleotide
caucgauucgcagcgacac

SEQ ID NO: 2440937 - RNA, 19 nt, Artificial Sequence
  Description of Artificial Sequence: Synthetic oligonucleotide
ucacuccgcaucucacugg

SEQ ID NO: 2440938 - RNA, 19 nt, Artificial Sequence
  Description of Artificial Sequence: Synthetic oligonucleotide
ugggcacgcgaccaggggc

SEQ ID NO: 2440939 - RNA, 19 nt, Artificial Sequence
  Description of Artificial Sequence: Synthetic oligonucleotide
uggacggucuugguggcgg

SEQ ID NO: 2440940 - RNA, 19 nt, Artificial Sequence
  Description of Artificial Sequence: Synthetic oligonucleotide
ccagguucaacuccagucg

SEQ ID NO: 2440941 - RNA, 19 nt, Artificial Sequence
  Description of Artificial Sequence: Synthetic oligonucleotide
acgccacucguucgguucc

SEQ ID NO: 2440942 - RNA, 19 nt, Artificial Sequence
  Description of Artificial Sequence: Synthetic oligonucleotide
aguacucgcugaugacuuc

SEQ ID NO: 2440943 - RNA, 19 nt, Artificial Sequence
  Description of Artificial Sequence: Synthetic oligonucleotide
guacucgcugaugacuucg

SEQ ID NO: 2440944 - RNA, 19 nt, Artificial Sequence
  Description of Artificial Sequence: Synthetic oligonucleotide
cuugaggcuucuugccagg

SEQ ID NO: 2440945 - RNA, 19 nt, Artificial Sequence
  Description of Artificial Sequence: Synthetic oligonucleotide
ucgauucgcagcgacacaa

SEQ ID NO: 2440946 - RNA, 19 nt, Artificial Sequence
  Description of Artificial Sequence: Synthetic oligonucleotide
ugagagagugugacagggu

SEQ ID NO: 2440947 - RNA, 19 nt, Artificial Sequence
  Description of Artificial Sequence: Synthetic oligonucleotide
uccaccuuccgcgaguacu

SEQ ID NO: 2440948 - RNA, 19 nt, Artificial Sequence
  Description of Artificial Sequence: Synthetic oligonucleotide
aaguccaccuuccgcgagu

SEQ ID NO: 2440949 - RNA, 19 nt, Artificial Sequence
  Description of Artificial Sequence: Synthetic oligonucleotide
ugguguaacgugcccggga

SEQ ID NO: 2440950 - RNA, 19 nt, Artificial Sequence
  Description of Artificial Sequence: Synthetic oligonucleotide
augcccuucagaaagucca

SEQ ID NO: 2440951 - RNA, 19 nt, Artificial Sequence
  Description of Artificial Sequence: Synthetic oligonucleotide
aaacaagaucaugcugaug

SEQ ID NO: 2440952 - RNA, 19 nt, Artificial Sequence
  Description of Artificial Sequence: Synthetic oligonucleotide
cucacuccgcaucucacug

SEQ ID NO: 2440953 - RNA, 19 nt, Artificial Sequence
  Description of Artificial Sequence: Synthetic oligonucleotide
gcuccagccgcucagauuc

SEQ ID NO: 2440954 - RNA, 19 nt, Artificial Sequence
  Description of Artificial Sequence: Synthetic oligonucleotide
acacaacaaccgcaccagg

SEQ ID NO: 2440955 - RNA, 19 nt, Artificial Sequence
  Description of Artificial Sequence: Synthetic oligonucleotide
aggucgagcucggacaccg

SEQ ID NO: 2440956 - RNA, 19 nt, Artificial Sequence
  Description of Artificial Sequence: Synthetic oligonucleotide
ggaggucaauuucucagcc

SEQ ID NO: 2440957 - RNA, 19 nt, Artificial Sequence
  Description of Artificial Sequence: Synthetic oligonucleotide
acuccagucgcgacgucgc

SEQ ID NO: 2440958 - RNA, 19 nt, Artificial Sequence
  Description of Artificial Sequence: Synthetic oligonucleotide
ugacuucggaggcagguuu

SEQ ID NO: 2440959 - RNA, 19 nt, Artificial Sequence
  Description of Artificial Sequence: Synthetic oligonucleotide
agacuuccgcgugugcugc

SEQ ID NO: 2440960 - RNA, 19 nt, Artificial Sequence
  Description of Artificial Sequence: Synthetic oligonucleotide
aacugguuagcuagagccu

SEQ ID NO: 2440961 - RNA, 19 nt, Artificial Sequence
  Description of Artificial Sequence: Synthetic oligonucleotide
cuagagccuucucagagga

SEQ ID NO: 2440962 - RNA, 19 nt, Artificial Sequence
  Description of Artificial Sequence: Synthetic oligonucleotide
aacaaccgcaccagguuca

SEQ ID NO: 2440963 - RNA, 19 nt, Artificial Sequence
  Description of Artificial Sequence: Synthetic oligonucleotide
cagguucaacuccagucgc

SEQ ID NO: 2440964 - RNA, 19 nt, Artificial Sequence
  Description of Artificial Sequence: Synthetic oligonucleotide
acuucggaggcagguuugc

SEQ ID NO: 2440965 - RNA, 19 nt, Artificial Sequence
  Description of Artificial Sequence: Synthetic oligonucleotide
auugcaaauggacggucuu

SEQ ID NO: 2440966 - RNA, 19 nt, Artificial Sequence
  Description of Artificial Sequence: Synthetic oligonucleotide
ggacccauuugcuaugcgc

SEQ ID NO: 2440967 - RNA, 19 nt, Artificial Sequence
  Description of Artificial Sequence: Synthetic oligonucleotide
ucgcagcgacacaacaacc

SEQ ID NO: 2440968 - RNA, 19 nt, Artificial Sequence
  Description of Artificial Sequence: Synthetic oligonucleotide
ccucauguccaucucacgc

SEQ ID NO: 2440969 - RNA, 19 nt, Artificial Sequence
  Description of Artificial Sequence: Synthetic oligonucleotide
uucggaggcagguuugcuc

SEQ ID NO: 2440970 - RNA, 19 nt, Artificial Sequence
  Description of Artificial Sequence: Synthetic oligonucleotide
ugaugacuucggaggcagg

SEQ ID NO: 2440971 - RNA, 19 nt, Artificial Sequence
  Description of Artificial Sequence: Synthetic oligonucleotide
uuucugccgccaucgauuc

SEQ ID NO: 2440972 - RNA, 19 nt, Artificial Sequence
  Description of Artificial Sequence: Synthetic oligonucleotide
acacaaagcacacgacgau

SEQ ID NO: 2440973 - RNA, 19 nt, Artificial Sequence
  Description of Artificial Sequence: Synthetic oligonucleotide
uggacccauuugcuaugcg

SEQ ID NO: 2440974 - RNA, 19 nt, Artificial Sequence
  Description of Artificial Sequence: Synthetic oligonucleotide
cacugguguaacgugcccg

SEQ ID NO: 2440975 - RNA, 19 nt, Artificial Sequence
  Description of Artificial Sequence: Synthetic oligonucleotide
aguccacagacuuccgcgu

SEQ ID NO: 2440976 - RNA, 19 nt, Artificial Sequence
  Description of Artificial Sequence: Synthetic oligonucleotide
cacaaagcacacgacgaug

SEQ ID NO: 2440977 - RNA, 19 nt, Artificial Sequence
  Description of Artificial Sequence: Synthetic oligonucleotide
cuagcuguggugggcacgc

SEQ ID NO: 2440978 - RNA, 19 nt, Artificial Sequence
  Description of Artificial Sequence: Synthetic oligonucleotide
acagacuuccgcgugugcu

SEQ ID NO: 2440979 - RNA, 19 nt, Artificial Sequence
  Description of Artificial Sequence: Synthetic oligonucleotide
caggccuagcaucuccucc

SEQ ID NO: 2440980 - RNA, 19 nt, Artificial Sequence
  Description of Artificial Sequence: Synthetic oligonucleotide
caaggucgagcucggacac

SEQ ID NO: 2440981 - RNA, 19 nt, Artificial Sequence
  Description of Artificial Sequence: Synthetic oligonucleotide
caacaaccgcaccagguuc

SEQ ID NO: 2440982 - RNA, 19 nt, Artificial Sequence
  Description of Artificial Sequence: Synthetic oligonucleotide
cgggauugcaaauggacgg

SEQ ID NO: 2440983 - RNA, 19 nt, Artificial Sequence
  Description of Artificial Sequence: Synthetic oligonucleotide
uguggugggcacgcgacca

SEQ ID NO: 2440984 - RNA, 19 nt, Artificial Sequence
  Description of Artificial Sequence: Synthetic oligonucleotide
ccgggauugcaaauggacg

SEQ ID NO: 2440985 - RNA, 19 nt, Artificial Sequence
  Description of Artificial Sequence: Synthetic oligonucleotide
gacgccacucguucgguuc

SEQ ID NO: 2440986 - RNA, 19 nt, Artificial Sequence
  Description of Artificial Sequence: Synthetic oligonucleotide
ggucuugaggcuucuugcc

SEQ ID NO: 2440987 - RNA, 19 nt, Artificial Sequence
  Description of Artificial Sequence: Synthetic oligonucleotide
acccauuugcuaugcgcug

SEQ ID NO: 2440988 - RNA, 19 nt, Artificial Sequence
  Description of Artificial Sequence: Synthetic oligonucleotide
uguguuggucuugaggcuu

SEQ ID NO: 2440989 - RNA, 19 nt, Artificial Sequence
  Description of Artificial Sequence: Synthetic oligonucleotide
guucccgcuuuucugccgc

SEQ ID NO: 2440990 - RNA, 19 nt, Artificial Sequence
  Description of Artificial Sequence: Synthetic oligonucleotide
ugucuuccagggcacccac

SEQ ID NO: 2440991 - RNA, 19 nt, Artificial Sequence
  Description of Artificial Sequence: Synthetic oligonucleotide
gugccucuggaggacaagg

SEQ ID NO: 2440992 - RNA, 19 nt, Artificial Sequence
  Description of Artificial Sequence: Synthetic oligonucleotide
agcucggacaccgaaugcu

SEQ ID NO: 2440993 - RNA, 19 nt, Artificial Sequence
  Description of Artificial Sequence: Synthetic oligonucleotide
cuucuccagacgccacucg

SEQ ID NO: 2440994 - RNA, 19 nt, Artificial Sequence
  Description of Artificial Sequence: Synthetic oligonucleotide
agucgcgacgucgccagcg

SEQ ID NO: 2440995 - RNA, 19 nt, Artificial Sequence
  Description of Artificial Sequence: Synthetic oligonucleotide
ugacacucugggcggccag

SEQ ID NO: 2440996 - RNA, 19 nt, Artificial Sequence
  Description of Artificial Sequence: Synthetic oligonucleotide
ccaucuuaggagagggcgg

SEQ ID NO: 2440997 - RNA, 19 nt, Artificial Sequence
  Description of Artificial Sequence: Synthetic oligonucleotide
cagguuugcucgcuuggac

SEQ ID NO: 2440998 - RNA, 19 nt, Artificial Sequence
  Description of Artificial Sequence: Synthetic oligonucleotide
ucgcuuggaccuucagggc

SEQ ID NO: 2440999 - RNA, 19 nt, Artificial Sequence
  Description of Artificial Sequence: Synthetic oligonucleotide
gucuugaggcuucuugcca

SEQ ID NO: 2441000 - RNA, 19 nt, Artificial Sequence
  Description of Artificial Sequence: Synthetic oligonucleotide
accgaaugcuucucaucca

SEQ ID NO: 2441001 - RNA, 19 nt, Artificial Sequence
  Description of Artificial Sequence: Synthetic oligonucleotide
agguucaacuccagucgcg

SEQ ID NO: 2441002 - RNA, 19 nt, Artificial Sequence
  Description of Artificial Sequence: Synthetic oligonucleotide
gugaccggccccuuccgcc

SEQ ID NO: 2441003 - RNA, 19 nt, Artificial Sequence
  Description of Artificial Sequence: Synthetic oligonucleotide
cucauccacaggucuggac

SEQ ID NO: 2441004 - RNA, 19 nt, Artificial Sequence
  Description of Artificial Sequence: Synthetic oligonucleotide
ucgagcucggacaccgaau

SEQ ID NO: 2441005 - RNA, 19 nt, Artificial Sequence
  Description of Artificial Sequence: Synthetic oligonucleotide
uucugccgccaucgauucg

SEQ ID NO: 2441006 - RNA, 19 nt, Artificial Sequence
  Description of Artificial Sequence: Synthetic oligonucleotide
gcagcgacacaacaaccgc

SEQ ID NO: 2441007 - RNA, 19 nt, Artificial Sequence
  Description of Artificial Sequence: Synthetic oligonucleotide
auacuucuccagacgccac

SEQ ID NO: 2441008 - RNA, 19 nt, Artificial Sequence
  Description of Artificial Sequence: Synthetic oligonucleotide
ucaugcugaugaacacaaa

SEQ ID NO: 2441009 - RNA, 19 nt, Artificial Sequence
  Description of Artificial Sequence: Synthetic oligonucleotide
gccgccaucgauucgcagc

SEQ ID NO: 2441010 - RNA, 19 nt, Artificial Sequence
  Description of Artificial Sequence: Synthetic oligonucleotide
gagcucggacaccgaaugc

SEQ ID NO: 2441011 - RNA, 19 nt, Artificial Sequence
  Description of Artificial Sequence: Synthetic oligonucleotide
uuccgcgaguacucgcuga

SEQ ID NO: 2441012 - RNA, 19 nt, Artificial Sequence
  Description of Artificial Sequence: Synthetic oligonucleotide
gacccauuugcuaugcgcu

SEQ ID NO: 2441013 - RNA, 19 nt, Artificial Sequence
  Description of Artificial Sequence: Synthetic oligonucleotide
uccgcgaguacucgcugau

SEQ ID NO: 2441014 - RNA, 19 nt, Artificial Sequence
  Description of Artificial Sequence: Synthetic oligonucleotide
aggcagguuugcucgcuug

SEQ ID NO: 2441015 - RNA, 19 nt, Artificial Sequence
  Description of Artificial Sequence: Synthetic oligonucleotide
gaugacuucggaggcaggu

SEQ ID NO: 2441016 - RNA, 19 nt, Artificial Sequence
  Description of Artificial Sequence: Synthetic oligonucleotide
uccgccucgcgccaucuua

SEQ ID NO: 2441017 - RNA, 19 nt, Artificial Sequence
  Description of Artificial Sequence: Synthetic oligonucleotide
cgcagcgacacaacaaccg

SEQ ID NO: 2441018 - RNA, 19 nt, Artificial Sequence
  Description of Artificial Sequence: Synthetic oligonucleotide
gacuucggaggcagguuug

SEQ ID NO: 2441019 - RNA, 19 nt, Artificial Sequence
  Description of Artificial Sequence: Synthetic oligonucleotide
cccgggauugcaaauggac

SEQ ID NO: 2441020 - RNA, 19 nt, Artificial Sequence
  Description of Artificial Sequence: Synthetic oligonucleotide
cucacgcucuccagaugag

SEQ ID NO: 2441021 - RNA, 19 nt, Artificial Sequence
  Description of Artificial Sequence: Synthetic oligonucleotide
uaacgugcccgggauugca

SEQ ID NO: 2441022 - RNA, 19 nt, Artificial Sequence
  Description of Artificial Sequence: Synthetic oligonucleotide
guucaacuccagucgcgac

SEQ ID NO: 2441023 - RNA, 19 nt, Artificial Sequence
  Description of Artificial Sequence: Synthetic oligonucleotide
gacagggucugguuguccu

SEQ ID NO: 2441024 - RNA, 19 nt, Artificial Sequence
  Description of Artificial Sequence: Synthetic oligonucleotide
gucgcgacgucgccagcgg

SEQ ID NO: 2441025 - RNA, 19 nt, Artificial Sequence
  Description of Artificial Sequence: Synthetic oligonucleotide
cucgcgccaucuuaggaga

SEQ ID NO: 2441026 - RNA, 19 nt, Artificial Sequence
  Description of Artificial Sequence: Synthetic oligonucleotide
ucgcgacgucgccagcggg

SEQ ID NO: 2441027 - RNA, 19 nt, Artificial Sequence
  Description of Artificial Sequence: Synthetic oligonucleotide
gaggaggaggucaauuucu

SEQ ID NO: 2441028 - RNA, 19 nt, Artificial Sequence
  Description of Artificial Sequence: Synthetic oligonucleotide
aucgauucgcagcgacaca

SEQ ID NO: 2441029 - RNA, 19 nt, Artificial Sequence
  Description of Artificial Sequence: Synthetic oligonucleotide
ccucgcgccaucuuaggag

SEQ ID NO: 2441030 - RNA, 19 nt, Artificial Sequence
  Description of Artificial Sequence: Synthetic oligonucleotide
ucgcgccaucuuaggagag

SEQ ID NO: 2441031 - RNA, 19 nt, Artificial Sequence
  Description of Artificial Sequence: Synthetic oligonucleotide
gcgaccaggggccaggaac

SEQ ID NO: 2441032 - RNA, 19 nt, Artificial Sequence
  Description of Artificial Sequence: Synthetic oligonucleotide
gacgaugagcauggcccag

SEQ ID NO: 2441033 - RNA, 19 nt, Artificial Sequence
  Description of Artificial Sequence: Synthetic oligonucleotide
auucgcagcgacacaacaa

SEQ ID NO: 2441034 - RNA, 19 nt, Artificial Sequence
  Description of Artificial Sequence: Synthetic oligonucleotide
uugguggcgggcacccgcu

SEQ ID NO: 2441035 - RNA, 19 nt, Artificial Sequence
  Description of Artificial Sequence: Synthetic oligonucleotide
gauugcaaauggacggucu

SEQ ID NO: 2441036 - RNA, 19 nt, Artificial Sequence
  Description of Artificial Sequence: Synthetic oligonucleotide
gggcaugacucugauaaac

SEQ ID NO: 2441037 - RNA, 19 nt, Artificial Sequence
  Description of Artificial Sequence: Synthetic oligonucleotide
ugaugacacucugggcggc

SEQ ID NO: 2441038 - RNA, 19 nt, Artificial Sequence
  Description of Artificial Sequence: Synthetic oligonucleotide
agcuguggugggcacgcga

SEQ ID NO: 2441039 - RNA, 19 nt, Artificial Sequence
  Description of Artificial Sequence: Synthetic oligonucleotide
acucgcugaugacuucgga

SEQ ID NO: 2441040 - RNA, 19 nt, Artificial Sequence
  Description of Artificial Sequence: Synthetic oligonucleotide
ucacgcucuccagaugagu

SEQ ID NO: 2441041 - RNA, 19 nt, Artificial Sequence
  Description of Artificial Sequence: Synthetic oligonucleotide
aucucacgcucuccagaug

SEQ ID NO: 2441042 - RNA, 19 nt, Artificial Sequence
  Description of Artificial Sequence: Synthetic oligonucleotide
cuuccgcgugugcugcucc

SEQ ID NO: 2441043 - RNA, 19 nt, Artificial Sequence
  Description of Artificial Sequence: Synthetic oligonucleotide
ucccuagcuguggugggca

SEQ ID NO: 2441044 - RNA, 19 nt, Artificial Sequence
  Description of Artificial Sequence: Synthetic oligonucleotide
uccagucgcgacgucgcca

SEQ ID NO: 2441045 - RNA, 19 nt, Artificial Sequence
  Description of Artificial Sequence: Synthetic oligonucleotide
acucguucgguucccgcuu

SEQ ID NO: 2441046 - RNA, 19 nt, Artificial Sequence
  Description of Artificial Sequence: Synthetic oligonucleotide
ugaccggccccuuccgccu

SEQ ID NO: 2441047 - RNA, 19 nt, Artificial Sequence
  Description of Artificial Sequence: Synthetic oligonucleotide
cacaacaaccgcaccaggu

SEQ ID NO: 2441048 - RNA, 19 nt, Artificial Sequence
  Description of Artificial Sequence: Synthetic oligonucleotide
aggacaaggucgagcucgg

SEQ ID NO: 2441049 - RNA, 19 nt, Artificial Sequence
  Description of Artificial Sequence: Synthetic oligonucleotide
uacuucagccggggcauga

SEQ ID NO: 2441050 - RNA, 19 nt, Artificial Sequence
  Description of Artificial Sequence: Synthetic oligonucleotide
cagcgacacaacaaccgca

SEQ ID NO: 2441051 - RNA, 19 nt, Artificial Sequence
  Description of Artificial Sequence: Synthetic oligonucleotide
ccgccaucgauucgcagcg

SEQ ID NO: 2441052 - RNA, 19 nt, Artificial Sequence
  Description of Artificial Sequence: Synthetic oligonucleotide
caucuuaggagagggcgga

SEQ ID NO: 2441053 - RNA, 19 nt, Artificial Sequence
  Description of Artificial Sequence: Synthetic oligonucleotide
uccgcaucucacuggugua

SEQ ID NO: 2441054 - RNA, 19 nt, Artificial Sequence
  Description of Artificial Sequence: Synthetic oligonucleotide
cuggacccauuugcuaugc

SEQ ID NO: 2441055 - RNA, 19 nt, Artificial Sequence
  Description of Artificial Sequence: Synthetic oligonucleotide
acuuccgcgugugcugcuc

SEQ ID NO: 2441056 - RNA, 19 nt, Artificial Sequence
  Description of Artificial Sequence: Synthetic oligonucleotide
ccagacgccacucguucgg

SEQ ID NO: 2441057 - RNA, 19 nt, Artificial Sequence
  Description of Artificial Sequence: Synthetic oligonucleotide
gguucccgcuuuucugccg

SEQ ID NO: 2441058 - RNA, 19 nt, Artificial Sequence
  Description of Artificial Sequence: Synthetic oligonucleotide
cuguggugggcacgcgacc

SEQ ID NO: 2441059 - RNA, 19 nt, Artificial Sequence
  Description of Artificial Sequence: Synthetic oligonucleotide
augucuuccagggcaccca

SEQ ID NO: 2441060 - RNA, 19 nt, Artificial Sequence
  Description of Artificial Sequence: Synthetic oligonucleotide
agagugugacagggucugg

SEQ ID NO: 2441061 - RNA, 19 nt, Artificial Sequence
  Description of Artificial Sequence: Synthetic oligonucleotide
cuuccgcgaguacucgcug

SEQ ID NO: 2441062 - RNA, 19 nt, Artificial Sequence
  Description of Artificial Sequence: Synthetic oligonucleotide
aggucuggacccauuugcu

SEQ ID NO: 2441063 - RNA, 19 nt, Artificial Sequence
  Description of Artificial Sequence: Synthetic oligonucleotide
ccgaaugcuucucauccac

SEQ ID NO: 2441064 - RNA, 19 nt, Artificial Sequence
  Description of Artificial Sequence: Synthetic oligonucleotide
cggggcaugacucugauaa

SEQ ID NO: 2441065 - RNA, 19 nt, Artificial Sequence
  Description of Artificial Sequence: Synthetic oligonucleotide
ggcaugacucugauaaaca

SEQ ID NO: 2441066 - RNA, 19 nt, Artificial Sequence
  Description of Artificial Sequence: Synthetic oligonucleotide
gcacacgacgaugagcaug

SEQ ID NO: 2441067 - RNA, 19 nt, Artificial Sequence
  Description of Artificial Sequence: Synthetic oligonucleotide
gacaccgaaugcuucucau

SEQ ID NO: 2441068 - RNA, 19 nt, Artificial Sequence
  Description of Artificial Sequence: Synthetic oligonucleotide
ggaggaggucaauuucuca

SEQ ID NO: 2441069 - RNA, 19 nt, Artificial Sequence
  Description of Artificial Sequence: Synthetic oligonucleotide
gguuugcucgcuuggaccu

SEQ ID NO: 2441070 - RNA, 19 nt, Artificial Sequence
  Description of Artificial Sequence: Synthetic oligonucleotide
ggucaauuucucagccugc

SEQ ID NO: 2441071 - RNA, 19 nt, Artificial Sequence
  Description of Artificial Sequence: Synthetic oligonucleotide
cuccgcaucucacuggugu

SEQ ID NO: 2441072 - RNA, 19 nt, Artificial Sequence
  Description of Artificial Sequence: Synthetic oligonucleotide
cacagacuuccgcgugugc

SEQ ID NO: 2441073 - RNA, 19 nt, Artificial Sequence
  Description of Artificial Sequence: Synthetic oligonucleotide
gugcccgggauugcaaaug

SEQ ID NO: 2441074 - RNA, 19 nt, Artificial Sequence
  Description of Artificial Sequence: Synthetic oligonucleotide
cugguguaacgugcccggg

SEQ ID NO: 2441075 - RNA, 19 nt, Artificial Sequence
  Description of Artificial Sequence: Synthetic oligonucleotide
gcgugugcugcuccagccg

SEQ ID NO: 2441076 - RNA, 19 nt, Artificial Sequence
  Description of Artificial Sequence: Synthetic oligonucleotide
ccuagcaucuccuccgcca

SEQ ID NO: 2441077 - RNA, 19 nt, Artificial Sequence
  Description of Artificial Sequence: Synthetic oligonucleotide
gguucaacuccagucgcga

SEQ ID NO: 2441078 - RNA, 19 nt, Artificial Sequence
  Description of Artificial Sequence: Synthetic oligonucleotide
ugcuccagccgcucagauu

SEQ ID NO: 2441079 - RNA, 19 nt, Artificial Sequence
  Description of Artificial Sequence: Synthetic oligonucleotide
acgaugagcauggcccaga

SEQ ID NO: 2441080 - RNA, 19 nt, Artificial Sequence
  Description of Artificial Sequence: Synthetic oligonucleotide
ccauuugcuaugcgcugcc

SEQ ID NO: 2441081 - RNA, 19 nt, Artificial Sequence
  Description of Artificial Sequence: Synthetic oligonucleotide
ccagucgcgacgucgccag

SEQ ID NO: 2441082 - RNA, 19 nt, Artificial Sequence
  Description of Artificial Sequence: Synthetic oligonucleotide
cagccaguccacagacuuc

SEQ ID NO: 2441083 - RNA, 19 nt, Artificial Sequence
  Description of Artificial Sequence: Synthetic oligonucleotide
ugccgccaucgauucgcag

SEQ ID NO: 2441084 - RNA, 19 nt, Artificial Sequence
  Description of Artificial Sequence: Synthetic oligonucleotide
guaacgugcccgggauugc

SEQ ID NO: 2441085 - RNA, 19 nt, Artificial Sequence
  Description of Artificial Sequence: Synthetic oligonucleotide
auggacggucuugguggcg

SEQ ID NO: 2441086 - RNA, 19 nt, Artificial Sequence
  Description of Artificial Sequence: Synthetic oligonucleotide
uugcucgcuuggaccuuca

SEQ ID NO: 2441087 - RNA, 19 nt, Artificial Sequence
  Description of Artificial Sequence: Synthetic oligonucleotide
cacgcgaccaggggccagg

SEQ ID NO: 2441088 - RNA, 19 nt, Artificial Sequence
  Description of Artificial Sequence: Synthetic oligonucleotide
cuucucagaggaggagguc

SEQ ID NO: 2441089 - RNA, 19 nt, Artificial Sequence
  Description of Artificial Sequence: Synthetic oligonucleotide
gaguacucgcugaugacuu

SEQ ID NO: 2441090 - RNA, 19 nt, Artificial Sequence
  Description of Artificial Sequence: Synthetic oligonucleotide
gccaucgauucgcagcgac

SEQ ID NO: 2441091 - RNA, 19 nt, Artificial Sequence
  Description of Artificial Sequence: Synthetic oligonucleotide
caccuuccgcgaguacucg

SEQ ID NO: 2441092 - RNA, 19 nt, Artificial Sequence
  Description of Artificial Sequence: Synthetic oligonucleotide
gcucccuagcugugguggg

SEQ ID NO: 2441093 - RNA, 19 nt, Artificial Sequence
  Description of Artificial Sequence: Synthetic oligonucleotide
augacuucggaggcagguu

SEQ ID NO: 2441094 - RNA, 19 nt, Artificial Sequence
  Description of Artificial Sequence: Synthetic oligonucleotide
cccauuugcuaugcgcugc

SEQ ID NO: 2441095 - RNA, 19 nt, Artificial Sequence
  Description of Artificial Sequence: Synthetic oligonucleotide
caucucacgcucuccagau

SEQ ID NO: 2441096 - RNA, 19 nt, Artificial Sequence
  Description of Artificial Sequence: Synthetic oligonucleotide
aacgugcccgggauugcaa

SEQ ID NO: 2441097 - RNA, 19 nt, Artificial Sequence
  Description of Artificial Sequence: Synthetic oligonucleotide
gcuucucauccacaggucu

SEQ ID NO: 2441098 - RNA, 19 nt, Artificial Sequence
  Description of Artificial Sequence: Synthetic oligonucleotide
uugcuaugcgcugccucau

SEQ ID NO: 2441099 - RNA, 19 nt, Artificial Sequence
  Description of Artificial Sequence: Synthetic oligonucleotide
ggauugcaaauggacgguc

SEQ ID NO: 2441100 - RNA, 19 nt, Artificial Sequence
  Description of Artificial Sequence: Synthetic oligonucleotide
agcuuuuccuggaggcccu

SEQ ID NO: 2441101 - RNA, 19 nt, Artificial Sequence
  Description of Artificial Sequence: Synthetic oligonucleotide
cgagcucggacaccgaaug

SEQ ID NO: 2441102 - RNA, 19 nt, Artificial Sequence
  Description of Artificial Sequence: Synthetic oligonucleotide
acacgacgaugagcauggc

SEQ ID NO: 2441103 - RNA, 19 nt, Artificial Sequence
  Description of Artificial Sequence: Synthetic oligonucleotide
cuccagucgcgacgucgcc

SEQ ID NO: 2441104 - RNA, 19 nt, Artificial Sequence
  Description of Artificial Sequence: Synthetic oligonucleotide
cuccagccgcucagauucc

SEQ ID NO: 2441105 - RNA, 19 nt, Artificial Sequence
  Description of Artificial Sequence: Synthetic oligonucleotide
ggugggcacgcgaccaggg

SEQ ID NO: 2441106 - RNA, 19 nt, Artificial Sequence
  Description of Artificial Sequence: Synthetic oligonucleotide
agcaugcccuucagaaagu

SEQ ID NO: 2441107 - RNA, 19 nt, Artificial Sequence
  Description of Artificial Sequence: Synthetic oligonucleotide
guguguuggucuugaggcu

SEQ ID NO: 2441108 - RNA, 19 nt, Artificial Sequence
  Description of Artificial Sequence: Synthetic oligonucleotide
augcgcugccucaugucca

SEQ ID NO: 2441109 - RNA, 19 nt, Artificial Sequence
  Description of Artificial Sequence: Synthetic oligonucleotide
gguggcgggcacccgcucc

SEQ ID NO: 2441110 - RNA, 19 nt, Artificial Sequence
  Description of Artificial Sequence: Synthetic oligonucleotide
ccaccuuccgcgaguacuc

SEQ ID NO: 2441111 - RNA, 19 nt, Artificial Sequence
  Description of Artificial Sequence: Synthetic oligonucleotide
ucccgcuuuucugccgcca

SEQ ID NO: 2441112 - RNA, 19 nt, Artificial Sequence
  Description of Artificial Sequence: Synthetic oligonucleotide
acccgcucccuagcugugg

SEQ ID NO: 2441113 - RNA, 19 nt, Artificial Sequence
  Description of Artificial Sequence: Synthetic oligonucleotide
gcggugaccggccccuucc

SEQ ID NO: 2441114 - RNA, 19 nt, Artificial Sequence
  Description of Artificial Sequence: Synthetic oligonucleotide
uccacaggucuggacccau

SEQ ID NO: 2441115 - RNA, 19 nt, Artificial Sequence
  Description of Artificial Sequence: Synthetic oligonucleotide
guguuggucuugaggcuuc

SEQ ID NO: 2441116 - RNA, 19 nt, Artificial Sequence
  Description of Artificial Sequence: Synthetic oligonucleotide
gcgaguacucgcugaugac

SEQ ID NO: 2441117 - RNA, 19 nt, Artificial Sequence
  Description of Artificial Sequence: Synthetic oligonucleotide
ggacaccgaaugcuucuca

SEQ ID NO: 2441118 - RNA, 19 nt, Artificial Sequence
  Description of Artificial Sequence: Synthetic oligonucleotide
agcacacgacgaugagcau

SEQ ID NO: 2441119 - RNA, 19 nt, Artificial Sequence
  Description of Artificial Sequence: Synthetic oligonucleotide
cacucguucgguucccgcu

SEQ ID NO: 2441120 - RNA, 19 nt, Artificial Sequence
  Description of Artificial Sequence: Synthetic oligonucleotide
ggugaccggccccuuccgc

SEQ ID NO: 2441121 - RNA, 19 nt, Artificial Sequence
  Description of Artificial Sequence: Synthetic oligonucleotide
gguguaacgugcccgggau

SEQ ID NO: 2441122 - RNA, 19 nt, Artificial Sequence
  Description of Artificial Sequence: Synthetic oligonucleotide
gcgacacaacaaccgcacc

SEQ ID NO: 2441123 - RNA, 19 nt, Artificial Sequence
  Description of Artificial Sequence: Synthetic oligonucleotide
cgcugaugacuucggaggc

SEQ ID NO: 2441124 - RNA, 19 nt, Artificial Sequence
  Description of Artificial Sequence: Synthetic oligonucleotide
cagcgggcggugaccggcc

SEQ ID NO: 2441125 - RNA, 19 nt, Artificial Sequence
  Description of Artificial Sequence: Synthetic oligonucleotide
agacgccacucguucgguu

SEQ ID NO: 2441126 - RNA, 19 nt, Artificial Sequence
  Description of Artificial Sequence: Synthetic oligonucleotide
cugggcggccaguguguug

SEQ ID NO: 2441127 - RNA, 19 nt, Artificial Sequence
  Description of Artificial Sequence: Synthetic oligonucleotide
ccuagcuguggugggcacg

SEQ ID NO: 2441128 - RNA, 19 nt, Artificial Sequence
  Description of Artificial Sequence: Synthetic oligonucleotide
gcgacgucgccagcgggcg

SEQ ID NO: 2441129 - RNA, 19 nt, Artificial Sequence
  Description of Artificial Sequence: Synthetic oligonucleotide
cuuggaccuucagggccug

SEQ ID NO: 2441130 - RNA, 19 nt, Artificial Sequence
  Description of Artificial Sequence: Synthetic oligonucleotide
ucguucgguucccgcuuuu

SEQ ID NO: 2441131 - RNA, 19 nt, Artificial Sequence
  Description of Artificial Sequence: Synthetic oligonucleotide
cacuccgcaucucacuggu

SEQ ID NO: 2441132 - RNA, 19 nt, Artificial Sequence
  Description of Artificial Sequence: Synthetic oligonucleotide
aguccaccuuccgcgagua

SEQ ID NO: 2441133 - RNA, 19 nt, Artificial Sequence
  Description of Artificial Sequence: Synthetic oligonucleotide
acaaccgcaccagguucaa

SEQ ID NO: 2441134 - RNA, 19 nt, Artificial Sequence
  Description of Artificial Sequence: Synthetic oligonucleotide
cgcucccuagcuguggugg

SEQ ID NO: 2441135 - RNA, 19 nt, Artificial Sequence
  Description of Artificial Sequence: Synthetic oligonucleotide
aucuuaggagagggcggaa

SEQ ID NO: 2441136 - RNA, 19 nt, Artificial Sequence
  Description of Artificial Sequence: Synthetic oligonucleotide
ccaucucacgcucuccaga

SEQ ID NO: 2441137 - RNA, 19 nt, Artificial Sequence
  Description of Artificial Sequence: Synthetic oligonucleotide
gcuaugcgcugccucaugu

SEQ ID NO: 2441138 - RNA, 19 nt, Artificial Sequence
  Description of Artificial Sequence: Synthetic oligonucleotide
gcgggcacccgcucccuag

SEQ ID NO: 2441139 - RNA, 19 nt, Artificial Sequence
  Description of Artificial Sequence: Synthetic oligonucleotide
ccacucguucgguucccgc

SEQ ID NO: 2441140 - RNA, 19 nt, Artificial Sequence
  Description of Artificial Sequence: Synthetic oligonucleotide
agcagccaguccacagacu

SEQ ID NO: 2441141 - RNA, 19 nt, Artificial Sequence
  Description of Artificial Sequence: Synthetic oligonucleotide
ccgcucagauuccaucuuc

SEQ ID NO: 2441142 - RNA, 19 nt, Artificial Sequence
  Description of Artificial Sequence: Synthetic oligonucleotide
ggucuugguggcgggcacc

SEQ ID NO: 2441143 - RNA, 19 nt, Artificial Sequence
  Description of Artificial Sequence: Synthetic oligonucleotide
ucugggcggccaguguguu

SEQ ID NO: 2441144 - RNA, 19 nt, Artificial Sequence
  Description of Artificial Sequence: Synthetic oligonucleotide
cacccgcucccuagcugug

SEQ ID NO: 2441145 - RNA, 19 nt, Artificial Sequence
  Description of Artificial Sequence: Synthetic oligonucleotide
gccaggaacugguuagcua

SEQ ID NO: 2441146 - RNA, 19 nt, Artificial Sequence
  Description of Artificial Sequence: Synthetic oligonucleotide
cgcgugugcugcuccagcc

SEQ ID NO: 2441147 - RNA, 19 nt, Artificial Sequence
  Description of Artificial Sequence: Synthetic oligonucleotide
ccaucgauucgcagcgaca

SEQ ID NO: 2441148 - RNA, 19 nt, Artificial Sequence
  Description of Artificial Sequence: Synthetic oligonucleotide
ugguggcgggcacccgcuc

SEQ ID NO: 2441149 - RNA, 19 nt, Artificial Sequence
  Description of Artificial Sequence: Synthetic oligonucleotide
cgaugagcauggcccagag

SEQ ID NO: 2441150 - RNA, 19 nt, Artificial Sequence
  Description of Artificial Sequence: Synthetic oligonucleotide
ggucagccaucuugagaga

SEQ ID NO: 2441151 - RNA, 19 nt, Artificial Sequence
  Description of Artificial Sequence: Synthetic oligonucleotide
ccgccucgcgccaucuuag

SEQ ID NO: 2441152 - RNA, 19 nt, Artificial Sequence
  Description of Artificial Sequence: Synthetic oligonucleotide
gcaugcccuucagaaaguc

SEQ ID NO: 2441153 - RNA, 19 nt, Artificial Sequence
  Description of Artificial Sequence: Synthetic oligonucleotide
gcagguuugcucgcuugga

SEQ ID NO: 2441154 - RNA, 19 nt, Artificial Sequence
  Description of Artificial Sequence: Synthetic oligonucleotide
ccagcgggcggugaccggc

SEQ ID NO: 2441155 - RNA, 19 nt, Artificial Sequence
  Description of Artificial Sequence: Synthetic oligonucleotide
cgcgacgucgccagcgggc

SEQ ID NO: 2441156 - RNA, 19 nt, Artificial Sequence
  Description of Artificial Sequence: Synthetic oligonucleotide
cucugggcggccagugugu

SEQ ID NO: 2441157 - RNA, 19 nt, Artificial Sequence
  Description of Artificial Sequence: Synthetic oligonucleotide
cacaggucuggacccauuu

SEQ ID NO: 2441158 - RNA, 19 nt, Artificial Sequence
  Description of Artificial Sequence: Synthetic oligonucleotide
acuccgcaucucacuggug

SEQ ID NO: 2441159 - RNA, 19 nt, Artificial Sequence
  Description of Artificial Sequence: Synthetic oligonucleotide
caaccgcaccagguucaac

SEQ ID NO: 2441160 - RNA, 19 nt, Artificial Sequence
  Description of Artificial Sequence: Synthetic oligonucleotide
uuccgccucgcgccaucuu

SEQ ID NO: 2441161 - RNA, 19 nt, Artificial Sequence
  Description of Artificial Sequence: Synthetic oligonucleotide
gcuuuucugccgccaucga

SEQ ID NO: 2441162 - RNA, 19 nt, Artificial Sequence
  Description of Artificial Sequence: Synthetic oligonucleotide
gcucacuccgcaucucacu

SEQ ID NO: 2441163 - RNA, 19 nt, Artificial Sequence
  Description of Artificial Sequence: Synthetic oligonucleotide
guccaccuuccgcgaguac

SEQ ID NO: 2441164 - RNA, 19 nt, Artificial Sequence
  Description of Artificial Sequence: Synthetic oligonucleotide
gccucgcgccaucuuagga

SEQ ID NO: 2441165 - RNA, 19 nt, Artificial Sequence
  Description of Artificial Sequence: Synthetic oligonucleotide
gacacucugggcggccagu

SEQ ID NO: 2441166 - RNA, 19 nt, Artificial Sequence
  Description of Artificial Sequence: Synthetic oligonucleotide
gcaaauggacggucuuggu

SEQ ID NO: 2441167 - RNA, 19 nt, Artificial Sequence
  Description of Artificial Sequence: Synthetic oligonucleotide
cgauucgcagcgacacaac

SEQ ID NO: 2441168 - RNA, 19 nt, Artificial Sequence
  Description of Artificial Sequence: Synthetic oligonucleotide
ccaggccuagcaucuccuc

SEQ ID NO: 2441169 - RNA, 19 nt, Artificial Sequence
  Description of Artificial Sequence: Synthetic oligonucleotide
cgcucagauuccaucuuca

SEQ ID NO: 2441170 - RNA, 19 nt, Artificial Sequence
  Description of Artificial Sequence: Synthetic oligonucleotide
agccggggcaugacucuga

SEQ ID NO: 2441171 - RNA, 19 nt, Artificial Sequence
  Description of Artificial Sequence: Synthetic oligonucleotide
ggggcaugacucugauaaa

SEQ ID NO: 2441172 - RNA, 19 nt, Artificial Sequence
  Description of Artificial Sequence: Synthetic oligonucleotide
gaccggccccuuccgccuc

SEQ ID NO: 2441173 - RNA, 19 nt, Artificial Sequence
  Description of Artificial Sequence: Synthetic oligonucleotide
cagucgcgacgucgccagc

SEQ ID NO: 2441174 - RNA, 19 nt, Artificial Sequence
  Description of Artificial Sequence: Synthetic oligonucleotide
cugccgccaucgauucgca

SEQ ID NO: 2441175 - RNA, 19 nt, Artificial Sequence
  Description of Artificial Sequence: Synthetic oligonucleotide
cuggugccucuggaggaca

SEQ ID NO: 2441176 - RNA, 19 nt, Artificial Sequence
  Description of Artificial Sequence: Synthetic oligonucleotide
ccgcgugugcugcuccagc

SEQ ID NO: 2441177 - RNA, 19 nt, Artificial Sequence
  Description of Artificial Sequence: Synthetic oligonucleotide
cgcgccaucuuaggagagg

SEQ ID NO: 2441178 - RNA, 19 nt, Artificial Sequence
  Description of Artificial Sequence: Synthetic oligonucleotide
gacuuccgcgugugcugcu

SEQ ID NO: 2441179 - RNA, 19 nt, Artificial Sequence
  Description of Artificial Sequence: Synthetic oligonucleotide
gcuuggaccuucagggccu

SEQ ID NO: 2441180 - RNA, 19 nt, Artificial Sequence
  Description of Artificial Sequence: Synthetic oligonucleotide
cgcaucucacugguguaac

SEQ ID NO: 2441181 - RNA, 19 nt, Artificial Sequence
  Description of Artificial Sequence: Synthetic oligonucleotide
ccuuccgcgaguacucgcu

SEQ ID NO: 2441182 - RNA, 19 nt, Artificial Sequence
  Description of Artificial Sequence: Synthetic oligonucleotide
uggcgggcacccgcucccu

SEQ ID NO: 2441183 - RNA, 19 nt, Artificial Sequence
  Description of Artificial Sequence: Synthetic oligonucleotide
cuucggaggcagguuugcu

SEQ ID NO: 2441184 - RNA, 19 nt, Artificial Sequence
  Description of Artificial Sequence: Synthetic oligonucleotide
cccuagcuguggugggcac

SEQ ID NO: 2441185 - RNA, 19 nt, Artificial Sequence
  Description of Artificial Sequence: Synthetic oligonucleotide
cgacgaugagcauggccca

SEQ ID NO: 2441186 - RNA, 19 nt, Artificial Sequence
  Description of Artificial Sequence: Synthetic oligonucleotide
ccgcuuuucugccgccauc

SEQ ID NO: 2441187 - RNA, 19 nt, Artificial Sequence
  Description of Artificial Sequence: Synthetic oligonucleotide
guguaacgugcccgggauu

SEQ ID NO: 2441188 - RNA, 19 nt, Artificial Sequence
  Description of Artificial Sequence: Synthetic oligonucleotide
acgcgaccaggggccagga

SEQ ID NO: 2441189 - RNA, 19 nt, Artificial Sequence
  Description of Artificial Sequence: Synthetic oligonucleotide
gcgggcggugaccggcccc

SEQ ID NO: 2441190 - RNA, 19 nt, Artificial Sequence
  Description of Artificial Sequence: Synthetic oligonucleotide
cgccucgcgccaucuuagg

SEQ ID NO: 2441191 - RNA, 19 nt, Artificial Sequence
  Description of Artificial Sequence: Synthetic oligonucleotide
cacucugggcggccagugu

SEQ ID NO: 2441192 - RNA, 19 nt, Artificial Sequence
  Description of Artificial Sequence: Synthetic oligonucleotide
cgcucuccagaugagucca

SEQ ID NO: 2441193 - RNA, 19 nt, Artificial Sequence
  Description of Artificial Sequence: Synthetic oligonucleotide
cggugaccggccccuuccg

SEQ ID NO: 2441194 - RNA, 19 nt, Artificial Sequence
  Description of Artificial Sequence: Synthetic oligonucleotide
ccgcucccuagcuguggug

SEQ ID NO: 2441195 - RNA, 19 nt, Artificial Sequence
  Description of Artificial Sequence: Synthetic oligonucleotide
cucguucgguucccgcuuu

SEQ ID NO: 2441196 - RNA, 19 nt, Artificial Sequence
  Description of Artificial Sequence: Synthetic oligonucleotide
gcccgggauugcaaaugga

SEQ ID NO: 2441197 - RNA, 19 nt, Artificial Sequence
  Description of Artificial Sequence: Synthetic oligonucleotide
ggacaaggucgagcucgga

SEQ ID NO: 2441198 - RNA, 19 nt, Artificial Sequence
  Description of Artificial Sequence: Synthetic oligonucleotide
ccuuccgccucgcgccauc

SEQ ID NO: 2441199 - RNA, 19 nt, Artificial Sequence
  Description of Artificial Sequence: Synthetic oligonucleotide
cguucgguucccgcuuuuc

SEQ ID NO: 2441200 - RNA, 19 nt, Artificial Sequence
  Description of Artificial Sequence: Synthetic oligonucleotide
ggcggccaguguguugguc

SEQ ID NO: 2441201 - RNA, 19 nt, Artificial Sequence
  Description of Artificial Sequence: Synthetic oligonucleotide
cgggcacccgcucccuagc

SEQ ID NO: 2441202 - RNA, 19 nt, Artificial Sequence
  Description of Artificial Sequence: Synthetic oligonucleotide
guuggucuugaggcuucuu

SEQ ID NO: 2441203 - RNA, 19 nt, Artificial Sequence
  Description of Artificial Sequence: Synthetic oligonucleotide
cggucuugguggcgggcac

SEQ ID NO: 2441204 - RNA, 19 nt, Artificial Sequence
  Description of Artificial Sequence: Synthetic oligonucleotide
ccgcgaguacucgcugaug

SEQ ID NO: 2441205 - RNA, 19 nt, Artificial Sequence
  Description of Artificial Sequence: Synthetic oligonucleotide
ccgcaucucacugguguaa

SEQ ID NO: 2441206 - RNA, 19 nt, Artificial Sequence
  Description of Artificial Sequence: Synthetic oligonucleotide
cagacgccacucguucggu

SEQ ID NO: 2441207 - RNA, 19 nt, Artificial Sequence
  Description of Artificial Sequence: Synthetic oligonucleotide
cggacaccgaaugcuucuc

SEQ ID NO: 2441208 - RNA, 19 nt, Artificial Sequence
  Description of Artificial Sequence: Synthetic oligonucleotide
gcacgcgaccaggggccag

SEQ ID NO: 2441209 - RNA, 19 nt, Artificial Sequence
  Description of Artificial Sequence: Synthetic oligonucleotide
cuuccgccucgcgccaucu

SEQ ID NO: 2441210 - RNA, 19 nt, Artificial Sequence
  Description of Artificial Sequence: Synthetic oligonucleotide
gccgcucagauuccaucuu

SEQ ID NO: 2441211 - RNA, 19 nt, Artificial Sequence
  Description of Artificial Sequence: Synthetic oligonucleotide
ggucgagcucggacaccga

SEQ ID NO: 2441212 - RNA, 19 nt, Artificial Sequence
  Description of Artificial Sequence: Synthetic oligonucleotide
ggcacgcgaccaggggcca

SEQ ID NO: 2441213 - RNA, 19 nt, Artificial Sequence
  Description of Artificial Sequence: Synthetic oligonucleotide
gggcacccgcucccuagcu

SEQ ID NO: 2441214 - RNA, 19 nt, Artificial Sequence
  Description of Artificial Sequence: Synthetic oligonucleotide
gcccagcagcucacuccgc

SEQ ID NO: 2441215 - RNA, 19 nt, Artificial Sequence
  Description of Artificial Sequence: Synthetic oligonucleotide
gccggggcaugacucugau

SEQ ID NO: 2441216 - RNA, 19 nt, Artificial Sequence
  Description of Artificial Sequence: Synthetic oligonucleotide
cccgcucccuagcuguggu

SEQ ID NO: 2441217 - RNA, 19 nt, Artificial Sequence
  Description of Artificial Sequence: Synthetic oligonucleotide
ccagccgcucagauuccau

SEQ ID NO: 2441218 - RNA, 19 nt, Artificial Sequence
  Description of Artificial Sequence: Synthetic oligonucleotide
ggcgggcacccgcucccua

SEQ ID NO: 2441219 - RNA, 19 nt, Artificial Sequence
  Description of Artificial Sequence: Synthetic oligonucleotide
cccgcuuuucugccgccau

SEQ ID NO: 2441220 - RNA, 19 nt, Artificial Sequence
  Description of Artificial Sequence: Synthetic oligonucleotide
ccggggcaugacucugaua

SEQ ID NO: 2441221 - RNA, 19 nt, Artificial Sequence
  Description of Artificial Sequence: Synthetic oligonucleotide
ccccuuccgccucgcgcca

SEQ ID NO: 2441222 - RNA, 19 nt, Artificial Sequence
  Description of Artificial Sequence: Synthetic oligonucleotide
cggccccuuccgccucgcg

SEQ ID NO: 2441223 - RNA, 19 nt, Artificial Sequence
  Description of Artificial Sequence: Synthetic oligonucleotide
ccggccccuuccgccucgc

SEQ ID NO: 2441224 - RNA, 19 nt, Artificial Sequence
  Description of Artificial Sequence: Synthetic oligonucleotide
gggcggccaguguguuggu

SEQ ID NO: 2441225 - RNA, 19 nt, Artificial Sequence
  Description of Artificial Sequence: Synthetic oligonucleotide
cgccaucgauucgcagcga

SEQ ID NO: 2441226 - RNA, 19 nt, Artificial Sequence
  Description of Artificial Sequence: Synthetic oligonucleotide
cgggcggugaccggccccu

SEQ ID NO: 2441227 - RNA, 19 nt, Artificial Sequence
  Description of Artificial Sequence: Synthetic oligonucleotide
cgucgccagcgggcgguga

SEQ ID NO: 2441228 - RNA, 19 nt, Artificial Sequence
  Description of Artificial Sequence: Synthetic oligonucleotide
cccuuccgccucgcgccau

SEQ ID NO: 2441229 - RNA, 19 nt, Artificial Sequence
  Description of Artificial Sequence: Synthetic oligonucleotide
gggcggugaccggccccuu

SEQ ID NO: 2441230 - RNA, 19 nt, Artificial Sequence
  Description of Artificial Sequence: Synthetic oligonucleotide
aauuauuagagcugaaggc

SEQ ID NO: 2441231 - RNA, 19 nt, Artificial Sequence
  Description of Artificial Sequence: Synthetic oligonucleotide
uuuaguuucaucuucagcu

SEQ ID NO: 2441232 - RNA, 19 nt, Artificial Sequence
  Description of Artificial Sequence: Synthetic oligonucleotide
uuaaucacaacauuuacug

SEQ ID NO: 2441233 - RNA, 19 nt, Artificial Sequence
  Description of Artificial Sequence: Synthetic oligonucleotide
gaauuauuagagcugaagg

SEQ ID NO: 2441234 - RNA, 19 nt, Artificial Sequence
  Description of Artificial Sequence: Synthetic oligonucleotide
  modified_base (6)..(6): a, c, u, g, unknown or other
aaaacngcugcucucuggc

SEQ ID NO: 2441235 - RNA, 19 nt, Artificial Sequence
  Description of Artificial Sequence: Synthetic oligonucleotide
uuugcuauggaauuauuag

SEQ ID NO: 2441236 - RNA, 19 nt, Artificial Sequence
  Description of Artificial Sequence: Synthetic oligonucleotide
auuuuggugacccugauga

SEQ ID NO: 2441237 - RNA, 19 nt, Artificial Sequence
  Description of Artificial Sequence: Synthetic oligonucleotide
ugcuauggaauuauuagag

SEQ ID NO: 2441238 - RNA, 19 nt, Artificial Sequence
  Description of Artificial Sequence: Synthetic oligonucleotide
aagucguucacguacuuag

SEQ ID NO: 2441239 - RNA, 19 nt, Artificial Sequence
  Description of Artificial Sequence: Synthetic oligonucleotide
uuucuuaucuauuuuggug

SEQ ID NO: 2441240 - RNA, 19 nt, Artificial Sequence
  Description of Artificial Sequence: Synthetic oligonucleotide
ucucacuuaagcgaaaggg

SEQ ID NO: 2441241 - RNA, 19 nt, Artificial Sequence
  Description of Artificial Sequence: Synthetic oligonucleotide
uucuuaucuauuuugguga

SEQ ID NO: 2441242 - RNA, 19 nt, Artificial Sequence
  Description of Artificial Sequence: Synthetic oligonucleotide
uuuacugccaugauacuca

SEQ ID NO: 2441243 - RNA, 19 nt, Artificial Sequence
  Description of Artificial Sequence: Synthetic oligonucleotide
uuuaaucacaacauuuacu

SEQ ID NO: 2441244 - RNA, 19 nt, Artificial Sequence
  Description of Artificial Sequence: Synthetic oligonucleotide
uuagcuguuuucuguaucg

SEQ ID NO: 2441245 - RNA, 19 nt, Artificial Sequence
  Description of Artificial Sequence: Synthetic oligonucleotide
ucacuuaagcgaaagggag

SEQ ID NO: 2441246 - RNA, 19 nt, Artificial Sequence
  Description of Artificial Sequence: Synthetic oligonucleotide
uuaucuauuuuggugaccc

SEQ ID NO: 2441247 - RNA, 19 nt, Artificial Sequence
  Description of Artificial Sequence: Synthetic oligonucleotide
uguaauggaguuuaaucac

SEQ ID NO: 2441248 - RNA, 19 nt, Artificial Sequence
  Description of Artificial Sequence: Synthetic oligonucleotide
auggaguuuaaucacaaca

SEQ ID NO: 2441249 - RNA, 19 nt, Artificial Sequence
  Description of Artificial Sequence: Synthetic oligonucleotide
ugccaugauacucaggcag

SEQ ID NO: 2441250 - RNA, 19 nt, Artificial Sequence
  Description of Artificial Sequence: Synthetic oligonucleotide
ugcuauuucuagcagcucc

SEQ ID NO: 2441251 - RNA, 19 nt, Artificial Sequence
  Description of Artificial Sequence: Synthetic oligonucleotide
aauggaguuuaaucacaac

SEQ ID NO: 2441252 - RNA, 19 nt, Artificial Sequence
  Description of Artificial Sequence: Synthetic oligonucleotide
agugcuccaucuuugcgcc

SEQ ID NO: 2441253 - RNA, 19 nt, Artificial Sequence
  Description of Artificial Sequence: Synthetic oligonucleotide
gaugaugucucuucagcag

SEQ ID NO: 2441254 - RNA, 19 nt, Artificial Sequence
  Description of Artificial Sequence: Synthetic oligonucleotide
auuauuagagcugaaggcu

SEQ ID NO: 2441255 - RNA, 19 nt, Artificial Sequence
  Description of Artificial Sequence: Synthetic oligonucleotide
aguuuuagggaaccccagc

SEQ ID NO: 2441256 - RNA, 19 nt, Artificial Sequence
  Description of Artificial Sequence: Synthetic oligonucleotide
uuuugcuauuucuagcagc

SEQ ID NO: 2441257 - RNA, 19 nt, Artificial Sequence
  Description of Artificial Sequence: Synthetic oligonucleotide
uuucuagcagcuccauucg

SEQ ID NO: 2441258 - RNA, 19 nt, Artificial Sequence
  Description of Artificial Sequence: Synthetic oligonucleotide
  modified_base (19)..(19): a, c, u, g, unknown or other
ugcgccacugcucaaaacn

SEQ ID NO: 2441259 - RNA, 19 nt, Artificial Sequence
  Description of Artificial Sequence: Synthetic oligonucleotide
aucuuucucacuuaagcga

SEQ ID NO: 2441260 - RNA, 19 nt, Artificial Sequence
  Description of Artificial Sequence: Synthetic oligonucleotide
ucuguaucggcuuugcuau

SEQ ID NO: 2441261 - RNA, 19 nt, Artificial Sequence
  Description of Artificial Sequence: Synthetic oligonucleotide
ucuauuuuggugacccuga

SEQ ID NO: 2441262 - RNA, 19 nt, Artificial Sequence
  Description of Artificial Sequence: Synthetic oligonucleotide
aacauuuacugccaugaua

SEQ ID NO: 2441263 - RNA, 19 nt, Artificial Sequence
  Description of Artificial Sequence: Synthetic oligonucleotide
ucguucacguacuuagacg

SEQ ID NO: 2441264 - RNA, 19 nt, Artificial Sequence
  Description of Artificial Sequence: Synthetic oligonucleotide
uguuccuagagcuuuugcu

SEQ ID NO: 2441265 - RNA, 19 nt, Artificial Sequence
  Description of Artificial Sequence: Synthetic oligonucleotide
uuuuagggaaccccagccc

SEQ ID NO: 2441266 - RNA, 19 nt, Artificial Sequence
  Description of Artificial Sequence: Synthetic oligonucleotide
uuuagggaaccccagcccu

SEQ ID NO: 2441267 - RNA, 19 nt, Artificial Sequence
  Description of Artificial Sequence: Synthetic oligonucleotide
auuuacugccaugauacuc

SEQ ID NO: 2441268 - RNA, 19 nt, Artificial Sequence
  Description of Artificial Sequence: Synthetic oligonucleotide
uuuucuuaucuauuuuggu

SEQ ID NO: 2441269 - RNA, 19 nt, Artificial Sequence
  Description of Artificial Sequence: Synthetic oligonucleotide
agcuugauuuucugagugc

SEQ ID NO: 2441270 - RNA, 19 nt, Artificial Sequence
  Description of Artificial Sequence: Synthetic oligonucleotide
uugcuauggaauuauuaga

SEQ ID NO: 2441271 - RNA, 19 nt, Artificial Sequence
  Description of Artificial Sequence: Synthetic oligonucleotide
aagcgaaagggaguucugc

SEQ ID NO: 2441272 - RNA, 19 nt, Artificial Sequence
  Description of Artificial Sequence: Synthetic oligonucleotide
  modified_base (14)..(14): a, c, u, g, unknown or other
cacugcucaaaacngcugc

SEQ ID NO: 2441273 - RNA, 19 nt, Artificial Sequence
  Description of Artificial Sequence: Synthetic oligonucleotide
ucuuucucacuuaagcgaa

SEQ ID NO: 2441274 - RNA, 19 nt, Artificial Sequence
  Description of Artificial Sequence: Synthetic oligonucleotide
guuuuagggaaccccagcc

SEQ ID NO: 2441275 - RNA, 19 nt, Artificial Sequence
  Description of Artificial Sequence: Synthetic oligonucleotide
uucacguacuuagacgugg

SEQ ID NO: 2441276 - RNA, 19 nt, Artificial Sequence
  Description of Artificial Sequence: Synthetic oligonucleotide
aaagugcaguuuuagggaa

SEQ ID NO: 2441277 - RNA, 19 nt, Artificial Sequence
  Description of Artificial Sequence: Synthetic oligonucleotide
ugaugaugucucuucagca

SEQ ID NO: 2441278 - RNA, 19 nt, Artificial Sequence
  Description of Artificial Sequence: Synthetic oligonucleotide
agugcaguuuuagggaacc

SEQ ID NO: 2441279 - RNA, 19 nt, Artificial Sequence
  Description of Artificial Sequence: Synthetic oligonucleotide
  modified_base (7)..(7): a, c, u, g, unknown or other
caaaacngcugcucucugg

SEQ ID NO: 2441280 - RNA, 19 nt, Artificial Sequence
  Description of Artificial Sequence: Synthetic oligonucleotide
uuguguggaagauuucuca

SEQ ID NO: 2441281 - RNA, 19 nt, Artificial Sequence
  Description of Artificial Sequence: Synthetic oligonucleotide
uuaagcgaaagggaguucu

SEQ ID NO: 2441282 - RNA, 19 nt, Artificial Sequence
  Description of Artificial Sequence: Synthetic oligonucleotide
ucugagugcuccaucuuug

SEQ ID NO: 2441283 - RNA, 19 nt, Artificial Sequence
  Description of Artificial Sequence: Synthetic oligonucleotide
uucuguaucggcuuugcua

SEQ ID NO: 2441284 - RNA, 19 nt, Artificial Sequence
  Description of Artificial Sequence: Synthetic oligonucleotide
ugagugcuccaucuuugcg

SEQ ID NO: 2441285 - RNA, 19 nt, Artificial Sequence
  Description of Artificial Sequence: Synthetic oligonucleotide
uaauggaguuuaaucacaa

SEQ ID NO: 2441286 - RNA, 19 nt, Artificial Sequence
  Description of Artificial Sequence: Synthetic oligonucleotide
agauuucucacugugauuu

SEQ ID NO: 2441287 - RNA, 19 nt, Artificial Sequence
  Description of Artificial Sequence: Synthetic oligonucleotide
uguacuugcgcugguggcg

SEQ ID NO: 2441288 - RNA, 19 nt, Artificial Sequence
  Description of Artificial Sequence: Synthetic oligonucleotide
uguaucggcuuugcuaugg

SEQ ID NO: 2441289 - RNA, 19 nt, Artificial Sequence
  Description of Artificial Sequence: Synthetic oligonucleotide
gauggcgagggcuuucucc

SEQ ID NO: 2441290 - RNA, 19 nt, Artificial Sequence
  Description of Artificial Sequence: Synthetic oligonucleotide
  modified_base (11)..(11): a, c, u, g, unknown or other
ugcucaaaacngcugcucu

SEQ ID NO: 2441291 - RNA, 19 nt, Artificial Sequence
  Description of Artificial Sequence: Synthetic oligonucleotide
uguguggaagauuucucac

SEQ ID NO: 2441292 - RNA, 19 nt, Artificial Sequence
  Description of Artificial Sequence: Synthetic oligonucleotide
uuuguguggaagauuucuc

SEQ ID NO: 2441293 - RNA, 19 nt, Artificial Sequence
  Description of Artificial Sequence: Synthetic oligonucleotide
uauuuuggugacccugaug

SEQ ID NO: 2441294 - RNA, 19 nt, Artificial Sequence
  Description of Artificial Sequence: Synthetic oligonucleotide
uuuggugacccugaugaug

SEQ ID NO: 2441295 - RNA, 19 nt, Artificial Sequence
  Description of Artificial Sequence: Synthetic oligonucleotide
  modified_base (14)..(14): a, c, u, g, unknown or other
ugcgggaccgggancgggg

SEQ ID NO: 2441296 - RNA, 19 nt, Artificial Sequence
  Description of Artificial Sequence: Synthetic oligonucleotide
agcagcuuuagcuguuuuc

SEQ ID NO: 2441297 - RNA, 19 nt, Artificial Sequence
  Description of Artificial Sequence: Synthetic oligonucleotide
ggaacucucaguaaagugc

SEQ ID NO: 2441298 - RNA, 19 nt, Artificial Sequence
  Description of Artificial Sequence: Synthetic oligonucleotide
agagcugaaggcuauguuu

SEQ ID NO: 2441299 - RNA, 19 nt, Artificial Sequence
  Description of Artificial Sequence: Synthetic oligonucleotide
aaaguuggcuguuccuaga

SEQ ID NO: 2441300 - RNA, 19 nt, Artificial Sequence
  Description of Artificial Sequence: Synthetic oligonucleotide
agagccgggccacaagucg

SEQ ID NO: 2441301 - RNA, 19 nt, Artificial Sequence
  Description of Artificial Sequence: Synthetic oligonucleotide
ucuuaucuauuuuggugac

SEQ ID NO: 2441302 - RNA, 19 nt, Artificial Sequence
  Description of Artificial Sequence: Synthetic oligonucleotide
aguacgaccgcgaguagcg

SEQ ID NO: 2441303 - RNA, 19 nt, Artificial Sequence
  Description of Artificial Sequence: Synthetic oligonucleotide
agagcuuuugcugcauugg

SEQ ID NO: 2441304 - RNA, 19 nt, Artificial Sequence
  Description of Artificial Sequence: Synthetic oligonucleotide
ugaaggcuauguuucuuug

SEQ ID NO: 2441305 - RNA, 19 nt, Artificial Sequence
  Description of Artificial Sequence: Synthetic oligonucleotide
acguacuuagacguggcgg

SEQ ID NO: 2441306 - RNA, 19 nt, Artificial Sequence
  Description of Artificial Sequence: Synthetic oligonucleotide
uauggcugcgcgacgacga

SEQ ID NO: 2441307 - RNA, 19 nt, Artificial Sequence
  Description of Artificial Sequence: Synthetic oligonucleotide
caaaguuggcuguuccuag

SEQ ID NO: 2441308 - RNA, 19 nt, Artificial Sequence
  Description of Artificial Sequence: Synthetic oligonucleotide
uagagcuuuugcugcauug

SEQ ID NO: 2441309 - RNA, 19 nt, Artificial Sequence
  Description of Artificial Sequence: Synthetic oligonucleotide
aguccggagacucgcuggc

SEQ ID NO: 2441310 - RNA, 19 nt, Artificial Sequence
  Description of Artificial Sequence: Synthetic oligonucleotide
ugaugucucuucagcagca

SEQ ID NO: 2441311 - RNA, 19 nt, Artificial Sequence
  Description of Artificial Sequence: Synthetic oligonucleotide
uucgaucuuucucacuuaa

SEQ ID NO: 2441312 - RNA, 19 nt, Artificial Sequence
  Description of Artificial Sequence: Synthetic oligonucleotide
agcugcgggacgaagagcg

SEQ ID NO: 2441313 - RNA, 19 nt, Artificial Sequence
  Description of Artificial Sequence: Synthetic oligonucleotide
  modified_base (4)..(4): a, c, u, g, unknown or other
aacngcugcucucuggcuu

SEQ ID NO: 2441314 - RNA, 19 nt, Artificial Sequence
  Description of Artificial Sequence: Synthetic oligonucleotide
cucacuuaagcgaaaggga

SEQ ID NO: 2441315 - RNA, 19 nt, Artificial Sequence
  Description of Artificial Sequence: Synthetic oligonucleotide
cuuucuccugcggagagcc

SEQ ID NO: 2441316 - RNA, 19 nt, Artificial Sequence
  Description of Artificial Sequence: Synthetic oligonucleotide
uagacguggcggccgaggg

SEQ ID NO: 2441317 - RNA, 19 nt, Artificial Sequence
  Description of Artificial Sequence: Synthetic oligonucleotide
ggcaagucaaaguuggcug

SEQ ID NO: 2441318 - RNA, 19 nt, Artificial Sequence
  Description of Artificial Sequence: Synthetic oligonucleotide
aagucaaaguuggcuguuc

SEQ ID NO: 2441319 - RNA, 19 nt, Artificial Sequence
  Description of Artificial Sequence: Synthetic oligonucleotide
uggaccuuucccuccgcgg

SEQ ID NO: 2441320 - RNA, 19 nt, Artificial Sequence
  Description of Artificial Sequence: Synthetic oligonucleotide
gagcuuuugcugcauuggc

SEQ ID NO: 2441321 - RNA, 19 nt, Artificial Sequence
  Description of Artificial Sequence: Synthetic oligonucleotide
  modified_base (8)..(8): a, c, u, g, unknown or other
ucaaaacngcugcucucug

SEQ ID NO: 2441322 - RNA, 19 nt, Artificial Sequence
  Description of Artificial Sequence: Synthetic oligonucleotide
gaacucucaguaaagugca

SEQ ID NO: 2441323 - RNA, 19 nt, Artificial Sequence
  Description of Artificial Sequence: Synthetic oligonucleotide
gauacucaggcagguaggc

SEQ ID NO: 2441324 - RNA, 19 nt, Artificial Sequence
  Description of Artificial Sequence: Synthetic oligonucleotide
uucuccugcggagagccgg

SEQ ID NO: 2441325 - RNA, 19 nt, Artificial Sequence
  Description of Artificial Sequence: Synthetic oligonucleotide
cagcuugauuuucugagug

SEQ ID NO: 2441326 - RNA, 19 nt, Artificial Sequence
  Description of Artificial Sequence: Synthetic oligonucleotide
uaagcgaaagggaguucug

SEQ ID NO: 2441327 - RNA, 19 nt, Artificial Sequence
  Description of Artificial Sequence: Synthetic oligonucleotide
ucaaaguuggcuguuccua

SEQ ID NO: 2441328 - RNA, 19 nt, Artificial Sequence
  Description of Artificial Sequence: Synthetic oligonucleotide
aagugcaguuuuagggaac

SEQ ID NO: 2441329 - RNA, 19 nt, Artificial Sequence
  Description of Artificial Sequence: Synthetic oligonucleotide
  modified_base (2)..(2): a, c, u, g, unknown or other
ancggggagcggcggcucc

SEQ ID NO: 2441330 - RNA, 19 nt, Artificial Sequence
  Description of Artificial Sequence: Synthetic oligonucleotide
ggcuauguuucuuugugug

SEQ ID NO: 2441331 - RNA, 19 nt, Artificial Sequence
  Description of Artificial Sequence: Synthetic oligonucleotide
acacagguauccacagucc

SEQ ID NO: 2441332 - RNA, 19 nt, Artificial Sequence
  Description of Artificial Sequence: Synthetic oligonucleotide
ucacguacuuagacguggc

SEQ ID NO: 2441333 - RNA, 19 nt, Artificial Sequence
  Description of Artificial Sequence: Synthetic oligonucleotide
gcuauguuucuuugugugg

SEQ ID NO: 2441334 - RNA, 19 nt, Artificial Sequence
  Description of Artificial Sequence: Synthetic oligonucleotide
agcgaaagggaguucugcu

SEQ ID NO: 2441335 - RNA, 19 nt, Artificial Sequence
  Description of Artificial Sequence: Synthetic oligonucleotide
agggcuuucuccugcggag

SEQ ID NO: 2441336 - RNA, 19 nt, Artificial Sequence
  Description of Artificial Sequence: Synthetic oligonucleotide
gcuggcaagucaaaguugg

SEQ ID NO: 2441337 - RNA, 19 nt, Artificial Sequence
  Description of Artificial Sequence: Synthetic oligonucleotide
ucgcuggcaagucaaaguu

SEQ ID NO: 2441338 - RNA, 19 nt, Artificial Sequence
  Description of Artificial Sequence: Synthetic oligonucleotide
uggcaagucaaaguuggcu

SEQ ID NO: 2441339 - RNA, 19 nt, Artificial Sequence
  Description of Artificial Sequence: Synthetic oligonucleotide
ugauuuucugagugcucca

SEQ ID NO: 2441340 - RNA, 19 nt, Artificial Sequence
  Description of Artificial Sequence: Synthetic oligonucleotide
  modified_base (5)..(5): a, c, u, g, unknown or other
aaacngcugcucucuggcu

SEQ ID NO: 2441341 - RNA, 19 nt, Artificial Sequence
  Description of Artificial Sequence: Synthetic oligonucleotide
uuagacguggcggccgagg

SEQ ID NO: 2441342 - RNA, 19 nt, Artificial Sequence
  Description of Artificial Sequence: Synthetic oligonucleotide
uacuuagacguggcggccg

SEQ ID NO: 2441343 - RNA, 19 nt, Artificial Sequence
  Description of Artificial Sequence: Synthetic oligonucleotide
uucugagugcuccaucuuu

SEQ ID NO: 2441344 - RNA, 19 nt, Artificial Sequence
  Description of Artificial Sequence: Synthetic oligonucleotide
gcuauggaauuauuagagc

SEQ ID NO: 2441345 - RNA, 19 nt, Artificial Sequence
  Description of Artificial Sequence: Synthetic oligonucleotide
gagcugaaggcuauguuuc

SEQ ID NO: 2441346 - RNA, 19 nt, Artificial Sequence
  Description of Artificial Sequence: Synthetic oligonucleotide
cuuugcuauggaauuauua

SEQ ID NO: 2441347 - RNA, 19 nt, Artificial Sequence
  Description of Artificial Sequence: Synthetic oligonucleotide
  modified_base (8)..(8): a, c, u, g, unknown or other
accgggancggggagcggc

SEQ ID NO: 2441348 - RNA, 19 nt, Artificial Sequence
  Description of Artificial Sequence: Synthetic oligonucleotide
ucggcuuugcuauggaauu

SEQ ID NO: 2441349 - RNA, 19 nt, Artificial Sequence
  Description of Artificial Sequence: Synthetic oligonucleotide
caguaaagugcaguuuuag

SEQ ID NO: 2441350 - RNA, 19 nt, Artificial Sequence
  Description of Artificial Sequence: Synthetic oligonucleotide
uucuuuacacagguaucca

SEQ ID NO: 2441351 - RNA, 19 nt, Artificial Sequence
  Description of Artificial Sequence: Synthetic oligonucleotide
cuauguuucuuugugugga

SEQ ID NO: 2441352 - RNA, 19 nt, Artificial Sequence
  Description of Artificial Sequence: Synthetic oligonucleotide
uuacacagguauccacagu

SEQ ID NO: 2441353 - RNA, 19 nt, Artificial Sequence
  Description of Artificial Sequence: Synthetic oligonucleotide
gacgacaggcggcuggagc

SEQ ID NO: 2441354 - RNA, 19 nt, Artificial Sequence
  Description of Artificial Sequence: Synthetic oligonucleotide
cuagcagcuccauucgauc

SEQ ID NO: 2441355 - RNA, 19 nt, Artificial Sequence
  Description of Artificial Sequence: Synthetic oligonucleotide
uccauucgaucuuucucac

SEQ ID NO: 2441356 - RNA, 19 nt, Artificial Sequence
  Description of Artificial Sequence: Synthetic oligonucleotide
guaauggaguuuaaucaca

SEQ ID NO: 2441357 - RNA, 19 nt, Artificial Sequence
  Description of Artificial Sequence: Synthetic oligonucleotide
cuuaucuauuuuggugacc

SEQ ID NO: 2441358 - RNA, 19 nt, Artificial Sequence
  Description of Artificial Sequence: Synthetic oligonucleotide
uacgaccgcgaguagcgcc

SEQ ID NO: 2441359 - RNA, 19 nt, Artificial Sequence
  Description of Artificial Sequence: Synthetic oligonucleotide
acuuaagcgaaagggaguu

SEQ ID NO: 2441360 - RNA, 19 nt, Artificial Sequence
  Description of Artificial Sequence: Synthetic oligonucleotide
caguuuuagggaaccccag

SEQ ID NO: 2441361 - RNA, 19 nt, Artificial Sequence
  Description of Artificial Sequence: Synthetic oligonucleotide
gguaggcgaaugcuggagg

SEQ ID NO: 2441362 - RNA, 19 nt, Artificial Sequence
  Description of Artificial Sequence: Synthetic oligonucleotide
uguuuucuguaucggcuuu

SEQ ID NO: 2441363 - RNA, 19 nt, Artificial Sequence
  Description of Artificial Sequence: Synthetic oligonucleotide
ugcugcgcgaccugguucu

SEQ ID NO: 2441364 - RNA, 19 nt, Artificial Sequence
  Description of Artificial Sequence: Synthetic oligonucleotide
uucuagcagcuccauucga

SEQ ID NO: 2441365 - RNA, 19 nt, Artificial Sequence
  Description of Artificial Sequence: Synthetic oligonucleotide
caguccggagacucgcugg

SEQ ID NO: 2441366 - RNA, 19 nt, Artificial Sequence
  Description of Artificial Sequence: Synthetic oligonucleotide
uuugcgccacugcucaaaa

SEQ ID NO: 2441367 - RNA, 19 nt, Artificial Sequence
  Description of Artificial Sequence: Synthetic oligonucleotide
ggaccuuucccuccgcggg

SEQ ID NO: 2441368 - RNA, 19 nt, Artificial Sequence
  Description of Artificial Sequence: Synthetic oligonucleotide
uccggaccggagcugcggg

SEQ ID NO: 2441369 - RNA, 19 nt, Artificial Sequence
  Description of Artificial Sequence: Synthetic oligonucleotide
gaguacgaccgcgaguagc

SEQ ID NO: 2441370 - RNA, 19 nt, Artificial Sequence
  Description of Artificial Sequence: Synthetic oligonucleotide
uccuagagcuuuugcugca

SEQ ID NO: 2441371 - RNA, 19 nt, Artificial Sequence
  Description of Artificial Sequence: Synthetic oligonucleotide
cacguacuuagacguggcg

SEQ ID NO: 2441372 - RNA, 19 nt, Artificial Sequence
  Description of Artificial Sequence: Synthetic oligonucleotide
auacucaggcagguaggcg

SEQ ID NO: 2441373 - RNA, 19 nt, Artificial Sequence
  Description of Artificial Sequence: Synthetic oligonucleotide
uaucuauuuuggugacccu

SEQ ID NO: 2441374 - RNA, 19 nt, Artificial Sequence
  Description of Artificial Sequence: Synthetic oligonucleotide
ccacaagucguucacguac

SEQ ID NO: 2441375 - RNA, 19 nt, Artificial Sequence
  Description of Artificial Sequence: Synthetic oligonucleotide
guucuggaccuuucccucc

SEQ ID NO: 2441376 - RNA, 19 nt, Artificial Sequence
  Description of Artificial Sequence: Synthetic oligonucleotide
ugcgcgacgacgagcggcu

SEQ ID NO: 2441377 - RNA, 19 nt, Artificial Sequence
  Description of Artificial Sequence: Synthetic oligonucleotide
gacgacgagcggcuggcgc

SEQ ID NO: 2441378 - RNA, 19 nt, Artificial Sequence
  Description of Artificial Sequence: Synthetic oligonucleotide
gaugucucuucagcagcag

SEQ ID NO: 2441379 - RNA, 19 nt, Artificial Sequence
  Description of Artificial Sequence: Synthetic oligonucleotide
cuguuccuagagcuuuugc

SEQ ID NO: 2441380 - RNA, 19 nt, Artificial Sequence
  Description of Artificial Sequence: Synthetic oligonucleotide
guaggcgaaugcuggagga

SEQ ID NO: 2441381 - RNA, 19 nt, Artificial Sequence
  Description of Artificial Sequence: Synthetic oligonucleotide
aguagcgccuguacuugcg

SEQ ID NO: 2441382 - RNA, 19 nt, Artificial Sequence
  Description of Artificial Sequence: Synthetic oligonucleotide
uuucuccugcggagagccg

SEQ ID NO: 2441383 - RNA, 19 nt, Artificial Sequence
  Description of Artificial Sequence: Synthetic oligonucleotide
gacguggcggccgagggac

SEQ ID NO: 2441384 - RNA, 19 nt, Artificial Sequence
  Description of Artificial Sequence: Synthetic oligonucleotide
agcgccuguacuugcgcug

SEQ ID NO: 2441385 - RNA, 19 nt, Artificial Sequence
  Description of Artificial Sequence: Synthetic oligonucleotide
cguacuuagacguggcggc

SEQ ID NO: 2441386 - RNA, 19 nt, Artificial Sequence
  Description of Artificial Sequence: Synthetic oligonucleotide
aucggcuuugcuauggaau

SEQ ID NO: 2441387 - RNA, 19 nt, Artificial Sequence
  Description of Artificial Sequence: Synthetic oligonucleotide
ggagcugcgggacgaagag

SEQ ID NO: 2441388 - RNA, 19 nt, Artificial Sequence
  Description of Artificial Sequence: Synthetic oligonucleotide
gaguagcgccuguacuugc

SEQ ID NO: 2441389 - RNA, 19 nt, Artificial Sequence
  Description of Artificial Sequence: Synthetic oligonucleotide
caggcagguaggcgaaugc

SEQ ID NO: 2441390 - RNA, 19 nt, Artificial Sequence
  Description of Artificial Sequence: Synthetic oligonucleotide
cuggcaagucaaaguuggc

SEQ ID NO: 2441391 - RNA, 19 nt, Artificial Sequence
  Description of Artificial Sequence: Synthetic oligonucleotide
cagcuuuagcuguuuucug

SEQ ID NO: 2441392 - RNA, 19 nt, Artificial Sequence
  Description of Artificial Sequence: Synthetic oligonucleotide
ugcgggaguacgaccgcga

SEQ ID NO: 2441393 - RNA, 19 nt, Artificial Sequence
  Description of Artificial Sequence: Synthetic oligonucleotide
guuuucuguaucggcuuug

SEQ ID NO: 2441394 - RNA, 19 nt, Artificial Sequence
  Description of Artificial Sequence: Synthetic oligonucleotide
uuuuggugacccugaugau

SEQ ID NO: 2441395 - RNA, 19 nt, Artificial Sequence
  Description of Artificial Sequence: Synthetic oligonucleotide
agguaggcgaaugcuggag

SEQ ID NO: 2441396 - RNA, 19 nt, Artificial Sequence
  Description of Artificial Sequence: Synthetic oligonucleotide
gaaggcuauguuucuuugu

SEQ ID NO: 2441397 - RNA, 19 nt, Artificial Sequence
  Description of Artificial Sequence: Synthetic oligonucleotide
cuauggcugcgcgacgacg

SEQ ID NO: 2441398 - RNA, 19 nt, Artificial Sequence
  Description of Artificial Sequence: Synthetic oligonucleotide
ugcuccaucuuugcgccac

SEQ ID NO: 2441399 - RNA, 19 nt, Artificial Sequence
  Description of Artificial Sequence: Synthetic oligonucleotide
cuggaccuuucccuccgcg

SEQ ID NO: 2441400 - RNA, 19 nt, Artificial Sequence
  Description of Artificial Sequence: Synthetic oligonucleotide
gagacucgcuggcaaguca

SEQ ID NO: 2441401 - RNA, 19 nt, Artificial Sequence
  Description of Artificial Sequence: Synthetic oligonucleotide
acucgcuggcaagucaaag

SEQ ID NO: 2441402 - RNA, 19 nt, Artificial Sequence
  Description of Artificial Sequence: Synthetic oligonucleotide
cgaaagggaguucugcucc

SEQ ID NO: 2441403 - RNA, 19 nt, Artificial Sequence
  Description of Artificial Sequence: Synthetic oligonucleotide
gagcccgacgcggauggcg

SEQ ID NO: 2441404 - RNA, 19 nt, Artificial Sequence
  Description of Artificial Sequence: Synthetic oligonucleotide
cuuuguguggaagauuucu

SEQ ID NO: 2441405 - RNA, 19 nt, Artificial Sequence
  Description of Artificial Sequence: Synthetic oligonucleotide
cacagguauccacagucca

SEQ ID NO: 2441406 - RNA, 19 nt, Artificial Sequence
  Description of Artificial Sequence: Synthetic oligonucleotide
acuuagacguggcggccga

SEQ ID NO: 2441407 - RNA, 19 nt, Artificial Sequence
  Description of Artificial Sequence: Synthetic oligonucleotide
uggcggccgagggacaugg

SEQ ID NO: 2441408 - RNA, 19 nt, Artificial Sequence
  Description of Artificial Sequence: Synthetic oligonucleotide
uuucccuccgcgggagcgg

SEQ ID NO: 2441409 - RNA, 19 nt, Artificial Sequence
  Description of Artificial Sequence: Synthetic oligonucleotide
uuggcuguuccuagagcuu

SEQ ID NO: 2441410 - RNA, 19 nt, Artificial Sequence
  Description of Artificial Sequence: Synthetic oligonucleotide
ugcuggaggacaggaacuc

SEQ ID NO: 2441411 - RNA, 19 nt, Artificial Sequence
  Description of Artificial Sequence: Synthetic oligonucleotide
  modified_base (10)..(10): a, c, u, g, unknown or other
gcucaaaacngcugcucuc

SEQ ID NO: 2441412 - RNA, 19 nt, Artificial Sequence
  Description of Artificial Sequence: Synthetic oligonucleotide
ggcugcgggaguacgaccg

SEQ ID NO: 2441413 - RNA, 19 nt, Artificial Sequence
  Description of Artificial Sequence: Synthetic oligonucleotide
aggcgaaugcuggaggaca

SEQ ID NO: 2441414 - RNA, 19 nt, Artificial Sequence
  Description of Artificial Sequence: Synthetic oligonucleotide
uccugcggagagccgggcc

SEQ ID NO: 2441415 - RNA, 19 nt, Artificial Sequence
  Description of Artificial Sequence: Synthetic oligonucleotide
ccugaugaugucucuucag

SEQ ID NO: 2441416 - RNA, 19 nt, Artificial Sequence
  Description of Artificial Sequence: Synthetic oligonucleotide
uagcgccuguacuugcgcu

SEQ ID NO: 2441417 - RNA, 19 nt, Artificial Sequence
  Description of Artificial Sequence: Synthetic oligonucleotide
uccgcgggagcggggagcg

SEQ ID NO: 2441418 - RNA, 19 nt, Artificial Sequence
  Description of Artificial Sequence: Synthetic oligonucleotide
  modified_base (3)..(3): a, c, u, g, unknown or other
acngcugcucucuggcuuu

SEQ ID NO: 2441419 - RNA, 19 nt, Artificial Sequence
  Description of Artificial Sequence: Synthetic oligonucleotide
guacuugcgcugguggcgc

SEQ ID NO: 2441420 - RNA, 19 nt, Artificial Sequence
  Description of Artificial Sequence: Synthetic oligonucleotide
agguauccacaguccauaa

SEQ ID NO: 2441421 - RNA, 19 nt, Artificial Sequence
  Description of Artificial Sequence: Synthetic oligonucleotide
ugcauuggcuuuugcuauu

SEQ ID NO: 2441422 - RNA, 19 nt, Artificial Sequence
  Description of Artificial Sequence: Synthetic oligonucleotide
guguggaagauuucucacu

SEQ ID NO: 2441423 - RNA, 19 nt, Artificial Sequence
  Description of Artificial Sequence: Synthetic oligonucleotide
uaggcgaaugcuggaggac

SEQ ID NO: 2441424 - RNA, 19 nt, Artificial Sequence
  Description of Artificial Sequence: Synthetic oligonucleotide
guacuuagacguggcggcc

SEQ ID NO: 2441425 - RNA, 19 nt, Artificial Sequence
  Description of Artificial Sequence: Synthetic oligonucleotide
gcaguuuuagggaacccca

SEQ ID NO: 2441426 - RNA, 19 nt, Artificial Sequence
  Description of Artificial Sequence: Synthetic oligonucleotide
cugcgggacgaagagcggc

SEQ ID NO: 2441427 - RNA, 19 nt, Artificial Sequence
  Description of Artificial Sequence: Synthetic oligonucleotide
uggcuguuccuagagcuuu

SEQ ID NO: 2441428 - RNA, 19 nt, Artificial Sequence
  Description of Artificial Sequence: Synthetic oligonucleotide
ggagcgcgacgacaggcgg

SEQ ID NO: 2441429 - RNA, 19 nt, Artificial Sequence
  Description of Artificial Sequence: Synthetic oligonucleotide
gggaguacgaccgcgagua

SEQ ID NO: 2441430 - RNA, 19 nt, Artificial Sequence
  Description of Artificial Sequence: Synthetic oligonucleotide
aggcagguaggcgaaugcu

SEQ ID NO: 2441431 - RNA, 19 nt, Artificial Sequence
  Description of Artificial Sequence: Synthetic oligonucleotide
acagguauccacaguccau

SEQ ID NO: 2441432 - RNA, 19 nt, Artificial Sequence
  Description of Artificial Sequence: Synthetic oligonucleotide
  modified_base (9)..(9): a, c, u, g, unknown or other
cucaaaacngcugcucucu

SEQ ID NO: 2441433 - RNA, 19 nt, Artificial Sequence
  Description of Artificial Sequence: Synthetic oligonucleotide
uucccuccgcgggagcggg

SEQ ID NO: 2441434 - RNA, 19 nt, Artificial Sequence
  Description of Artificial Sequence: Synthetic oligonucleotide
cuuaagcgaaagggaguuc

SEQ ID NO: 2441435 - RNA, 19 nt, Artificial Sequence
  Description of Artificial Sequence: Synthetic oligonucleotide
gaaagggaguucugcuccu

SEQ ID NO: 2441436 - RNA, 19 nt, Artificial Sequence
  Description of Artificial Sequence: Synthetic oligonucleotide
gaagagcggcugcgggagc

SEQ ID NO: 2441437 - RNA, 19 nt, Artificial Sequence
  Description of Artificial Sequence: Synthetic oligonucleotide
guaucggcuuugcuaugga

SEQ ID NO: 2441438 - RNA, 19 nt, Artificial Sequence
  Description of Artificial Sequence: Synthetic oligonucleotide
cuggcgcugcgcgaguccg

SEQ ID NO: 2441439 - RNA, 19 nt, Artificial Sequence
  Description of Artificial Sequence: Synthetic oligonucleotide
gcugcgcgaguccggaccg

SEQ ID NO: 2441440 - RNA, 19 nt, Artificial Sequence
  Description of Artificial Sequence: Synthetic oligonucleotide
gcgaaagggaguucugcuc

SEQ ID NO: 2441441 - RNA, 19 nt, Artificial Sequence
  Description of Artificial Sequence: Synthetic oligonucleotide
guuucuuuguguggaagau

SEQ ID NO: 2441442 - RNA, 19 nt, Artificial Sequence
  Description of Artificial Sequence: Synthetic oligonucleotide
agacucgcuggcaagucaa

SEQ ID NO: 2441443 - RNA, 19 nt, Artificial Sequence
  Description of Artificial Sequence: Synthetic oligonucleotide
acaagucguucacguacuu

SEQ ID NO: 2441444 - RNA, 19 nt, Artificial Sequence
  Description of Artificial Sequence: Synthetic oligonucleotide
agacguggcggccgaggga

SEQ ID NO: 2441445 - RNA, 19 nt, Artificial Sequence
  Description of Artificial Sequence: Synthetic oligonucleotide
cuguaucggcuuugcuaug

SEQ ID NO: 2441446 - RNA, 19 nt, Artificial Sequence
  Description of Artificial Sequence: Synthetic oligonucleotide
agcgcgacgacaggcggcu

SEQ ID NO: 2441447 - RNA, 19 nt, Artificial Sequence
  Description of Artificial Sequence: Synthetic oligonucleotide
uggcgcugcgcgaguccgg

SEQ ID NO: 2441448 - RNA, 19 nt, Artificial Sequence
  Description of Artificial Sequence: Synthetic oligonucleotide
cuuucucacuuaagcgaaa

SEQ ID NO: 2441449 - RNA, 19 nt, Artificial Sequence
  Description of Artificial Sequence: Synthetic oligonucleotide
ggcgagggcuuucuccugc

SEQ ID NO: 2441450 - RNA, 19 nt, Artificial Sequence
  Description of Artificial Sequence: Synthetic oligonucleotide
accuuucccuccgcgggag

SEQ ID NO: 2441451 - RNA, 19 nt, Artificial Sequence
  Description of Artificial Sequence: Synthetic oligonucleotide
cugcgggaguacgaccgcg

SEQ ID NO: 2441452 - RNA, 19 nt, Artificial Sequence
  Description of Artificial Sequence: Synthetic oligonucleotide
  modified_base (17)..(17): a, c, u, g, unknown or other
gccugcgggaccgggancg

SEQ ID NO: 2441453 - RNA, 19 nt, Artificial Sequence
  Description of Artificial Sequence: Synthetic oligonucleotide
cacaagucguucacguacu

SEQ ID NO: 2441454 - RNA, 19 nt, Artificial Sequence
  Description of Artificial Sequence: Synthetic oligonucleotide
ggcgaaugcuggaggacag

SEQ ID NO: 2441455 - RNA, 19 nt, Artificial Sequence
  Description of Artificial Sequence: Synthetic oligonucleotide
cuggagcggcccgagcccg

SEQ ID NO: 2441456 - RNA, 19 nt, Artificial Sequence
  Description of Artificial Sequence: Synthetic oligonucleotide
cugcugcgcgaccugguuc

SEQ ID NO: 2441457 - RNA, 19 nt, Artificial Sequence
  Description of Artificial Sequence: Synthetic oligonucleotide
uggcgagggcuuucuccug

SEQ ID NO: 2441458 - RNA, 19 nt, Artificial Sequence
  Description of Artificial Sequence: Synthetic oligonucleotide
gagcggcugcgggaguacg

SEQ ID NO: 2441459 - RNA, 19 nt, Artificial Sequence
  Description of Artificial Sequence: Synthetic oligonucleotide
gguggcgccugcgggaccg

SEQ ID NO: 2441460 - RNA, 19 nt, Artificial Sequence
  Description of Artificial Sequence: Synthetic oligonucleotide
gggagcgcgacgacaggcg

SEQ ID NO: 2441461 - RNA, 19 nt, Artificial Sequence
  Description of Artificial Sequence: Synthetic oligonucleotide
gagcugcgggacgaagagc

SEQ ID NO: 2441462 - RNA, 19 nt, Artificial Sequence
  Description of Artificial Sequence: Synthetic oligonucleotide
gugcaguuuuagggaaccc

SEQ ID NO: 2441463 - RNA, 19 nt, Artificial Sequence
  Description of Artificial Sequence: Synthetic oligonucleotide
cagguauccacaguccaua

SEQ ID NO: 2441464 - RNA, 19 nt, Artificial Sequence
  Description of Artificial Sequence: Synthetic oligonucleotide
gcaagucaaaguuggcugu

SEQ ID NO: 2441465 - RNA, 19 nt, Artificial Sequence
  Description of Artificial Sequence: Synthetic oligonucleotide
acaguccauaaggacuuuu

SEQ ID NO: 2441466 - RNA, 19 nt, Artificial Sequence
  Description of Artificial Sequence: Synthetic oligonucleotide
gagagccgggccacaaguc

SEQ ID NO: 2441467 - RNA, 19 nt, Artificial Sequence
  Description of Artificial Sequence: Synthetic oligonucleotide
gagcgcgacgacaggcggc

SEQ ID NO: 2441468 - RNA, 19 nt, Artificial Sequence
  Description of Artificial Sequence: Synthetic oligonucleotide
  modified_base (18)..(18): a, c, u, g, unknown or other
gcgccacugcucaaaacng

SEQ ID NO: 2441469 - RNA, 19 nt, Artificial Sequence
  Description of Artificial Sequence: Synthetic oligonucleotide
acgaccgcgaguagcgccu

SEQ ID NO: 2441470 - RNA, 19 nt, Artificial Sequence
  Description of Artificial Sequence: Synthetic oligonucleotide
gggagcggcggcuccgccg

SEQ ID NO: 2441471 - RNA, 19 nt, Artificial Sequence
  Description of Artificial Sequence: Synthetic oligonucleotide
cuuuagcuguuuucuguau

SEQ ID NO: 2441472 - RNA, 19 nt, Artificial Sequence
  Description of Artificial Sequence: Synthetic oligonucleotide
ucuuugcgccacugcucaa

SEQ ID NO: 2441473 - RNA, 19 nt, Artificial Sequence
  Description of Artificial Sequence: Synthetic oligonucleotide
ugcgcgaguccggaccgga

SEQ ID NO: 2441474 - RNA, 19 nt, Artificial Sequence
  Description of Artificial Sequence: Synthetic oligonucleotide
gcaguccggagacucgcug

SEQ ID NO: 2441475 - RNA, 19 nt, Artificial Sequence
  Description of Artificial Sequence: Synthetic oligonucleotide
gacgcggauggcgagggcu

SEQ ID NO: 2441476 - RNA, 19 nt, Artificial Sequence
  Description of Artificial Sequence: Synthetic oligonucleotide
cagguaggcgaaugcugga

SEQ ID NO: 2441477 - RNA, 19 nt, Artificial Sequence
  Description of Artificial Sequence: Synthetic oligonucleotide
cuuugcgccacugcucaaa

SEQ ID NO: 2441478 - RNA, 19 nt, Artificial Sequence
  Description of Artificial Sequence: Synthetic oligonucleotide
  modified_base (15)..(15): a, c, u, g, unknown or other
ccacugcucaaaacngcug

SEQ ID NO: 2441479 - RNA, 19 nt, Artificial Sequence
  Description of Artificial Sequence: Synthetic oligonucleotide
gagcggcugcgggagcgcg

SEQ ID NO: 2441480 - RNA, 19 nt, Artificial Sequence
  Description of Artificial Sequence: Synthetic oligonucleotide
acgagcggcuggcgcugcg

SEQ ID NO: 2441481 - RNA, 19 nt, Artificial Sequence
  Description of Artificial Sequence: Synthetic oligonucleotide
uggcugcgcgacgacgagc

SEQ ID NO: 2441482 - RNA, 19 nt, Artificial Sequence
  Description of Artificial Sequence: Synthetic oligonucleotide
cguucacguacuuagacgu

SEQ ID NO: 2441483 - RNA, 19 nt, Artificial Sequence
  Description of Artificial Sequence: Synthetic oligonucleotide
cauuuacugccaugauacu

SEQ ID NO: 2441484 - RNA, 19 nt, Artificial Sequence
  Description of Artificial Sequence: Synthetic oligonucleotide
ggaccggagcugcgggacg

SEQ ID NO: 2441485 - RNA, 19 nt, Artificial Sequence
  Description of Artificial Sequence: Synthetic oligonucleotide
cuuagacguggcggccgag

SEQ ID NO: 2441486 - RNA, 19 nt, Artificial Sequence
  Description of Artificial Sequence: Synthetic oligonucleotide
cgcgaccugguucuggacc

SEQ ID NO: 2441487 - RNA, 19 nt, Artificial Sequence
  Description of Artificial Sequence: Synthetic oligonucleotide
  modified_base (16)..(16): a, c, u, g, unknown or other
gccacugcucaaaacngcu

SEQ ID NO: 2441488 - RNA, 19 nt, Artificial Sequence
  Description of Artificial Sequence: Synthetic oligonucleotide
ggagagccgggccacaagu

SEQ ID NO: 2441489 - RNA, 19 nt, Artificial Sequence
  Description of Artificial Sequence: Synthetic oligonucleotide
cugcgcgaccugguucugg

SEQ ID NO: 2441490 - RNA, 19 nt, Artificial Sequence
  Description of Artificial Sequence: Synthetic oligonucleotide
ggccacaagucguucacgu

SEQ ID NO: 2441491 - RNA, 19 nt, Artificial Sequence
  Description of Artificial Sequence: Synthetic oligonucleotide
aggcggcuggagcggcccg

SEQ ID NO: 2441492 - RNA, 19 nt, Artificial Sequence
  Description of Artificial Sequence: Synthetic oligonucleotide
gcgccuguacuugcgcugg

SEQ ID NO: 2441493 - RNA, 19 nt, Artificial Sequence
  Description of Artificial Sequence: Synthetic oligonucleotide
uugcgcugguggcgccugc

SEQ ID NO: 2441494 - RNA, 19 nt, Artificial Sequence
  Description of Artificial Sequence: Synthetic oligonucleotide
gaccggagcugcgggacga

SEQ ID NO: 2441495 - RNA, 19 nt, Artificial Sequence
  Description of Artificial Sequence: Synthetic oligonucleotide
ggacaggaacucucaguaa

SEQ ID NO: 2441496 - RNA, 19 nt, Artificial Sequence
  Description of Artificial Sequence: Synthetic oligonucleotide
gcgggaguacgaccgcgag

SEQ ID NO: 2441497 - RNA, 19 nt, Artificial Sequence
  Description of Artificial Sequence: Synthetic oligonucleotide
ucccuccgcgggagcgggg

SEQ ID NO: 2441498 - RNA, 19 nt, Artificial Sequence
  Description of Artificial Sequence: Synthetic oligonucleotide
guacgaccgcgaguagcgc

SEQ ID NO: 2441499 - RNA, 19 nt, Artificial Sequence
  Description of Artificial Sequence: Synthetic oligonucleotide
  modified_base (7)..(7): a, c, u, g, unknown or other
ccgggancggggagcggcg

SEQ ID NO: 2441500 - RNA, 19 nt, Artificial Sequence
  Description of Artificial Sequence: Synthetic oligonucleotide
  modified_base (5)..(5): a, c, u, g, unknown or other
gggancggggagcggcggc

SEQ ID NO: 2441501 - RNA, 19 nt, Artificial Sequence
  Description of Artificial Sequence: Synthetic oligonucleotide
ggaguacgaccgcgaguag

SEQ ID NO: 2441502 - RNA, 19 nt, Artificial Sequence
  Description of Artificial Sequence: Synthetic oligonucleotide
  modified_base (15)..(15): a, c, u, g, unknown or other
cugcgggaccgggancggg

SEQ ID NO: 2441503 - RNA, 19 nt, Artificial Sequence
  Description of Artificial Sequence: Synthetic oligonucleotide
uggagcggcccgagcccga

SEQ ID NO: 2441504 - RNA, 19 nt, Artificial Sequence
  Description of Artificial Sequence: Synthetic oligonucleotide
gcgaaugcuggaggacagg

SEQ ID NO: 2441505 - RNA, 19 nt, Artificial Sequence
  Description of Artificial Sequence: Synthetic oligonucleotide
ggagcggggagcggcugcg

SEQ ID NO: 2441506 - RNA, 19 nt, Artificial Sequence
  Description of Artificial Sequence: Synthetic oligonucleotide
agcccgacgcggauggcga

SEQ ID NO: 2441507 - RNA, 19 nt, Artificial Sequence
  Description of Artificial Sequence: Synthetic oligonucleotide
caugauacucaggcaggua

SEQ ID NO: 2441508 - RNA, 19 nt, Artificial Sequence
  Description of Artificial Sequence: Synthetic oligonucleotide
gggccacaagucguucacg

SEQ ID NO: 2441509 - RNA, 19 nt, Artificial Sequence
  Description of Artificial Sequence: Synthetic oligonucleotide
  modified_base (17)..(17): a, c, u, g, unknown or other
cgccacugcucaaaacngc

SEQ ID NO: 2441510 - RNA, 19 nt, Artificial Sequence
  Description of Artificial Sequence: Synthetic oligonucleotide
  modified_base (3)..(3): a, c, u, g, unknown or other
gancggggagcggcggcuc

SEQ ID NO: 2441511 - RNA, 19 nt, Artificial Sequence
  Description of Artificial Sequence: Synthetic oligonucleotide
gcugguggcgccugcggga

SEQ ID NO: 2441512 - RNA, 19 nt, Artificial Sequence
  Description of Artificial Sequence: Synthetic oligonucleotide
agcggcuggcgcugcgcga

SEQ ID NO: 2441513 - RNA, 19 nt, Artificial Sequence
  Description of Artificial Sequence: Synthetic oligonucleotide
cgaagagcggcugcgggag

SEQ ID NO: 2441514 - RNA, 19 nt, Artificial Sequence
  Description of Artificial Sequence: Synthetic oligonucleotide
ggcuauggcugcgcgacga

SEQ ID NO: 2441515 - RNA, 19 nt, Artificial Sequence
  Description of Artificial Sequence: Synthetic oligonucleotide
cuauuuuggugacccugau

SEQ ID NO: 2441516 - RNA, 19 nt, Artificial Sequence
  Description of Artificial Sequence: Synthetic oligonucleotide
gagcggggagcggcugcgg

SEQ ID NO: 2441517 - RNA, 19 nt, Artificial Sequence
  Description of Artificial Sequence: Synthetic oligonucleotide
ccggagacucgcuggcaag

SEQ ID NO: 2441518 - RNA, 19 nt, Artificial Sequence
  Description of Artificial Sequence: Synthetic oligonucleotide
gcugcgggaguacgaccgc

SEQ ID NO: 2441519 - RNA, 19 nt, Artificial Sequence
  Description of Artificial Sequence: Synthetic oligonucleotide
gcuauggcugcgcgacgac

SEQ ID NO: 2441520 - RNA, 19 nt, Artificial Sequence
  Description of Artificial Sequence: Synthetic oligonucleotide
uggcgccugcgggaccggg

SEQ ID NO: 2441521 - RNA, 19 nt, Artificial Sequence
  Description of Artificial Sequence: Synthetic oligonucleotide
gcgacgacgagcggcuggc

SEQ ID NO: 2441522 - RNA, 19 nt, Artificial Sequence
  Description of Artificial Sequence: Synthetic oligonucleotide
ggagacucgcuggcaaguc

SEQ ID NO: 2441523 - RNA, 19 nt, Artificial Sequence
  Description of Artificial Sequence: Synthetic oligonucleotide
  modified_base (9)..(9): a, c, u, g, unknown or other
gaccgggancggggagcgg

SEQ ID NO: 2441524 - RNA, 19 nt, Artificial Sequence
  Description of Artificial Sequence: Synthetic oligonucleotide
gcuggcgcugcgcgagucc

SEQ ID NO: 2441525 - RNA, 19 nt, Artificial Sequence
  Description of Artificial Sequence: Synthetic oligonucleotide
cugcggagagccgggccac

SEQ ID NO: 2441526 - RNA, 19 nt, Artificial Sequence
  Description of Artificial Sequence: Synthetic oligonucleotide
agcggcugcgggaguacga

SEQ ID NO: 2441527 - RNA, 19 nt, Artificial Sequence
  Description of Artificial Sequence: Synthetic oligonucleotide
gacucgcuggcaagucaaa

SEQ ID NO: 2441528 - RNA, 19 nt, Artificial Sequence
  Description of Artificial Sequence: Synthetic oligonucleotide
cgcugcgcgaguccggacc

SEQ ID NO: 2441529 - RNA, 19 nt, Artificial Sequence
  Description of Artificial Sequence: Synthetic oligonucleotide
ggugacccugaugaugucu

SEQ ID NO: 2441530 - RNA, 19 nt, Artificial Sequence
  Description of Artificial Sequence: Synthetic oligonucleotide
gagccgggccacaagucgu

SEQ ID NO: 2441531 - RNA, 19 nt, Artificial Sequence
  Description of Artificial Sequence: Synthetic oligonucleotide
cgcgacgacaggcggcugg

SEQ ID NO: 2441532 - RNA, 19 nt, Artificial Sequence
  Description of Artificial Sequence: Synthetic oligonucleotide
gacgagcggcuggcgcugc

SEQ ID NO: 2441533 - RNA, 19 nt, Artificial Sequence
  Description of Artificial Sequence: Synthetic oligonucleotide
ugcggagagccgggccaca

SEQ ID NO: 2441534 - RNA, 19 nt, Artificial Sequence
  Description of Artificial Sequence: Synthetic oligonucleotide
cgaguagcgccuguacuug

SEQ ID NO: 2441535 - RNA, 19 nt, Artificial Sequence
  Description of Artificial Sequence: Synthetic oligonucleotide
uccgccgcgcccggcuaug

SEQ ID NO: 2441536 - RNA, 19 nt, Artificial Sequence
  Description of Artificial Sequence: Synthetic oligonucleotide
gcugcgggacgaagagcgg

SEQ ID NO: 2441537 - RNA, 19 nt, Artificial Sequence
  Description of Artificial Sequence: Synthetic oligonucleotide
cgcgaguccggaccggagc

SEQ ID NO: 2441538 - RNA, 19 nt, Artificial Sequence
  Description of Artificial Sequence: Synthetic oligonucleotide
accgcgaguagcgccugua

SEQ ID NO: 2441539 - RNA, 19 nt, Artificial Sequence
  Description of Artificial Sequence: Synthetic oligonucleotide
gcggcuggcgcugcgcgag

SEQ ID NO: 2441540 - RNA, 19 nt, Artificial Sequence
  Description of Artificial Sequence: Synthetic oligonucleotide
ccgacgcggauggcgaggg

SEQ ID NO: 2441541 - RNA, 19 nt, Artificial Sequence
  Description of Artificial Sequence: Synthetic oligonucleotide
gacccugaugaugucucuu

SEQ ID NO: 2441542 - RNA, 19 nt, Artificial Sequence
  Description of Artificial Sequence: Synthetic oligonucleotide
cugcgcgaguccggaccgg

SEQ ID NO: 2441543 - RNA, 19 nt, Artificial Sequence
  Description of Artificial Sequence: Synthetic oligonucleotide
ccacaguccauaaggacuu

SEQ ID NO: 2441544 - RNA, 19 nt, Artificial Sequence
  Description of Artificial Sequence: Synthetic oligonucleotide
  modified_base (2)..(2): a, c, u, g, unknown or other
cngcugcucucuggcuuug

SEQ ID NO: 2441545 - RNA, 19 nt, Artificial Sequence
  Description of Artificial Sequence: Synthetic oligonucleotide
gccacaagucguucacgua

SEQ ID NO: 2441546 - RNA, 19 nt, Artificial Sequence
  Description of Artificial Sequence: Synthetic oligonucleotide
cgggccacaagucguucac

SEQ ID NO: 2441547 - RNA, 19 nt, Artificial Sequence
  Description of Artificial Sequence: Synthetic oligonucleotide
cgaaugcuggaggacagga

SEQ ID NO: 2441548 - RNA, 19 nt, Artificial Sequence
  Description of Artificial Sequence: Synthetic oligonucleotide
gcgggagcgcgacgacagg

SEQ ID NO: 2441549 - RNA, 19 nt, Artificial Sequence
  Description of Artificial Sequence: Synthetic oligonucleotide
ggaaccccagcccuugguu

SEQ ID NO: 2441550 - RNA, 19 nt, Artificial Sequence
  Description of Artificial Sequence: Synthetic oligonucleotide
acgcggauggcgagggcuu

SEQ ID NO: 2441551 - RNA, 19 nt, Artificial Sequence
  Description of Artificial Sequence: Synthetic oligonucleotide
gcugcgcgacgacgagcgg

SEQ ID NO: 2441552 - RNA, 19 nt, Artificial Sequence
  Description of Artificial Sequence: Synthetic oligonucleotide
gugcuccaucuuugcgcca

SEQ ID NO: 2441553 - RNA, 19 nt, Artificial Sequence
  Description of Artificial Sequence: Synthetic oligonucleotide
ccgcgaguagcgccuguac

SEQ ID NO: 2441554 - RNA, 19 nt, Artificial Sequence
  Description of Artificial Sequence: Synthetic oligonucleotide
gggcuuucuccugcggaga

SEQ ID NO: 2441555 - RNA, 19 nt, Artificial Sequence
  Description of Artificial Sequence: Synthetic oligonucleotide
cugcgggagcgcgacgaca

SEQ ID NO: 2441556 - RNA, 19 nt, Artificial Sequence
  Description of Artificial Sequence: Synthetic oligonucleotide
guggcggccgagggacaug

SEQ ID NO: 2441557 - RNA, 19 nt, Artificial Sequence
  Description of Artificial Sequence: Synthetic oligonucleotide
ccgcgcccggcuauggcug

SEQ ID NO: 2441558 - RNA, 19 nt, Artificial Sequence
  Description of Artificial Sequence: Synthetic oligonucleotide
cccgacgcggauggcgagg

SEQ ID NO: 2441559 - RNA, 19 nt, Artificial Sequence
  Description of Artificial Sequence: Synthetic oligonucleotide
cgggacgaagagcggcugc

SEQ ID NO: 2441560 - RNA, 19 nt, Artificial Sequence
  Description of Artificial Sequence: Synthetic oligonucleotide
cgggagcgcgacgacaggc

SEQ ID NO: 2441561 - RNA, 19 nt, Artificial Sequence
  Description of Artificial Sequence: Synthetic oligonucleotide
agccgggccacaagucguu

SEQ ID NO: 2441562 - RNA, 19 nt, Artificial Sequence
  Description of Artificial Sequence: Synthetic oligonucleotide
ccuuucccuccgcgggagc

SEQ ID NO: 2441563 - RNA, 19 nt, Artificial Sequence
  Description of Artificial Sequence: Synthetic oligonucleotide
gggaaccccagcccuuggu

SEQ ID NO: 2441564 - RNA, 19 nt, Artificial Sequence
  Description of Artificial Sequence: Synthetic oligonucleotide
  modified_base (4)..(4): a, c, u, g, unknown or other
ggancggggagcggcggcu

SEQ ID NO: 2441565 - RNA, 19 nt, Artificial Sequence
  Description of Artificial Sequence: Synthetic oligonucleotide
  modified_base (19)..(19): a, c, u, g, unknown or other
gcgccugcgggaccgggan

SEQ ID NO: 2441566 - RNA, 19 nt, Artificial Sequence
  Description of Artificial Sequence: Synthetic oligonucleotide
gcccgacgcggauggcgag

SEQ ID NO: 2441567 - RNA, 19 nt, Artificial Sequence
  Description of Artificial Sequence: Synthetic oligonucleotide
gcgggacgaagagcggcug

SEQ ID NO: 2441568 - RNA, 19 nt, Artificial Sequence
  Description of Artificial Sequence: Synthetic oligonucleotide
ggcgcugcgcgaguccgga

SEQ ID NO: 2441569 - RNA, 19 nt, Artificial Sequence
  Description of Artificial Sequence: Synthetic oligonucleotide
ccgggccacaagucguuca

SEQ ID NO: 2441570 - RNA, 19 nt, Artificial Sequence
  Description of Artificial Sequence: Synthetic oligonucleotide
guggcgccugcgggaccgg

SEQ ID NO: 2441571 - RNA, 19 nt, Artificial Sequence
  Description of Artificial Sequence: Synthetic oligonucleotide
gcgacgacaggcggcugga

SEQ ID NO: 2441572 - RNA, 19 nt, Artificial Sequence
  Description of Artificial Sequence: Synthetic oligonucleotide
cgacaggcggcuggagcgg

SEQ ID NO: 2441573 - RNA, 19 nt, Artificial Sequence
  Description of Artificial Sequence: Synthetic oligonucleotide
gaccgcgaguagcgccugu

SEQ ID NO: 2441574 - RNA, 19 nt, Artificial Sequence
  Description of Artificial Sequence: Synthetic oligonucleotide
gccgcgcccggcuauggcu

SEQ ID NO: 2441575 - RNA, 19 nt, Artificial Sequence
  Description of Artificial Sequence: Synthetic oligonucleotide
gcgcgaccugguucuggac

SEQ ID NO: 2441576 - RNA, 19 nt, Artificial Sequence
  Description of Artificial Sequence: Synthetic oligonucleotide
cggagagccgggccacaag

SEQ ID NO: 2441577 - RNA, 19 nt, Artificial Sequence
  Description of Artificial Sequence: Synthetic oligonucleotide
cggcugcgggaguacgacc

SEQ ID NO: 2441578 - RNA, 19 nt, Artificial Sequence
  Description of Artificial Sequence: Synthetic oligonucleotide
ccauucgaucuuucucacu

SEQ ID NO: 2441579 - RNA, 19 nt, Artificial Sequence
  Description of Artificial Sequence: Synthetic oligonucleotide
gcggcuggagcggcccgag

SEQ ID NO: 2441580 - RNA, 19 nt, Artificial Sequence
  Description of Artificial Sequence: Synthetic oligonucleotide
ggagcggcccgagcccgac

SEQ ID NO: 2441581 - RNA, 19 nt, Artificial Sequence
  Description of Artificial Sequence: Synthetic oligonucleotide
gcgcgaguccggaccggag

SEQ ID NO: 2441582 - RNA, 19 nt, Artificial Sequence
  Description of Artificial Sequence: Synthetic oligonucleotide
cggaccggagcugcgggac

SEQ ID NO: 2441583 - RNA, 19 nt, Artificial Sequence
  Description of Artificial Sequence: Synthetic oligonucleotide
gcauuggcuuuugcuauuu

SEQ ID NO: 2441584 - RNA, 19 nt, Artificial Sequence
  Description of Artificial Sequence: Synthetic oligonucleotide
cagcagcuuuagcuguuuu

SEQ ID NO: 2441585 - RNA, 19 nt, Artificial Sequence
  Description of Artificial Sequence: Synthetic oligonucleotide
  modified_base (13)..(13): a, c, u, g, unknown or other
gcgggaccgggancgggga

SEQ ID NO: 2441586 - RNA, 19 nt, Artificial Sequence
  Description of Artificial Sequence: Synthetic oligonucleotide
  modified_base (12)..(12): a, c, u, g, unknown or other
cgggaccgggancggggag

SEQ ID NO: 2441587 - RNA, 19 nt, Artificial Sequence
  Description of Artificial Sequence: Synthetic oligonucleotide
acguggcggccgagggaca

SEQ ID NO: 2441588 - RNA, 19 nt, Artificial Sequence
  Description of Artificial Sequence: Synthetic oligonucleotide
  modified_base (6)..(6): a, c, u, g, unknown or other
cgggancggggagcggcgg

SEQ ID NO: 2441589 - RNA, 19 nt, Artificial Sequence
  Description of Artificial Sequence: Synthetic oligonucleotide
cggcuauggcugcgcgacg

SEQ ID NO: 2441590 - RNA, 19 nt, Artificial Sequence
  Description of Artificial Sequence: Synthetic oligonucleotide
ggcuggcgcugcgcgaguc

SEQ ID NO: 2441591 - RNA, 19 nt, Artificial Sequence
  Description of Artificial Sequence: Synthetic oligonucleotide
gcgcccggcuauggcugcg

SEQ ID NO: 2441592 - RNA, 19 nt, Artificial Sequence
  Description of Artificial Sequence: Synthetic oligonucleotide
gcugcgcgaccugguucug

SEQ ID NO: 2441593 - RNA, 19 nt, Artificial Sequence
  Description of Artificial Sequence: Synthetic oligonucleotide
ggcggcuggagcggcccga

SEQ ID NO: 2441594 - RNA, 19 nt, Artificial Sequence
  Description of Artificial Sequence: Synthetic oligonucleotide
gccgggccacaagucguuc

SEQ ID NO: 2441595 - RNA, 19 nt, Artificial Sequence
  Description of Artificial Sequence: Synthetic oligonucleotide
ccggaccggagcugcggga

SEQ ID NO: 2441596 - RNA, 19 nt, Artificial Sequence
  Description of Artificial Sequence: Synthetic oligonucleotide
cgcgaguagcgccuguacu

SEQ ID NO: 2441597 - RNA, 19 nt, Artificial Sequence
  Description of Artificial Sequence: Synthetic oligonucleotide
gcggagagccgggccacaa

SEQ ID NO: 2441598 - RNA, 19 nt, Artificial Sequence
  Description of Artificial Sequence: Synthetic oligonucleotide
cacaguccauaaggacuuu

SEQ ID NO: 2441599 - RNA, 19 nt, Artificial Sequence
  Description of Artificial Sequence: Synthetic oligonucleotide
cgacgacgagcggcuggcg

SEQ ID NO: 2441600 - RNA, 19 nt, Artificial Sequence
  Description of Artificial Sequence: Synthetic oligonucleotide
cgacgacaggcggcuggag

SEQ ID NO: 2441601 - RNA, 19 nt, Artificial Sequence
  Description of Artificial Sequence: Synthetic oligonucleotide
cgacgcggauggcgagggc

SEQ ID NO: 2441602 - RNA, 19 nt, Artificial Sequence
  Description of Artificial Sequence: Synthetic oligonucleotide
cgccgcgcccggcuauggc

SEQ ID NO: 2441603 - RNA, 19 nt, Artificial Sequence
  Description of Artificial Sequence: Synthetic oligonucleotide
  modified_base (18)..(18): a, c, u, g, unknown or other
cgccugcgggaccggganc

SEQ ID NO: 2441604 - RNA, 19 nt, Artificial Sequence
  Description of Artificial Sequence: Synthetic oligonucleotide
ccgccgcgcccggcuaugg

SEQ ID NO: 2441605 - RNA, 19 nt, Artificial Sequence
  Description of Artificial Sequence: Synthetic oligonucleotide
cggcuuugcuauggaauua

SEQ ID NO: 2441606 - RNA, 19 nt, Artificial Sequence
  Description of Artificial Sequence: Synthetic oligonucleotide
cgcccggcuauggcugcgc

SEQ ID NO: 2441607 - RNA, 19 nt, Artificial Sequence
  Description of Artificial Sequence: Synthetic oligonucleotide
cuccgccgcgcccggcuau

SEQ ID NO: 2441608 - RNA, 19 nt, Artificial Sequence
  Description of Artificial Sequence: Synthetic oligonucleotide
gcgcgacgacgagcggcug

SEQ ID NO: 2441609 - RNA, 19 nt, Artificial Sequence
  Description of Artificial Sequence: Synthetic oligonucleotide
cgggaguacgaccgcgagu

SEQ ID NO: 2441610 - RNA, 19 nt, Artificial Sequence
  Description of Artificial Sequence: Synthetic oligonucleotide
cggagacucgcuggcaagu

SEQ ID NO: 2441611 - RNA, 19 nt, Artificial Sequence
  Description of Artificial Sequence: Synthetic oligonucleotide
cgaccgcgaguagcgccug

SEQ ID NO: 2441612 - RNA, 19 nt, Artificial Sequence
  Description of Artificial Sequence: Synthetic oligonucleotide
gcgcgacgacaggcggcug

SEQ ID NO: 2441613 - RNA, 19 nt, Artificial Sequence
  Description of Artificial Sequence: Synthetic oligonucleotide
cgagcccgacgcggauggc

SEQ ID NO: 2441614 - RNA, 19 nt, Artificial Sequence
  Description of Artificial Sequence: Synthetic oligonucleotide
gcccgagcccgacgcggau

SEQ ID NO: 2441615 - RNA, 19 nt, Artificial Sequence
  Description of Artificial Sequence: Synthetic oligonucleotide
cgccuguacuugcgcuggu

SEQ ID NO: 2441616 - RNA, 19 nt, Artificial Sequence
  Description of Artificial Sequence: Synthetic oligonucleotide
cgaccugguucuggaccuu

SEQ ID NO: 2441617 - RNA, 19 nt, Artificial Sequence
  Description of Artificial Sequence: Synthetic oligonucleotide
auucuuauacuucagaucc

SEQ ID NO: 2441618 - RNA, 19 nt, Artificial Sequence
  Description of Artificial Sequence: Synthetic oligonucleotide
aaugccaagauaaagaagc

SEQ ID NO: 2441619 - RNA, 19 nt, Artificial Sequence
  Description of Artificial Sequence: Synthetic oligonucleotide
aaauagguggcauaguacc

SEQ ID NO: 2441620 - RNA, 19 nt, Artificial Sequence
  Description of Artificial Sequence: Synthetic oligonucleotide
caaaagaagagcaaaaugc

SEQ ID NO: 2441621 - RNA, 19 nt, Artificial Sequence
  Description of Artificial Sequence: Synthetic oligonucleotide
aagauaaagaagcagcauc

SEQ ID NO: 2441622 - RNA, 19 nt, Artificial Sequence
  Description of Artificial Sequence: Synthetic oligonucleotide
agucguauuacuucaaugc

SEQ ID NO: 2441623 - RNA, 19 nt, Artificial Sequence
  Description of Artificial Sequence: Synthetic oligonucleotide
aaaacagucguauuacuuc

SEQ ID NO: 2441624 - RNA, 19 nt, Artificial Sequence
  Description of Artificial Sequence: Synthetic oligonucleotide
aauucuuauacuucagauc

SEQ ID NO: 2441625 - RNA, 19 nt, Artificial Sequence
  Description of Artificial Sequence: Synthetic oligonucleotide
caugauagcuucuagacgg

SEQ ID NO: 2441626 - RNA, 19 nt, Artificial Sequence
  Description of Artificial Sequence: Synthetic oligonucleotide
uaauaggaagccaucaugg

SEQ ID NO: 2441627 - RNA, 19 nt, Artificial Sequence
  Description of Artificial Sequence: Synthetic oligonucleotide
cacacuaaugcuaagaggc

SEQ ID NO: 2441628 - RNA, 19 nt, Artificial Sequence
  Description of Artificial Sequence: Synthetic oligonucleotide
auauaauccacacaaggag

SEQ ID NO: 2441629 - RNA, 19 nt, Artificial Sequence
  Description of Artificial Sequence: Synthetic oligonucleotide
aauaggaagccaucauggc

SEQ ID NO: 2441630 - RNA, 19 nt, Artificial Sequence
  Description of Artificial Sequence: Synthetic oligonucleotide
auaaagaagcagcaucacc

SEQ ID NO: 2441631 - RNA, 19 nt, Artificial Sequence
  Description of Artificial Sequence: Synthetic oligonucleotide
acugaccucagguaggugc

SEQ ID NO: 2441632 - RNA, 19 nt, Artificial Sequence
  Description of Artificial Sequence: Synthetic oligonucleotide
cauaguaccacccauucag

SEQ ID NO: 2441633 - RNA, 19 nt, Artificial Sequence
  Description of Artificial Sequence: Synthetic oligonucleotide
uucuagacggaguacauag

SEQ ID NO: 2441634 - RNA, 19 nt, Artificial Sequence
  Description of Artificial Sequence: Synthetic oligonucleotide
uauaauccacacaaggagc

SEQ ID NO: 2441635 - RNA, 19 nt, Artificial Sequence
  Description of Artificial Sequence: Synthetic oligonucleotide
agagguuucccuuguaccc

SEQ ID NO: 2441636 - RNA, 19 nt, Artificial Sequence
  Description of Artificial Sequence: Synthetic oligonucleotide
uacuucaaugccaagauaa

SEQ ID NO: 2441637 - RNA, 19 nt, Artificial Sequence
  Description of Artificial Sequence: Synthetic oligonucleotide
aaaaugcuguucaugauag

SEQ ID NO: 2441638 - RNA, 19 nt, Artificial Sequence
  Description of Artificial Sequence: Synthetic oligonucleotide
uuuaagaugacgccacuga

SEQ ID NO: 2441639 - RNA, 19 nt, Artificial Sequence
  Description of Artificial Sequence: Synthetic oligonucleotide
ugauccugguuuaagauga

SEQ ID NO: 2441640 - RNA, 19 nt, Artificial Sequence
  Description of Artificial Sequence: Synthetic oligonucleotide
aagaugacgccacugaccu

SEQ ID NO: 2441641 - RNA, 19 nt, Artificial Sequence
  Description of Artificial Sequence: Synthetic oligonucleotide
cuugaggucaguaggaagc

SEQ ID NO: 2441642 - RNA, 19 nt, Artificial Sequence
  Description of Artificial Sequence: Synthetic oligonucleotide
uucaugauagcuucuagac

SEQ ID NO: 2441643 - RNA, 19 nt, Artificial Sequence
  Description of Artificial Sequence: Synthetic oligonucleotide
aaugcuaagaggcaucuuu

SEQ ID NO: 2441644 - RNA, 19 nt, Artificial Sequence
  Description of Artificial Sequence: Synthetic oligonucleotide
ucaugauagcuucuagacg

SEQ ID NO: 2441645 - RNA, 19 nt, Artificial Sequence
  Description of Artificial Sequence: Synthetic oligonucleotide
ugaccuaccacuuuucaca

SEQ ID NO: 2441646 - RNA, 19 nt, Artificial Sequence
  Description of Artificial Sequence: Synthetic oligonucleotide
aaauguccgugucuccugc

SEQ ID NO: 2441647 - RNA, 19 nt, Artificial Sequence
  Description of Artificial Sequence: Synthetic oligonucleotide
aacgugagcaucucaagca

SEQ ID NO: 2441648 - RNA, 19 nt, Artificial Sequence
  Description of Artificial Sequence: Synthetic oligonucleotide
agccauauaauccacacaa

SEQ ID NO: 2441649 - RNA, 19 nt, Artificial Sequence
  Description of Artificial Sequence: Synthetic oligonucleotide
aaugcuguucaugauagcu

SEQ ID NO: 2441650 - RNA, 19 nt, Artificial Sequence
  Description of Artificial Sequence: Synthetic oligonucleotide
uccugguuuaagaugacgc

SEQ ID NO: 2441651 - RNA, 19 nt, Artificial Sequence
  Description of Artificial Sequence: Synthetic oligonucleotide
agcaaaaugcuguucauga

SEQ ID NO: 2441652 - RNA, 19 nt, Artificial Sequence
  Description of Artificial Sequence: Synthetic oligonucleotide
ucugaaccacaaaagaaga

SEQ ID NO: 2441653 - RNA, 19 nt, Artificial Sequence
  Description of Artificial Sequence: Synthetic oligonucleotide
augugguacauguacagag

SEQ ID NO: 2441654 - RNA, 19 nt, Artificial Sequence
  Description of Artificial Sequence: Synthetic oligonucleotide
aaacagucguauuacuuca

SEQ ID NO: 2441655 - RNA, 19 nt, Artificial Sequence
  Description of Artificial Sequence: Synthetic oligonucleotide
acaaguguggcugacguac

SEQ ID NO: 2441656 - RNA, 19 nt, Artificial Sequence
  Description of Artificial Sequence: Synthetic oligonucleotide
ucaugcaggacagaugugg

SEQ ID NO: 2441657 - RNA, 19 nt, Artificial Sequence
  Description of Artificial Sequence: Synthetic oligonucleotide
uguuaggaagcccaagaug

SEQ ID NO: 2441658 - RNA, 19 nt, Artificial Sequence
  Description of Artificial Sequence: Synthetic oligonucleotide
guaggaagcuguuaggaag

SEQ ID NO: 2441659 - RNA, 19 nt, Artificial Sequence
  Description of Artificial Sequence: Synthetic oligonucleotide
uacuggaagcccaacaagc

SEQ ID NO: 2441660 - RNA, 19 nt, Artificial Sequence
  Description of Artificial Sequence: Synthetic oligonucleotide
uaagaugacgccacugacc

SEQ ID NO: 2441661 - RNA, 19 nt, Artificial Sequence
  Description of Artificial Sequence: Synthetic oligonucleotide
guaccacccauucagaaag

SEQ ID NO: 2441662 - RNA, 19 nt, Artificial Sequence
  Description of Artificial Sequence: Synthetic oligonucleotide
auacaggaagaugaggagc

SEQ ID NO: 2441663 - RNA, 19 nt, Artificial Sequence
  Description of Artificial Sequence: Synthetic oligonucleotide
ugcagcaggagguaauagg

SEQ ID NO: 2441664 - RNA, 19 nt, Artificial Sequence
  Description of Artificial Sequence: Synthetic oligonucleotide
ucagauccuguccauacug

SEQ ID NO: 2441665 - RNA, 19 nt, Artificial Sequence
  Description of Artificial Sequence: Synthetic oligonucleotide
ucguauuacuucaaugcca

SEQ ID NO: 2441666 - RNA, 19 nt, Artificial Sequence
  Description of Artificial Sequence: Synthetic oligonucleotide
guaauaggaagccaucaug

SEQ ID NO: 2441667 - RNA, 19 nt, Artificial Sequence
  Description of Artificial Sequence: Synthetic oligonucleotide
cagcaagagaccuuuauac

SEQ ID NO: 2441668 - RNA, 19 nt, Artificial Sequence
  Description of Artificial Sequence: Synthetic oligonucleotide
agacggaguacauaggucu

SEQ ID NO: 2441669 - RNA, 19 nt, Artificial Sequence
  Description of Artificial Sequence: Synthetic oligonucleotide
cauauaauccacacaagga

SEQ ID NO: 2441670 - RNA, 19 nt, Artificial Sequence
  Description of Artificial Sequence: Synthetic oligonucleotide
aaagaagagcaaaaugcug

SEQ ID NO: 2441671 - RNA, 19 nt, Artificial Sequence
  Description of Artificial Sequence: Synthetic oligonucleotide
uugaggacaaccuuuuauc

SEQ ID NO: 2441672 - RNA, 19 nt, Artificial Sequence
  Description of Artificial Sequence: Synthetic oligonucleotide
ugcuaagaggcaucuuucg

SEQ ID NO: 2441673 - RNA, 19 nt, Artificial Sequence
  Description of Artificial Sequence: Synthetic oligonucleotide
agaugugguacauguacag

SEQ ID NO: 2441674 - RNA, 19 nt, Artificial Sequence
  Description of Artificial Sequence: Synthetic oligonucleotide
uugaaucagccuaggaggc

SEQ ID NO: 2441675 - RNA, 19 nt, Artificial Sequence
  Description of Artificial Sequence: Synthetic oligonucleotide
uuauacuucagauccuguc

SEQ ID NO: 2441676 - RNA, 19 nt, Artificial Sequence
  Description of Artificial Sequence: Synthetic oligonucleotide
aaggucgccaacgugagca

SEQ ID NO: 2441677 - RNA, 19 nt, Artificial Sequence
  Description of Artificial Sequence: Synthetic oligonucleotide
agcccaacaagccauauaa

SEQ ID NO: 2441678 - RNA, 19 nt, Artificial Sequence
  Description of Artificial Sequence: Synthetic oligonucleotide
ucaguaggaagcuguuagg

SEQ ID NO: 2441679 - RNA, 19 nt, Artificial Sequence
  Description of Artificial Sequence: Synthetic oligonucleotide
accauaaaauguccguguc

SEQ ID NO: 2441680 - RNA, 19 nt, Artificial Sequence
  Description of Artificial Sequence: Synthetic oligonucleotide
auaggaagccaucauggca

SEQ ID NO: 2441681 - RNA, 19 nt, Artificial Sequence
  Description of Artificial Sequence: Synthetic oligonucleotide
cauaaaauguccgugucuc

SEQ ID NO: 2441682 - RNA, 19 nt, Artificial Sequence
  Description of Artificial Sequence: Synthetic oligonucleotide
ucuagacggaguacauagg

SEQ ID NO: 2441683 - RNA, 19 nt, Artificial Sequence
  Description of Artificial Sequence: Synthetic oligonucleotide
ugaugauccugguuuaaga

SEQ ID NO: 2441684 - RNA, 19 nt, Artificial Sequence
  Description of Artificial Sequence: Synthetic oligonucleotide
ucuuauacuucagauccug

SEQ ID NO: 2441685 - RNA, 19 nt, Artificial Sequence
  Description of Artificial Sequence: Synthetic oligonucleotide
ugaggacaaccuuuuaucu

SEQ ID NO: 2441686 - RNA, 19 nt, Artificial Sequence
  Description of Artificial Sequence: Synthetic oligonucleotide
uuggguauggcagcaagag

SEQ ID NO: 2441687 - RNA, 19 nt, Artificial Sequence
  Description of Artificial Sequence: Synthetic oligonucleotide
uggcugacguaccagagga

SEQ ID NO: 2441688 - RNA, 19 nt, Artificial Sequence
  Description of Artificial Sequence: Synthetic oligonucleotide
ccauauaauccacacaagg

SEQ ID NO: 2441689 - RNA, 19 nt, Artificial Sequence
  Description of Artificial Sequence: Synthetic oligonucleotide
gucguauuacuucaaugcc

SEQ ID NO: 2441690 - RNA, 19 nt, Artificial Sequence
  Description of Artificial Sequence: Synthetic oligonucleotide
cacacaaggagcucuggcc

SEQ ID NO: 2441691 - RNA, 19 nt, Artificial Sequence
  Description of Artificial Sequence: Synthetic oligonucleotide
ugguuuaagaugacgccac

SEQ ID NO: 2441692 - RNA, 19 nt, Artificial Sequence
  Description of Artificial Sequence: Synthetic oligonucleotide
ucacaaguguggcugacgu

SEQ ID NO: 2441693 - RNA, 19 nt, Artificial Sequence
  Description of Artificial Sequence: Synthetic oligonucleotide
uaccauaaaauguccgugu

SEQ ID NO: 2441694 - RNA, 19 nt, Artificial Sequence
  Description of Artificial Sequence: Synthetic oligonucleotide
agauaaagaagcagcauca

SEQ ID NO: 2441695 - RNA, 19 nt, Artificial Sequence
  Description of Artificial Sequence: Synthetic oligonucleotide
gcaagagaccuuuauacag

SEQ ID NO: 2441696 - RNA, 19 nt, Artificial Sequence
  Description of Artificial Sequence: Synthetic oligonucleotide
augauccugguuuaagaug

SEQ ID NO: 2441697 - RNA, 19 nt, Artificial Sequence
  Description of Artificial Sequence: Synthetic oligonucleotide
cucccuaccauaaaauguc

SEQ ID NO: 2441698 - RNA, 19 nt, Artificial Sequence
  Description of Artificial Sequence: Synthetic oligonucleotide
gaugggaaggucaaggcca

SEQ ID NO: 2441699 - RNA, 19 nt, Artificial Sequence
  Description of Artificial Sequence: Synthetic oligonucleotide
acuggaagcccaacaagcc

SEQ ID NO: 2441700 - RNA, 19 nt, Artificial Sequence
  Description of Artificial Sequence: Synthetic oligonucleotide
aacaagccauauaauccac

SEQ ID NO: 2441701 - RNA, 19 nt, Artificial Sequence
  Description of Artificial Sequence: Synthetic oligonucleotide
uaaaauguccgugucuccu

SEQ ID NO: 2441702 - RNA, 19 nt, Artificial Sequence
  Description of Artificial Sequence: Synthetic oligonucleotide
ugguacauguacagagugc

SEQ ID NO: 2441703 - RNA, 19 nt, Artificial Sequence
  Description of Artificial Sequence: Synthetic oligonucleotide
ugugguacauguacagagu

SEQ ID NO: 2441704 - RNA, 19 nt, Artificial Sequence
  Description of Artificial Sequence: Synthetic oligonucleotide
aacuugaccuaccacuuuu

SEQ ID NO: 2441705 - RNA, 19 nt, Artificial Sequence
  Description of Artificial Sequence: Synthetic oligonucleotide
auagguggcauaguaccac

SEQ ID NO: 2441706 - RNA, 19 nt, Artificial Sequence
  Description of Artificial Sequence: Synthetic oligonucleotide
uggccguuggguauggcag

SEQ ID NO: 2441707 - RNA, 19 nt, Artificial Sequence
  Description of Artificial Sequence: Synthetic oligonucleotide
auacuucagauccugucca

SEQ ID NO: 2441708 - RNA, 19 nt, Artificial Sequence
  Description of Artificial Sequence: Synthetic oligonucleotide
gaagcuguuaggaagccca

SEQ ID NO: 2441709 - RNA, 19 nt, Artificial Sequence
  Description of Artificial Sequence: Synthetic oligonucleotide
uguggcuuccguccuacug

SEQ ID NO: 2441710 - RNA, 19 nt, Artificial Sequence
  Description of Artificial Sequence: Synthetic oligonucleotide
auagcuucuagacggagua

SEQ ID NO: 2441711 - RNA, 19 nt, Artificial Sequence
  Description of Artificial Sequence: Synthetic oligonucleotide
cuucagauccuguccauac

SEQ ID NO: 2441712 - RNA, 19 nt, Artificial Sequence
  Description of Artificial Sequence: Synthetic oligonucleotide
gaaauagguggcauaguac

SEQ ID NO: 2441713 - RNA, 19 nt, Artificial Sequence
  Description of Artificial Sequence: Synthetic oligonucleotide
uaggucugcagcaggaggu

SEQ ID NO: 2441714 - RNA, 19 nt, Artificial Sequence
  Description of Artificial Sequence: Synthetic oligonucleotide
aauccacacaaggagcucu

SEQ ID NO: 2441715 - RNA, 19 nt, Artificial Sequence
  Description of Artificial Sequence: Synthetic oligonucleotide
agcaagagaccuuuauaca

SEQ ID NO: 2441716 - RNA, 19 nt, Artificial Sequence
  Description of Artificial Sequence: Synthetic oligonucleotide
agcuuugccucucccuacc

SEQ ID NO: 2441717 - RNA, 19 nt, Artificial Sequence
  Description of Artificial Sequence: Synthetic oligonucleotide
ccuuuauacaggaagauga

SEQ ID NO: 2441718 - RNA, 19 nt, Artificial Sequence
  Description of Artificial Sequence: Synthetic oligonucleotide
caacgugagcaucucaagc

SEQ ID NO: 2441719 - RNA, 19 nt, Artificial Sequence
  Description of Artificial Sequence: Synthetic oligonucleotide
gaugacgccacugaccuca

SEQ ID NO: 2441720 - RNA, 19 nt, Artificial Sequence
  Description of Artificial Sequence: Synthetic oligonucleotide
cuggaauucuuauacuuca

SEQ ID NO: 2441721 - RNA, 19 nt, Artificial Sequence
  Description of Artificial Sequence: Synthetic oligonucleotide
cuuccguccuacuggaagc

SEQ ID NO: 2441722 - RNA, 19 nt, Artificial Sequence
  Description of Artificial Sequence: Synthetic oligonucleotide
aucauggcagaugggaagg

SEQ ID NO: 2441723 - RNA, 19 nt, Artificial Sequence
  Description of Artificial Sequence: Synthetic oligonucleotide
auccuguccauacuggaga

SEQ ID NO: 2441724 - RNA, 19 nt, Artificial Sequence
  Description of Artificial Sequence: Synthetic oligonucleotide
gagaaggucgccaacguga

SEQ ID NO: 2441725 - RNA, 19 nt, Artificial Sequence
  Description of Artificial Sequence: Synthetic oligonucleotide
guucaugauagcuucuaga

SEQ ID NO: 2441726 - RNA, 19 nt, Artificial Sequence
  Description of Artificial Sequence: Synthetic oligonucleotide
uugaccuaccacuuuucac

SEQ ID NO: 2441727 - RNA, 19 nt, Artificial Sequence
  Description of Artificial Sequence: Synthetic oligonucleotide
acuaaugcuaagaggcauc

SEQ ID NO: 2441728 - RNA, 19 nt, Artificial Sequence
  Description of Artificial Sequence: Synthetic oligonucleotide
accacuuuucacaagugug

SEQ ID NO: 2441729 - RNA, 19 nt, Artificial Sequence
  Description of Artificial Sequence: Synthetic oligonucleotide
auaauccacacaaggagcu

SEQ ID NO: 2441730 - RNA, 19 nt, Artificial Sequence
  Description of Artificial Sequence: Synthetic oligonucleotide
uccuacuggaagcccaaca

SEQ ID NO: 2441731 - RNA, 19 nt, Artificial Sequence
  Description of Artificial Sequence: Synthetic oligonucleotide
agcucuggccaugaugacc

SEQ ID NO: 2441732 - RNA, 19 nt, Artificial Sequence
  Description of Artificial Sequence: Synthetic oligonucleotide
gccaagauaaagaagcagc

SEQ ID NO: 2441733 - RNA, 19 nt, Artificial Sequence
  Description of Artificial Sequence: Synthetic oligonucleotide
aauagguggcauaguacca

SEQ ID NO: 2441734 - RNA, 19 nt, Artificial Sequence
  Description of Artificial Sequence: Synthetic oligonucleotide
cucucccuaccauaaaaug

SEQ ID NO: 2441735 - RNA, 19 nt, Artificial Sequence
  Description of Artificial Sequence: Synthetic oligonucleotide
augaugaccaaggaagaga

SEQ ID NO: 2441736 - RNA, 19 nt, Artificial Sequence
  Description of Artificial Sequence: Synthetic oligonucleotide
gaggaugugggcugucacc

SEQ ID NO: 2441737 - RNA, 19 nt, Artificial Sequence
  Description of Artificial Sequence: Synthetic oligonucleotide
gauaaagaagcagcaucac

SEQ ID NO: 2441738 - RNA, 19 nt, Artificial Sequence
  Description of Artificial Sequence: Synthetic oligonucleotide
cagucguauuacuucaaug

SEQ ID NO: 2441739 - RNA, 19 nt, Artificial Sequence
  Description of Artificial Sequence: Synthetic oligonucleotide
cuacuggaagcccaacaag

SEQ ID NO: 2441740 - RNA, 19 nt, Artificial Sequence
  Description of Artificial Sequence: Synthetic oligonucleotide
aguaggaagcuguuaggaa

SEQ ID NO: 2441741 - RNA, 19 nt, Artificial Sequence
  Description of Artificial Sequence: Synthetic oligonucleotide
aguaccacccauucagaaa

SEQ ID NO: 2441742 - RNA, 19 nt, Artificial Sequence
  Description of Artificial Sequence: Synthetic oligonucleotide
uucacaaguguggcugacg

SEQ ID NO: 2441743 - RNA, 19 nt, Artificial Sequence
  Description of Artificial Sequence: Synthetic oligonucleotide
cagcucugaaccacaaaag

SEQ ID NO: 2441744 - RNA, 19 nt, Artificial Sequence
  Description of Artificial Sequence: Synthetic oligonucleotide
gaacaggacuuccagaggu

SEQ ID NO: 2441745 - RNA, 19 nt, Artificial Sequence
  Description of Artificial Sequence: Synthetic oligonucleotide
cucagguaggugcucaaug

SEQ ID NO: 2441746 - RNA, 19 nt, Artificial Sequence
  Description of Artificial Sequence: Synthetic oligonucleotide
ggguauggcagcaagagac

SEQ ID NO: 2441747 - RNA, 19 nt, Artificial Sequence
  Description of Artificial Sequence: Synthetic oligonucleotide
gaagagaacuugaggucag

SEQ ID NO: 2441748 - RNA, 19 nt, Artificial Sequence
  Description of Artificial Sequence: Synthetic oligonucleotide
accuuuauacaggaagaug

SEQ ID NO: 2441749 - RNA, 19 nt, Artificial Sequence
  Description of Artificial Sequence: Synthetic oligonucleotide
ugcucaugcaggacagaug

SEQ ID NO: 2441750 - RNA, 19 nt, Artificial Sequence
  Description of Artificial Sequence: Synthetic oligonucleotide
uucagauccuguccauacu

SEQ ID NO: 2441751 - RNA, 19 nt, Artificial Sequence
  Description of Artificial Sequence: Synthetic oligonucleotide
agaugucugugcuaaggaa

SEQ ID NO: 2441752 - RNA, 19 nt, Artificial Sequence
  Description of Artificial Sequence: Synthetic oligonucleotide
caaaaugcuguucaugaua

SEQ ID NO: 2441753 - RNA, 19 nt, Artificial Sequence
  Description of Artificial Sequence: Synthetic oligonucleotide
acuuuucacaaguguggcu

SEQ ID NO: 2441754 - RNA, 19 nt, Artificial Sequence
  Description of Artificial Sequence: Synthetic oligonucleotide
aaguguggcugacguacca

SEQ ID NO: 2441755 - RNA, 19 nt, Artificial Sequence
  Description of Artificial Sequence: Synthetic oligonucleotide
aggagcucuggccaugaug

SEQ ID NO: 2441756 - RNA, 19 nt, Artificial Sequence
  Description of Artificial Sequence: Synthetic oligonucleotide
uaccagaggaugugggcug

SEQ ID NO: 2441757 - RNA, 19 nt, Artificial Sequence
  Description of Artificial Sequence: Synthetic oligonucleotide
acggaguacauaggucugc

SEQ ID NO: 2441758 - RNA, 19 nt, Artificial Sequence
  Description of Artificial Sequence: Synthetic oligonucleotide
acuagguuggccguugggu

SEQ ID NO: 2441759 - RNA, 19 nt, Artificial Sequence
  Description of Artificial Sequence: Synthetic oligonucleotide
uagguggcauaguaccacc

SEQ ID NO: 2441760 - RNA, 19 nt, Artificial Sequence
  Description of Artificial Sequence: Synthetic oligonucleotide
agauccuguccauacugga

SEQ ID NO: 2441761 - RNA, 19 nt, Artificial Sequence
  Description of Artificial Sequence: Synthetic oligonucleotide
gccacacuaaugcuaagag

SEQ ID NO: 2441762 - RNA, 19 nt, Artificial Sequence
  Description of Artificial Sequence: Synthetic oligonucleotide
uguccauacuggagaaggu

SEQ ID NO: 2441763 - RNA, 19 nt, Artificial Sequence
  Description of Artificial Sequence: Synthetic oligonucleotide
caugaugaccaaggaagag

SEQ ID NO: 2441764 - RNA, 19 nt, Artificial Sequence
  Description of Artificial Sequence: Synthetic oligonucleotide
aucuuucgcuggcagaggu

SEQ ID NO: 2441765 - RNA, 19 nt, Artificial Sequence
  Description of Artificial Sequence: Synthetic oligonucleotide
guggcugacguaccagagg

SEQ ID NO: 2441766 - RNA, 19 nt, Artificial Sequence
  Description of Artificial Sequence: Synthetic oligonucleotide
augcuaagaggcaucuuuc

SEQ ID NO: 2441767 - RNA, 19 nt, Artificial Sequence
  Description of Artificial Sequence: Synthetic oligonucleotide
gacguaccagaggaugugg

SEQ ID NO: 2441768 - RNA, 19 nt, Artificial Sequence
  Description of Artificial Sequence: Synthetic oligonucleotide
gaugauccugguuuaagau

SEQ ID NO: 2441769 - RNA, 19 nt, Artificial Sequence
  Description of Artificial Sequence: Synthetic oligonucleotide
uggagaaggucgccaacgu

SEQ ID NO: 2441770 - RNA, 19 nt, Artificial Sequence
  Description of Artificial Sequence: Synthetic oligonucleotide
uguccgugucuccugcuga

SEQ ID NO: 2441771 - RNA, 19 nt, Artificial Sequence
  Description of Artificial Sequence: Synthetic oligonucleotide
uggguauggcagcaagaga

SEQ ID NO: 2441772 - RNA, 19 nt, Artificial Sequence
  Description of Artificial Sequence: Synthetic oligonucleotide
uaguaccacccauucagaa

SEQ ID NO: 2441773 - RNA, 19 nt, Artificial Sequence
  Description of Artificial Sequence: Synthetic oligonucleotide
gcagaugggaaggucaagg

SEQ ID NO: 2441774 - RNA, 19 nt, Artificial Sequence
  Description of Artificial Sequence: Synthetic oligonucleotide
cccaacaagccauauaauc

SEQ ID NO: 2441775 - RNA, 19 nt, Artificial Sequence
  Description of Artificial Sequence: Synthetic oligonucleotide
ugcucaaugcccagauguc

SEQ ID NO: 2441776 - RNA, 19 nt, Artificial Sequence
  Description of Artificial Sequence: Synthetic oligonucleotide
gaacuugaggucaguagga

SEQ ID NO: 2441777 - RNA, 19 nt, Artificial Sequence
  Description of Artificial Sequence: Synthetic oligonucleotide
agccuaggaggccaccauc

SEQ ID NO: 2441778 - RNA, 19 nt, Artificial Sequence
  Description of Artificial Sequence: Synthetic oligonucleotide
ccugguuuaagaugacgcc

SEQ ID NO: 2441779 - RNA, 19 nt, Artificial Sequence
  Description of Artificial Sequence: Synthetic oligonucleotide
gaaucagccuaggaggcca

SEQ ID NO: 2441780 - RNA, 19 nt, Artificial Sequence
  Description of Artificial Sequence: Synthetic oligonucleotide
aauguccgugucuccugcu

SEQ ID NO: 2441781 - RNA, 19 nt, Artificial Sequence
  Description of Artificial Sequence: Synthetic oligonucleotide
ggaaauagguggcauagua

SEQ ID NO: 2441782 - RNA, 19 nt, Artificial Sequence
  Description of Artificial Sequence: Synthetic oligonucleotide
ugaaucagccuaggaggcc

SEQ ID NO: 2441783 - RNA, 19 nt, Artificial Sequence
  Description of Artificial Sequence: Synthetic oligonucleotide
agagcaaaaugcuguucau

SEQ ID NO: 2441784 - RNA, 19 nt, Artificial Sequence
  Description of Artificial Sequence: Synthetic oligonucleotide
ugacguaccagaggaugug

SEQ ID NO: 2441785 - RNA, 19 nt, Artificial Sequence
  Description of Artificial Sequence: Synthetic oligonucleotide
uugccucucccuaccauaa

SEQ ID NO: 2441786 - RNA, 19 nt, Artificial Sequence
  Description of Artificial Sequence: Synthetic oligonucleotide
cuaggaggccaccaucaug

SEQ ID NO: 2441787 - RNA, 19 nt, Artificial Sequence
  Description of Artificial Sequence: Synthetic oligonucleotide
caugaggcucuucaugcuc

SEQ ID NO: 2441788 - RNA, 19 nt, Artificial Sequence
  Description of Artificial Sequence: Synthetic oligonucleotide
ccauucagaaagaacagga

SEQ ID NO: 2441789 - RNA, 19 nt, Artificial Sequence
  Description of Artificial Sequence: Synthetic oligonucleotide
cuaccacuuuucacaagug

SEQ ID NO: 2441790 - RNA, 19 nt, Artificial Sequence
  Description of Artificial Sequence: Synthetic oligonucleotide
aacuugaggucaguaggaa

SEQ ID NO: 2441791 - RNA, 19 nt, Artificial Sequence
  Description of Artificial Sequence: Synthetic oligonucleotide
ccacacuaaugcuaagagg

SEQ ID NO: 2441792 - RNA, 19 nt, Artificial Sequence
  Description of Artificial Sequence: Synthetic oligonucleotide
aacaggacuuccagaggug

SEQ ID NO: 2441793 - RNA, 19 nt, Artificial Sequence
  Description of Artificial Sequence: Synthetic oligonucleotide
cuuucccaggccaacuuga

SEQ ID NO: 2441794 - RNA, 19 nt, Artificial Sequence
  Description of Artificial Sequence: Synthetic oligonucleotide
acccauucagaaagaacag

SEQ ID NO: 2441795 - RNA, 19 nt, Artificial Sequence
  Description of Artificial Sequence: Synthetic oligonucleotide
guacauaggucugcagcag

SEQ ID NO: 2441796 - RNA, 19 nt, Artificial Sequence
  Description of Artificial Sequence: Synthetic oligonucleotide
guauuacuucaaugccaag

SEQ ID NO: 2441797 - RNA, 19 nt, Artificial Sequence
  Description of Artificial Sequence: Synthetic oligonucleotide
ggaagagaacuugagguca

SEQ ID NO: 2441798 - RNA, 19 nt, Artificial Sequence
  Description of Artificial Sequence: Synthetic oligonucleotide
cauacuggagaaggucgcc

SEQ ID NO: 2441799 - RNA, 19 nt, Artificial Sequence
  Description of Artificial Sequence: Synthetic oligonucleotide
aaucagccuaggaggccac

SEQ ID NO: 2441800 - RNA, 19 nt, Artificial Sequence
  Description of Artificial Sequence: Synthetic oligonucleotide
aggucaaggccacacuaau

SEQ ID NO: 2441801 - RNA, 19 nt, Artificial Sequence
  Description of Artificial Sequence: Synthetic oligonucleotide
agguggcauaguaccaccc

SEQ ID NO: 2441802 - RNA, 19 nt, Artificial Sequence
  Description of Artificial Sequence: Synthetic oligonucleotide
aaggucaaggccacacuaa

SEQ ID NO: 2441803 - RNA, 19 nt, Artificial Sequence
  Description of Artificial Sequence: Synthetic oligonucleotide
gacgccacugaccucaggu

SEQ ID NO: 2441804 - RNA, 19 nt, Artificial Sequence
  Description of Artificial Sequence: Synthetic oligonucleotide
ugagcaucucaagcagcag

SEQ ID NO: 2441805 - RNA, 19 nt, Artificial Sequence
  Description of Artificial Sequence: Synthetic oligonucleotide
acuugaccuaccacuuuuc

SEQ ID NO: 2441806 - RNA, 19 nt, Artificial Sequence
  Description of Artificial Sequence: Synthetic oligonucleotide
gaagcagcaucaccacauc

SEQ ID NO: 2441807 - RNA, 19 nt, Artificial Sequence
  Description of Artificial Sequence: Synthetic oligonucleotide
ucuggccaugaugaccaag

SEQ ID NO: 2441808 - RNA, 19 nt, Artificial Sequence
  Description of Artificial Sequence: Synthetic oligonucleotide
uggcauaguaccacccauu

SEQ ID NO: 2441809 - RNA, 19 nt, Artificial Sequence
  Description of Artificial Sequence: Synthetic oligonucleotide
cuagacggaguacauaggu

SEQ ID NO: 2441810 - RNA, 19 nt, Artificial Sequence
  Description of Artificial Sequence: Synthetic oligonucleotide
gagguaauaggaagccauc

SEQ ID NO: 2441811 - RNA, 19 nt, Artificial Sequence
  Description of Artificial Sequence: Synthetic oligonucleotide
ccaagauaaagaagcagca

SEQ ID NO: 2441812 - RNA, 19 nt, Artificial Sequence
  Description of Artificial Sequence: Synthetic oligonucleotide
cagaugucugugcuaagga

SEQ ID NO: 2441813 - RNA, 19 nt, Artificial Sequence
  Description of Artificial Sequence: Synthetic oligonucleotide
ucagccuaggaggccacca

SEQ ID NO: 2441814 - RNA, 19 nt, Artificial Sequence
  Description of Artificial Sequence: Synthetic oligonucleotide
uagguuggccguuggguau

SEQ ID NO: 2441815 - RNA, 19 nt, Artificial Sequence
  Description of Artificial Sequence: Synthetic oligonucleotide
cuugaccuaccacuuuuca

SEQ ID NO: 2441816 - RNA, 19 nt, Artificial Sequence
  Description of Artificial Sequence: Synthetic oligonucleotide
ggcauaguaccacccauuc

SEQ ID NO: 2441817 - RNA, 19 nt, Artificial Sequence
  Description of Artificial Sequence: Synthetic oligonucleotide
augggaaggucaaggccac

SEQ ID NO: 2441818 - RNA, 19 nt, Artificial Sequence
  Description of Artificial Sequence: Synthetic oligonucleotide
gcucaugcaggacagaugu

SEQ ID NO: 2441819 - RNA, 19 nt, Artificial Sequence
  Description of Artificial Sequence: Synthetic oligonucleotide
aucucaagcagcagcucug

SEQ ID NO: 2441820 - RNA, 19 nt, Artificial Sequence
  Description of Artificial Sequence: Synthetic oligonucleotide
uggcuuccguccuacugga

SEQ ID NO: 2441821 - RNA, 19 nt, Artificial Sequence
  Description of Artificial Sequence: Synthetic oligonucleotide
uuccguccuacuggaagcc

SEQ ID NO: 2441822 - RNA, 19 nt, Artificial Sequence
  Description of Artificial Sequence: Synthetic oligonucleotide
gaccuaccacuuuucacaa

SEQ ID NO: 2441823 - RNA, 19 nt, Artificial Sequence
  Description of Artificial Sequence: Synthetic oligonucleotide
auacuggagaaggucgcca

SEQ ID NO: 2441824 - RNA, 19 nt, Artificial Sequence
  Description of Artificial Sequence: Synthetic oligonucleotide
cccuaccauaaaauguccg

SEQ ID NO: 2441825 - RNA, 19 nt, Artificial Sequence
  Description of Artificial Sequence: Synthetic oligonucleotide
ugcugaugauccugguuua

SEQ ID NO: 2441826 - RNA, 19 nt, Artificial Sequence
  Description of Artificial Sequence: Synthetic oligonucleotide
uuucacaaguguggcugac

SEQ ID NO: 2441827 - RNA, 19 nt, Artificial Sequence
  Description of Artificial Sequence: Synthetic oligonucleotide
aucaccacauccaggacua

SEQ ID NO: 2441828 - RNA, 19 nt, Artificial Sequence
  Description of Artificial Sequence: Synthetic oligonucleotide
acacuaaugcuaagaggca

SEQ ID NO: 2441829 - RNA, 19 nt, Artificial Sequence
  Description of Artificial Sequence: Synthetic oligonucleotide
uacuucagauccuguccau

SEQ ID NO: 2441830 - RNA, 19 nt, Artificial Sequence
  Description of Artificial Sequence: Synthetic oligonucleotide
gguacauguacagagugcu

SEQ ID NO: 2441831 - RNA, 19 nt, Artificial Sequence
  Description of Artificial Sequence: Synthetic oligonucleotide
acuucaaugccaagauaaa

SEQ ID NO: 2441832 - RNA, 19 nt, Artificial Sequence
  Description of Artificial Sequence: Synthetic oligonucleotide
gauagcuucuagacggagu

SEQ ID NO: 2441833 - RNA, 19 nt, Artificial Sequence
  Description of Artificial Sequence: Synthetic oligonucleotide
gagugcuguggcuuccguc

SEQ ID NO: 2441834 - RNA, 19 nt, Artificial Sequence
  Description of Artificial Sequence: Synthetic oligonucleotide
gaaggucgccaacgugagc

SEQ ID NO: 2441835 - RNA, 19 nt, Artificial Sequence
  Description of Artificial Sequence: Synthetic oligonucleotide
agcuguuaggaagcccaag

SEQ ID NO: 2441836 - RNA, 19 nt, Artificial Sequence
  Description of Artificial Sequence: Synthetic oligonucleotide
auggcagcaagagaccuuu

SEQ ID NO: 2441837 - RNA, 19 nt, Artificial Sequence
  Description of Artificial Sequence: Synthetic oligonucleotide
cuagguuggccguugggua

SEQ ID NO: 2441838 - RNA, 19 nt, Artificial Sequence
  Description of Artificial Sequence: Synthetic oligonucleotide
agaugacgccacugaccuc

SEQ ID NO: 2441839 - RNA, 19 nt, Artificial Sequence
  Description of Artificial Sequence: Synthetic oligonucleotide
auaguaccacccauucaga

SEQ ID NO: 2441840 - RNA, 19 nt, Artificial Sequence
  Description of Artificial Sequence: Synthetic oligonucleotide
caucuuucgcuggcagagg

SEQ ID NO: 2441841 - RNA, 19 nt, Artificial Sequence
  Description of Artificial Sequence: Synthetic oligonucleotide
gagcuccagcaggaaauag

SEQ ID NO: 2441842 - RNA, 19 nt, Artificial Sequence
  Description of Artificial Sequence: Synthetic oligonucleotide
gguauggcagcaagagacc

SEQ ID NO: 2441843 - RNA, 19 nt, Artificial Sequence
  Description of Artificial Sequence: Synthetic oligonucleotide
ggaguacauaggucugcag

SEQ ID NO: 2441844 - RNA, 19 nt, Artificial Sequence
  Description of Artificial Sequence: Synthetic oligonucleotide
guacauguacagagugcug

SEQ ID NO: 2441845 - RNA, 19 nt, Artificial Sequence
  Description of Artificial Sequence: Synthetic oligonucleotide
augccaagauaaagaagca

SEQ ID NO: 2441846 - RNA, 19 nt, Artificial Sequence
  Description of Artificial Sequence: Synthetic oligonucleotide
uuucgcuggcagagguuuc

SEQ ID NO: 2441847 - RNA, 19 nt, Artificial Sequence
  Description of Artificial Sequence: Synthetic oligonucleotide
ggagaaggucgccaacgug

SEQ ID NO: 2441848 - RNA, 19 nt, Artificial Sequence
  Description of Artificial Sequence: Synthetic oligonucleotide
aggacagaugugguacaug

SEQ ID NO: 2441849 - RNA, 19 nt, Artificial Sequence
  Description of Artificial Sequence: Synthetic oligonucleotide
cucaugcaggacagaugug

SEQ ID NO: 2441850 - RNA, 19 nt, Artificial Sequence
  Description of Artificial Sequence: Synthetic oligonucleotide
cugcugaugauccugguuu

SEQ ID NO: 2441851 - RNA, 19 nt, Artificial Sequence
  Description of Artificial Sequence: Synthetic oligonucleotide
guuggguauggcagcaaga

SEQ ID NO: 2441852 - RNA, 19 nt, Artificial Sequence
  Description of Artificial Sequence: Synthetic oligonucleotide
aggaaauagguggcauagu

SEQ ID NO: 2441853 - RNA, 19 nt, Artificial Sequence
  Description of Artificial Sequence: Synthetic oligonucleotide
gguggcauaguaccaccca

SEQ ID NO: 2441854 - RNA, 19 nt, Artificial Sequence
  Description of Artificial Sequence: Synthetic oligonucleotide
ccaacgugagcaucucaag

SEQ ID NO: 2441855 - RNA, 19 nt, Artificial Sequence
  Description of Artificial Sequence: Synthetic oligonucleotide
ucauggcagaugggaaggu

SEQ ID NO: 2441856 - RNA, 19 nt, Artificial Sequence
  Description of Artificial Sequence: Synthetic oligonucleotide
caucucaagcagcagcucu

SEQ ID NO: 2441857 - RNA, 19 nt, Artificial Sequence
  Description of Artificial Sequence: Synthetic oligonucleotide
uccguccuacuggaagccc

SEQ ID NO: 2441858 - RNA, 19 nt, Artificial Sequence
  Description of Artificial Sequence: Synthetic oligonucleotide
ccacccauucagaaagaac

SEQ ID NO: 2441859 - RNA, 19 nt, Artificial Sequence
  Description of Artificial Sequence: Synthetic oligonucleotide
accuuucccaggccaacuu

SEQ ID NO: 2441860 - RNA, 19 nt, Artificial Sequence
  Description of Artificial Sequence: Synthetic oligonucleotide
cguauuacuucaaugccaa

SEQ ID NO: 2441861 - RNA, 19 nt, Artificial Sequence
  Description of Artificial Sequence: Synthetic oligonucleotide
guaccagaggaugugggcu

SEQ ID NO: 2441862 - RNA, 19 nt, Artificial Sequence
  Description of Artificial Sequence: Synthetic oligonucleotide
gguaggugcucaaugccca

SEQ ID NO: 2441863 - RNA, 19 nt, Artificial Sequence
  Description of Artificial Sequence: Synthetic oligonucleotide
cuaaugcuaagaggcaucu

SEQ ID NO: 2441864 - RNA, 19 nt, Artificial Sequence
  Description of Artificial Sequence: Synthetic oligonucleotide
gguaauaggaagccaucau

SEQ ID NO: 2441865 - RNA, 19 nt, Artificial Sequence
  Description of Artificial Sequence: Synthetic oligonucleotide
cguaccagaggaugugggc

SEQ ID NO: 2441866 - RNA, 19 nt, Artificial Sequence
  Description of Artificial Sequence: Synthetic oligonucleotide
accacccauucagaaagaa

SEQ ID NO: 2441867 - RNA, 19 nt, Artificial Sequence
  Description of Artificial Sequence: Synthetic oligonucleotide
gaccuuuauacaggaagau

SEQ ID NO: 2441868 - RNA, 19 nt, Artificial Sequence
  Description of Artificial Sequence: Synthetic oligonucleotide
uccgugucuccugcugaug

SEQ ID NO: 2441869 - RNA, 19 nt, Artificial Sequence
  Description of Artificial Sequence: Synthetic oligonucleotide
aaggagcucuggccaugau

SEQ ID NO: 2441870 - RNA, 19 nt, Artificial Sequence
  Description of Artificial Sequence: Synthetic oligonucleotide
augugggcugucaccagcu

SEQ ID NO: 2441871 - RNA, 19 nt, Artificial Sequence
  Description of Artificial Sequence: Synthetic oligonucleotide
ggaagcuguuaggaagccc

SEQ ID NO: 2441872 - RNA, 19 nt, Artificial Sequence
  Description of Artificial Sequence: Synthetic oligonucleotide
aagcuguuaggaagcccaa

SEQ ID NO: 2441873 - RNA, 19 nt, Artificial Sequence
  Description of Artificial Sequence: Synthetic oligonucleotide
cagcaggagguaauaggaa

SEQ ID NO: 2441874 - RNA, 19 nt, Artificial Sequence
  Description of Artificial Sequence: Synthetic oligonucleotide
ccuaccacuuuucacaagu

SEQ ID NO: 2441875 - RNA, 19 nt, Artificial Sequence
  Description of Artificial Sequence: Synthetic oligonucleotide
caugcaggacagauguggu

SEQ ID NO: 2441876 - RNA, 19 nt, Artificial Sequence
  Description of Artificial Sequence: Synthetic oligonucleotide
acgccacugaccucaggua

SEQ ID NO: 2441877 - RNA, 19 nt, Artificial Sequence
  Description of Artificial Sequence: Synthetic oligonucleotide
ccuacuggaagcccaacaa

SEQ ID NO: 2441878 - RNA, 19 nt, Artificial Sequence
  Description of Artificial Sequence: Synthetic oligonucleotide
ugccucucccuaccauaaa

SEQ ID NO: 2441879 - RNA, 19 nt, Artificial Sequence
  Description of Artificial Sequence: Synthetic oligonucleotide
ggagguaauaggaagccau

SEQ ID NO: 2441880 - RNA, 19 nt, Artificial Sequence
  Description of Artificial Sequence: Synthetic oligonucleotide
agguuggccguuggguaug

SEQ ID NO: 2441881 - RNA, 19 nt, Artificial Sequence
  Description of Artificial Sequence: Synthetic oligonucleotide
uaaugcuaagaggcaucuu

SEQ ID NO: 2441882 - RNA, 19 nt, Artificial Sequence
  Description of Artificial Sequence: Synthetic oligonucleotide
ggugcucaaugcccagaug

SEQ ID NO: 2441883 - RNA, 19 nt, Artificial Sequence
  Description of Artificial Sequence: Synthetic oligonucleotide
gcauaguaccacccauuca

SEQ ID NO: 2441884 - RNA, 19 nt, Artificial Sequence
  Description of Artificial Sequence: Synthetic oligonucleotide
guauggcagcaagagaccu

SEQ ID NO: 2441885 - RNA, 19 nt, Artificial Sequence
  Description of Artificial Sequence: Synthetic oligonucleotide
ccuaccauaaaauguccgu

SEQ ID NO: 2441886 - RNA, 19 nt, Artificial Sequence
  Description of Artificial Sequence: Synthetic oligonucleotide
ggaugugggcugucaccag

SEQ ID NO: 2441887 - RNA, 19 nt, Artificial Sequence
  Description of Artificial Sequence: Synthetic oligonucleotide
cuguucaugauagcuucua

SEQ ID NO: 2441888 - RNA, 19 nt, Artificial Sequence
  Description of Artificial Sequence: Synthetic oligonucleotide
guggcauaguaccacccau

SEQ ID NO: 2441889 - RNA, 19 nt, Artificial Sequence
  Description of Artificial Sequence: Synthetic oligonucleotide
ucaccacauccaggacuag

SEQ ID NO: 2441890 - RNA, 19 nt, Artificial Sequence
  Description of Artificial Sequence: Synthetic oligonucleotide
cguuggguauggcagcaag

SEQ ID NO: 2441891 - RNA, 19 nt, Artificial Sequence
  Description of Artificial Sequence: Synthetic oligonucleotide
agagaccuuuauacaggaa

SEQ ID NO: 2441892 - RNA, 19 nt, Artificial Sequence
  Description of Artificial Sequence: Synthetic oligonucleotide
gccaacgugagcaucucaa

SEQ ID NO: 2441893 - RNA, 19 nt, Artificial Sequence
  Description of Artificial Sequence: Synthetic oligonucleotide
gcaggaaauagguggcaua

SEQ ID NO: 2441894 - RNA, 19 nt, Artificial Sequence
  Description of Artificial Sequence: Synthetic oligonucleotide
cuucuagacggaguacaua

SEQ ID NO: 2441895 - RNA, 19 nt, Artificial Sequence
  Description of Artificial Sequence: Synthetic oligonucleotide
gucgccaacgugagcaucu

SEQ ID NO: 2441896 - RNA, 19 nt, Artificial Sequence
  Description of Artificial Sequence: Synthetic oligonucleotide
aggucgccaacgugagcau

SEQ ID NO: 2441897 - RNA, 19 nt, Artificial Sequence
  Description of Artificial Sequence: Synthetic oligonucleotide
gguguugaggacaaccuuu

SEQ ID NO: 2441898 - RNA, 19 nt, Artificial Sequence
  Description of Artificial Sequence: Synthetic oligonucleotide
cacuaaugcuaagaggcau

SEQ ID NO: 2441899 - RNA, 19 nt, Artificial Sequence
  Description of Artificial Sequence: Synthetic oligonucleotide
gcaggacagaugugguaca

SEQ ID NO: 2441900 - RNA, 19 nt, Artificial Sequence
  Description of Artificial Sequence: Synthetic oligonucleotide
guacagagugcuguggcuu

SEQ ID NO: 2441901 - RNA, 19 nt, Artificial Sequence
  Description of Artificial Sequence: Synthetic oligonucleotide
caaggagcucuggccauga

SEQ ID NO: 2441902 - RNA, 19 nt, Artificial Sequence
  Description of Artificial Sequence: Synthetic oligonucleotide
uggcagcaagagaccuuua

SEQ ID NO: 2441903 - RNA, 19 nt, Artificial Sequence
  Description of Artificial Sequence: Synthetic oligonucleotide
ccaucauggcagaugggaa

SEQ ID NO: 2441904 - RNA, 19 nt, Artificial Sequence
  Description of Artificial Sequence: Synthetic oligonucleotide
cacaaguguggcugacgua

SEQ ID NO: 2441905 - RNA, 19 nt, Artificial Sequence
  Description of Artificial Sequence: Synthetic oligonucleotide
ggcagcaagagaccuuuau

SEQ ID NO: 2441906 - RNA, 19 nt, Artificial Sequence
  Description of Artificial Sequence: Synthetic oligonucleotide
ucgccaacgugagcaucuc

SEQ ID NO: 2441907 - RNA, 19 nt, Artificial Sequence
  Description of Artificial Sequence: Synthetic oligonucleotide
gguuggccguuggguaugg

SEQ ID NO: 2441908 - RNA, 19 nt, Artificial Sequence
  Description of Artificial Sequence: Synthetic oligonucleotide
ggaaggucaaggccacacu

SEQ ID NO: 2441909 - RNA, 19 nt, Artificial Sequence
  Description of Artificial Sequence: Synthetic oligonucleotide
ggacuuccagagguguuga

SEQ ID NO: 2441910 - RNA, 19 nt, Artificial Sequence
  Description of Artificial Sequence: Synthetic oligonucleotide
gcccagaugucugugcuaa

SEQ ID NO: 2441911 - RNA, 19 nt, Artificial Sequence
  Description of Artificial Sequence: Synthetic oligonucleotide
ccgugucuccugcugauga

SEQ ID NO: 2441912 - RNA, 19 nt, Artificial Sequence
  Description of Artificial Sequence: Synthetic oligonucleotide
gaagcccaacaagccauau

SEQ ID NO: 2441913 - RNA, 19 nt, Artificial Sequence
  Description of Artificial Sequence: Synthetic oligonucleotide
cagcagcucugaaccacaa

SEQ ID NO: 2441914 - RNA, 19 nt, Artificial Sequence
  Description of Artificial Sequence: Synthetic oligonucleotide
augacgccacugaccucag

SEQ ID NO: 2441915 - RNA, 19 nt, Artificial Sequence
  Description of Artificial Sequence: Synthetic oligonucleotide
guccuacuggaagcccaac

SEQ ID NO: 2441916 - RNA, 19 nt, Artificial Sequence
  Description of Artificial Sequence: Synthetic oligonucleotide
caccagcuggaauucuuau

SEQ ID NO: 2441917 - RNA, 19 nt, Artificial Sequence
  Description of Artificial Sequence: Synthetic oligonucleotide
ccguccuacuggaagccca

SEQ ID NO: 2441918 - RNA, 19 nt, Artificial Sequence
  Description of Artificial Sequence: Synthetic oligonucleotide
guuggccguuggguauggc

SEQ ID NO: 2441919 - RNA, 19 nt, Artificial Sequence
  Description of Artificial Sequence: Synthetic oligonucleotide
ccaacuugaccuaccacuu

SEQ ID NO: 2441920 - RNA, 19 nt, Artificial Sequence
  Description of Artificial Sequence: Synthetic oligonucleotide
ggucaguaggaagcuguua

SEQ ID NO: 2441921 - RNA, 19 nt, Artificial Sequence
  Description of Artificial Sequence: Synthetic oligonucleotide
cccagaugucugugcuaag

SEQ ID NO: 2441922 - RNA, 19 nt, Artificial Sequence
  Description of Artificial Sequence: Synthetic oligonucleotide
guccgugucuccugcugau

SEQ ID NO: 2441923 - RNA, 19 nt, Artificial Sequence
  Description of Artificial Sequence: Synthetic oligonucleotide
gcugaugauccugguuuaa

SEQ ID NO: 2441924 - RNA, 19 nt, Artificial Sequence
  Description of Artificial Sequence: Synthetic oligonucleotide
caacuugaccuaccacuuu

SEQ ID NO: 2441925 - RNA, 19 nt, Artificial Sequence
  Description of Artificial Sequence: Synthetic oligonucleotide
ggagcuccagcaggaaaua

SEQ ID NO: 2441926 - RNA, 19 nt, Artificial Sequence
  Description of Artificial Sequence: Synthetic oligonucleotide
ggucgccaacgugagcauc

SEQ ID NO: 2441927 - RNA, 19 nt, Artificial Sequence
  Description of Artificial Sequence: Synthetic oligonucleotide
gccguuggguauggcagca

SEQ ID NO: 2441928 - RNA, 19 nt, Artificial Sequence
  Description of Artificial Sequence: Synthetic oligonucleotide
ccucucccuaccauaaaau

SEQ ID NO: 2441929 - RNA, 19 nt, Artificial Sequence
  Description of Artificial Sequence: Synthetic oligonucleotide
caggacagaugugguacau

SEQ ID NO: 2441930 - RNA, 19 nt, Artificial Sequence
  Description of Artificial Sequence: Synthetic oligonucleotide
gcuucuagacggaguacau

SEQ ID NO: 2441931 - RNA, 19 nt, Artificial Sequence
  Description of Artificial Sequence: Synthetic oligonucleotide
cagccuaggaggccaccau

SEQ ID NO: 2441932 - RNA, 19 nt, Artificial Sequence
  Description of Artificial Sequence: Synthetic oligonucleotide
cucuggccaugaugaccaa

SEQ ID NO: 2441933 - RNA, 19 nt, Artificial Sequence
  Description of Artificial Sequence: Synthetic oligonucleotide
ccaggacuagguuggccgu

SEQ ID NO: 2441934 - RNA, 19 nt, Artificial Sequence
  Description of Artificial Sequence: Synthetic oligonucleotide
cguccuacuggaagcccaa

SEQ ID NO: 2441935 - RNA, 19 nt, Artificial Sequence
  Description of Artificial Sequence: Synthetic oligonucleotide
gguuucccuuguacccaaa

SEQ ID NO: 2441936 - RNA, 19 nt, Artificial Sequence
  Description of Artificial Sequence: Synthetic oligonucleotide
caggacuagguuggccguu

SEQ ID NO: 2441937 - RNA, 19 nt, Artificial Sequence
  Description of Artificial Sequence: Synthetic oligonucleotide
ccuaggaggccaccaucau

SEQ ID NO: 2441938 - RNA, 19 nt, Artificial Sequence
  Description of Artificial Sequence: Synthetic oligonucleotide
ggcuuccguccuacuggaa

SEQ ID NO: 2441939 - RNA, 19 nt, Artificial Sequence
  Description of Artificial Sequence: Synthetic oligonucleotide
cgccaacgugagcaucuca

SEQ ID NO: 2441940 - RNA, 19 nt, Artificial Sequence
  Description of Artificial Sequence: Synthetic oligonucleotide
ggcugacguaccagaggau

SEQ ID NO: 2441941 - RNA, 19 nt, Artificial Sequence
  Description of Artificial Sequence: Synthetic oligonucleotide
ccguuggguauggcagcaa

SEQ ID NO: 2441942 - RNA, 19 nt, Artificial Sequence
  Description of Artificial Sequence: Synthetic oligonucleotide
aauaauuaacaacugauca

SEQ ID NO: 2441943 - RNA, 19 nt, Artificial Sequence
  Description of Artificial Sequence: Synthetic oligonucleotide
agauauaacaaaaugauac

SEQ ID NO: 2441944 - RNA, 19 nt, Artificial Sequence
  Description of Artificial Sequence: Synthetic oligonucleotide
auuauuucauaccaguuag

SEQ ID NO: 2441945 - RNA, 19 nt, Artificial Sequence
  Description of Artificial Sequence: Synthetic oligonucleotide
ugaauuauuauuucauacc

SEQ ID NO: 2441946 - RNA, 19 nt, Artificial Sequence
  Description of Artificial Sequence: Synthetic oligonucleotide
acauuuaucuuuugcauac

SEQ ID NO: 2441947 - RNA, 19 nt, Artificial Sequence
  Description of Artificial Sequence: Synthetic oligonucleotide
aacaacguaacaaauuugg

SEQ ID NO: 2441948 - RNA, 19 nt, Artificial Sequence
  Description of Artificial Sequence: Synthetic oligonucleotide
aaaacaacguaacaaauuu

SEQ ID NO: 2441949 - RNA, 19 nt, Artificial Sequence
  Description of Artificial Sequence: Synthetic oligonucleotide
uuugcauacaauagcacag

SEQ ID NO: 2441950 - RNA, 19 nt, Artificial Sequence
  Description of Artificial Sequence: Synthetic oligonucleotide
uuaacaacugaucaguacu

SEQ ID NO: 2441951 - RNA, 19 nt, Artificial Sequence
  Description of Artificial Sequence: Synthetic oligonucleotide
aaaaugauacaauauuuau

SEQ ID NO: 2441952 - RNA, 19 nt, Artificial Sequence
  Description of Artificial Sequence: Synthetic oligonucleotide
uuaaagguugucauaaugu

SEQ ID NO: 2441953 - RNA, 19 nt, Artificial Sequence
  Description of Artificial Sequence: Synthetic oligonucleotide
aaagauauaacaaaaugau

SEQ ID NO: 2441954 - RNA, 19 nt, Artificial Sequence
  Description of Artificial Sequence: Synthetic oligonucleotide
aucuuuugcauacaauagc

SEQ ID NO: 2441955 - RNA, 19 nt, Artificial Sequence
  Description of Artificial Sequence: Synthetic oligonucleotide
uauguuaguguccaaaacu

SEQ ID NO: 2441956 - RNA, 19 nt, Artificial Sequence
  Description of Artificial Sequence: Synthetic oligonucleotide
aauuaugacacugacaaaa

SEQ ID NO: 2441957 - RNA, 19 nt, Artificial Sequence
  Description of Artificial Sequence: Synthetic oligonucleotide
acaaguuacacuaaugugg

SEQ ID NO: 2441958 - RNA, 19 nt, Artificial Sequence
  Description of Artificial Sequence: Synthetic oligonucleotide
auaauuaacaacugaucag

SEQ ID NO: 2441959 - RNA, 19 nt, Artificial Sequence
  Description of Artificial Sequence: Synthetic oligonucleotide
auuacauuuaucuuuugca

SEQ ID NO: 2441960 - RNA, 19 nt, Artificial Sequence
  Description of Artificial Sequence: Synthetic oligonucleotide
ugauacaauauuuauugca

SEQ ID NO: 2441961 - RNA, 19 nt, Artificial Sequence
  Description of Artificial Sequence: Synthetic oligonucleotide
aacugaucaguacuuaaag

SEQ ID NO: 2441962 - RNA, 19 nt, Artificial Sequence
  Description of Artificial Sequence: Synthetic oligonucleotide
auuauuauuucauaccagu

SEQ ID NO: 2441963 - RNA, 19 nt, Artificial Sequence
  Description of Artificial Sequence: Synthetic oligonucleotide
aacaaguuacacuaaugug

SEQ ID NO: 2441964 - RNA, 19 nt, Artificial Sequence
  Description of Artificial Sequence: Synthetic oligonucleotide
aacguaacaaauuuggcuu

SEQ ID NO: 2441965 - RNA, 19 nt, Artificial Sequence
  Description of Artificial Sequence: Synthetic oligonucleotide
uugaauuauuauuucauac

SEQ ID NO: 2441966 - RNA, 19 nt, Artificial Sequence
  Description of Artificial Sequence: Synthetic oligonucleotide
uuaaauuccccuccccucg

SEQ ID NO: 2441967 - RNA, 19 nt, Artificial Sequence
  Description of Artificial Sequence: Synthetic oligonucleotide
auacaauauuuauugcagc

SEQ ID NO: 2441968 - RNA, 19 nt, Artificial Sequence
  Description of Artificial Sequence: Synthetic oligonucleotide
auuaacaacugaucaguac

SEQ ID NO: 2441969 - RNA, 19 nt, Artificial Sequence
  Description of Artificial Sequence: Synthetic oligonucleotide
uuaucuuuugcauacaaua

SEQ ID NO: 2441970 - RNA, 19 nt, Artificial Sequence
  Description of Artificial Sequence: Synthetic oligonucleotide
uuuaguaaaguagaauuug

SEQ ID NO: 2441971 - RNA, 19 nt, Artificial Sequence
  Description of Artificial Sequence: Synthetic oligonucleotide
uuaaagaaaacaaguuaca

SEQ ID NO: 2441972 - RNA, 19 nt, Artificial Sequence
  Description of Artificial Sequence: Synthetic oligonucleotide
uauugcagcaacaacaaau

SEQ ID NO: 2441973 - RNA, 19 nt, Artificial Sequence
  Description of Artificial Sequence: Synthetic oligonucleotide
uuuugcauacaauagcaca

SEQ ID NO: 2441974 - RNA, 19 nt, Artificial Sequence
  Description of Artificial Sequence: Synthetic oligonucleotide
caauguguugucaucaucc

SEQ ID NO: 2441975 - RNA, 19 nt, Artificial Sequence
  Description of Artificial Sequence: Synthetic oligonucleotide
aacaacaaauuaaagguug

SEQ ID NO: 2441976 - RNA, 19 nt, Artificial Sequence
  Description of Artificial Sequence: Synthetic oligonucleotide
caaagauauaacaaaauga

SEQ ID NO: 2441977 - RNA, 19 nt, Artificial Sequence
  Description of Artificial Sequence: Synthetic oligonucleotide
aaauuaaagguugucauaa

SEQ ID NO: 2441978 - RNA, 19 nt, Artificial Sequence
  Description of Artificial Sequence: Synthetic oligonucleotide
aaaauaaucuccaauggaa

SEQ ID NO: 2441979 - RNA, 19 nt, Artificial Sequence
  Description of Artificial Sequence: Synthetic oligonucleotide
ucagaaaacagcaucuuaa

SEQ ID NO: 2441980 - RNA, 19 nt, Artificial Sequence
  Description of Artificial Sequence: Synthetic oligonucleotide
aauaugaagucuucucaug

SEQ ID NO: 2441981 - RNA, 19 nt, Artificial Sequence
  Description of Artificial Sequence: Synthetic oligonucleotide
ucaccuucuaggaugauug

SEQ ID NO: 2441982 - RNA, 19 nt, Artificial Sequence
  Description of Artificial Sequence: Synthetic oligonucleotide
uagaauuugaauuauuauu

SEQ ID NO: 2441983 - RNA, 19 nt, Artificial Sequence
  Description of Artificial Sequence: Synthetic oligonucleotide
aacuuaaauuccccucccc

SEQ ID NO: 2441984 - RNA, 19 nt, Artificial Sequence
  Description of Artificial Sequence: Synthetic oligonucleotide
auuaaagguugucauaaug

SEQ ID NO: 2441985 - RNA, 19 nt, Artificial Sequence
  Description of Artificial Sequence: Synthetic oligonucleotide
uauuauuucauaccaguua

SEQ ID NO: 2441986 - RNA, 19 nt, Artificial Sequence
  Description of Artificial Sequence: Synthetic oligonucleotide
uuaguaaaguagaauuuga

SEQ ID NO: 2441987 - RNA, 19 nt, Artificial Sequence
  Description of Artificial Sequence: Synthetic oligonucleotide
auaacaaaaugauacaaua

SEQ ID NO: 2441988 - RNA, 19 nt, Artificial Sequence
  Description of Artificial Sequence: Synthetic oligonucleotide
auugaguggcuucuuauuc

SEQ ID NO: 2441989 - RNA, 19 nt, Artificial Sequence
  Description of Artificial Sequence: Synthetic oligonucleotide
aauagcacagacaauuucu

SEQ ID NO: 2441990 - RNA, 19 nt, Artificial Sequence
  Description of Artificial Sequence: Synthetic oligonucleotide
uaaagguugucauaaugug

SEQ ID NO: 2441991 - RNA, 19 nt, Artificial Sequence
  Description of Artificial Sequence: Synthetic oligonucleotide
uaauuaacaacugaucagu

SEQ ID NO: 2441992 - RNA, 19 nt, Artificial Sequence
  Description of Artificial Sequence: Synthetic oligonucleotide
cacuuaauaauuuaaauua

SEQ ID NO: 2441993 - RNA, 19 nt, Artificial Sequence
  Description of Artificial Sequence: Synthetic oligonucleotide
augauacaauauuuauugc

SEQ ID NO: 2441994 - RNA, 19 nt, Artificial Sequence
  Description of Artificial Sequence: Synthetic oligonucleotide
ugugguuggaggaaggaca

SEQ ID NO: 2441995 - RNA, 19 nt, Artificial Sequence
  Description of Artificial Sequence: Synthetic oligonucleotide
acuuaauaauuuaaauuac

SEQ ID NO: 2441996 - RNA, 19 nt, Artificial Sequence
  Description of Artificial Sequence: Synthetic oligonucleotide
ugauuggcaucaaacaaug

SEQ ID NO: 2441997 - RNA, 19 nt, Artificial Sequence
  Description of Artificial Sequence: Synthetic oligonucleotide
aagguugucauaaugugug

SEQ ID NO: 2441998 - RNA, 19 nt, Artificial Sequence
  Description of Artificial Sequence: Synthetic oligonucleotide
agagcuguuccaaauauac

SEQ ID NO: 2441999 - RNA, 19 nt, Artificial Sequence
  Description of Artificial Sequence: Synthetic oligonucleotide
acaaauuaaagguugucau

SEQ ID NO: 2442000 - RNA, 19 nt, Artificial Sequence
  Description of Artificial Sequence: Synthetic oligonucleotide
aguaaaguagaauuugaau

SEQ ID NO: 2442001 - RNA, 19 nt, Artificial Sequence
  Description of Artificial Sequence: Synthetic oligonucleotide
acuuaaagaaaacaaguua

SEQ ID NO: 2442002 - RNA, 19 nt, Artificial Sequence
  Description of Artificial Sequence: Synthetic oligonucleotide
aguuaguuguggcuuauag

SEQ ID NO: 2442003 - RNA, 19 nt, Artificial Sequence
  Description of Artificial Sequence: Synthetic oligonucleotide
agaggugucaacuccaugu

SEQ ID NO: 2442004 - RNA, 19 nt, Artificial Sequence
  Description of Artificial Sequence: Synthetic oligonucleotide
ucaugaaaggcacagucuc

SEQ ID NO: 2442005 - RNA, 19 nt, Artificial Sequence
  Description of Artificial Sequence: Synthetic oligonucleotide
uuuucuauguuagugucca

SEQ ID NO: 2442006 - RNA, 19 nt, Artificial Sequence
  Description of Artificial Sequence: Synthetic oligonucleotide
ucuaggaugauuggcauca

SEQ ID NO: 2442007 - RNA, 19 nt, Artificial Sequence
  Description of Artificial Sequence: Synthetic oligonucleotide
ucucaugaaaggcacaguc

SEQ ID NO: 2442008 - RNA, 19 nt, Artificial Sequence
  Description of Artificial Sequence: Synthetic oligonucleotide
aguuacacuaaugugguug

SEQ ID NO: 2442009 - RNA, 19 nt, Artificial Sequence
  Description of Artificial Sequence: Synthetic oligonucleotide
guuacacuaaugugguugg

SEQ ID NO: 2442010 - RNA, 19 nt, Artificial Sequence
  Description of Artificial Sequence: Synthetic oligonucleotide
agcuguuccaaauauacaa

SEQ ID NO: 2442011 - RNA, 19 nt, Artificial Sequence
  Description of Artificial Sequence: Synthetic oligonucleotide
ugugcaacuuaaauucccc

SEQ ID NO: 2442012 - RNA, 19 nt, Artificial Sequence
  Description of Artificial Sequence: Synthetic oligonucleotide
aguccaauaacagagcugu

SEQ ID NO: 2442013 - RNA, 19 nt, Artificial Sequence
  Description of Artificial Sequence: Synthetic oligonucleotide
caauauuuauugcagcaac

SEQ ID NO: 2442014 - RNA, 19 nt, Artificial Sequence
  Description of Artificial Sequence: Synthetic oligonucleotide
guuaguguccaaaacuccg

SEQ ID NO: 2442015 - RNA, 19 nt, Artificial Sequence
  Description of Artificial Sequence: Synthetic oligonucleotide
ugaucaguacuuaaagaaa

SEQ ID NO: 2442016 - RNA, 19 nt, Artificial Sequence
  Description of Artificial Sequence: Synthetic oligonucleotide
uuagacauagaaaucuguu

SEQ ID NO: 2442017 - RNA, 19 nt, Artificial Sequence
  Description of Artificial Sequence: Synthetic oligonucleotide
uccaaaacuccguaucucc

SEQ ID NO: 2442018 - RNA, 19 nt, Artificial Sequence
  Description of Artificial Sequence: Synthetic oligonucleotide
auaugaagucuucucauga

SEQ ID NO: 2442019 - RNA, 19 nt, Artificial Sequence
  Description of Artificial Sequence: Synthetic oligonucleotide
agaauuugaauuauuauuu

SEQ ID NO: 2442020 - RNA, 19 nt, Artificial Sequence
  Description of Artificial Sequence: Synthetic oligonucleotide
agucucaccuucuaggaug

SEQ ID NO: 2442021 - RNA, 19 nt, Artificial Sequence
  Description of Artificial Sequence: Synthetic oligonucleotide
uucuagaggugucaacucc

SEQ ID NO: 2442022 - RNA, 19 nt, Artificial Sequence
  Description of Artificial Sequence: Synthetic oligonucleotide
aauguguugucaucauccu

SEQ ID NO: 2442023 - RNA, 19 nt, Artificial Sequence
  Description of Artificial Sequence: Synthetic oligonucleotide
cuuauaguucuuuaaauua

SEQ ID NO: 2442024 - RNA, 19 nt, Artificial Sequence
  Description of Artificial Sequence: Synthetic oligonucleotide
uaaucuccaauggaaaagc

SEQ ID NO: 2442025 - RNA, 19 nt, Artificial Sequence
  Description of Artificial Sequence: Synthetic oligonucleotide
aaguuuugcgauuccuucu

SEQ ID NO: 2442026 - RNA, 19 nt, Artificial Sequence
  Description of Artificial Sequence: Synthetic oligonucleotide
agaaaucuguucucaguag

SEQ ID NO: 2442027 - RNA, 19 nt, Artificial Sequence
  Description of Artificial Sequence: Synthetic oligonucleotide
ucuauguuaguguccaaaa

SEQ ID NO: 2442028 - RNA, 19 nt, Artificial Sequence
  Description of Artificial Sequence: Synthetic oligonucleotide
uaguaaaguagaauuugaa

SEQ ID NO: 2442029 - RNA, 19 nt, Artificial Sequence
  Description of Artificial Sequence: Synthetic oligonucleotide
cacgaaguacaccagcacg

SEQ ID NO: 2442030 - RNA, 19 nt, Artificial Sequence
  Description of Artificial Sequence: Synthetic oligonucleotide
auagaaaucuguucucagu

SEQ ID NO: 2442031 - RNA, 19 nt, Artificial Sequence
  Description of Artificial Sequence: Synthetic oligonucleotide
ucuagaggugucaacucca

SEQ ID NO: 2442032 - RNA, 19 nt, Artificial Sequence
  Description of Artificial Sequence: Synthetic oligonucleotide
accacuuaauaauuuaaau

SEQ ID NO: 2442033 - RNA, 19 nt, Artificial Sequence
  Description of Artificial Sequence: Synthetic oligonucleotide
uuauuauuucauaccaguu

SEQ ID NO: 2442034 - RNA, 19 nt, Artificial Sequence
  Description of Artificial Sequence: Synthetic oligonucleotide
ugggucaugggcuugucgc

SEQ ID NO: 2442035 - RNA, 19 nt, Artificial Sequence
  Description of Artificial Sequence: Synthetic oligonucleotide
aauaacagagcuguuccaa

SEQ ID NO: 2442036 - RNA, 19 nt, Artificial Sequence
  Description of Artificial Sequence: Synthetic oligonucleotide
uugaguggcuucuuauucc

SEQ ID NO: 2442037 - RNA, 19 nt, Artificial Sequence
  Description of Artificial Sequence: Synthetic oligonucleotide
uguaccacuuaauaauuua

SEQ ID NO: 2442038 - RNA, 19 nt, Artificial Sequence
  Description of Artificial Sequence: Synthetic oligonucleotide
guaucuccuaaguuuugcg

SEQ ID NO: 2442039 - RNA, 19 nt, Artificial Sequence
  Description of Artificial Sequence: Synthetic oligonucleotide
uguccaaaacuccguaucu

SEQ ID NO: 2442040 - RNA, 19 nt, Artificial Sequence
  Description of Artificial Sequence: Synthetic oligonucleotide
cauaccaguuaguuguggc

SEQ ID NO: 2442041 - RNA, 19 nt, Artificial Sequence
  Description of Artificial Sequence: Synthetic oligonucleotide
acugaucaguacuuaaaga

SEQ ID NO: 2442042 - RNA, 19 nt, Artificial Sequence
  Description of Artificial Sequence: Synthetic oligonucleotide
acaacguaacaaauuuggc

SEQ ID NO: 2442043 - RNA, 19 nt, Artificial Sequence
  Description of Artificial Sequence: Synthetic oligonucleotide
uaccacuuaauaauuuaaa

SEQ ID NO: 2442044 - RNA, 19 nt, Artificial Sequence
  Description of Artificial Sequence: Synthetic oligonucleotide
cugaccacgaaguacacca

SEQ ID NO: 2442045 - RNA, 19 nt, Artificial Sequence
  Description of Artificial Sequence: Synthetic oligonucleotide
uaucuccuaaguuuugcga

SEQ ID NO: 2442046 - RNA, 19 nt, Artificial Sequence
  Description of Artificial Sequence: Synthetic oligonucleotide
uucucaguagaaauaugaa

SEQ ID NO: 2442047 - RNA, 19 nt, Artificial Sequence
  Description of Artificial Sequence: Synthetic oligonucleotide
aaagguugucauaaugugu

SEQ ID NO: 2442048 - RNA, 19 nt, Artificial Sequence
  Description of Artificial Sequence: Synthetic oligonucleotide
aacuccguaucuccuaagu

SEQ ID NO: 2442049 - RNA, 19 nt, Artificial Sequence
  Description of Artificial Sequence: Synthetic oligonucleotide
aaaacuccguaucuccuaa

SEQ ID NO: 2442050 - RNA, 19 nt, Artificial Sequence
  Description of Artificial Sequence: Synthetic oligonucleotide
uuaguguccaaaacuccgu

SEQ ID NO: 2442051 - RNA, 19 nt, Artificial Sequence
  Description of Artificial Sequence: Synthetic oligonucleotide
uggcuuauaguucuuuaaa

SEQ ID NO: 2442052 - RNA, 19 nt, Artificial Sequence
  Description of Artificial Sequence: Synthetic oligonucleotide
ucuguucucaguagaaaua

SEQ ID NO: 2442053 - RNA, 19 nt, Artificial Sequence
  Description of Artificial Sequence: Synthetic oligonucleotide
ugcaacuuaaauuccccuc

SEQ ID NO: 2442054 - RNA, 19 nt, Artificial Sequence
  Description of Artificial Sequence: Synthetic oligonucleotide
uauuucauaccaguuaguu

SEQ ID NO: 2442055 - RNA, 19 nt, Artificial Sequence
  Description of Artificial Sequence: Synthetic oligonucleotide
gaaguacaccagcacggcg

SEQ ID NO: 2442056 - RNA, 19 nt, Artificial Sequence
  Description of Artificial Sequence: Synthetic oligonucleotide
aaacaacguaacaaauuug

SEQ ID NO: 2442057 - RNA, 19 nt, Artificial Sequence
  Description of Artificial Sequence: Synthetic oligonucleotide
auccugacgguccugacca

SEQ ID NO: 2442058 - RNA, 19 nt, Artificial Sequence
  Description of Artificial Sequence: Synthetic oligonucleotide
cauaaugugugcaacuuaa

SEQ ID NO: 2442059 - RNA, 19 nt, Artificial Sequence
  Description of Artificial Sequence: Synthetic oligonucleotide
uucagaaaacagcaucuua

SEQ ID NO: 2442060 - RNA, 19 nt, Artificial Sequence
  Description of Artificial Sequence: Synthetic oligonucleotide
gaaaagccaguccagucca

SEQ ID NO: 2442061 - RNA, 19 nt, Artificial Sequence
  Description of Artificial Sequence: Synthetic oligonucleotide
accuucuaggaugauuggc

SEQ ID NO: 2442062 - RNA, 19 nt, Artificial Sequence
  Description of Artificial Sequence: Synthetic oligonucleotide
aucuguucucaguagaaau

SEQ ID NO: 2442063 - RNA, 19 nt, Artificial Sequence
  Description of Artificial Sequence: Synthetic oligonucleotide
cuauguuaguguccaaaac

SEQ ID NO: 2442064 - RNA, 19 nt, Artificial Sequence
  Description of Artificial Sequence: Synthetic oligonucleotide
acgaaguacaccagcacgg

SEQ ID NO: 2442065 - RNA, 19 nt, Artificial Sequence
  Description of Artificial Sequence: Synthetic oligonucleotide
uuuugcgauuccuucuucu

SEQ ID NO: 2442066 - RNA, 19 nt, Artificial Sequence
  Description of Artificial Sequence: Synthetic oligonucleotide
guucucaguagaaauauga

SEQ ID NO: 2442067 - RNA, 19 nt, Artificial Sequence
  Description of Artificial Sequence: Synthetic oligonucleotide
cuuuugcauacaauagcac

SEQ ID NO: 2442068 - RNA, 19 nt, Artificial Sequence
  Description of Artificial Sequence: Synthetic oligonucleotide
uuauuucauaccaguuagu

SEQ ID NO: 2442069 - RNA, 19 nt, Artificial Sequence
  Description of Artificial Sequence: Synthetic oligonucleotide
ucuguaccacuuaauaauu

SEQ ID NO: 2442070 - RNA, 19 nt, Artificial Sequence
  Description of Artificial Sequence: Synthetic oligonucleotide
uguucucaguagaaauaug

SEQ ID NO: 2442071 - RNA, 19 nt, Artificial Sequence
  Description of Artificial Sequence: Synthetic oligonucleotide
gacauagaaaucuguucuc

SEQ ID NO: 2442072 - RNA, 19 nt, Artificial Sequence
  Description of Artificial Sequence: Synthetic oligonucleotide
uugcgauuccuucuucuca

SEQ ID NO: 2442073 - RNA, 19 nt, Artificial Sequence
  Description of Artificial Sequence: Synthetic oligonucleotide
gcaacuuaaauuccccucc

SEQ ID NO: 2442074 - RNA, 19 nt, Artificial Sequence
  Description of Artificial Sequence: Synthetic oligonucleotide
aguagaaauaugaagucuu

SEQ ID NO: 2442075 - RNA, 19 nt, Artificial Sequence
  Description of Artificial Sequence: Synthetic oligonucleotide
aaauuaugacacugacaaa

SEQ ID NO: 2442076 - RNA, 19 nt, Artificial Sequence
  Description of Artificial Sequence: Synthetic oligonucleotide
auaccaguuaguuguggcu

SEQ ID NO: 2442077 - RNA, 19 nt, Artificial Sequence
  Description of Artificial Sequence: Synthetic oligonucleotide
guuccaaauauacaaagau

SEQ ID NO: 2442078 - RNA, 19 nt, Artificial Sequence
  Description of Artificial Sequence: Synthetic oligonucleotide
ucccuaacagcauggaguc

SEQ ID NO: 2442079 - RNA, 19 nt, Artificial Sequence
  Description of Artificial Sequence: Synthetic oligonucleotide
uggaguccaauaacagagc

SEQ ID NO: 2442080 - RNA, 19 nt, Artificial Sequence
  Description of Artificial Sequence: Synthetic oligonucleotide
uucuauguuaguguccaaa

SEQ ID NO: 2442081 - RNA, 19 nt, Artificial Sequence
  Description of Artificial Sequence: Synthetic oligonucleotide
uccguaucuccuaaguuuu

SEQ ID NO: 2442082 - RNA, 19 nt, Artificial Sequence
  Description of Artificial Sequence: Synthetic oligonucleotide
caggcugucccuaacagca

SEQ ID NO: 2442083 - RNA, 19 nt, Artificial Sequence
  Description of Artificial Sequence: Synthetic oligonucleotide
uaacaacugaucaguacuu

SEQ ID NO: 2442084 - RNA, 19 nt, Artificial Sequence
  Description of Artificial Sequence: Synthetic oligonucleotide
uuugcgauuccuucuucuc

SEQ ID NO: 2442085 - RNA, 19 nt, Artificial Sequence
  Description of Artificial Sequence: Synthetic oligonucleotide
aaaggcacagucucaccuu

SEQ ID NO: 2442086 - RNA, 19 nt, Artificial Sequence
  Description of Artificial Sequence: Synthetic oligonucleotide
aaacuccguaucuccuaag

SEQ ID NO: 2442087 - RNA, 19 nt, Artificial Sequence
  Description of Artificial Sequence: Synthetic oligonucleotide
aaaucuguucucaguagaa

SEQ ID NO: 2442088 - RNA, 19 nt, Artificial Sequence
  Description of Artificial Sequence: Synthetic oligonucleotide
ucauaccaguuaguugugg

SEQ ID NO: 2442089 - RNA, 19 nt, Artificial Sequence
  Description of Artificial Sequence: Synthetic oligonucleotide
caucaaacaauguguuguc

SEQ ID NO: 2442090 - RNA, 19 nt, Artificial Sequence
  Description of Artificial Sequence: Synthetic oligonucleotide
ggaaggacaagcucuucag

SEQ ID NO: 2442091 - RNA, 19 nt, Artificial Sequence
  Description of Artificial Sequence: Synthetic oligonucleotide
aaugugguuggaggaagga

SEQ ID NO: 2442092 - RNA, 19 nt, Artificial Sequence
  Description of Artificial Sequence: Synthetic oligonucleotide
cuaaugugguuggaggaag

SEQ ID NO: 2442093 - RNA, 19 nt, Artificial Sequence
  Description of Artificial Sequence: Synthetic oligonucleotide
uucauaccaguuaguugug

SEQ ID NO: 2442094 - RNA, 19 nt, Artificial Sequence
  Description of Artificial Sequence: Synthetic oligonucleotide
acagacaauuucuacuauu

SEQ ID NO: 2442095 - RNA, 19 nt, Artificial Sequence
  Description of Artificial Sequence: Synthetic oligonucleotide
uccaauggaaaagccaguc

SEQ ID NO: 2442096 - RNA, 19 nt, Artificial Sequence
  Description of Artificial Sequence: Synthetic oligonucleotide
caacguaacaaauuuggcu

SEQ ID NO: 2442097 - RNA, 19 nt, Artificial Sequence
  Description of Artificial Sequence: Synthetic oligonucleotide
ucuucucaugaaaggcaca

SEQ ID NO: 2442098 - RNA, 19 nt, Artificial Sequence
  Description of Artificial Sequence: Synthetic oligonucleotide
gaccacgaaguacaccagc

SEQ ID NO: 2442099 - RNA, 19 nt, Artificial Sequence
  Description of Artificial Sequence: Synthetic oligonucleotide
auaacagagcuguuccaaa

SEQ ID NO: 2442100 - RNA, 19 nt, Artificial Sequence
  Description of Artificial Sequence: Synthetic oligonucleotide
guugucauaaugugugcaa

SEQ ID NO: 2442101 - RNA, 19 nt, Artificial Sequence
  Description of Artificial Sequence: Synthetic oligonucleotide
guguccaaaacuccguauc

SEQ ID NO: 2442102 - RNA, 19 nt, Artificial Sequence
  Description of Artificial Sequence: Synthetic oligonucleotide
ugcgauuccuucuucucau

SEQ ID NO: 2442103 - RNA, 19 nt, Artificial Sequence
  Description of Artificial Sequence: Synthetic oligonucleotide
uguggcuuauaguucuuua

SEQ ID NO: 2442104 - RNA, 19 nt, Artificial Sequence
  Description of Artificial Sequence: Synthetic oligonucleotide
aguuuugcgauuccuucuu

SEQ ID NO: 2442105 - RNA, 19 nt, Artificial Sequence
  Description of Artificial Sequence: Synthetic oligonucleotide
aauuaacaacugaucagua

SEQ ID NO: 2442106 - RNA, 19 nt, Artificial Sequence
  Description of Artificial Sequence: Synthetic oligonucleotide
gacgguccugaccacgaag

SEQ ID NO: 2442107 - RNA, 19 nt, Artificial Sequence
  Description of Artificial Sequence: Synthetic oligonucleotide
auugcagcaacaacaaauu

SEQ ID NO: 2442108 - RNA, 19 nt, Artificial Sequence
  Description of Artificial Sequence: Synthetic oligonucleotide
uaaauuccccuccccucga

SEQ ID NO: 2442109 - RNA, 19 nt, Artificial Sequence
  Description of Artificial Sequence: Synthetic oligonucleotide
acaacaaauuaaagguugu

SEQ ID NO: 2442110 - RNA, 19 nt, Artificial Sequence
  Description of Artificial Sequence: Synthetic oligonucleotide
cuccccucgauugaguggc

SEQ ID NO: 2442111 - RNA, 19 nt, Artificial Sequence
  Description of Artificial Sequence: Synthetic oligonucleotide
cauccugacgguccugacc

SEQ ID NO: 2442112 - RNA, 19 nt, Artificial Sequence
  Description of Artificial Sequence: Synthetic oligonucleotide
uccuaaguuuugcgauucc

SEQ ID NO: 2442113 - RNA, 19 nt, Artificial Sequence
  Description of Artificial Sequence: Synthetic oligonucleotide
gaguccaauaacagagcug

SEQ ID NO: 2442114 - RNA, 19 nt, Artificial Sequence
  Description of Artificial Sequence: Synthetic oligonucleotide
caaguuacacuaauguggu

SEQ ID NO: 2442115 - RNA, 19 nt, Artificial Sequence
  Description of Artificial Sequence: Synthetic oligonucleotide
aggacaagcucuucagaaa

SEQ ID NO: 2442116 - RNA, 19 nt, Artificial Sequence
  Description of Artificial Sequence: Synthetic oligonucleotide
guagaaauaugaagucuuc

SEQ ID NO: 2442117 - RNA, 19 nt, Artificial Sequence
  Description of Artificial Sequence: Synthetic oligonucleotide
uaggaugauuggcaucaaa

SEQ ID NO: 2442118 - RNA, 19 nt, Artificial Sequence
  Description of Artificial Sequence: Synthetic oligonucleotide
uucuaggaugauuggcauc

SEQ ID NO: 2442119 - RNA, 19 nt, Artificial Sequence
  Description of Artificial Sequence: Synthetic oligonucleotide
uugcagcaacaacaaauua

SEQ ID NO: 2442120 - RNA, 19 nt, Artificial Sequence
  Description of Artificial Sequence: Synthetic oligonucleotide
aguccaguccaggcugucc

SEQ ID NO: 2442121 - RNA, 19 nt, Artificial Sequence
  Description of Artificial Sequence: Synthetic oligonucleotide
acuaaugugguuggaggaa

SEQ ID NO: 2442122 - RNA, 19 nt, Artificial Sequence
  Description of Artificial Sequence: Synthetic oligonucleotide
ucuccuaaguuuugcgauu

SEQ ID NO: 2442123 - RNA, 19 nt, Artificial Sequence
  Description of Artificial Sequence: Synthetic oligonucleotide
uaguguccaaaacuccgua

SEQ ID NO: 2442124 - RNA, 19 nt, Artificial Sequence
  Description of Artificial Sequence: Synthetic oligonucleotide
caacaaauuaaagguuguc

SEQ ID NO: 2442125 - RNA, 19 nt, Artificial Sequence
  Description of Artificial Sequence: Synthetic oligonucleotide
aacaacugaucaguacuua

SEQ ID NO: 2442126 - RNA, 19 nt, Artificial Sequence
  Description of Artificial Sequence: Synthetic oligonucleotide
cuuagacauagaaaucugu

SEQ ID NO: 2442127 - RNA, 19 nt, Artificial Sequence
  Description of Artificial Sequence: Synthetic oligonucleotide
caacugaucaguacuuaaa

SEQ ID NO: 2442128 - RNA, 19 nt, Artificial Sequence
  Description of Artificial Sequence: Synthetic oligonucleotide
ucgauugaguggcuucuua

SEQ ID NO: 2442129 - RNA, 19 nt, Artificial Sequence
  Description of Artificial Sequence: Synthetic oligonucleotide
gucaacuccauguuuucua

SEQ ID NO: 2442130 - RNA, 19 nt, Artificial Sequence
  Description of Artificial Sequence: Synthetic oligonucleotide
gcuucuuauuccuuagaca

SEQ ID NO: 2442131 - RNA, 19 nt, Artificial Sequence
  Description of Artificial Sequence: Synthetic oligonucleotide
guggcuuauaguucuuuaa

SEQ ID NO: 2442132 - RNA, 19 nt, Artificial Sequence
  Description of Artificial Sequence: Synthetic oligonucleotide
caccuucuaggaugauugg

SEQ ID NO: 2442133 - RNA, 19 nt, Artificial Sequence
  Description of Artificial Sequence: Synthetic oligonucleotide
uaccaguuaguuguggcuu

SEQ ID NO: 2442134 - RNA, 19 nt, Artificial Sequence
  Description of Artificial Sequence: Synthetic oligonucleotide
uucuucucauccugacggu

SEQ ID NO: 2442135 - RNA, 19 nt, Artificial Sequence
  Description of Artificial Sequence: Synthetic oligonucleotide
aaguagaauuugaauuauu

SEQ ID NO: 2442136 - RNA, 19 nt, Artificial Sequence
  Description of Artificial Sequence: Synthetic oligonucleotide
acguaacaaauuuggcuuu

SEQ ID NO: 2442137 - RNA, 19 nt, Artificial Sequence
  Description of Artificial Sequence: Synthetic oligonucleotide
guaccacuuaauaauuuaa

SEQ ID NO: 2442138 - RNA, 19 nt, Artificial Sequence
  Description of Artificial Sequence: Synthetic oligonucleotide
acuccguaucuccuaaguu

SEQ ID NO: 2442139 - RNA, 19 nt, Artificial Sequence
  Description of Artificial Sequence: Synthetic oligonucleotide
gucaugggcuugucgccgg

SEQ ID NO: 2442140 - RNA, 19 nt, Artificial Sequence
  Description of Artificial Sequence: Synthetic oligonucleotide
agccaguccaguccaggcu

SEQ ID NO: 2442141 - RNA, 19 nt, Artificial Sequence
  Description of Artificial Sequence: Synthetic oligonucleotide
ccuuagacauagaaaucug

SEQ ID NO: 2442142 - RNA, 19 nt, Artificial Sequence
  Description of Artificial Sequence: Synthetic oligonucleotide
agcacggcgccgcucacca

SEQ ID NO: 2442143 - RNA, 19 nt, Artificial Sequence
  Description of Artificial Sequence: Synthetic oligonucleotide
ccuucuaggaugauuggca

SEQ ID NO: 2442144 - RNA, 19 nt, Artificial Sequence
  Description of Artificial Sequence: Synthetic oligonucleotide
gucccuaacagcauggagu

SEQ ID NO: 2442145 - RNA, 19 nt, Artificial Sequence
  Description of Artificial Sequence: Synthetic oligonucleotide
ccaauggaaaagccagucc

SEQ ID NO: 2442146 - RNA, 19 nt, Artificial Sequence
  Description of Artificial Sequence: Synthetic oligonucleotide
aaauuccccuccccucgau

SEQ ID NO: 2442147 - RNA, 19 nt, Artificial Sequence
  Description of Artificial Sequence: Synthetic oligonucleotide
aaguuacacuaaugugguu

SEQ ID NO: 2442148 - RNA, 19 nt, Artificial Sequence
  Description of Artificial Sequence: Synthetic oligonucleotide
cuccuaaguuuugcgauuc

SEQ ID NO: 2442149 - RNA, 19 nt, Artificial Sequence
  Description of Artificial Sequence: Synthetic oligonucleotide
gauugaguggcuucuuauu

SEQ ID NO: 2442150 - RNA, 19 nt, Artificial Sequence
  Description of Artificial Sequence: Synthetic oligonucleotide
auagcacagacaauuucua

SEQ ID NO: 2442151 - RNA, 19 nt, Artificial Sequence
  Description of Artificial Sequence: Synthetic oligonucleotide
uuacacuaaugugguugga

SEQ ID NO: 2442152 - RNA, 19 nt, Artificial Sequence
  Description of Artificial Sequence: Synthetic oligonucleotide
acgguccugaccacgaagu

SEQ ID NO: 2442153 - RNA, 19 nt, Artificial Sequence
  Description of Artificial Sequence: Synthetic oligonucleotide
caaaacuccguaucuccua

SEQ ID NO: 2442154 - RNA, 19 nt, Artificial Sequence
  Description of Artificial Sequence: Synthetic oligonucleotide
gagcuguuccaaauauaca

SEQ ID NO: 2442155 - RNA, 19 nt, Artificial Sequence
  Description of Artificial Sequence: Synthetic oligonucleotide
ccuucuucucauccugacg

SEQ ID NO: 2442156 - RNA, 19 nt, Artificial Sequence
  Description of Artificial Sequence: Synthetic oligonucleotide
accaguuaguuguggcuua

SEQ ID NO: 2442157 - RNA, 19 nt, Artificial Sequence
  Description of Artificial Sequence: Synthetic oligonucleotide
acaauagcacagacaauuu

SEQ ID NO: 2442158 - RNA, 19 nt, Artificial Sequence
  Description of Artificial Sequence: Synthetic oligonucleotide
uuucuauguuaguguccaa

SEQ ID NO: 2442159 - RNA, 19 nt, Artificial Sequence
  Description of Artificial Sequence: Synthetic oligonucleotide
guuuugcgauuccuucuuc

SEQ ID NO: 2442160 - RNA, 19 nt, Artificial Sequence
  Description of Artificial Sequence: Synthetic oligonucleotide
aggugucaacuccauguuu

SEQ ID NO: 2442161 - RNA, 19 nt, Artificial Sequence
  Description of Artificial Sequence: Synthetic oligonucleotide
uccugaccacgaaguacac

SEQ ID NO: 2442162 - RNA, 19 nt, Artificial Sequence
  Description of Artificial Sequence: Synthetic oligonucleotide
cuccguaucuccuaaguuu

SEQ ID NO: 2442163 - RNA, 19 nt, Artificial Sequence
  Description of Artificial Sequence: Synthetic oligonucleotide
gguugucauaaugugugca

SEQ ID NO: 2442164 - RNA, 19 nt, Artificial Sequence
  Description of Artificial Sequence: Synthetic oligonucleotide
ucauccugacgguccugac

SEQ ID NO: 2442165 - RNA, 19 nt, Artificial Sequence
  Description of Artificial Sequence: Synthetic oligonucleotide
caguagaaauaugaagucu

SEQ ID NO: 2442166 - RNA, 19 nt, Artificial Sequence
  Description of Artificial Sequence: Synthetic oligonucleotide
ggcuuauaguucuuuaaau

SEQ ID NO: 2442167 - RNA, 19 nt, Artificial Sequence
  Description of Artificial Sequence: Synthetic oligonucleotide
ggaguccaauaacagagcu

SEQ ID NO: 2442168 - RNA, 19 nt, Artificial Sequence
  Description of Artificial Sequence: Synthetic oligonucleotide
cuuauuccuuagacauaga

SEQ ID NO: 2442169 - RNA, 19 nt, Artificial Sequence
  Description of Artificial Sequence: Synthetic oligonucleotide
cugacgguccugaccacga

SEQ ID NO: 2442170 - RNA, 19 nt, Artificial Sequence
  Description of Artificial Sequence: Synthetic oligonucleotide
cacggagccuuccccggcc

SEQ ID NO: 2442171 - RNA, 19 nt, Artificial Sequence
  Description of Artificial Sequence: Synthetic oligonucleotide
cauuuaucuuuugcauaca

SEQ ID NO: 2442172 - RNA, 19 nt, Artificial Sequence
  Description of Artificial Sequence: Synthetic oligonucleotide
gugcaacuuaaauuccccu

SEQ ID NO: 2442173 - RNA, 19 nt, Artificial Sequence
  Description of Artificial Sequence: Synthetic oligonucleotide
uuguggcuuauaguucuuu

SEQ ID NO: 2442174 - RNA, 19 nt, Artificial Sequence
  Description of Artificial Sequence: Synthetic oligonucleotide
uccccuccccucgauugag

SEQ ID NO: 2442175 - RNA, 19 nt, Artificial Sequence
  Description of Artificial Sequence: Synthetic oligonucleotide
guccaggcugucccuaaca

SEQ ID NO: 2442176 - RNA, 19 nt, Artificial Sequence
  Description of Artificial Sequence: Synthetic oligonucleotide
ugacgguccugaccacgaa

SEQ ID NO: 2442177 - RNA, 19 nt, Artificial Sequence
  Description of Artificial Sequence: Synthetic oligonucleotide
ccaggcugucccuaacagc

SEQ ID NO: 2442178 - RNA, 19 nt, Artificial Sequence
  Description of Artificial Sequence: Synthetic oligonucleotide
cuucuaggaugauuggcau

SEQ ID NO: 2442179 - RNA, 19 nt, Artificial Sequence
  Description of Artificial Sequence: Synthetic oligonucleotide
auacaauagcacagacaau

SEQ ID NO: 2442180 - RNA, 19 nt, Artificial Sequence
  Description of Artificial Sequence: Synthetic oligonucleotide
guuggggcucaccgccaag

SEQ ID NO: 2442181 - RNA, 19 nt, Artificial Sequence
  Description of Artificial Sequence: Synthetic oligonucleotide
ccgggguuggggcucaccg

SEQ ID NO: 2442182 - RNA, 19 nt, Artificial Sequence
  Description of Artificial Sequence: Synthetic oligonucleotide
accgccaagcugccgccca

SEQ ID NO: 2442183 - RNA, 19 nt, Artificial Sequence
  Description of Artificial Sequence: Synthetic oligonucleotide
agccuuccccggccuuccc

SEQ ID NO: 2442184 - RNA, 19 nt, Artificial Sequence
  Description of Artificial Sequence: Synthetic oligonucleotide
gucauaaugugugcaacuu

SEQ ID NO: 2442185 - RNA, 19 nt, Artificial Sequence
  Description of Artificial Sequence: Synthetic oligonucleotide
cuaacagcauggaguccaa

SEQ ID NO: 2442186 - RNA, 19 nt, Artificial Sequence
  Description of Artificial Sequence: Synthetic oligonucleotide
ccuccccucgauugagugg

SEQ ID NO: 2442187 - RNA, 19 nt, Artificial Sequence
  Description of Artificial Sequence: Synthetic oligonucleotide
agcacggucagggcccgcu

SEQ ID NO: 2442188 - RNA, 19 nt, Artificial Sequence
  Description of Artificial Sequence: Synthetic oligonucleotide
gauuggcaucaaacaaugu

SEQ ID NO: 2442189 - RNA, 19 nt, Artificial Sequence
  Description of Artificial Sequence: Synthetic oligonucleotide
gccaagcugccgcccacgg

SEQ ID NO: 2442190 - RNA, 19 nt, Artificial Sequence
  Description of Artificial Sequence: Synthetic oligonucleotide
gggcuugucgccgggguug

SEQ ID NO: 2442191 - RNA, 19 nt, Artificial Sequence
  Description of Artificial Sequence: Synthetic oligonucleotide
ccugacgguccugaccacg

SEQ ID NO: 2442192 - RNA, 19 nt, Artificial Sequence
  Description of Artificial Sequence: Synthetic oligonucleotide
ggcgccgcucaccaccacc

SEQ ID NO: 2442193 - RNA, 19 nt, Artificial Sequence
  Description of Artificial Sequence: Synthetic oligonucleotide
uccugacgguccugaccac

SEQ ID NO: 2442194 - RNA, 19 nt, Artificial Sequence
  Description of Artificial Sequence: Synthetic oligonucleotide
acggagccuuccccggccu

SEQ ID NO: 2442195 - RNA, 19 nt, Artificial Sequence
  Description of Artificial Sequence: Synthetic oligonucleotide
cuagaggugucaacuccau

SEQ ID NO: 2442196 - RNA, 19 nt, Artificial Sequence
  Description of Artificial Sequence: Synthetic oligonucleotide
cccucgauugaguggcuuc

SEQ ID NO: 2442197 - RNA, 19 nt, Artificial Sequence
  Description of Artificial Sequence: Synthetic oligonucleotide
uccccucgauugaguggcu

SEQ ID NO: 2442198 - RNA, 19 nt, Artificial Sequence
  Description of Artificial Sequence: Synthetic oligonucleotide
ggucagggcccgcuggguc

SEQ ID NO: 2442199 - RNA, 19 nt, Artificial Sequence
  Description of Artificial Sequence: Synthetic oligonucleotide
ccguaucuccuaaguuuug

SEQ ID NO: 2442200 - RNA, 19 nt, Artificial Sequence
  Description of Artificial Sequence: Synthetic oligonucleotide
cuucagaaaacagcaucuu

SEQ ID NO: 2442201 - RNA, 19 nt, Artificial Sequence
  Description of Artificial Sequence: Synthetic oligonucleotide
cacagacaauuucuacuau

SEQ ID NO: 2442202 - RNA, 19 nt, Artificial Sequence
  Description of Artificial Sequence: Synthetic oligonucleotide
ggcuugucgccgggguugg

SEQ ID NO: 2442203 - RNA, 19 nt, Artificial Sequence
  Description of Artificial Sequence: Synthetic oligonucleotide
cagcacggcgccgcucacc

SEQ ID NO: 2442204 - RNA, 19 nt, Artificial Sequence
  Description of Artificial Sequence: Synthetic oligonucleotide
ccaaaacuccguaucuccu

SEQ ID NO: 2442205 - RNA, 19 nt, Artificial Sequence
  Description of Artificial Sequence: Synthetic oligonucleotide
caguccaggcugucccuaa

SEQ ID NO: 2442206 - RNA, 19 nt, Artificial Sequence
  Description of Artificial Sequence: Synthetic oligonucleotide
gcgauuccuucuucucauc

SEQ ID NO: 2442207 - RNA, 19 nt, Artificial Sequence
  Description of Artificial Sequence: Synthetic oligonucleotide
cucaccuucuaggaugauu

SEQ ID NO: 2442208 - RNA, 19 nt, Artificial Sequence
  Description of Artificial Sequence: Synthetic oligonucleotide
ucucaccuucuaggaugau

SEQ ID NO: 2442209 - RNA, 19 nt, Artificial Sequence
  Description of Artificial Sequence: Synthetic oligonucleotide
cuaggaugauuggcaucaa

SEQ ID NO: 2442210 - RNA, 19 nt, Artificial Sequence
  Description of Artificial Sequence: Synthetic oligonucleotide
ccuaaguuuugcgauuccu

SEQ ID NO: 2442211 - RNA, 19 nt, Artificial Sequence
  Description of Artificial Sequence: Synthetic oligonucleotide
caccgccaagcugccgccc

SEQ ID NO: 2442212 - RNA, 19 nt, Artificial Sequence
  Description of Artificial Sequence: Synthetic oligonucleotide
aggcugucccuaacagcau

SEQ ID NO: 2442213 - RNA, 19 nt, Artificial Sequence
  Description of Artificial Sequence: Synthetic oligonucleotide
ccacggagccuuccccggc

SEQ ID NO: 2442214 - RNA, 19 nt, Artificial Sequence
  Description of Artificial Sequence: Synthetic oligonucleotide
caguuaguuguggcuuaua

SEQ ID NO: 2442215 - RNA, 19 nt, Artificial Sequence
  Description of Artificial Sequence: Synthetic oligonucleotide
ggcucaccgccaagcugcc

SEQ ID NO: 2442216 - RNA, 19 nt, Artificial Sequence
  Description of Artificial Sequence: Synthetic oligonucleotide
gcucaccgccaagcugccg

SEQ ID NO: 2442217 - RNA, 19 nt, Artificial Sequence
  Description of Artificial Sequence: Synthetic oligonucleotide
cgauugaguggcuucuuau

SEQ ID NO: 2442218 - RNA, 19 nt, Artificial Sequence
  Description of Artificial Sequence: Synthetic oligonucleotide
ccucgauugaguggcuucu

SEQ ID NO: 2442219 - RNA, 19 nt, Artificial Sequence
  Description of Artificial Sequence: Synthetic oligonucleotide
gcuugucgccgggguuggg

SEQ ID NO: 2442220 - RNA, 19 nt, Artificial Sequence
  Description of Artificial Sequence: Synthetic oligonucleotide
guccaauaacagagcuguu

SEQ ID NO: 2442221 - RNA, 19 nt, Artificial Sequence
  Description of Artificial Sequence: Synthetic oligonucleotide
cgccaagcugccgcccacg

SEQ ID NO: 2442222 - RNA, 19 nt, Artificial Sequence
  Description of Artificial Sequence: Synthetic oligonucleotide
gccgggguuggggcucacc

SEQ ID NO: 2442223 - RNA, 19 nt, Artificial Sequence
  Description of Artificial Sequence: Synthetic oligonucleotide
gcacggcgccgcucaccac

SEQ ID NO: 2442224 - RNA, 19 nt, Artificial Sequence
  Description of Artificial Sequence: Synthetic oligonucleotide
cgccgcucaccaccaccag

SEQ ID NO: 2442225 - RNA, 19 nt, Artificial Sequence
  Description of Artificial Sequence: Synthetic oligonucleotide
cguaacaaauuuggcuuuu

SEQ ID NO: 2442226 - RNA, 19 nt, Artificial Sequence
  Description of Artificial Sequence: Synthetic oligonucleotide
ccgcugggucaugggcuug

SEQ ID NO: 2442227 - RNA, 19 nt, Artificial Sequence
  Description of Artificial Sequence: Synthetic oligonucleotide
cgguccugaccacgaagua

SEQ ID NO: 2442228 - RNA, 19 nt, Artificial Sequence
  Description of Artificial Sequence: Synthetic oligonucleotide
cccgcugggucaugggcuu

SEQ ID NO: 2442229 - RNA, 19 nt, Artificial Sequence
  Description of Artificial Sequence: Synthetic oligonucleotide
ccccuccccucgauugagu

SEQ ID NO: 2442230 - RNA, 19 nt, Artificial Sequence
  Description of Artificial Sequence: Synthetic oligonucleotide
ccccucgauugaguggcuu

SEQ ID NO: 2442231 - RNA, 19 nt, Artificial Sequence
  Description of Artificial Sequence: Synthetic oligonucleotide
cggcgccgcucaccaccac

SEQ ID NO: 2442232 - RNA, 19 nt, Artificial Sequence
  Description of Artificial Sequence: Synthetic oligonucleotide
cgccgggguuggggcucac

SEQ ID NO: 2442233 - RNA, 19 nt, Artificial Sequence
  Description of Artificial Sequence: Synthetic oligonucleotide
uuugauguauauaauacga

SEQ ID NO: 2442234 - RNA, 19 nt, Artificial Sequence
  Description of Artificial Sequence: Synthetic oligonucleotide
acaucuuuaccuuaugccg

SEQ ID NO: 2442235 - RNA, 19 nt, Artificial Sequence
  Description of Artificial Sequence: Synthetic oligonucleotide
uauaauacgaaugucuuca

SEQ ID NO: 2442236 - RNA, 19 nt, Artificial Sequence
  Description of Artificial Sequence: Synthetic oligonucleotide
uuagcaaugguuccaauga

SEQ ID NO: 2442237 - RNA, 19 nt, Artificial Sequence
  Description of Artificial Sequence: Synthetic oligonucleotide
aagaguuucacgaugguag

SEQ ID NO: 2442238 - RNA, 19 nt, Artificial Sequence
  Description of Artificial Sequence: Synthetic oligonucleotide
uguaaaggcaaucuugcca

SEQ ID NO: 2442239 - RNA, 19 nt, Artificial Sequence
  Description of Artificial Sequence: Synthetic oligonucleotide
agaaccagucacaagaugc

SEQ ID NO: 2442240 - RNA, 19 nt, Artificial Sequence
  Description of Artificial Sequence: Synthetic oligonucleotide
ugaguaagauggaaaagag

SEQ ID NO: 2442241 - RNA, 19 nt, Artificial Sequence
  Description of Artificial Sequence: Synthetic oligonucleotide
auggaaaagaguuucacga

SEQ ID NO: 2442242 - RNA, 19 nt, Artificial Sequence
  Description of Artificial Sequence: Synthetic oligonucleotide
auaguauaugcagucagcc

SEQ ID NO: 2442243 - RNA, 19 nt, Artificial Sequence
  Description of Artificial Sequence: Synthetic oligonucleotide
aacauauaauacauguuuc

SEQ ID NO: 2442244 - RNA, 19 nt, Artificial Sequence
  Description of Artificial Sequence: Synthetic oligonucleotide
uucauagcaacauauaaua

SEQ ID NO: 2442245 - RNA, 19 nt, Artificial Sequence
  Description of Artificial Sequence: Synthetic oligonucleotide
ucuaaggucaugcuggaga

SEQ ID NO: 2442246 - RNA, 19 nt, Artificial Sequence
  Description of Artificial Sequence: Synthetic oligonucleotide
uucauauuaauguucauuu

SEQ ID NO: 2442247 - RNA, 19 nt, Artificial Sequence
  Description of Artificial Sequence: Synthetic oligonucleotide
auguauauaauacgaaugu

SEQ ID NO: 2442248 - RNA, 19 nt, Artificial Sequence
  Description of Artificial Sequence: Synthetic oligonucleotide
gauguauauaauacgaaug

SEQ ID NO: 2442249 - RNA, 19 nt, Artificial Sequence
  Description of Artificial Sequence: Synthetic oligonucleotide
ucauaguauaugcagucag

SEQ ID NO: 2442250 - RNA, 19 nt, Artificial Sequence
  Description of Artificial Sequence: Synthetic oligonucleotide
gaaaagaguuucacgaugg

SEQ ID NO: 2442251 - RNA, 19 nt, Artificial Sequence
  Description of Artificial Sequence: Synthetic oligonucleotide
aaagucuaguuggaggagc

SEQ ID NO: 2442252 - RNA, 19 nt, Artificial Sequence
  Description of Artificial Sequence: Synthetic oligonucleotide
aaggucaugcuggagaaac

SEQ ID NO: 2442253 - RNA, 19 nt, Artificial Sequence
  Description of Artificial Sequence: Synthetic oligonucleotide
uacuuggaaaggacgaugg

SEQ ID NO: 2442254 - RNA, 19 nt, Artificial Sequence
  Description of Artificial Sequence: Synthetic oligonucleotide
ucaaagucuaguuggagga

SEQ ID NO: 2442255 - RNA, 19 nt, Artificial Sequence
  Description of Artificial Sequence: Synthetic oligonucleotide
uauauaauacgaaugucuu

SEQ ID NO: 2442256 - RNA, 19 nt, Artificial Sequence
  Description of Artificial Sequence: Synthetic oligonucleotide
uuguucauauuaauguuca

SEQ ID NO: 2442257 - RNA, 19 nt, Artificial Sequence
  Description of Artificial Sequence: Synthetic oligonucleotide
uuuagcaaugguuccaaug

SEQ ID NO: 2442258 - RNA, 19 nt, Artificial Sequence
  Description of Artificial Sequence: Synthetic oligonucleotide
uuguacguuguucauagca

SEQ ID NO: 2442259 - RNA, 19 nt, Artificial Sequence
  Description of Artificial Sequence: Synthetic oligonucleotide
ucuguucacaucuuuaccu

SEQ ID NO: 2442260 - RNA, 19 nt, Artificial Sequence
  Description of Artificial Sequence: Synthetic oligonucleotide
aguaccuuggcuugaacag

SEQ ID NO: 2442261 - RNA, 19 nt, Artificial Sequence
  Description of Artificial Sequence: Synthetic oligonucleotide
acuguaaaggcaaucuugc

SEQ ID NO: 2442262 - RNA, 19 nt, Artificial Sequence
  Description of Artificial Sequence: Synthetic oligonucleotide
ucauccaugugccaggucu

SEQ ID NO: 2442263 - RNA, 19 nt, Artificial Sequence
  Description of Artificial Sequence: Synthetic oligonucleotide
cauuguacguuguucauag

SEQ ID NO: 2442264 - RNA, 19 nt, Artificial Sequence
  Description of Artificial Sequence: Synthetic oligonucleotide
aaaggcaaucuugccaugc

SEQ ID NO: 2442265 - RNA, 19 nt, Artificial Sequence
  Description of Artificial Sequence: Synthetic oligonucleotide
aaggcaaucuugccaugcc

SEQ ID NO: 2442266 - RNA, 19 nt, Artificial Sequence
  Description of Artificial Sequence: Synthetic oligonucleotide
aaagggauuuccucaaagu

SEQ ID NO: 2442267 - RNA, 19 nt, Artificial Sequence
  Description of Artificial Sequence: Synthetic oligonucleotide
aaugguuccaaugacuccu

SEQ ID NO: 2442268 - RNA, 19 nt, Artificial Sequence
  Description of Artificial Sequence: Synthetic oligonucleotide
auauaauacgaaugucuuc

SEQ ID NO: 2442269 - RNA, 19 nt, Artificial Sequence
  Description of Artificial Sequence: Synthetic oligonucleotide
uaugcagucagccaucaaa

SEQ ID NO: 2442270 - RNA, 19 nt, Artificial Sequence
  Description of Artificial Sequence: Synthetic oligonucleotide
agucacaagaugcuuguuc

SEQ ID NO: 2442271 - RNA, 19 nt, Artificial Sequence
  Description of Artificial Sequence: Synthetic oligonucleotide
cacaucuuuaccuuaugcc

SEQ ID NO: 2442272 - RNA, 19 nt, Artificial Sequence
  Description of Artificial Sequence: Synthetic oligonucleotide
ugauguauauaauacgaau

SEQ ID NO: 2442273 - RNA, 19 nt, Artificial Sequence
  Description of Artificial Sequence: Synthetic oligonucleotide
gucaaagucuaguuggagg

SEQ ID NO: 2442274 - RNA, 19 nt, Artificial Sequence
  Description of Artificial Sequence: Synthetic oligonucleotide
aguauaugcagucagccau

SEQ ID NO: 2442275 - RNA, 19 nt, Artificial Sequence
  Description of Artificial Sequence: Synthetic oligonucleotide
uacgaaugucuucacuucg

SEQ ID NO: 2442276 - RNA, 19 nt, Artificial Sequence
  Description of Artificial Sequence: Synthetic oligonucleotide
aaugacuccucauaguaua

SEQ ID NO: 2442277 - RNA, 19 nt, Artificial Sequence
  Description of Artificial Sequence: Synthetic oligonucleotide
aguaagauggaaaagaguu

SEQ ID NO: 2442278 - RNA, 19 nt, Artificial Sequence
  Description of Artificial Sequence: Synthetic oligonucleotide
acauauaauacauguuuca

SEQ ID NO: 2442279 - RNA, 19 nt, Artificial Sequence
  Description of Artificial Sequence: Synthetic oligonucleotide
uucacuucgguauuccuca

SEQ ID NO: 2442280 - RNA, 19 nt, Artificial Sequence
  Description of Artificial Sequence: Synthetic oligonucleotide
uacaacaucugccccgagg

SEQ ID NO: 2442281 - RNA, 19 nt, Artificial Sequence
  Description of Artificial Sequence: Synthetic oligonucleotide
caucuuuaccuuaugccgg

SEQ ID NO: 2442282 - RNA, 19 nt, Artificial Sequence
  Description of Artificial Sequence: Synthetic oligonucleotide
uucgguauuccucaucaug

SEQ ID NO: 2442283 - RNA, 19 nt, Artificial Sequence
  Description of Artificial Sequence: Synthetic oligonucleotide
uuccaaugacuccucauag

SEQ ID NO: 2442284 - RNA, 19 nt, Artificial Sequence
  Description of Artificial Sequence: Synthetic oligonucleotide
ucgguauuccucaucaugu

SEQ ID NO: 2442285 - RNA, 19 nt, Artificial Sequence
  Description of Artificial Sequence: Synthetic oligonucleotide
gugacuacaacaucugccc

SEQ ID NO: 2442286 - RNA, 19 nt, Artificial Sequence
  Description of Artificial Sequence: Synthetic oligonucleotide
cuuggaaaggacgauggcg

SEQ ID NO: 2442287 - RNA, 19 nt, Artificial Sequence
  Description of Artificial Sequence: Synthetic oligonucleotide
ucacaucuuuaccuuaugc

SEQ ID NO: 2442288 - RNA, 19 nt, Artificial Sequence
  Description of Artificial Sequence: Synthetic oligonucleotide
gucucuaaggucaugcugg

SEQ ID NO: 2442289 - RNA, 19 nt, Artificial Sequence
  Description of Artificial Sequence: Synthetic oligonucleotide
auacgaaugucuucacuuc

SEQ ID NO: 2442290 - RNA, 19 nt, Artificial Sequence
  Description of Artificial Sequence: Synthetic oligonucleotide
cuggagaaacuguaaaggc

SEQ ID NO: 2442291 - RNA, 19 nt, Artificial Sequence
  Description of Artificial Sequence: Synthetic oligonucleotide
gugaagucaagucuucuag

SEQ ID NO: 2442292 - RNA, 19 nt, Artificial Sequence
  Description of Artificial Sequence: Synthetic oligonucleotide
uuuaccuuaugccgggugu

SEQ ID NO: 2442293 - RNA, 19 nt, Artificial Sequence
  Description of Artificial Sequence: Synthetic oligonucleotide
cuugaacagaaccagucac

SEQ ID NO: 2442294 - RNA, 19 nt, Artificial Sequence
  Description of Artificial Sequence: Synthetic oligonucleotide
aagaugcuuguucauauua

SEQ ID NO: 2442295 - RNA, 19 nt, Artificial Sequence
  Description of Artificial Sequence: Synthetic oligonucleotide
cauaguauaugcagucagc

SEQ ID NO: 2442296 - RNA, 19 nt, Artificial Sequence
  Description of Artificial Sequence: Synthetic oligonucleotide
uguacguuguucauagcaa

SEQ ID NO: 2442297 - RNA, 19 nt, Artificial Sequence
  Description of Artificial Sequence: Synthetic oligonucleotide
agucuggugaagucaaguc

SEQ ID NO: 2442298 - RNA, 19 nt, Artificial Sequence
  Description of Artificial Sequence: Synthetic oligonucleotide
ucauagcaacauauaauac

SEQ ID NO: 2442299 - RNA, 19 nt, Artificial Sequence
  Description of Artificial Sequence: Synthetic oligonucleotide
acgaugguaguuuugauuu

SEQ ID NO: 2442300 - RNA, 19 nt, Artificial Sequence
  Description of Artificial Sequence: Synthetic oligonucleotide
auuucaguaccuuggcuug

SEQ ID NO: 2442301 - RNA, 19 nt, Artificial Sequence
  Description of Artificial Sequence: Synthetic oligonucleotide
uugauguauauaauacgaa

SEQ ID NO: 2442302 - RNA, 19 nt, Artificial Sequence
  Description of Artificial Sequence: Synthetic oligonucleotide
uugaacagaaccagucaca

SEQ ID NO: 2442303 - RNA, 19 nt, Artificial Sequence
  Description of Artificial Sequence: Synthetic oligonucleotide
aaauguagucuggugaagu

SEQ ID NO: 2442304 - RNA, 19 nt, Artificial Sequence
  Description of Artificial Sequence: Synthetic oligonucleotide
ugccaggucucuaagguca

SEQ ID NO: 2442305 - RNA, 19 nt, Artificial Sequence
  Description of Artificial Sequence: Synthetic oligonucleotide
aucaaaauguagucuggug

SEQ ID NO: 2442306 - RNA, 19 nt, Artificial Sequence
  Description of Artificial Sequence: Synthetic oligonucleotide
auaauacgaaugucuucac

SEQ ID NO: 2442307 - RNA, 19 nt, Artificial Sequence
  Description of Artificial Sequence: Synthetic oligonucleotide
auauuaauguucauuuuca

SEQ ID NO: 2442308 - RNA, 19 nt, Artificial Sequence
  Description of Artificial Sequence: Synthetic oligonucleotide
agcucaaaauauuucuucu

SEQ ID NO: 2442309 - RNA, 19 nt, Artificial Sequence
  Description of Artificial Sequence: Synthetic oligonucleotide
uguagucuggugaagucaa

SEQ ID NO: 2442310 - RNA, 19 nt, Artificial Sequence
  Description of Artificial Sequence: Synthetic oligonucleotide
ucaaagucaaagucuaguu

SEQ ID NO: 2442311 - RNA, 19 nt, Artificial Sequence
  Description of Artificial Sequence: Synthetic oligonucleotide
aucccgcuucuccagaacc

SEQ ID NO: 2442312 - RNA, 19 nt, Artificial Sequence
  Description of Artificial Sequence: Synthetic oligonucleotide
ucuggugaagucaagucuu

SEQ ID NO: 2442313 - RNA, 19 nt, Artificial Sequence
  Description of Artificial Sequence: Synthetic oligonucleotide
uuggcuugaacagaaccag

SEQ ID NO: 2442314 - RNA, 19 nt, Artificial Sequence
  Description of Artificial Sequence: Synthetic oligonucleotide
uguuucagauccacugagc

SEQ ID NO: 2442315 - RNA, 19 nt, Artificial Sequence
  Description of Artificial Sequence: Synthetic oligonucleotide
agaacccgcacgaagcucc

SEQ ID NO: 2442316 - RNA, 19 nt, Artificial Sequence
  Description of Artificial Sequence: Synthetic oligonucleotide
uucuccagaacccgcacga

SEQ ID NO: 2442317 - RNA, 19 nt, Artificial Sequence
  Description of Artificial Sequence: Synthetic oligonucleotide
aucuuuaccuuaugccggg

SEQ ID NO: 2442318 - RNA, 19 nt, Artificial Sequence
  Description of Artificial Sequence: Synthetic oligonucleotide
cuugccaugccguaugcac

SEQ ID NO: 2442319 - RNA, 19 nt, Artificial Sequence
  Description of Artificial Sequence: Synthetic oligonucleotide
aaaauguagucuggugaag

SEQ ID NO: 2442320 - RNA, 19 nt, Artificial Sequence
  Description of Artificial Sequence: Synthetic oligonucleotide
aaaagaguuucacgauggu

SEQ ID NO: 2442321 - RNA, 19 nt, Artificial Sequence
  Description of Artificial Sequence: Synthetic oligonucleotide
uacugcuguagccgaaggg

SEQ ID NO: 2442322 - RNA, 19 nt, Artificial Sequence
  Description of Artificial Sequence: Synthetic oligonucleotide
cagguacuuggaaaggacg

SEQ ID NO: 2442323 - RNA, 19 nt, Artificial Sequence
  Description of Artificial Sequence: Synthetic oligonucleotide
uguauauaauacgaauguc

SEQ ID NO: 2442324 - RNA, 19 nt, Artificial Sequence
  Description of Artificial Sequence: Synthetic oligonucleotide
uucagcaagucuugcagcu

SEQ ID NO: 2442325 - RNA, 19 nt, Artificial Sequence
  Description of Artificial Sequence: Synthetic oligonucleotide
aagucuugcagcuccucga

SEQ ID NO: 2442326 - RNA, 19 nt, Artificial Sequence
  Description of Artificial Sequence: Synthetic oligonucleotide
uucacgaugguaguuuuga

SEQ ID NO: 2442327 - RNA, 19 nt, Artificial Sequence
  Description of Artificial Sequence: Synthetic oligonucleotide
gagaucggugacuacaaca

SEQ ID NO: 2442328 - RNA, 19 nt, Artificial Sequence
  Description of Artificial Sequence: Synthetic oligonucleotide
uacguuguucauagcaaca

SEQ ID NO: 2442329 - RNA, 19 nt, Artificial Sequence
  Description of Artificial Sequence: Synthetic oligonucleotide
gugaguaagauggaaaaga

SEQ ID NO: 2442330 - RNA, 19 nt, Artificial Sequence
  Description of Artificial Sequence: Synthetic oligonucleotide
uaguauaugcagucagcca

SEQ ID NO: 2442331 - RNA, 19 nt, Artificial Sequence
  Description of Artificial Sequence: Synthetic oligonucleotide
guauauaauacgaaugucu

SEQ ID NO: 2442332 - RNA, 19 nt, Artificial Sequence
  Description of Artificial Sequence: Synthetic oligonucleotide
ggaaaagaguuucacgaug

SEQ ID NO: 2442333 - RNA, 19 nt, Artificial Sequence
  Description of Artificial Sequence: Synthetic oligonucleotide
cuuggcuugaacagaacca

SEQ ID NO: 2442334 - RNA, 19 nt, Artificial Sequence
  Description of Artificial Sequence: Synthetic oligonucleotide
aacccacgccuccggagcc

SEQ ID NO: 2442335 - RNA, 19 nt, Artificial Sequence
  Description of Artificial Sequence: Synthetic oligonucleotide
gaagggcugucccaucccg

SEQ ID NO: 2442336 - RNA, 19 nt, Artificial Sequence
  Description of Artificial Sequence: Synthetic oligonucleotide
caagucuugcagcuccucg

SEQ ID NO: 2442337 - RNA, 19 nt, Artificial Sequence
  Description of Artificial Sequence: Synthetic oligonucleotide
ugaacagaaccagucacaa

SEQ ID NO: 2442338 - RNA, 19 nt, Artificial Sequence
  Description of Artificial Sequence: Synthetic oligonucleotide
uuuuccccauuguacguug

SEQ ID NO: 2442339 - RNA, 19 nt, Artificial Sequence
  Description of Artificial Sequence: Synthetic oligonucleotide
uggucauccaugugccagg

SEQ ID NO: 2442340 - RNA, 19 nt, Artificial Sequence
  Description of Artificial Sequence: Synthetic oligonucleotide
auuguacguuguucauagc

SEQ ID NO: 2442341 - RNA, 19 nt, Artificial Sequence
  Description of Artificial Sequence: Synthetic oligonucleotide
cuucacuucgguauuccuc

SEQ ID NO: 2442342 - RNA, 19 nt, Artificial Sequence
  Description of Artificial Sequence: Synthetic oligonucleotide
ugacuacaacaucugcccc

SEQ ID NO: 2442343 - RNA, 19 nt, Artificial Sequence
  Description of Artificial Sequence: Synthetic oligonucleotide
ucaugcuggagaaacugua

SEQ ID NO: 2442344 - RNA, 19 nt, Artificial Sequence
  Description of Artificial Sequence: Synthetic oligonucleotide
aggcaaucuugccaugccg

SEQ ID NO: 2442345 - RNA, 19 nt, Artificial Sequence
  Description of Artificial Sequence: Synthetic oligonucleotide
uuguccaaagggauuuccu

SEQ ID NO: 2442346 - RNA, 19 nt, Artificial Sequence
  Description of Artificial Sequence: Synthetic oligonucleotide
caaaauguagucuggugaa

SEQ ID NO: 2442347 - RNA, 19 nt, Artificial Sequence
  Description of Artificial Sequence: Synthetic oligonucleotide
ucggugacuacaacaucug

SEQ ID NO: 2442348 - RNA, 19 nt, Artificial Sequence
  Description of Artificial Sequence: Synthetic oligonucleotide
uggaaaagaguuucacgau

SEQ ID NO: 2442349 - RNA, 19 nt, Artificial Sequence
  Description of Artificial Sequence: Synthetic oligonucleotide
aaagaguuucacgauggua

SEQ ID NO: 2442350 - RNA, 19 nt, Artificial Sequence
  Description of Artificial Sequence: Synthetic oligonucleotide
agggauuuccucaaaguca

SEQ ID NO: 2442351 - RNA, 19 nt, Artificial Sequence
  Description of Artificial Sequence: Synthetic oligonucleotide
uuaugccggguguuagggg

SEQ ID NO: 2442352 - RNA, 19 nt, Artificial Sequence
  Description of Artificial Sequence: Synthetic oligonucleotide
uuucacgaugguaguuuug

SEQ ID NO: 2442353 - RNA, 19 nt, Artificial Sequence
  Description of Artificial Sequence: Synthetic oligonucleotide
cacgaagcuccacagcggg

SEQ ID NO: 2442354 - RNA, 19 nt, Artificial Sequence
  Description of Artificial Sequence: Synthetic oligonucleotide
guacguuguucauagcaac

SEQ ID NO: 2442355 - RNA, 19 nt, Artificial Sequence
  Description of Artificial Sequence: Synthetic oligonucleotide
aaaacgccggcgucuccag

SEQ ID NO: 2442356 - RNA, 19 nt, Artificial Sequence
  Description of Artificial Sequence: Synthetic oligonucleotide
cuguaaaggcaaucuugcc

SEQ ID NO: 2442357 - RNA, 19 nt, Artificial Sequence
  Description of Artificial Sequence: Synthetic oligonucleotide
uccaaugacuccucauagu

SEQ ID NO: 2442358 - RNA, 19 nt, Artificial Sequence
  Description of Artificial Sequence: Synthetic oligonucleotide
uaguuggaggagcucaaaa

SEQ ID NO: 2442359 - RNA, 19 nt, Artificial Sequence
  Description of Artificial Sequence: Synthetic oligonucleotide
aacgccggcgucuccaggu

SEQ ID NO: 2442360 - RNA, 19 nt, Artificial Sequence
  Description of Artificial Sequence: Synthetic oligonucleotide
gaacagaaccagucacaag

SEQ ID NO: 2442361 - RNA, 19 nt, Artificial Sequence
  Description of Artificial Sequence: Synthetic oligonucleotide
cagcaagucuugcagcucc

SEQ ID NO: 2442362 - RNA, 19 nt, Artificial Sequence
  Description of Artificial Sequence: Synthetic oligonucleotide
uccaaagggauuuccucaa

SEQ ID NO: 2442363 - RNA, 19 nt, Artificial Sequence
  Description of Artificial Sequence: Synthetic oligonucleotide
ggugacuacaacaucugcc

SEQ ID NO: 2442364 - RNA, 19 nt, Artificial Sequence
  Description of Artificial Sequence: Synthetic oligonucleotide
uagcaaugguuccaaugac

SEQ ID NO: 2442365 - RNA, 19 nt, Artificial Sequence
  Description of Artificial Sequence: Synthetic oligonucleotide
ugagcucuuuuaauguuuu

SEQ ID NO: 2442366 - RNA, 19 nt, Artificial Sequence
  Description of Artificial Sequence: Synthetic oligonucleotide
uccggagccguacugcugu

SEQ ID NO: 2442367 - RNA, 19 nt, Artificial Sequence
  Description of Artificial Sequence: Synthetic oligonucleotide
agcuccucgagaucgguga

SEQ ID NO: 2442368 - RNA, 19 nt, Artificial Sequence
  Description of Artificial Sequence: Synthetic oligonucleotide
uguucauuuucagcaaguc

SEQ ID NO: 2442369 - RNA, 19 nt, Artificial Sequence
  Description of Artificial Sequence: Synthetic oligonucleotide
aaggacgauggcggcgucc

SEQ ID NO: 2442370 - RNA, 19 nt, Artificial Sequence
  Description of Artificial Sequence: Synthetic oligonucleotide
agaguuucacgaugguagu

SEQ ID NO: 2442371 - RNA, 19 nt, Artificial Sequence
  Description of Artificial Sequence: Synthetic oligonucleotide
agggucgcggccaugaguc

SEQ ID NO: 2442372 - RNA, 19 nt, Artificial Sequence
  Description of Artificial Sequence: Synthetic oligonucleotide
aggacgauggcggcguccc

SEQ ID NO: 2442373 - RNA, 19 nt, Artificial Sequence
  Description of Artificial Sequence: Synthetic oligonucleotide
ucuaguuggaggagcucaa

SEQ ID NO: 2442374 - RNA, 19 nt, Artificial Sequence
  Description of Artificial Sequence: Synthetic oligonucleotide
guaaaggcaaucuugccau

SEQ ID NO: 2442375 - RNA, 19 nt, Artificial Sequence
  Description of Artificial Sequence: Synthetic oligonucleotide
ucgagaucggugacuacaa

SEQ ID NO: 2442376 - RNA, 19 nt, Artificial Sequence
  Description of Artificial Sequence: Synthetic oligonucleotide
acaccacgcaacccacgcc

SEQ ID NO: 2442377 - RNA, 19 nt, Artificial Sequence
  Description of Artificial Sequence: Synthetic oligonucleotide
uauaugcagucagccauca

SEQ ID NO: 2442378 - RNA, 19 nt, Artificial Sequence
  Description of Artificial Sequence: Synthetic oligonucleotide
ugcucuguucacaucuuua

SEQ ID NO: 2442379 - RNA, 19 nt, Artificial Sequence
  Description of Artificial Sequence: Synthetic oligonucleotide
ugcuguagccgaagggcug

SEQ ID NO: 2442380 - RNA, 19 nt, Artificial Sequence
  Description of Artificial Sequence: Synthetic oligonucleotide
acgaaugucuucacuucgg

SEQ ID NO: 2442381 - RNA, 19 nt, Artificial Sequence
  Description of Artificial Sequence: Synthetic oligonucleotide
agaucggugacuacaacau

SEQ ID NO: 2442382 - RNA, 19 nt, Artificial Sequence
  Description of Artificial Sequence: Synthetic oligonucleotide
uguucacaucuuuaccuua

SEQ ID NO: 2442383 - RNA, 19 nt, Artificial Sequence
  Description of Artificial Sequence: Synthetic oligonucleotide
guagccgaagggcuguccc

SEQ ID NO: 2442384 - RNA, 19 nt, Artificial Sequence
  Description of Artificial Sequence: Synthetic oligonucleotide
agccguacugcuguagccg

SEQ ID NO: 2442385 - RNA, 19 nt, Artificial Sequence
  Description of Artificial Sequence: Synthetic oligonucleotide
cuuuaccuuaugccgggug

SEQ ID NO: 2442386 - RNA, 19 nt, Artificial Sequence
  Description of Artificial Sequence: Synthetic oligonucleotide
ucccgcuucuccagaaccc

SEQ ID NO: 2442387 - RNA, 19 nt, Artificial Sequence
  Description of Artificial Sequence: Synthetic oligonucleotide
auggcggcgucccacacca

SEQ ID NO: 2442388 - RNA, 19 nt, Artificial Sequence
  Description of Artificial Sequence: Synthetic oligonucleotide
aagucuaguuggaggagcu

SEQ ID NO: 2442389 - RNA, 19 nt, Artificial Sequence
  Description of Artificial Sequence: Synthetic oligonucleotide
ucucuaaggucaugcugga

SEQ ID NO: 2442390 - RNA, 19 nt, Artificial Sequence
  Description of Artificial Sequence: Synthetic oligonucleotide
uggaggagcucaaaauauu

SEQ ID NO: 2442391 - RNA, 19 nt, Artificial Sequence
  Description of Artificial Sequence: Synthetic oligonucleotide
cauguuucagauccacuga

SEQ ID NO: 2442392 - RNA, 19 nt, Artificial Sequence
  Description of Artificial Sequence: Synthetic oligonucleotide
gaggagcucaaaauauuuc

SEQ ID NO: 2442393 - RNA, 19 nt, Artificial Sequence
  Description of Artificial Sequence: Synthetic oligonucleotide
auguagucuggugaaguca

SEQ ID NO: 2442394 - RNA, 19 nt, Artificial Sequence
  Description of Artificial Sequence: Synthetic oligonucleotide
aguuucacgaugguaguuu

SEQ ID NO: 2442395 - RNA, 19 nt, Artificial Sequence
  Description of Artificial Sequence: Synthetic oligonucleotide
gagccguacugcuguagcc

SEQ ID NO: 2442396 - RNA, 19 nt, Artificial Sequence
  Description of Artificial Sequence: Synthetic oligonucleotide
uguucauauuaauguucau

SEQ ID NO: 2442397 - RNA, 19 nt, Artificial Sequence
  Description of Artificial Sequence: Synthetic oligonucleotide
ggucucuaaggucaugcug

SEQ ID NO: 2442398 - RNA, 19 nt, Artificial Sequence
  Description of Artificial Sequence: Synthetic oligonucleotide
gaugcuuguucauauuaau

SEQ ID NO: 2442399 - RNA, 19 nt, Artificial Sequence
  Description of Artificial Sequence: Synthetic oligonucleotide
cuaaggucaugcuggagaa

SEQ ID NO: 2442400 - RNA, 19 nt, Artificial Sequence
  Description of Artificial Sequence: Synthetic oligonucleotide
agcaaugguuccaaugacu

SEQ ID NO: 2442401 - RNA, 19 nt, Artificial Sequence
  Description of Artificial Sequence: Synthetic oligonucleotide
aaacgccggcgucuccagg

SEQ ID NO: 2442402 - RNA, 19 nt, Artificial Sequence
  Description of Artificial Sequence: Synthetic oligonucleotide
ugcagcuccucgagaucgg

SEQ ID NO: 2442403 - RNA, 19 nt, Artificial Sequence
  Description of Artificial Sequence: Synthetic oligonucleotide
aaaggacgauggcggcguc

SEQ ID NO: 2442404 - RNA, 19 nt, Artificial Sequence
  Description of Artificial Sequence: Synthetic oligonucleotide
guucauuuucagcaagucu

SEQ ID NO: 2442405 - RNA, 19 nt, Artificial Sequence
  Description of Artificial Sequence: Synthetic oligonucleotide
ccuuggcuugaacagaacc

SEQ ID NO: 2442406 - RNA, 19 nt, Artificial Sequence
  Description of Artificial Sequence: Synthetic oligonucleotide
ccccauuucaguaccuugg

SEQ ID NO: 2442407 - RNA, 19 nt, Artificial Sequence
  Description of Artificial Sequence: Synthetic oligonucleotide
caacccacgccuccggagc

SEQ ID NO: 2442408 - RNA, 19 nt, Artificial Sequence
  Description of Artificial Sequence: Synthetic oligonucleotide
acaucugccccgagggucg

SEQ ID NO: 2442409 - RNA, 19 nt, Artificial Sequence
  Description of Artificial Sequence: Synthetic oligonucleotide
gaaaacgccggcgucucca

SEQ ID NO: 2442410 - RNA, 19 nt, Artificial Sequence
  Description of Artificial Sequence: Synthetic oligonucleotide
caaagucuaguuggaggag

SEQ ID NO: 2442411 - RNA, 19 nt, Artificial Sequence
  Description of Artificial Sequence: Synthetic oligonucleotide
gcggccaugagucccacag

SEQ ID NO: 2442412 - RNA, 19 nt, Artificial Sequence
  Description of Artificial Sequence: Synthetic oligonucleotide
gucuaguuggaggagcuca

SEQ ID NO: 2442413 - RNA, 19 nt, Artificial Sequence
  Description of Artificial Sequence: Synthetic oligonucleotide
acuacaacaucugccccga

SEQ ID NO: 2442414 - RNA, 19 nt, Artificial Sequence
  Description of Artificial Sequence: Synthetic oligonucleotide
cauuucaguaccuuggcuu

SEQ ID NO: 2442415 - RNA, 19 nt, Artificial Sequence
  Description of Artificial Sequence: Synthetic oligonucleotide
gaucggugacuacaacauc

SEQ ID NO: 2442416 - RNA, 19 nt, Artificial Sequence
  Description of Artificial Sequence: Synthetic oligonucleotide
gauggcggcgucccacacc

SEQ ID NO: 2442417 - RNA, 19 nt, Artificial Sequence
  Description of Artificial Sequence: Synthetic oligonucleotide
cagaaccagucacaagaug

SEQ ID NO: 2442418 - RNA, 19 nt, Artificial Sequence
  Description of Artificial Sequence: Synthetic oligonucleotide
gcucuguucacaucuuuac

SEQ ID NO: 2442419 - RNA, 19 nt, Artificial Sequence
  Description of Artificial Sequence: Synthetic oligonucleotide
ugccaugccguaugcacau

SEQ ID NO: 2442420 - RNA, 19 nt, Artificial Sequence
  Description of Artificial Sequence: Synthetic oligonucleotide
accgagcggcgacucagcg

SEQ ID NO: 2442421 - RNA, 19 nt, Artificial Sequence
  Description of Artificial Sequence: Synthetic oligonucleotide
cucgagaucggugacuaca

SEQ ID NO: 2442422 - RNA, 19 nt, Artificial Sequence
  Description of Artificial Sequence: Synthetic oligonucleotide
ggucaugcuggagaaacug

SEQ ID NO: 2442423 - RNA, 19 nt, Artificial Sequence
  Description of Artificial Sequence: Synthetic oligonucleotide
aggucucuaaggucaugcu

SEQ ID NO: 2442424 - RNA, 19 nt, Artificial Sequence
  Description of Artificial Sequence: Synthetic oligonucleotide
agaugcuuguucauauuaa

SEQ ID NO: 2442425 - RNA, 19 nt, Artificial Sequence
  Description of Artificial Sequence: Synthetic oligonucleotide
uuaggggcgugaguaagau

SEQ ID NO: 2442426 - RNA, 19 nt, Artificial Sequence
  Description of Artificial Sequence: Synthetic oligonucleotide
acguuguucauagcaacau

SEQ ID NO: 2442427 - RNA, 19 nt, Artificial Sequence
  Description of Artificial Sequence: Synthetic oligonucleotide
gucuggugaagucaagucu

SEQ ID NO: 2442428 - RNA, 19 nt, Artificial Sequence
  Description of Artificial Sequence: Synthetic oligonucleotide
ugguuccaaugacuccuca

SEQ ID NO: 2442429 - RNA, 19 nt, Artificial Sequence
  Description of Artificial Sequence: Synthetic oligonucleotide
ucugccccgagggucgcgg

SEQ ID NO: 2442430 - RNA, 19 nt, Artificial Sequence
  Description of Artificial Sequence: Synthetic oligonucleotide
uuuccccauuguacguugu

SEQ ID NO: 2442431 - RNA, 19 nt, Artificial Sequence
  Description of Artificial Sequence: Synthetic oligonucleotide
uuucaguaccuuggcuuga

SEQ ID NO: 2442432 - RNA, 19 nt, Artificial Sequence
  Description of Artificial Sequence: Synthetic oligonucleotide
caugcuggagaaacuguaa

SEQ ID NO: 2442433 - RNA, 19 nt, Artificial Sequence
  Description of Artificial Sequence: Synthetic oligonucleotide
uccccauuguacguuguuc

SEQ ID NO: 2442434 - RNA, 19 nt, Artificial Sequence
  Description of Artificial Sequence: Synthetic oligonucleotide
cgagcggcgacucagcgcg

SEQ ID NO: 2442435 - RNA, 19 nt, Artificial Sequence
  Description of Artificial Sequence: Synthetic oligonucleotide
cuccagguacuuggaaagg

SEQ ID NO: 2442436 - RNA, 19 nt, Artificial Sequence
  Description of Artificial Sequence: Synthetic oligonucleotide
ggaaaggacgauggcggcg

SEQ ID NO: 2442437 - RNA, 19 nt, Artificial Sequence
  Description of Artificial Sequence: Synthetic oligonucleotide
ucacgaugguaguuuugau

SEQ ID NO: 2442438 - RNA, 19 nt, Artificial Sequence
  Description of Artificial Sequence: Synthetic oligonucleotide
cauccaugugccaggucuc

SEQ ID NO: 2442439 - RNA, 19 nt, Artificial Sequence
  Description of Artificial Sequence: Synthetic oligonucleotide
ucgccggaaaacgccggcg

SEQ ID NO: 2442440 - RNA, 19 nt, Artificial Sequence
  Description of Artificial Sequence: Synthetic oligonucleotide
agucuaguuggaggagcuc

SEQ ID NO: 2442441 - RNA, 19 nt, Artificial Sequence
  Description of Artificial Sequence: Synthetic oligonucleotide
agggcugucccaucccgcu

SEQ ID NO: 2442442 - RNA, 19 nt, Artificial Sequence
  Description of Artificial Sequence: Synthetic oligonucleotide
gcuugaacagaaccaguca

SEQ ID NO: 2442443 - RNA, 19 nt, Artificial Sequence
  Description of Artificial Sequence: Synthetic oligonucleotide
gaguaagauggaaaagagu

SEQ ID NO: 2442444 - RNA, 19 nt, Artificial Sequence
  Description of Artificial Sequence: Synthetic oligonucleotide
ggagccguacugcuguagc

SEQ ID NO: 2442445 - RNA, 19 nt, Artificial Sequence
  Description of Artificial Sequence: Synthetic oligonucleotide
gguguuaggggcgugagua

SEQ ID NO: 2442446 - RNA, 19 nt, Artificial Sequence
  Description of Artificial Sequence: Synthetic oligonucleotide
uccucgagaucggugacua

SEQ ID NO: 2442447 - RNA, 19 nt, Artificial Sequence
  Description of Artificial Sequence: Synthetic oligonucleotide
ggugcccgagcccagcucc

SEQ ID NO: 2442448 - RNA, 19 nt, Artificial Sequence
  Description of Artificial Sequence: Synthetic oligonucleotide
guauaugcagucagccauc

SEQ ID NO: 2442449 - RNA, 19 nt, Artificial Sequence
  Description of Artificial Sequence: Synthetic oligonucleotide
acccgcacgaagcuccaca

SEQ ID NO: 2442450 - RNA, 19 nt, Artificial Sequence
  Description of Artificial Sequence: Synthetic oligonucleotide
uagccgaagggcuguccca

SEQ ID NO: 2442451 - RNA, 19 nt, Artificial Sequence
  Description of Artificial Sequence: Synthetic oligonucleotide
cuccacagcggguccuccg

SEQ ID NO: 2442452 - RNA, 19 nt, Artificial Sequence
  Description of Artificial Sequence: Synthetic oligonucleotide
uguagccgaagggcugucc

SEQ ID NO: 2442453 - RNA, 19 nt, Artificial Sequence
  Description of Artificial Sequence: Synthetic oligonucleotide
uucaguaccuuggcuugaa

SEQ ID NO: 2442454 - RNA, 19 nt, Artificial Sequence
  Description of Artificial Sequence: Synthetic oligonucleotide
gaaaggacgauggcggcgu

SEQ ID NO: 2442455 - RNA, 19 nt, Artificial Sequence
  Description of Artificial Sequence: Synthetic oligonucleotide
ccagguacuuggaaaggac

SEQ ID NO: 2442456 - RNA, 19 nt, Artificial Sequence
  Description of Artificial Sequence: Synthetic oligonucleotide
ucuugccaugccguaugca

SEQ ID NO: 2442457 - RNA, 19 nt, Artificial Sequence
  Description of Artificial Sequence: Synthetic oligonucleotide
ggcggcgucccacaccacg

SEQ ID NO: 2442458 - RNA, 19 nt, Artificial Sequence
  Description of Artificial Sequence: Synthetic oligonucleotide
gcgugaguaagauggaaaa

SEQ ID NO: 2442459 - RNA, 19 nt, Artificial Sequence
  Description of Artificial Sequence: Synthetic oligonucleotide
uuaccuuaugccggguguu

SEQ ID NO: 2442460 - RNA, 19 nt, Artificial Sequence
  Description of Artificial Sequence: Synthetic oligonucleotide
acagaaccagucacaagau

SEQ ID NO: 2442461 - RNA, 19 nt, Artificial Sequence
  Description of Artificial Sequence: Synthetic oligonucleotide
uuccccauuguacguuguu

SEQ ID NO: 2442462 - RNA, 19 nt, Artificial Sequence
  Description of Artificial Sequence: Synthetic oligonucleotide
ucagcaagucuugcagcuc

SEQ ID NO: 2442463 - RNA, 19 nt, Artificial Sequence
  Description of Artificial Sequence: Synthetic oligonucleotide
augguuccaaugacuccuc

SEQ ID NO: 2442464 - RNA, 19 nt, Artificial Sequence
  Description of Artificial Sequence: Synthetic oligonucleotide
cacgcaacccacgccuccg

SEQ ID NO: 2442465 - RNA, 19 nt, Artificial Sequence
  Description of Artificial Sequence: Synthetic oligonucleotide
guaccuuggcuugaacaga

SEQ ID NO: 2442466 - RNA, 19 nt, Artificial Sequence
  Description of Artificial Sequence: Synthetic oligonucleotide
acgcaacccacgccuccgg

SEQ ID NO: 2442467 - RNA, 19 nt, Artificial Sequence
  Description of Artificial Sequence: Synthetic oligonucleotide
ccaugccguaugcacaugc

SEQ ID NO: 2442468 - RNA, 19 nt, Artificial Sequence
  Description of Artificial Sequence: Synthetic oligonucleotide
cuucucaauuucuggauuu

SEQ ID NO: 2442469 - RNA, 19 nt, Artificial Sequence
  Description of Artificial Sequence: Synthetic oligonucleotide
ccaaugacuccucauagua

SEQ ID NO: 2442470 - RNA, 19 nt, Artificial Sequence
  Description of Artificial Sequence: Synthetic oligonucleotide
gucgccggaaaacgccggc

SEQ ID NO: 2442471 - RNA, 19 nt, Artificial Sequence
  Description of Artificial Sequence: Synthetic oligonucleotide
aacccgcacgaagcuccac

SEQ ID NO: 2442472 - RNA, 19 nt, Artificial Sequence
  Description of Artificial Sequence: Synthetic oligonucleotide
cacuucgguauuccucauc

SEQ ID NO: 2442473 - RNA, 19 nt, Artificial Sequence
  Description of Artificial Sequence: Synthetic oligonucleotide
guuaggggcgugaguaaga

SEQ ID NO: 2442474 - RNA, 19 nt, Artificial Sequence
  Description of Artificial Sequence: Synthetic oligonucleotide
gugccaggucucuaagguc

SEQ ID NO: 2442475 - RNA, 19 nt, Artificial Sequence
  Description of Artificial Sequence: Synthetic oligonucleotide
cagcgcgugggccccgucg

SEQ ID NO: 2442476 - RNA, 19 nt, Artificial Sequence
  Description of Artificial Sequence: Synthetic oligonucleotide
ucuuuaccuuaugccgggu

SEQ ID NO: 2442477 - RNA, 19 nt, Artificial Sequence
  Description of Artificial Sequence: Synthetic oligonucleotide
uaaggucaugcuggagaaa

SEQ ID NO: 2442478 - RNA, 19 nt, Artificial Sequence
  Description of Artificial Sequence: Synthetic oligonucleotide
auguuuguccaaagggauu

SEQ ID NO: 2442479 - RNA, 19 nt, Artificial Sequence
  Description of Artificial Sequence: Synthetic oligonucleotide
cucuaaggucaugcuggag

SEQ ID NO: 2442480 - RNA, 19 nt, Artificial Sequence
  Description of Artificial Sequence: Synthetic oligonucleotide
gccguaugcacaugcucug

SEQ ID NO: 2442481 - RNA, 19 nt, Artificial Sequence
  Description of Artificial Sequence: Synthetic oligonucleotide
caucccgcuucuccagaac

SEQ ID NO: 2442482 - RNA, 19 nt, Artificial Sequence
  Description of Artificial Sequence: Synthetic oligonucleotide
cacaagaugcuuguucaua

SEQ ID NO: 2442483 - RNA, 19 nt, Artificial Sequence
  Description of Artificial Sequence: Synthetic oligonucleotide
gcaacccacgccuccggag

SEQ ID NO: 2442484 - RNA, 19 nt, Artificial Sequence
  Description of Artificial Sequence: Synthetic oligonucleotide
auaugcagucagccaucaa

SEQ ID NO: 2442485 - RNA, 19 nt, Artificial Sequence
  Description of Artificial Sequence: Synthetic oligonucleotide
uaccuuaugccggguguua

SEQ ID NO: 2442486 - RNA, 19 nt, Artificial Sequence
  Description of Artificial Sequence: Synthetic oligonucleotide
cacgaugguaguuuugauu

SEQ ID NO: 2442487 - RNA, 19 nt, Artificial Sequence
  Description of Artificial Sequence: Synthetic oligonucleotide
ucacuucgguauuccucau

SEQ ID NO: 2442488 - RNA, 19 nt, Artificial Sequence
  Description of Artificial Sequence: Synthetic oligonucleotide
caucaaaauguagucuggu

SEQ ID NO: 2442489 - RNA, 19 nt, Artificial Sequence
  Description of Artificial Sequence: Synthetic oligonucleotide
aagcuccacagcggguccu

SEQ ID NO: 2442490 - RNA, 19 nt, Artificial Sequence
  Description of Artificial Sequence: Synthetic oligonucleotide
ccccauuguacguuguuca

SEQ ID NO: 2442491 - RNA, 19 nt, Artificial Sequence
  Description of Artificial Sequence: Synthetic oligonucleotide
cccgucgccggaaaacgcc

SEQ ID NO: 2442492 - RNA, 19 nt, Artificial Sequence
  Description of Artificial Sequence: Synthetic oligonucleotide
cuccggagccguacugcug

SEQ ID NO: 2442493 - RNA, 19 nt, Artificial Sequence
  Description of Artificial Sequence: Synthetic oligonucleotide
cgugaguaagauggaaaag

SEQ ID NO: 2442494 - RNA, 19 nt, Artificial Sequence
  Description of Artificial Sequence: Synthetic oligonucleotide
ccgaagggcugucccaucc

SEQ ID NO: 2442495 - RNA, 19 nt, Artificial Sequence
  Description of Artificial Sequence: Synthetic oligonucleotide
guguuaggggcgugaguaa

SEQ ID NO: 2442496 - RNA, 19 nt, Artificial Sequence
  Description of Artificial Sequence: Synthetic oligonucleotide
aggucaugcuggagaaacu

SEQ ID NO: 2442497 - RNA, 19 nt, Artificial Sequence
  Description of Artificial Sequence: Synthetic oligonucleotide
guuucacgaugguaguuuu

SEQ ID NO: 2442498 - RNA, 19 nt, Artificial Sequence
  Description of Artificial Sequence: Synthetic oligonucleotide
agcggguccuccgccuccg

SEQ ID NO: 2442499 - RNA, 19 nt, Artificial Sequence
  Description of Artificial Sequence: Synthetic oligonucleotide
ggcgugaguaagauggaaa

SEQ ID NO: 2442500 - RNA, 19 nt, Artificial Sequence
  Description of Artificial Sequence: Synthetic oligonucleotide
cuacaacaucugccccgag

SEQ ID NO: 2442501 - RNA, 19 nt, Artificial Sequence
  Description of Artificial Sequence: Synthetic oligonucleotide
accacgcaacccacgccuc

SEQ ID NO: 2442502 - RNA, 19 nt, Artificial Sequence
  Description of Artificial Sequence: Synthetic oligonucleotide
gagggucgcggccaugagu

SEQ ID NO: 2442503 - RNA, 19 nt, Artificial Sequence
  Description of Artificial Sequence: Synthetic oligonucleotide
ccgucgccggaaaacgccg

SEQ ID NO: 2442504 - RNA, 19 nt, Artificial Sequence
  Description of Artificial Sequence: Synthetic oligonucleotide
cagaacccgcacgaagcuc

SEQ ID NO: 2442505 - RNA, 19 nt, Artificial Sequence
  Description of Artificial Sequence: Synthetic oligonucleotide
cccgcacgaagcuccacag

SEQ ID NO: 2442506 - RNA, 19 nt, Artificial Sequence
  Description of Artificial Sequence: Synthetic oligonucleotide
agcaccgagcggcgacuca

SEQ ID NO: 2442507 - RNA, 19 nt, Artificial Sequence
  Description of Artificial Sequence: Synthetic oligonucleotide
ggcugucccaucccgcuuc

SEQ ID NO: 2442508 - RNA, 19 nt, Artificial Sequence
  Description of Artificial Sequence: Synthetic oligonucleotide
caugccguaugcacaugcu

SEQ ID NO: 2442509 - RNA, 19 nt, Artificial Sequence
  Description of Artificial Sequence: Synthetic oligonucleotide
agccgaagggcugucccau

SEQ ID NO: 2442510 - RNA, 19 nt, Artificial Sequence
  Description of Artificial Sequence: Synthetic oligonucleotide
cacgccuccggagccguac

SEQ ID NO: 2442511 - RNA, 19 nt, Artificial Sequence
  Description of Artificial Sequence: Synthetic oligonucleotide
uccaugugccaggucucua

SEQ ID NO: 2442512 - RNA, 19 nt, Artificial Sequence
  Description of Artificial Sequence: Synthetic oligonucleotide
gcaccgagcggcgacucag

SEQ ID NO: 2442513 - RNA, 19 nt, Artificial Sequence
  Description of Artificial Sequence: Synthetic oligonucleotide
ggcgacucagcgcgugggc

SEQ ID NO: 2442514 - RNA, 19 nt, Artificial Sequence
  Description of Artificial Sequence: Synthetic oligonucleotide
gccccgucgccggaaaacg

SEQ ID NO: 2442515 - RNA, 19 nt, Artificial Sequence
  Description of Artificial Sequence: Synthetic oligonucleotide
ggaaaacgccggcgucucc

SEQ ID NO: 2442516 - RNA, 19 nt, Artificial Sequence
  Description of Artificial Sequence: Synthetic oligonucleotide
gucauccaugugccagguc

SEQ ID NO: 2442517 - RNA, 19 nt, Artificial Sequence
  Description of Artificial Sequence: Synthetic oligonucleotide
ggcaaucuugccaugccgu

SEQ ID NO: 2442518 - RNA, 19 nt, Artificial Sequence
  Description of Artificial Sequence: Synthetic oligonucleotide
cuaguuggaggagcucaaa

SEQ ID NO: 2442519 - RNA, 19 nt, Artificial Sequence
  Description of Artificial Sequence: Synthetic oligonucleotide
agcggcgacucagcgcgug

SEQ ID NO: 2442520 - RNA, 19 nt, Artificial Sequence
  Description of Artificial Sequence: Synthetic oligonucleotide
cgucccacaccacgcaacc

SEQ ID NO: 2442521 - RNA, 19 nt, Artificial Sequence
  Description of Artificial Sequence: Synthetic oligonucleotide
gcaaucuugccaugccgua

SEQ ID NO: 2442522 - RNA, 19 nt, Artificial Sequence
  Description of Artificial Sequence: Synthetic oligonucleotide
gccguacugcuguagccga

SEQ ID NO: 2442523 - RNA, 19 nt, Artificial Sequence
  Description of Artificial Sequence: Synthetic oligonucleotide
acgccuccggagccguacu

SEQ ID NO: 2442524 - RNA, 19 nt, Artificial Sequence
  Description of Artificial Sequence: Synthetic oligonucleotide
ggaggagcucaaaauauuu

SEQ ID NO: 2442525 - RNA, 19 nt, Artificial Sequence
  Description of Artificial Sequence: Synthetic oligonucleotide
caagaugcuuguucauauu

SEQ ID NO: 2442526 - RNA, 19 nt, Artificial Sequence
  Description of Artificial Sequence: Synthetic oligonucleotide
cggugacuacaacaucugc

SEQ ID NO: 2442527 - RNA, 19 nt, Artificial Sequence
  Description of Artificial Sequence: Synthetic oligonucleotide
gcgacucagcgcgugggcc

SEQ ID NO: 2442528 - RNA, 19 nt, Artificial Sequence
  Description of Artificial Sequence: Synthetic oligonucleotide
acgaagcuccacagcgggu

SEQ ID NO: 2442529 - RNA, 19 nt, Artificial Sequence
  Description of Artificial Sequence: Synthetic oligonucleotide
gaacccgcacgaagcucca

SEQ ID NO: 2442530 - RNA, 19 nt, Artificial Sequence
  Description of Artificial Sequence: Synthetic oligonucleotide
cgacucagcgcgugggccc

SEQ ID NO: 2442531 - RNA, 19 nt, Artificial Sequence
  Description of Artificial Sequence: Synthetic oligonucleotide
gcaacauauaauacauguu

SEQ ID NO: 2442532 - RNA, 19 nt, Artificial Sequence
  Description of Artificial Sequence: Synthetic oligonucleotide
ccgagcggcgacucagcgc

SEQ ID NO: 2442533 - RNA, 19 nt, Artificial Sequence
  Description of Artificial Sequence: Synthetic oligonucleotide
gaguuucacgaugguaguu

SEQ ID NO: 2442534 - RNA, 19 nt, Artificial Sequence
  Description of Artificial Sequence: Synthetic oligonucleotide
cguacugcuguagccgaag

SEQ ID NO: 2442535 - RNA, 19 nt, Artificial Sequence
  Description of Artificial Sequence: Synthetic oligonucleotide
gcuccucgagaucggugac

SEQ ID NO: 2442536 - RNA, 19 nt, Artificial Sequence
  Description of Artificial Sequence: Synthetic oligonucleotide
ccacgcaacccacgccucc

SEQ ID NO: 2442537 - RNA, 19 nt, Artificial Sequence
  Description of Artificial Sequence: Synthetic oligonucleotide
ccaugugccaggucucuaa

SEQ ID NO: 2442538 - RNA, 19 nt, Artificial Sequence
  Description of Artificial Sequence: Synthetic oligonucleotide
aucugccccgagggucgcg

SEQ ID NO: 2442539 - RNA, 19 nt, Artificial Sequence
  Description of Artificial Sequence: Synthetic oligonucleotide
ccgcuucuccagaacccgc

SEQ ID NO: 2442540 - RNA, 19 nt, Artificial Sequence
  Description of Artificial Sequence: Synthetic oligonucleotide
gcggcgacucagcgcgugg

SEQ ID NO: 2442541 - RNA, 19 nt, Artificial Sequence
  Description of Artificial Sequence: Synthetic oligonucleotide
gguacuuggaaaggacgau

SEQ ID NO: 2442542 - RNA, 19 nt, Artificial Sequence
  Description of Artificial Sequence: Synthetic oligonucleotide
gucgcggccaugaguccca

SEQ ID NO: 2442543 - RNA, 19 nt, Artificial Sequence
  Description of Artificial Sequence: Synthetic oligonucleotide
gccuccggagccguacugc

SEQ ID NO: 2442544 - RNA, 19 nt, Artificial Sequence
  Description of Artificial Sequence: Synthetic oligonucleotide
gccggaaaacgccggcguc

SEQ ID NO: 2442545 - RNA, 19 nt, Artificial Sequence
  Description of Artificial Sequence: Synthetic oligonucleotide
gcggcgucccacaccacgc

SEQ ID NO: 2442546 - RNA, 19 nt, Artificial Sequence
  Description of Artificial Sequence: Synthetic oligonucleotide
caaucuugccaugccguau

SEQ ID NO: 2442547 - RNA, 19 nt, Artificial Sequence
  Description of Artificial Sequence: Synthetic oligonucleotide
cgaagggcugucccauccc

SEQ ID NO: 2442548 - RNA, 19 nt, Artificial Sequence
  Description of Artificial Sequence: Synthetic oligonucleotide
cacagccccggugcccgag

SEQ ID NO: 2442549 - RNA, 19 nt, Artificial Sequence
  Description of Artificial Sequence: Synthetic oligonucleotide
ucagcgcgugggccccguc

SEQ ID NO: 2442550 - RNA, 19 nt, Artificial Sequence
  Description of Artificial Sequence: Synthetic oligonucleotide
ccgcacgaagcuccacagc

SEQ ID NO: 2442551 - RNA, 19 nt, Artificial Sequence
  Description of Artificial Sequence: Synthetic oligonucleotide
ccccgucgccggaaaacgc

SEQ ID NO: 2442552 - RNA, 19 nt, Artificial Sequence
  Description of Artificial Sequence: Synthetic oligonucleotide
cuucgguauuccucaucau

SEQ ID NO: 2442553 - RNA, 19 nt, Artificial Sequence
  Description of Artificial Sequence: Synthetic oligonucleotide
ggccccgucgccggaaaac

SEQ ID NO: 2442554 - RNA, 19 nt, Artificial Sequence
  Description of Artificial Sequence: Synthetic oligonucleotide
acgccggcgucuccaggua

SEQ ID NO: 2442555 - RNA, 19 nt, Artificial Sequence
  Description of Artificial Sequence: Synthetic oligonucleotide
cgucgccggaaaacgccgg

SEQ ID NO: 2442556 - RNA, 19 nt, Artificial Sequence
  Description of Artificial Sequence: Synthetic oligonucleotide
gggucgcggccaugagucc

SEQ ID NO: 2442557 - RNA, 19 nt, Artificial Sequence
  Description of Artificial Sequence: Synthetic oligonucleotide
cgagaucggugacuacaac

SEQ ID NO: 2442558 - RNA, 19 nt, Artificial Sequence
  Description of Artificial Sequence: Synthetic oligonucleotide
gcgucccacaccacgcaac

SEQ ID NO: 2442559 - RNA, 19 nt, Artificial Sequence
  Description of Artificial Sequence: Synthetic oligonucleotide
gggcgugaguaagauggaa

SEQ ID NO: 2442560 - RNA, 19 nt, Artificial Sequence
  Description of Artificial Sequence: Synthetic oligonucleotide
ccauuguacguuguucaua

SEQ ID NO: 2442561 - RNA, 19 nt, Artificial Sequence
  Description of Artificial Sequence: Synthetic oligonucleotide
cagcaccgagcggcgacuc

SEQ ID NO: 2442562 - RNA, 19 nt, Artificial Sequence
  Description of Artificial Sequence: Synthetic oligonucleotide
ccauuucaguaccuuggcu

SEQ ID NO: 2442563 - RNA, 19 nt, Artificial Sequence
  Description of Artificial Sequence: Synthetic oligonucleotide
ggcgucccacaccacgcaa

SEQ ID NO: 2442564 - RNA, 19 nt, Artificial Sequence
  Description of Artificial Sequence: Synthetic oligonucleotide
cguuguucauagcaacaua

SEQ ID NO: 2442565 - RNA, 19 nt, Artificial Sequence
  Description of Artificial Sequence: Synthetic oligonucleotide
ccucgagaucggugacuac

SEQ ID NO: 2442566 - RNA, 19 nt, Artificial Sequence
  Description of Artificial Sequence: Synthetic oligonucleotide
gcuguagccgaagggcugu

SEQ ID NO: 2442567 - RNA, 19 nt, Artificial Sequence
  Description of Artificial Sequence: Synthetic oligonucleotide
uggcggcgucccacaccac

SEQ ID NO: 2442568 - RNA, 19 nt, Artificial Sequence
  Description of Artificial Sequence: Synthetic oligonucleotide
ucgcggccaugagucccac

SEQ ID NO: 2442569 - RNA, 19 nt, Artificial Sequence
  Description of Artificial Sequence: Synthetic oligonucleotide
cuccucgagaucggugacu

SEQ ID NO: 2442570 - RNA, 19 nt, Artificial Sequence
  Description of Artificial Sequence: Synthetic oligonucleotide
ggggcgugaguaagaugga

SEQ ID NO: 2442571 - RNA, 19 nt, Artificial Sequence
  Description of Artificial Sequence: Synthetic oligonucleotide
ggguguuaggggcgugagu

SEQ ID NO: 2442572 - RNA, 19 nt, Artificial Sequence
  Description of Artificial Sequence: Synthetic oligonucleotide
ggucauccaugugccaggu

SEQ ID NO: 2442573 - RNA, 19 nt, Artificial Sequence
  Description of Artificial Sequence: Synthetic oligonucleotide
guccguggugguggucauc

SEQ ID NO: 2442574 - RNA, 19 nt, Artificial Sequence
  Description of Artificial Sequence: Synthetic oligonucleotide
gccgaagggcugucccauc

SEQ ID NO: 2442575 - RNA, 19 nt, Artificial Sequence
  Description of Artificial Sequence: Synthetic oligonucleotide
cugucccaucccgcuucuc

SEQ ID NO: 2442576 - RNA, 19 nt, Artificial Sequence
  Description of Artificial Sequence: Synthetic oligonucleotide
ccaucccgcuucuccagaa

SEQ ID NO: 2442577 - RNA, 19 nt, Artificial Sequence
  Description of Artificial Sequence: Synthetic oligonucleotide
gcgucuccagguacuugga

SEQ ID NO: 2442578 - RNA, 19 nt, Artificial Sequence
  Description of Artificial Sequence: Synthetic oligonucleotide
cggguguuaggggcgugag

SEQ ID NO: 2442579 - RNA, 19 nt, Artificial Sequence
  Description of Artificial Sequence: Synthetic oligonucleotide
ccgagggucgcggccauga

SEQ ID NO: 2442580 - RNA, 19 nt, Artificial Sequence
  Description of Artificial Sequence: Synthetic oligonucleotide
cggaaaacgccggcgucuc

SEQ ID NO: 2442581 - RNA, 19 nt, Artificial Sequence
  Description of Artificial Sequence: Synthetic oligonucleotide
gccaugccguaugcacaug

SEQ ID NO: 2442582 - RNA, 19 nt, Artificial Sequence
  Description of Artificial Sequence: Synthetic oligonucleotide
cggcgacucagcgcguggg

SEQ ID NO: 2442583 - RNA, 19 nt, Artificial Sequence
  Description of Artificial Sequence: Synthetic oligonucleotide
gcgcgugggccccgucgcc

SEQ ID NO: 2442584 - RNA, 19 nt, Artificial Sequence
  Description of Artificial Sequence: Synthetic oligonucleotide
cgcgugggccccgucgccg

SEQ ID NO: 2442585 - RNA, 19 nt, Artificial Sequence
  Description of Artificial Sequence: Synthetic oligonucleotide
cgagggucgcggccaugag

SEQ ID NO: 2442586 - RNA, 19 nt, Artificial Sequence
  Description of Artificial Sequence: Synthetic oligonucleotide
ccggaaaacgccggcgucu

SEQ ID NO: 2442587 - RNA, 19 nt, Artificial Sequence
  Description of Artificial Sequence: Synthetic oligonucleotide
gcugucccaucccgcuucu

SEQ ID NO: 2442588 - RNA, 19 nt, Artificial Sequence
  Description of Artificial Sequence: Synthetic oligonucleotide
cgauggcggcgucccacac

SEQ ID NO: 2442589 - RNA, 19 nt, Artificial Sequence
  Description of Artificial Sequence: Synthetic oligonucleotide
ccggguguuaggggcguga

SEQ ID NO: 2442590 - RNA, 19 nt, Artificial Sequence
  Description of Artificial Sequence: Synthetic oligonucleotide
ccguacugcuguagccgaa

SEQ ID NO: 2442591 - RNA, 19 nt, Artificial Sequence
  Description of Artificial Sequence: Synthetic oligonucleotide
gcaguccgugguggugguc

SEQ ID NO: 2442592 - RNA, 19 nt, Artificial Sequence
  Description of Artificial Sequence: Synthetic oligonucleotide
gccggguguuaggggcgug

SEQ ID NO: 2442593 - RNA, 19 nt, Artificial Sequence
  Description of Artificial Sequence: Synthetic oligonucleotide
cgcaacccacgccuccgga

SEQ ID NO: 2442594 - RNA, 19 nt, Artificial Sequence
  Description of Artificial Sequence: Synthetic oligonucleotide
cgaugguaguuuugauuuu

SEQ ID NO: 2442595 - RNA, 19 nt, Artificial Sequence
  Description of Artificial Sequence: Synthetic oligonucleotide
gggccccgucgccggaaaa

SEQ ID NO: 2442596 - RNA, 19 nt, Artificial Sequence
  Description of Artificial Sequence: Synthetic oligonucleotide
gggcugucccaucccgcuu

SEQ ID NO: 2442597 - RNA, 19 nt, Artificial Sequence
  Description of Artificial Sequence: Synthetic oligonucleotide
cgccggaaaacgccggcgu

SEQ ID NO: 2442598 - RNA, 19 nt, Artificial Sequence
  Description of Artificial Sequence: Synthetic oligonucleotide
cggcgucccacaccacgca

SEQ ID NO: 2442599 - RNA, 19 nt, Artificial Sequence
  Description of Artificial Sequence: Synthetic oligonucleotide
gagcggcgacucagcgcgu

SEQ ID NO: 2442600 - RNA, 19 nt, Artificial Sequence
  Description of Artificial Sequence: Synthetic oligonucleotide
cucagcgcgugggccccgu

SEQ ID NO: 2442601 - RNA, 19 nt, Artificial Sequence
  Description of Artificial Sequence: Synthetic oligonucleotide
cccgagggucgcggccaug

SEQ ID NO: 2442602 - RNA, 19 nt, Artificial Sequence
  Description of Artificial Sequence: Synthetic oligonucleotide
ccggagccguacugcugua

SEQ ID NO: 2442603 - RNA, 19 nt, Artificial Sequence
  Description of Artificial Sequence: Synthetic oligonucleotide
ccggugcccgagcccagcu

SEQ ID NO: 2442604 - RNA, 19 nt, Artificial Sequence
  Description of Artificial Sequence: Synthetic oligonucleotide
ccacagccccggugcccga

SEQ ID NO: 2442605 - RNA, 19 nt, Artificial Sequence
  Description of Artificial Sequence: Synthetic oligonucleotide
cgccuccggcuccgacgcc

SEQ ID NO: 2442606 - RNA, 19 nt, Artificial Sequence
  Description of Artificial Sequence: Synthetic oligonucleotide
ccggcgucuccagguacuu

SEQ ID NO: 2442607 - RNA, 19 nt, Artificial Sequence
  Description of Artificial Sequence: Synthetic oligonucleotide
ccccgagggucgcggccau

SEQ ID NO: 2442608 - RNA, 19 nt, Artificial Sequence
  Description of Artificial Sequence: Synthetic oligonucleotide
aacauucaaacauagauuc

SEQ ID NO: 2442609 - RNA, 19 nt, Artificial Sequence
  Description of Artificial Sequence: Synthetic oligonucleotide
auugauaaaacacauccac

SEQ ID NO: 2442610 - RNA, 19 nt, Artificial Sequence
  Description of Artificial Sequence: Synthetic oligonucleotide
aagccuaccaucuucaaac

SEQ ID NO: 2442611 - RNA, 19 nt, Artificial Sequence
  Description of Artificial Sequence: Synthetic oligonucleotide
auaaauauuaguuuacuga

SEQ ID NO: 2442612 - RNA, 19 nt, Artificial Sequence
  Description of Artificial Sequence: Synthetic oligonucleotide
ugguuaaagaauauaacag

SEQ ID NO: 2442613 - RNA, 19 nt, Artificial Sequence
  Description of Artificial Sequence: Synthetic oligonucleotide
uaaagaauauaacagggca

SEQ ID NO: 2442614 - RNA, 19 nt, Artificial Sequence
  Description of Artificial Sequence: Synthetic oligonucleotide
aauaaauauuaguuuacug

SEQ ID NO: 2442615 - RNA, 19 nt, Artificial Sequence
  Description of Artificial Sequence: Synthetic oligonucleotide
acaaaguagacauaaaaug

SEQ ID NO: 2442616 - RNA, 19 nt, Artificial Sequence
  Description of Artificial Sequence: Synthetic oligonucleotide
uuuucuaaaacuuuuaauu

SEQ ID NO: 2442617 - RNA, 19 nt, Artificial Sequence
  Description of Artificial Sequence: Synthetic oligonucleotide
aaucuucugaaccaugggg

SEQ ID NO: 2442618 - RNA, 19 nt, Artificial Sequence
  Description of Artificial Sequence: Synthetic oligonucleotide
uuuacugagauauuuuaag

SEQ ID NO: 2442619 - RNA, 19 nt, Artificial Sequence
  Description of Artificial Sequence: Synthetic oligonucleotide
aauauuaguuuacugagau

SEQ ID NO: 2442620 - RNA, 19 nt, Artificial Sequence
  Description of Artificial Sequence: Synthetic oligonucleotide
uugguuaaagaauauaaca

SEQ ID NO: 2442621 - RNA, 19 nt, Artificial Sequence
  Description of Artificial Sequence: Synthetic oligonucleotide
uugugaaauaaauaaauac

SEQ ID NO: 2442622 - RNA, 19 nt, Artificial Sequence
  Description of Artificial Sequence: Synthetic oligonucleotide
aauauaacagggcacuaug

SEQ ID NO: 2442623 - RNA, 19 nt, Artificial Sequence
  Description of Artificial Sequence: Synthetic oligonucleotide
auauuuuaagccuaccauc

SEQ ID NO: 2442624 - RNA, 19 nt, Artificial Sequence
  Description of Artificial Sequence: Synthetic oligonucleotide
cuuuccaaaacauucaaac

SEQ ID NO: 2442625 - RNA, 19 nt, Artificial Sequence
  Description of Artificial Sequence: Synthetic oligonucleotide
auaaaacacauccacaaug

SEQ ID NO: 2442626 - RNA, 19 nt, Artificial Sequence
  Description of Artificial Sequence: Synthetic oligonucleotide
guuaaagaauauaacaggg

SEQ ID NO: 2442627 - RNA, 19 nt, Artificial Sequence
  Description of Artificial Sequence: Synthetic oligonucleotide
ucugucacaagacagacaa

SEQ ID NO: 2442628 - RNA, 19 nt, Artificial Sequence
  Description of Artificial Sequence: Synthetic oligonucleotide
uucaauaaauaacugacau

SEQ ID NO: 2442629 - RNA, 19 nt, Artificial Sequence
  Description of Artificial Sequence: Synthetic oligonucleotide
uuaaagaauauaacagggc

SEQ ID NO: 2442630 - RNA, 19 nt, Artificial Sequence
  Description of Artificial Sequence: Synthetic oligonucleotide
uauuaguuuacugagauau

SEQ ID NO: 2442631 - RNA, 19 nt, Artificial Sequence
  Description of Artificial Sequence: Synthetic oligonucleotide
aaguagacauaaaaugucc

SEQ ID NO: 2442632 - RNA, 19 nt, Artificial Sequence
  Description of Artificial Sequence: Synthetic oligonucleotide
ugaacuaccauugauaaaa

SEQ ID NO: 2442633 - RNA, 19 nt, Artificial Sequence
  Description of Artificial Sequence: Synthetic oligonucleotide
aaaguagacauaaaauguc

SEQ ID NO: 2442634 - RNA, 19 nt, Artificial Sequence
  Description of Artificial Sequence: Synthetic oligonucleotide
ucaauguugaccauuaaua

SEQ ID NO: 2442635 - RNA, 19 nt, Artificial Sequence
  Description of Artificial Sequence: Synthetic oligonucleotide
aauaaauaggaguguuguc

SEQ ID NO: 2442636 - RNA, 19 nt, Artificial Sequence
  Description of Artificial Sequence: Synthetic oligonucleotide
auaacagggcacuaugccc

SEQ ID NO: 2442637 - RNA, 19 nt, Artificial Sequence
  Description of Artificial Sequence: Synthetic oligonucleotide
aaauaaauaggaguguugu

SEQ ID NO: 2442638 - RNA, 19 nt, Artificial Sequence
  Description of Artificial Sequence: Synthetic oligonucleotide
agaaacauugguuaaagaa

SEQ ID NO: 2442639 - RNA, 19 nt, Artificial Sequence
  Description of Artificial Sequence: Synthetic oligonucleotide
uauuuuaagccuaccaucu

SEQ ID NO: 2442640 - RNA, 19 nt, Artificial Sequence
  Description of Artificial Sequence: Synthetic oligonucleotide
uaugacuucgguuugggug

SEQ ID NO: 2442641 - RNA, 19 nt, Artificial Sequence
  Description of Artificial Sequence: Synthetic oligonucleotide
aaagaauauaacagggcac

SEQ ID NO: 2442642 - RNA, 19 nt, Artificial Sequence
  Description of Artificial Sequence: Synthetic oligonucleotide
agugguugacacuuaaugg

SEQ ID NO: 2442643 - RNA, 19 nt, Artificial Sequence
  Description of Artificial Sequence: Synthetic oligonucleotide
uguuaaauauuaauguaaa

SEQ ID NO: 2442644 - RNA, 19 nt, Artificial Sequence
  Description of Artificial Sequence: Synthetic oligonucleotide
uuccaaaacauucaaacau

SEQ ID NO: 2442645 - RNA, 19 nt, Artificial Sequence
  Description of Artificial Sequence: Synthetic oligonucleotide
uuuguaacaguccuuuuga

SEQ ID NO: 2442646 - RNA, 19 nt, Artificial Sequence
  Description of Artificial Sequence: Synthetic oligonucleotide
ugaacaaucagaacugaac

SEQ ID NO: 2442647 - RNA, 19 nt, Artificial Sequence
  Description of Artificial Sequence: Synthetic oligonucleotide
augacuucgguuugggugc

SEQ ID NO: 2442648 - RNA, 19 nt, Artificial Sequence
  Description of Artificial Sequence: Synthetic oligonucleotide
uacugagauauuuuaagcc

SEQ ID NO: 2442649 - RNA, 19 nt, Artificial Sequence
  Description of Artificial Sequence: Synthetic oligonucleotide
ugauaaaacacauccacaa

SEQ ID NO: 2442650 - RNA, 19 nt, Artificial Sequence
  Description of Artificial Sequence: Synthetic oligonucleotide
gacauaaaauguccaaggg

SEQ ID NO: 2442651 - RNA, 19 nt, Artificial Sequence
  Description of Artificial Sequence: Synthetic oligonucleotide
aacaggagccccuguagcc

SEQ ID NO: 2442652 - RNA, 19 nt, Artificial Sequence
  Description of Artificial Sequence: Synthetic oligonucleotide
gguuaaagaauauaacagg

SEQ ID NO: 2442653 - RNA, 19 nt, Artificial Sequence
  Description of Artificial Sequence: Synthetic oligonucleotide
ugaucauaugcucucaucu

SEQ ID NO: 2442654 - RNA, 19 nt, Artificial Sequence
  Description of Artificial Sequence: Synthetic oligonucleotide
uauaacagggcacuaugcc

SEQ ID NO: 2442655 - RNA, 19 nt, Artificial Sequence
  Description of Artificial Sequence: Synthetic oligonucleotide
acauaaauaaauaggagug

SEQ ID NO: 2442656 - RNA, 19 nt, Artificial Sequence
  Description of Artificial Sequence: Synthetic oligonucleotide
agcuuugugaaauaaauaa

SEQ ID NO: 2442657 - RNA, 19 nt, Artificial Sequence
  Description of Artificial Sequence: Synthetic oligonucleotide
ugucacaagacagacaaag

SEQ ID NO: 2442658 - RNA, 19 nt, Artificial Sequence
  Description of Artificial Sequence: Synthetic oligonucleotide
aaucuuacuucuuucucug

SEQ ID NO: 2442659 - RNA, 19 nt, Artificial Sequence
  Description of Artificial Sequence: Synthetic oligonucleotide
acaauguuaaauauuaaug

SEQ ID NO: 2442660 - RNA, 19 nt, Artificial Sequence
  Description of Artificial Sequence: Synthetic oligonucleotide
uccacaauguuaaauauua

SEQ ID NO: 2442661 - RNA, 19 nt, Artificial Sequence
  Description of Artificial Sequence: Synthetic oligonucleotide
acaaucagaacugaacuac

SEQ ID NO: 2442662 - RNA, 19 nt, Artificial Sequence
  Description of Artificial Sequence: Synthetic oligonucleotide
auaacugacauucuuucca

SEQ ID NO: 2442663 - RNA, 19 nt, Artificial Sequence
  Description of Artificial Sequence: Synthetic oligonucleotide
uucaaacugaacaaucaga

SEQ ID NO: 2442664 - RNA, 19 nt, Artificial Sequence
  Description of Artificial Sequence: Synthetic oligonucleotide
uuacugagauauuuuaagc

SEQ ID NO: 2442665 - RNA, 19 nt, Artificial Sequence
  Description of Artificial Sequence: Synthetic oligonucleotide
uaaauaggaguguugucag

SEQ ID NO: 2442666 - RNA, 19 nt, Artificial Sequence
  Description of Artificial Sequence: Synthetic oligonucleotide
aagaauauaacagggcacu

SEQ ID NO: 2442667 - RNA, 19 nt, Artificial Sequence
  Description of Artificial Sequence: Synthetic oligonucleotide
ccuaauacaaacaugauca

SEQ ID NO: 2442668 - RNA, 19 nt, Artificial Sequence
  Description of Artificial Sequence: Synthetic oligonucleotide
auuuguaacaguccuuuug

SEQ ID NO: 2442669 - RNA, 19 nt, Artificial Sequence
  Description of Artificial Sequence: Synthetic oligonucleotide
auaaauaggaguguuguca

SEQ ID NO: 2442670 - RNA, 19 nt, Artificial Sequence
  Description of Artificial Sequence: Synthetic oligonucleotide
acaugcuucucuuacagug

SEQ ID NO: 2442671 - RNA, 19 nt, Artificial Sequence
  Description of Artificial Sequence: Synthetic oligonucleotide
acugagauauuuuaagccu

SEQ ID NO: 2442672 - RNA, 19 nt, Artificial Sequence
  Description of Artificial Sequence: Synthetic oligonucleotide
cauagauucccacacauuc

SEQ ID NO: 2442673 - RNA, 19 nt, Artificial Sequence
  Description of Artificial Sequence: Synthetic oligonucleotide
auugguuaaagaauauaac

SEQ ID NO: 2442674 - RNA, 19 nt, Artificial Sequence
  Description of Artificial Sequence: Synthetic oligonucleotide
ccauugauaaaacacaucc

SEQ ID NO: 2442675 - RNA, 19 nt, Artificial Sequence
  Description of Artificial Sequence: Synthetic oligonucleotide
ucaaacauagauucccaca

SEQ ID NO: 2442676 - RNA, 19 nt, Artificial Sequence
  Description of Artificial Sequence: Synthetic oligonucleotide
uccaagggaaacuucaaca

SEQ ID NO: 2442677 - RNA, 19 nt, Artificial Sequence
  Description of Artificial Sequence: Synthetic oligonucleotide
agucagcgaucacagaugc

SEQ ID NO: 2442678 - RNA, 19 nt, Artificial Sequence
  Description of Artificial Sequence: Synthetic oligonucleotide
acggauuccgcucuuuagc

SEQ ID NO: 2442679 - RNA, 19 nt, Artificial Sequence
  Description of Artificial Sequence: Synthetic oligonucleotide
aacauagauucccacacau

SEQ ID NO: 2442680 - RNA, 19 nt, Artificial Sequence
  Description of Artificial Sequence: Synthetic oligonucleotide
uuuaagccuaccaucuuca

SEQ ID NO: 2442681 - RNA, 19 nt, Artificial Sequence
  Description of Artificial Sequence: Synthetic oligonucleotide
agauauuuuaagccuacca

SEQ ID NO: 2442682 - RNA, 19 nt, Artificial Sequence
  Description of Artificial Sequence: Synthetic oligonucleotide
caaacauagauucccacac

SEQ ID NO: 2442683 - RNA, 19 nt, Artificial Sequence
  Description of Artificial Sequence: Synthetic oligonucleotide
acauaaaauguccaaggga

SEQ ID NO: 2442684 - RNA, 19 nt, Artificial Sequence
  Description of Artificial Sequence: Synthetic oligonucleotide
uugagaguggcuaugacuu

SEQ ID NO: 2442685 - RNA, 19 nt, Artificial Sequence
  Description of Artificial Sequence: Synthetic oligonucleotide
aauguugaccauuaauaua

SEQ ID NO: 2442686 - RNA, 19 nt, Artificial Sequence
  Description of Artificial Sequence: Synthetic oligonucleotide
uuuuggacaaucuucugaa

SEQ ID NO: 2442687 - RNA, 19 nt, Artificial Sequence
  Description of Artificial Sequence: Synthetic oligonucleotide
ggcacuaugcccuacaaag

SEQ ID NO: 2442688 - RNA, 19 nt, Artificial Sequence
  Description of Artificial Sequence: Synthetic oligonucleotide
uucucuguuacuuacggau

SEQ ID NO: 2442689 - RNA, 19 nt, Artificial Sequence
  Description of Artificial Sequence: Synthetic oligonucleotide
ucagcgaucacagaugcgc

SEQ ID NO: 2442690 - RNA, 19 nt, Artificial Sequence
  Description of Artificial Sequence: Synthetic oligonucleotide
acagaugcgccaccaaagc

SEQ ID NO: 2442691 - RNA, 19 nt, Artificial Sequence
  Description of Artificial Sequence: Synthetic oligonucleotide
aaagagaaacauugguuaa

SEQ ID NO: 2442692 - RNA, 19 nt, Artificial Sequence
  Description of Artificial Sequence: Synthetic oligonucleotide
aagggaaacuucaacaugu

SEQ ID NO: 2442693 - RNA, 19 nt, Artificial Sequence
  Description of Artificial Sequence: Synthetic oligonucleotide
uuuuaagccuaccaucuuc

SEQ ID NO: 2442694 - RNA, 19 nt, Artificial Sequence
  Description of Artificial Sequence: Synthetic oligonucleotide
cuuucucuguuacuuacgg

SEQ ID NO: 2442695 - RNA, 19 nt, Artificial Sequence
  Description of Artificial Sequence: Synthetic oligonucleotide
uuaauggucucccaauaaa

SEQ ID NO: 2442696 - RNA, 19 nt, Artificial Sequence
  Description of Artificial Sequence: Synthetic oligonucleotide
uucucauuuguaacagucc

SEQ ID NO: 2442697 - RNA, 19 nt, Artificial Sequence
  Description of Artificial Sequence: Synthetic oligonucleotide
uguaacaguccuuuugaac

SEQ ID NO: 2442698 - RNA, 19 nt, Artificial Sequence
  Description of Artificial Sequence: Synthetic oligonucleotide
ucuuucucuguuacuuacg

SEQ ID NO: 2442699 - RNA, 19 nt, Artificial Sequence
  Description of Artificial Sequence: Synthetic oligonucleotide
caucuuuuggacaaucuuc

SEQ ID NO: 2442700 - RNA, 19 nt, Artificial Sequence
  Description of Artificial Sequence: Synthetic oligonucleotide
uucuaaaacuuuuaauuuu

SEQ ID NO: 2442701 - RNA, 19 nt, Artificial Sequence
  Description of Artificial Sequence: Synthetic oligonucleotide
acugaacuaccauugauaa

SEQ ID NO: 2442702 - RNA, 19 nt, Artificial Sequence
  Description of Artificial Sequence: Synthetic oligonucleotide
ucgguuugggugcaguggg

SEQ ID NO: 2442703 - RNA, 19 nt, Artificial Sequence
  Description of Artificial Sequence: Synthetic oligonucleotide
cauugguuaaagaauauaa

SEQ ID NO: 2442704 - RNA, 19 nt, Artificial Sequence
  Description of Artificial Sequence: Synthetic oligonucleotide
cauucccucacccuaauac

SEQ ID NO: 2442705 - RNA, 19 nt, Artificial Sequence
  Description of Artificial Sequence: Synthetic oligonucleotide
cucguuggcaacaggagcc

SEQ ID NO: 2442706 - RNA, 19 nt, Artificial Sequence
  Description of Artificial Sequence: Synthetic oligonucleotide
cagaacugaacuaccauug

SEQ ID NO: 2442707 - RNA, 19 nt, Artificial Sequence
  Description of Artificial Sequence: Synthetic oligonucleotide
uuccugaccauucuugaga

SEQ ID NO: 2442708 - RNA, 19 nt, Artificial Sequence
  Description of Artificial Sequence: Synthetic oligonucleotide
caacaugucaauguugacc

SEQ ID NO: 2442709 - RNA, 19 nt, Artificial Sequence
  Description of Artificial Sequence: Synthetic oligonucleotide
cuucaaacugaacaaucag

SEQ ID NO: 2442710 - RNA, 19 nt, Artificial Sequence
  Description of Artificial Sequence: Synthetic oligonucleotide
cacccuaauacaaacauga

SEQ ID NO: 2442711 - RNA, 19 nt, Artificial Sequence
  Description of Artificial Sequence: Synthetic oligonucleotide
uaacagggcacuaugcccu

SEQ ID NO: 2442712 - RNA, 19 nt, Artificial Sequence
  Description of Artificial Sequence: Synthetic oligonucleotide
aauaggaguguugucagaa

SEQ ID NO: 2442713 - RNA, 19 nt, Artificial Sequence
  Description of Artificial Sequence: Synthetic oligonucleotide
auauaacagggcacuaugc

SEQ ID NO: 2442714 - RNA, 19 nt, Artificial Sequence
  Description of Artificial Sequence: Synthetic oligonucleotide
ugagauauuuuaagccuac

SEQ ID NO: 2442715 - RNA, 19 nt, Artificial Sequence
  Description of Artificial Sequence: Synthetic oligonucleotide
auaaaauacacaagcuuug

SEQ ID NO: 2442716 - RNA, 19 nt, Artificial Sequence
  Description of Artificial Sequence: Synthetic oligonucleotide
auagauucccacacauucc

SEQ ID NO: 2442717 - RNA, 19 nt, Artificial Sequence
  Description of Artificial Sequence: Synthetic oligonucleotide
caauguuaaauauuaaugu

SEQ ID NO: 2442718 - RNA, 19 nt, Artificial Sequence
  Description of Artificial Sequence: Synthetic oligonucleotide
aaacauugguuaaagaaua

SEQ ID NO: 2442719 - RNA, 19 nt, Artificial Sequence
  Description of Artificial Sequence: Synthetic oligonucleotide
aacuaccauugauaaaaca

SEQ ID NO: 2442720 - RNA, 19 nt, Artificial Sequence
  Description of Artificial Sequence: Synthetic oligonucleotide
auguugaccauuaauauaa

SEQ ID NO: 2442721 - RNA, 19 nt, Artificial Sequence
  Description of Artificial Sequence: Synthetic oligonucleotide
aguguugucagaagucagc

SEQ ID NO: 2442722 - RNA, 19 nt, Artificial Sequence
  Description of Artificial Sequence: Synthetic oligonucleotide
uccaaaacauucaaacaua

SEQ ID NO: 2442723 - RNA, 19 nt, Artificial Sequence
  Description of Artificial Sequence: Synthetic oligonucleotide
aucauaugcucucaucucu

SEQ ID NO: 2442724 - RNA, 19 nt, Artificial Sequence
  Description of Artificial Sequence: Synthetic oligonucleotide
aaacauucaaacauagauu

SEQ ID NO: 2442725 - RNA, 19 nt, Artificial Sequence
  Description of Artificial Sequence: Synthetic oligonucleotide
acauccacaauguuaaaua

SEQ ID NO: 2442726 - RNA, 19 nt, Artificial Sequence
  Description of Artificial Sequence: Synthetic oligonucleotide
agagaaacauugguuaaag

SEQ ID NO: 2442727 - RNA, 19 nt, Artificial Sequence
  Description of Artificial Sequence: Synthetic oligonucleotide
gaacaaucagaacugaacu

SEQ ID NO: 2442728 - RNA, 19 nt, Artificial Sequence
  Description of Artificial Sequence: Synthetic oligonucleotide
cuaccauugauaaaacaca

SEQ ID NO: 2442729 - RNA, 19 nt, Artificial Sequence
  Description of Artificial Sequence: Synthetic oligonucleotide
uguuacuuacggauuccgc

SEQ ID NO: 2442730 - RNA, 19 nt, Artificial Sequence
  Description of Artificial Sequence: Synthetic oligonucleotide
augaucauaugcucucauc

SEQ ID NO: 2442731 - RNA, 19 nt, Artificial Sequence
  Description of Artificial Sequence: Synthetic oligonucleotide
aaacauagauucccacaca

SEQ ID NO: 2442732 - RNA, 19 nt, Artificial Sequence
  Description of Artificial Sequence: Synthetic oligonucleotide
uuacuucuuucucuguuac

SEQ ID NO: 2442733 - RNA, 19 nt, Artificial Sequence
  Description of Artificial Sequence: Synthetic oligonucleotide
aaauauuaguuuacugaga

SEQ ID NO: 2442734 - RNA, 19 nt, Artificial Sequence
  Description of Artificial Sequence: Synthetic oligonucleotide
uuaguuuacugagauauuu

SEQ ID NO: 2442735 - RNA, 19 nt, Artificial Sequence
  Description of Artificial Sequence: Synthetic oligonucleotide
cagugguugacacuuaaug

SEQ ID NO: 2442736 - RNA, 19 nt, Artificial Sequence
  Description of Artificial Sequence: Synthetic oligonucleotide
aaacaugaucauaugcucu

SEQ ID NO: 2442737 - RNA, 19 nt, Artificial Sequence
  Description of Artificial Sequence: Synthetic oligonucleotide
uccugaccauucuugagag

SEQ ID NO: 2442738 - RNA, 19 nt, Artificial Sequence
  Description of Artificial Sequence: Synthetic oligonucleotide
cugaccauucuugagagug

SEQ ID NO: 2442739 - RNA, 19 nt, Artificial Sequence
  Description of Artificial Sequence: Synthetic oligonucleotide
caaaguagacauaaaaugu

SEQ ID NO: 2442740 - RNA, 19 nt, Artificial Sequence
  Description of Artificial Sequence: Synthetic oligonucleotide
uaccauugauaaaacacau

SEQ ID NO: 2442741 - RNA, 19 nt, Artificial Sequence
  Description of Artificial Sequence: Synthetic oligonucleotide
auguuaaauauuaauguaa

SEQ ID NO: 2442742 - RNA, 19 nt, Artificial Sequence
  Description of Artificial Sequence: Synthetic oligonucleotide
uacacaagcuuugugaaau

SEQ ID NO: 2442743 - RNA, 19 nt, Artificial Sequence
  Description of Artificial Sequence: Synthetic oligonucleotide
guagccaagcggcuggugg

SEQ ID NO: 2442744 - RNA, 19 nt, Artificial Sequence
  Description of Artificial Sequence: Synthetic oligonucleotide
agcaaucuuacuucuuucu

SEQ ID NO: 2442745 - RNA, 19 nt, Artificial Sequence
  Description of Artificial Sequence: Synthetic oligonucleotide
cugacauucuuuccaaaac

SEQ ID NO: 2442746 - RNA, 19 nt, Artificial Sequence
  Description of Artificial Sequence: Synthetic oligonucleotide
aggugaaccccugucaugg

SEQ ID NO: 2442747 - RNA, 19 nt, Artificial Sequence
  Description of Artificial Sequence: Synthetic oligonucleotide
uugaggugaaccccuguca

SEQ ID NO: 2442748 - RNA, 19 nt, Artificial Sequence
  Description of Artificial Sequence: Synthetic oligonucleotide
uaaaauacacaagcuuugu

SEQ ID NO: 2442749 - RNA, 19 nt, Artificial Sequence
  Description of Artificial Sequence: Synthetic oligonucleotide
ucacccuaauacaaacaug

SEQ ID NO: 2442750 - RNA, 19 nt, Artificial Sequence
  Description of Artificial Sequence: Synthetic oligonucleotide
ucagaacugaacuaccauu

SEQ ID NO: 2442751 - RNA, 19 nt, Artificial Sequence
  Description of Artificial Sequence: Synthetic oligonucleotide
uucaaacauagauucccac

SEQ ID NO: 2442752 - RNA, 19 nt, Artificial Sequence
  Description of Artificial Sequence: Synthetic oligonucleotide
ugaaccccugucauggucu

SEQ ID NO: 2442753 - RNA, 19 nt, Artificial Sequence
  Description of Artificial Sequence: Synthetic oligonucleotide
caaucagaacugaacuacc

SEQ ID NO: 2442754 - RNA, 19 nt, Artificial Sequence
  Description of Artificial Sequence: Synthetic oligonucleotide
gacauucaauaaauaacug

SEQ ID NO: 2442755 - RNA, 19 nt, Artificial Sequence
  Description of Artificial Sequence: Synthetic oligonucleotide
uuacuuacggauuccgcuc

SEQ ID NO: 2442756 - RNA, 19 nt, Artificial Sequence
  Description of Artificial Sequence: Synthetic oligonucleotide
acauucaaacauagauucc

SEQ ID NO: 2442757 - RNA, 19 nt, Artificial Sequence
  Description of Artificial Sequence: Synthetic oligonucleotide
gagaguggcuaugacuucg

SEQ ID NO: 2442758 - RNA, 19 nt, Artificial Sequence
  Description of Artificial Sequence: Synthetic oligonucleotide
gaucauaugcucucaucuc

SEQ ID NO: 2442759 - RNA, 19 nt, Artificial Sequence
  Description of Artificial Sequence: Synthetic oligonucleotide
uucgguuugggugcagugg

SEQ ID NO: 2442760 - RNA, 19 nt, Artificial Sequence
  Description of Artificial Sequence: Synthetic oligonucleotide
ugguugacacuuaaugguc

SEQ ID NO: 2442761 - RNA, 19 nt, Artificial Sequence
  Description of Artificial Sequence: Synthetic oligonucleotide
ucauuuguaacaguccuuu

SEQ ID NO: 2442762 - RNA, 19 nt, Artificial Sequence
  Description of Artificial Sequence: Synthetic oligonucleotide
caggguuaaggcaagcuuc

SEQ ID NO: 2442763 - RNA, 19 nt, Artificial Sequence
  Description of Artificial Sequence: Synthetic oligonucleotide
gauuccgcucuuuagcauc

SEQ ID NO: 2442764 - RNA, 19 nt, Artificial Sequence
  Description of Artificial Sequence: Synthetic oligonucleotide
cacagaugcgccaccaaag

SEQ ID NO: 2442765 - RNA, 19 nt, Artificial Sequence
  Description of Artificial Sequence: Synthetic oligonucleotide
aaauaggaguguugucaga

SEQ ID NO: 2442766 - RNA, 19 nt, Artificial Sequence
  Description of Artificial Sequence: Synthetic oligonucleotide
aagcucuggauguucuuga

SEQ ID NO: 2442767 - RNA, 19 nt, Artificial Sequence
  Description of Artificial Sequence: Synthetic oligonucleotide
aggguuaaggcaagcuucc

SEQ ID NO: 2442768 - RNA, 19 nt, Artificial Sequence
  Description of Artificial Sequence: Synthetic oligonucleotide
guguugucagaagucagcg

SEQ ID NO: 2442769 - RNA, 19 nt, Artificial Sequence
  Description of Artificial Sequence: Synthetic oligonucleotide
gaaacauugguuaaagaau

SEQ ID NO: 2442770 - RNA, 19 nt, Artificial Sequence
  Description of Artificial Sequence: Synthetic oligonucleotide
cuuuuggacaaucuucuga

SEQ ID NO: 2442771 - RNA, 19 nt, Artificial Sequence
  Description of Artificial Sequence: Synthetic oligonucleotide
aacugaacuaccauugaua

SEQ ID NO: 2442772 - RNA, 19 nt, Artificial Sequence
  Description of Artificial Sequence: Synthetic oligonucleotide
uacggauuccgcucuuuag

SEQ ID NO: 2442773 - RNA, 19 nt, Artificial Sequence
  Description of Artificial Sequence: Synthetic oligonucleotide
uaagccuaccaucuucaaa

SEQ ID NO: 2442774 - RNA, 19 nt, Artificial Sequence
  Description of Artificial Sequence: Synthetic oligonucleotide
gaagucagcgaucacagau

SEQ ID NO: 2442775 - RNA, 19 nt, Artificial Sequence
  Description of Artificial Sequence: Synthetic oligonucleotide
auucccucacccuaauaca

SEQ ID NO: 2442776 - RNA, 19 nt, Artificial Sequence
  Description of Artificial Sequence: Synthetic oligonucleotide
acuucaacaugucaauguu

SEQ ID NO: 2442777 - RNA, 19 nt, Artificial Sequence
  Description of Artificial Sequence: Synthetic oligonucleotide
auaggaguguugucagaag

SEQ ID NO: 2442778 - RNA, 19 nt, Artificial Sequence
  Description of Artificial Sequence: Synthetic oligonucleotide
ucauaugcucucaucucuc

SEQ ID NO: 2442779 - RNA, 19 nt, Artificial Sequence
  Description of Artificial Sequence: Synthetic oligonucleotide
ugacagcgcagcucguugg

SEQ ID NO: 2442780 - RNA, 19 nt, Artificial Sequence
  Description of Artificial Sequence: Synthetic oligonucleotide
agacaaagagaaacauugg

SEQ ID NO: 2442781 - RNA, 19 nt, Artificial Sequence
  Description of Artificial Sequence: Synthetic oligonucleotide
ugaggugaaccccugucau

SEQ ID NO: 2442782 - RNA, 19 nt, Artificial Sequence
  Description of Artificial Sequence: Synthetic oligonucleotide
ucacagaugcgccaccaaa

SEQ ID NO: 2442783 - RNA, 19 nt, Artificial Sequence
  Description of Artificial Sequence: Synthetic oligonucleotide
uaacugacauucuuuccaa

SEQ ID NO: 2442784 - RNA, 19 nt, Artificial Sequence
  Description of Artificial Sequence: Synthetic oligonucleotide
cauugauaaaacacaucca

SEQ ID NO: 2442785 - RNA, 19 nt, Artificial Sequence
  Description of Artificial Sequence: Synthetic oligonucleotide
ccaaaacauucaaacauag

SEQ ID NO: 2442786 - RNA, 19 nt, Artificial Sequence
  Description of Artificial Sequence: Synthetic oligonucleotide
aaauguccaagggaaacuu

SEQ ID NO: 2442787 - RNA, 19 nt, Artificial Sequence
  Description of Artificial Sequence: Synthetic oligonucleotide
acaaagagaaacauugguu

SEQ ID NO: 2442788 - RNA, 19 nt, Artificial Sequence
  Description of Artificial Sequence: Synthetic oligonucleotide
ucuuuuggacaaucuucug

SEQ ID NO: 2442789 - RNA, 19 nt, Artificial Sequence
  Description of Artificial Sequence: Synthetic oligonucleotide
uucccucacccuaauacaa

SEQ ID NO: 2442790 - RNA, 19 nt, Artificial Sequence
  Description of Artificial Sequence: Synthetic oligonucleotide
aauggucucccaauaaaua

SEQ ID NO: 2442791 - RNA, 19 nt, Artificial Sequence
  Description of Artificial Sequence: Synthetic oligonucleotide
ugucauggucugcaggcac

SEQ ID NO: 2442792 - RNA, 19 nt, Artificial Sequence
  Description of Artificial Sequence: Synthetic oligonucleotide
uacuuacggauuccgcucu

SEQ ID NO: 2442793 - RNA, 19 nt, Artificial Sequence
  Description of Artificial Sequence: Synthetic oligonucleotide
uuucucuguuacuuacgga

SEQ ID NO: 2442794 - RNA, 19 nt, Artificial Sequence
  Description of Artificial Sequence: Synthetic oligonucleotide
uaugcccuacaaaguagac

SEQ ID NO: 2442795 - RNA, 19 nt, Artificial Sequence
  Description of Artificial Sequence: Synthetic oligonucleotide
ugcgccaccaaagcaaucu

SEQ ID NO: 2442796 - RNA, 19 nt, Artificial Sequence
  Description of Artificial Sequence: Synthetic oligonucleotide
ucuguuacuuacggauucc

SEQ ID NO: 2442797 - RNA, 19 nt, Artificial Sequence
  Description of Artificial Sequence: Synthetic oligonucleotide
cucuguuacuuacggauuc

SEQ ID NO: 2442798 - RNA, 19 nt, Artificial Sequence
  Description of Artificial Sequence: Synthetic oligonucleotide
agccccuguagccaagcgg

SEQ ID NO: 2442799 - RNA, 19 nt, Artificial Sequence
  Description of Artificial Sequence: Synthetic oligonucleotide
ucuuacagugguugacacu

SEQ ID NO: 2442800 - RNA, 19 nt, Artificial Sequence
  Description of Artificial Sequence: Synthetic oligonucleotide
ucucugucacaagacagac

SEQ ID NO: 2442801 - RNA, 19 nt, Artificial Sequence
  Description of Artificial Sequence: Synthetic oligonucleotide
auaugcucucaucucucug

SEQ ID NO: 2442802 - RNA, 19 nt, Artificial Sequence
  Description of Artificial Sequence: Synthetic oligonucleotide
uguugucagaagucagcga

SEQ ID NO: 2442803 - RNA, 19 nt, Artificial Sequence
  Description of Artificial Sequence: Synthetic oligonucleotide
uacagugguugacacuuaa

SEQ ID NO: 2442804 - RNA, 19 nt, Artificial Sequence
  Description of Artificial Sequence: Synthetic oligonucleotide
uggucucccaauaaauauu

SEQ ID NO: 2442805 - RNA, 19 nt, Artificial Sequence
  Description of Artificial Sequence: Synthetic oligonucleotide
gugguugacacuuaauggu

SEQ ID NO: 2442806 - RNA, 19 nt, Artificial Sequence
  Description of Artificial Sequence: Synthetic oligonucleotide
accauugauaaaacacauc

SEQ ID NO: 2442807 - RNA, 19 nt, Artificial Sequence
  Description of Artificial Sequence: Synthetic oligonucleotide
ucuggauguucuugaggug

SEQ ID NO: 2442808 - RNA, 19 nt, Artificial Sequence
  Description of Artificial Sequence: Synthetic oligonucleotide
cuugaggugaaccccuguc

SEQ ID NO: 2442809 - RNA, 19 nt, Artificial Sequence
  Description of Artificial Sequence: Synthetic oligonucleotide
acuaugcccuacaaaguag

SEQ ID NO: 2442810 - RNA, 19 nt, Artificial Sequence
  Description of Artificial Sequence: Synthetic oligonucleotide
gagaaacauugguuaaaga

SEQ ID NO: 2442811 - RNA, 19 nt, Artificial Sequence
  Description of Artificial Sequence: Synthetic oligonucleotide
acacuuaauggucucccaa

SEQ ID NO: 2442812 - RNA, 19 nt, Artificial Sequence
  Description of Artificial Sequence: Synthetic oligonucleotide
acuuaauggucucccaaua

SEQ ID NO: 2442813 - RNA, 19 nt, Artificial Sequence
  Description of Artificial Sequence: Synthetic oligonucleotide
uuaaggcaagcuuccugac

SEQ ID NO: 2442814 - RNA, 19 nt, Artificial Sequence
  Description of Artificial Sequence: Synthetic oligonucleotide
auucccacacauucccuca

SEQ ID NO: 2442815 - RNA, 19 nt, Artificial Sequence
  Description of Artificial Sequence: Synthetic oligonucleotide
gucaccuucaagcucugga

SEQ ID NO: 2442816 - RNA, 19 nt, Artificial Sequence
  Description of Artificial Sequence: Synthetic oligonucleotide
uuugaacuucucugucaca

SEQ ID NO: 2442817 - RNA, 19 nt, Artificial Sequence
  Description of Artificial Sequence: Synthetic oligonucleotide
caagcuuugugaaauaaau

SEQ ID NO: 2442818 - RNA, 19 nt, Artificial Sequence
  Description of Artificial Sequence: Synthetic oligonucleotide
uugacacuuaauggucucc

SEQ ID NO: 2442819 - RNA, 19 nt, Artificial Sequence
  Description of Artificial Sequence: Synthetic oligonucleotide
gagauauuuuaagccuacc

SEQ ID NO: 2442820 - RNA, 19 nt, Artificial Sequence
  Description of Artificial Sequence: Synthetic oligonucleotide
cuguuacuuacggauuccg

SEQ ID NO: 2442821 - RNA, 19 nt, Artificial Sequence
  Description of Artificial Sequence: Synthetic oligonucleotide
uucucuuacagugguugac

SEQ ID NO: 2442822 - RNA, 19 nt, Artificial Sequence
  Description of Artificial Sequence: Synthetic oligonucleotide
caacaggagccccuguagc

SEQ ID NO: 2442823 - RNA, 19 nt, Artificial Sequence
  Description of Artificial Sequence: Synthetic oligonucleotide
aacauugguuaaagaauau

SEQ ID NO: 2442824 - RNA, 19 nt, Artificial Sequence
  Description of Artificial Sequence: Synthetic oligonucleotide
guugaccauuaauauaaaa

SEQ ID NO: 2442825 - RNA, 19 nt, Artificial Sequence
  Description of Artificial Sequence: Synthetic oligonucleotide
uguugaccauuaauauaaa

SEQ ID NO: 2442826 - RNA, 19 nt, Artificial Sequence
  Description of Artificial Sequence: Synthetic oligonucleotide
uucaggguuaaggcaagcu

SEQ ID NO: 2442827 - RNA, 19 nt, Artificial Sequence
  Description of Artificial Sequence: Synthetic oligonucleotide
aagcuuugugaaauaaaua

SEQ ID NO: 2442828 - RNA, 19 nt, Artificial Sequence
  Description of Artificial Sequence: Synthetic oligonucleotide
cuaugcccuacaaaguaga

SEQ ID NO: 2442829 - RNA, 19 nt, Artificial Sequence
  Description of Artificial Sequence: Synthetic oligonucleotide
uuguaacaguccuuuugaa

SEQ ID NO: 2442830 - RNA, 19 nt, Artificial Sequence
  Description of Artificial Sequence: Synthetic oligonucleotide
guggcuaugacuucgguuu

SEQ ID NO: 2442831 - RNA, 19 nt, Artificial Sequence
  Description of Artificial Sequence: Synthetic oligonucleotide
uagccaagcggcugguggc

SEQ ID NO: 2442832 - RNA, 19 nt, Artificial Sequence
  Description of Artificial Sequence: Synthetic oligonucleotide
uugucagaagucagcgauc

SEQ ID NO: 2442833 - RNA, 19 nt, Artificial Sequence
  Description of Artificial Sequence: Synthetic oligonucleotide
cuuuagcaucuuuuggaca

SEQ ID NO: 2442834 - RNA, 19 nt, Artificial Sequence
  Description of Artificial Sequence: Synthetic oligonucleotide
auucaaacauagauuccca

SEQ ID NO: 2442835 - RNA, 19 nt, Artificial Sequence
  Description of Artificial Sequence: Synthetic oligonucleotide
gguuaaggcaagcuuccug

SEQ ID NO: 2442836 - RNA, 19 nt, Artificial Sequence
  Description of Artificial Sequence: Synthetic oligonucleotide
guugacacuuaauggucuc

SEQ ID NO: 2442837 - RNA, 19 nt, Artificial Sequence
  Description of Artificial Sequence: Synthetic oligonucleotide
cuuaauggucucccaauaa

SEQ ID NO: 2442838 - RNA, 19 nt, Artificial Sequence
  Description of Artificial Sequence: Synthetic oligonucleotide
auacacaagcuuugugaaa

SEQ ID NO: 2442839 - RNA, 19 nt, Artificial Sequence
  Description of Artificial Sequence: Synthetic oligonucleotide
caaucuuacuucuuucucu

SEQ ID NO: 2442840 - RNA, 19 nt, Artificial Sequence
  Description of Artificial Sequence: Synthetic oligonucleotide
guuuacugagauauuuuaa

SEQ ID NO: 2442841 - RNA, 19 nt, Artificial Sequence
  Description of Artificial Sequence: Synthetic oligonucleotide
uuacggauuccgcucuuua

SEQ ID NO: 2442842 - RNA, 19 nt, Artificial Sequence
  Description of Artificial Sequence: Synthetic oligonucleotide
gaggugaaccccugucaug

SEQ ID NO: 2442843 - RNA, 19 nt, Artificial Sequence
  Description of Artificial Sequence: Synthetic oligonucleotide
ucuugaggugaaccccugu

SEQ ID NO: 2442844 - RNA, 19 nt, Artificial Sequence
  Description of Artificial Sequence: Synthetic oligonucleotide
uucuugaggugaaccccug

SEQ ID NO: 2442845 - RNA, 19 nt, Artificial Sequence
  Description of Artificial Sequence: Synthetic oligonucleotide
cuugagaguggcuaugacu

SEQ ID NO: 2442846 - RNA, 19 nt, Artificial Sequence
  Description of Artificial Sequence: Synthetic oligonucleotide
aaccccacaugcuucucuu

SEQ ID NO: 2442847 - RNA, 19 nt, Artificial Sequence
  Description of Artificial Sequence: Synthetic oligonucleotide
gacacuuaauggucuccca

SEQ ID NO: 2442848 - RNA, 19 nt, Artificial Sequence
  Description of Artificial Sequence: Synthetic oligonucleotide
uggcuaugacuucgguuug

SEQ ID NO: 2442849 - RNA, 19 nt, Artificial Sequence
  Description of Artificial Sequence: Synthetic oligonucleotide
agcgcagcucguuggcaac

SEQ ID NO: 2442850 - RNA, 19 nt, Artificial Sequence
  Description of Artificial Sequence: Synthetic oligonucleotide
gaacuaccauugauaaaac

SEQ ID NO: 2442851 - RNA, 19 nt, Artificial Sequence
  Description of Artificial Sequence: Synthetic oligonucleotide
auuuuaagccuaccaucuu

SEQ ID NO: 2442852 - RNA, 19 nt, Artificial Sequence
  Description of Artificial Sequence: Synthetic oligonucleotide
agaugcgccaccaaagcaa

SEQ ID NO: 2442853 - RNA, 19 nt, Artificial Sequence
  Description of Artificial Sequence: Synthetic oligonucleotide
cugagauauuuuaagccua

SEQ ID NO: 2442854 - RNA, 19 nt, Artificial Sequence
  Description of Artificial Sequence: Synthetic oligonucleotide
ccuaccaucuucaaacuga

SEQ ID NO: 2442855 - RNA, 19 nt, Artificial Sequence
  Description of Artificial Sequence: Synthetic oligonucleotide
gcuucucuuacagugguug

SEQ ID NO: 2442856 - RNA, 19 nt, Artificial Sequence
  Description of Artificial Sequence: Synthetic oligonucleotide
caauguugaccauuaauau

SEQ ID NO: 2442857 - RNA, 19 nt, Artificial Sequence
  Description of Artificial Sequence: Synthetic oligonucleotide
ggggccuucaggguuaagg

SEQ ID NO: 2442858 - RNA, 19 nt, Artificial Sequence
  Description of Artificial Sequence: Synthetic oligonucleotide
auucuugagaguggcuaug

SEQ ID NO: 2442859 - RNA, 19 nt, Artificial Sequence
  Description of Artificial Sequence: Synthetic oligonucleotide
gacagcgcagcucguuggc

SEQ ID NO: 2442860 - RNA, 19 nt, Artificial Sequence
  Description of Artificial Sequence: Synthetic oligonucleotide
acauugguuaaagaauaua

SEQ ID NO: 2442861 - RNA, 19 nt, Artificial Sequence
  Description of Artificial Sequence: Synthetic oligonucleotide
cccaauaaauauuaguuua

SEQ ID NO: 2442862 - RNA, 19 nt, Artificial Sequence
  Description of Artificial Sequence: Synthetic oligonucleotide
uuaagccuaccaucuucaa

SEQ ID NO: 2442863 - RNA, 19 nt, Artificial Sequence
  Description of Artificial Sequence: Synthetic oligonucleotide
cuucgguuugggugcagug

SEQ ID NO: 2442864 - RNA, 19 nt, Artificial Sequence
  Description of Artificial Sequence: Synthetic oligonucleotide
cagcgaucacagaugcgcc

SEQ ID NO: 2442865 - RNA, 19 nt, Artificial Sequence
  Description of Artificial Sequence: Synthetic oligonucleotide
agcuuccugaccauucuug

SEQ ID NO: 2442866 - RNA, 19 nt, Artificial Sequence
  Description of Artificial Sequence: Synthetic oligonucleotide
agcgaucacagaugcgcca

SEQ ID NO: 2442867 - RNA, 19 nt, Artificial Sequence
  Description of Artificial Sequence: Synthetic oligonucleotide
ucccucacccuaauacaaa

SEQ ID NO: 2442868 - RNA, 19 nt, Artificial Sequence
  Description of Artificial Sequence: Synthetic oligonucleotide
cugacagcgcagcucguug

SEQ ID NO: 2442869 - RNA, 19 nt, Artificial Sequence
  Description of Artificial Sequence: Synthetic oligonucleotide
gggccuucaggguuaaggc

SEQ ID NO: 2442870 - RNA, 19 nt, Artificial Sequence
  Description of Artificial Sequence: Synthetic oligonucleotide
agggaaacuucaacauguc

SEQ ID NO: 2442871 - RNA, 19 nt, Artificial Sequence
  Description of Artificial Sequence: Synthetic oligonucleotide
augcccuacaaaguagaca

SEQ ID NO: 2442872 - RNA, 19 nt, Artificial Sequence
  Description of Artificial Sequence: Synthetic oligonucleotide
cacuaugcccuacaaagua

SEQ ID NO: 2442873 - RNA, 19 nt, Artificial Sequence
  Description of Artificial Sequence: Synthetic oligonucleotide
acaagcuuugugaaauaaa

SEQ ID NO: 2442874 - RNA, 19 nt, Artificial Sequence
  Description of Artificial Sequence: Synthetic oligonucleotide
uucccacacauucccucac

SEQ ID NO: 2442875 - RNA, 19 nt, Artificial Sequence
  Description of Artificial Sequence: Synthetic oligonucleotide
gcaacaggagccccuguag

SEQ ID NO: 2442876 - RNA, 19 nt, Artificial Sequence
  Description of Artificial Sequence: Synthetic oligonucleotide
ggugcagugggguccuggg

SEQ ID NO: 2442877 - RNA, 19 nt, Artificial Sequence
  Description of Artificial Sequence: Synthetic oligonucleotide
aagcuuccugaccauucuu

SEQ ID NO: 2442878 - RNA, 19 nt, Artificial Sequence
  Description of Artificial Sequence: Synthetic oligonucleotide
gcaaucuuacuucuuucuc

SEQ ID NO: 2442879 - RNA, 19 nt, Artificial Sequence
  Description of Artificial Sequence: Synthetic oligonucleotide
cagcucguuggcaacagga

SEQ ID NO: 2442880 - RNA, 19 nt, Artificial Sequence
  Description of Artificial Sequence: Synthetic oligonucleotide
cuuacagugguugacacuu

SEQ ID NO: 2442881 - RNA, 19 nt, Artificial Sequence
  Description of Artificial Sequence: Synthetic oligonucleotide
gacauucuuuccaaaacau

SEQ ID NO: 2442882 - RNA, 19 nt, Artificial Sequence
  Description of Artificial Sequence: Synthetic oligonucleotide
agaguggcuaugacuucgg

SEQ ID NO: 2442883 - RNA, 19 nt, Artificial Sequence
  Description of Artificial Sequence: Synthetic oligonucleotide
ugagaguggcuaugacuuc

SEQ ID NO: 2442884 - RNA, 19 nt, Artificial Sequence
  Description of Artificial Sequence: Synthetic oligonucleotide
caauaaauauuaguuuacu

SEQ ID NO: 2442885 - RNA, 19 nt, Artificial Sequence
  Description of Artificial Sequence: Synthetic oligonucleotide
ccacaugcuucucuuacag

SEQ ID NO: 2442886 - RNA, 19 nt, Artificial Sequence
  Description of Artificial Sequence: Synthetic oligonucleotide
agccaagcggcugguggcc

SEQ ID NO: 2442887 - RNA, 19 nt, Artificial Sequence
  Description of Artificial Sequence: Synthetic oligonucleotide
gcucguuggcaacaggagc

SEQ ID NO: 2442888 - RNA, 19 nt, Artificial Sequence
  Description of Artificial Sequence: Synthetic oligonucleotide
gaauauaacagggcacuau

SEQ ID NO: 2442889 - RNA, 19 nt, Artificial Sequence
  Description of Artificial Sequence: Synthetic oligonucleotide
ucccaaccccacaugcuuc

SEQ ID NO: 2442890 - RNA, 19 nt, Artificial Sequence
  Description of Artificial Sequence: Synthetic oligonucleotide
agccuaccaucuucaaacu

SEQ ID NO: 2442891 - RNA, 19 nt, Artificial Sequence
  Description of Artificial Sequence: Synthetic oligonucleotide
agaagucagcgaucacaga

SEQ ID NO: 2442892 - RNA, 19 nt, Artificial Sequence
  Description of Artificial Sequence: Synthetic oligonucleotide
gaaccccugucauggucug

SEQ ID NO: 2442893 - RNA, 19 nt, Artificial Sequence
  Description of Artificial Sequence: Synthetic oligonucleotide
uuggcaacaggagccccug

SEQ ID NO: 2442894 - RNA, 19 nt, Artificial Sequence
  Description of Artificial Sequence: Synthetic oligonucleotide
cacacauucccucacccua

SEQ ID NO: 2442895 - RNA, 19 nt, Artificial Sequence
  Description of Artificial Sequence: Synthetic oligonucleotide
gaucacagaugcgccacca

SEQ ID NO: 2442896 - RNA, 19 nt, Artificial Sequence
  Description of Artificial Sequence: Synthetic oligonucleotide
ucguuggcaacaggagccc

SEQ ID NO: 2442897 - RNA, 19 nt, Artificial Sequence
  Description of Artificial Sequence: Synthetic oligonucleotide
cucacccuaauacaaacau

SEQ ID NO: 2442898 - RNA, 19 nt, Artificial Sequence
  Description of Artificial Sequence: Synthetic oligonucleotide
cuucucuuacagugguuga

SEQ ID NO: 2442899 - RNA, 19 nt, Artificial Sequence
  Description of Artificial Sequence: Synthetic oligonucleotide
gagccccuguagccaagcg

SEQ ID NO: 2442900 - RNA, 19 nt, Artificial Sequence
  Description of Artificial Sequence: Synthetic oligonucleotide
gcuaugacuucgguuuggg

SEQ ID NO: 2442901 - RNA, 19 nt, Artificial Sequence
  Description of Artificial Sequence: Synthetic oligonucleotide
gggaaacuucaacauguca

SEQ ID NO: 2442902 - RNA, 19 nt, Artificial Sequence
  Description of Artificial Sequence: Synthetic oligonucleotide
uagcaucuuuuggacaauc

SEQ ID NO: 2442903 - RNA, 19 nt, Artificial Sequence
  Description of Artificial Sequence: Synthetic oligonucleotide
caccaaagcaaucuuacuu

SEQ ID NO: 2442904 - RNA, 19 nt, Artificial Sequence
  Description of Artificial Sequence: Synthetic oligonucleotide
gugaaccccugucaugguc

SEQ ID NO: 2442905 - RNA, 19 nt, Artificial Sequence
  Description of Artificial Sequence: Synthetic oligonucleotide
auccacaauguuaaauauu

SEQ ID NO: 2442906 - RNA, 19 nt, Artificial Sequence
  Description of Artificial Sequence: Synthetic oligonucleotide
cuucaagcucuggauguuc

SEQ ID NO: 2442907 - RNA, 19 nt, Artificial Sequence
  Description of Artificial Sequence: Synthetic oligonucleotide
gucucccaauaaauauuag

SEQ ID NO: 2442908 - RNA, 19 nt, Artificial Sequence
  Description of Artificial Sequence: Synthetic oligonucleotide
acaggagccccuguagcca

SEQ ID NO: 2442909 - RNA, 19 nt, Artificial Sequence
  Description of Artificial Sequence: Synthetic oligonucleotide
guuugggugcagugggguc

SEQ ID NO: 2442910 - RNA, 19 nt, Artificial Sequence
  Description of Artificial Sequence: Synthetic oligonucleotide
gccaccaaagcaaucuuac

SEQ ID NO: 2442911 - RNA, 19 nt, Artificial Sequence
  Description of Artificial Sequence: Synthetic oligonucleotide
uuacagugguugacacuua

SEQ ID NO: 2442912 - RNA, 19 nt, Artificial Sequence
  Description of Artificial Sequence: Synthetic oligonucleotide
agaauauaacagggcacua

SEQ ID NO: 2442913 - RNA, 19 nt, Artificial Sequence
  Description of Artificial Sequence: Synthetic oligonucleotide
cauccacaauguuaaauau

SEQ ID NO: 2442914 - RNA, 19 nt, Artificial Sequence
  Description of Artificial Sequence: Synthetic oligonucleotide
auuccgcucuuuagcaucu

SEQ ID NO: 2442915 - RNA, 19 nt, Artificial Sequence
  Description of Artificial Sequence: Synthetic oligonucleotide
uuagcaucuuuuggacaau

SEQ ID NO: 2442916 - RNA, 19 nt, Artificial Sequence
  Description of Artificial Sequence: Synthetic oligonucleotide
cagaugcgccaccaaagca

SEQ ID NO: 2442917 - RNA, 19 nt, Artificial Sequence
  Description of Artificial Sequence: Synthetic oligonucleotide
gccccuguagccaagcggc

SEQ ID NO: 2442918 - RNA, 19 nt, Artificial Sequence
  Description of Artificial Sequence: Synthetic oligonucleotide
ccuuuugaacuucucuguc

SEQ ID NO: 2442919 - RNA, 19 nt, Artificial Sequence
  Description of Artificial Sequence: Synthetic oligonucleotide
acacaagcuuugugaaaua

SEQ ID NO: 2442920 - RNA, 19 nt, Artificial Sequence
  Description of Artificial Sequence: Synthetic oligonucleotide
cugaacuaccauugauaaa

SEQ ID NO: 2442921 - RNA, 19 nt, Artificial Sequence
  Description of Artificial Sequence: Synthetic oligonucleotide
cucugucacaagacagaca

SEQ ID NO: 2442922 - RNA, 19 nt, Artificial Sequence
  Description of Artificial Sequence: Synthetic oligonucleotide
cuaauacaaacaugaucau

SEQ ID NO: 2442923 - RNA, 19 nt, Artificial Sequence
  Description of Artificial Sequence: Synthetic oligonucleotide
cacaagcuuugugaaauaa

SEQ ID NO: 2442924 - RNA, 19 nt, Artificial Sequence
  Description of Artificial Sequence: Synthetic oligonucleotide
cuucaggguuaaggcaagc

SEQ ID NO: 2442925 - RNA, 19 nt, Artificial Sequence
  Description of Artificial Sequence: Synthetic oligonucleotide
gucagcgaucacagaugcg

SEQ ID NO: 2442926 - RNA, 19 nt, Artificial Sequence
  Description of Artificial Sequence: Synthetic oligonucleotide
uguagccaagcggcuggug

SEQ ID NO: 2442927 - RNA, 19 nt, Artificial Sequence
  Description of Artificial Sequence: Synthetic oligonucleotide
acuucgguuugggugcagu

SEQ ID NO: 2442928 - RNA, 19 nt, Artificial Sequence
  Description of Artificial Sequence: Synthetic oligonucleotide
cccucacccuaauacaaac

SEQ ID NO: 2442929 - RNA, 19 nt, Artificial Sequence
  Description of Artificial Sequence: Synthetic oligonucleotide
agggcacuaugcccuacaa

SEQ ID NO: 2442930 - RNA, 19 nt, Artificial Sequence
  Description of Artificial Sequence: Synthetic oligonucleotide
ugcuucucuuacagugguu

SEQ ID NO: 2442931 - RNA, 19 nt, Artificial Sequence
  Description of Artificial Sequence: Synthetic oligonucleotide
acaugucaauguugaccau

SEQ ID NO: 2442932 - RNA, 19 nt, Artificial Sequence
  Description of Artificial Sequence: Synthetic oligonucleotide
gccuaccaucuucaaacug

SEQ ID NO: 2442933 - RNA, 19 nt, Artificial Sequence
  Description of Artificial Sequence: Synthetic oligonucleotide
ggucucccaauaaauauua

SEQ ID NO: 2442934 - RNA, 19 nt, Artificial Sequence
  Description of Artificial Sequence: Synthetic oligonucleotide
acauagauucccacacauu

SEQ ID NO: 2442935 - RNA, 19 nt, Artificial Sequence
  Description of Artificial Sequence: Synthetic oligonucleotide
cccacacauucccucaccc

SEQ ID NO: 2442936 - RNA, 19 nt, Artificial Sequence
  Description of Artificial Sequence: Synthetic oligonucleotide
cgcucuuuagcaucuuuug

SEQ ID NO: 2442937 - RNA, 19 nt, Artificial Sequence
  Description of Artificial Sequence: Synthetic oligonucleotide
cacuuaauggucucccaau

SEQ ID NO: 2442938 - RNA, 19 nt, Artificial Sequence
  Description of Artificial Sequence: Synthetic oligonucleotide
acagggcacuaugcccuac

SEQ ID NO: 2442939 - RNA, 19 nt, Artificial Sequence
  Description of Artificial Sequence: Synthetic oligonucleotide
cauaugcucucaucucucu

SEQ ID NO: 2442940 - RNA, 19 nt, Artificial Sequence
  Description of Artificial Sequence: Synthetic oligonucleotide
guucuugaggugaaccccu

SEQ ID NO: 2442941 - RNA, 19 nt, Artificial Sequence
  Description of Artificial Sequence: Synthetic oligonucleotide
gucagaagucagcgaucac

SEQ ID NO: 2442942 - RNA, 19 nt, Artificial Sequence
  Description of Artificial Sequence: Synthetic oligonucleotide
acacauucccucacccuaa

SEQ ID NO: 2442943 - RNA, 19 nt, Artificial Sequence
  Description of Artificial Sequence: Synthetic oligonucleotide
ccuucaggguuaaggcaag

SEQ ID NO: 2442944 - RNA, 19 nt, Artificial Sequence
  Description of Artificial Sequence: Synthetic oligonucleotide
acauucccucacccuaaua

SEQ ID NO: 2442945 - RNA, 19 nt, Artificial Sequence
  Description of Artificial Sequence: Synthetic oligonucleotide
ugacuucgguuugggugca

SEQ ID NO: 2442946 - RNA, 19 nt, Artificial Sequence
  Description of Artificial Sequence: Synthetic oligonucleotide
acccuaauacaaacaugau

SEQ ID NO: 2442947 - RNA, 19 nt, Artificial Sequence
  Description of Artificial Sequence: Synthetic oligonucleotide
ccccacaugcuucucuuac

SEQ ID NO: 2442948 - RNA, 19 nt, Artificial Sequence
  Description of Artificial Sequence: Synthetic oligonucleotide
gcaagcuuccugaccauuc

SEQ ID NO: 2442949 - RNA, 19 nt, Artificial Sequence
  Description of Artificial Sequence: Synthetic oligonucleotide
acugacagcgcagcucguu

SEQ ID NO: 2442950 - RNA, 19 nt, Artificial Sequence
  Description of Artificial Sequence: Synthetic oligonucleotide
cccugucauggucugcagg

SEQ ID NO: 2442951 - RNA, 19 nt, Artificial Sequence
  Description of Artificial Sequence: Synthetic oligonucleotide
acuuacggauuccgcucuu

SEQ ID NO: 2442952 - RNA, 19 nt, Artificial Sequence
  Description of Artificial Sequence: Synthetic oligonucleotide
gccuucaggguuaaggcaa

SEQ ID NO: 2442953 - RNA, 19 nt, Artificial Sequence
  Description of Artificial Sequence: Synthetic oligonucleotide
accauucuugagaguggcu

SEQ ID NO: 2442954 - RNA, 19 nt, Artificial Sequence
  Description of Artificial Sequence: Synthetic oligonucleotide
cacauccacaauguuaaau

SEQ ID NO: 2442955 - RNA, 19 nt, Artificial Sequence
  Description of Artificial Sequence: Synthetic oligonucleotide
caugaucauaugcucucau

SEQ ID NO: 2442956 - RNA, 19 nt, Artificial Sequence
  Description of Artificial Sequence: Synthetic oligonucleotide
acagcgcagcucguuggca

SEQ ID NO: 2442957 - RNA, 19 nt, Artificial Sequence
  Description of Artificial Sequence: Synthetic oligonucleotide
aagcggcugguggccagca

SEQ ID NO: 2442958 - RNA, 19 nt, Artificial Sequence
  Description of Artificial Sequence: Synthetic oligonucleotide
gaugcgccaccaaagcaau

SEQ ID NO: 2442959 - RNA, 19 nt, Artificial Sequence
  Description of Artificial Sequence: Synthetic oligonucleotide
cagggcacuaugcccuaca

SEQ ID NO: 2442960 - RNA, 19 nt, Artificial Sequence
  Description of Artificial Sequence: Synthetic oligonucleotide
gcgaucacagaugcgccac

SEQ ID NO: 2442961 - RNA, 19 nt, Artificial Sequence
  Description of Artificial Sequence: Synthetic oligonucleotide
aggcaagcuuccugaccau

SEQ ID NO: 2442962 - RNA, 19 nt, Artificial Sequence
  Description of Artificial Sequence: Synthetic oligonucleotide
cuaugacuucgguuugggu

SEQ ID NO: 2442963 - RNA, 19 nt, Artificial Sequence
  Description of Artificial Sequence: Synthetic oligonucleotide
gguugacacuuaauggucu

SEQ ID NO: 2442964 - RNA, 19 nt, Artificial Sequence
  Description of Artificial Sequence: Synthetic oligonucleotide
ggcaacaggagccccugua

SEQ ID NO: 2442965 - RNA, 19 nt, Artificial Sequence
  Description of Artificial Sequence: Synthetic oligonucleotide
ccucacccuaauacaaaca

SEQ ID NO: 2442966 - RNA, 19 nt, Artificial Sequence
  Description of Artificial Sequence: Synthetic oligonucleotide
gacuucgguuugggugcag

SEQ ID NO: 2442967 - RNA, 19 nt, Artificial Sequence
  Description of Artificial Sequence: Synthetic oligonucleotide
augcgccaccaaagcaauc

SEQ ID NO: 2442968 - RNA, 19 nt, Artificial Sequence
  Description of Artificial Sequence: Synthetic oligonucleotide
ggggugucaccuucaagcu

SEQ ID NO: 2442969 - RNA, 19 nt, Artificial Sequence
  Description of Artificial Sequence: Synthetic oligonucleotide
gaguggcuaugacuucggu

SEQ ID NO: 2442970 - RNA, 19 nt, Artificial Sequence
  Description of Artificial Sequence: Synthetic oligonucleotide
cacaugcuucucuuacagu

SEQ ID NO: 2442971 - RNA, 19 nt, Artificial Sequence
  Description of Artificial Sequence: Synthetic oligonucleotide
accccacaugcuucucuua

SEQ ID NO: 2442972 - RNA, 19 nt, Artificial Sequence
  Description of Artificial Sequence: Synthetic oligonucleotide
gggugcagugggguccugg

SEQ ID NO: 2442973 - RNA, 19 nt, Artificial Sequence
  Description of Artificial Sequence: Synthetic oligonucleotide
ccacaauguuaaauauuaa

SEQ ID NO: 2442974 - RNA, 19 nt, Artificial Sequence
  Description of Artificial Sequence: Synthetic oligonucleotide
ggauguucuugaggugaac

SEQ ID NO: 2442975 - RNA, 19 nt, Artificial Sequence
  Description of Artificial Sequence: Synthetic oligonucleotide
gucauggucugcaggcacu

SEQ ID NO: 2442976 - RNA, 19 nt, Artificial Sequence
  Description of Artificial Sequence: Synthetic oligonucleotide
cggauuccgcucuuuagca

SEQ ID NO: 2442977 - RNA, 19 nt, Artificial Sequence
  Description of Artificial Sequence: Synthetic oligonucleotide
caaccccacaugcuucucu

SEQ ID NO: 2442978 - RNA, 19 nt, Artificial Sequence
  Description of Artificial Sequence: Synthetic oligonucleotide
gggcacuaugcccuacaaa

SEQ ID NO: 2442979 - RNA, 19 nt, Artificial Sequence
  Description of Artificial Sequence: Synthetic oligonucleotide
cccacaugcuucucuuaca

SEQ ID NO: 2442980 - RNA, 19 nt, Artificial Sequence
  Description of Artificial Sequence: Synthetic oligonucleotide
gguuugggugcaguggggu

SEQ ID NO: 2442981 - RNA, 19 nt, Artificial Sequence
  Description of Artificial Sequence: Synthetic oligonucleotide
ccaagcggcugguggccag

SEQ ID NO: 2442982 - RNA, 19 nt, Artificial Sequence
  Description of Artificial Sequence: Synthetic oligonucleotide
cgguuugggugcagugggg

SEQ ID NO: 2442983 - RNA, 19 nt, Artificial Sequence
  Description of Artificial Sequence: Synthetic oligonucleotide
ggauuccgcucuuuagcau

SEQ ID NO: 2442984 - RNA, 19 nt, Artificial Sequence
  Description of Artificial Sequence: Synthetic oligonucleotide
ggacaaucuucugaaccau

SEQ ID NO: 2442985 - RNA, 19 nt, Artificial Sequence
  Description of Artificial Sequence: Synthetic oligonucleotide
gcacuaugcccuacaaagu

SEQ ID NO: 2442986 - RNA, 19 nt, Artificial Sequence
  Description of Artificial Sequence: Synthetic oligonucleotide
cccuguagccaagcggcug

SEQ ID NO: 2442987 - RNA, 19 nt, Artificial Sequence
  Description of Artificial Sequence: Synthetic oligonucleotide
ccccugucauggucugcag

SEQ ID NO: 2442988 - RNA, 19 nt, Artificial Sequence
  Description of Artificial Sequence: Synthetic oligonucleotide
ccaccaaagcaaucuuacu

SEQ ID NO: 2442989 - RNA, 19 nt, Artificial Sequence
  Description of Artificial Sequence: Synthetic oligonucleotide
cacauucccucacccuaau

SEQ ID NO: 2442990 - RNA, 19 nt, Artificial Sequence
  Description of Artificial Sequence: Synthetic oligonucleotide
cuuacggauuccgcucuuu

SEQ ID NO: 2442991 - RNA, 19 nt, Artificial Sequence
  Description of Artificial Sequence: Synthetic oligonucleotide
ggugaaccccugucauggu

SEQ ID NO: 2442992 - RNA, 19 nt, Artificial Sequence
  Description of Artificial Sequence: Synthetic oligonucleotide
cguuggcaacaggagcccc

SEQ ID NO: 2442993 - RNA, 19 nt, Artificial Sequence
  Description of Artificial Sequence: Synthetic oligonucleotide
ugggugcagugggguccug

SEQ ID NO: 2442994 - RNA, 19 nt, Artificial Sequence
  Description of Artificial Sequence: Synthetic oligonucleotide
cgcagcucguuggcaacag

SEQ ID NO: 2442995 - RNA, 19 nt, Artificial Sequence
  Description of Artificial Sequence: Synthetic oligonucleotide
ccgcucuuuagcaucuuuu

SEQ ID NO: 2442996 - RNA, 19 nt, Artificial Sequence
  Description of Artificial Sequence: Synthetic oligonucleotide
gcgcagcucguuggcaaca

SEQ ID NO: 2442997 - RNA, 19 nt, Artificial Sequence
  Description of Artificial Sequence: Synthetic oligonucleotide
ccaaccccacaugcuucuc

SEQ ID NO: 2442998 - RNA, 19 nt, Artificial Sequence
  Description of Artificial Sequence: Synthetic oligonucleotide
gccaagcggcugguggcca

SEQ ID NO: 2442999 - RNA, 19 nt, Artificial Sequence
  Description of Artificial Sequence: Synthetic oligonucleotide
cuguagccaagcggcuggu

SEQ ID NO: 2443000 - RNA, 19 nt, Artificial Sequence
  Description of Artificial Sequence: Synthetic oligonucleotide
ggcaagcuuccugaccauu

SEQ ID NO: 2443001 - RNA, 19 nt, Artificial Sequence
  Description of Artificial Sequence: Synthetic oligonucleotide
gcccuacaaaguagacaua

SEQ ID NO: 2443002 - RNA, 19 nt, Artificial Sequence
  Description of Artificial Sequence: Synthetic oligonucleotide
gcgccaccaaagcaaucuu

SEQ ID NO: 2443003 - RNA, 19 nt, Artificial Sequence
  Description of Artificial Sequence: Synthetic oligonucleotide
ccuucaagcucuggauguu

SEQ ID NO: 2443004 - RNA, 19 nt, Artificial Sequence
  Description of Artificial Sequence: Synthetic oligonucleotide
  modified_base (10)..(10): a, c, u, g, unknown or other
gaaacugacncuuugccug

SEQ ID NO: 2443005 - RNA, 19 nt, Artificial Sequence
  Description of Artificial Sequence: Synthetic oligonucleotide
  modified_base (7)..(7): a, c, u, g, unknown or other
caaaagnucauacaccugc

SEQ ID NO: 2443006 - RNA, 19 nt, Artificial Sequence
  Description of Artificial Sequence: Synthetic oligonucleotide
agaagguucagacacagag

SEQ ID NO: 2443007 - RNA, 19 nt, Artificial Sequence
  Description of Artificial Sequence: Synthetic oligonucleotide
aaaacuucaacuggcgagc

SEQ ID NO: 2443008 - RNA, 19 nt, Artificial Sequence
  Description of Artificial Sequence: Synthetic oligonucleotide
aacuugauccuguuugggc

SEQ ID NO: 2443009 - RNA, 19 nt, Artificial Sequence
  Description of Artificial Sequence: Synthetic oligonucleotide
aauucuggcagcaaguuag

SEQ ID NO: 2443010 - RNA, 19 nt, Artificial Sequence
  Description of Artificial Sequence: Synthetic oligonucleotide
aagguucagacacagagcu

SEQ ID NO: 2443011 - RNA, 19 nt, Artificial Sequence
  Description of Artificial Sequence: Synthetic oligonucleotide
aacagucucuaauucuggc

SEQ ID NO: 2443012 - RNA, 19 nt, Artificial Sequence
  Description of Artificial Sequence: Synthetic oligonucleotide
uguuguguugauaugauau

SEQ ID NO: 2443013 - RNA, 19 nt, Artificial Sequence
  Description of Artificial Sequence: Synthetic oligonucleotide
  modified_base (4)..(4): a, c, u, g, unknown or other
aagnucauacaccugcucu

SEQ ID NO: 2443014 - RNA, 19 nt, Artificial Sequence
  Description of Artificial Sequence: Synthetic oligonucleotide
auacaccugcucuagaagc

SEQ ID NO: 2443015 - RNA, 19 nt, Artificial Sequence
  Description of Artificial Sequence: Synthetic oligonucleotide
agcaaguuagaacaaaucu

SEQ ID NO: 2443016 - RNA, 19 nt, Artificial Sequence
  Description of Artificial Sequence: Synthetic oligonucleotide
uugaacuguuuacagaccc

SEQ ID NO: 2443017 - RNA, 19 nt, Artificial Sequence
  Description of Artificial Sequence: Synthetic oligonucleotide
  modified_base (12)..(12): a, c, u, g, unknown or other
uugaaacugacncuuugcc

SEQ ID NO: 2443018 - RNA, 19 nt, Artificial Sequence
  Description of Artificial Sequence: Synthetic oligonucleotide
  modified_base (5)..(5): a, c, u, g, unknown or other
aaagnucauacaccugcuc

SEQ ID NO: 2443019 - RNA, 19 nt, Artificial Sequence
  Description of Artificial Sequence: Synthetic oligonucleotide
aacugaaaggccugagggg

SEQ ID NO: 2443020 - RNA, 19 nt, Artificial Sequence
  Description of Artificial Sequence: Synthetic oligonucleotide
ugauaugauauccacuuuc

SEQ ID NO: 2443021 - RNA, 19 nt, Artificial Sequence
  Description of Artificial Sequence: Synthetic oligonucleotide
aaaacagucucuaauucug

SEQ ID NO: 2443022 - RNA, 19 nt, Artificial Sequence
  Description of Artificial Sequence: Synthetic oligonucleotide
  modified_base (14)..(14): a, c, u, g, unknown or other
ucuugaaacugacncuuug

SEQ ID NO: 2443023 - RNA, 19 nt, Artificial Sequence
  Description of Artificial Sequence: Synthetic oligonucleotide
ucugaaaacagucucuaau

SEQ ID NO: 2443024 - RNA, 19 nt, Artificial Sequence
  Description of Artificial Sequence: Synthetic oligonucleotide
uaugauauccacuuuccaa

SEQ ID NO: 2443025 - RNA, 19 nt, Artificial Sequence
  Description of Artificial Sequence: Synthetic oligonucleotide
ugagagauaccauauugac

SEQ ID NO: 2443026 - RNA, 19 nt, Artificial Sequence
  Description of Artificial Sequence: Synthetic oligonucleotide
uaaguugcguacuuguccc

SEQ ID NO: 2443027 - RNA, 19 nt, Artificial Sequence
  Description of Artificial Sequence: Synthetic oligonucleotide
auauugacugucuaauuca

SEQ ID NO: 2443028 - RNA, 19 nt, Artificial Sequence
  Description of Artificial Sequence: Synthetic oligonucleotide
caaguuagaacaaaucuca

SEQ ID NO: 2443029 - RNA, 19 nt, Artificial Sequence
  Description of Artificial Sequence: Synthetic oligonucleotide
uugagagauaccauauuga

SEQ ID NO: 2443030 - RNA, 19 nt, Artificial Sequence
  Description of Artificial Sequence: Synthetic oligonucleotide
gagaaggcaaagccgacgg

SEQ ID NO: 2443031 - RNA, 19 nt, Artificial Sequence
  Description of Artificial Sequence: Synthetic oligonucleotide
aguucuccgaacugaaagg

SEQ ID NO: 2443032 - RNA, 19 nt, Artificial Sequence
  Description of Artificial Sequence: Synthetic oligonucleotide
cauauugacugucuaauuc

SEQ ID NO: 2443033 - RNA, 19 nt, Artificial Sequence
  Description of Artificial Sequence: Synthetic oligonucleotide
ugaaaacagucucuaauuc

SEQ ID NO: 2443034 - RNA, 19 nt, Artificial Sequence
  Description of Artificial Sequence: Synthetic oligonucleotide
uguuuacagacccagccac

SEQ ID NO: 2443035 - RNA, 19 nt, Artificial Sequence
  Description of Artificial Sequence: Synthetic oligonucleotide
cuuuuggucuuuauuuggg

SEQ ID NO: 2443036 - RNA, 19 nt, Artificial Sequence
  Description of Artificial Sequence: Synthetic oligonucleotide
  modified_base (13)..(13): a, c, u, g, unknown or other
cuugaaacugacncuuugc

SEQ ID NO: 2443037 - RNA, 19 nt, Artificial Sequence
  Description of Artificial Sequence: Synthetic oligonucleotide
uugacugucuaauucauua

SEQ ID NO: 2443038 - RNA, 19 nt, Artificial Sequence
  Description of Artificial Sequence: Synthetic oligonucleotide
guaaguugcguacuugucc

SEQ ID NO: 2443039 - RNA, 19 nt, Artificial Sequence
  Description of Artificial Sequence: Synthetic oligonucleotide
ugcucuagaagcugaaccc

SEQ ID NO: 2443040 - RNA, 19 nt, Artificial Sequence
  Description of Artificial Sequence: Synthetic oligonucleotide
  modified_base (4)..(4): a, c, u, g, unknown or other
gacncuuugccugaccacg

SEQ ID NO: 2443041 - RNA, 19 nt, Artificial Sequence
  Description of Artificial Sequence: Synthetic oligonucleotide
ucuccaauucaucuccucc

SEQ ID NO: 2443042 - RNA, 19 nt, Artificial Sequence
  Description of Artificial Sequence: Synthetic oligonucleotide
gauaugauauccacuuucc

SEQ ID NO: 2443043 - RNA, 19 nt, Artificial Sequence
  Description of Artificial Sequence: Synthetic oligonucleotide
cucucgcugauaauggucg

SEQ ID NO: 2443044 - RNA, 19 nt, Artificial Sequence
  Description of Artificial Sequence: Synthetic oligonucleotide
aacaucagggugagaaggc

SEQ ID NO: 2443045 - RNA, 19 nt, Artificial Sequence
  Description of Artificial Sequence: Synthetic oligonucleotide
gauaauggucgauccuugg

SEQ ID NO: 2443046 - RNA, 19 nt, Artificial Sequence
  Description of Artificial Sequence: Synthetic oligonucleotide
uuucgggugagaaaccucu

SEQ ID NO: 2443047 - RNA, 19 nt, Artificial Sequence
  Description of Artificial Sequence: Synthetic oligonucleotide
cuuucacacuguaaguugc

SEQ ID NO: 2443048 - RNA, 19 nt, Artificial Sequence
  Description of Artificial Sequence: Synthetic oligonucleotide
gcugccgagacacagaagg

SEQ ID NO: 2443049 - RNA, 19 nt, Artificial Sequence
  Description of Artificial Sequence: Synthetic oligonucleotide
uguugauaugauauccacu

SEQ ID NO: 2443050 - RNA, 19 nt, Artificial Sequence
  Description of Artificial Sequence: Synthetic oligonucleotide
uuucacacuguaaguugcg

SEQ ID NO: 2443051 - RNA, 19 nt, Artificial Sequence
  Description of Artificial Sequence: Synthetic oligonucleotide
cuggcagcaaguuagaaca

SEQ ID NO: 2443052 - RNA, 19 nt, Artificial Sequence
  Description of Artificial Sequence: Synthetic oligonucleotide
guaacuugauccuguuugg

SEQ ID NO: 2443053 - RNA, 19 nt, Artificial Sequence
  Description of Artificial Sequence: Synthetic oligonucleotide
uuaaucgucgucucucucu

SEQ ID NO: 2443054 - RNA, 19 nt, Artificial Sequence
  Description of Artificial Sequence: Synthetic oligonucleotide
ucagcucuacugcacuugg

SEQ ID NO: 2443055 - RNA, 19 nt, Artificial Sequence
  Description of Artificial Sequence: Synthetic oligonucleotide
aucaccauaaucagaggac

SEQ ID NO: 2443056 - RNA, 19 nt, Artificial Sequence
  Description of Artificial Sequence: Synthetic oligonucleotide
  modified_base (11)..(11): a, c, u, g, unknown or other
ugaaacugacncuuugccu

SEQ ID NO: 2443057 - RNA, 19 nt, Artificial Sequence
  Description of Artificial Sequence: Synthetic oligonucleotide
ccugugacugcuuuaaucg

SEQ ID NO: 2443058 - RNA, 19 nt, Artificial Sequence
  Description of Artificial Sequence: Synthetic oligonucleotide
aucgucgucucucucucgc

SEQ ID NO: 2443059 - RNA, 19 nt, Artificial Sequence
  Description of Artificial Sequence: Synthetic oligonucleotide
ucuccgaacugaaaggccu

SEQ ID NO: 2443060 - RNA, 19 nt, Artificial Sequence
  Description of Artificial Sequence: Synthetic oligonucleotide
ugauccuugaacuguuuac

SEQ ID NO: 2443061 - RNA, 19 nt, Artificial Sequence
  Description of Artificial Sequence: Synthetic oligonucleotide
agcucuacugcacuuggag

SEQ ID NO: 2443062 - RNA, 19 nt, Artificial Sequence
  Description of Artificial Sequence: Synthetic oligonucleotide
accacggucagucuguucu

SEQ ID NO: 2443063 - RNA, 19 nt, Artificial Sequence
  Description of Artificial Sequence: Synthetic oligonucleotide
ugauaauggucgauccuug

SEQ ID NO: 2443064 - RNA, 19 nt, Artificial Sequence
  Description of Artificial Sequence: Synthetic oligonucleotide
uaauggucgauccuuggau

SEQ ID NO: 2443065 - RNA, 19 nt, Artificial Sequence
  Description of Artificial Sequence: Synthetic oligonucleotide
ucuauccuacauccacugg

SEQ ID NO: 2443066 - RNA, 19 nt, Artificial Sequence
  Description of Artificial Sequence: Synthetic oligonucleotide
agucucuaauucuggcagc

SEQ ID NO: 2443067 - RNA, 19 nt, Artificial Sequence
  Description of Artificial Sequence: Synthetic oligonucleotide
cacacuguaaguugcguac

SEQ ID NO: 2443068 - RNA, 19 nt, Artificial Sequence
  Description of Artificial Sequence: Synthetic oligonucleotide
ugacugucuaauucauuag

SEQ ID NO: 2443069 - RNA, 19 nt, Artificial Sequence
  Description of Artificial Sequence: Synthetic oligonucleotide
aaucagaggaccagcuggg

SEQ ID NO: 2443070 - RNA, 19 nt, Artificial Sequence
  Description of Artificial Sequence: Synthetic oligonucleotide
ucuggcagcaaguuagaac

SEQ ID NO: 2443071 - RNA, 19 nt, Artificial Sequence
  Description of Artificial Sequence: Synthetic oligonucleotide
uucuauccuacauccacug

SEQ ID NO: 2443072 - RNA, 19 nt, Artificial Sequence
  Description of Artificial Sequence: Synthetic oligonucleotide
cagucucuaauucuggcag

SEQ ID NO: 2443073 - RNA, 19 nt, Artificial Sequence
  Description of Artificial Sequence: Synthetic oligonucleotide
uuuacagacccagccacag

SEQ ID NO: 2443074 - RNA, 19 nt, Artificial Sequence
  Description of Artificial Sequence: Synthetic oligonucleotide
aaguugcguacuugucccc

SEQ ID NO: 2443075 - RNA, 19 nt, Artificial Sequence
  Description of Artificial Sequence: Synthetic oligonucleotide
ucuaccuugguuuucuauu

SEQ ID NO: 2443076 - RNA, 19 nt, Artificial Sequence
  Description of Artificial Sequence: Synthetic oligonucleotide
  modified_base (7)..(7): a, c, u, g, unknown or other
acugacncuuugccugacc

SEQ ID NO: 2443077 - RNA, 19 nt, Artificial Sequence
  Description of Artificial Sequence: Synthetic oligonucleotide
caacaucagggugagaagg

SEQ ID NO: 2443078 - RNA, 19 nt, Artificial Sequence
  Description of Artificial Sequence: Synthetic oligonucleotide
ucaccauaaucagaggacc

SEQ ID NO: 2443079 - RNA, 19 nt, Artificial Sequence
  Description of Artificial Sequence: Synthetic oligonucleotide
gacgggugauucuugaaac

SEQ ID NO: 2443080 - RNA, 19 nt, Artificial Sequence
  Description of Artificial Sequence: Synthetic oligonucleotide
ugucuugagagauaccaua

SEQ ID NO: 2443081 - RNA, 19 nt, Artificial Sequence
  Description of Artificial Sequence: Synthetic oligonucleotide
auccuugaacuguuuacag

SEQ ID NO: 2443082 - RNA, 19 nt, Artificial Sequence
  Description of Artificial Sequence: Synthetic oligonucleotide
ugauauccacuuuccaaca

SEQ ID NO: 2443083 - RNA, 19 nt, Artificial Sequence
  Description of Artificial Sequence: Synthetic oligonucleotide
ugugacugcuuuaaucguc

SEQ ID NO: 2443084 - RNA, 19 nt, Artificial Sequence
  Description of Artificial Sequence: Synthetic oligonucleotide
uggacuugccaucacccug

SEQ ID NO: 2443085 - RNA, 19 nt, Artificial Sequence
  Description of Artificial Sequence: Synthetic oligonucleotide
  modified_base (9)..(9): a, c, u, g, unknown or other
aaacugacncuuugccuga

SEQ ID NO: 2443086 - RNA, 19 nt, Artificial Sequence
  Description of Artificial Sequence: Synthetic oligonucleotide
auaaucagaggaccagcug

SEQ ID NO: 2443087 - RNA, 19 nt, Artificial Sequence
  Description of Artificial Sequence: Synthetic oligonucleotide
aacuguuuacagacccagc

SEQ ID NO: 2443088 - RNA, 19 nt, Artificial Sequence
  Description of Artificial Sequence: Synthetic oligonucleotide
  modified_base (14)..(14): a, c, u, g, unknown or other
ugaggggagcgucncuucc

SEQ ID NO: 2443089 - RNA, 19 nt, Artificial Sequence
  Description of Artificial Sequence: Synthetic oligonucleotide
ugaacuguuuacagaccca

SEQ ID NO: 2443090 - RNA, 19 nt, Artificial Sequence
  Description of Artificial Sequence: Synthetic oligonucleotide
auaauggucgauccuugga

SEQ ID NO: 2443091 - RNA, 19 nt, Artificial Sequence
  Description of Artificial Sequence: Synthetic oligonucleotide
gaaaacagucucuaauucu

SEQ ID NO: 2443092 - RNA, 19 nt, Artificial Sequence
  Description of Artificial Sequence: Synthetic oligonucleotide
uguaaguugcguacuuguc

SEQ ID NO: 2443093 - RNA, 19 nt, Artificial Sequence
  Description of Artificial Sequence: Synthetic oligonucleotide
  modified_base (2)..(2): a, c, u, g, unknown or other
gnucauacaccugcucuag

SEQ ID NO: 2443094 - RNA, 19 nt, Artificial Sequence
  Description of Artificial Sequence: Synthetic oligonucleotide
ucaacuggcgagcuuucac

SEQ ID NO: 2443095 - RNA, 19 nt, Artificial Sequence
  Description of Artificial Sequence: Synthetic oligonucleotide
  modified_base (6)..(6): a, c, u, g, unknown or other
aaaagnucauacaccugcu

SEQ ID NO: 2443096 - RNA, 19 nt, Artificial Sequence
  Description of Artificial Sequence: Synthetic oligonucleotide
uucuccgaacugaaaggcc

SEQ ID NO: 2443097 - RNA, 19 nt, Artificial Sequence
  Description of Artificial Sequence: Synthetic oligonucleotide
acugucuaauucauuagug

SEQ ID NO: 2443098 - RNA, 19 nt, Artificial Sequence
  Description of Artificial Sequence: Synthetic oligonucleotide
ugcacuuggaguucuccga

SEQ ID NO: 2443099 - RNA, 19 nt, Artificial Sequence
  Description of Artificial Sequence: Synthetic oligonucleotide
ucaggcugaucacuggacu

SEQ ID NO: 2443100 - RNA, 19 nt, Artificial Sequence
  Description of Artificial Sequence: Synthetic oligonucleotide
uccuugaacuguuuacaga

SEQ ID NO: 2443101 - RNA, 19 nt, Artificial Sequence
  Description of Artificial Sequence: Synthetic oligonucleotide
auaugauauccacuuucca

SEQ ID NO: 2443102 - RNA, 19 nt, Artificial Sequence
  Description of Artificial Sequence: Synthetic oligonucleotide
gaagguucagacacagagc

SEQ ID NO: 2443103 - RNA, 19 nt, Artificial Sequence
  Description of Artificial Sequence: Synthetic oligonucleotide
cauacaccugcucuagaag

SEQ ID NO: 2443104 - RNA, 19 nt, Artificial Sequence
  Description of Artificial Sequence: Synthetic oligonucleotide
guguugauaugauauccac

SEQ ID NO: 2443105 - RNA, 19 nt, Artificial Sequence
  Description of Artificial Sequence: Synthetic oligonucleotide
ugugcucccguaacgugcc

SEQ ID NO: 2443106 - RNA, 19 nt, Artificial Sequence
  Description of Artificial Sequence: Synthetic oligonucleotide
uccugugacugcuuuaauc

SEQ ID NO: 2443107 - RNA, 19 nt, Artificial Sequence
  Description of Artificial Sequence: Synthetic oligonucleotide
gugacugcuuuaaucgucg

SEQ ID NO: 2443108 - RNA, 19 nt, Artificial Sequence
  Description of Artificial Sequence: Synthetic oligonucleotide
uuacagacccagccacagg

SEQ ID NO: 2443109 - RNA, 19 nt, Artificial Sequence
  Description of Artificial Sequence: Synthetic oligonucleotide
uaacgugccucucucucca

SEQ ID NO: 2443110 - RNA, 19 nt, Artificial Sequence
  Description of Artificial Sequence: Synthetic oligonucleotide
cuaccuugguuuucuauuc

SEQ ID NO: 2443111 - RNA, 19 nt, Artificial Sequence
  Description of Artificial Sequence: Synthetic oligonucleotide
uguagccucuccuucuugu

SEQ ID NO: 2443112 - RNA, 19 nt, Artificial Sequence
  Description of Artificial Sequence: Synthetic oligonucleotide
guuguguugauaugauauc

SEQ ID NO: 2443113 - RNA, 19 nt, Artificial Sequence
  Description of Artificial Sequence: Synthetic oligonucleotide
caucaccauaaucagagga

SEQ ID NO: 2443114 - RNA, 19 nt, Artificial Sequence
  Description of Artificial Sequence: Synthetic oligonucleotide
aaucgucgucucucucucg

SEQ ID NO: 2443115 - RNA, 19 nt, Artificial Sequence
  Description of Artificial Sequence: Synthetic oligonucleotide
augugcucccguaacgugc

SEQ ID NO: 2443116 - RNA, 19 nt, Artificial Sequence
  Description of Artificial Sequence: Synthetic oligonucleotide
uaaucgucgucucucucuc

SEQ ID NO: 2443117 - RNA, 19 nt, Artificial Sequence
  Description of Artificial Sequence: Synthetic oligonucleotide
ucucucgcugauaaugguc

SEQ ID NO: 2443118 - RNA, 19 nt, Artificial Sequence
  Description of Artificial Sequence: Synthetic oligonucleotide
uaccauauugacugucuaa

SEQ ID NO: 2443119 - RNA, 19 nt, Artificial Sequence
  Description of Artificial Sequence: Synthetic oligonucleotide
uccuacauccacugguaac

SEQ ID NO: 2443120 - RNA, 19 nt, Artificial Sequence
  Description of Artificial Sequence: Synthetic oligonucleotide
cagacacagagcugugugg

SEQ ID NO: 2443121 - RNA, 19 nt, Artificial Sequence
  Description of Artificial Sequence: Synthetic oligonucleotide
  modified_base (17)..(17): a, c, u, g, unknown or other
gauucuugaaacugacncu

SEQ ID NO: 2443122 - RNA, 19 nt, Artificial Sequence
  Description of Artificial Sequence: Synthetic oligonucleotide
accauaaucagaggaccag

SEQ ID NO: 2443123 - RNA, 19 nt, Artificial Sequence
  Description of Artificial Sequence: Synthetic oligonucleotide
cuggcgagcuuucacacug

SEQ ID NO: 2443124 - RNA, 19 nt, Artificial Sequence
  Description of Artificial Sequence: Synthetic oligonucleotide
accauauugacugucuaau

SEQ ID NO: 2443125 - RNA, 19 nt, Artificial Sequence
  Description of Artificial Sequence: Synthetic oligonucleotide
aaagccgacgggugauucu

SEQ ID NO: 2443126 - RNA, 19 nt, Artificial Sequence
  Description of Artificial Sequence: Synthetic oligonucleotide
ucuauucauuuuguugugu

SEQ ID NO: 2443127 - RNA, 19 nt, Artificial Sequence
  Description of Artificial Sequence: Synthetic oligonucleotide
  modified_base (3)..(3): a, c, u, g, unknown or other
agnucauacaccugcucua

SEQ ID NO: 2443128 - RNA, 19 nt, Artificial Sequence
  Description of Artificial Sequence: Synthetic oligonucleotide
uuuaaucgucgucucucuc

SEQ ID NO: 2443129 - RNA, 19 nt, Artificial Sequence
  Description of Artificial Sequence: Synthetic oligonucleotide
ucgggugagaaaccucuga

SEQ ID NO: 2443130 - RNA, 19 nt, Artificial Sequence
  Description of Artificial Sequence: Synthetic oligonucleotide
cagcaaguuagaacaaauc

SEQ ID NO: 2443131 - RNA, 19 nt, Artificial Sequence
  Description of Artificial Sequence: Synthetic oligonucleotide
gauccuuggaugaugacgu

SEQ ID NO: 2443132 - RNA, 19 nt, Artificial Sequence
  Description of Artificial Sequence: Synthetic oligonucleotide
guucuccgaacugaaaggc

SEQ ID NO: 2443133 - RNA, 19 nt, Artificial Sequence
  Description of Artificial Sequence: Synthetic oligonucleotide
guaacgugccucucucucc

SEQ ID NO: 2443134 - RNA, 19 nt, Artificial Sequence
  Description of Artificial Sequence: Synthetic oligonucleotide
ucuugagagauaccauauu

SEQ ID NO: 2443135 - RNA, 19 nt, Artificial Sequence
  Description of Artificial Sequence: Synthetic oligonucleotide
agaaggcaaagccgacggg

SEQ ID NO: 2443136 - RNA, 19 nt, Artificial Sequence
  Description of Artificial Sequence: Synthetic oligonucleotide
uuuucgggugagaaaccuc

SEQ ID NO: 2443137 - RNA, 19 nt, Artificial Sequence
  Description of Artificial Sequence: Synthetic oligonucleotide
uacauccacugguaacuug

SEQ ID NO: 2443138 - RNA, 19 nt, Artificial Sequence
  Description of Artificial Sequence: Synthetic oligonucleotide
  modified_base (10)..(10): a, c, u, g, unknown or other
ccccaaaagnucauacacc

SEQ ID NO: 2443139 - RNA, 19 nt, Artificial Sequence
  Description of Artificial Sequence: Synthetic oligonucleotide
cuuugccugaccacgguca

SEQ ID NO: 2443140 - RNA, 19 nt, Artificial Sequence
  Description of Artificial Sequence: Synthetic oligonucleotide
acauccacugguaacuuga

SEQ ID NO: 2443141 - RNA, 19 nt, Artificial Sequence
  Description of Artificial Sequence: Synthetic oligonucleotide
  modified_base (5)..(5): a, c, u, g, unknown or other
ugacncuuugccugaccac

SEQ ID NO: 2443142 - RNA, 19 nt, Artificial Sequence
  Description of Artificial Sequence: Synthetic oligonucleotide
gcaaguuagaacaaaucuc

SEQ ID NO: 2443143 - RNA, 19 nt, Artificial Sequence
  Description of Artificial Sequence: Synthetic oligonucleotide
aaggcaaagccgacgggug

SEQ ID NO: 2443144 - RNA, 19 nt, Artificial Sequence
  Description of Artificial Sequence: Synthetic oligonucleotide
uggauuacaucagcucuac

SEQ ID NO: 2443145 - RNA, 19 nt, Artificial Sequence
  Description of Artificial Sequence: Synthetic oligonucleotide
acuucaacuggcgagcuuu

SEQ ID NO: 2443146 - RNA, 19 nt, Artificial Sequence
  Description of Artificial Sequence: Synthetic oligonucleotide
ugccucucucuccaauuca

SEQ ID NO: 2443147 - RNA, 19 nt, Artificial Sequence
  Description of Artificial Sequence: Synthetic oligonucleotide
acuguaaguugcguacuug

SEQ ID NO: 2443148 - RNA, 19 nt, Artificial Sequence
  Description of Artificial Sequence: Synthetic oligonucleotide
ucugccuucgcugccgaga

SEQ ID NO: 2443149 - RNA, 19 nt, Artificial Sequence
  Description of Artificial Sequence: Synthetic oligonucleotide
  modified_base (6)..(6): a, c, u, g, unknown or other
cugacncuuugccugacca

SEQ ID NO: 2443150 - RNA, 19 nt, Artificial Sequence
  Description of Artificial Sequence: Synthetic oligonucleotide
aaacuucaacuggcgagcu

SEQ ID NO: 2443151 - RNA, 19 nt, Artificial Sequence
  Description of Artificial Sequence: Synthetic oligonucleotide
ugacguugaacugauccuu

SEQ ID NO: 2443152 - RNA, 19 nt, Artificial Sequence
  Description of Artificial Sequence: Synthetic oligonucleotide
gacguugaacugauccuug

SEQ ID NO: 2443153 - RNA, 19 nt, Artificial Sequence
  Description of Artificial Sequence: Synthetic oligonucleotide
gacugcuuuaaucgucguc

SEQ ID NO: 2443154 - RNA, 19 nt, Artificial Sequence
  Description of Artificial Sequence: Synthetic oligonucleotide
  modified_base (8)..(8): a, c, u, g, unknown or other
aacugacncuuugccugac

SEQ ID NO: 2443155 - RNA, 19 nt, Artificial Sequence
  Description of Artificial Sequence: Synthetic oligonucleotide
gaaaggccugaggggagcg

SEQ ID NO: 2443156 - RNA, 19 nt, Artificial Sequence
  Description of Artificial Sequence: Synthetic oligonucleotide
uuguuguguugauaugaua

SEQ ID NO: 2443157 - RNA, 19 nt, Artificial Sequence
  Description of Artificial Sequence: Synthetic oligonucleotide
acgggugauucuugaaacu

SEQ ID NO: 2443158 - RNA, 19 nt, Artificial Sequence
  Description of Artificial Sequence: Synthetic oligonucleotide
aaguuagaacaaaucucaa

SEQ ID NO: 2443159 - RNA, 19 nt, Artificial Sequence
  Description of Artificial Sequence: Synthetic oligonucleotide
cuggaaucuuggcuggaug

SEQ ID NO: 2443160 - RNA, 19 nt, Artificial Sequence
  Description of Artificial Sequence: Synthetic oligonucleotide
auaccauauugacugucua

SEQ ID NO: 2443161 - RNA, 19 nt, Artificial Sequence
  Description of Artificial Sequence: Synthetic oligonucleotide
cuauccuacauccacuggu

SEQ ID NO: 2443162 - RNA, 19 nt, Artificial Sequence
  Description of Artificial Sequence: Synthetic oligonucleotide
ucgcugccgagacacagaa

SEQ ID NO: 2443163 - RNA, 19 nt, Artificial Sequence
  Description of Artificial Sequence: Synthetic oligonucleotide
ucuacugcacuuggaguuc

SEQ ID NO: 2443164 - RNA, 19 nt, Artificial Sequence
  Description of Artificial Sequence: Synthetic oligonucleotide
  modified_base (3)..(3): a, c, u, g, unknown or other
acncuuugccugaccacgg

SEQ ID NO: 2443165 - RNA, 19 nt, Artificial Sequence
  Description of Artificial Sequence: Synthetic oligonucleotide
agaaaccucugaaaacagu

SEQ ID NO: 2443166 - RNA, 19 nt, Artificial Sequence
  Description of Artificial Sequence: Synthetic oligonucleotide
cauaaucagaggaccagcu

SEQ ID NO: 2443167 - RNA, 19 nt, Artificial Sequence
  Description of Artificial Sequence: Synthetic oligonucleotide
ucccguaacgugccucucu

SEQ ID NO: 2443168 - RNA, 19 nt, Artificial Sequence
  Description of Artificial Sequence: Synthetic oligonucleotide
caacuggcgagcuuucaca

SEQ ID NO: 2443169 - RNA, 19 nt, Artificial Sequence
  Description of Artificial Sequence: Synthetic oligonucleotide
cuguguggcuggaaucuug

SEQ ID NO: 2443170 - RNA, 19 nt, Artificial Sequence
  Description of Artificial Sequence: Synthetic oligonucleotide
ucgcugauaauggucgauc

SEQ ID NO: 2443171 - RNA, 19 nt, Artificial Sequence
  Description of Artificial Sequence: Synthetic oligonucleotide
ucuuggcuggaugcugucc

SEQ ID NO: 2443172 - RNA, 19 nt, Artificial Sequence
  Description of Artificial Sequence: Synthetic oligonucleotide
  modified_base (10)..(10): a, c, u, g, unknown or other
gggagcgucncuuccugug

SEQ ID NO: 2443173 - RNA, 19 nt, Artificial Sequence
  Description of Artificial Sequence: Synthetic oligonucleotide
cugaaaacagucucuaauu

SEQ ID NO: 2443174 - RNA, 19 nt, Artificial Sequence
  Description of Artificial Sequence: Synthetic oligonucleotide
  modified_base (15)..(15): a, c, u, g, unknown or other
uucuugaaacugacncuuu

SEQ ID NO: 2443175 - RNA, 19 nt, Artificial Sequence
  Description of Artificial Sequence: Synthetic oligonucleotide
gaaggcaaagccgacgggu

SEQ ID NO: 2443176 - RNA, 19 nt, Artificial Sequence
  Description of Artificial Sequence: Synthetic oligonucleotide
  modified_base (7)..(7): a, c, u, g, unknown or other
agcgucncuuccugugacu

SEQ ID NO: 2443177 - RNA, 19 nt, Artificial Sequence
  Description of Artificial Sequence: Synthetic oligonucleotide
gagagauaccauauugacu

SEQ ID NO: 2443178 - RNA, 19 nt, Artificial Sequence
  Description of Artificial Sequence: Synthetic oligonucleotide
ggugauucuugaaacugac

SEQ ID NO: 2443179 - RNA, 19 nt, Artificial Sequence
  Description of Artificial Sequence: Synthetic oligonucleotide
  modified_base (12)..(12): a, c, u, g, unknown or other
aggggagcgucncuuccug

SEQ ID NO: 2443180 - RNA, 19 nt, Artificial Sequence
  Description of Artificial Sequence: Synthetic oligonucleotide
ucucgcugauaauggucga

SEQ ID NO: 2443181 - RNA, 19 nt, Artificial Sequence
  Description of Artificial Sequence: Synthetic oligonucleotide
caccauaaucagaggacca

SEQ ID NO: 2443182 - RNA, 19 nt, Artificial Sequence
  Description of Artificial Sequence: Synthetic oligonucleotide
aggcugaucacuggacuug

SEQ ID NO: 2443183 - RNA, 19 nt, Artificial Sequence
  Description of Artificial Sequence: Synthetic oligonucleotide
  modified_base (8)..(8): a, c, u, g, unknown or other
gagcgucncuuccugugac

SEQ ID NO: 2443184 - RNA, 19 nt, Artificial Sequence
  Description of Artificial Sequence: Synthetic oligonucleotide
cuccgaacugaaaggccug

SEQ ID NO: 2443185 - RNA, 19 nt, Artificial Sequence
  Description of Artificial Sequence: Synthetic oligonucleotide
acaucagggugagaaggca

SEQ ID NO: 2443186 - RNA, 19 nt, Artificial Sequence
  Description of Artificial Sequence: Synthetic oligonucleotide
uuucugccuucgcugccga

SEQ ID NO: 2443187 - RNA, 19 nt, Artificial Sequence
  Description of Artificial Sequence: Synthetic oligonucleotide
aacuucaacuggcgagcuu

SEQ ID NO: 2443188 - RNA, 19 nt, Artificial Sequence
  Description of Artificial Sequence: Synthetic oligonucleotide
gcuuuaaucgucgucucuc

SEQ ID NO: 2443189 - RNA, 19 nt, Artificial Sequence
  Description of Artificial Sequence: Synthetic oligonucleotide
uguuugggcuuuuggucuu

SEQ ID NO: 2443190 - RNA, 19 nt, Artificial Sequence
  Description of Artificial Sequence: Synthetic oligonucleotide
cacuuggaguucuccgaac

SEQ ID NO: 2443191 - RNA, 19 nt, Artificial Sequence
  Description of Artificial Sequence: Synthetic oligonucleotide
uucaacuggcgagcuuuca

SEQ ID NO: 2443192 - RNA, 19 nt, Artificial Sequence
  Description of Artificial Sequence: Synthetic oligonucleotide
cuggauuacaucagcucua

SEQ ID NO: 2443193 - RNA, 19 nt, Artificial Sequence
  Description of Artificial Sequence: Synthetic oligonucleotide
ugccgagacacagaagguu

SEQ ID NO: 2443194 - RNA, 19 nt, Artificial Sequence
  Description of Artificial Sequence: Synthetic oligonucleotide
uccgaacugaaaggccuga

SEQ ID NO: 2443195 - RNA, 19 nt, Artificial Sequence
  Description of Artificial Sequence: Synthetic oligonucleotide
cugccuucgcugccgagac

SEQ ID NO: 2443196 - RNA, 19 nt, Artificial Sequence
  Description of Artificial Sequence: Synthetic oligonucleotide
acacuguaaguugcguacu

SEQ ID NO: 2443197 - RNA, 19 nt, Artificial Sequence
  Description of Artificial Sequence: Synthetic oligonucleotide
ugacugcuuuaaucgucgu

SEQ ID NO: 2443198 - RNA, 19 nt, Artificial Sequence
  Description of Artificial Sequence: Synthetic oligonucleotide
cuucaacuggcgagcuuuc

SEQ ID NO: 2443199 - RNA, 19 nt, Artificial Sequence
  Description of Artificial Sequence: Synthetic oligonucleotide
gauauccacuuuccaacau

SEQ ID NO: 2443200 - RNA, 19 nt, Artificial Sequence
  Description of Artificial Sequence: Synthetic oligonucleotide
aagccgacgggugauucuu

SEQ ID NO: 2443201 - RNA, 19 nt, Artificial Sequence
  Description of Artificial Sequence: Synthetic oligonucleotide
cuuccugugacugcuuuaa

SEQ ID NO: 2443202 - RNA, 19 nt, Artificial Sequence
  Description of Artificial Sequence: Synthetic oligonucleotide
  modified_base (9)..(9): a, c, u, g, unknown or other
cccaaaagnucauacaccu

SEQ ID NO: 2443203 - RNA, 19 nt, Artificial Sequence
  Description of Artificial Sequence: Synthetic oligonucleotide
cuccaauucaucuccuccu

SEQ ID NO: 2443204 - RNA, 19 nt, Artificial Sequence
  Description of Artificial Sequence: Synthetic oligonucleotide
gcucuagaagcugaacccc

SEQ ID NO: 2443205 - RNA, 19 nt, Artificial Sequence
  Description of Artificial Sequence: Synthetic oligonucleotide
cucuacugcacuuggaguu

SEQ ID NO: 2443206 - RNA, 19 nt, Artificial Sequence
  Description of Artificial Sequence: Synthetic oligonucleotide
gucgauccuuggaugauga

SEQ ID NO: 2443207 - RNA, 19 nt, Artificial Sequence
  Description of Artificial Sequence: Synthetic oligonucleotide
cuuuaaucgucgucucucu

SEQ ID NO: 2443208 - RNA, 19 nt, Artificial Sequence
  Description of Artificial Sequence: Synthetic oligonucleotide
ucgauccuuggaugaugac

SEQ ID NO: 2443209 - RNA, 19 nt, Artificial Sequence
  Description of Artificial Sequence: Synthetic oligonucleotide
cacugguaacuugauccug

SEQ ID NO: 2443210 - RNA, 19 nt, Artificial Sequence
  Description of Artificial Sequence: Synthetic oligonucleotide
ccauaaucagaggaccagc

SEQ ID NO: 2443211 - RNA, 19 nt, Artificial Sequence
  Description of Artificial Sequence: Synthetic oligonucleotide
acagacccagccacagguc

SEQ ID NO: 2443212 - RNA, 19 nt, Artificial Sequence
  Description of Artificial Sequence: Synthetic oligonucleotide
ccaauucaucuccuccucc

SEQ ID NO: 2443213 - RNA, 19 nt, Artificial Sequence
  Description of Artificial Sequence: Synthetic oligonucleotide
caucagggugagaaggcaa

SEQ ID NO: 2443214 - RNA, 19 nt, Artificial Sequence
  Description of Artificial Sequence: Synthetic oligonucleotide
  modified_base (8)..(8): a, c, u, g, unknown or other
ccaaaagnucauacaccug

SEQ ID NO: 2443215 - RNA, 19 nt, Artificial Sequence
  Description of Artificial Sequence: Synthetic oligonucleotide
cacagaagguucagacaca

SEQ ID NO: 2443216 - RNA, 19 nt, Artificial Sequence
  Description of Artificial Sequence: Synthetic oligonucleotide
uuccugugacugcuuuaau

SEQ ID NO: 2443217 - RNA, 19 nt, Artificial Sequence
  Description of Artificial Sequence: Synthetic oligonucleotide
uugggcuuuuggucuuuau

SEQ ID NO: 2443218 - RNA, 19 nt, Artificial Sequence
  Description of Artificial Sequence: Synthetic oligonucleotide
  modified_base (4)..(4): a, c, u, g, unknown or other
gucncuuccugugacugcu

SEQ ID NO: 2443219 - RNA, 19 nt, Artificial Sequence
  Description of Artificial Sequence: Synthetic oligonucleotide
  modified_base (15)..(15): a, c, u, g, unknown or other
cugaggggagcgucncuuc

SEQ ID NO: 2443220 - RNA, 19 nt, Artificial Sequence
  Description of Artificial Sequence: Synthetic oligonucleotide
cgcugauaauggucgaucc

SEQ ID NO: 2443221 - RNA, 19 nt, Artificial Sequence
  Description of Artificial Sequence: Synthetic oligonucleotide
caaagccgacgggugauuc

SEQ ID NO: 2443222 - RNA, 19 nt, Artificial Sequence
  Description of Artificial Sequence: Synthetic oligonucleotide
ucgucucucucucgcugau

SEQ ID NO: 2443223 - RNA, 19 nt, Artificial Sequence
  Description of Artificial Sequence: Synthetic oligonucleotide
cccaugugcucccguaacg

SEQ ID NO: 2443224 - RNA, 19 nt, Artificial Sequence
  Description of Artificial Sequence: Synthetic oligonucleotide
uggcgagcuuucacacugu

SEQ ID NO: 2443225 - RNA, 19 nt, Artificial Sequence
  Description of Artificial Sequence: Synthetic oligonucleotide
ccaucaccauaaucagagg

SEQ ID NO: 2443226 - RNA, 19 nt, Artificial Sequence
  Description of Artificial Sequence: Synthetic oligonucleotide
cccuggauuacaucagcuc

SEQ ID NO: 2443227 - RNA, 19 nt, Artificial Sequence
  Description of Artificial Sequence: Synthetic oligonucleotide
ggcccuggauuacaucagc

SEQ ID NO: 2443228 - RNA, 19 nt, Artificial Sequence
  Description of Artificial Sequence: Synthetic oligonucleotide
cugauaauggucgauccuu

SEQ ID NO: 2443229 - RNA, 19 nt, Artificial Sequence
  Description of Artificial Sequence: Synthetic oligonucleotide
uacugcacuuggaguucuc

SEQ ID NO: 2443230 - RNA, 19 nt, Artificial Sequence
  Description of Artificial Sequence: Synthetic oligonucleotide
  modified_base (9)..(9): a, c, u, g, unknown or other
ggagcgucncuuccuguga

SEQ ID NO: 2443231 - RNA, 19 nt, Artificial Sequence
  Description of Artificial Sequence: Synthetic oligonucleotide
aacgugccucucucuccaa

SEQ ID NO: 2443232 - RNA, 19 nt, Artificial Sequence
  Description of Artificial Sequence: Synthetic oligonucleotide
ccuggauuacaucagcucu

SEQ ID NO: 2443233 - RNA, 19 nt, Artificial Sequence
  Description of Artificial Sequence: Synthetic oligonucleotide
gccuucgcugccgagacac

SEQ ID NO: 2443234 - RNA, 19 nt, Artificial Sequence
  Description of Artificial Sequence: Synthetic oligonucleotide
uggucgauccuuggaugau

SEQ ID NO: 2443235 - RNA, 19 nt, Artificial Sequence
  Description of Artificial Sequence: Synthetic oligonucleotide
ggucgauccuuggaugaug

SEQ ID NO: 2443236 - RNA, 19 nt, Artificial Sequence
  Description of Artificial Sequence: Synthetic oligonucleotide
  modified_base (3)..(3): a, c, u, g, unknown or other
ucncuuccugugacugcuu

SEQ ID NO: 2443237 - RNA, 19 nt, Artificial Sequence
  Description of Artificial Sequence: Synthetic oligonucleotide
gccgagacacagaagguuc

SEQ ID NO: 2443238 - RNA, 19 nt, Artificial Sequence
  Description of Artificial Sequence: Synthetic oligonucleotide
  modified_base (6)..(6): a, c, u, g, unknown or other
gcgucncuuccugugacug

SEQ ID NO: 2443239 - RNA, 19 nt, Artificial Sequence
  Description of Artificial Sequence: Synthetic oligonucleotide
ugcucccguaacgugccuc

SEQ ID NO: 2443240 - RNA, 19 nt, Artificial Sequence
  Description of Artificial Sequence: Synthetic oligonucleotide
acgugccucucucuccaau

SEQ ID NO: 2443241 - RNA, 19 nt, Artificial Sequence
  Description of Artificial Sequence: Synthetic oligonucleotide
cugaccacggucagucugu

SEQ ID NO: 2443242 - RNA, 19 nt, Artificial Sequence
  Description of Artificial Sequence: Synthetic oligonucleotide
ggcugaucacuggacuugc

SEQ ID NO: 2443243 - RNA, 19 nt, Artificial Sequence
  Description of Artificial Sequence: Synthetic oligonucleotide
cugugacugcuuuaaucgu

SEQ ID NO: 2443244 - RNA, 19 nt, Artificial Sequence
  Description of Artificial Sequence: Synthetic oligonucleotide
cguaacgugccucucucuc

SEQ ID NO: 2443245 - RNA, 19 nt, Artificial Sequence
  Description of Artificial Sequence: Synthetic oligonucleotide
cuggaugcuguccuguuuu

SEQ ID NO: 2443246 - RNA, 19 nt, Artificial Sequence
  Description of Artificial Sequence: Synthetic oligonucleotide
ugccuucgcugccgagaca

SEQ ID NO: 2443247 - RNA, 19 nt, Artificial Sequence
  Description of Artificial Sequence: Synthetic oligonucleotide
cuuggaugaugacguugaa

SEQ ID NO: 2443248 - RNA, 19 nt, Artificial Sequence
  Description of Artificial Sequence: Synthetic oligonucleotide
gcugauaauggucgauccu

SEQ ID NO: 2443249 - RNA, 19 nt, Artificial Sequence
  Description of Artificial Sequence: Synthetic oligonucleotide
gaccacggucagucuguuc

SEQ ID NO: 2443250 - RNA, 19 nt, Artificial Sequence
  Description of Artificial Sequence: Synthetic oligonucleotide
cgggugauucuugaaacug

SEQ ID NO: 2443251 - RNA, 19 nt, Artificial Sequence
  Description of Artificial Sequence: Synthetic oligonucleotide
uugccugaccacggucagu

SEQ ID NO: 2443252 - RNA, 19 nt, Artificial Sequence
  Description of Artificial Sequence: Synthetic oligonucleotide
ggcagcaaguuagaacaaa

SEQ ID NO: 2443253 - RNA, 19 nt, Artificial Sequence
  Description of Artificial Sequence: Synthetic oligonucleotide
gcucuacugcacuuggagu

SEQ ID NO: 2443254 - RNA, 19 nt, Artificial Sequence
  Description of Artificial Sequence: Synthetic oligonucleotide
cagcucuacugcacuugga

SEQ ID NO: 2443255 - RNA, 19 nt, Artificial Sequence
  Description of Artificial Sequence: Synthetic oligonucleotide
cccguaacgugccucucuc

SEQ ID NO: 2443256 - RNA, 19 nt, Artificial Sequence
  Description of Artificial Sequence: Synthetic oligonucleotide
  modified_base (5)..(5): a, c, u, g, unknown or other
cgucncuuccugugacugc

SEQ ID NO: 2443257 - RNA, 19 nt, Artificial Sequence
  Description of Artificial Sequence: Synthetic oligonucleotide
  modified_base (19)..(19): a, c, u, g, unknown or other
aggccugaggggagcgucn

SEQ ID NO: 2443258 - RNA, 19 nt, Artificial Sequence
  Description of Artificial Sequence: Synthetic oligonucleotide
accugcucuagaagcugaa

SEQ ID NO: 2443259 - RNA, 19 nt, Artificial Sequence
  Description of Artificial Sequence: Synthetic oligonucleotide
caggcugaucacuggacuu

SEQ ID NO: 2443260 - RNA, 19 nt, Artificial Sequence
  Description of Artificial Sequence: Synthetic oligonucleotide
gccgacgggugauucuuga

SEQ ID NO: 2443261 - RNA, 19 nt, Artificial Sequence
  Description of Artificial Sequence: Synthetic oligonucleotide
ggacuugccaucacccugu

SEQ ID NO: 2443262 - RNA, 19 nt, Artificial Sequence
  Description of Artificial Sequence: Synthetic oligonucleotide
gcugaucacuggacuugcc

SEQ ID NO: 2443263 - RNA, 19 nt, Artificial Sequence
  Description of Artificial Sequence: Synthetic oligonucleotide
ugaccacggucagucuguu

SEQ ID NO: 2443264 - RNA, 19 nt, Artificial Sequence
  Description of Artificial Sequence: Synthetic oligonucleotide
gacuugccaucacccugua

SEQ ID NO: 2443265 - RNA, 19 nt, Artificial Sequence
  Description of Artificial Sequence: Synthetic oligonucleotide
ccgaacugaaaggccugag

SEQ ID NO: 2443266 - RNA, 19 nt, Artificial Sequence
  Description of Artificial Sequence: Synthetic oligonucleotide
agccgacgggugauucuug

SEQ ID NO: 2443267 - RNA, 19 nt, Artificial Sequence
  Description of Artificial Sequence: Synthetic oligonucleotide
cacuguaaguugcguacuu

SEQ ID NO: 2443268 - RNA, 19 nt, Artificial Sequence
  Description of Artificial Sequence: Synthetic oligonucleotide
  modified_base (2)..(2): a, c, u, g, unknown or other
cncuuugccugaccacggu

SEQ ID NO: 2443269 - RNA, 19 nt, Artificial Sequence
  Description of Artificial Sequence: Synthetic oligonucleotide
caucagcucuacugcacuu

SEQ ID NO: 2443270 - RNA, 19 nt, Artificial Sequence
  Description of Artificial Sequence: Synthetic oligonucleotide
cgacgggugauucuugaaa

SEQ ID NO: 2443271 - RNA, 19 nt, Artificial Sequence
  Description of Artificial Sequence: Synthetic oligonucleotide
cuacugcacuuggaguucu

SEQ ID NO: 2443272 - RNA, 19 nt, Artificial Sequence
  Description of Artificial Sequence: Synthetic oligonucleotide
ggcgagcuuucacacugua

SEQ ID NO: 2443273 - RNA, 19 nt, Artificial Sequence
  Description of Artificial Sequence: Synthetic oligonucleotide
ccacugguaacuugauccu

SEQ ID NO: 2443274 - RNA, 19 nt, Artificial Sequence
  Description of Artificial Sequence: Synthetic oligonucleotide
cacccuguagccucuccuu

SEQ ID NO: 2443275 - RNA, 19 nt, Artificial Sequence
  Description of Artificial Sequence: Synthetic oligonucleotide
cucccguaacgugccucuc

SEQ ID NO: 2443276 - RNA, 19 nt, Artificial Sequence
  Description of Artificial Sequence: Synthetic oligonucleotide
  modified_base (2)..(2): a, c, u, g, unknown or other
cncuuccugugacugcuuu

SEQ ID NO: 2443277 - RNA, 19 nt, Artificial Sequence
  Description of Artificial Sequence: Synthetic oligonucleotide
cucgcugauaauggucgau

SEQ ID NO: 2443278 - RNA, 19 nt, Artificial Sequence
  Description of Artificial Sequence: Synthetic oligonucleotide
gcgagcuuucacacuguaa

SEQ ID NO: 2443279 - RNA, 19 nt, Artificial Sequence
  Description of Artificial Sequence: Synthetic oligonucleotide
  modified_base (18)..(18): a, c, u, g, unknown or other
ggccugaggggagcgucnc

SEQ ID NO: 2443280 - RNA, 19 nt, Artificial Sequence
  Description of Artificial Sequence: Synthetic oligonucleotide
ccauauugacugucuaauu

SEQ ID NO: 2443281 - RNA, 19 nt, Artificial Sequence
  Description of Artificial Sequence: Synthetic oligonucleotide
cuacauccacugguaacuu

SEQ ID NO: 2443282 - RNA, 19 nt, Artificial Sequence
  Description of Artificial Sequence: Synthetic oligonucleotide
ggcaaagccgacgggugau

SEQ ID NO: 2443283 - RNA, 19 nt, Artificial Sequence
  Description of Artificial Sequence: Synthetic oligonucleotide
gcccuggauuacaucagcu

SEQ ID NO: 2443284 - RNA, 19 nt, Artificial Sequence
  Description of Artificial Sequence: Synthetic oligonucleotide
ccaugugcucccguaacgu

SEQ ID NO: 2443285 - RNA, 19 nt, Artificial Sequence
  Description of Artificial Sequence: Synthetic oligonucleotide
cagcugggaagcagauuuu

SEQ ID NO: 2443286 - RNA, 19 nt, Artificial Sequence
  Description of Artificial Sequence: Synthetic oligonucleotide
ccagccacaggucuaccuu

SEQ ID NO: 2443287 - RNA, 19 nt, Artificial Sequence
  Description of Artificial Sequence: Synthetic oligonucleotide
ccgacgggugauucuugaa

SEQ ID NO: 2443288 - RNA, 19 nt, Artificial Sequence
  Description of Artificial Sequence: Synthetic oligonucleotide
  modified_base (11)..(11): a, c, u, g, unknown or other
ggggagcgucncuuccugu

SEQ ID NO: 2443289 - RNA, 19 nt, Artificial Sequence
  Description of Artificial Sequence: Synthetic oligonucleotide
  modified_base (16)..(16): a, c, u, g, unknown or other
ccugaggggagcgucncuu

SEQ ID NO: 2443290 - RNA, 19 nt, Artificial Sequence
  Description of Artificial Sequence: Synthetic oligonucleotide
cgcugccgagacacagaag

SEQ ID NO: 2443291 - RNA, 19 nt, Artificial Sequence
  Description of Artificial Sequence: Synthetic oligonucleotide
ccuucgcugccgagacaca

SEQ ID NO: 2443292 - RNA, 19 nt, Artificial Sequence
  Description of Artificial Sequence: Synthetic oligonucleotide
gugcucccguaacgugccu

SEQ ID NO: 2443293 - RNA, 19 nt, Artificial Sequence
  Description of Artificial Sequence: Synthetic oligonucleotide
cggucagucuguucuuccu

SEQ ID NO: 2443294 - RNA, 19 nt, Artificial Sequence
  Description of Artificial Sequence: Synthetic oligonucleotide
ccguaacgugccucucucu

SEQ ID NO: 2443295 - RNA, 19 nt, Artificial Sequence
  Description of Artificial Sequence: Synthetic oligonucleotide
  modified_base (17)..(17): a, c, u, g, unknown or other
gccugaggggagcgucncu

SEQ ID NO: 2443296 - RNA, 19 nt, Artificial Sequence
  Description of Artificial Sequence: Synthetic oligonucleotide
cgugccucucucuccaauu

SEQ ID NO: 2443297 - RNA, 19 nt, Artificial Sequence
  Description of Artificial Sequence: Synthetic oligonucleotide
gcuguguggcuggaaucuu

SEQ ID NO: 2443298 - RNA, 19 nt, Artificial Sequence
  Description of Artificial Sequence: Synthetic oligonucleotide
cccaggcccuggauuacau

SEQ ID NO: 2443299 - RNA, 19 nt, Artificial Sequence
  Description of Artificial Sequence: Synthetic oligonucleotide
gcaaagccgacgggugauu

SEQ ID NO: 2443300 - RNA, 19 nt, Artificial Sequence
  Description of Artificial Sequence: Synthetic oligonucleotide
cgucucucucucgcugaua

SEQ ID NO: 2443301 - RNA, 19 nt, Artificial Sequence
  Description of Artificial Sequence: Synthetic oligonucleotide
  modified_base (1)..(1): a, c, u, g, unknown or other
ncuuugccugaccacgguc

SEQ ID NO: 2443302 - RNA, 19 nt, Artificial Sequence
  Description of Artificial Sequence: Synthetic oligonucleotide
aauacaauagauuucgucu

SEQ ID NO: 2443303 - RNA, 19 nt, Artificial Sequence
  Description of Artificial Sequence: Synthetic oligonucleotide
aauauuacuaauccgccuc

SEQ ID NO: 2443304 - RNA, 19 nt, Artificial Sequence
  Description of Artificial Sequence: Synthetic oligonucleotide
aagcaauaaagccagaguc

SEQ ID NO: 2443305 - RNA, 19 nt, Artificial Sequence
  Description of Artificial Sequence: Synthetic oligonucleotide
aaauacaauagauuucguc

SEQ ID NO: 2443306 - RNA, 19 nt, Artificial Sequence
  Description of Artificial Sequence: Synthetic oligonucleotide
uggaauauuacuaauccgc

SEQ ID NO: 2443307 - RNA, 19 nt, Artificial Sequence
  Description of Artificial Sequence: Synthetic oligonucleotide
aucauauucauauacuguc

SEQ ID NO: 2443308 - RNA, 19 nt, Artificial Sequence
  Description of Artificial Sequence: Synthetic oligonucleotide
uucauauacugucacacgg

SEQ ID NO: 2443309 - RNA, 19 nt, Artificial Sequence
  Description of Artificial Sequence: Synthetic oligonucleotide
gaaguugugagcuaugaag

SEQ ID NO: 2443310 - RNA, 19 nt, Artificial Sequence
  Description of Artificial Sequence: Synthetic oligonucleotide
acaaauacaauagauuucg

SEQ ID NO: 2443311 - RNA, 19 nt, Artificial Sequence
  Description of Artificial Sequence: Synthetic oligonucleotide
acugggauaucacaaauac

SEQ ID NO: 2443312 - RNA, 19 nt, Artificial Sequence
  Description of Artificial Sequence: Synthetic oligonucleotide
uuauagaccuucaugacug

SEQ ID NO: 2443313 - RNA, 19 nt, Artificial Sequence
  Description of Artificial Sequence: Synthetic oligonucleotide
auauuaauccauuuggucu

SEQ ID NO: 2443314 - RNA, 19 nt, Artificial Sequence
  Description of Artificial Sequence: Synthetic oligonucleotide
auagauuucgucuuugaag

SEQ ID NO: 2443315 - RNA, 19 nt, Artificial Sequence
  Description of Artificial Sequence: Synthetic oligonucleotide
aaaaggccaacaugguacc

SEQ ID NO: 2443316 - RNA, 19 nt, Artificial Sequence
  Description of Artificial Sequence: Synthetic oligonucleotide
aagagaugcacaccacugc

SEQ ID NO: 2443317 - RNA, 19 nt, Artificial Sequence
  Description of Artificial Sequence: Synthetic oligonucleotide
uagauuucgucuuugaaga

SEQ ID NO: 2443318 - RNA, 19 nt, Artificial Sequence
  Description of Artificial Sequence: Synthetic oligonucleotide
aaagccagagucaaacugc

SEQ ID NO: 2443319 - RNA, 19 nt, Artificial Sequence
  Description of Artificial Sequence: Synthetic oligonucleotide
augguaccuauauuaaucc

SEQ ID NO: 2443320 - RNA, 19 nt, Artificial Sequence
  Description of Artificial Sequence: Synthetic oligonucleotide
caacuuuuggucaugauug

SEQ ID NO: 2443321 - RNA, 19 nt, Artificial Sequence
  Description of Artificial Sequence: Synthetic oligonucleotide
cugcaaaaggccaacaugg

SEQ ID NO: 2443322 - RNA, 19 nt, Artificial Sequence
  Description of Artificial Sequence: Synthetic oligonucleotide
uauacugucacacgguucu

SEQ ID NO: 2443323 - RNA, 19 nt, Artificial Sequence
  Description of Artificial Sequence: Synthetic oligonucleotide
ucacaaauacaauagauuu

SEQ ID NO: 2443324 - RNA, 19 nt, Artificial Sequence
  Description of Artificial Sequence: Synthetic oligonucleotide
augauugacgaucugguag

SEQ ID NO: 2443325 - RNA, 19 nt, Artificial Sequence
  Description of Artificial Sequence: Synthetic oligonucleotide
uggauuauagaccuucaug

SEQ ID NO: 2443326 - RNA, 19 nt, Artificial Sequence
  Description of Artificial Sequence: Synthetic oligonucleotide
agcuaugaaggacugggcc

SEQ ID NO: 2443327 - RNA, 19 nt, Artificial Sequence
  Description of Artificial Sequence: Synthetic oligonucleotide
ugagcuaugaaggacuggg

SEQ ID NO: 2443328 - RNA, 19 nt, Artificial Sequence
  Description of Artificial Sequence: Synthetic oligonucleotide
uaguaucauauucauauac

SEQ ID NO: 2443329 - RNA, 19 nt, Artificial Sequence
  Description of Artificial Sequence: Synthetic oligonucleotide
caaaaggccaacaugguac

SEQ ID NO: 2443330 - RNA, 19 nt, Artificial Sequence
  Description of Artificial Sequence: Synthetic oligonucleotide
cuuuuggucaugauugacg

SEQ ID NO: 2443331 - RNA, 19 nt, Artificial Sequence
  Description of Artificial Sequence: Synthetic oligonucleotide
agagucaaacugcaaaagg

SEQ ID NO: 2443332 - RNA, 19 nt, Artificial Sequence
  Description of Artificial Sequence: Synthetic oligonucleotide
uauauuaauccauuugguc

SEQ ID NO: 2443333 - RNA, 19 nt, Artificial Sequence
  Description of Artificial Sequence: Synthetic oligonucleotide
acugucuacguccagacug

SEQ ID NO: 2443334 - RNA, 19 nt, Artificial Sequence
  Description of Artificial Sequence: Synthetic oligonucleotide
auauuacuaauccgccucc

SEQ ID NO: 2443335 - RNA, 19 nt, Artificial Sequence
  Description of Artificial Sequence: Synthetic oligonucleotide
aagccugcgagccaggaag

SEQ ID NO: 2443336 - RNA, 19 nt, Artificial Sequence
  Description of Artificial Sequence: Synthetic oligonucleotide
aguuguggguuucugaguc

SEQ ID NO: 2443337 - RNA, 19 nt, Artificial Sequence
  Description of Artificial Sequence: Synthetic oligonucleotide
ugaaacucugaccagguuc

SEQ ID NO: 2443338 - RNA, 19 nt, Artificial Sequence
  Description of Artificial Sequence: Synthetic oligonucleotide
guaucauauucauauacug

SEQ ID NO: 2443339 - RNA, 19 nt, Artificial Sequence
  Description of Artificial Sequence: Synthetic oligonucleotide
agucaaacugcaaaaggcc

SEQ ID NO: 2443340 - RNA, 19 nt, Artificial Sequence
  Description of Artificial Sequence: Synthetic oligonucleotide
gacaggaaggauaaacucg

SEQ ID NO: 2443341 - RNA, 19 nt, Artificial Sequence
  Description of Artificial Sequence: Synthetic oligonucleotide
ccuauauuaauccauuugg

SEQ ID NO: 2443342 - RNA, 19 nt, Artificial Sequence
  Description of Artificial Sequence: Synthetic oligonucleotide
uuuuggucaugauugacga

SEQ ID NO: 2443343 - RNA, 19 nt, Artificial Sequence
  Description of Artificial Sequence: Synthetic oligonucleotide
uaagagaugcacaccacug

SEQ ID NO: 2443344 - RNA, 19 nt, Artificial Sequence
  Description of Artificial Sequence: Synthetic oligonucleotide
ucuacguccagacugucga

SEQ ID NO: 2443345 - RNA, 19 nt, Artificial Sequence
  Description of Artificial Sequence: Synthetic oligonucleotide
auuauagaccuucaugacu

SEQ ID NO: 2443346 - RNA, 19 nt, Artificial Sequence
  Description of Artificial Sequence: Synthetic oligonucleotide
agacaggaaggauaaacuc

SEQ ID NO: 2443347 - RNA, 19 nt, Artificial Sequence
  Description of Artificial Sequence: Synthetic oligonucleotide
ucuggcuggauuauagacc

SEQ ID NO: 2443348 - RNA, 19 nt, Artificial Sequence
  Description of Artificial Sequence: Synthetic oligonucleotide
acugucgagacgcagcacg

SEQ ID NO: 2443349 - RNA, 19 nt, Artificial Sequence
  Description of Artificial Sequence: Synthetic oligonucleotide
caugguaccuauauuaauc

SEQ ID NO: 2443350 - RNA, 19 nt, Artificial Sequence
  Description of Artificial Sequence: Synthetic oligonucleotide
gagcacacaagcaauaaag

SEQ ID NO: 2443351 - RNA, 19 nt, Artificial Sequence
  Description of Artificial Sequence: Synthetic oligonucleotide
ucggcaaacuugaggaugg

SEQ ID NO: 2443352 - RNA, 19 nt, Artificial Sequence
  Description of Artificial Sequence: Synthetic oligonucleotide
auucauauacugucacacg

SEQ ID NO: 2443353 - RNA, 19 nt, Artificial Sequence
  Description of Artificial Sequence: Synthetic oligonucleotide
ugcagcauauccgaggccg

SEQ ID NO: 2443354 - RNA, 19 nt, Artificial Sequence
  Description of Artificial Sequence: Synthetic oligonucleotide
ugaugaaacucugaccagg

SEQ ID NO: 2443355 - RNA, 19 nt, Artificial Sequence
  Description of Artificial Sequence: Synthetic oligonucleotide
uuaagagaugcacaccacu

SEQ ID NO: 2443356 - RNA, 19 nt, Artificial Sequence
  Description of Artificial Sequence: Synthetic oligonucleotide
ucaugauugacgaucuggu

SEQ ID NO: 2443357 - RNA, 19 nt, Artificial Sequence
  Description of Artificial Sequence: Synthetic oligonucleotide
accuauauuaauccauuug

SEQ ID NO: 2443358 - RNA, 19 nt, Artificial Sequence
  Description of Artificial Sequence: Synthetic oligonucleotide
guaguuguggguuucugag

SEQ ID NO: 2443359 - RNA, 19 nt, Artificial Sequence
  Description of Artificial Sequence: Synthetic oligonucleotide
uucguuuaagagaugcaca

SEQ ID NO: 2443360 - RNA, 19 nt, Artificial Sequence
  Description of Artificial Sequence: Synthetic oligonucleotide
gagucaaacugcaaaaggc

SEQ ID NO: 2443361 - RNA, 19 nt, Artificial Sequence
  Description of Artificial Sequence: Synthetic oligonucleotide
uucccuaguaucauauuca

SEQ ID NO: 2443362 - RNA, 19 nt, Artificial Sequence
  Description of Artificial Sequence: Synthetic oligonucleotide
aacucgagcacacaagcaa

SEQ ID NO: 2443363 - RNA, 19 nt, Artificial Sequence
  Description of Artificial Sequence: Synthetic oligonucleotide
ggauuauagaccuucauga

SEQ ID NO: 2443364 - RNA, 19 nt, Artificial Sequence
  Description of Artificial Sequence: Synthetic oligonucleotide
agucacuucguuuaagaga

SEQ ID NO: 2443365 - RNA, 19 nt, Artificial Sequence
  Description of Artificial Sequence: Synthetic oligonucleotide
aauggaacccauccugcug

SEQ ID NO: 2443366 - RNA, 19 nt, Artificial Sequence
  Description of Artificial Sequence: Synthetic oligonucleotide
ucgucuuugaagacacagg

SEQ ID NO: 2443367 - RNA, 19 nt, Artificial Sequence
  Description of Artificial Sequence: Synthetic oligonucleotide
acaggcuucgcgcacguac

SEQ ID NO: 2443368 - RNA, 19 nt, Artificial Sequence
  Description of Artificial Sequence: Synthetic oligonucleotide
agugcaguuugucagguca

SEQ ID NO: 2443369 - RNA, 19 nt, Artificial Sequence
  Description of Artificial Sequence: Synthetic oligonucleotide
aaggauaaacucgagcaca

SEQ ID NO: 2443370 - RNA, 19 nt, Artificial Sequence
  Description of Artificial Sequence: Synthetic oligonucleotide
ucguuuaagagaugcacac

SEQ ID NO: 2443371 - RNA, 19 nt, Artificial Sequence
  Description of Artificial Sequence: Synthetic oligonucleotide
gauuauagaccuucaugac

SEQ ID NO: 2443372 - RNA, 19 nt, Artificial Sequence
  Description of Artificial Sequence: Synthetic oligonucleotide
guggaauauuacuaauccg

SEQ ID NO: 2443373 - RNA, 19 nt, Artificial Sequence
  Description of Artificial Sequence: Synthetic oligonucleotide
ucguggauggucacgcugg

SEQ ID NO: 2443374 - RNA, 19 nt, Artificial Sequence
  Description of Artificial Sequence: Synthetic oligonucleotide
auuacuaauccgccuccac

SEQ ID NO: 2443375 - RNA, 19 nt, Artificial Sequence
  Description of Artificial Sequence: Synthetic oligonucleotide
guagcaguaguccaccaag

SEQ ID NO: 2443376 - RNA, 19 nt, Artificial Sequence
  Description of Artificial Sequence: Synthetic oligonucleotide
uucgucuuugaagacacag

SEQ ID NO: 2443377 - RNA, 19 nt, Artificial Sequence
  Description of Artificial Sequence: Synthetic oligonucleotide
uauuaauccauuuggucuu

SEQ ID NO: 2443378 - RNA, 19 nt, Artificial Sequence
  Description of Artificial Sequence: Synthetic oligonucleotide
aacuugaggauggcagugc

SEQ ID NO: 2443379 - RNA, 19 nt, Artificial Sequence
  Description of Artificial Sequence: Synthetic oligonucleotide
agcugcuugaaguugugag

SEQ ID NO: 2443380 - RNA, 19 nt, Artificial Sequence
  Description of Artificial Sequence: Synthetic oligonucleotide
caguuugucaggucaagcc

SEQ ID NO: 2443381 - RNA, 19 nt, Artificial Sequence
  Description of Artificial Sequence: Synthetic oligonucleotide
aagaccucgaaggacucgg

SEQ ID NO: 2443382 - RNA, 19 nt, Artificial Sequence
  Description of Artificial Sequence: Synthetic oligonucleotide
ugucuucucacugucuacg

SEQ ID NO: 2443383 - RNA, 19 nt, Artificial Sequence
  Description of Artificial Sequence: Synthetic oligonucleotide
gauaaacucgagcacacaa

SEQ ID NO: 2443384 - RNA, 19 nt, Artificial Sequence
  Description of Artificial Sequence: Synthetic oligonucleotide
ugauugacgaucugguagu

SEQ ID NO: 2443385 - RNA, 19 nt, Artificial Sequence
  Description of Artificial Sequence: Synthetic oligonucleotide
gucaugauugacgaucugg

SEQ ID NO: 2443386 - RNA, 19 nt, Artificial Sequence
  Description of Artificial Sequence: Synthetic oligonucleotide
ucccgaauggaacccaucc

SEQ ID NO: 2443387 - RNA, 19 nt, Artificial Sequence
  Description of Artificial Sequence: Synthetic oligonucleotide
uggauggucacgcuggccu

SEQ ID NO: 2443388 - RNA, 19 nt, Artificial Sequence
  Description of Artificial Sequence: Synthetic oligonucleotide
acucugaccagguucaaga

SEQ ID NO: 2443389 - RNA, 19 nt, Artificial Sequence
  Description of Artificial Sequence: Synthetic oligonucleotide
agcaguaguccaccaagac

SEQ ID NO: 2443390 - RNA, 19 nt, Artificial Sequence
  Description of Artificial Sequence: Synthetic oligonucleotide
ucauauacugucacacggu

SEQ ID NO: 2443391 - RNA, 19 nt, Artificial Sequence
  Description of Artificial Sequence: Synthetic oligonucleotide
ccuugcaucaucuuccucg

SEQ ID NO: 2443392 - RNA, 19 nt, Artificial Sequence
  Description of Artificial Sequence: Synthetic oligonucleotide
cacaaauacaauagauuuc

SEQ ID NO: 2443393 - RNA, 19 nt, Artificial Sequence
  Description of Artificial Sequence: Synthetic oligonucleotide
aaaggcgucggcaaacuug

SEQ ID NO: 2443394 - RNA, 19 nt, Artificial Sequence
  Description of Artificial Sequence: Synthetic oligonucleotide
uccucuggcuggauuauag

SEQ ID NO: 2443395 - RNA, 19 nt, Artificial Sequence
  Description of Artificial Sequence: Synthetic oligonucleotide
ucaaacugcaaaaggccaa

SEQ ID NO: 2443396 - RNA, 19 nt, Artificial Sequence
  Description of Artificial Sequence: Synthetic oligonucleotide
acaagcaauaaagccagag

SEQ ID NO: 2443397 - RNA, 19 nt, Artificial Sequence
  Description of Artificial Sequence: Synthetic oligonucleotide
acacaagcaauaaagccag

SEQ ID NO: 2443398 - RNA, 19 nt, Artificial Sequence
  Description of Artificial Sequence: Synthetic oligonucleotide
uuuaagagaugcacaccac

SEQ ID NO: 2443399 - RNA, 19 nt, Artificial Sequence
  Description of Artificial Sequence: Synthetic oligonucleotide
uccaguggaauauuacuaa

SEQ ID NO: 2443400 - RNA, 19 nt, Artificial Sequence
  Description of Artificial Sequence: Synthetic oligonucleotide
uagaccuucaugacuggga

SEQ ID NO: 2443401 - RNA, 19 nt, Artificial Sequence
  Description of Artificial Sequence: Synthetic oligonucleotide
cuucguuuaagagaugcac

SEQ ID NO: 2443402 - RNA, 19 nt, Artificial Sequence
  Description of Artificial Sequence: Synthetic oligonucleotide
gucaggucaagccugcgag

SEQ ID NO: 2443403 - RNA, 19 nt, Artificial Sequence
  Description of Artificial Sequence: Synthetic oligonucleotide
aacugcaaaaggccaacau

SEQ ID NO: 2443404 - RNA, 19 nt, Artificial Sequence
  Description of Artificial Sequence: Synthetic oligonucleotide
ugucacacgguucuucuuc

SEQ ID NO: 2443405 - RNA, 19 nt, Artificial Sequence
  Description of Artificial Sequence: Synthetic oligonucleotide
uacuaauccgccuccacuc

SEQ ID NO: 2443406 - RNA, 19 nt, Artificial Sequence
  Description of Artificial Sequence: Synthetic oligonucleotide
aguaucauauucauauacu

SEQ ID NO: 2443407 - RNA, 19 nt, Artificial Sequence
  Description of Artificial Sequence: Synthetic oligonucleotide
auacaauagauuucgucuu

SEQ ID NO: 2443408 - RNA, 19 nt, Artificial Sequence
  Description of Artificial Sequence: Synthetic oligonucleotide
uuugucaggucaagccugc

SEQ ID NO: 2443409 - RNA, 19 nt, Artificial Sequence
  Description of Artificial Sequence: Synthetic oligonucleotide
aacuuuuggucaugauuga

SEQ ID NO: 2443410 - RNA, 19 nt, Artificial Sequence
  Description of Artificial Sequence: Synthetic oligonucleotide
uccgaggccgcguacaggc

SEQ ID NO: 2443411 - RNA, 19 nt, Artificial Sequence
  Description of Artificial Sequence: Synthetic oligonucleotide
agagaugcacaccacugca

SEQ ID NO: 2443412 - RNA, 19 nt, Artificial Sequence
  Description of Artificial Sequence: Synthetic oligonucleotide
gacgaucugguaguugugg

SEQ ID NO: 2443413 - RNA, 19 nt, Artificial Sequence
  Description of Artificial Sequence: Synthetic oligonucleotide
ugugagcuaugaaggacug

SEQ ID NO: 2443414 - RNA, 19 nt, Artificial Sequence
  Description of Artificial Sequence: Synthetic oligonucleotide
agauuucgucuuugaagac

SEQ ID NO: 2443415 - RNA, 19 nt, Artificial Sequence
  Description of Artificial Sequence: Synthetic oligonucleotide
caacaugguaccuauauua

SEQ ID NO: 2443416 - RNA, 19 nt, Artificial Sequence
  Description of Artificial Sequence: Synthetic oligonucleotide
cucuggcuggauuauagac

SEQ ID NO: 2443417 - RNA, 19 nt, Artificial Sequence
  Description of Artificial Sequence: Synthetic oligonucleotide
acgaucugguaguuguggg

SEQ ID NO: 2443418 - RNA, 19 nt, Artificial Sequence
  Description of Artificial Sequence: Synthetic oligonucleotide
ucuccucccgaauggaacc

SEQ ID NO: 2443419 - RNA, 19 nt, Artificial Sequence
  Description of Artificial Sequence: Synthetic oligonucleotide
ucuuggaaagucacuucgu

SEQ ID NO: 2443420 - RNA, 19 nt, Artificial Sequence
  Description of Artificial Sequence: Synthetic oligonucleotide
aaggacucggcguccacgu

SEQ ID NO: 2443421 - RNA, 19 nt, Artificial Sequence
  Description of Artificial Sequence: Synthetic oligonucleotide
gcacacaagcaauaaagcc

SEQ ID NO: 2443422 - RNA, 19 nt, Artificial Sequence
  Description of Artificial Sequence: Synthetic oligonucleotide
caguggaauauuacuaauc

SEQ ID NO: 2443423 - RNA, 19 nt, Artificial Sequence
  Description of Artificial Sequence: Synthetic oligonucleotide
acguccagacugucgagac

SEQ ID NO: 2443424 - RNA, 19 nt, Artificial Sequence
  Description of Artificial Sequence: Synthetic oligonucleotide
auggaacccauccugcuga

SEQ ID NO: 2443425 - RNA, 19 nt, Artificial Sequence
  Description of Artificial Sequence: Synthetic oligonucleotide
acuuuuggucaugauugac

SEQ ID NO: 2443426 - RNA, 19 nt, Artificial Sequence
  Description of Artificial Sequence: Synthetic oligonucleotide
ugaaguugugagcuaugaa

SEQ ID NO: 2443427 - RNA, 19 nt, Artificial Sequence
  Description of Artificial Sequence: Synthetic oligonucleotide
uccacgucguggaugguca

SEQ ID NO: 2443428 - RNA, 19 nt, Artificial Sequence
  Description of Artificial Sequence: Synthetic oligonucleotide
uugugguggucaaaggcgu

SEQ ID NO: 2443429 - RNA, 19 nt, Artificial Sequence
  Description of Artificial Sequence: Synthetic oligonucleotide
uaauccgccuccacucucc

SEQ ID NO: 2443430 - RNA, 19 nt, Artificial Sequence
  Description of Artificial Sequence: Synthetic oligonucleotide
aguugugagcuaugaagga

SEQ ID NO: 2443431 - RNA, 19 nt, Artificial Sequence
  Description of Artificial Sequence: Synthetic oligonucleotide
uugaaguugugagcuauga

SEQ ID NO: 2443432 - RNA, 19 nt, Artificial Sequence
  Description of Artificial Sequence: Synthetic oligonucleotide
acacaggcuucuuggaaag

SEQ ID NO: 2443433 - RNA, 19 nt, Artificial Sequence
  Description of Artificial Sequence: Synthetic oligonucleotide
acggccacaugacacacug

SEQ ID NO: 2443434 - RNA, 19 nt, Artificial Sequence
  Description of Artificial Sequence: Synthetic oligonucleotide
aggauaaacucgagcacac

SEQ ID NO: 2443435 - RNA, 19 nt, Artificial Sequence
  Description of Artificial Sequence: Synthetic oligonucleotide
ggugguagaagugaugagc

SEQ ID NO: 2443436 - RNA, 19 nt, Artificial Sequence
  Description of Artificial Sequence: Synthetic oligonucleotide
uguagcaguaguccaccaa

SEQ ID NO: 2443437 - RNA, 19 nt, Artificial Sequence
  Description of Artificial Sequence: Synthetic oligonucleotide
ugacugggauaucacaaau

SEQ ID NO: 2443438 - RNA, 19 nt, Artificial Sequence
  Description of Artificial Sequence: Synthetic oligonucleotide
gaccucgaaggacucggcg

SEQ ID NO: 2443439 - RNA, 19 nt, Artificial Sequence
  Description of Artificial Sequence: Synthetic oligonucleotide
ugcaaaaggccaacauggu

SEQ ID NO: 2443440 - RNA, 19 nt, Artificial Sequence
  Description of Artificial Sequence: Synthetic oligonucleotide
ugguaccuauauuaaucca

SEQ ID NO: 2443441 - RNA, 19 nt, Artificial Sequence
  Description of Artificial Sequence: Synthetic oligonucleotide
cugcgagccaggaaggaag

SEQ ID NO: 2443442 - RNA, 19 nt, Artificial Sequence
  Description of Artificial Sequence: Synthetic oligonucleotide
ucagugcuagacucacucc

SEQ ID NO: 2443443 - RNA, 19 nt, Artificial Sequence
  Description of Artificial Sequence: Synthetic oligonucleotide
ggaauauuacuaauccgcc

SEQ ID NO: 2443444 - RNA, 19 nt, Artificial Sequence
  Description of Artificial Sequence: Synthetic oligonucleotide
acgucguggauggucacgc

SEQ ID NO: 2443445 - RNA, 19 nt, Artificial Sequence
  Description of Artificial Sequence: Synthetic oligonucleotide
ggauaucacaaauacaaua

SEQ ID NO: 2443446 - RNA, 19 nt, Artificial Sequence
  Description of Artificial Sequence: Synthetic oligonucleotide
ugucaggucaagccugcga

SEQ ID NO: 2443447 - RNA, 19 nt, Artificial Sequence
  Description of Artificial Sequence: Synthetic oligonucleotide
aggaagcacaggcuucgcg

SEQ ID NO: 2443448 - RNA, 19 nt, Artificial Sequence
  Description of Artificial Sequence: Synthetic oligonucleotide
ggaagcacaggcuucgcgc

SEQ ID NO: 2443449 - RNA, 19 nt, Artificial Sequence
  Description of Artificial Sequence: Synthetic oligonucleotide
caugacugggauaucacaa

SEQ ID NO: 2443450 - RNA, 19 nt, Artificial Sequence
  Description of Artificial Sequence: Synthetic oligonucleotide
gguagaagugaugagcagc

SEQ ID NO: 2443451 - RNA, 19 nt, Artificial Sequence
  Description of Artificial Sequence: Synthetic oligonucleotide
agacucacuccuugcauca

SEQ ID NO: 2443452 - RNA, 19 nt, Artificial Sequence
  Description of Artificial Sequence: Synthetic oligonucleotide
uccauuguggggugguaga

SEQ ID NO: 2443453 - RNA, 19 nt, Artificial Sequence
  Description of Artificial Sequence: Synthetic oligonucleotide
cacgguucuucuuccauug

SEQ ID NO: 2443454 - RNA, 19 nt, Artificial Sequence
  Description of Artificial Sequence: Synthetic oligonucleotide
guccagacugucgagacgc

SEQ ID NO: 2443455 - RNA, 19 nt, Artificial Sequence
  Description of Artificial Sequence: Synthetic oligonucleotide
gaauauuacuaauccgccu

SEQ ID NO: 2443456 - RNA, 19 nt, Artificial Sequence
  Description of Artificial Sequence: Synthetic oligonucleotide
acacacugucuucucacug

SEQ ID NO: 2443457 - RNA, 19 nt, Artificial Sequence
  Description of Artificial Sequence: Synthetic oligonucleotide
gaagugaugagcagcaacu

SEQ ID NO: 2443458 - RNA, 19 nt, Artificial Sequence
  Description of Artificial Sequence: Synthetic oligonucleotide
aaggcgucggcaaacuuga

SEQ ID NO: 2443459 - RNA, 19 nt, Artificial Sequence
  Description of Artificial Sequence: Synthetic oligonucleotide
uagcaguaguccaccaaga

SEQ ID NO: 2443460 - RNA, 19 nt, Artificial Sequence
  Description of Artificial Sequence: Synthetic oligonucleotide
guagaagugaugagcagca

SEQ ID NO: 2443461 - RNA, 19 nt, Artificial Sequence
  Description of Artificial Sequence: Synthetic oligonucleotide
guuugucaggucaagccug

SEQ ID NO: 2443462 - RNA, 19 nt, Artificial Sequence
  Description of Artificial Sequence: Synthetic oligonucleotide
auauacugucacacgguuc

SEQ ID NO: 2443463 - RNA, 19 nt, Artificial Sequence
  Description of Artificial Sequence: Synthetic oligonucleotide
agaccuucaugacugggau

SEQ ID NO: 2443464 - RNA, 19 nt, Artificial Sequence
  Description of Artificial Sequence: Synthetic oligonucleotide
gaaggacucggcguccacg

SEQ ID NO: 2443465 - RNA, 19 nt, Artificial Sequence
  Description of Artificial Sequence: Synthetic oligonucleotide
acaauagauuucgucuuug

SEQ ID NO: 2443466 - RNA, 19 nt, Artificial Sequence
  Description of Artificial Sequence: Synthetic oligonucleotide
uuccauuguggggugguag

SEQ ID NO: 2443467 - RNA, 19 nt, Artificial Sequence
  Description of Artificial Sequence: Synthetic oligonucleotide
ugcuagacucacuccuugc

SEQ ID NO: 2443468 - RNA, 19 nt, Artificial Sequence
  Description of Artificial Sequence: Synthetic oligonucleotide
gcuugugguggucaaaggc

SEQ ID NO: 2443469 - RNA, 19 nt, Artificial Sequence
  Description of Artificial Sequence: Synthetic oligonucleotide
cuauauuaauccauuuggu

SEQ ID NO: 2443470 - RNA, 19 nt, Artificial Sequence
  Description of Artificial Sequence: Synthetic oligonucleotide
agcuugugguggucaaagg

SEQ ID NO: 2443471 - RNA, 19 nt, Artificial Sequence
  Description of Artificial Sequence: Synthetic oligonucleotide
cagagucaaacugcaaaag

SEQ ID NO: 2443472 - RNA, 19 nt, Artificial Sequence
  Description of Artificial Sequence: Synthetic oligonucleotide
gugaugaaacucugaccag

SEQ ID NO: 2443473 - RNA, 19 nt, Artificial Sequence
  Description of Artificial Sequence: Synthetic oligonucleotide
cuugaaguugugagcuaug

SEQ ID NO: 2443474 - RNA, 19 nt, Artificial Sequence
  Description of Artificial Sequence: Synthetic oligonucleotide
gcaguaguccaccaagacc

SEQ ID NO: 2443475 - RNA, 19 nt, Artificial Sequence
  Description of Artificial Sequence: Synthetic oligonucleotide
aaggaagcacaggcuucgc

SEQ ID NO: 2443476 - RNA, 19 nt, Artificial Sequence
  Description of Artificial Sequence: Synthetic oligonucleotide
cuaugaaggacugggccug

SEQ ID NO: 2443477 - RNA, 19 nt, Artificial Sequence
  Description of Artificial Sequence: Synthetic oligonucleotide
ucccuaguaucauauucau

SEQ ID NO: 2443478 - RNA, 19 nt, Artificial Sequence
  Description of Artificial Sequence: Synthetic oligonucleotide
aacccauccugcugagcug

SEQ ID NO: 2443479 - RNA, 19 nt, Artificial Sequence
  Description of Artificial Sequence: Synthetic oligonucleotide
acgcagcacggccagcagc

SEQ ID NO: 2443480 - RNA, 19 nt, Artificial Sequence
  Description of Artificial Sequence: Synthetic oligonucleotide
ugaaggacugggccuggga

SEQ ID NO: 2443481 - RNA, 19 nt, Artificial Sequence
  Description of Artificial Sequence: Synthetic oligonucleotide
augacugggauaucacaaa

SEQ ID NO: 2443482 - RNA, 19 nt, Artificial Sequence
  Description of Artificial Sequence: Synthetic oligonucleotide
accaagaccucgaaggacu

SEQ ID NO: 2443483 - RNA, 19 nt, Artificial Sequence
  Description of Artificial Sequence: Synthetic oligonucleotide
gaagcacaggcuucgcgca

SEQ ID NO: 2443484 - RNA, 19 nt, Artificial Sequence
  Description of Artificial Sequence: Synthetic oligonucleotide
ugcacaccacugcacggcc

SEQ ID NO: 2443485 - RNA, 19 nt, Artificial Sequence
  Description of Artificial Sequence: Synthetic oligonucleotide
ugcgagccaggaaggaagc

SEQ ID NO: 2443486 - RNA, 19 nt, Artificial Sequence
  Description of Artificial Sequence: Synthetic oligonucleotide
ucaggucaagccugcgagc

SEQ ID NO: 2443487 - RNA, 19 nt, Artificial Sequence
  Description of Artificial Sequence: Synthetic oligonucleotide
aaacucgagcacacaagca

SEQ ID NO: 2443488 - RNA, 19 nt, Artificial Sequence
  Description of Artificial Sequence: Synthetic oligonucleotide
uauuacuaauccgccucca

SEQ ID NO: 2443489 - RNA, 19 nt, Artificial Sequence
  Description of Artificial Sequence: Synthetic oligonucleotide
cacuccuugcaucaucuuc

SEQ ID NO: 2443490 - RNA, 19 nt, Artificial Sequence
  Description of Artificial Sequence: Synthetic oligonucleotide
cugucgagacgcagcacgg

SEQ ID NO: 2443491 - RNA, 19 nt, Artificial Sequence
  Description of Artificial Sequence: Synthetic oligonucleotide
acuaauccgccuccacucu

SEQ ID NO: 2443492 - RNA, 19 nt, Artificial Sequence
  Description of Artificial Sequence: Synthetic oligonucleotide
ugacgaucugguaguugug

SEQ ID NO: 2443493 - RNA, 19 nt, Artificial Sequence
  Description of Artificial Sequence: Synthetic oligonucleotide
gucgagacgcagcacggcc

SEQ ID NO: 2443494 - RNA, 19 nt, Artificial Sequence
  Description of Artificial Sequence: Synthetic oligonucleotide
gucggcaaacuugaggaug

SEQ ID NO: 2443495 - RNA, 19 nt, Artificial Sequence
  Description of Artificial Sequence: Synthetic oligonucleotide
ucgagacgcagcacggcca

SEQ ID NO: 2443496 - RNA, 19 nt, Artificial Sequence
  Description of Artificial Sequence: Synthetic oligonucleotide
caggucaagccugcgagcc

SEQ ID NO: 2443497 - RNA, 19 nt, Artificial Sequence
  Description of Artificial Sequence: Synthetic oligonucleotide
cugcacggccacaugacac

SEQ ID NO: 2443498 - RNA, 19 nt, Artificial Sequence
  Description of Artificial Sequence: Synthetic oligonucleotide
caaacugcaaaaggccaac

SEQ ID NO: 2443499 - RNA, 19 nt, Artificial Sequence
  Description of Artificial Sequence: Synthetic oligonucleotide
acaugacacacugucuucu

SEQ ID NO: 2443500 - RNA, 19 nt, Artificial Sequence
  Description of Artificial Sequence: Synthetic oligonucleotide
gucacacgguucuucuucc

SEQ ID NO: 2443501 - RNA, 19 nt, Artificial Sequence
  Description of Artificial Sequence: Synthetic oligonucleotide
gugguggucaaaggcgucg

SEQ ID NO: 2443502 - RNA, 19 nt, Artificial Sequence
  Description of Artificial Sequence: Synthetic oligonucleotide
aaacugcaaaaggccaaca

SEQ ID NO: 2443503 - RNA, 19 nt, Artificial Sequence
  Description of Artificial Sequence: Synthetic oligonucleotide
aagccagagucaaacugca

SEQ ID NO: 2443504 - RNA, 19 nt, Artificial Sequence
  Description of Artificial Sequence: Synthetic oligonucleotide
cuucaugacugggauauca

SEQ ID NO: 2443505 - RNA, 19 nt, Artificial Sequence
  Description of Artificial Sequence: Synthetic oligonucleotide
ggacucggcguccacgucg

SEQ ID NO: 2443506 - RNA, 19 nt, Artificial Sequence
  Description of Artificial Sequence: Synthetic oligonucleotide
gguuucugaguccagugga

SEQ ID NO: 2443507 - RNA, 19 nt, Artificial Sequence
  Description of Artificial Sequence: Synthetic oligonucleotide
ggcgucggcaaacuugagg

SEQ ID NO: 2443508 - RNA, 19 nt, Artificial Sequence
  Description of Artificial Sequence: Synthetic oligonucleotide
uuaauccauuuggucuucc

SEQ ID NO: 2443509 - RNA, 19 nt, Artificial Sequence
  Description of Artificial Sequence: Synthetic oligonucleotide
cucugaccagguucaagac

SEQ ID NO: 2443510 - RNA, 19 nt, Artificial Sequence
  Description of Artificial Sequence: Synthetic oligonucleotide
agcagcaacuuuuggucau

SEQ ID NO: 2443511 - RNA, 19 nt, Artificial Sequence
  Description of Artificial Sequence: Synthetic oligonucleotide
gucguggauggucacgcug

SEQ ID NO: 2443512 - RNA, 19 nt, Artificial Sequence
  Description of Artificial Sequence: Synthetic oligonucleotide
gaguccaguggaauauuac

SEQ ID NO: 2443513 - RNA, 19 nt, Artificial Sequence
  Description of Artificial Sequence: Synthetic oligonucleotide
guuguggguuucugagucc

SEQ ID NO: 2443514 - RNA, 19 nt, Artificial Sequence
  Description of Artificial Sequence: Synthetic oligonucleotide
gagcagcaacuuuugguca

SEQ ID NO: 2443515 - RNA, 19 nt, Artificial Sequence
  Description of Artificial Sequence: Synthetic oligonucleotide
agggucaggucugccagcg

SEQ ID NO: 2443516 - RNA, 19 nt, Artificial Sequence
  Description of Artificial Sequence: Synthetic oligonucleotide
ggucacgcuggccugcugg

SEQ ID NO: 2443517 - RNA, 19 nt, Artificial Sequence
  Description of Artificial Sequence: Synthetic oligonucleotide
gcgucggcaaacuugagga

SEQ ID NO: 2443518 - RNA, 19 nt, Artificial Sequence
  Description of Artificial Sequence: Synthetic oligonucleotide
ggccacaugacacacuguc

SEQ ID NO: 2443519 - RNA, 19 nt, Artificial Sequence
  Description of Artificial Sequence: Synthetic oligonucleotide
aaggccaacaugguaccua

SEQ ID NO: 2443520 - RNA, 19 nt, Artificial Sequence
  Description of Artificial Sequence: Synthetic oligonucleotide
uacguccagacugucgaga

SEQ ID NO: 2443521 - RNA, 19 nt, Artificial Sequence
  Description of Artificial Sequence: Synthetic oligonucleotide
acugcacggccacaugaca

SEQ ID NO: 2443522 - RNA, 19 nt, Artificial Sequence
  Description of Artificial Sequence: Synthetic oligonucleotide
cugggagcgcagcuugugg

SEQ ID NO: 2443523 - RNA, 19 nt, Artificial Sequence
  Description of Artificial Sequence: Synthetic oligonucleotide
cauuguggggugguagaag

SEQ ID NO: 2443524 - RNA, 19 nt, Artificial Sequence
  Description of Artificial Sequence: Synthetic oligonucleotide
cugggauaucacaaauaca

SEQ ID NO: 2443525 - RNA, 19 nt, Artificial Sequence
  Description of Artificial Sequence: Synthetic oligonucleotide
ucuuccauugugggguggu

SEQ ID NO: 2443526 - RNA, 19 nt, Artificial Sequence
  Description of Artificial Sequence: Synthetic oligonucleotide
guacaggcgcugcacguug

SEQ ID NO: 2443527 - RNA, 19 nt, Artificial Sequence
  Description of Artificial Sequence: Synthetic oligonucleotide
gugcuagacucacuccuug

SEQ ID NO: 2443528 - RNA, 19 nt, Artificial Sequence
  Description of Artificial Sequence: Synthetic oligonucleotide
gucuacguccagacugucg

SEQ ID NO: 2443529 - RNA, 19 nt, Artificial Sequence
  Description of Artificial Sequence: Synthetic oligonucleotide
aagugaugagcagcaacuu

SEQ ID NO: 2443530 - RNA, 19 nt, Artificial Sequence
  Description of Artificial Sequence: Synthetic oligonucleotide
ucgagcacacaagcaauaa

SEQ ID NO: 2443531 - RNA, 19 nt, Artificial Sequence
  Description of Artificial Sequence: Synthetic oligonucleotide
cuccacucuccucuggcug

SEQ ID NO: 2443532 - RNA, 19 nt, Artificial Sequence
  Description of Artificial Sequence: Synthetic oligonucleotide
ucgcgcacguacuccagcu

SEQ ID NO: 2443533 - RNA, 19 nt, Artificial Sequence
  Description of Artificial Sequence: Synthetic oligonucleotide
ugcugagcugcuugaaguu

SEQ ID NO: 2443534 - RNA, 19 nt, Artificial Sequence
  Description of Artificial Sequence: Synthetic oligonucleotide
ccgaauggaacccauccug

SEQ ID NO: 2443535 - RNA, 19 nt, Artificial Sequence
  Description of Artificial Sequence: Synthetic oligonucleotide
gcguccacgucguggaugg

SEQ ID NO: 2443536 - RNA, 19 nt, Artificial Sequence
  Description of Artificial Sequence: Synthetic oligonucleotide
gguaguuguggguuucuga

SEQ ID NO: 2443537 - RNA, 19 nt, Artificial Sequence
  Description of Artificial Sequence: Synthetic oligonucleotide
gagaugcacaccacugcac

SEQ ID NO: 2443538 - RNA, 19 nt, Artificial Sequence
  Description of Artificial Sequence: Synthetic oligonucleotide
gagcuaugaaggacugggc

SEQ ID NO: 2443539 - RNA, 19 nt, Artificial Sequence
  Description of Artificial Sequence: Synthetic oligonucleotide
caggcuucuuggaaaguca

SEQ ID NO: 2443540 - RNA, 19 nt, Artificial Sequence
  Description of Artificial Sequence: Synthetic oligonucleotide
uggaacccauccugcugag

SEQ ID NO: 2443541 - RNA, 19 nt, Artificial Sequence
  Description of Artificial Sequence: Synthetic oligonucleotide
cucggcguccacgucgugg

SEQ ID NO: 2443542 - RNA, 19 nt, Artificial Sequence
  Description of Artificial Sequence: Synthetic oligonucleotide
gaugaaacucugaccaggu

SEQ ID NO: 2443543 - RNA, 19 nt, Artificial Sequence
  Description of Artificial Sequence: Synthetic oligonucleotide
gagccaggaaggaagcaca

SEQ ID NO: 2443544 - RNA, 19 nt, Artificial Sequence
  Description of Artificial Sequence: Synthetic oligonucleotide
gaauggaacccauccugcu

SEQ ID NO: 2443545 - RNA, 19 nt, Artificial Sequence
  Description of Artificial Sequence: Synthetic oligonucleotide
auauccgaggccgcguaca

SEQ ID NO: 2443546 - RNA, 19 nt, Artificial Sequence
  Description of Artificial Sequence: Synthetic oligonucleotide
uucuuccauuguggggugg

SEQ ID NO: 2443547 - RNA, 19 nt, Artificial Sequence
  Description of Artificial Sequence: Synthetic oligonucleotide
acuucguuuaagagaugca

SEQ ID NO: 2443548 - RNA, 19 nt, Artificial Sequence
  Description of Artificial Sequence: Synthetic oligonucleotide
agcacggccagcagcugcg

SEQ ID NO: 2443549 - RNA, 19 nt, Artificial Sequence
  Description of Artificial Sequence: Synthetic oligonucleotide
ugguaguuguggguuucug

SEQ ID NO: 2443550 - RNA, 19 nt, Artificial Sequence
  Description of Artificial Sequence: Synthetic oligonucleotide
gacacggcggccgguguag

SEQ ID NO: 2443551 - RNA, 19 nt, Artificial Sequence
  Description of Artificial Sequence: Synthetic oligonucleotide
aggcuucgcgcacguacuc

SEQ ID NO: 2443552 - RNA, 19 nt, Artificial Sequence
  Description of Artificial Sequence: Synthetic oligonucleotide
gguguagcaguaguccacc

SEQ ID NO: 2443553 - RNA, 19 nt, Artificial Sequence
  Description of Artificial Sequence: Synthetic oligonucleotide
cuacguccagacugucgag

SEQ ID NO: 2443554 - RNA, 19 nt, Artificial Sequence
  Description of Artificial Sequence: Synthetic oligonucleotide
cuaauccgccuccacucuc

SEQ ID NO: 2443555 - RNA, 19 nt, Artificial Sequence
  Description of Artificial Sequence: Synthetic oligonucleotide
ucuucccuaguaucauauu

SEQ ID NO: 2443556 - RNA, 19 nt, Artificial Sequence
  Description of Artificial Sequence: Synthetic oligonucleotide
gugagcuaugaaggacugg

SEQ ID NO: 2443557 - RNA, 19 nt, Artificial Sequence
  Description of Artificial Sequence: Synthetic oligonucleotide
guccaguggaauauuacua

SEQ ID NO: 2443558 - RNA, 19 nt, Artificial Sequence
  Description of Artificial Sequence: Synthetic oligonucleotide
ugucgagacgcagcacggc

SEQ ID NO: 2443559 - RNA, 19 nt, Artificial Sequence
  Description of Artificial Sequence: Synthetic oligonucleotide
cauuuggucuucccuagua

SEQ ID NO: 2443560 - RNA, 19 nt, Artificial Sequence
  Description of Artificial Sequence: Synthetic oligonucleotide
uugucaggucaagccugcg

SEQ ID NO: 2443561 - RNA, 19 nt, Artificial Sequence
  Description of Artificial Sequence: Synthetic oligonucleotide
caccaagaccucgaaggac

SEQ ID NO: 2443562 - RNA, 19 nt, Artificial Sequence
  Description of Artificial Sequence: Synthetic oligonucleotide
gcuagacucacuccuugca

SEQ ID NO: 2443563 - RNA, 19 nt, Artificial Sequence
  Description of Artificial Sequence: Synthetic oligonucleotide
agacgcagcacggccagca

SEQ ID NO: 2443564 - RNA, 19 nt, Artificial Sequence
  Description of Artificial Sequence: Synthetic oligonucleotide
ggucaggucugccagcguc

SEQ ID NO: 2443565 - RNA, 19 nt, Artificial Sequence
  Description of Artificial Sequence: Synthetic oligonucleotide
cagcauauccgaggccgcg

SEQ ID NO: 2443566 - RNA, 19 nt, Artificial Sequence
  Description of Artificial Sequence: Synthetic oligonucleotide
cauauccgaggccgcguac

SEQ ID NO: 2443567 - RNA, 19 nt, Artificial Sequence
  Description of Artificial Sequence: Synthetic oligonucleotide
caugauugacgaucuggua

SEQ ID NO: 2443568 - RNA, 19 nt, Artificial Sequence
  Description of Artificial Sequence: Synthetic oligonucleotide
gacgcagcacggccagcag

SEQ ID NO: 2443569 - RNA, 19 nt, Artificial Sequence
  Description of Artificial Sequence: Synthetic oligonucleotide
gucacgcuggccugcuggc

SEQ ID NO: 2443570 - RNA, 19 nt, Artificial Sequence
  Description of Artificial Sequence: Synthetic oligonucleotide
ggucaagccugcgagccag

SEQ ID NO: 2443571 - RNA, 19 nt, Artificial Sequence
  Description of Artificial Sequence: Synthetic oligonucleotide
augaaacucugaccagguu

SEQ ID NO: 2443572 - RNA, 19 nt, Artificial Sequence
  Description of Artificial Sequence: Synthetic oligonucleotide
cacgucguggauggucacg

SEQ ID NO: 2443573 - RNA, 19 nt, Artificial Sequence
  Description of Artificial Sequence: Synthetic oligonucleotide
cagcacggccagcagcugc

SEQ ID NO: 2443574 - RNA, 19 nt, Artificial Sequence
  Description of Artificial Sequence: Synthetic oligonucleotide
acucgagcacacaagcaau

SEQ ID NO: 2443575 - RNA, 19 nt, Artificial Sequence
  Description of Artificial Sequence: Synthetic oligonucleotide
cuucgcgcacguacuccag

SEQ ID NO: 2443576 - RNA, 19 nt, Artificial Sequence
  Description of Artificial Sequence: Synthetic oligonucleotide
cucggugaugaaacucuga

SEQ ID NO: 2443577 - RNA, 19 nt, Artificial Sequence
  Description of Artificial Sequence: Synthetic oligonucleotide
ugcuugaaguugugagcua

SEQ ID NO: 2443578 - RNA, 19 nt, Artificial Sequence
  Description of Artificial Sequence: Synthetic oligonucleotide
agcugcgccagggucaggu

SEQ ID NO: 2443579 - RNA, 19 nt, Artificial Sequence
  Description of Artificial Sequence: Synthetic oligonucleotide
cugcuugaaguugugagcu

SEQ ID NO: 2443580 - RNA, 19 nt, Artificial Sequence
  Description of Artificial Sequence: Synthetic oligonucleotide
gcuaugaaggacugggccu

SEQ ID NO: 2443581 - RNA, 19 nt, Artificial Sequence
  Description of Artificial Sequence: Synthetic oligonucleotide
gcgcacguacuccagcugc

SEQ ID NO: 2443582 - RNA, 19 nt, Artificial Sequence
  Description of Artificial Sequence: Synthetic oligonucleotide
gcaacuuuuggucaugauu

SEQ ID NO: 2443583 - RNA, 19 nt, Artificial Sequence
  Description of Artificial Sequence: Synthetic oligonucleotide
acgguucuucuuccauugu

SEQ ID NO: 2443584 - RNA, 19 nt, Artificial Sequence
  Description of Artificial Sequence: Synthetic oligonucleotide
cugcacguuggccucgcuc

SEQ ID NO: 2443585 - RNA, 19 nt, Artificial Sequence
  Description of Artificial Sequence: Synthetic oligonucleotide
gguaccuauauuaauccau

SEQ ID NO: 2443586 - RNA, 19 nt, Artificial Sequence
  Description of Artificial Sequence: Synthetic oligonucleotide
ucgaaggacucggcgucca

SEQ ID NO: 2443587 - RNA, 19 nt, Artificial Sequence
  Description of Artificial Sequence: Synthetic oligonucleotide
cacgcuggccugcuggcuc

SEQ ID NO: 2443588 - RNA, 19 nt, Artificial Sequence
  Description of Artificial Sequence: Synthetic oligonucleotide
gcaaaaggccaacauggua

SEQ ID NO: 2443589 - RNA, 19 nt, Artificial Sequence
  Description of Artificial Sequence: Synthetic oligonucleotide
agcauauccgaggccgcgu

SEQ ID NO: 2443590 - RNA, 19 nt, Artificial Sequence
  Description of Artificial Sequence: Synthetic oligonucleotide
cauauacugucacacgguu

SEQ ID NO: 2443591 - RNA, 19 nt, Artificial Sequence
  Description of Artificial Sequence: Synthetic oligonucleotide
cucgaaggacucggcgucc

SEQ ID NO: 2443592 - RNA, 19 nt, Artificial Sequence
  Description of Artificial Sequence: Synthetic oligonucleotide
cuccucccgaauggaaccc

SEQ ID NO: 2443593 - RNA, 19 nt, Artificial Sequence
  Description of Artificial Sequence: Synthetic oligonucleotide
gccucgcucagggacacgg

SEQ ID NO: 2443594 - RNA, 19 nt, Artificial Sequence
  Description of Artificial Sequence: Synthetic oligonucleotide
uccucccgaauggaaccca

SEQ ID NO: 2443595 - RNA, 19 nt, Artificial Sequence
  Description of Artificial Sequence: Synthetic oligonucleotide
cucgagcacacaagcaaua

SEQ ID NO: 2443596 - RNA, 19 nt, Artificial Sequence
  Description of Artificial Sequence: Synthetic oligonucleotide
cucccgaauggaacccauc

SEQ ID NO: 2443597 - RNA, 19 nt, Artificial Sequence
  Description of Artificial Sequence: Synthetic oligonucleotide
agccugcgagccaggaagg

SEQ ID NO: 2443598 - RNA, 19 nt, Artificial Sequence
  Description of Artificial Sequence: Synthetic oligonucleotide
ggaaagucacuucguuuaa

SEQ ID NO: 2443599 - RNA, 19 nt, Artificial Sequence
  Description of Artificial Sequence: Synthetic oligonucleotide
gccaacaugguaccuauau

SEQ ID NO: 2443600 - RNA, 19 nt, Artificial Sequence
  Description of Artificial Sequence: Synthetic oligonucleotide
guaccuauauuaauccauu

SEQ ID NO: 2443601 - RNA, 19 nt, Artificial Sequence
  Description of Artificial Sequence: Synthetic oligonucleotide
auccgaggccgcguacagg

SEQ ID NO: 2443602 - RNA, 19 nt, Artificial Sequence
  Description of Artificial Sequence: Synthetic oligonucleotide
aaacucugaccagguucaa

SEQ ID NO: 2443603 - RNA, 19 nt, Artificial Sequence
  Description of Artificial Sequence: Synthetic oligonucleotide
gaccuucaugacugggaua

SEQ ID NO: 2443604 - RNA, 19 nt, Artificial Sequence
  Description of Artificial Sequence: Synthetic oligonucleotide
cuagacucacuccuugcau

SEQ ID NO: 2443605 - RNA, 19 nt, Artificial Sequence
  Description of Artificial Sequence: Synthetic oligonucleotide
ucacuccuugcaucaucuu

SEQ ID NO: 2443606 - RNA, 19 nt, Artificial Sequence
  Description of Artificial Sequence: Synthetic oligonucleotide
cugucuacguccagacugu

SEQ ID NO: 2443607 - RNA, 19 nt, Artificial Sequence
  Description of Artificial Sequence: Synthetic oligonucleotide
cagugcaguuugucagguc

SEQ ID NO: 2443608 - RNA, 19 nt, Artificial Sequence
  Description of Artificial Sequence: Synthetic oligonucleotide
gagcugcuugaaguuguga

SEQ ID NO: 2443609 - RNA, 19 nt, Artificial Sequence
  Description of Artificial Sequence: Synthetic oligonucleotide
agcgcagcuuguggugguc

SEQ ID NO: 2443610 - RNA, 19 nt, Artificial Sequence
  Description of Artificial Sequence: Synthetic oligonucleotide
cguuuaagagaugcacacc

SEQ ID NO: 2443611 - RNA, 19 nt, Artificial Sequence
  Description of Artificial Sequence: Synthetic oligonucleotide
guggauggucacgcuggcc

SEQ ID NO: 2443612 - RNA, 19 nt, Artificial Sequence
  Description of Artificial Sequence: Synthetic oligonucleotide
ugucuacguccagacuguc

SEQ ID NO: 2443613 - RNA, 19 nt, Artificial Sequence
  Description of Artificial Sequence: Synthetic oligonucleotide
agggacacggcggccggug

SEQ ID NO: 2443614 - RNA, 19 nt, Artificial Sequence
  Description of Artificial Sequence: Synthetic oligonucleotide
gcuucgcgcacguacucca

SEQ ID NO: 2443615 - RNA, 19 nt, Artificial Sequence
  Description of Artificial Sequence: Synthetic oligonucleotide
cuggauuauagaccuucau

SEQ ID NO: 2443616 - RNA, 19 nt, Artificial Sequence
  Description of Artificial Sequence: Synthetic oligonucleotide
gucaagccugcgagccagg

SEQ ID NO: 2443617 - RNA, 19 nt, Artificial Sequence
  Description of Artificial Sequence: Synthetic oligonucleotide
cgguucuucuuccauugug

SEQ ID NO: 2443618 - RNA, 19 nt, Artificial Sequence
  Description of Artificial Sequence: Synthetic oligonucleotide
ucacgcuggccugcuggcu

SEQ ID NO: 2443619 - RNA, 19 nt, Artificial Sequence
  Description of Artificial Sequence: Synthetic oligonucleotide
ccucggugaugaaacucug

SEQ ID NO: 2443620 - RNA, 19 nt, Artificial Sequence
  Description of Artificial Sequence: Synthetic oligonucleotide
ggauaaacucgagcacaca

SEQ ID NO: 2443621 - RNA, 19 nt, Artificial Sequence
  Description of Artificial Sequence: Synthetic oligonucleotide
ugccagcgucuccucccga

SEQ ID NO: 2443622 - RNA, 19 nt, Artificial Sequence
  Description of Artificial Sequence: Synthetic oligonucleotide
ggcuucgcgcacguacucc

SEQ ID NO: 2443623 - RNA, 19 nt, Artificial Sequence
  Description of Artificial Sequence: Synthetic oligonucleotide
ccaagaccucgaaggacuc

SEQ ID NO: 2443624 - RNA, 19 nt, Artificial Sequence
  Description of Artificial Sequence: Synthetic oligonucleotide
gugcaguuugucaggucaa

SEQ ID NO: 2443625 - RNA, 19 nt, Artificial Sequence
  Description of Artificial Sequence: Synthetic oligonucleotide
caagccugcgagccaggaa

SEQ ID NO: 2443626 - RNA, 19 nt, Artificial Sequence
  Description of Artificial Sequence: Synthetic oligonucleotide
cgguguagcaguaguccac

SEQ ID NO: 2443627 - RNA, 19 nt, Artificial Sequence
  Description of Artificial Sequence: Synthetic oligonucleotide
ggcguccacgucguggaug

SEQ ID NO: 2443628 - RNA, 19 nt, Artificial Sequence
  Description of Artificial Sequence: Synthetic oligonucleotide
caggcuucgcgcacguacu

SEQ ID NO: 2443629 - RNA, 19 nt, Artificial Sequence
  Description of Artificial Sequence: Synthetic oligonucleotide
auggucacgcuggccugcu

SEQ ID NO: 2443630 - RNA, 19 nt, Artificial Sequence
  Description of Artificial Sequence: Synthetic oligonucleotide
gcagcauauccgaggccgc

SEQ ID NO: 2443631 - RNA, 19 nt, Artificial Sequence
  Description of Artificial Sequence: Synthetic oligonucleotide
ccaccaagaccucgaagga

SEQ ID NO: 2443632 - RNA, 19 nt, Artificial Sequence
  Description of Artificial Sequence: Synthetic oligonucleotide
ccgguguagcaguagucca

SEQ ID NO: 2443633 - RNA, 19 nt, Artificial Sequence
  Description of Artificial Sequence: Synthetic oligonucleotide
cguccagacugucgagacg

SEQ ID NO: 2443634 - RNA, 19 nt, Artificial Sequence
  Description of Artificial Sequence: Synthetic oligonucleotide
cgcguacaggcgcugcacg

SEQ ID NO: 2443635 - RNA, 19 nt, Artificial Sequence
  Description of Artificial Sequence: Synthetic oligonucleotide
gucaggucugccagcgucu

SEQ ID NO: 2443636 - RNA, 19 nt, Artificial Sequence
  Description of Artificial Sequence: Synthetic oligonucleotide
cacacgguucuucuuccau

SEQ ID NO: 2443637 - RNA, 19 nt, Artificial Sequence
  Description of Artificial Sequence: Synthetic oligonucleotide
gcuugaaguugugagcuau

SEQ ID NO: 2443638 - RNA, 19 nt, Artificial Sequence
  Description of Artificial Sequence: Synthetic oligonucleotide
cgaggccgcguacaggcgc

SEQ ID NO: 2443639 - RNA, 19 nt, Artificial Sequence
  Description of Artificial Sequence: Synthetic oligonucleotide
gacucggcguccacgucgu

SEQ ID NO: 2443640 - RNA, 19 nt, Artificial Sequence
  Description of Artificial Sequence: Synthetic oligonucleotide
cugcgccagggucaggucu

SEQ ID NO: 2443641 - RNA, 19 nt, Artificial Sequence
  Description of Artificial Sequence: Synthetic oligonucleotide
cgcucagggacacggcggc

SEQ ID NO: 2443642 - RNA, 19 nt, Artificial Sequence
  Description of Artificial Sequence: Synthetic oligonucleotide
gggauaucacaaauacaau

SEQ ID NO: 2443643 - RNA, 19 nt, Artificial Sequence
  Description of Artificial Sequence: Synthetic oligonucleotide
gauugacgaucugguaguu

SEQ ID NO: 2443644 - RNA, 19 nt, Artificial Sequence
  Description of Artificial Sequence: Synthetic oligonucleotide
ccucgcucagggacacggc

SEQ ID NO: 2443645 - RNA, 19 nt, Artificial Sequence
  Description of Artificial Sequence: Synthetic oligonucleotide
agccagagucaaacugcaa

SEQ ID NO: 2443646 - RNA, 19 nt, Artificial Sequence
  Description of Artificial Sequence: Synthetic oligonucleotide
cacggcggccgguguagca

SEQ ID NO: 2443647 - RNA, 19 nt, Artificial Sequence
  Description of Artificial Sequence: Synthetic oligonucleotide
ccaguggaauauuacuaau

SEQ ID NO: 2443648 - RNA, 19 nt, Artificial Sequence
  Description of Artificial Sequence: Synthetic oligonucleotide
cguggauggucacgcuggc

SEQ ID NO: 2443649 - RNA, 19 nt, Artificial Sequence
  Description of Artificial Sequence: Synthetic oligonucleotide
cacugucuacguccagacu

SEQ ID NO: 2443650 - RNA, 19 nt, Artificial Sequence
  Description of Artificial Sequence: Synthetic oligonucleotide
ggccgguguagcaguaguc

SEQ ID NO: 2443651 - RNA, 19 nt, Artificial Sequence
  Description of Artificial Sequence: Synthetic oligonucleotide
gaggccgcguacaggcgcu

SEQ ID NO: 2443652 - RNA, 19 nt, Artificial Sequence
  Description of Artificial Sequence: Synthetic oligonucleotide
cccuaguaucauauucaua

SEQ ID NO: 2443653 - RNA, 19 nt, Artificial Sequence
  Description of Artificial Sequence: Synthetic oligonucleotide
ccgaggccgcguacaggcg

SEQ ID NO: 2443654 - RNA, 19 nt, Artificial Sequence
  Description of Artificial Sequence: Synthetic oligonucleotide
aggcgucggcaaacuugag

SEQ ID NO: 2443655 - RNA, 19 nt, Artificial Sequence
  Description of Artificial Sequence: Synthetic oligonucleotide
cgagcacacaagcaauaaa

SEQ ID NO: 2443656 - RNA, 19 nt, Artificial Sequence
  Description of Artificial Sequence: Synthetic oligonucleotide
gccgcguacaggcgcugca

SEQ ID NO: 2443657 - RNA, 19 nt, Artificial Sequence
  Description of Artificial Sequence: Synthetic oligonucleotide
gccacaugacacacugucu

SEQ ID NO: 2443658 - RNA, 19 nt, Artificial Sequence
  Description of Artificial Sequence: Synthetic oligonucleotide
gcguacaggcgcugcacgu

SEQ ID NO: 2443659 - RNA, 19 nt, Artificial Sequence
  Description of Artificial Sequence: Synthetic oligonucleotide
gacucacuccuugcaucau

SEQ ID NO: 2443660 - RNA, 19 nt, Artificial Sequence
  Description of Artificial Sequence: Synthetic oligonucleotide
cugguaguuguggguuucu

SEQ ID NO: 2443661 - RNA, 19 nt, Artificial Sequence
  Description of Artificial Sequence: Synthetic oligonucleotide
caaaggcgucggcaaacuu

SEQ ID NO: 2443662 - RNA, 19 nt, Artificial Sequence
  Description of Artificial Sequence: Synthetic oligonucleotide
gcugcgccagggucagguc

SEQ ID NO: 2443663 - RNA, 19 nt, Artificial Sequence
  Description of Artificial Sequence: Synthetic oligonucleotide
cacggccacaugacacacu

SEQ ID NO: 2443664 - RNA, 19 nt, Artificial Sequence
  Description of Artificial Sequence: Synthetic oligonucleotide
cugucacacgguucuucuu

SEQ ID NO: 2443665 - RNA, 19 nt, Artificial Sequence
  Description of Artificial Sequence: Synthetic oligonucleotide
ccaacaugguaccuauauu

SEQ ID NO: 2443666 - RNA, 19 nt, Artificial Sequence
  Description of Artificial Sequence: Synthetic oligonucleotide
gcggccgguguagcaguag

SEQ ID NO: 2443667 - RNA, 19 nt, Artificial Sequence
  Description of Artificial Sequence: Synthetic oligonucleotide
ggacacggcggccggugua

SEQ ID NO: 2443668 - RNA, 19 nt, Artificial Sequence
  Description of Artificial Sequence: Synthetic oligonucleotide
gcucagggacacggcggcc

SEQ ID NO: 2443669 - RNA, 19 nt, Artificial Sequence
  Description of Artificial Sequence: Synthetic oligonucleotide
aggccgcguacaggcgcug

SEQ ID NO: 2443670 - RNA, 19 nt, Artificial Sequence
  Description of Artificial Sequence: Synthetic oligonucleotide
cccgaauggaacccauccu

SEQ ID NO: 2443671 - RNA, 19 nt, Artificial Sequence
  Description of Artificial Sequence: Synthetic oligonucleotide
ccgcguacaggcgcugcac

SEQ ID NO: 2443672 - RNA, 19 nt, Artificial Sequence
  Description of Artificial Sequence: Synthetic oligonucleotide
cgaucugguaguugugggu

SEQ ID NO: 2443673 - RNA, 19 nt, Artificial Sequence
  Description of Artificial Sequence: Synthetic oligonucleotide
ccugcgagccaggaaggaa

SEQ ID NO: 2443674 - RNA, 19 nt, Artificial Sequence
  Description of Artificial Sequence: Synthetic oligonucleotide
caccacugcacggccacau

SEQ ID NO: 2443675 - RNA, 19 nt, Artificial Sequence
  Description of Artificial Sequence: Synthetic oligonucleotide
gcgagccaggaaggaagca

SEQ ID NO: 2443676 - RNA, 19 nt, Artificial Sequence
  Description of Artificial Sequence: Synthetic oligonucleotide
ccuucaugacugggauauc

SEQ ID NO: 2443677 - RNA, 19 nt, Artificial Sequence
  Description of Artificial Sequence: Synthetic oligonucleotide
cgcacguacuccagcugca

SEQ ID NO: 2443678 - RNA, 19 nt, Artificial Sequence
  Description of Artificial Sequence: Synthetic oligonucleotide
gcacaccacugcacggcca

SEQ ID NO: 2443679 - RNA, 19 nt, Artificial Sequence
  Description of Artificial Sequence: Synthetic oligonucleotide
gccugcgagccaggaagga

SEQ ID NO: 2443680 - RNA, 19 nt, Artificial Sequence
  Description of Artificial Sequence: Synthetic oligonucleotide
ccauuuggucuucccuagu

SEQ ID NO: 2443681 - RNA, 19 nt, Artificial Sequence
  Description of Artificial Sequence: Synthetic oligonucleotide
cggcaaacuugaggauggc

SEQ ID NO: 2443682 - RNA, 19 nt, Artificial Sequence
  Description of Artificial Sequence: Synthetic oligonucleotide
cagcugcgccagggucagg

SEQ ID NO: 2443683 - RNA, 19 nt, Artificial Sequence
  Description of Artificial Sequence: Synthetic oligonucleotide
gggacacggcggccggugu

SEQ ID NO: 2443684 - RNA, 19 nt, Artificial Sequence
  Description of Artificial Sequence: Synthetic oligonucleotide
ggccaacaugguaccuaua

SEQ ID NO: 2443685 - RNA, 19 nt, Artificial Sequence
  Description of Artificial Sequence: Synthetic oligonucleotide
ggauggcagugcaguuugu

SEQ ID NO: 2443686 - RNA, 19 nt, Artificial Sequence
  Description of Artificial Sequence: Synthetic oligonucleotide
gggucaggucugccagcgu

SEQ ID NO: 2443687 - RNA, 19 nt, Artificial Sequence
  Description of Artificial Sequence: Synthetic oligonucleotide
ccucccgaauggaacccau

SEQ ID NO: 2443688 - RNA, 19 nt, Artificial Sequence
  Description of Artificial Sequence: Synthetic oligonucleotide
cgcugcacguuggccucgc

SEQ ID NO: 2443689 - RNA, 19 nt, Artificial Sequence
  Description of Artificial Sequence: Synthetic oligonucleotide
cgucggcaaacuugaggau

SEQ ID NO: 2443690 - RNA, 19 nt, Artificial Sequence
  Description of Artificial Sequence: Synthetic oligonucleotide
gcugcacguuggccucgcu

SEQ ID NO: 2443691 - RNA, 19 nt, Artificial Sequence
  Description of Artificial Sequence: Synthetic oligonucleotide
cgccagggucaggucugcc

SEQ ID NO: 2443692 - RNA, 19 nt, Artificial Sequence
  Description of Artificial Sequence: Synthetic oligonucleotide
ggcggccgguguagcagua

SEQ ID NO: 2443693 - RNA, 19 nt, Artificial Sequence
  Description of Artificial Sequence: Synthetic oligonucleotide
cagggacacggcggccggu

SEQ ID NO: 2443694 - RNA, 19 nt, Artificial Sequence
  Description of Artificial Sequence: Synthetic oligonucleotide
cggccgguguagcaguagu

SEQ ID NO: 2443695 - RNA, 19 nt, Artificial Sequence
  Description of Artificial Sequence: Synthetic oligonucleotide
cacucuccucuggcuggau

SEQ ID NO: 2443696 - RNA, 19 nt, Artificial Sequence
  Description of Artificial Sequence: Synthetic oligonucleotide
cggcggccgguguagcagu

SEQ ID NO: 2443697 - RNA, 19 nt, Artificial Sequence
  Description of Artificial Sequence: Synthetic oligonucleotide
cguccacgucguggauggu

SEQ ID NO: 2443698 - RNA, 19 nt, Artificial Sequence
  Description of Artificial Sequence: Synthetic oligonucleotide
uguuuuagagugcagaugg

SEQ ID NO: 2443699 - RNA, 19 nt, Artificial Sequence
  Description of Artificial Sequence: Synthetic oligonucleotide
aaauaaaacgaacaguuga

SEQ ID NO: 2443700 - RNA, 19 nt, Artificial Sequence
  Description of Artificial Sequence: Synthetic oligonucleotide
ccaauuuugaaauaaaacg

SEQ ID NO: 2443701 - RNA, 19 nt, Artificial Sequence
  Description of Artificial Sequence: Synthetic oligonucleotide
aauaaaacgaacaguugac

SEQ ID NO: 2443702 - RNA, 19 nt, Artificial Sequence
  Description of Artificial Sequence: Synthetic oligonucleotide
uuauucaagucaaucacag

SEQ ID NO: 2443703 - RNA, 19 nt, Artificial Sequence
  Description of Artificial Sequence: Synthetic oligonucleotide
aacuacaacacugucuagc

SEQ ID NO: 2443704 - RNA, 19 nt, Artificial Sequence
  Description of Artificial Sequence: Synthetic oligonucleotide
aacggcucggcucagaauc

SEQ ID NO: 2443705 - RNA, 19 nt, Artificial Sequence
  Description of Artificial Sequence: Synthetic oligonucleotide
ugagauaggcuucaggugc

SEQ ID NO: 2443706 - RNA, 19 nt, Artificial Sequence
  Description of Artificial Sequence: Synthetic oligonucleotide
aaguauuccgccauuuucc

SEQ ID NO: 2443707 - RNA, 19 nt, Artificial Sequence
  Description of Artificial Sequence: Synthetic oligonucleotide
uccaauuuugaaauaaaac

SEQ ID NO: 2443708 - RNA, 19 nt, Artificial Sequence
  Description of Artificial Sequence: Synthetic oligonucleotide
ugugcaaccgagaacaucu

SEQ ID NO: 2443709 - RNA, 19 nt, Artificial Sequence
  Description of Artificial Sequence: Synthetic oligonucleotide
aacaucuaucuccaugacg

SEQ ID NO: 2443710 - RNA, 19 nt, Artificial Sequence
  Description of Artificial Sequence: Synthetic oligonucleotide
auuggcugcccauuaaacc

SEQ ID NO: 2443711 - RNA, 19 nt, Artificial Sequence
  Description of Artificial Sequence: Synthetic oligonucleotide
cugucuagcagacacacgg

SEQ ID NO: 2443712 - RNA, 19 nt, Artificial Sequence
  Description of Artificial Sequence: Synthetic oligonucleotide
uuuauugugcaaccgagaa

SEQ ID NO: 2443713 - RNA, 19 nt, Artificial Sequence
  Description of Artificial Sequence: Synthetic oligonucleotide
caugaaguugcaaaagccc

SEQ ID NO: 2443714 - RNA, 19 nt, Artificial Sequence
  Description of Artificial Sequence: Synthetic oligonucleotide
uuuagagugcagauggucu

SEQ ID NO: 2443715 - RNA, 19 nt, Artificial Sequence
  Description of Artificial Sequence: Synthetic oligonucleotide
uacgguagauguuuuagag

SEQ ID NO: 2443716 - RNA, 19 nt, Artificial Sequence
  Description of Artificial Sequence: Synthetic oligonucleotide
uucaggugcaugaaguugc

SEQ ID NO: 2443717 - RNA, 19 nt, Artificial Sequence
  Description of Artificial Sequence: Synthetic oligonucleotide
uacaacacugucuagcaga

SEQ ID NO: 2443718 - RNA, 19 nt, Artificial Sequence
  Description of Artificial Sequence: Synthetic oligonucleotide
aucuaugcuucuuacgccg

SEQ ID NO: 2443719 - RNA, 19 nt, Artificial Sequence
  Description of Artificial Sequence: Synthetic oligonucleotide
ugcaugaaguugcaaaagc

SEQ ID NO: 2443720 - RNA, 19 nt, Artificial Sequence
  Description of Artificial Sequence: Synthetic oligonucleotide
uauuccgccauuuuccagc

SEQ ID NO: 2443721 - RNA, 19 nt, Artificial Sequence
  Description of Artificial Sequence: Synthetic oligonucleotide
aacuugacauacacguucc

SEQ ID NO: 2443722 - RNA, 19 nt, Artificial Sequence
  Description of Artificial Sequence: Synthetic oligonucleotide
aaaacgaacaguugacuuu

SEQ ID NO: 2443723 - RNA, 19 nt, Artificial Sequence
  Description of Artificial Sequence: Synthetic oligonucleotide
uuaugaacuggcuugucac

SEQ ID NO: 2443724 - RNA, 19 nt, Artificial Sequence
  Description of Artificial Sequence: Synthetic oligonucleotide
gaacuugacauacacguuc

SEQ ID NO: 2443725 - RNA, 19 nt, Artificial Sequence
  Description of Artificial Sequence: Synthetic oligonucleotide
acaucuaucuccaugacga

SEQ ID NO: 2443726 - RNA, 19 nt, Artificial Sequence
  Description of Artificial Sequence: Synthetic oligonucleotide
ucuaucuccaugacgacau

SEQ ID NO: 2443727 - RNA, 19 nt, Artificial Sequence
  Description of Artificial Sequence: Synthetic oligonucleotide
aaacgaacaguugacuuug

SEQ ID NO: 2443728 - RNA, 19 nt, Artificial Sequence
  Description of Artificial Sequence: Synthetic oligonucleotide
uugacauacacguucccca

SEQ ID NO: 2443729 - RNA, 19 nt, Artificial Sequence
  Description of Artificial Sequence: Synthetic oligonucleotide
aaaccaacgguuauucaag

SEQ ID NO: 2443730 - RNA, 19 nt, Artificial Sequence
  Description of Artificial Sequence: Synthetic oligonucleotide
cagacacacgguaaaacgg

SEQ ID NO: 2443731 - RNA, 19 nt, Artificial Sequence
  Description of Artificial Sequence: Synthetic oligonucleotide
aaaggucgguuuauugugc

SEQ ID NO: 2443732 - RNA, 19 nt, Artificial Sequence
  Description of Artificial Sequence: Synthetic oligonucleotide
ggaucuaugcuucuuacgc

SEQ ID NO: 2443733 - RNA, 19 nt, Artificial Sequence
  Description of Artificial Sequence: Synthetic oligonucleotide
cagauggucuccuagguug

SEQ ID NO: 2443734 - RNA, 19 nt, Artificial Sequence
  Description of Artificial Sequence: Synthetic oligonucleotide
ugcccauuaaaccaacggu

SEQ ID NO: 2443735 - RNA, 19 nt, Artificial Sequence
  Description of Artificial Sequence: Synthetic oligonucleotide
uaaaacgaacaguugacuu

SEQ ID NO: 2443736 - RNA, 19 nt, Artificial Sequence
  Description of Artificial Sequence: Synthetic oligonucleotide
augcuucuuacgccgacgc

SEQ ID NO: 2443737 - RNA, 19 nt, Artificial Sequence
  Description of Artificial Sequence: Synthetic oligonucleotide
cucagaaucgcccagaucu

SEQ ID NO: 2443738 - RNA, 19 nt, Artificial Sequence
  Description of Artificial Sequence: Synthetic oligonucleotide
acuacaacacugucuagca

SEQ ID NO: 2443739 - RNA, 19 nt, Artificial Sequence
  Description of Artificial Sequence: Synthetic oligonucleotide
uggaucuaugcuucuuacg

SEQ ID NO: 2443740 - RNA, 19 nt, Artificial Sequence
  Description of Artificial Sequence: Synthetic oligonucleotide
gaacucgucauagugcucc

SEQ ID NO: 2443741 - RNA, 19 nt, Artificial Sequence
  Description of Artificial Sequence: Synthetic oligonucleotide
gaucuaugcuucuuacgcc

SEQ ID NO: 2443742 - RNA, 19 nt, Artificial Sequence
  Description of Artificial Sequence: Synthetic oligonucleotide
uuagagugcagauggucug

SEQ ID NO: 2443743 - RNA, 19 nt, Artificial Sequence
  Description of Artificial Sequence: Synthetic oligonucleotide
agacacacgguaaaacggc

SEQ ID NO: 2443744 - RNA, 19 nt, Artificial Sequence
  Description of Artificial Sequence: Synthetic oligonucleotide
ugugcacucucccauuuca

SEQ ID NO: 2443745 - RNA, 19 nt, Artificial Sequence
  Description of Artificial Sequence: Synthetic oligonucleotide
ucgcccagaucucucacgg

SEQ ID NO: 2443746 - RNA, 19 nt, Artificial Sequence
  Description of Artificial Sequence: Synthetic oligonucleotide
aaucgcccagaucucucac

SEQ ID NO: 2443747 - RNA, 19 nt, Artificial Sequence
  Description of Artificial Sequence: Synthetic oligonucleotide
guuacgguagauguuuuag

SEQ ID NO: 2443748 - RNA, 19 nt, Artificial Sequence
  Description of Artificial Sequence: Synthetic oligonucleotide
cacacgguaaaacggcucg

SEQ ID NO: 2443749 - RNA, 19 nt, Artificial Sequence
  Description of Artificial Sequence: Synthetic oligonucleotide
uuauugugcaaccgagaac

SEQ ID NO: 2443750 - RNA, 19 nt, Artificial Sequence
  Description of Artificial Sequence: Synthetic oligonucleotide
aaccgagaacaucuaucuc

SEQ ID NO: 2443751 - RNA, 19 nt, Artificial Sequence
  Description of Artificial Sequence: Synthetic oligonucleotide
agacauucaucuccucaac

SEQ ID NO: 2443752 - RNA, 19 nt, Artificial Sequence
  Description of Artificial Sequence: Synthetic oligonucleotide
ucaccaacuacaacacugu

SEQ ID NO: 2443753 - RNA, 19 nt, Artificial Sequence
  Description of Artificial Sequence: Synthetic oligonucleotide
ucgcucacagcacagugug

SEQ ID NO: 2443754 - RNA, 19 nt, Artificial Sequence
  Description of Artificial Sequence: Synthetic oligonucleotide
auuucauacuggcggcaac

SEQ ID NO: 2443755 - RNA, 19 nt, Artificial Sequence
  Description of Artificial Sequence: Synthetic oligonucleotide
ucauacuggcggcaacagg

SEQ ID NO: 2443756 - RNA, 19 nt, Artificial Sequence
  Description of Artificial Sequence: Synthetic oligonucleotide
uccgccauuuuccagcgga

SEQ ID NO: 2443757 - RNA, 19 nt, Artificial Sequence
  Description of Artificial Sequence: Synthetic oligonucleotide
acgguuauucaagucaauc

SEQ ID NO: 2443758 - RNA, 19 nt, Artificial Sequence
  Description of Artificial Sequence: Synthetic oligonucleotide
cugcccauuaaaccaacgg

SEQ ID NO: 2443759 - RNA, 19 nt, Artificial Sequence
  Description of Artificial Sequence: Synthetic oligonucleotide
cucugcauggauuggcugc

SEQ ID NO: 2443760 - RNA, 19 nt, Artificial Sequence
  Description of Artificial Sequence: Synthetic oligonucleotide
aagucagucacuggggaca

SEQ ID NO: 2443761 - RNA, 19 nt, Artificial Sequence
  Description of Artificial Sequence: Synthetic oligonucleotide
uuacgguagauguuuuaga

SEQ ID NO: 2443762 - RNA, 19 nt, Artificial Sequence
  Description of Artificial Sequence: Synthetic oligonucleotide
ucuagcagacacacgguaa

SEQ ID NO: 2443763 - RNA, 19 nt, Artificial Sequence
  Description of Artificial Sequence: Synthetic oligonucleotide
caaguauuccgccauuuuc

SEQ ID NO: 2443764 - RNA, 19 nt, Artificial Sequence
  Description of Artificial Sequence: Synthetic oligonucleotide
ucgagaacgccguucccgg

SEQ ID NO: 2443765 - RNA, 19 nt, Artificial Sequence
  Description of Artificial Sequence: Synthetic oligonucleotide
cuugagauaggcuucaggu

SEQ ID NO: 2443766 - RNA, 19 nt, Artificial Sequence
  Description of Artificial Sequence: Synthetic oligonucleotide
acuugacauacacguuccc

SEQ ID NO: 2443767 - RNA, 19 nt, Artificial Sequence
  Description of Artificial Sequence: Synthetic oligonucleotide
uuuuagagugcagaugguc

SEQ ID NO: 2443768 - RNA, 19 nt, Artificial Sequence
  Description of Artificial Sequence: Synthetic oligonucleotide
ucggugccgaagauggagg

SEQ ID NO: 2443769 - RNA, 19 nt, Artificial Sequence
  Description of Artificial Sequence: Synthetic oligonucleotide
ucaagucaaucacagcuuu

SEQ ID NO: 2443770 - RNA, 19 nt, Artificial Sequence
  Description of Artificial Sequence: Synthetic oligonucleotide
uccaugacgacaugcucca

SEQ ID NO: 2443771 - RNA, 19 nt, Artificial Sequence
  Description of Artificial Sequence: Synthetic oligonucleotide
aacgccguucccgggaucg

SEQ ID NO: 2443772 - RNA, 19 nt, Artificial Sequence
  Description of Artificial Sequence: Synthetic oligonucleotide
aaaacggcucggcucagaa

SEQ ID NO: 2443773 - RNA, 19 nt, Artificial Sequence
  Description of Artificial Sequence: Synthetic oligonucleotide
uucaagucaaucacagcuu

SEQ ID NO: 2443774 - RNA, 19 nt, Artificial Sequence
  Description of Artificial Sequence: Synthetic oligonucleotide
uccugucacgcucucgucc

SEQ ID NO: 2443775 - RNA, 19 nt, Artificial Sequence
  Description of Artificial Sequence: Synthetic oligonucleotide
agcagacacacgguaaaac

SEQ ID NO: 2443776 - RNA, 19 nt, Artificial Sequence
  Description of Artificial Sequence: Synthetic oligonucleotide
uaugcuucuuacgccgacg

SEQ ID NO: 2443777 - RNA, 19 nt, Artificial Sequence
  Description of Artificial Sequence: Synthetic oligonucleotide
auaaaacgaacaguugacu

SEQ ID NO: 2443778 - RNA, 19 nt, Artificial Sequence
  Description of Artificial Sequence: Synthetic oligonucleotide
accaacgguuauucaaguc

SEQ ID NO: 2443779 - RNA, 19 nt, Artificial Sequence
  Description of Artificial Sequence: Synthetic oligonucleotide
cucgucauagugcuccugc

SEQ ID NO: 2443780 - RNA, 19 nt, Artificial Sequence
  Description of Artificial Sequence: Synthetic oligonucleotide
cucgccguacuuuucuucc

SEQ ID NO: 2443781 - RNA, 19 nt, Artificial Sequence
  Description of Artificial Sequence: Synthetic oligonucleotide
uuucauacuggcggcaaca

SEQ ID NO: 2443782 - RNA, 19 nt, Artificial Sequence
  Description of Artificial Sequence: Synthetic oligonucleotide
aaggucgguuuauugugca

SEQ ID NO: 2443783 - RNA, 19 nt, Artificial Sequence
  Description of Artificial Sequence: Synthetic oligonucleotide
aaccaacgguuauucaagu

SEQ ID NO: 2443784 - RNA, 19 nt, Artificial Sequence
  Description of Artificial Sequence: Synthetic oligonucleotide
acauacacguuccccacca

SEQ ID NO: 2443785 - RNA, 19 nt, Artificial Sequence
  Description of Artificial Sequence: Synthetic oligonucleotide
aucgagaacgccguucccg

SEQ ID NO: 2443786 - RNA, 19 nt, Artificial Sequence
  Description of Artificial Sequence: Synthetic oligonucleotide
agugugagccgucagccgu

SEQ ID NO: 2443787 - RNA, 19 nt, Artificial Sequence
  Description of Artificial Sequence: Synthetic oligonucleotide
aguauuccgccauuuucca

SEQ ID NO: 2443788 - RNA, 19 nt, Artificial Sequence
  Description of Artificial Sequence: Synthetic oligonucleotide
ucgguuuauugugcaaccg

SEQ ID NO: 2443789 - RNA, 19 nt, Artificial Sequence
  Description of Artificial Sequence: Synthetic oligonucleotide
auuccgccauuuuccagcg

SEQ ID NO: 2443790 - RNA, 19 nt, Artificial Sequence
  Description of Artificial Sequence: Synthetic oligonucleotide
gucggaacuugacauacac

SEQ ID NO: 2443791 - RNA, 19 nt, Artificial Sequence
  Description of Artificial Sequence: Synthetic oligonucleotide
uaucuccaugacgacaugc

SEQ ID NO: 2443792 - RNA, 19 nt, Artificial Sequence
  Description of Artificial Sequence: Synthetic oligonucleotide
acgaacaguugacuuuguc

SEQ ID NO: 2443793 - RNA, 19 nt, Artificial Sequence
  Description of Artificial Sequence: Synthetic oligonucleotide
gaccacggucucuggaucg

SEQ ID NO: 2443794 - RNA, 19 nt, Artificial Sequence
  Description of Artificial Sequence: Synthetic oligonucleotide
gucgguuuauugugcaacc

SEQ ID NO: 2443795 - RNA, 19 nt, Artificial Sequence
  Description of Artificial Sequence: Synthetic oligonucleotide
ucucucacggucuccuuga

SEQ ID NO: 2443796 - RNA, 19 nt, Artificial Sequence
  Description of Artificial Sequence: Synthetic oligonucleotide
uagagugcagauggucugg

SEQ ID NO: 2443797 - RNA, 19 nt, Artificial Sequence
  Description of Artificial Sequence: Synthetic oligonucleotide
guagauguuuuagagugca

SEQ ID NO: 2443798 - RNA, 19 nt, Artificial Sequence
  Description of Artificial Sequence: Synthetic oligonucleotide
gguaaaacggcucggcuca

SEQ ID NO: 2443799 - RNA, 19 nt, Artificial Sequence
  Description of Artificial Sequence: Synthetic oligonucleotide
uggaggccaaguauuccgc

SEQ ID NO: 2443800 - RNA, 19 nt, Artificial Sequence
  Description of Artificial Sequence: Synthetic oligonucleotide
gguuuauugugcaaccgag

SEQ ID NO: 2443801 - RNA, 19 nt, Artificial Sequence
  Description of Artificial Sequence: Synthetic oligonucleotide
auacagcucccgucgcagc

SEQ ID NO: 2443802 - RNA, 19 nt, Artificial Sequence
  Description of Artificial Sequence: Synthetic oligonucleotide
uccuagguugucacagaca

SEQ ID NO: 2443803 - RNA, 19 nt, Artificial Sequence
  Description of Artificial Sequence: Synthetic oligonucleotide
ucuaugcuucuuacgccga

SEQ ID NO: 2443804 - RNA, 19 nt, Artificial Sequence
  Description of Artificial Sequence: Synthetic oligonucleotide
gucuccuagguugucacag

SEQ ID NO: 2443805 - RNA, 19 nt, Artificial Sequence
  Description of Artificial Sequence: Synthetic oligonucleotide
auguuuuagagugcagaug

SEQ ID NO: 2443806 - RNA, 19 nt, Artificial Sequence
  Description of Artificial Sequence: Synthetic oligonucleotide
cuaaaggucgguuuauugu

SEQ ID NO: 2443807 - RNA, 19 nt, Artificial Sequence
  Description of Artificial Sequence: Synthetic oligonucleotide
cuggaucuaugcuucuuac

SEQ ID NO: 2443808 - RNA, 19 nt, Artificial Sequence
  Description of Artificial Sequence: Synthetic oligonucleotide
ucuggcuaaaggucgguuu

SEQ ID NO: 2443809 - RNA, 19 nt, Artificial Sequence
  Description of Artificial Sequence: Synthetic oligonucleotide
ucugcauggauuggcugcc

SEQ ID NO: 2443810 - RNA, 19 nt, Artificial Sequence
  Description of Artificial Sequence: Synthetic oligonucleotide
cuuacgccgacgcccauac

SEQ ID NO: 2443811 - RNA, 19 nt, Artificial Sequence
  Description of Artificial Sequence: Synthetic oligonucleotide
cuccaauuuugaaauaaaa

SEQ ID NO: 2443812 - RNA, 19 nt, Artificial Sequence
  Description of Artificial Sequence: Synthetic oligonucleotide
aucucucacggucuccuug

SEQ ID NO: 2443813 - RNA, 19 nt, Artificial Sequence
  Description of Artificial Sequence: Synthetic oligonucleotide
aucgcccagaucucucacg

SEQ ID NO: 2443814 - RNA, 19 nt, Artificial Sequence
  Description of Artificial Sequence: Synthetic oligonucleotide
ucucacggucuccuugacc

SEQ ID NO: 2443815 - RNA, 19 nt, Artificial Sequence
  Description of Artificial Sequence: Synthetic oligonucleotide
gacauacacguuccccacc

SEQ ID NO: 2443816 - RNA, 19 nt, Artificial Sequence
  Description of Artificial Sequence: Synthetic oligonucleotide
ugucuagcagacacacggu

SEQ ID NO: 2443817 - RNA, 19 nt, Artificial Sequence
  Description of Artificial Sequence: Synthetic oligonucleotide
auacacguuccccaccaga

SEQ ID NO: 2443818 - RNA, 19 nt, Artificial Sequence
  Description of Artificial Sequence: Synthetic oligonucleotide
accaacuacaacacugucu

SEQ ID NO: 2443819 - RNA, 19 nt, Artificial Sequence
  Description of Artificial Sequence: Synthetic oligonucleotide
ucaaccucgccguacuuuu

SEQ ID NO: 2443820 - RNA, 19 nt, Artificial Sequence
  Description of Artificial Sequence: Synthetic oligonucleotide
cuucaggugcaugaaguug

SEQ ID NO: 2443821 - RNA, 19 nt, Artificial Sequence
  Description of Artificial Sequence: Synthetic oligonucleotide
cuccacgucgcucacagca

SEQ ID NO: 2443822 - RNA, 19 nt, Artificial Sequence
  Description of Artificial Sequence: Synthetic oligonucleotide
uccuugacccgccuccugu

SEQ ID NO: 2443823 - RNA, 19 nt, Artificial Sequence
  Description of Artificial Sequence: Synthetic oligonucleotide
gaacaucuaucuccaugac

SEQ ID NO: 2443824 - RNA, 19 nt, Artificial Sequence
  Description of Artificial Sequence: Synthetic oligonucleotide
acgacaugcuccaauuuug

SEQ ID NO: 2443825 - RNA, 19 nt, Artificial Sequence
  Description of Artificial Sequence: Synthetic oligonucleotide
uccucaaccucgccguacu

SEQ ID NO: 2443826 - RNA, 19 nt, Artificial Sequence
  Description of Artificial Sequence: Synthetic oligonucleotide
caaucacagcuuucucugc

SEQ ID NO: 2443827 - RNA, 19 nt, Artificial Sequence
  Description of Artificial Sequence: Synthetic oligonucleotide
uuucucggugccgaagaug

SEQ ID NO: 2443828 - RNA, 19 nt, Artificial Sequence
  Description of Artificial Sequence: Synthetic oligonucleotide
ucagaaucgcccagaucuc

SEQ ID NO: 2443829 - RNA, 19 nt, Artificial Sequence
  Description of Artificial Sequence: Synthetic oligonucleotide
uccgacacggcagccgacg

SEQ ID NO: 2443830 - RNA, 19 nt, Artificial Sequence
  Description of Artificial Sequence: Synthetic oligonucleotide
augacgacaugcuccaauu

SEQ ID NO: 2443831 - RNA, 19 nt, Artificial Sequence
  Description of Artificial Sequence: Synthetic oligonucleotide
cuacaacacugucuagcag

SEQ ID NO: 2443832 - RNA, 19 nt, Artificial Sequence
  Description of Artificial Sequence: Synthetic oligonucleotide
uuuccagcggacgccuccg

SEQ ID NO: 2443833 - RNA, 19 nt, Artificial Sequence
  Description of Artificial Sequence: Synthetic oligonucleotide
ugucaccaacuacaacacu

SEQ ID NO: 2443834 - RNA, 19 nt, Artificial Sequence
  Description of Artificial Sequence: Synthetic oligonucleotide
cagacauucaucuccucaa

SEQ ID NO: 2443835 - RNA, 19 nt, Artificial Sequence
  Description of Artificial Sequence: Synthetic oligonucleotide
ugcaaccgagaacaucuau

SEQ ID NO: 2443836 - RNA, 19 nt, Artificial Sequence
  Description of Artificial Sequence: Synthetic oligonucleotide
ucggcucagaaucgcccag

SEQ ID NO: 2443837 - RNA, 19 nt, Artificial Sequence
  Description of Artificial Sequence: Synthetic oligonucleotide
cuccuagguugucacagac

SEQ ID NO: 2443838 - RNA, 19 nt, Artificial Sequence
  Description of Artificial Sequence: Synthetic oligonucleotide
guauuccgccauuuuccag

SEQ ID NO: 2443839 - RNA, 19 nt, Artificial Sequence
  Description of Artificial Sequence: Synthetic oligonucleotide
ugcuucuuacgccgacgcc

SEQ ID NO: 2443840 - RNA, 19 nt, Artificial Sequence
  Description of Artificial Sequence: Synthetic oligonucleotide
acgguaaaacggcucggcu

SEQ ID NO: 2443841 - RNA, 19 nt, Artificial Sequence
  Description of Artificial Sequence: Synthetic oligonucleotide
cucggugccgaagauggag

SEQ ID NO: 2443842 - RNA, 19 nt, Artificial Sequence
  Description of Artificial Sequence: Synthetic oligonucleotide
gaaucgcccagaucucuca

SEQ ID NO: 2443843 - RNA, 19 nt, Artificial Sequence
  Description of Artificial Sequence: Synthetic oligonucleotide
cacgcucucguccuccacc

SEQ ID NO: 2443844 - RNA, 19 nt, Artificial Sequence
  Description of Artificial Sequence: Synthetic oligonucleotide
gaacuggcuugucaccaac

SEQ ID NO: 2443845 - RNA, 19 nt, Artificial Sequence
  Description of Artificial Sequence: Synthetic oligonucleotide
ugcacucucccauuucaua

SEQ ID NO: 2443846 - RNA, 19 nt, Artificial Sequence
  Description of Artificial Sequence: Synthetic oligonucleotide
ugacccgccuccugucacg

SEQ ID NO: 2443847 - RNA, 19 nt, Artificial Sequence
  Description of Artificial Sequence: Synthetic oligonucleotide
gcuucuuacgccgacgccc

SEQ ID NO: 2443848 - RNA, 19 nt, Artificial Sequence
  Description of Artificial Sequence: Synthetic oligonucleotide
caaccgagaacaucuaucu

SEQ ID NO: 2443849 - RNA, 19 nt, Artificial Sequence
  Description of Artificial Sequence: Synthetic oligonucleotide
ucgucauagugcuccugca

SEQ ID NO: 2443850 - RNA, 19 nt, Artificial Sequence
  Description of Artificial Sequence: Synthetic oligonucleotide
aacucgucauagugcuccu

SEQ ID NO: 2443851 - RNA, 19 nt, Artificial Sequence
  Description of Artificial Sequence: Synthetic oligonucleotide
ucacggucuccuugacccg

SEQ ID NO: 2443852 - RNA, 19 nt, Artificial Sequence
  Description of Artificial Sequence: Synthetic oligonucleotide
ccaacgguuauucaaguca

SEQ ID NO: 2443853 - RNA, 19 nt, Artificial Sequence
  Description of Artificial Sequence: Synthetic oligonucleotide
caacgguuauucaagucaa

SEQ ID NO: 2443854 - RNA, 19 nt, Artificial Sequence
  Description of Artificial Sequence: Synthetic oligonucleotide
caagucaaucacagcuuuc

SEQ ID NO: 2443855 - RNA, 19 nt, Artificial Sequence
  Description of Artificial Sequence: Synthetic oligonucleotide
ucgggaccuggaucuaugc

SEQ ID NO: 2443856 - RNA, 19 nt, Artificial Sequence
  Description of Artificial Sequence: Synthetic oligonucleotide
agaucucucacggucuccu

SEQ ID NO: 2443857 - RNA, 19 nt, Artificial Sequence
  Description of Artificial Sequence: Synthetic oligonucleotide
agaaucgcccagaucucuc

SEQ ID NO: 2443858 - RNA, 19 nt, Artificial Sequence
  Description of Artificial Sequence: Synthetic oligonucleotide
cucacgucggaacuugaca

SEQ ID NO: 2443859 - RNA, 19 nt, Artificial Sequence
  Description of Artificial Sequence: Synthetic oligonucleotide
guuuauugugcaaccgaga

SEQ ID NO: 2443860 - RNA, 19 nt, Artificial Sequence
  Description of Artificial Sequence: Synthetic oligonucleotide
acggucucuggaucgagaa

SEQ ID NO: 2443861 - RNA, 19 nt, Artificial Sequence
  Description of Artificial Sequence: Synthetic oligonucleotide
gccauuuuccagcggacgc

SEQ ID NO: 2443862 - RNA, 19 nt, Artificial Sequence
  Description of Artificial Sequence: Synthetic oligonucleotide
uccacgucgcucacagcac

SEQ ID NO: 2443863 - RNA, 19 nt, Artificial Sequence
  Description of Artificial Sequence: Synthetic oligonucleotide
acacacgguaaaacggcuc

SEQ ID NO: 2443864 - RNA, 19 nt, Artificial Sequence
  Description of Artificial Sequence: Synthetic oligonucleotide
uggauuggcugcccauuaa

SEQ ID NO: 2443865 - RNA, 19 nt, Artificial Sequence
  Description of Artificial Sequence: Synthetic oligonucleotide
acgaccacggucucuggau

SEQ ID NO: 2443866 - RNA, 19 nt, Artificial Sequence
  Description of Artificial Sequence: Synthetic oligonucleotide
cacgguaaaacggcucggc

SEQ ID NO: 2443867 - RNA, 19 nt, Artificial Sequence
  Description of Artificial Sequence: Synthetic oligonucleotide
aucuccaugacgacaugcu

SEQ ID NO: 2443868 - RNA, 19 nt, Artificial Sequence
  Description of Artificial Sequence: Synthetic oligonucleotide
cuagcagacacacgguaaa

SEQ ID NO: 2443869 - RNA, 19 nt, Artificial Sequence
  Description of Artificial Sequence: Synthetic oligonucleotide
aaacggcucggcucagaau

SEQ ID NO: 2443870 - RNA, 19 nt, Artificial Sequence
  Description of Artificial Sequence: Synthetic oligonucleotide
gagaacgccguucccggga

SEQ ID NO: 2443871 - RNA, 19 nt, Artificial Sequence
  Description of Artificial Sequence: Synthetic oligonucleotide
cuaugcuucuuacgccgac

SEQ ID NO: 2443872 - RNA, 19 nt, Artificial Sequence
  Description of Artificial Sequence: Synthetic oligonucleotide
gaucgagaacgccguuccc

SEQ ID NO: 2443873 - RNA, 19 nt, Artificial Sequence
  Description of Artificial Sequence: Synthetic oligonucleotide
uugacccgccuccugucac

SEQ ID NO: 2443874 - RNA, 19 nt, Artificial Sequence
  Description of Artificial Sequence: Synthetic oligonucleotide
ugacgacaugcuccaauuu

SEQ ID NO: 2443875 - RNA, 19 nt, Artificial Sequence
  Description of Artificial Sequence: Synthetic oligonucleotide
gacgacaugcuccaauuuu

SEQ ID NO: 2443876 - RNA, 19 nt, Artificial Sequence
  Description of Artificial Sequence: Synthetic oligonucleotide
uggaucgagaacgccguuc

SEQ ID NO: 2443877 - RNA, 19 nt, Artificial Sequence
  Description of Artificial Sequence: Synthetic oligonucleotide
acacgguaaaacggcucgg

SEQ ID NO: 2443878 - RNA, 19 nt, Artificial Sequence
  Description of Artificial Sequence: Synthetic oligonucleotide
cuucuuacgccgacgccca

SEQ ID NO: 2443879 - RNA, 19 nt, Artificial Sequence
  Description of Artificial Sequence: Synthetic oligonucleotide
caacuacaacacugucuag

SEQ ID NO: 2443880 - RNA, 19 nt, Artificial Sequence
  Description of Artificial Sequence: Synthetic oligonucleotide
agucagucacuggggacag

SEQ ID NO: 2443881 - RNA, 19 nt, Artificial Sequence
  Description of Artificial Sequence: Synthetic oligonucleotide
uugugcaaccgagaacauc

SEQ ID NO: 2443882 - RNA, 19 nt, Artificial Sequence
  Description of Artificial Sequence: Synthetic oligonucleotide
agccgucagccgucugugc

SEQ ID NO: 2443883 - RNA, 19 nt, Artificial Sequence
  Description of Artificial Sequence: Synthetic oligonucleotide
acugucuagcagacacacg

SEQ ID NO: 2443884 - RNA, 19 nt, Artificial Sequence
  Description of Artificial Sequence: Synthetic oligonucleotide
cccauuucauacuggcggc

SEQ ID NO: 2443885 - RNA, 19 nt, Artificial Sequence
  Description of Artificial Sequence: Synthetic oligonucleotide
ucgccguacuuuucuucca

SEQ ID NO: 2443886 - RNA, 19 nt, Artificial Sequence
  Description of Artificial Sequence: Synthetic oligonucleotide
gagauaggcuucaggugca

SEQ ID NO: 2443887 - RNA, 19 nt, Artificial Sequence
  Description of Artificial Sequence: Synthetic oligonucleotide
cagcggacgccuccgacac

SEQ ID NO: 2443888 - RNA, 19 nt, Artificial Sequence
  Description of Artificial Sequence: Synthetic oligonucleotide
gucuagcagacacacggua

SEQ ID NO: 2443889 - RNA, 19 nt, Artificial Sequence
  Description of Artificial Sequence: Synthetic oligonucleotide
uuccgccauuuuccagcgg

SEQ ID NO: 2443890 - RNA, 19 nt, Artificial Sequence
  Description of Artificial Sequence: Synthetic oligonucleotide
cagcucugcauggauuggc

SEQ ID NO: 2443891 - RNA, 19 nt, Artificial Sequence
  Description of Artificial Sequence: Synthetic oligonucleotide
ccgacgcccauacagcucc

SEQ ID NO: 2443892 - RNA, 19 nt, Artificial Sequence
  Description of Artificial Sequence: Synthetic oligonucleotide
gcggcaacaggcuucccug

SEQ ID NO: 2443893 - RNA, 19 nt, Artificial Sequence
  Description of Artificial Sequence: Synthetic oligonucleotide
cuggcuaaaggucgguuua

SEQ ID NO: 2443894 - RNA, 19 nt, Artificial Sequence
  Description of Artificial Sequence: Synthetic oligonucleotide
uaaaacggcucggcucaga

SEQ ID NO: 2443895 - RNA, 19 nt, Artificial Sequence
  Description of Artificial Sequence: Synthetic oligonucleotide
caccaacuacaacacuguc

SEQ ID NO: 2443896 - RNA, 19 nt, Artificial Sequence
  Description of Artificial Sequence: Synthetic oligonucleotide
ucccgucgcagcucucuug

SEQ ID NO: 2443897 - RNA, 19 nt, Artificial Sequence
  Description of Artificial Sequence: Synthetic oligonucleotide
gcaaccgagaacaucuauc

SEQ ID NO: 2443898 - RNA, 19 nt, Artificial Sequence
  Description of Artificial Sequence: Synthetic oligonucleotide
gucuuucucggugccgaag

SEQ ID NO: 2443899 - RNA, 19 nt, Artificial Sequence
  Description of Artificial Sequence: Synthetic oligonucleotide
agaacucgucauagugcuc

SEQ ID NO: 2443900 - RNA, 19 nt, Artificial Sequence
  Description of Artificial Sequence: Synthetic oligonucleotide
gucgcagcucucuugagau

SEQ ID NO: 2443901 - RNA, 19 nt, Artificial Sequence
  Description of Artificial Sequence: Synthetic oligonucleotide
aacgguuauucaagucaau

SEQ ID NO: 2443902 - RNA, 19 nt, Artificial Sequence
  Description of Artificial Sequence: Synthetic oligonucleotide
gacgcccauacagcucccg

SEQ ID NO: 2443903 - RNA, 19 nt, Artificial Sequence
  Description of Artificial Sequence: Synthetic oligonucleotide
agaacgccguucccgggau

SEQ ID NO: 2443904 - RNA, 19 nt, Artificial Sequence
  Description of Artificial Sequence: Synthetic oligonucleotide
aacgaacaguugacuuugu

SEQ ID NO: 2443905 - RNA, 19 nt, Artificial Sequence
  Description of Artificial Sequence: Synthetic oligonucleotide
cuaucuccaugacgacaug

SEQ ID NO: 2443906 - RNA, 19 nt, Artificial Sequence
  Description of Artificial Sequence: Synthetic oligonucleotide
gcccagaucucucacgguc

SEQ ID NO: 2443907 - RNA, 19 nt, Artificial Sequence
  Description of Artificial Sequence: Synthetic oligonucleotide
cggaacuugacauacacgu

SEQ ID NO: 2443908 - RNA, 19 nt, Artificial Sequence
  Description of Artificial Sequence: Synthetic oligonucleotide
acgcccauacagcucccgu

SEQ ID NO: 2443909 - RNA, 19 nt, Artificial Sequence
  Description of Artificial Sequence: Synthetic oligonucleotide
agcucucuugagauaggcu

SEQ ID NO: 2443910 - RNA, 19 nt, Artificial Sequence
  Description of Artificial Sequence: Synthetic oligonucleotide
agcucugcauggauuggcu

SEQ ID NO: 2443911 - RNA, 19 nt, Artificial Sequence
  Description of Artificial Sequence: Synthetic oligonucleotide
gucacuggggacagcucug

SEQ ID NO: 2443912 - RNA, 19 nt, Artificial Sequence
  Description of Artificial Sequence: Synthetic oligonucleotide
aggucgguuuauugugcaa

SEQ ID NO: 2443913 - RNA, 19 nt, Artificial Sequence
  Description of Artificial Sequence: Synthetic oligonucleotide
cuccucacgucggaacuug

SEQ ID NO: 2443914 - RNA, 19 nt, Artificial Sequence
  Description of Artificial Sequence: Synthetic oligonucleotide
acggcucggcucagaaucg

SEQ ID NO: 2443915 - RNA, 19 nt, Artificial Sequence
  Description of Artificial Sequence: Synthetic oligonucleotide
acggucuccuugacccgcc

SEQ ID NO: 2443916 - RNA, 19 nt, Artificial Sequence
  Description of Artificial Sequence: Synthetic oligonucleotide
uacuggcggcaacaggcuu

SEQ ID NO: 2443917 - RNA, 19 nt, Artificial Sequence
  Description of Artificial Sequence: Synthetic oligonucleotide
auacuggcggcaacaggcu

SEQ ID NO: 2443918 - RNA, 19 nt, Artificial Sequence
  Description of Artificial Sequence: Synthetic oligonucleotide
uggcuaaaggucgguuuau

SEQ ID NO: 2443919 - RNA, 19 nt, Artificial Sequence
  Description of Artificial Sequence: Synthetic oligonucleotide
gcggacgccuccgacacgg

SEQ ID NO: 2443920 - RNA, 19 nt, Artificial Sequence
  Description of Artificial Sequence: Synthetic oligonucleotide
ggaccuggaucuaugcuuc

SEQ ID NO: 2443921 - RNA, 19 nt, Artificial Sequence
  Description of Artificial Sequence: Synthetic oligonucleotide
ccauuuuccagcggacgcc

SEQ ID NO: 2443922 - RNA, 19 nt, Artificial Sequence
  Description of Artificial Sequence: Synthetic oligonucleotide
cagaucucucacggucucc

SEQ ID NO: 2443923 - RNA, 19 nt, Artificial Sequence
  Description of Artificial Sequence: Synthetic oligonucleotide
cauuucauacuggcggcaa

SEQ ID NO: 2443924 - RNA, 19 nt, Artificial Sequence
  Description of Artificial Sequence: Synthetic oligonucleotide
ccgagaacaucuaucucca

SEQ ID NO: 2443925 - RNA, 19 nt, Artificial Sequence
  Description of Artificial Sequence: Synthetic oligonucleotide
ugugagccgucagccgucu

SEQ ID NO: 2443926 - RNA, 19 nt, Artificial Sequence
  Description of Artificial Sequence: Synthetic oligonucleotide
ccaccagauggucuccuag

SEQ ID NO: 2443927 - RNA, 19 nt, Artificial Sequence
  Description of Artificial Sequence: Synthetic oligonucleotide
cgcagcucucuugagauag

SEQ ID NO: 2443928 - RNA, 19 nt, Artificial Sequence
  Description of Artificial Sequence: Synthetic oligonucleotide
guaaaacggcucggcucag

SEQ ID NO: 2443929 - RNA, 19 nt, Artificial Sequence
  Description of Artificial Sequence: Synthetic oligonucleotide
gacacacgguaaaacggcu

SEQ ID NO: 2443930 - RNA, 19 nt, Artificial Sequence
  Description of Artificial Sequence: Synthetic oligonucleotide
cccauuaaaccaacgguua

SEQ ID NO: 2443931 - RNA, 19 nt, Artificial Sequence
  Description of Artificial Sequence: Synthetic oligonucleotide
caugacgacaugcuccaau

SEQ ID NO: 2443932 - RNA, 19 nt, Artificial Sequence
  Description of Artificial Sequence: Synthetic oligonucleotide
cuccucaaccucgccguac

SEQ ID NO: 2443933 - RNA, 19 nt, Artificial Sequence
  Description of Artificial Sequence: Synthetic oligonucleotide
gcugcccauuaaaccaacg

SEQ ID NO: 2443934 - RNA, 19 nt, Artificial Sequence
  Description of Artificial Sequence: Synthetic oligonucleotide
caaccucgccguacuuuuc

SEQ ID NO: 2443935 - RNA, 19 nt, Artificial Sequence
  Description of Artificial Sequence: Synthetic oligonucleotide
acucgucauagugcuccug

SEQ ID NO: 2443936 - RNA, 19 nt, Artificial Sequence
  Description of Artificial Sequence: Synthetic oligonucleotide
cgguaaaacggcucggcuc

SEQ ID NO: 2443937 - RNA, 19 nt, Artificial Sequence
  Description of Artificial Sequence: Synthetic oligonucleotide
agcggacgccuccgacacg

SEQ ID NO: 2443938 - RNA, 19 nt, Artificial Sequence
  Description of Artificial Sequence: Synthetic oligonucleotide
gacccgccuccugucacgc

SEQ ID NO: 2443939 - RNA, 19 nt, Artificial Sequence
  Description of Artificial Sequence: Synthetic oligonucleotide
cucucguccuccaccaccu

SEQ ID NO: 2443940 - RNA, 19 nt, Artificial Sequence
  Description of Artificial Sequence: Synthetic oligonucleotide
cucucacggucuccuugac

SEQ ID NO: 2443941 - RNA, 19 nt, Artificial Sequence
  Description of Artificial Sequence: Synthetic oligonucleotide
cuccugucacgcucucguc

SEQ ID NO: 2443942 - RNA, 19 nt, Artificial Sequence
  Description of Artificial Sequence: Synthetic oligonucleotide
cgaacaguugacuuugucu

SEQ ID NO: 2443943 - RNA, 19 nt, Artificial Sequence
  Description of Artificial Sequence: Synthetic oligonucleotide
gggaccuggaucuaugcuu

SEQ ID NO: 2443944 - RNA, 19 nt, Artificial Sequence
  Description of Artificial Sequence: Synthetic oligonucleotide
cguacuuuucuuccaucuc

SEQ ID NO: 2443945 - RNA, 19 nt, Artificial Sequence
  Description of Artificial Sequence: Synthetic oligonucleotide
gcucggcucagaaucgccc

SEQ ID NO: 2443946 - RNA, 19 nt, Artificial Sequence
  Description of Artificial Sequence: Synthetic oligonucleotide
gguuacgguagauguuuua

SEQ ID NO: 2443947 - RNA, 19 nt, Artificial Sequence
  Description of Artificial Sequence: Synthetic oligonucleotide
ccucacgucggaacuugac

SEQ ID NO: 2443948 - RNA, 19 nt, Artificial Sequence
  Description of Artificial Sequence: Synthetic oligonucleotide
accacggucucuggaucga

SEQ ID NO: 2443949 - RNA, 19 nt, Artificial Sequence
  Description of Artificial Sequence: Synthetic oligonucleotide
uccccaccagauggucucc

SEQ ID NO: 2443950 - RNA, 19 nt, Artificial Sequence
  Description of Artificial Sequence: Synthetic oligonucleotide
cacgaccacggucucugga

SEQ ID NO: 2443951 - RNA, 19 nt, Artificial Sequence
  Description of Artificial Sequence: Synthetic oligonucleotide
ucgcagcucucuugagaua

SEQ ID NO: 2443952 - RNA, 19 nt, Artificial Sequence
  Description of Artificial Sequence: Synthetic oligonucleotide
gccgucagccgucugugca

SEQ ID NO: 2443953 - RNA, 19 nt, Artificial Sequence
  Description of Artificial Sequence: Synthetic oligonucleotide
cacggcagccgacgccgcc

SEQ ID NO: 2443954 - RNA, 19 nt, Artificial Sequence
  Description of Artificial Sequence: Synthetic oligonucleotide
cugcauggauuggcugccc

SEQ ID NO: 2443955 - RNA, 19 nt, Artificial Sequence
  Description of Artificial Sequence: Synthetic oligonucleotide
gucacgcucucguccucca

SEQ ID NO: 2443956 - RNA, 19 nt, Artificial Sequence
  Description of Artificial Sequence: Synthetic oligonucleotide
accucgccguacuuuucuu

SEQ ID NO: 2443957 - RNA, 19 nt, Artificial Sequence
  Description of Artificial Sequence: Synthetic oligonucleotide
guuuuagagugcagauggu

SEQ ID NO: 2443958 - RNA, 19 nt, Artificial Sequence
  Description of Artificial Sequence: Synthetic oligonucleotide
guucccgggaucgggaccu

SEQ ID NO: 2443959 - RNA, 19 nt, Artificial Sequence
  Description of Artificial Sequence: Synthetic oligonucleotide
agauaggcuucaggugcau

SEQ ID NO: 2443960 - RNA, 19 nt, Artificial Sequence
  Description of Artificial Sequence: Synthetic oligonucleotide
ccgucagccgucugugcag

SEQ ID NO: 2443961 - RNA, 19 nt, Artificial Sequence
  Description of Artificial Sequence: Synthetic oligonucleotide
agccgacgccgccgacuac

SEQ ID NO: 2443962 - RNA, 19 nt, Artificial Sequence
  Description of Artificial Sequence: Synthetic oligonucleotide
uucuuacgccgacgcccau

SEQ ID NO: 2443963 - RNA, 19 nt, Artificial Sequence
  Description of Artificial Sequence: Synthetic oligonucleotide
acacggcagccgacgccgc

SEQ ID NO: 2443964 - RNA, 19 nt, Artificial Sequence
  Description of Artificial Sequence: Synthetic oligonucleotide
gccguacuuuucuuccauc

SEQ ID NO: 2443965 - RNA, 19 nt, Artificial Sequence
  Description of Artificial Sequence: Synthetic oligonucleotide
ccagaucucucacggucuc

SEQ ID NO: 2443966 - RNA, 19 nt, Artificial Sequence
  Description of Artificial Sequence: Synthetic oligonucleotide
gucgcucacagcacagugu

SEQ ID NO: 2443967 - RNA, 19 nt, Artificial Sequence
  Description of Artificial Sequence: Synthetic oligonucleotide
gaacgccguucccgggauc

SEQ ID NO: 2443968 - RNA, 19 nt, Artificial Sequence
  Description of Artificial Sequence: Synthetic oligonucleotide
ccucgccguacuuuucuuc

SEQ ID NO: 2443969 - RNA, 19 nt, Artificial Sequence
  Description of Artificial Sequence: Synthetic oligonucleotide
cgguuuauugugcaaccga

SEQ ID NO: 2443970 - RNA, 19 nt, Artificial Sequence
  Description of Artificial Sequence: Synthetic oligonucleotide
gcucagaaucgcccagauc

SEQ ID NO: 2443971 - RNA, 19 nt, Artificial Sequence
  Description of Artificial Sequence: Synthetic oligonucleotide
gccuccgacacggcagccg

SEQ ID NO: 2443972 - RNA, 19 nt, Artificial Sequence
  Description of Artificial Sequence: Synthetic oligonucleotide
gugugagccgucagccguc

SEQ ID NO: 2443973 - RNA, 19 nt, Artificial Sequence
  Description of Artificial Sequence: Synthetic oligonucleotide
gcccauuaaaccaacgguu

SEQ ID NO: 2443974 - RNA, 19 nt, Artificial Sequence
  Description of Artificial Sequence: Synthetic oligonucleotide
gggguuacgguagauguuu

SEQ ID NO: 2443975 - RNA, 19 nt, Artificial Sequence
  Description of Artificial Sequence: Synthetic oligonucleotide
cuugugcacucucccauuu

SEQ ID NO: 2443976 - RNA, 19 nt, Artificial Sequence
  Description of Artificial Sequence: Synthetic oligonucleotide
gaccuggaucuaugcuucu

SEQ ID NO: 2443977 - RNA, 19 nt, Artificial Sequence
  Description of Artificial Sequence: Synthetic oligonucleotide
cccauacagcucccgucgc

SEQ ID NO: 2443978 - RNA, 19 nt, Artificial Sequence
  Description of Artificial Sequence: Synthetic oligonucleotide
ggcucggcucagaaucgcc

SEQ ID NO: 2443979 - RNA, 19 nt, Artificial Sequence
  Description of Artificial Sequence: Synthetic oligonucleotide
ggcggcaacaggcuucccu

SEQ ID NO: 2443980 - RNA, 19 nt, Artificial Sequence
  Description of Artificial Sequence: Synthetic oligonucleotide
ggcuugucaccaacuacaa

SEQ ID NO: 2443981 - RNA, 19 nt, Artificial Sequence
  Description of Artificial Sequence: Synthetic oligonucleotide
acgccguucccgggaucgg

SEQ ID NO: 2443982 - RNA, 19 nt, Artificial Sequence
  Description of Artificial Sequence: Synthetic oligonucleotide
cagaaucgcccagaucucu

SEQ ID NO: 2443983 - RNA, 19 nt, Artificial Sequence
  Description of Artificial Sequence: Synthetic oligonucleotide
cggugccgaagauggaggc

SEQ ID NO: 2443984 - RNA, 19 nt, Artificial Sequence
  Description of Artificial Sequence: Synthetic oligonucleotide
cgacaugcuccaauuuuga

SEQ ID NO: 2443985 - RNA, 19 nt, Artificial Sequence
  Description of Artificial Sequence: Synthetic oligonucleotide
cacuggggacagcucugca

SEQ ID NO: 2443986 - RNA, 19 nt, Artificial Sequence
  Description of Artificial Sequence: Synthetic oligonucleotide
ccuugacccgccuccuguc

SEQ ID NO: 2443987 - RNA, 19 nt, Artificial Sequence
  Description of Artificial Sequence: Synthetic oligonucleotide
cccgccuccugucacgcuc

SEQ ID NO: 2443988 - RNA, 19 nt, Artificial Sequence
  Description of Artificial Sequence: Synthetic oligonucleotide
ccagcggacgccuccgaca

SEQ ID NO: 2443989 - RNA, 19 nt, Artificial Sequence
  Description of Artificial Sequence: Synthetic oligonucleotide
ccgccauuuuccagcggac

SEQ ID NO: 2443990 - RNA, 19 nt, Artificial Sequence
  Description of Artificial Sequence: Synthetic oligonucleotide
ccaucucagugaagacuuc

SEQ ID NO: 2443991 - RNA, 19 nt, Artificial Sequence
  Description of Artificial Sequence: Synthetic oligonucleotide
gaucgggaccuggaucuau

SEQ ID NO: 2443992 - RNA, 19 nt, Artificial Sequence
  Description of Artificial Sequence: Synthetic oligonucleotide
cuuucucggugccgaagau

SEQ ID NO: 2443993 - RNA, 19 nt, Artificial Sequence
  Description of Artificial Sequence: Synthetic oligonucleotide
cccgucgcagcucucuuga

SEQ ID NO: 2443994 - RNA, 19 nt, Artificial Sequence
  Description of Artificial Sequence: Synthetic oligonucleotide
gugagccgucagccgucug

SEQ ID NO: 2443995 - RNA, 19 nt, Artificial Sequence
  Description of Artificial Sequence: Synthetic oligonucleotide
cauggauuggcugcccauu

SEQ ID NO: 2443996 - RNA, 19 nt, Artificial Sequence
  Description of Artificial Sequence: Synthetic oligonucleotide
cgagaacgccguucccggg

SEQ ID NO: 2443997 - RNA, 19 nt, Artificial Sequence
  Description of Artificial Sequence: Synthetic oligonucleotide
ccgacacggcagccgacgc

SEQ ID NO: 2443998 - RNA, 19 nt, Artificial Sequence
  Description of Artificial Sequence: Synthetic oligonucleotide
ggcugcccauuaaaccaac

SEQ ID NO: 2443999 - RNA, 19 nt, Artificial Sequence
  Description of Artificial Sequence: Synthetic oligonucleotide
cagccgacgccgccgacua

SEQ ID NO: 2444000 - RNA, 19 nt, Artificial Sequence
  Description of Artificial Sequence: Synthetic oligonucleotide
ccauuaaaccaacgguuau

SEQ ID NO: 2444001 - RNA, 19 nt, Artificial Sequence
  Description of Artificial Sequence: Synthetic oligonucleotide
cuagguugucacagacauu

SEQ ID NO: 2444002 - RNA, 19 nt, Artificial Sequence
  Description of Artificial Sequence: Synthetic oligonucleotide
gccuccugucacgcucucg

SEQ ID NO: 2444003 - RNA, 19 nt, Artificial Sequence
  Description of Artificial Sequence: Synthetic oligonucleotide
cucaaccucgccguacuuu

SEQ ID NO: 2444004 - RNA, 19 nt, Artificial Sequence
  Description of Artificial Sequence: Synthetic oligonucleotide
acccgccuccugucacgcu

SEQ ID NO: 2444005 - RNA, 19 nt, Artificial Sequence
  Description of Artificial Sequence: Synthetic oligonucleotide
cguucccgggaucgggacc

SEQ ID NO: 2444006 - RNA, 19 nt, Artificial Sequence
  Description of Artificial Sequence: Synthetic oligonucleotide
ccauuucauacuggcggca

SEQ ID NO: 2444007 - RNA, 19 nt, Artificial Sequence
  Description of Artificial Sequence: Synthetic oligonucleotide
ggaacuugacauacacguu

SEQ ID NO: 2444008 - RNA, 19 nt, Artificial Sequence
  Description of Artificial Sequence: Synthetic oligonucleotide
ccguucccgggaucgggac

SEQ ID NO: 2444009 - RNA, 19 nt, Artificial Sequence
  Description of Artificial Sequence: Synthetic oligonucleotide
ccacgucgcucacagcaca

SEQ ID NO: 2444010 - RNA, 19 nt, Artificial Sequence
  Description of Artificial Sequence: Synthetic oligonucleotide
cgacacggcagccgacgcc

SEQ ID NO: 2444011 - RNA, 19 nt, Artificial Sequence
  Description of Artificial Sequence: Synthetic oligonucleotide
caggugcaugaaguugcaa

SEQ ID NO: 2444012 - RNA, 19 nt, Artificial Sequence
  Description of Artificial Sequence: Synthetic oligonucleotide
gugcaaccgagaacaucua

SEQ ID NO: 2444013 - RNA, 19 nt, Artificial Sequence
  Description of Artificial Sequence: Synthetic oligonucleotide
cccagaucucucacggucu

SEQ ID NO: 2444014 - RNA, 19 nt, Artificial Sequence
  Description of Artificial Sequence: Synthetic oligonucleotide
ggcucagaaucgcccagau

SEQ ID NO: 2444015 - RNA, 19 nt, Artificial Sequence
  Description of Artificial Sequence: Synthetic oligonucleotide
cgaccacggucucuggauc

SEQ ID NO: 2444016 - RNA, 19 nt, Artificial Sequence
  Description of Artificial Sequence: Synthetic oligonucleotide
ccgucgcagcucucuugag

SEQ ID NO: 2444017 - RNA, 19 nt, Artificial Sequence
  Description of Artificial Sequence: Synthetic oligonucleotide
ccacggucucuggaucgag

SEQ ID NO: 2444018 - RNA, 19 nt, Artificial Sequence
  Description of Artificial Sequence: Synthetic oligonucleotide
cagccgucugugcaguguu

SEQ ID NO: 2444019 - RNA, 19 nt, Artificial Sequence
  Description of Artificial Sequence: Synthetic oligonucleotide
uggcggcaacaggcuuccc

SEQ ID NO: 2444020 - RNA, 19 nt, Artificial Sequence
  Description of Artificial Sequence: Synthetic oligonucleotide
gccgacgcccauacagcuc

SEQ ID NO: 2444021 - RNA, 19 nt, Artificial Sequence
  Description of Artificial Sequence: Synthetic oligonucleotide
gccguucccgggaucggga

SEQ ID NO: 2444022 - RNA, 19 nt, Artificial Sequence
  Description of Artificial Sequence: Synthetic oligonucleotide
ccaaguauuccgccauuuu

SEQ ID NO: 2444023 - RNA, 19 nt, Artificial Sequence
  Description of Artificial Sequence: Synthetic oligonucleotide
gccaaguauuccgccauuu

SEQ ID NO: 2444024 - RNA, 19 nt, Artificial Sequence
  Description of Artificial Sequence: Synthetic oligonucleotide
cgccaccacgaccacgguc

SEQ ID NO: 2444025 - RNA, 19 nt, Artificial Sequence
  Description of Artificial Sequence: Synthetic oligonucleotide
cuggaucgagaacgccguu

SEQ ID NO: 2444026 - RNA, 19 nt, Artificial Sequence
  Description of Artificial Sequence: Synthetic oligonucleotide
gcagccgacgccgccgacu

SEQ ID NO: 2444027 - RNA, 19 nt, Artificial Sequence
  Description of Artificial Sequence: Synthetic oligonucleotide
ggccaaguauuccgccauu

SEQ ID NO: 2444028 - RNA, 19 nt, Artificial Sequence
  Description of Artificial Sequence: Synthetic oligonucleotide
cggcucggcucagaaucgc

SEQ ID NO: 2444029 - RNA, 19 nt, Artificial Sequence
  Description of Artificial Sequence: Synthetic oligonucleotide
cgacgcccauacagcuccc

SEQ ID NO: 2444030 - RNA, 19 nt, Artificial Sequence
  Description of Artificial Sequence: Synthetic oligonucleotide
gccgucugugcaguguuuu

SEQ ID NO: 2444031 - RNA, 19 nt, Artificial Sequence
  Description of Artificial Sequence: Synthetic oligonucleotide
ggcagccgacgccgccgac

SEQ ID NO: 2444032 - RNA, 19 nt, Artificial Sequence
  Description of Artificial Sequence: Synthetic oligonucleotide
ggaucgggaccuggaucua

SEQ ID NO: 2444033 - RNA, 19 nt, Artificial Sequence
  Description of Artificial Sequence: Synthetic oligonucleotide
cccaccagauggucuccua

SEQ ID NO: 2444034 - RNA, 19 nt, Artificial Sequence
  Description of Artificial Sequence: Synthetic oligonucleotide
cucccgucgcagcucucuu

SEQ ID NO: 2444035 - RNA, 19 nt, Artificial Sequence
  Description of Artificial Sequence: Synthetic oligonucleotide
ggguuacgguagauguuuu

SEQ ID NO: 2444036 - RNA, 19 nt, Artificial Sequence
  Description of Artificial Sequence: Synthetic oligonucleotide
cggacgccuccgacacggc

SEQ ID NO: 2444037 - RNA, 19 nt, Artificial Sequence
  Description of Artificial Sequence: Synthetic oligonucleotide
cgccgacgcccauacagcu

SEQ ID NO: 2444038 - RNA, 19 nt, Artificial Sequence
  Description of Artificial Sequence: Synthetic oligonucleotide
ccgccuccugucacgcucu

SEQ ID NO: 2444039 - RNA, 19 nt, Artificial Sequence
  Description of Artificial Sequence: Synthetic oligonucleotide
cgccguacuuuucuuccau

SEQ ID NO: 2444040 - RNA, 19 nt, Artificial Sequence
  Description of Artificial Sequence: Synthetic oligonucleotide
ccgggaucgggaccuggau

SEQ ID NO: 2444041 - RNA, 19 nt, Artificial Sequence
  Description of Artificial Sequence: Synthetic oligonucleotide
ccaugacgacaugcuccaa

SEQ ID NO: 2444042 - RNA, 19 nt, Artificial Sequence
  Description of Artificial Sequence: Synthetic oligonucleotide
cgccuccugucacgcucuc

SEQ ID NO: 2444043 - RNA, 19 nt, Artificial Sequence
  Description of Artificial Sequence: Synthetic oligonucleotide
ccucaaccucgccguacuu

SEQ ID NO: 2444044 - RNA, 19 nt, Artificial Sequence
  Description of Artificial Sequence: Synthetic oligonucleotide
cgucagccgucugugcagu

SEQ ID NO: 2444045 - RNA, 19 nt, Artificial Sequence
  Description of Artificial Sequence: Synthetic oligonucleotide
cgcccagaucucucacggu

SEQ ID NO: 2444046 - RNA, 19 nt, Artificial Sequence
  Description of Artificial Sequence: Synthetic oligonucleotide
ccgccaccacgaccacggu

SEQ ID NO: 2444047 - RNA, 19 nt, Artificial Sequence
  Description of Artificial Sequence: Synthetic oligonucleotide
acuaccagcacccagaggc

SEQ ID NO: 2444048 - RNA, 19 nt, Artificial Sequence
  Description of Artificial Sequence: Synthetic oligonucleotide
uaagucacgggcaacaggc

SEQ ID NO: 2444049 - RNA, 19 nt, Artificial Sequence
  Description of Artificial Sequence: Synthetic oligonucleotide
gaaauagaggccaaagagg

SEQ ID NO: 2444050 - RNA, 19 nt, Artificial Sequence
  Description of Artificial Sequence: Synthetic oligonucleotide
guggacaggaaucagaugc

SEQ ID NO: 2444051 - RNA, 19 nt, Artificial Sequence
  Description of Artificial Sequence: Synthetic oligonucleotide
auagcaguagacccggacc

SEQ ID NO: 2444052 - RNA, 19 nt, Artificial Sequence
  Description of Artificial Sequence: Synthetic oligonucleotide
ugcagagugaggaugagug

SEQ ID NO: 2444053 - RNA, 19 nt, Artificial Sequence
  Description of Artificial Sequence: Synthetic oligonucleotide
agaguagccacccagcguc

SEQ ID NO: 2444054 - RNA, 19 nt, Artificial Sequence
  Description of Artificial Sequence: Synthetic oligonucleotide
auacacaggggacaguccc

SEQ ID NO: 2444055 - RNA, 19 nt, Artificial Sequence
  Description of Artificial Sequence: Synthetic oligonucleotide
ggaaauagaggccaaagag

SEQ ID NO: 2444056 - RNA, 19 nt, Artificial Sequence
  Description of Artificial Sequence: Synthetic oligonucleotide
agaucaaagugucugagga

SEQ ID NO: 2444057 - RNA, 19 nt, Artificial Sequence
  Description of Artificial Sequence: Synthetic oligonucleotide
uccacagagaucaaagugu

SEQ ID NO: 2444058 - RNA, 19 nt, Artificial Sequence
  Description of Artificial Sequence: Synthetic oligonucleotide
aggaagagggguuguaagc

SEQ ID NO: 2444059 - RNA, 19 nt, Artificial Sequence
  Description of Artificial Sequence: Synthetic oligonucleotide
uucaacggguccaugaucu

SEQ ID NO: 2444060 - RNA, 19 nt, Artificial Sequence
  Description of Artificial Sequence: Synthetic oligonucleotide
ugggguuugagcaggaccc

SEQ ID NO: 2444061 - RNA, 19 nt, Artificial Sequence
  Description of Artificial Sequence: Synthetic oligonucleotide
uuccacucgagccuuagcc

SEQ ID NO: 2444062 - RNA, 19 nt, Artificial Sequence
  Description of Artificial Sequence: Synthetic oligonucleotide
uaucccuaggucaucuagg

SEQ ID NO: 2444063 - RNA, 19 nt, Artificial Sequence
  Description of Artificial Sequence: Synthetic oligonucleotide
aggggaaccugauucaacg

SEQ ID NO: 2444064 - RNA, 19 nt, Artificial Sequence
  Description of Artificial Sequence: Synthetic oligonucleotide
uuaucccuaggucaucuag

SEQ ID NO: 2444065 - RNA, 19 nt, Artificial Sequence
  Description of Artificial Sequence: Synthetic oligonucleotide
uugagcaggacccaggguc

SEQ ID NO: 2444066 - RNA, 19 nt, Artificial Sequence
  Description of Artificial Sequence: Synthetic oligonucleotide
uccaagaguagccacccag

SEQ ID NO: 2444067 - RNA, 19 nt, Artificial Sequence
  Description of Artificial Sequence: Synthetic oligonucleotide
aguggcaucacauuaggaa

SEQ ID NO: 2444068 - RNA, 19 nt, Artificial Sequence
  Description of Artificial Sequence: Synthetic oligonucleotide
gguacaguaagucacgggc

SEQ ID NO: 2444069 - RNA, 19 nt, Artificial Sequence
  Description of Artificial Sequence: Synthetic oligonucleotide
agggguuguaagcaaggcc

SEQ ID NO: 2444070 - RNA, 19 nt, Artificial Sequence
  Description of Artificial Sequence: Synthetic oligonucleotide
uggaaauagaggccaaaga

SEQ ID NO: 2444071 - RNA, 19 nt, Artificial Sequence
  Description of Artificial Sequence: Synthetic oligonucleotide
aaguacauacacaggggac

SEQ ID NO: 2444072 - RNA, 19 nt, Artificial Sequence
  Description of Artificial Sequence: Synthetic oligonucleotide
aaaugagguaggccagcac

SEQ ID NO: 2444073 - RNA, 19 nt, Artificial Sequence
  Description of Artificial Sequence: Synthetic oligonucleotide
uacugaaggcucaccaccg

SEQ ID NO: 2444074 - RNA, 19 nt, Artificial Sequence
  Description of Artificial Sequence: Synthetic oligonucleotide
gaaguacauacacagggga

SEQ ID NO: 2444075 - RNA, 19 nt, Artificial Sequence
  Description of Artificial Sequence: Synthetic oligonucleotide
gaugaguggcgucagguac

SEQ ID NO: 2444076 - RNA, 19 nt, Artificial Sequence
  Description of Artificial Sequence: Synthetic oligonucleotide
ugauucaacggguccauga

SEQ ID NO: 2444077 - RNA, 19 nt, Artificial Sequence
  Description of Artificial Sequence: Synthetic oligonucleotide
gaagcuguuccacucgagc

SEQ ID NO: 2444078 - RNA, 19 nt, Artificial Sequence
  Description of Artificial Sequence: Synthetic oligonucleotide
aucccuaggucaucuaggg

SEQ ID NO: 2444079 - RNA, 19 nt, Artificial Sequence
  Description of Artificial Sequence: Synthetic oligonucleotide
uccgauggcagagaagagg

SEQ ID NO: 2444080 - RNA, 19 nt, Artificial Sequence
  Description of Artificial Sequence: Synthetic oligonucleotide
uggcaucacauuaggaagc

SEQ ID NO: 2444081 - RNA, 19 nt, Artificial Sequence
  Description of Artificial Sequence: Synthetic oligonucleotide
gagucaaaggccccuuccg

SEQ ID NO: 2444082 - RNA, 19 nt, Artificial Sequence
  Description of Artificial Sequence: Synthetic oligonucleotide
uggcgucagguacugaagg

SEQ ID NO: 2444083 - RNA, 19 nt, Artificial Sequence
  Description of Artificial Sequence: Synthetic oligonucleotide
uagcaguagacccggacca

SEQ ID NO: 2444084 - RNA, 19 nt, Artificial Sequence
  Description of Artificial Sequence: Synthetic oligonucleotide
cacagcacuaccagcaccc

SEQ ID NO: 2444085 - RNA, 19 nt, Artificial Sequence
  Description of Artificial Sequence: Synthetic oligonucleotide
guuugagcaggacccaggg

SEQ ID NO: 2444086 - RNA, 19 nt, Artificial Sequence
  Description of Artificial Sequence: Synthetic oligonucleotide
guacugaaggcucaccacc

SEQ ID NO: 2444087 - RNA, 19 nt, Artificial Sequence
  Description of Artificial Sequence: Synthetic oligonucleotide
ugaaggcucaccaccguca

SEQ ID NO: 2444088 - RNA, 19 nt, Artificial Sequence
  Description of Artificial Sequence: Synthetic oligonucleotide
acauuaggaagcugccagg

SEQ ID NO: 2444089 - RNA, 19 nt, Artificial Sequence
  Description of Artificial Sequence: Synthetic oligonucleotide
gaucuaggcacugagguga

SEQ ID NO: 2444090 - RNA, 19 nt, Artificial Sequence
  Description of Artificial Sequence: Synthetic oligonucleotide
aacaggcuuuguccagagc

SEQ ID NO: 2444091 - RNA, 19 nt, Artificial Sequence
  Description of Artificial Sequence: Synthetic oligonucleotide
caccaaaugagguaggcca

SEQ ID NO: 2444092 - RNA, 19 nt, Artificial Sequence
  Description of Artificial Sequence: Synthetic oligonucleotide
cuaguggcaucacauuagg

SEQ ID NO: 2444093 - RNA, 19 nt, Artificial Sequence
  Description of Artificial Sequence: Synthetic oligonucleotide
auucaacggguccaugauc

SEQ ID NO: 2444094 - RNA, 19 nt, Artificial Sequence
  Description of Artificial Sequence: Synthetic oligonucleotide
ggguccaugaucuaggcac

SEQ ID NO: 2444095 - RNA, 19 nt, Artificial Sequence
  Description of Artificial Sequence: Synthetic oligonucleotide
ugcgaagcuguuccacucg

SEQ ID NO: 2444096 - RNA, 19 nt, Artificial Sequence
  Description of Artificial Sequence: Synthetic oligonucleotide
aguacauacacaggggaca

SEQ ID NO: 2444097 - RNA, 19 nt, Artificial Sequence
  Description of Artificial Sequence: Synthetic oligonucleotide
caagaguagccacccagcg

SEQ ID NO: 2444098 - RNA, 19 nt, Artificial Sequence
  Description of Artificial Sequence: Synthetic oligonucleotide
aacggguccaugaucuagg

SEQ ID NO: 2444099 - RNA, 19 nt, Artificial Sequence
  Description of Artificial Sequence: Synthetic oligonucleotide
uggacaggaaucagaugcc

SEQ ID NO: 2444100 - RNA, 19 nt, Artificial Sequence
  Description of Artificial Sequence: Synthetic oligonucleotide
cagagaagaggucauguuc

SEQ ID NO: 2444101 - RNA, 19 nt, Artificial Sequence
  Description of Artificial Sequence: Synthetic oligonucleotide
ugguacaguaagucacggg

SEQ ID NO: 2444102 - RNA, 19 nt, Artificial Sequence
  Description of Artificial Sequence: Synthetic oligonucleotide
uacaguaagucacgggcaa

SEQ ID NO: 2444103 - RNA, 19 nt, Artificial Sequence
  Description of Artificial Sequence: Synthetic oligonucleotide
aagaguagccacccagcgu

SEQ ID NO: 2444104 - RNA, 19 nt, Artificial Sequence
  Description of Artificial Sequence: Synthetic oligonucleotide
cuccuugcgaagcuguucc

SEQ ID NO: 2444105 - RNA, 19 nt, Artificial Sequence
  Description of Artificial Sequence: Synthetic oligonucleotide
guuguaagcaaggccaccc

SEQ ID NO: 2444106 - RNA, 19 nt, Artificial Sequence
  Description of Artificial Sequence: Synthetic oligonucleotide
cagugugcagugcagagug

SEQ ID NO: 2444107 - RNA, 19 nt, Artificial Sequence
  Description of Artificial Sequence: Synthetic oligonucleotide
ugguggacaggaaucagau

SEQ ID NO: 2444108 - RNA, 19 nt, Artificial Sequence
  Description of Artificial Sequence: Synthetic oligonucleotide
ggaaucagaugccagcacc

SEQ ID NO: 2444109 - RNA, 19 nt, Artificial Sequence
  Description of Artificial Sequence: Synthetic oligonucleotide
aucagaugccagcaccuag

SEQ ID NO: 2444110 - RNA, 19 nt, Artificial Sequence
  Description of Artificial Sequence: Synthetic oligonucleotide
cuuccgauggcagagaaga

SEQ ID NO: 2444111 - RNA, 19 nt, Artificial Sequence
  Description of Artificial Sequence: Synthetic oligonucleotide
ucgagccuuagccaggcac

SEQ ID NO: 2444112 - RNA, 19 nt, Artificial Sequence
  Description of Artificial Sequence: Synthetic oligonucleotide
cagagugaggaugaguggc

SEQ ID NO: 2444113 - RNA, 19 nt, Artificial Sequence
  Description of Artificial Sequence: Synthetic oligonucleotide
augagguaggccagcacgc

SEQ ID NO: 2444114 - RNA, 19 nt, Artificial Sequence
  Description of Artificial Sequence: Synthetic oligonucleotide
agguacugaaggcucacca

SEQ ID NO: 2444115 - RNA, 19 nt, Artificial Sequence
  Description of Artificial Sequence: Synthetic oligonucleotide
guaagcaaggccacccagg

SEQ ID NO: 2444116 - RNA, 19 nt, Artificial Sequence
  Description of Artificial Sequence: Synthetic oligonucleotide
aaaggccccuuccgauggc

SEQ ID NO: 2444117 - RNA, 19 nt, Artificial Sequence
  Description of Artificial Sequence: Synthetic oligonucleotide
cuucaugggugccugguac

SEQ ID NO: 2444118 - RNA, 19 nt, Artificial Sequence
  Description of Artificial Sequence: Synthetic oligonucleotide
caaaggccccuuccgaugg

SEQ ID NO: 2444119 - RNA, 19 nt, Artificial Sequence
  Description of Artificial Sequence: Synthetic oligonucleotide
cagccguccaccaaaugag

SEQ ID NO: 2444120 - RNA, 19 nt, Artificial Sequence
  Description of Artificial Sequence: Synthetic oligonucleotide
acgggcaacaggcuuuguc

SEQ ID NO: 2444121 - RNA, 19 nt, Artificial Sequence
  Description of Artificial Sequence: Synthetic oligonucleotide
ugggcuucauccucugcag

SEQ ID NO: 2444122 - RNA, 19 nt, Artificial Sequence
  Description of Artificial Sequence: Synthetic oligonucleotide
aguggcgucagguacugaa

SEQ ID NO: 2444123 - RNA, 19 nt, Artificial Sequence
  Description of Artificial Sequence: Synthetic oligonucleotide
guggaaauagaggccaaag

SEQ ID NO: 2444124 - RNA, 19 nt, Artificial Sequence
  Description of Artificial Sequence: Synthetic oligonucleotide
acaggaagcugguguacag

SEQ ID NO: 2444125 - RNA, 19 nt, Artificial Sequence
  Description of Artificial Sequence: Synthetic oligonucleotide
ucuagggucugaaguacau

SEQ ID NO: 2444126 - RNA, 19 nt, Artificial Sequence
  Description of Artificial Sequence: Synthetic oligonucleotide
aggguccaagaguagccac

SEQ ID NO: 2444127 - RNA, 19 nt, Artificial Sequence
  Description of Artificial Sequence: Synthetic oligonucleotide
uccacucgagccuuagcca

SEQ ID NO: 2444128 - RNA, 19 nt, Artificial Sequence
  Description of Artificial Sequence: Synthetic oligonucleotide
auuaggaagcugccaggug

SEQ ID NO: 2444129 - RNA, 19 nt, Artificial Sequence
  Description of Artificial Sequence: Synthetic oligonucleotide
gugggguuugagcaggacc

SEQ ID NO: 2444130 - RNA, 19 nt, Artificial Sequence
  Description of Artificial Sequence: Synthetic oligonucleotide
acggguccaugaucuaggc

SEQ ID NO: 2444131 - RNA, 19 nt, Artificial Sequence
  Description of Artificial Sequence: Synthetic oligonucleotide
agucaaaggccccuuccga

SEQ ID NO: 2444132 - RNA, 19 nt, Artificial Sequence
  Description of Artificial Sequence: Synthetic oligonucleotide
ugcugaaucucgcgggccu

SEQ ID NO: 2444133 - RNA, 19 nt, Artificial Sequence
  Description of Artificial Sequence: Synthetic oligonucleotide
agagugaggaugaguggcg

SEQ ID NO: 2444134 - RNA, 19 nt, Artificial Sequence
  Description of Artificial Sequence: Synthetic oligonucleotide
cacagggugcacaggggcg

SEQ ID NO: 2444135 - RNA, 19 nt, Artificial Sequence
  Description of Artificial Sequence: Synthetic oligonucleotide
accgucacauagcaguaga

SEQ ID NO: 2444136 - RNA, 19 nt, Artificial Sequence
  Description of Artificial Sequence: Synthetic oligonucleotide
gugucugaggacuggggug

SEQ ID NO: 2444137 - RNA, 19 nt, Artificial Sequence
  Description of Artificial Sequence: Synthetic oligonucleotide
cacccuuaucccuagguca

SEQ ID NO: 2444138 - RNA, 19 nt, Artificial Sequence
  Description of Artificial Sequence: Synthetic oligonucleotide
cucgaugcggccagccucc

SEQ ID NO: 2444139 - RNA, 19 nt, Artificial Sequence
  Description of Artificial Sequence: Synthetic oligonucleotide
accuaguggcaucacauua

SEQ ID NO: 2444140 - RNA, 19 nt, Artificial Sequence
  Description of Artificial Sequence: Synthetic oligonucleotide
aggggcgacaggaagcugg

SEQ ID NO: 2444141 - RNA, 19 nt, Artificial Sequence
  Description of Artificial Sequence: Synthetic oligonucleotide
cuaccagcacccagaggcg

SEQ ID NO: 2444142 - RNA, 19 nt, Artificial Sequence
  Description of Artificial Sequence: Synthetic oligonucleotide
uaguggcaucacauuagga

SEQ ID NO: 2444143 - RNA, 19 nt, Artificial Sequence
  Description of Artificial Sequence: Synthetic oligonucleotide
accgcuagccgcagcaggc

SEQ ID NO: 2444144 - RNA, 19 nt, Artificial Sequence
  Description of Artificial Sequence: Synthetic oligonucleotide
gggguuguaagcaaggcca

SEQ ID NO: 2444145 - RNA, 19 nt, Artificial Sequence
  Description of Artificial Sequence: Synthetic oligonucleotide
agcgucuugagcagcagug

SEQ ID NO: 2444146 - RNA, 19 nt, Artificial Sequence
  Description of Artificial Sequence: Synthetic oligonucleotide
acaguaagucacgggcaac

SEQ ID NO: 2444147 - RNA, 19 nt, Artificial Sequence
  Description of Artificial Sequence: Synthetic oligonucleotide
ccuaguggcaucacauuag

SEQ ID NO: 2444148 - RNA, 19 nt, Artificial Sequence
  Description of Artificial Sequence: Synthetic oligonucleotide
gguguacaggagcagcugc

SEQ ID NO: 2444149 - RNA, 19 nt, Artificial Sequence
  Description of Artificial Sequence: Synthetic oligonucleotide
gaaggcucaccaccgucac

SEQ ID NO: 2444150 - RNA, 19 nt, Artificial Sequence
  Description of Artificial Sequence: Synthetic oligonucleotide
caucuagggucugaaguac

SEQ ID NO: 2444151 - RNA, 19 nt, Artificial Sequence
  Description of Artificial Sequence: Synthetic oligonucleotide
gaagagggguuguaagcaa

SEQ ID NO: 2444152 - RNA, 19 nt, Artificial Sequence
  Description of Artificial Sequence: Synthetic oligonucleotide
uugcgaagcuguuccacuc

SEQ ID NO: 2444153 - RNA, 19 nt, Artificial Sequence
  Description of Artificial Sequence: Synthetic oligonucleotide
uaggccagcacgccacgga

SEQ ID NO: 2444154 - RNA, 19 nt, Artificial Sequence
  Description of Artificial Sequence: Synthetic oligonucleotide
cugguacaguaagucacgg

SEQ ID NO: 2444155 - RNA, 19 nt, Artificial Sequence
  Description of Artificial Sequence: Synthetic oligonucleotide
accaaaugagguaggccag

SEQ ID NO: 2444156 - RNA, 19 nt, Artificial Sequence
  Description of Artificial Sequence: Synthetic oligonucleotide
guagacccggaccacccgc

SEQ ID NO: 2444157 - RNA, 19 nt, Artificial Sequence
  Description of Artificial Sequence: Synthetic oligonucleotide
agcaccuaguggcaucaca

SEQ ID NO: 2444158 - RNA, 19 nt, Artificial Sequence
  Description of Artificial Sequence: Synthetic oligonucleotide
augggugccugguacagua

SEQ ID NO: 2444159 - RNA, 19 nt, Artificial Sequence
  Description of Artificial Sequence: Synthetic oligonucleotide
ccugguacaguaagucacg

SEQ ID NO: 2444160 - RNA, 19 nt, Artificial Sequence
  Description of Artificial Sequence: Synthetic oligonucleotide
cacgccacggaggaagagg

SEQ ID NO: 2444161 - RNA, 19 nt, Artificial Sequence
  Description of Artificial Sequence: Synthetic oligonucleotide
gagggguuguaagcaaggc

SEQ ID NO: 2444162 - RNA, 19 nt, Artificial Sequence
  Description of Artificial Sequence: Synthetic oligonucleotide
gguacugaaggcucaccac

SEQ ID NO: 2444163 - RNA, 19 nt, Artificial Sequence
  Description of Artificial Sequence: Synthetic oligonucleotide
uguuccacucgagccuuag

SEQ ID NO: 2444164 - RNA, 19 nt, Artificial Sequence
  Description of Artificial Sequence: Synthetic oligonucleotide
guacaggagcagcugcagc

SEQ ID NO: 2444165 - RNA, 19 nt, Artificial Sequence
  Description of Artificial Sequence: Synthetic oligonucleotide
acgccacggaggaagaggg

SEQ ID NO: 2444166 - RNA, 19 nt, Artificial Sequence
  Description of Artificial Sequence: Synthetic oligonucleotide
cugguggaaauagaggcca

SEQ ID NO: 2444167 - RNA, 19 nt, Artificial Sequence
  Description of Artificial Sequence: Synthetic oligonucleotide
ggugagagaggguggggag

SEQ ID NO: 2444168 - RNA, 19 nt, Artificial Sequence
  Description of Artificial Sequence: Synthetic oligonucleotide
ugagguaggccagcacgcc

SEQ ID NO: 2444169 - RNA, 19 nt, Artificial Sequence
  Description of Artificial Sequence: Synthetic oligonucleotide
gcagccguccaccaaauga

SEQ ID NO: 2444170 - RNA, 19 nt, Artificial Sequence
  Description of Artificial Sequence: Synthetic oligonucleotide
ggggaaccugauucaacgg

SEQ ID NO: 2444171 - RNA, 19 nt, Artificial Sequence
  Description of Artificial Sequence: Synthetic oligonucleotide
caacggguccaugaucuag

SEQ ID NO: 2444172 - RNA, 19 nt, Artificial Sequence
  Description of Artificial Sequence: Synthetic oligonucleotide
caggugcugguggaaauag

SEQ ID NO: 2444173 - RNA, 19 nt, Artificial Sequence
  Description of Artificial Sequence: Synthetic oligonucleotide
uccaugaucuaggcacuga

SEQ ID NO: 2444174 - RNA, 19 nt, Artificial Sequence
  Description of Artificial Sequence: Synthetic oligonucleotide
cacucgagccuuagccagg

SEQ ID NO: 2444175 - RNA, 19 nt, Artificial Sequence
  Description of Artificial Sequence: Synthetic oligonucleotide
gauucaacggguccaugau

SEQ ID NO: 2444176 - RNA, 19 nt, Artificial Sequence
  Description of Artificial Sequence: Synthetic oligonucleotide
guacaguaagucacgggca

SEQ ID NO: 2444177 - RNA, 19 nt, Artificial Sequence
  Description of Artificial Sequence: Synthetic oligonucleotide
ccaagaguagccacccagc

SEQ ID NO: 2444178 - RNA, 19 nt, Artificial Sequence
  Description of Artificial Sequence: Synthetic oligonucleotide
ugaguggcgucagguacug

SEQ ID NO: 2444179 - RNA, 19 nt, Artificial Sequence
  Description of Artificial Sequence: Synthetic oligonucleotide
gaaccugauucaacggguc

SEQ ID NO: 2444180 - RNA, 19 nt, Artificial Sequence
  Description of Artificial Sequence: Synthetic oligonucleotide
augcggccagccuccuugc

SEQ ID NO: 2444181 - RNA, 19 nt, Artificial Sequence
  Description of Artificial Sequence: Synthetic oligonucleotide
acacaggggacagucccag

SEQ ID NO: 2444182 - RNA, 19 nt, Artificial Sequence
  Description of Artificial Sequence: Synthetic oligonucleotide
aaucagaugccagcaccua

SEQ ID NO: 2444183 - RNA, 19 nt, Artificial Sequence
  Description of Artificial Sequence: Synthetic oligonucleotide
gacaggaagcugguguaca

SEQ ID NO: 2444184 - RNA, 19 nt, Artificial Sequence
  Description of Artificial Sequence: Synthetic oligonucleotide
ggaagagggguuguaagca

SEQ ID NO: 2444185 - RNA, 19 nt, Artificial Sequence
  Description of Artificial Sequence: Synthetic oligonucleotide
uagacccggaccacccgcu

SEQ ID NO: 2444186 - RNA, 19 nt, Artificial Sequence
  Description of Artificial Sequence: Synthetic oligonucleotide
ugcaggguccacagagauc

SEQ ID NO: 2444187 - RNA, 19 nt, Artificial Sequence
  Description of Artificial Sequence: Synthetic oligonucleotide
gaggcgcagggagucaaag

SEQ ID NO: 2444188 - RNA, 19 nt, Artificial Sequence
  Description of Artificial Sequence: Synthetic oligonucleotide
gcucaccaccgucacauag

SEQ ID NO: 2444189 - RNA, 19 nt, Artificial Sequence
  Description of Artificial Sequence: Synthetic oligonucleotide
caggggaaccugauucaac

SEQ ID NO: 2444190 - RNA, 19 nt, Artificial Sequence
  Description of Artificial Sequence: Synthetic oligonucleotide
gucaccgcuagccgcagca

SEQ ID NO: 2444191 - RNA, 19 nt, Artificial Sequence
  Description of Artificial Sequence: Synthetic oligonucleotide
gagccuuagccaggcacag

SEQ ID NO: 2444192 - RNA, 19 nt, Artificial Sequence
  Description of Artificial Sequence: Synthetic oligonucleotide
caccgcuagccgcagcagg

SEQ ID NO: 2444193 - RNA, 19 nt, Artificial Sequence
  Description of Artificial Sequence: Synthetic oligonucleotide
gguuugagcaggacccagg

SEQ ID NO: 2444194 - RNA, 19 nt, Artificial Sequence
  Description of Artificial Sequence: Synthetic oligonucleotide
gcuuuguccagagccacag

SEQ ID NO: 2444195 - RNA, 19 nt, Artificial Sequence
  Description of Artificial Sequence: Synthetic oligonucleotide
agugggguuugagcaggac

SEQ ID NO: 2444196 - RNA, 19 nt, Artificial Sequence
  Description of Artificial Sequence: Synthetic oligonucleotide
gaaucagaugccagcaccu

SEQ ID NO: 2444197 - RNA, 19 nt, Artificial Sequence
  Description of Artificial Sequence: Synthetic oligonucleotide
aggugagagagggugggga

SEQ ID NO: 2444198 - RNA, 19 nt, Artificial Sequence
  Description of Artificial Sequence: Synthetic oligonucleotide
ccaggguccaagaguagcc

SEQ ID NO: 2444199 - RNA, 19 nt, Artificial Sequence
  Description of Artificial Sequence: Synthetic oligonucleotide
acaggggcgacaggaagcu

SEQ ID NO: 2444200 - RNA, 19 nt, Artificial Sequence
  Description of Artificial Sequence: Synthetic oligonucleotide
cacccgcugcugaaucucg

SEQ ID NO: 2444201 - RNA, 19 nt, Artificial Sequence
  Description of Artificial Sequence: Synthetic oligonucleotide
agguguggccgggucaccg

SEQ ID NO: 2444202 - RNA, 19 nt, Artificial Sequence
  Description of Artificial Sequence: Synthetic oligonucleotide
caggaaucagaugccagca

SEQ ID NO: 2444203 - RNA, 19 nt, Artificial Sequence
  Description of Artificial Sequence: Synthetic oligonucleotide
guagccacccagcgucuug

SEQ ID NO: 2444204 - RNA, 19 nt, Artificial Sequence
  Description of Artificial Sequence: Synthetic oligonucleotide
ugcgaccugggcugcaguc

SEQ ID NO: 2444205 - RNA, 19 nt, Artificial Sequence
  Description of Artificial Sequence: Synthetic oligonucleotide
ggucaucuagggucugaag

SEQ ID NO: 2444206 - RNA, 19 nt, Artificial Sequence
  Description of Artificial Sequence: Synthetic oligonucleotide
gguccaagaguagccaccc

SEQ ID NO: 2444207 - RNA, 19 nt, Artificial Sequence
  Description of Artificial Sequence: Synthetic oligonucleotide
guggcgucagguacugaag

SEQ ID NO: 2444208 - RNA, 19 nt, Artificial Sequence
  Description of Artificial Sequence: Synthetic oligonucleotide
gacccggaccacccgcugc

SEQ ID NO: 2444209 - RNA, 19 nt, Artificial Sequence
  Description of Artificial Sequence: Synthetic oligonucleotide
ucacgggcaacaggcuuug

SEQ ID NO: 2444210 - RNA, 19 nt, Artificial Sequence
  Description of Artificial Sequence: Synthetic oligonucleotide
augaguggcgucagguacu

SEQ ID NO: 2444211 - RNA, 19 nt, Artificial Sequence
  Description of Artificial Sequence: Synthetic oligonucleotide
agccguccaccaaaugagg

SEQ ID NO: 2444212 - RNA, 19 nt, Artificial Sequence
  Description of Artificial Sequence: Synthetic oligonucleotide
cagcacuaccagcacccag

SEQ ID NO: 2444213 - RNA, 19 nt, Artificial Sequence
  Description of Artificial Sequence: Synthetic oligonucleotide
ucgcgggccucgaugcggc

SEQ ID NO: 2444214 - RNA, 19 nt, Artificial Sequence
  Description of Artificial Sequence: Synthetic oligonucleotide
uccuugcgaagcuguucca

SEQ ID NO: 2444215 - RNA, 19 nt, Artificial Sequence
  Description of Artificial Sequence: Synthetic oligonucleotide
cacccagcgucuugagcag

SEQ ID NO: 2444216 - RNA, 19 nt, Artificial Sequence
  Description of Artificial Sequence: Synthetic oligonucleotide
acagggugcacaggggcga

SEQ ID NO: 2444217 - RNA, 19 nt, Artificial Sequence
  Description of Artificial Sequence: Synthetic oligonucleotide
accacccgcugcugaaucu

SEQ ID NO: 2444218 - RNA, 19 nt, Artificial Sequence
  Description of Artificial Sequence: Synthetic oligonucleotide
gaccacccgcugcugaauc

SEQ ID NO: 2444219 - RNA, 19 nt, Artificial Sequence
  Description of Artificial Sequence: Synthetic oligonucleotide
gcugcugaaucucgcgggc

SEQ ID NO: 2444220 - RNA, 19 nt, Artificial Sequence
  Description of Artificial Sequence: Synthetic oligonucleotide
aagucacgggcaacaggcu

SEQ ID NO: 2444221 - RNA, 19 nt, Artificial Sequence
  Description of Artificial Sequence: Synthetic oligonucleotide
cacuaccagcacccagagg

SEQ ID NO: 2444222 - RNA, 19 nt, Artificial Sequence
  Description of Artificial Sequence: Synthetic oligonucleotide
ggucauguucuucaugggu

SEQ ID NO: 2444223 - RNA, 19 nt, Artificial Sequence
  Description of Artificial Sequence: Synthetic oligonucleotide
agggucugaaguacauaca

SEQ ID NO: 2444224 - RNA, 19 nt, Artificial Sequence
  Description of Artificial Sequence: Synthetic oligonucleotide
acccggaccacccgcugcu

SEQ ID NO: 2444225 - RNA, 19 nt, Artificial Sequence
  Description of Artificial Sequence: Synthetic oligonucleotide
aucuagggucugaaguaca

SEQ ID NO: 2444226 - RNA, 19 nt, Artificial Sequence
  Description of Artificial Sequence: Synthetic oligonucleotide
cuugcgaagcuguuccacu

SEQ ID NO: 2444227 - RNA, 19 nt, Artificial Sequence
  Description of Artificial Sequence: Synthetic oligonucleotide
ucaccgcuagccgcagcag

SEQ ID NO: 2444228 - RNA, 19 nt, Artificial Sequence
  Description of Artificial Sequence: Synthetic oligonucleotide
gcacaggggcgacaggaag

SEQ ID NO: 2444229 - RNA, 19 nt, Artificial Sequence
  Description of Artificial Sequence: Synthetic oligonucleotide
guggccgggucaccgcuag

SEQ ID NO: 2444230 - RNA, 19 nt, Artificial Sequence
  Description of Artificial Sequence: Synthetic oligonucleotide
acccagcgucuugagcagc

SEQ ID NO: 2444231 - RNA, 19 nt, Artificial Sequence
  Description of Artificial Sequence: Synthetic oligonucleotide
cugcugaaucucgcgggcc

SEQ ID NO: 2444232 - RNA, 19 nt, Artificial Sequence
  Description of Artificial Sequence: Synthetic oligonucleotide
gaccccugcgaccugggcu

SEQ ID NO: 2444233 - RNA, 19 nt, Artificial Sequence
  Description of Artificial Sequence: Synthetic oligonucleotide
gaggguggggaguccccac

SEQ ID NO: 2444234 - RNA, 19 nt, Artificial Sequence
  Description of Artificial Sequence: Synthetic oligonucleotide
ucaacggguccaugaucua

SEQ ID NO: 2444235 - RNA, 19 nt, Artificial Sequence
  Description of Artificial Sequence: Synthetic oligonucleotide
guaggccagcacgccacgg

SEQ ID NO: 2444236 - RNA, 19 nt, Artificial Sequence
  Description of Artificial Sequence: Synthetic oligonucleotide
gguuguaagcaaggccacc

SEQ ID NO: 2444237 - RNA, 19 nt, Artificial Sequence
  Description of Artificial Sequence: Synthetic oligonucleotide
gguaggccagcacgccacg

SEQ ID NO: 2444238 - RNA, 19 nt, Artificial Sequence
  Description of Artificial Sequence: Synthetic oligonucleotide
caccgucacauagcaguag

SEQ ID NO: 2444239 - RNA, 19 nt, Artificial Sequence
  Description of Artificial Sequence: Synthetic oligonucleotide
ugaaucucgcgggccucga

SEQ ID NO: 2444240 - RNA, 19 nt, Artificial Sequence
  Description of Artificial Sequence: Synthetic oligonucleotide
ugggugccugguacaguaa

SEQ ID NO: 2444241 - RNA, 19 nt, Artificial Sequence
  Description of Artificial Sequence: Synthetic oligonucleotide
aggucaucuagggucugaa

SEQ ID NO: 2444242 - RNA, 19 nt, Artificial Sequence
  Description of Artificial Sequence: Synthetic oligonucleotide
aucuaggcacugaggugag

SEQ ID NO: 2444243 - RNA, 19 nt, Artificial Sequence
  Description of Artificial Sequence: Synthetic oligonucleotide
cguccaccaaaugagguag

SEQ ID NO: 2444244 - RNA, 19 nt, Artificial Sequence
  Description of Artificial Sequence: Synthetic oligonucleotide
agccuuagccaggcacagg

SEQ ID NO: 2444245 - RNA, 19 nt, Artificial Sequence
  Description of Artificial Sequence: Synthetic oligonucleotide
cauuaggaagcugccaggu

SEQ ID NO: 2444246 - RNA, 19 nt, Artificial Sequence
  Description of Artificial Sequence: Synthetic oligonucleotide
agacccggaccacccgcug

SEQ ID NO: 2444247 - RNA, 19 nt, Artificial Sequence
  Description of Artificial Sequence: Synthetic oligonucleotide
guccaugaucuaggcacug

SEQ ID NO: 2444248 - RNA, 19 nt, Artificial Sequence
  Description of Artificial Sequence: Synthetic oligonucleotide
caccaccgucacauagcag

SEQ ID NO: 2444249 - RNA, 19 nt, Artificial Sequence
  Description of Artificial Sequence: Synthetic oligonucleotide
gagagaggguggggagucc

SEQ ID NO: 2444250 - RNA, 19 nt, Artificial Sequence
  Description of Artificial Sequence: Synthetic oligonucleotide
ccaaaugagguaggccagc

SEQ ID NO: 2444251 - RNA, 19 nt, Artificial Sequence
  Description of Artificial Sequence: Synthetic oligonucleotide
ucuaggcacugaggugaga

SEQ ID NO: 2444252 - RNA, 19 nt, Artificial Sequence
  Description of Artificial Sequence: Synthetic oligonucleotide
gccuuagccaggcacaggu

SEQ ID NO: 2444253 - RNA, 19 nt, Artificial Sequence
  Description of Artificial Sequence: Synthetic oligonucleotide
cgcugcugaaucucgcggg

SEQ ID NO: 2444254 - RNA, 19 nt, Artificial Sequence
  Description of Artificial Sequence: Synthetic oligonucleotide
ucugaggacuggggugggu

SEQ ID NO: 2444255 - RNA, 19 nt, Artificial Sequence
  Description of Artificial Sequence: Synthetic oligonucleotide
cugauucaacggguccaug

SEQ ID NO: 2444256 - RNA, 19 nt, Artificial Sequence
  Description of Artificial Sequence: Synthetic oligonucleotide
ccacccuuaucccuagguc

SEQ ID NO: 2444257 - RNA, 19 nt, Artificial Sequence
  Description of Artificial Sequence: Synthetic oligonucleotide
uguggccgggucaccgcua

SEQ ID NO: 2444258 - RNA, 19 nt, Artificial Sequence
  Description of Artificial Sequence: Synthetic oligonucleotide
ccuuccgauggcagagaag

SEQ ID NO: 2444259 - RNA, 19 nt, Artificial Sequence
  Description of Artificial Sequence: Synthetic oligonucleotide
gguguggccgggucaccgc

SEQ ID NO: 2444260 - RNA, 19 nt, Artificial Sequence
  Description of Artificial Sequence: Synthetic oligonucleotide
gccagcacgccacggagga

SEQ ID NO: 2444261 - RNA, 19 nt, Artificial Sequence
  Description of Artificial Sequence: Synthetic oligonucleotide
cuuaucccuaggucaucua

SEQ ID NO: 2444262 - RNA, 19 nt, Artificial Sequence
  Description of Artificial Sequence: Synthetic oligonucleotide
gguccacagagaucaaagu

SEQ ID NO: 2444263 - RNA, 19 nt, Artificial Sequence
  Description of Artificial Sequence: Synthetic oligonucleotide
ccucgaugcggccagccuc

SEQ ID NO: 2444264 - RNA, 19 nt, Artificial Sequence
  Description of Artificial Sequence: Synthetic oligonucleotide
ccgucacauagcaguagac

SEQ ID NO: 2444265 - RNA, 19 nt, Artificial Sequence
  Description of Artificial Sequence: Synthetic oligonucleotide
ggugcacaggggcgacagg

SEQ ID NO: 2444266 - RNA, 19 nt, Artificial Sequence
  Description of Artificial Sequence: Synthetic oligonucleotide
ggacccaggguccaagagu

SEQ ID NO: 2444267 - RNA, 19 nt, Artificial Sequence
  Description of Artificial Sequence: Synthetic oligonucleotide
caggguccaagaguagcca

SEQ ID NO: 2444268 - RNA, 19 nt, Artificial Sequence
  Description of Artificial Sequence: Synthetic oligonucleotide
ggguuguaagcaaggccac

SEQ ID NO: 2444269 - RNA, 19 nt, Artificial Sequence
  Description of Artificial Sequence: Synthetic oligonucleotide
acggaggaagagggguugu

SEQ ID NO: 2444270 - RNA, 19 nt, Artificial Sequence
  Description of Artificial Sequence: Synthetic oligonucleotide
cgucuugagcagcagugug

SEQ ID NO: 2444271 - RNA, 19 nt, Artificial Sequence
  Description of Artificial Sequence: Synthetic oligonucleotide
gccccuuccgauggcagag

SEQ ID NO: 2444272 - RNA, 19 nt, Artificial Sequence
  Description of Artificial Sequence: Synthetic oligonucleotide
gagugaggaugaguggcgu

SEQ ID NO: 2444273 - RNA, 19 nt, Artificial Sequence
  Description of Artificial Sequence: Synthetic oligonucleotide
ccgggucaccgcuagccgc

SEQ ID NO: 2444274 - RNA, 19 nt, Artificial Sequence
  Description of Artificial Sequence: Synthetic oligonucleotide
cuagggucugaaguacaua

SEQ ID NO: 2444275 - RNA, 19 nt, Artificial Sequence
  Description of Artificial Sequence: Synthetic oligonucleotide
ugccagcaccuaguggcau

SEQ ID NO: 2444276 - RNA, 19 nt, Artificial Sequence
  Description of Artificial Sequence: Synthetic oligonucleotide
caggcacagguaggccugc

SEQ ID NO: 2444277 - RNA, 19 nt, Artificial Sequence
  Description of Artificial Sequence: Synthetic oligonucleotide
ggccagcacgccacggagg

SEQ ID NO: 2444278 - RNA, 19 nt, Artificial Sequence
  Description of Artificial Sequence: Synthetic oligonucleotide
gucccagcccugguggaca

SEQ ID NO: 2444279 - RNA, 19 nt, Artificial Sequence
  Description of Artificial Sequence: Synthetic oligonucleotide
cugcaggguccacagagau

SEQ ID NO: 2444280 - RNA, 19 nt, Artificial Sequence
  Description of Artificial Sequence: Synthetic oligonucleotide
uggccgggucaccgcuagc

SEQ ID NO: 2444281 - RNA, 19 nt, Artificial Sequence
  Description of Artificial Sequence: Synthetic oligonucleotide
ggguccagugggguuugag

SEQ ID NO: 2444282 - RNA, 19 nt, Artificial Sequence
  Description of Artificial Sequence: Synthetic oligonucleotide
guggguccagugggguuug

SEQ ID NO: 2444283 - RNA, 19 nt, Artificial Sequence
  Description of Artificial Sequence: Synthetic oligonucleotide
gugagagaggguggggagu

SEQ ID NO: 2444284 - RNA, 19 nt, Artificial Sequence
  Description of Artificial Sequence: Synthetic oligonucleotide
cgagccuuagccaggcaca

SEQ ID NO: 2444285 - RNA, 19 nt, Artificial Sequence
  Description of Artificial Sequence: Synthetic oligonucleotide
acccaggguccaagaguag

SEQ ID NO: 2444286 - RNA, 19 nt, Artificial Sequence
  Description of Artificial Sequence: Synthetic oligonucleotide
ggcaucacauuaggaagcu

SEQ ID NO: 2444287 - RNA, 19 nt, Artificial Sequence
  Description of Artificial Sequence: Synthetic oligonucleotide
ggcagccguccaccaaaug

SEQ ID NO: 2444288 - RNA, 19 nt, Artificial Sequence
  Description of Artificial Sequence: Synthetic oligonucleotide
gcaccuaguggcaucacau

SEQ ID NO: 2444289 - RNA, 19 nt, Artificial Sequence
  Description of Artificial Sequence: Synthetic oligonucleotide
cagugggguuugagcagga

SEQ ID NO: 2444290 - RNA, 19 nt, Artificial Sequence
  Description of Artificial Sequence: Synthetic oligonucleotide
gcggccagccuccuugcga

SEQ ID NO: 2444291 - RNA, 19 nt, Artificial Sequence
  Description of Artificial Sequence: Synthetic oligonucleotide
cagggugcacaggggcgac

SEQ ID NO: 2444292 - RNA, 19 nt, Artificial Sequence
  Description of Artificial Sequence: Synthetic oligonucleotide
gucacgggcaacaggcuuu

SEQ ID NO: 2444293 - RNA, 19 nt, Artificial Sequence
  Description of Artificial Sequence: Synthetic oligonucleotide
gaaucucgcgggccucgau

SEQ ID NO: 2444294 - RNA, 19 nt, Artificial Sequence
  Description of Artificial Sequence: Synthetic oligonucleotide
gcgucagguacugaaggcu

SEQ ID NO: 2444295 - RNA, 19 nt, Artificial Sequence
  Description of Artificial Sequence: Synthetic oligonucleotide
ggccccuuccgauggcaga

SEQ ID NO: 2444296 - RNA, 19 nt, Artificial Sequence
  Description of Artificial Sequence: Synthetic oligonucleotide
guguggccgggucaccgcu

SEQ ID NO: 2444297 - RNA, 19 nt, Artificial Sequence
  Description of Artificial Sequence: Synthetic oligonucleotide
cagguguggccgggucacc

SEQ ID NO: 2444298 - RNA, 19 nt, Artificial Sequence
  Description of Artificial Sequence: Synthetic oligonucleotide
ccguccaccaaaugaggua

SEQ ID NO: 2444299 - RNA, 19 nt, Artificial Sequence
  Description of Artificial Sequence: Synthetic oligonucleotide
caccuaguggcaucacauu

SEQ ID NO: 2444300 - RNA, 19 nt, Artificial Sequence
  Description of Artificial Sequence: Synthetic oligonucleotide
ggugccugguacaguaagu

SEQ ID NO: 2444301 - RNA, 19 nt, Artificial Sequence
  Description of Artificial Sequence: Synthetic oligonucleotide
ggucaccgcuagccgcagc

SEQ ID NO: 2444302 - RNA, 19 nt, Artificial Sequence
  Description of Artificial Sequence: Synthetic oligonucleotide
agaggcgcagggagucaaa

SEQ ID NO: 2444303 - RNA, 19 nt, Artificial Sequence
  Description of Artificial Sequence: Synthetic oligonucleotide
ucgaugcggccagccuccu

SEQ ID NO: 2444304 - RNA, 19 nt, Artificial Sequence
  Description of Artificial Sequence: Synthetic oligonucleotide
gcuagccgcagcaggcaca

SEQ ID NO: 2444305 - RNA, 19 nt, Artificial Sequence
  Description of Artificial Sequence: Synthetic oligonucleotide
gcugaaucucgcgggccuc

SEQ ID NO: 2444306 - RNA, 19 nt, Artificial Sequence
  Description of Artificial Sequence: Synthetic oligonucleotide
gggguuugagcaggaccca

SEQ ID NO: 2444307 - RNA, 19 nt, Artificial Sequence
  Description of Artificial Sequence: Synthetic oligonucleotide
gcugcagucugcugggcuu

SEQ ID NO: 2444308 - RNA, 19 nt, Artificial Sequence
  Description of Artificial Sequence: Synthetic oligonucleotide
ggccucgaugcggccagcc

SEQ ID NO: 2444309 - RNA, 19 nt, Artificial Sequence
  Description of Artificial Sequence: Synthetic oligonucleotide
aggcagccguccaccaaau

SEQ ID NO: 2444310 - RNA, 19 nt, Artificial Sequence
  Description of Artificial Sequence: Synthetic oligonucleotide
cagcaccuaguggcaucac

SEQ ID NO: 2444311 - RNA, 19 nt, Artificial Sequence
  Description of Artificial Sequence: Synthetic oligonucleotide
caggggcgacaggaagcug

SEQ ID NO: 2444312 - RNA, 19 nt, Artificial Sequence
  Description of Artificial Sequence: Synthetic oligonucleotide
ccacccgcugcugaaucuc

SEQ ID NO: 2444313 - RNA, 19 nt, Artificial Sequence
  Description of Artificial Sequence: Synthetic oligonucleotide
ggggacagucccagcccug

SEQ ID NO: 2444314 - RNA, 19 nt, Artificial Sequence
  Description of Artificial Sequence: Synthetic oligonucleotide
gaguggcgucagguacuga

SEQ ID NO: 2444315 - RNA, 19 nt, Artificial Sequence
  Description of Artificial Sequence: Synthetic oligonucleotide
ccuuaucccuaggucaucu

SEQ ID NO: 2444316 - RNA, 19 nt, Artificial Sequence
  Description of Artificial Sequence: Synthetic oligonucleotide
gccguccaccaaaugaggu

SEQ ID NO: 2444317 - RNA, 19 nt, Artificial Sequence
  Description of Artificial Sequence: Synthetic oligonucleotide
ccaccgucacauagcagua

SEQ ID NO: 2444318 - RNA, 19 nt, Artificial Sequence
  Description of Artificial Sequence: Synthetic oligonucleotide
gguggggaguccccacccu

SEQ ID NO: 2444319 - RNA, 19 nt, Artificial Sequence
  Description of Artificial Sequence: Synthetic oligonucleotide
cagcccugguggacaggaa

SEQ ID NO: 2444320 - RNA, 19 nt, Artificial Sequence
  Description of Artificial Sequence: Synthetic oligonucleotide
cgcuagccgcagcaggcac

SEQ ID NO: 2444321 - RNA, 19 nt, Artificial Sequence
  Description of Artificial Sequence: Synthetic oligonucleotide
cccuuccgauggcagagaa

SEQ ID NO: 2444322 - RNA, 19 nt, Artificial Sequence
  Description of Artificial Sequence: Synthetic oligonucleotide
ccaggggaaccugauucaa

SEQ ID NO: 2444323 - RNA, 19 nt, Artificial Sequence
  Description of Artificial Sequence: Synthetic oligonucleotide
gcgucuugagcagcagugu

SEQ ID NO: 2444324 - RNA, 19 nt, Artificial Sequence
  Description of Artificial Sequence: Synthetic oligonucleotide
cgggucaccgcuagccgca

SEQ ID NO: 2444325 - RNA, 19 nt, Artificial Sequence
  Description of Artificial Sequence: Synthetic oligonucleotide
ccuuagccaggcacaggua

SEQ ID NO: 2444326 - RNA, 19 nt, Artificial Sequence
  Description of Artificial Sequence: Synthetic oligonucleotide
cccuuaucccuaggucauc

SEQ ID NO: 2444327 - RNA, 19 nt, Artificial Sequence
  Description of Artificial Sequence: Synthetic oligonucleotide
gcgaccugggcugcagucu

SEQ ID NO: 2444328 - RNA, 19 nt, Artificial Sequence
  Description of Artificial Sequence: Synthetic oligonucleotide
cugcgaccugggcugcagu

SEQ ID NO: 2444329 - RNA, 19 nt, Artificial Sequence
  Description of Artificial Sequence: Synthetic oligonucleotide
cggguccaugaucuaggca

SEQ ID NO: 2444330 - RNA, 19 nt, Artificial Sequence
  Description of Artificial Sequence: Synthetic oligonucleotide
gcgggccucgaugcggcca

SEQ ID NO: 2444331 - RNA, 19 nt, Artificial Sequence
  Description of Artificial Sequence: Synthetic oligonucleotide
ggggcgacaggaagcuggu

SEQ ID NO: 2444332 - RNA, 19 nt, Artificial Sequence
  Description of Artificial Sequence: Synthetic oligonucleotide
gggguggguccaguggggu

SEQ ID NO: 2444333 - RNA, 19 nt, Artificial Sequence
  Description of Artificial Sequence: Synthetic oligonucleotide
ccacggaggaagagggguu

SEQ ID NO: 2444334 - RNA, 19 nt, Artificial Sequence
  Description of Artificial Sequence: Synthetic oligonucleotide
cggaccacccgcugcugaa

SEQ ID NO: 2444335 - RNA, 19 nt, Artificial Sequence
  Description of Artificial Sequence: Synthetic oligonucleotide
ccgcuagccgcagcaggca

SEQ ID NO: 2444336 - RNA, 19 nt, Artificial Sequence
  Description of Artificial Sequence: Synthetic oligonucleotide
ggaccacccgcugcugaau

SEQ ID NO: 2444337 - RNA, 19 nt, Artificial Sequence
  Description of Artificial Sequence: Synthetic oligonucleotide
ccccuuccgauggcagaga

SEQ ID NO: 2444338 - RNA, 19 nt, Artificial Sequence
  Description of Artificial Sequence: Synthetic oligonucleotide
cacgggcaacaggcuuugu

SEQ ID NO: 2444339 - RNA, 19 nt, Artificial Sequence
  Description of Artificial Sequence: Synthetic oligonucleotide
ccagcacgccacggaggaa

SEQ ID NO: 2444340 - RNA, 19 nt, Artificial Sequence
  Description of Artificial Sequence: Synthetic oligonucleotide
cccugcgaccugggcugca

SEQ ID NO: 2444341 - RNA, 19 nt, Artificial Sequence
  Description of Artificial Sequence: Synthetic oligonucleotide
aaugggacugcccagauac

SEQ ID NO: 2444342 - RNA, 19 nt, Artificial Sequence
  Description of Artificial Sequence: Synthetic oligonucleotide
aaagaacucaugcaguucc

SEQ ID NO: 2444343 - RNA, 19 nt, Artificial Sequence
  Description of Artificial Sequence: Synthetic oligonucleotide
aaugauguaaaacuucuca

SEQ ID NO: 2444344 - RNA, 19 nt, Artificial Sequence
  Description of Artificial Sequence: Synthetic oligonucleotide
uguaaaacuucucaaucag

SEQ ID NO: 2444345 - RNA, 19 nt, Artificial Sequence
  Description of Artificial Sequence: Synthetic oligonucleotide
aauaggcuucuucagaaag

SEQ ID NO: 2444346 - RNA, 19 nt, Artificial Sequence
  Description of Artificial Sequence: Synthetic oligonucleotide
aaagaagucucuguagccc

SEQ ID NO: 2444347 - RNA, 19 nt, Artificial Sequence
  Description of Artificial Sequence: Synthetic oligonucleotide
aagaagucucuguagcccc

SEQ ID NO: 2444348 - RNA, 19 nt, Artificial Sequence
  Description of Artificial Sequence: Synthetic oligonucleotide
uuuggaacuguaguaaugg

SEQ ID NO: 2444349 - RNA, 19 nt, Artificial Sequence
  Description of Artificial Sequence: Synthetic oligonucleotide
acaacuuggagaaaucacc

SEQ ID NO: 2444350 - RNA, 19 nt, Artificial Sequence
  Description of Artificial Sequence: Synthetic oligonucleotide
aggaacacaaugaugauuc

SEQ ID NO: 2444351 - RNA, 19 nt, Artificial Sequence
  Description of Artificial Sequence: Synthetic oligonucleotide
gaugauucuuuucuggaug

SEQ ID NO: 2444352 - RNA, 19 nt, Artificial Sequence
  Description of Artificial Sequence: Synthetic oligonucleotide
cuauuguggguucacaucc

SEQ ID NO: 2444353 - RNA, 19 nt, Artificial Sequence
  Description of Artificial Sequence: Synthetic oligonucleotide
uuuagauucuuacucaguu

SEQ ID NO: 2444354 - RNA, 19 nt, Artificial Sequence
  Description of Artificial Sequence: Synthetic oligonucleotide
gagaccaucuucuuuagac

SEQ ID NO: 2444355 - RNA, 19 nt, Artificial Sequence
  Description of Artificial Sequence: Synthetic oligonucleotide
uggcuauacagguuuaagg

SEQ ID NO: 2444356 - RNA, 19 nt, Artificial Sequence
  Description of Artificial Sequence: Synthetic oligonucleotide
cugaggagaauucacagag

SEQ ID NO: 2444357 - RNA, 19 nt, Artificial Sequence
  Description of Artificial Sequence: Synthetic oligonucleotide
uggcauucauaucacagag

SEQ ID NO: 2444358 - RNA, 19 nt, Artificial Sequence
  Description of Artificial Sequence: Synthetic oligonucleotide
gagaacggcacauucgggg

SEQ ID NO: 2444359 - RNA, 19 nt, Artificial Sequence
  Description of Artificial Sequence: Synthetic oligonucleotide
cuggguaguacaaugcugg

SEQ ID NO: 2444360 - RNA, 19 nt, Artificial Sequence
  Description of Artificial Sequence: Synthetic oligonucleotide
ucagagaacggcacauucg

SEQ ID NO: 2444361 - RNA, 19 nt, Artificial Sequence
  Description of Artificial Sequence: Synthetic oligonucleotide
uucuuuagacuuaagcccu

SEQ ID NO: 2444362 - RNA, 19 nt, Artificial Sequence
  Description of Artificial Sequence: Synthetic oligonucleotide
aucugaauggcauucauau

SEQ ID NO: 2444363 - RNA, 19 nt, Artificial Sequence
  Description of Artificial Sequence: Synthetic oligonucleotide
uggauagcggcaaucaaug

SEQ ID NO: 2444364 - RNA, 19 nt, Artificial Sequence
  Description of Artificial Sequence: Synthetic oligonucleotide
acuauuguggguucacauc

SEQ ID NO: 2444365 - RNA, 19 nt, Artificial Sequence
  Description of Artificial Sequence: Synthetic oligonucleotide
uuuagacuuaagcccuugg

SEQ ID NO: 2444366 - RNA, 19 nt, Artificial Sequence
  Description of Artificial Sequence: Synthetic oligonucleotide
uuccagacaguaaagcagc

SEQ ID NO: 2444367 - RNA, 19 nt, Artificial Sequence
  Description of Artificial Sequence: Synthetic oligonucleotide
cugugguucacacagcucc

SEQ ID NO: 2444368 - RNA, 19 nt, Artificial Sequence
  Description of Artificial Sequence: Synthetic oligonucleotide
agagacaauaggcuucuuc

SEQ ID NO: 2444369 - RNA, 19 nt, Artificial Sequence
  Description of Artificial Sequence: Synthetic oligonucleotide
ugguguuucccugacaccg

SEQ ID NO: 2444370 - RNA, 19 nt, Artificial Sequence
  Description of Artificial Sequence: Synthetic oligonucleotide
uacucauauggauagcggc

SEQ ID NO: 2444371 - RNA, 19 nt, Artificial Sequence
  Description of Artificial Sequence: Synthetic oligonucleotide
uggugcauaggacaguagc

SEQ ID NO: 2444372 - RNA, 19 nt, Artificial Sequence
  Description of Artificial Sequence: Synthetic oligonucleotide
uggagaaaucaccaauaag

SEQ ID NO: 2444373 - RNA, 19 nt, Artificial Sequence
  Description of Artificial Sequence: Synthetic oligonucleotide
uuuaaggcucccaggaugu

SEQ ID NO: 2444374 - RNA, 19 nt, Artificial Sequence
  Description of Artificial Sequence: Synthetic oligonucleotide
aguacaaugcuggauacug

SEQ ID NO: 2444375 - RNA, 19 nt, Artificial Sequence
  Description of Artificial Sequence: Synthetic oligonucleotide
aacuguaguaaugggacug

SEQ ID NO: 2444376 - RNA, 19 nt, Artificial Sequence
  Description of Artificial Sequence: Synthetic oligonucleotide
uggaaagaagucucuguag

SEQ ID NO: 2444377 - RNA, 19 nt, Artificial Sequence
  Description of Artificial Sequence: Synthetic oligonucleotide
uuagacuuaagcccuuggu

SEQ ID NO: 2444378 - RNA, 19 nt, Artificial Sequence
  Description of Artificial Sequence: Synthetic oligonucleotide
ugacguacuucaaaucuug

SEQ ID NO: 2444379 - RNA, 19 nt, Artificial Sequence
  Description of Artificial Sequence: Synthetic oligonucleotide
ugauguaaaacuucucaau

SEQ ID NO: 2444380 - RNA, 19 nt, Artificial Sequence
  Description of Artificial Sequence: Synthetic oligonucleotide
aacucaugcaguuccuucu

SEQ ID NO: 2444381 - RNA, 19 nt, Artificial Sequence
  Description of Artificial Sequence: Synthetic oligonucleotide
aaugcuggauacugguuca

SEQ ID NO: 2444382 - RNA, 19 nt, Artificial Sequence
  Description of Artificial Sequence: Synthetic oligonucleotide
uguaguaaugggacugccc

SEQ ID NO: 2444383 - RNA, 19 nt, Artificial Sequence
  Description of Artificial Sequence: Synthetic oligonucleotide
agauccuggaacuuuccag

SEQ ID NO: 2444384 - RNA, 19 nt, Artificial Sequence
  Description of Artificial Sequence: Synthetic oligonucleotide
guuuaaggcucccaggaug

SEQ ID NO: 2444385 - RNA, 19 nt, Artificial Sequence
  Description of Artificial Sequence: Synthetic oligonucleotide
uggucuucuagcuuuagau

SEQ ID NO: 2444386 - RNA, 19 nt, Artificial Sequence
  Description of Artificial Sequence: Synthetic oligonucleotide
agacuuaagcccuugguau

SEQ ID NO: 2444387 - RNA, 19 nt, Artificial Sequence
  Description of Artificial Sequence: Synthetic oligonucleotide
cagagaacggcacauucgg

SEQ ID NO: 2444388 - RNA, 19 nt, Artificial Sequence
  Description of Artificial Sequence: Synthetic oligonucleotide
cagguacucauauggauag

SEQ ID NO: 2444389 - RNA, 19 nt, Artificial Sequence
  Description of Artificial Sequence: Synthetic oligonucleotide
accaauaaggugcccuugg

SEQ ID NO: 2444390 - RNA, 19 nt, Artificial Sequence
  Description of Artificial Sequence: Synthetic oligonucleotide
uauacagguuuaaggcucc

SEQ ID NO: 2444391 - RNA, 19 nt, Artificial Sequence
  Description of Artificial Sequence: Synthetic oligonucleotide
aacacaaugaugauucuuu

SEQ ID NO: 2444392 - RNA, 19 nt, Artificial Sequence
  Description of Artificial Sequence: Synthetic oligonucleotide
cuccguauauucuggaaag

SEQ ID NO: 2444393 - RNA, 19 nt, Artificial Sequence
  Description of Artificial Sequence: Synthetic oligonucleotide
agagagaccaucuucuuua

SEQ ID NO: 2444394 - RNA, 19 nt, Artificial Sequence
  Description of Artificial Sequence: Synthetic oligonucleotide
uagacuuaagcccuuggua

SEQ ID NO: 2444395 - RNA, 19 nt, Artificial Sequence
  Description of Artificial Sequence: Synthetic oligonucleotide
guaguaaugggacugccca

SEQ ID NO: 2444396 - RNA, 19 nt, Artificial Sequence
  Description of Artificial Sequence: Synthetic oligonucleotide
cagacaguaaagcagccac

SEQ ID NO: 2444397 - RNA, 19 nt, Artificial Sequence
  Description of Artificial Sequence: Synthetic oligonucleotide
aggacaguagcucuguggu

SEQ ID NO: 2444398 - RNA, 19 nt, Artificial Sequence
  Description of Artificial Sequence: Synthetic oligonucleotide
ucuggaaagaagucucugu

SEQ ID NO: 2444399 - RNA, 19 nt, Artificial Sequence
  Description of Artificial Sequence: Synthetic oligonucleotide
auaucacagagagagacca

SEQ ID NO: 2444400 - RNA, 19 nt, Artificial Sequence
  Description of Artificial Sequence: Synthetic oligonucleotide
uucuuacucaguuuuggaa

SEQ ID NO: 2444401 - RNA, 19 nt, Artificial Sequence
  Description of Artificial Sequence: Synthetic oligonucleotide
augauguaaaacuucucaa

SEQ ID NO: 2444402 - RNA, 19 nt, Artificial Sequence
  Description of Artificial Sequence: Synthetic oligonucleotide
ugaauccucugaaagcccu

SEQ ID NO: 2444403 - RNA, 19 nt, Artificial Sequence
  Description of Artificial Sequence: Synthetic oligonucleotide
guuucccugacaccguugg

SEQ ID NO: 2444404 - RNA, 19 nt, Artificial Sequence
  Description of Artificial Sequence: Synthetic oligonucleotide
ugugguucacacagcuccg

SEQ ID NO: 2444405 - RNA, 19 nt, Artificial Sequence
  Description of Artificial Sequence: Synthetic oligonucleotide
cauaucacagagagagacc

SEQ ID NO: 2444406 - RNA, 19 nt, Artificial Sequence
  Description of Artificial Sequence: Synthetic oligonucleotide
cacugaauccucugaaagc

SEQ ID NO: 2444407 - RNA, 19 nt, Artificial Sequence
  Description of Artificial Sequence: Synthetic oligonucleotide
agaauucacagaggaacac

SEQ ID NO: 2444408 - RNA, 19 nt, Artificial Sequence
  Description of Artificial Sequence: Synthetic oligonucleotide
agguuuaaggcucccagga

SEQ ID NO: 2444409 - RNA, 19 nt, Artificial Sequence
  Description of Artificial Sequence: Synthetic oligonucleotide
gauccuggaacuuuccaga

SEQ ID NO: 2444410 - RNA, 19 nt, Artificial Sequence
  Description of Artificial Sequence: Synthetic oligonucleotide
agcuuuagauucuuacuca

SEQ ID NO: 2444411 - RNA, 19 nt, Artificial Sequence
  Description of Artificial Sequence: Synthetic oligonucleotide
agacaauaggcuucuucag

SEQ ID NO: 2444412 - RNA, 19 nt, Artificial Sequence
  Description of Artificial Sequence: Synthetic oligonucleotide
caguaaagcagccacugug

SEQ ID NO: 2444413 - RNA, 19 nt, Artificial Sequence
  Description of Artificial Sequence: Synthetic oligonucleotide
acugucauggccacuauug

SEQ ID NO: 2444414 - RNA, 19 nt, Artificial Sequence
  Description of Artificial Sequence: Synthetic oligonucleotide
aaucuugguguuucccuga

SEQ ID NO: 2444415 - RNA, 19 nt, Artificial Sequence
  Description of Artificial Sequence: Synthetic oligonucleotide
acuguaguaaugggacugc

SEQ ID NO: 2444416 - RNA, 19 nt, Artificial Sequence
  Description of Artificial Sequence: Synthetic oligonucleotide
augauucuuuucuggaugu

SEQ ID NO: 2444417 - RNA, 19 nt, Artificial Sequence
  Description of Artificial Sequence: Synthetic oligonucleotide
gacaauaggcuucuucaga

SEQ ID NO: 2444418 - RNA, 19 nt, Artificial Sequence
  Description of Artificial Sequence: Synthetic oligonucleotide
caaugcuggauacugguuc

SEQ ID NO: 2444419 - RNA, 19 nt, Artificial Sequence
  Description of Artificial Sequence: Synthetic oligonucleotide
auggcauucauaucacaga

SEQ ID NO: 2444420 - RNA, 19 nt, Artificial Sequence
  Description of Artificial Sequence: Synthetic oligonucleotide
gguacucauauggauagcg

SEQ ID NO: 2444421 - RNA, 19 nt, Artificial Sequence
  Description of Artificial Sequence: Synthetic oligonucleotide
agaaagaacucaugcaguu

SEQ ID NO: 2444422 - RNA, 19 nt, Artificial Sequence
  Description of Artificial Sequence: Synthetic oligonucleotide
ucaaaucuugguguuuccc

SEQ ID NO: 2444423 - RNA, 19 nt, Artificial Sequence
  Description of Artificial Sequence: Synthetic oligonucleotide
aacuccacugaauccucug

SEQ ID NO: 2444424 - RNA, 19 nt, Artificial Sequence
  Description of Artificial Sequence: Synthetic oligonucleotide
ugcauaggacaguagcucu

SEQ ID NO: 2444425 - RNA, 19 nt, Artificial Sequence
  Description of Artificial Sequence: Synthetic oligonucleotide
auagcggcaaucaaugaug

SEQ ID NO: 2444426 - RNA, 19 nt, Artificial Sequence
  Description of Artificial Sequence: Synthetic oligonucleotide
ugguaucuuggucuuccag

SEQ ID NO: 2444427 - RNA, 19 nt, Artificial Sequence
  Description of Artificial Sequence: Synthetic oligonucleotide
auaaggugcccuuggucag

SEQ ID NO: 2444428 - RNA, 19 nt, Artificial Sequence
  Description of Artificial Sequence: Synthetic oligonucleotide
agcucuggguaguacaaug

SEQ ID NO: 2444429 - RNA, 19 nt, Artificial Sequence
  Description of Artificial Sequence: Synthetic oligonucleotide
aguuuuggaacuguaguaa

SEQ ID NO: 2444430 - RNA, 19 nt, Artificial Sequence
  Description of Artificial Sequence: Synthetic oligonucleotide
agcgcacacaacuuggaga

SEQ ID NO: 2444431 - RNA, 19 nt, Artificial Sequence
  Description of Artificial Sequence: Synthetic oligonucleotide
gacaguagcucugugguuc

SEQ ID NO: 2444432 - RNA, 19 nt, Artificial Sequence
  Description of Artificial Sequence: Synthetic oligonucleotide
auucuuacucaguuuugga

SEQ ID NO: 2444433 - RNA, 19 nt, Artificial Sequence
  Description of Artificial Sequence: Synthetic oligonucleotide
uuuguucuggcuucgccau

SEQ ID NO: 2444434 - RNA, 19 nt, Artificial Sequence
  Description of Artificial Sequence: Synthetic oligonucleotide
ggaacuguaguaaugggac

SEQ ID NO: 2444435 - RNA, 19 nt, Artificial Sequence
  Description of Artificial Sequence: Synthetic oligonucleotide
gaaaacuccacugaauccu

SEQ ID NO: 2444436 - RNA, 19 nt, Artificial Sequence
  Description of Artificial Sequence: Synthetic oligonucleotide
agaccaucuucuuuagacu

SEQ ID NO: 2444437 - RNA, 19 nt, Artificial Sequence
  Description of Artificial Sequence: Synthetic oligonucleotide
uucuuuucuggauguccag

SEQ ID NO: 2444438 - RNA, 19 nt, Artificial Sequence
  Description of Artificial Sequence: Synthetic oligonucleotide
acguacuucaaaucuuggu

SEQ ID NO: 2444439 - RNA, 19 nt, Artificial Sequence
  Description of Artificial Sequence: Synthetic oligonucleotide
uucaaaucuugguguuucc

SEQ ID NO: 2444440 - RNA, 19 nt, Artificial Sequence
  Description of Artificial Sequence: Synthetic oligonucleotide
cacagcuccguauauucug

SEQ ID NO: 2444441 - RNA, 19 nt, Artificial Sequence
  Description of Artificial Sequence: Synthetic oligonucleotide
cagagagacaauaggcuuc

SEQ ID NO: 2444442 - RNA, 19 nt, Artificial Sequence
  Description of Artificial Sequence: Synthetic oligonucleotide
aaggcucccaggauguguc

SEQ ID NO: 2444443 - RNA, 19 nt, Artificial Sequence
  Description of Artificial Sequence: Synthetic oligonucleotide
agugucuuccagugacuuc

SEQ ID NO: 2444444 - RNA, 19 nt, Artificial Sequence
  Description of Artificial Sequence: Synthetic oligonucleotide
gaacucaugcaguuccuuc

SEQ ID NO: 2444445 - RNA, 19 nt, Artificial Sequence
  Description of Artificial Sequence: Synthetic oligonucleotide
guacucauauggauagcgg

SEQ ID NO: 2444446 - RNA, 19 nt, Artificial Sequence
  Description of Artificial Sequence: Synthetic oligonucleotide
guaguacaaugcuggauac

SEQ ID NO: 2444447 - RNA, 19 nt, Artificial Sequence
  Description of Artificial Sequence: Synthetic oligonucleotide
uuggucuucuagcuuuaga

SEQ ID NO: 2444448 - RNA, 19 nt, Artificial Sequence
  Description of Artificial Sequence: Synthetic oligonucleotide
uucuggauguccagagaga

SEQ ID NO: 2444449 - RNA, 19 nt, Artificial Sequence
  Description of Artificial Sequence: Synthetic oligonucleotide
cucucugaggagaauucac

SEQ ID NO: 2444450 - RNA, 19 nt, Artificial Sequence
  Description of Artificial Sequence: Synthetic oligonucleotide
cuuuguucuggcuucgcca

SEQ ID NO: 2444451 - RNA, 19 nt, Artificial Sequence
  Description of Artificial Sequence: Synthetic oligonucleotide
cugguggugcauaggacag

SEQ ID NO: 2444452 - RNA, 19 nt, Artificial Sequence
  Description of Artificial Sequence: Synthetic oligonucleotide
gguaguacaaugcuggaua

SEQ ID NO: 2444453 - RNA, 19 nt, Artificial Sequence
  Description of Artificial Sequence: Synthetic oligonucleotide
uaggcuucuucagaaagaa

SEQ ID NO: 2444454 - RNA, 19 nt, Artificial Sequence
  Description of Artificial Sequence: Synthetic oligonucleotide
gcuuuagauucuuacucag

SEQ ID NO: 2444455 - RNA, 19 nt, Artificial Sequence
  Description of Artificial Sequence: Synthetic oligonucleotide
agggcaaucugcuccaaaa

SEQ ID NO: 2444456 - RNA, 19 nt, Artificial Sequence
  Description of Artificial Sequence: Synthetic oligonucleotide
aagcccuugguaucuuggu

SEQ ID NO: 2444457 - RNA, 19 nt, Artificial Sequence
  Description of Artificial Sequence: Synthetic oligonucleotide
aaucaccaauaaggugccc

SEQ ID NO: 2444458 - RNA, 19 nt, Artificial Sequence
  Description of Artificial Sequence: Synthetic oligonucleotide
gacguacuucaaaucuugg

SEQ ID NO: 2444459 - RNA, 19 nt, Artificial Sequence
  Description of Artificial Sequence: Synthetic oligonucleotide
uauuguggguucacauccu

SEQ ID NO: 2444460 - RNA, 19 nt, Artificial Sequence
  Description of Artificial Sequence: Synthetic oligonucleotide
gacuuaagcccuugguauc

SEQ ID NO: 2444461 - RNA, 19 nt, Artificial Sequence
  Description of Artificial Sequence: Synthetic oligonucleotide
guagcucugugguucacac

SEQ ID NO: 2444462 - RNA, 19 nt, Artificial Sequence
  Description of Artificial Sequence: Synthetic oligonucleotide
aucaccaauaaggugcccu

SEQ ID NO: 2444463 - RNA, 19 nt, Artificial Sequence
  Description of Artificial Sequence: Synthetic oligonucleotide
gagagaccaucuucuuuag

SEQ ID NO: 2444464 - RNA, 19 nt, Artificial Sequence
  Description of Artificial Sequence: Synthetic oligonucleotide
caauaaggugcccuugguc

SEQ ID NO: 2444465 - RNA, 19 nt, Artificial Sequence
  Description of Artificial Sequence: Synthetic oligonucleotide
cugaauccucugaaagccc

SEQ ID NO: 2444466 - RNA, 19 nt, Artificial Sequence
  Description of Artificial Sequence: Synthetic oligonucleotide
gagaaaucaccaauaaggu

SEQ ID NO: 2444467 - RNA, 19 nt, Artificial Sequence
  Description of Artificial Sequence: Synthetic oligonucleotide
uagcggcaaucaaugaugu

SEQ ID NO: 2444468 - RNA, 19 nt, Artificial Sequence
  Description of Artificial Sequence: Synthetic oligonucleotide
caaugauguaaaacuucuc

SEQ ID NO: 2444469 - RNA, 19 nt, Artificial Sequence
  Description of Artificial Sequence: Synthetic oligonucleotide
cguacuucaaaucuuggug

SEQ ID NO: 2444470 - RNA, 19 nt, Artificial Sequence
  Description of Artificial Sequence: Synthetic oligonucleotide
uccacugaauccucugaaa

SEQ ID NO: 2444471 - RNA, 19 nt, Artificial Sequence
  Description of Artificial Sequence: Synthetic oligonucleotide
cugaaagcccuucuugguc

SEQ ID NO: 2444472 - RNA, 19 nt, Artificial Sequence
  Description of Artificial Sequence: Synthetic oligonucleotide
acucauauggauagcggca

SEQ ID NO: 2444473 - RNA, 19 nt, Artificial Sequence
  Description of Artificial Sequence: Synthetic oligonucleotide
gauagcggcaaucaaugau

SEQ ID NO: 2444474 - RNA, 19 nt, Artificial Sequence
  Description of Artificial Sequence: Synthetic oligonucleotide
aguaaugggacugcccaga

SEQ ID NO: 2444475 - RNA, 19 nt, Artificial Sequence
  Description of Artificial Sequence: Synthetic oligonucleotide
guuggcagcgcacacaacu

SEQ ID NO: 2444476 - RNA, 19 nt, Artificial Sequence
  Description of Artificial Sequence: Synthetic oligonucleotide
acacaacuuggagaaauca

SEQ ID NO: 2444477 - RNA, 19 nt, Artificial Sequence
  Description of Artificial Sequence: Synthetic oligonucleotide
gaaagaacucaugcaguuc

SEQ ID NO: 2444478 - RNA, 19 nt, Artificial Sequence
  Description of Artificial Sequence: Synthetic oligonucleotide
gcaaucaaugauguaaaac

SEQ ID NO: 2444479 - RNA, 19 nt, Artificial Sequence
  Description of Artificial Sequence: Synthetic oligonucleotide
uguucuggcuucgccaucu

SEQ ID NO: 2444480 - RNA, 19 nt, Artificial Sequence
  Description of Artificial Sequence: Synthetic oligonucleotide
uguuucccugacaccguug

SEQ ID NO: 2444481 - RNA, 19 nt, Artificial Sequence
  Description of Artificial Sequence: Synthetic oligonucleotide
ugcaguuccuucuggcuau

SEQ ID NO: 2444482 - RNA, 19 nt, Artificial Sequence
  Description of Artificial Sequence: Synthetic oligonucleotide
ucucucugaggagaauuca

SEQ ID NO: 2444483 - RNA, 19 nt, Artificial Sequence
  Description of Artificial Sequence: Synthetic oligonucleotide
uggggugacguacuucaaa

SEQ ID NO: 2444484 - RNA, 19 nt, Artificial Sequence
  Description of Artificial Sequence: Synthetic oligonucleotide
uugguguuucccugacacc

SEQ ID NO: 2444485 - RNA, 19 nt, Artificial Sequence
  Description of Artificial Sequence: Synthetic oligonucleotide
acagcuccguauauucugg

SEQ ID NO: 2444486 - RNA, 19 nt, Artificial Sequence
  Description of Artificial Sequence: Synthetic oligonucleotide
cuuccagggaaaacuccac

SEQ ID NO: 2444487 - RNA, 19 nt, Artificial Sequence
  Description of Artificial Sequence: Synthetic oligonucleotide
cguauauucuggaaagaag

SEQ ID NO: 2444488 - RNA, 19 nt, Artificial Sequence
  Description of Artificial Sequence: Synthetic oligonucleotide
uggcagcgcacacaacuug

SEQ ID NO: 2444489 - RNA, 19 nt, Artificial Sequence
  Description of Artificial Sequence: Synthetic oligonucleotide
ucgccaucucagcagcuca

SEQ ID NO: 2444490 - RNA, 19 nt, Artificial Sequence
  Description of Artificial Sequence: Synthetic oligonucleotide
cuggcuauacagguuuaag

SEQ ID NO: 2444491 - RNA, 19 nt, Artificial Sequence
  Description of Artificial Sequence: Synthetic oligonucleotide
gauacugguucagagcucu

SEQ ID NO: 2444492 - RNA, 19 nt, Artificial Sequence
  Description of Artificial Sequence: Synthetic oligonucleotide
ggugacguacuucaaaucu

SEQ ID NO: 2444493 - RNA, 19 nt, Artificial Sequence
  Description of Artificial Sequence: Synthetic oligonucleotide
gaauggcauucauaucaca

SEQ ID NO: 2444494 - RNA, 19 nt, Artificial Sequence
  Description of Artificial Sequence: Synthetic oligonucleotide
guaaaacuucucaaucaga

SEQ ID NO: 2444495 - RNA, 19 nt, Artificial Sequence
  Description of Artificial Sequence: Synthetic oligonucleotide
uuacucaguuuuggaacug

SEQ ID NO: 2444496 - RNA, 19 nt, Artificial Sequence
  Description of Artificial Sequence: Synthetic oligonucleotide
uggcuucgccaucucagca

SEQ ID NO: 2444497 - RNA, 19 nt, Artificial Sequence
  Description of Artificial Sequence: Synthetic oligonucleotide
ugggacugcccagauaccu

SEQ ID NO: 2444498 - RNA, 19 nt, Artificial Sequence
  Description of Artificial Sequence: Synthetic oligonucleotide
guaaagcagccacuguguc

SEQ ID NO: 2444499 - RNA, 19 nt, Artificial Sequence
  Description of Artificial Sequence: Synthetic oligonucleotide
auaggcuucuucagaaaga

SEQ ID NO: 2444500 - RNA, 19 nt, Artificial Sequence
  Description of Artificial Sequence: Synthetic oligonucleotide
ugacuucacugccacuguc

SEQ ID NO: 2444501 - RNA, 19 nt, Artificial Sequence
  Description of Artificial Sequence: Synthetic oligonucleotide
cuggcuucgccaucucagc

SEQ ID NO: 2444502 - RNA, 19 nt, Artificial Sequence
  Description of Artificial Sequence: Synthetic oligonucleotide
uggguaguacaaugcugga

SEQ ID NO: 2444503 - RNA, 19 nt, Artificial Sequence
  Description of Artificial Sequence: Synthetic oligonucleotide
uccguauauucuggaaaga

SEQ ID NO: 2444504 - RNA, 19 nt, Artificial Sequence
  Description of Artificial Sequence: Synthetic oligonucleotide
uccgcccagguacucauau

SEQ ID NO: 2444505 - RNA, 19 nt, Artificial Sequence
  Description of Artificial Sequence: Synthetic oligonucleotide
acugugucuggggugacgu

SEQ ID NO: 2444506 - RNA, 19 nt, Artificial Sequence
  Description of Artificial Sequence: Synthetic oligonucleotide
auacagguuuaaggcuccc

SEQ ID NO: 2444507 - RNA, 19 nt, Artificial Sequence
  Description of Artificial Sequence: Synthetic oligonucleotide
ugcccagauaccucauuuc

SEQ ID NO: 2444508 - RNA, 19 nt, Artificial Sequence
  Description of Artificial Sequence: Synthetic oligonucleotide
ccccuuugaggauauacag

SEQ ID NO: 2444509 - RNA, 19 nt, Artificial Sequence
  Description of Artificial Sequence: Synthetic oligonucleotide
agguacucauauggauagc

SEQ ID NO: 2444510 - RNA, 19 nt, Artificial Sequence
  Description of Artificial Sequence: Synthetic oligonucleotide
uacugguucagagcucugu

SEQ ID NO: 2444511 - RNA, 19 nt, Artificial Sequence
  Description of Artificial Sequence: Synthetic oligonucleotide
auauacagcucuggguagu

SEQ ID NO: 2444512 - RNA, 19 nt, Artificial Sequence
  Description of Artificial Sequence: Synthetic oligonucleotide
cuggaaagaagucucugua

SEQ ID NO: 2444513 - RNA, 19 nt, Artificial Sequence
  Description of Artificial Sequence: Synthetic oligonucleotide
auggccacuauuguggguu

SEQ ID NO: 2444514 - RNA, 19 nt, Artificial Sequence
  Description of Artificial Sequence: Synthetic oligonucleotide
auaggacaguagcucugug

SEQ ID NO: 2444515 - RNA, 19 nt, Artificial Sequence
  Description of Artificial Sequence: Synthetic oligonucleotide
caaaucuugguguuucccu

SEQ ID NO: 2444516 - RNA, 19 nt, Artificial Sequence
  Description of Artificial Sequence: Synthetic oligonucleotide
aagaacucaugcaguuccu

SEQ ID NO: 2444517 - RNA, 19 nt, Artificial Sequence
  Description of Artificial Sequence: Synthetic oligonucleotide
gugcauaggacaguagcuc

SEQ ID NO: 2444518 - RNA, 19 nt, Artificial Sequence
  Description of Artificial Sequence: Synthetic oligonucleotide
uacagguuuaaggcuccca

SEQ ID NO: 2444519 - RNA, 19 nt, Artificial Sequence
  Description of Artificial Sequence: Synthetic oligonucleotide
agagaacggcacauucggg

SEQ ID NO: 2444520 - RNA, 19 nt, Artificial Sequence
  Description of Artificial Sequence: Synthetic oligonucleotide
uuggcagcgcacacaacuu

SEQ ID NO: 2444521 - RNA, 19 nt, Artificial Sequence
  Description of Artificial Sequence: Synthetic oligonucleotide
uaguacaaugcuggauacu

SEQ ID NO: 2444522 - RNA, 19 nt, Artificial Sequence
  Description of Artificial Sequence: Synthetic oligonucleotide
gggcaaucugcuccaaaag

SEQ ID NO: 2444523 - RNA, 19 nt, Artificial Sequence
  Description of Artificial Sequence: Synthetic oligonucleotide
cuguaguaaugggacugcc

SEQ ID NO: 2444524 - RNA, 19 nt, Artificial Sequence
  Description of Artificial Sequence: Synthetic oligonucleotide
ucuggcuauacagguuuaa

SEQ ID NO: 2444525 - RNA, 19 nt, Artificial Sequence
  Description of Artificial Sequence: Synthetic oligonucleotide
aaacuccacugaauccucu

SEQ ID NO: 2444526 - RNA, 19 nt, Artificial Sequence
  Description of Artificial Sequence: Synthetic oligonucleotide
agcuccguauauucuggaa

SEQ ID NO: 2444527 - RNA, 19 nt, Artificial Sequence
  Description of Artificial Sequence: Synthetic oligonucleotide
agagagagaccaucuucuu

SEQ ID NO: 2444528 - RNA, 19 nt, Artificial Sequence
  Description of Artificial Sequence: Synthetic oligonucleotide
ggcuucgccaucucagcag

SEQ ID NO: 2444529 - RNA, 19 nt, Artificial Sequence
  Description of Artificial Sequence: Synthetic oligonucleotide
uaaugggacugcccagaua

SEQ ID NO: 2444530 - RNA, 19 nt, Artificial Sequence
  Description of Artificial Sequence: Synthetic oligonucleotide
gcggcaaucaaugauguaa

SEQ ID NO: 2444531 - RNA, 19 nt, Artificial Sequence
  Description of Artificial Sequence: Synthetic oligonucleotide
ugguucacacagcuccgua

SEQ ID NO: 2444532 - RNA, 19 nt, Artificial Sequence
  Description of Artificial Sequence: Synthetic oligonucleotide
ugcuggauacugguucaga

SEQ ID NO: 2444533 - RNA, 19 nt, Artificial Sequence
  Description of Artificial Sequence: Synthetic oligonucleotide
cuuuagauucuuacucagu

SEQ ID NO: 2444534 - RNA, 19 nt, Artificial Sequence
  Description of Artificial Sequence: Synthetic oligonucleotide
ccugacaccguuggcagcg

SEQ ID NO: 2444535 - RNA, 19 nt, Artificial Sequence
  Description of Artificial Sequence: Synthetic oligonucleotide
ccucugaaagcccuucuug

SEQ ID NO: 2444536 - RNA, 19 nt, Artificial Sequence
  Description of Artificial Sequence: Synthetic oligonucleotide
uguccgcccagguacucau

SEQ ID NO: 2444537 - RNA, 19 nt, Artificial Sequence
  Description of Artificial Sequence: Synthetic oligonucleotide
agacaguaaagcagccacu

SEQ ID NO: 2444538 - RNA, 19 nt, Artificial Sequence
  Description of Artificial Sequence: Synthetic oligonucleotide
uucuggcuauacagguuua

SEQ ID NO: 2444539 - RNA, 19 nt, Artificial Sequence
  Description of Artificial Sequence: Synthetic oligonucleotide
caucugaauggcauucaua

SEQ ID NO: 2444540 - RNA, 19 nt, Artificial Sequence
  Description of Artificial Sequence: Synthetic oligonucleotide
ugacaccguuggcagcgca

SEQ ID NO: 2444541 - RNA, 19 nt, Artificial Sequence
  Description of Artificial Sequence: Synthetic oligonucleotide
cagggaaaacuccacugaa

SEQ ID NO: 2444542 - RNA, 19 nt, Artificial Sequence
  Description of Artificial Sequence: Synthetic oligonucleotide
gcuccguauauucuggaaa

SEQ ID NO: 2444543 - RNA, 19 nt, Artificial Sequence
  Description of Artificial Sequence: Synthetic oligonucleotide
gcgcacacaacuuggagaa

SEQ ID NO: 2444544 - RNA, 19 nt, Artificial Sequence
  Description of Artificial Sequence: Synthetic oligonucleotide
uuaaggcucccaggaugug

SEQ ID NO: 2444545 - RNA, 19 nt, Artificial Sequence
  Description of Artificial Sequence: Synthetic oligonucleotide
agggaaaacuccacugaau

SEQ ID NO: 2444546 - RNA, 19 nt, Artificial Sequence
  Description of Artificial Sequence: Synthetic oligonucleotide
ccugguggugcauaggaca

SEQ ID NO: 2444547 - RNA, 19 nt, Artificial Sequence
  Description of Artificial Sequence: Synthetic oligonucleotide
gacaccguuggcagcgcac

SEQ ID NO: 2444548 - RNA, 19 nt, Artificial Sequence
  Description of Artificial Sequence: Synthetic oligonucleotide
cuucuggcuauacagguuu

SEQ ID NO: 2444549 - RNA, 19 nt, Artificial Sequence
  Description of Artificial Sequence: Synthetic oligonucleotide
ggugcccuuggucaggcuc

SEQ ID NO: 2444550 - RNA, 19 nt, Artificial Sequence
  Description of Artificial Sequence: Synthetic oligonucleotide
caauaggcuucuucagaaa

SEQ ID NO: 2444551 - RNA, 19 nt, Artificial Sequence
  Description of Artificial Sequence: Synthetic oligonucleotide
acagcucuggguaguacaa

SEQ ID NO: 2444552 - RNA, 19 nt, Artificial Sequence
  Description of Artificial Sequence: Synthetic oligonucleotide
uuguucuggcuucgccauc

SEQ ID NO: 2444553 - RNA, 19 nt, Artificial Sequence
  Description of Artificial Sequence: Synthetic oligonucleotide
cuccacugaauccucugaa

SEQ ID NO: 2444554 - RNA, 19 nt, Artificial Sequence
  Description of Artificial Sequence: Synthetic oligonucleotide
gagagagaccaucuucuuu

SEQ ID NO: 2444555 - RNA, 19 nt, Artificial Sequence
  Description of Artificial Sequence: Synthetic oligonucleotide
aggagaauucacagaggaa

SEQ ID NO: 2444556 - RNA, 19 nt, Artificial Sequence
  Description of Artificial Sequence: Synthetic oligonucleotide
gcucuggguaguacaaugc

SEQ ID NO: 2444557 - RNA, 19 nt, Artificial Sequence
  Description of Artificial Sequence: Synthetic oligonucleotide
caucucagcagcucagccu

SEQ ID NO: 2444558 - RNA, 19 nt, Artificial Sequence
  Description of Artificial Sequence: Synthetic oligonucleotide
gaacacaaugaugauucuu

SEQ ID NO: 2444559 - RNA, 19 nt, Artificial Sequence
  Description of Artificial Sequence: Synthetic oligonucleotide
agaacucaugcaguuccuu

SEQ ID NO: 2444560 - RNA, 19 nt, Artificial Sequence
  Description of Artificial Sequence: Synthetic oligonucleotide
cucugugguucacacagcu

SEQ ID NO: 2444561 - RNA, 19 nt, Artificial Sequence
  Description of Artificial Sequence: Synthetic oligonucleotide
auucacagaggaacacaau

SEQ ID NO: 2444562 - RNA, 19 nt, Artificial Sequence
  Description of Artificial Sequence: Synthetic oligonucleotide
augcuggauacugguucag

SEQ ID NO: 2444563 - RNA, 19 nt, Artificial Sequence
  Description of Artificial Sequence: Synthetic oligonucleotide
cacuauuguggguucacau

SEQ ID NO: 2444564 - RNA, 19 nt, Artificial Sequence
  Description of Artificial Sequence: Synthetic oligonucleotide
acacagcuccguauauucu

SEQ ID NO: 2444565 - RNA, 19 nt, Artificial Sequence
  Description of Artificial Sequence: Synthetic oligonucleotide
cacugugucuggggugacg

SEQ ID NO: 2444566 - RNA, 19 nt, Artificial Sequence
  Description of Artificial Sequence: Synthetic oligonucleotide
ggaacuuuccagacaguaa

SEQ ID NO: 2444567 - RNA, 19 nt, Artificial Sequence
  Description of Artificial Sequence: Synthetic oligonucleotide
uggccacuauuguggguuc

SEQ ID NO: 2444568 - RNA, 19 nt, Artificial Sequence
  Description of Artificial Sequence: Synthetic oligonucleotide
gggugacguacuucaaauc

SEQ ID NO: 2444569 - RNA, 19 nt, Artificial Sequence
  Description of Artificial Sequence: Synthetic oligonucleotide
acaaugcuggauacugguu

SEQ ID NO: 2444570 - RNA, 19 nt, Artificial Sequence
  Description of Artificial Sequence: Synthetic oligonucleotide
gcauaggacaguagcucug

SEQ ID NO: 2444571 - RNA, 19 nt, Artificial Sequence
  Description of Artificial Sequence: Synthetic oligonucleotide
cucccaggauguguccgcc

SEQ ID NO: 2444572 - RNA, 19 nt, Artificial Sequence
  Description of Artificial Sequence: Synthetic oligonucleotide
ccagguacucauauggaua

SEQ ID NO: 2444573 - RNA, 19 nt, Artificial Sequence
  Description of Artificial Sequence: Synthetic oligonucleotide
ggauagcggcaaucaauga

SEQ ID NO: 2444574 - RNA, 19 nt, Artificial Sequence
  Description of Artificial Sequence: Synthetic oligonucleotide
guggugcauaggacaguag

SEQ ID NO: 2444575 - RNA, 19 nt, Artificial Sequence
  Description of Artificial Sequence: Synthetic oligonucleotide
ggugcauaggacaguagcu

SEQ ID NO: 2444576 - RNA, 19 nt, Artificial Sequence
  Description of Artificial Sequence: Synthetic oligonucleotide
gguucacauccuucuucac

SEQ ID NO: 2444577 - RNA, 19 nt, Artificial Sequence
  Description of Artificial Sequence: Synthetic oligonucleotide
gcucccaggauguguccgc

SEQ ID NO: 2444578 - RNA, 19 nt, Artificial Sequence
  Description of Artificial Sequence: Synthetic oligonucleotide
agcggcaaucaaugaugua

SEQ ID NO: 2444579 - RNA, 19 nt, Artificial Sequence
  Description of Artificial Sequence: Synthetic oligonucleotide
cuuggucuuccagggaaaa

SEQ ID NO: 2444580 - RNA, 19 nt, Artificial Sequence
  Description of Artificial Sequence: Synthetic oligonucleotide
ggcauucauaucacagaga

SEQ ID NO: 2444581 - RNA, 19 nt, Artificial Sequence
  Description of Artificial Sequence: Synthetic oligonucleotide
cauaggacaguagcucugu

SEQ ID NO: 2444582 - RNA, 19 nt, Artificial Sequence
  Description of Artificial Sequence: Synthetic oligonucleotide
gguggugcauaggacagua

SEQ ID NO: 2444583 - RNA, 19 nt, Artificial Sequence
  Description of Artificial Sequence: Synthetic oligonucleotide
guaaugggacugcccagau

SEQ ID NO: 2444584 - RNA, 19 nt, Artificial Sequence
  Description of Artificial Sequence: Synthetic oligonucleotide
cagcuccguauauucugga

SEQ ID NO: 2444585 - RNA, 19 nt, Artificial Sequence
  Description of Artificial Sequence: Synthetic oligonucleotide
uguguccgcccagguacuc

SEQ ID NO: 2444586 - RNA, 19 nt, Artificial Sequence
  Description of Artificial Sequence: Synthetic oligonucleotide
ggggccucucucugaggag

SEQ ID NO: 2444587 - RNA, 19 nt, Artificial Sequence
  Description of Artificial Sequence: Synthetic oligonucleotide
ccguauauucuggaaagaa

SEQ ID NO: 2444588 - RNA, 19 nt, Artificial Sequence
  Description of Artificial Sequence: Synthetic oligonucleotide
gguucacacagcuccguau

SEQ ID NO: 2444589 - RNA, 19 nt, Artificial Sequence
  Description of Artificial Sequence: Synthetic oligonucleotide
gugacguacuucaaaucuu

SEQ ID NO: 2444590 - RNA, 19 nt, Artificial Sequence
  Description of Artificial Sequence: Synthetic oligonucleotide
cugacaccguuggcagcgc

SEQ ID NO: 2444591 - RNA, 19 nt, Artificial Sequence
  Description of Artificial Sequence: Synthetic oligonucleotide
auguguccgcccagguacu

SEQ ID NO: 2444592 - RNA, 19 nt, Artificial Sequence
  Description of Artificial Sequence: Synthetic oligonucleotide
gguuuaaggcucccaggau

SEQ ID NO: 2444593 - RNA, 19 nt, Artificial Sequence
  Description of Artificial Sequence: Synthetic oligonucleotide
ggaacacaaugaugauucu

SEQ ID NO: 2444594 - RNA, 19 nt, Artificial Sequence
  Description of Artificial Sequence: Synthetic oligonucleotide
gcacacaacuuggagaaau

SEQ ID NO: 2444595 - RNA, 19 nt, Artificial Sequence
  Description of Artificial Sequence: Synthetic oligonucleotide
gggccucucucugaggaga

SEQ ID NO: 2444596 - RNA, 19 nt, Artificial Sequence
  Description of Artificial Sequence: Synthetic oligonucleotide
caguagcucugugguucac

SEQ ID NO: 2444597 - RNA, 19 nt, Artificial Sequence
  Description of Artificial Sequence: Synthetic oligonucleotide
gaauccucugaaagcccuu

SEQ ID NO: 2444598 - RNA, 19 nt, Artificial Sequence
  Description of Artificial Sequence: Synthetic oligonucleotide
cauggccacuauugugggu

SEQ ID NO: 2444599 - RNA, 19 nt, Artificial Sequence
  Description of Artificial Sequence: Synthetic oligonucleotide
gcucugugguucacacagc

SEQ ID NO: 2444600 - RNA, 19 nt, Artificial Sequence
  Description of Artificial Sequence: Synthetic oligonucleotide
aggugcccuuggucaggcu

SEQ ID NO: 2444601 - RNA, 19 nt, Artificial Sequence
  Description of Artificial Sequence: Synthetic oligonucleotide
guguuucccugacaccguu

SEQ ID NO: 2444602 - RNA, 19 nt, Artificial Sequence
  Description of Artificial Sequence: Synthetic oligonucleotide
cccugacaccguuggcagc

SEQ ID NO: 2444603 - RNA, 19 nt, Artificial Sequence
  Description of Artificial Sequence: Synthetic oligonucleotide
cgccaucucagcagcucag

SEQ ID NO: 2444604 - RNA, 19 nt, Artificial Sequence
  Description of Artificial Sequence: Synthetic oligonucleotide
cuggaacuuuccagacagu

SEQ ID NO: 2444605 - RNA, 19 nt, Artificial Sequence
  Description of Artificial Sequence: Synthetic oligonucleotide
ccguuggcagcgcacacaa

SEQ ID NO: 2444606 - RNA, 19 nt, Artificial Sequence
  Description of Artificial Sequence: Synthetic oligonucleotide
gugguucacacagcuccgu

SEQ ID NO: 2444607 - RNA, 19 nt, Artificial Sequence
  Description of Artificial Sequence: Synthetic oligonucleotide
gcagcgcacacaacuugga

SEQ ID NO: 2444608 - RNA, 19 nt, Artificial Sequence
  Description of Artificial Sequence: Synthetic oligonucleotide
gcccagguacucauaugga

SEQ ID NO: 2444609 - RNA, 19 nt, Artificial Sequence
  Description of Artificial Sequence: Synthetic oligonucleotide
cccagguacucauauggau

SEQ ID NO: 2444610 - RNA, 19 nt, Artificial Sequence
  Description of Artificial Sequence: Synthetic oligonucleotide
ggguaguacaaugcuggau

SEQ ID NO: 2444611 - RNA, 19 nt, Artificial Sequence
  Description of Artificial Sequence: Synthetic oligonucleotide
cuucgccaucucagcagcu

SEQ ID NO: 2444612 - RNA, 19 nt, Artificial Sequence
  Description of Artificial Sequence: Synthetic oligonucleotide
cagugucuuccagugacuu

SEQ ID NO: 2444613 - RNA, 19 nt, Artificial Sequence
  Description of Artificial Sequence: Synthetic oligonucleotide
ccaauaaggugcccuuggu

SEQ ID NO: 2444614 - RNA, 19 nt, Artificial Sequence
  Description of Artificial Sequence: Synthetic oligonucleotide
ccgcccagguacucauaug

SEQ ID NO: 2444615 - RNA, 19 nt, Artificial Sequence
  Description of Artificial Sequence: Synthetic oligonucleotide
ccacuauuguggguucaca

SEQ ID NO: 2444616 - RNA, 19 nt, Artificial Sequence
  Description of Artificial Sequence: Synthetic oligonucleotide
cacugucauggccacuauu

SEQ ID NO: 2444617 - RNA, 19 nt, Artificial Sequence
  Description of Artificial Sequence: Synthetic oligonucleotide
ggccacuauuguggguuca

SEQ ID NO: 2444618 - RNA, 19 nt, Artificial Sequence
  Description of Artificial Sequence: Synthetic oligonucleotide
ccagugucuuccagugacu

SEQ ID NO: 2444619 - RNA, 19 nt, Artificial Sequence
  Description of Artificial Sequence: Synthetic oligonucleotide
gagagacaauaggcuucuu

SEQ ID NO: 2444620 - RNA, 19 nt, Artificial Sequence
  Description of Artificial Sequence: Synthetic oligonucleotide
guccgcccagguacucaua

SEQ ID NO: 2444621 - RNA, 19 nt, Artificial Sequence
  Description of Artificial Sequence: Synthetic oligonucleotide
ggugguccugguggugcau

SEQ ID NO: 2444622 - RNA, 19 nt, Artificial Sequence
  Description of Artificial Sequence: Synthetic oligonucleotide
gcccuuggucaggcucuuc

SEQ ID NO: 2444623 - RNA, 19 nt, Artificial Sequence
  Description of Artificial Sequence: Synthetic oligonucleotide
ccgcuccccuuccugggcu

SEQ ID NO: 2444624 - RNA, 19 nt, Artificial Sequence
  Description of Artificial Sequence: Synthetic oligonucleotide
gccucucucugaggagaau

SEQ ID NO: 2444625 - RNA, 19 nt, Artificial Sequence
  Description of Artificial Sequence: Synthetic oligonucleotide
ccccuuccugggcuuuguu

SEQ ID NO: 2444626 - RNA, 19 nt, Artificial Sequence
  Description of Artificial Sequence: Synthetic oligonucleotide
aaauaauaaauucuccuac

SEQ ID NO: 2444627 - RNA, 19 nt, Artificial Sequence
  Description of Artificial Sequence: Synthetic oligonucleotide
uuauuuguggaacaaaugg

SEQ ID NO: 2444628 - RNA, 19 nt, Artificial Sequence
  Description of Artificial Sequence: Synthetic oligonucleotide
aacauuuucaucuuuuauc

SEQ ID NO: 2444629 - RNA, 19 nt, Artificial Sequence
  Description of Artificial Sequence: Synthetic oligonucleotide
uuagaaauaauaaauucuc

SEQ ID NO: 2444630 - RNA, 19 nt, Artificial Sequence
  Description of Artificial Sequence: Synthetic oligonucleotide
uauuuguggaacaaauggg

SEQ ID NO: 2444631 - RNA, 19 nt, Artificial Sequence
  Description of Artificial Sequence: Synthetic oligonucleotide
agagcuucaaacuggauag

SEQ ID NO: 2444632 - RNA, 19 nt, Artificial Sequence
  Description of Artificial Sequence: Synthetic oligonucleotide
uuauccaucgaccuugucc

SEQ ID NO: 2444633 - RNA, 19 nt, Artificial Sequence
  Description of Artificial Sequence: Synthetic oligonucleotide
aaagcguccaucccgcagc

SEQ ID NO: 2444634 - RNA, 19 nt, Artificial Sequence
  Description of Artificial Sequence: Synthetic oligonucleotide
uugaaagacaucacgacug

SEQ ID NO: 2444635 - RNA, 19 nt, Artificial Sequence
  Description of Artificial Sequence: Synthetic oligonucleotide
ucuggguuagcaaaggugc

SEQ ID NO: 2444636 - RNA, 19 nt, Artificial Sequence
  Description of Artificial Sequence: Synthetic oligonucleotide
ucaucuuuuauccaucgac

SEQ ID NO: 2444637 - RNA, 19 nt, Artificial Sequence
  Description of Artificial Sequence: Synthetic oligonucleotide
gauguaacuggccagcaag

SEQ ID NO: 2444638 - RNA, 19 nt, Artificial Sequence
  Description of Artificial Sequence: Synthetic oligonucleotide
uuuauuuguggaacaaaug

SEQ ID NO: 2444639 - RNA, 19 nt, Artificial Sequence
  Description of Artificial Sequence: Synthetic oligonucleotide
agcacauugagcugacucc

SEQ ID NO: 2444640 - RNA, 19 nt, Artificial Sequence
  Description of Artificial Sequence: Synthetic oligonucleotide
ugagucuuagaaauaauaa

SEQ ID NO: 2444641 - RNA, 19 nt, Artificial Sequence
  Description of Artificial Sequence: Synthetic oligonucleotide
acgguuauuaguccaaggg

SEQ ID NO: 2444642 - RNA, 19 nt, Artificial Sequence
  Description of Artificial Sequence: Synthetic oligonucleotide
aagcaaagcguccaucccg

SEQ ID NO: 2444643 - RNA, 19 nt, Artificial Sequence
  Description of Artificial Sequence: Synthetic oligonucleotide
auagaagagcuucaaacug

SEQ ID NO: 2444644 - RNA, 19 nt, Artificial Sequence
  Description of Artificial Sequence: Synthetic oligonucleotide
uauccaucgaccuugucca

SEQ ID NO: 2444645 - RNA, 19 nt, Artificial Sequence
  Description of Artificial Sequence: Synthetic oligonucleotide
ucagguucccuacugaucu

SEQ ID NO: 2444646 - RNA, 19 nt, Artificial Sequence
  Description of Artificial Sequence: Synthetic oligonucleotide
aucggagucaaauucaaca

SEQ ID NO: 2444647 - RNA, 19 nt, Artificial Sequence
  Description of Artificial Sequence: Synthetic oligonucleotide
gaaauaauaaauucuccua

SEQ ID NO: 2444648 - RNA, 19 nt, Artificial Sequence
  Description of Artificial Sequence: Synthetic oligonucleotide
aggaagaguagguuaucgc

SEQ ID NO: 2444649 - RNA, 19 nt, Artificial Sequence
  Description of Artificial Sequence: Synthetic oligonucleotide
caucuuuuauccaucgacc

SEQ ID NO: 2444650 - RNA, 19 nt, Artificial Sequence
  Description of Artificial Sequence: Synthetic oligonucleotide
uuguggaacaaauggggag

SEQ ID NO: 2444651 - RNA, 19 nt, Artificial Sequence
  Description of Artificial Sequence: Synthetic oligonucleotide
ucuugaaagacaucacgac

SEQ ID NO: 2444652 - RNA, 19 nt, Artificial Sequence
  Description of Artificial Sequence: Synthetic oligonucleotide
uauagugaggagcucugug

SEQ ID NO: 2444653 - RNA, 19 nt, Artificial Sequence
  Description of Artificial Sequence: Synthetic oligonucleotide
ucugaugacucuuuggcau

SEQ ID NO: 2444654 - RNA, 19 nt, Artificial Sequence
  Description of Artificial Sequence: Synthetic oligonucleotide
acgacugugagucuuagaa

SEQ ID NO: 2444655 - RNA, 19 nt, Artificial Sequence
  Description of Artificial Sequence: Synthetic oligonucleotide
uucuccuacgccuacuuug

SEQ ID NO: 2444656 - RNA, 19 nt, Artificial Sequence
  Description of Artificial Sequence: Synthetic oligonucleotide
agaucugaugacucuuugg

SEQ ID NO: 2444657 - RNA, 19 nt, Artificial Sequence
  Description of Artificial Sequence: Synthetic oligonucleotide
aucuuugcacucuggaguc

SEQ ID NO: 2444658 - RNA, 19 nt, Artificial Sequence
  Description of Artificial Sequence: Synthetic oligonucleotide
cuuuuauccaucgaccuug

SEQ ID NO: 2444659 - RNA, 19 nt, Artificial Sequence
  Description of Artificial Sequence: Synthetic oligonucleotide
gauaggugcuucuugccug

SEQ ID NO: 2444660 - RNA, 19 nt, Artificial Sequence
  Description of Artificial Sequence: Synthetic oligonucleotide
acuguaguuuauuugugga

SEQ ID NO: 2444661 - RNA, 19 nt, Artificial Sequence
  Description of Artificial Sequence: Synthetic oligonucleotide
ugauuaaucgagucugggu

SEQ ID NO: 2444662 - RNA, 19 nt, Artificial Sequence
  Description of Artificial Sequence: Synthetic oligonucleotide
augugauccugccuuaguc

SEQ ID NO: 2444663 - RNA, 19 nt, Artificial Sequence
  Description of Artificial Sequence: Synthetic oligonucleotide
gagucuuagaaauaauaaa

SEQ ID NO: 2444664 - RNA, 19 nt, Artificial Sequence
  Description of Artificial Sequence: Synthetic oligonucleotide
uuugagcacauugagcuga

SEQ ID NO: 2444665 - RNA, 19 nt, Artificial Sequence
  Description of Artificial Sequence: Synthetic oligonucleotide
cucugggugauuaaucgag

SEQ ID NO: 2444666 - RNA, 19 nt, Artificial Sequence
  Description of Artificial Sequence: Synthetic oligonucleotide
guuuuguggggcuuauggg

SEQ ID NO: 2444667 - RNA, 19 nt, Artificial Sequence
  Description of Artificial Sequence: Synthetic oligonucleotide
uaagguaaugguucaggac

SEQ ID NO: 2444668 - RNA, 19 nt, Artificial Sequence
  Description of Artificial Sequence: Synthetic oligonucleotide
ggaacaaauggggagacgg

SEQ ID NO: 2444669 - RNA, 19 nt, Artificial Sequence
  Description of Artificial Sequence: Synthetic oligonucleotide
uaggaagaguagguuaucg

SEQ ID NO: 2444670 - RNA, 19 nt, Artificial Sequence
  Description of Artificial Sequence: Synthetic oligonucleotide
ucccucuugaaagacauca

SEQ ID NO: 2444671 - RNA, 19 nt, Artificial Sequence
  Description of Artificial Sequence: Synthetic oligonucleotide
uuauuaguccaaggggagg

SEQ ID NO: 2444672 - RNA, 19 nt, Artificial Sequence
  Description of Artificial Sequence: Synthetic oligonucleotide
ggaagaguagguuaucgcc

SEQ ID NO: 2444673 - RNA, 19 nt, Artificial Sequence
  Description of Artificial Sequence: Synthetic oligonucleotide
uuagcaaaggugccucggc

SEQ ID NO: 2444674 - RNA, 19 nt, Artificial Sequence
  Description of Artificial Sequence: Synthetic oligonucleotide
uucccuacugaucuuugca

SEQ ID NO: 2444675 - RNA, 19 nt, Artificial Sequence
  Description of Artificial Sequence: Synthetic oligonucleotide
gacgguuauuaguccaagg

SEQ ID NO: 2444676 - RNA, 19 nt, Artificial Sequence
  Description of Artificial Sequence: Synthetic oligonucleotide
uguggaacaaauggggaga

SEQ ID NO: 2444677 - RNA, 19 nt, Artificial Sequence
  Description of Artificial Sequence: Synthetic oligonucleotide
ucuccuacgccuacuuugc

SEQ ID NO: 2444678 - RNA, 19 nt, Artificial Sequence
  Description of Artificial Sequence: Synthetic oligonucleotide
cuggauaggugcuucuugc

SEQ ID NO: 2444679 - RNA, 19 nt, Artificial Sequence
  Description of Artificial Sequence: Synthetic oligonucleotide
ugggugauuaaucgagucu

SEQ ID NO: 2444680 - RNA, 19 nt, Artificial Sequence
  Description of Artificial Sequence: Synthetic oligonucleotide
uuuggcaugugauccugcc

SEQ ID NO: 2444681 - RNA, 19 nt, Artificial Sequence
  Description of Artificial Sequence: Synthetic oligonucleotide
ucugucuucaauucauuuu

SEQ ID NO: 2444682 - RNA, 19 nt, Artificial Sequence
  Description of Artificial Sequence: Synthetic oligonucleotide
ucugggauccauccagagc

SEQ ID NO: 2444683 - RNA, 19 nt, Artificial Sequence
  Description of Artificial Sequence: Synthetic oligonucleotide
gaucuuugcacucuggagu

SEQ ID NO: 2444684 - RNA, 19 nt, Artificial Sequence
  Description of Artificial Sequence: Synthetic oligonucleotide
uacuuugccucuccuucgg

SEQ ID NO: 2444685 - RNA, 19 nt, Artificial Sequence
  Description of Artificial Sequence: Synthetic oligonucleotide
uuugcucuguuuucuugcc

SEQ ID NO: 2444686 - RNA, 19 nt, Artificial Sequence
  Description of Artificial Sequence: Synthetic oligonucleotide
uagugaggagcucugugca

SEQ ID NO: 2444687 - RNA, 19 nt, Artificial Sequence
  Description of Artificial Sequence: Synthetic oligonucleotide
gauuaaucgagucuggguu

SEQ ID NO: 2444688 - RNA, 19 nt, Artificial Sequence
  Description of Artificial Sequence: Synthetic oligonucleotide
cucuugaaagacaucacga

SEQ ID NO: 2444689 - RNA, 19 nt, Artificial Sequence
  Description of Artificial Sequence: Synthetic oligonucleotide
aaaggugccucggcuuugc

SEQ ID NO: 2444690 - RNA, 19 nt, Artificial Sequence
  Description of Artificial Sequence: Synthetic oligonucleotide
acugcuauagugaggagcu

SEQ ID NO: 2444691 - RNA, 19 nt, Artificial Sequence
  Description of Artificial Sequence: Synthetic oligonucleotide
guuauuaguccaaggggag

SEQ ID NO: 2444692 - RNA, 19 nt, Artificial Sequence
  Description of Artificial Sequence: Synthetic oligonucleotide
gagcacauugagcugacuc

SEQ ID NO: 2444693 - RNA, 19 nt, Artificial Sequence
  Description of Artificial Sequence: Synthetic oligonucleotide
ucggagucaaauucaacau

SEQ ID NO: 2444694 - RNA, 19 nt, Artificial Sequence
  Description of Artificial Sequence: Synthetic oligonucleotide
cagcauuagcgccucaucc

SEQ ID NO: 2444695 - RNA, 19 nt, Artificial Sequence
  Description of Artificial Sequence: Synthetic oligonucleotide
ucuggucugugcuuccucc

SEQ ID NO: 2444696 - RNA, 19 nt, Artificial Sequence
  Description of Artificial Sequence: Synthetic oligonucleotide
uuaaucgagucuggguuag

SEQ ID NO: 2444697 - RNA, 19 nt, Artificial Sequence
  Description of Artificial Sequence: Synthetic oligonucleotide
aauggggagacgguuauua

SEQ ID NO: 2444698 - RNA, 19 nt, Artificial Sequence
  Description of Artificial Sequence: Synthetic oligonucleotide
ggacucgucguuuuguggg

SEQ ID NO: 2444699 - RNA, 19 nt, Artificial Sequence
  Description of Artificial Sequence: Synthetic oligonucleotide
uuuugagcacauugagcug

SEQ ID NO: 2444700 - RNA, 19 nt, Artificial Sequence
  Description of Artificial Sequence: Synthetic oligonucleotide
ugcacucuggaguccaacc

SEQ ID NO: 2444701 - RNA, 19 nt, Artificial Sequence
  Description of Artificial Sequence: Synthetic oligonucleotide
ucggaggguaagguaaugg

SEQ ID NO: 2444702 - RNA, 19 nt, Artificial Sequence
  Description of Artificial Sequence: Synthetic oligonucleotide
agcauuagcgccucauccu

SEQ ID NO: 2444703 - RNA, 19 nt, Artificial Sequence
  Description of Artificial Sequence: Synthetic oligonucleotide
aauucuccuacgccuacuu

SEQ ID NO: 2444704 - RNA, 19 nt, Artificial Sequence
  Description of Artificial Sequence: Synthetic oligonucleotide
uucaucuuuuauccaucga

SEQ ID NO: 2444705 - RNA, 19 nt, Artificial Sequence
  Description of Artificial Sequence: Synthetic oligonucleotide
aaucgagucuggguuagca

SEQ ID NO: 2444706 - RNA, 19 nt, Artificial Sequence
  Description of Artificial Sequence: Synthetic oligonucleotide
aggccaggagaucugauga

SEQ ID NO: 2444707 - RNA, 19 nt, Artificial Sequence
  Description of Artificial Sequence: Synthetic oligonucleotide
guaagguaaugguucagga

SEQ ID NO: 2444708 - RNA, 19 nt, Artificial Sequence
  Description of Artificial Sequence: Synthetic oligonucleotide
aagaguagguuaucgccuu

SEQ ID NO: 2444709 - RNA, 19 nt, Artificial Sequence
  Description of Artificial Sequence: Synthetic oligonucleotide
uucauuuugcugucuuggu

SEQ ID NO: 2444710 - RNA, 19 nt, Artificial Sequence
  Description of Artificial Sequence: Synthetic oligonucleotide
guaguuuauuuguggaaca

SEQ ID NO: 2444711 - RNA, 19 nt, Artificial Sequence
  Description of Artificial Sequence: Synthetic oligonucleotide
ucauuuugcugucuugguu

SEQ ID NO: 2444712 - RNA, 19 nt, Artificial Sequence
  Description of Artificial Sequence: Synthetic oligonucleotide
uggucugugcuuccuccgg

SEQ ID NO: 2444713 - RNA, 19 nt, Artificial Sequence
  Description of Artificial Sequence: Synthetic oligonucleotide
ugcuauagugaggagcucu

SEQ ID NO: 2444714 - RNA, 19 nt, Artificial Sequence
  Description of Artificial Sequence: Synthetic oligonucleotide
ucaucggagucaaauucaa

SEQ ID NO: 2444715 - RNA, 19 nt, Artificial Sequence
  Description of Artificial Sequence: Synthetic oligonucleotide
uggcaugugauccugccuu

SEQ ID NO: 2444716 - RNA, 19 nt, Artificial Sequence
  Description of Artificial Sequence: Synthetic oligonucleotide
gguaagguaaugguucagg

SEQ ID NO: 2444717 - RNA, 19 nt, Artificial Sequence
  Description of Artificial Sequence: Synthetic oligonucleotide
uaaugguucaggacucguc

SEQ ID NO: 2444718 - RNA, 19 nt, Artificial Sequence
  Description of Artificial Sequence: Synthetic oligonucleotide
gauccauccagagcuucgg

SEQ ID NO: 2444719 - RNA, 19 nt, Artificial Sequence
  Description of Artificial Sequence: Synthetic oligonucleotide
gacucgucguuuugugggg

SEQ ID NO: 2444720 - RNA, 19 nt, Artificial Sequence
  Description of Artificial Sequence: Synthetic oligonucleotide
cuuugccucuccuucgggc

SEQ ID NO: 2444721 - RNA, 19 nt, Artificial Sequence
  Description of Artificial Sequence: Synthetic oligonucleotide
ucugggugauuaaucgagu

SEQ ID NO: 2444722 - RNA, 19 nt, Artificial Sequence
  Description of Artificial Sequence: Synthetic oligonucleotide
cugccuuagucucagguuc

SEQ ID NO: 2444723 - RNA, 19 nt, Artificial Sequence
  Description of Artificial Sequence: Synthetic oligonucleotide
gugauuaaucgagucuggg

SEQ ID NO: 2444724 - RNA, 19 nt, Artificial Sequence
  Description of Artificial Sequence: Synthetic oligonucleotide
ggugcuucuugccugcacg

SEQ ID NO: 2444725 - RNA, 19 nt, Artificial Sequence
  Description of Artificial Sequence: Synthetic oligonucleotide
ugcuuucugucuucaauuc

SEQ ID NO: 2444726 - RNA, 19 nt, Artificial Sequence
  Description of Artificial Sequence: Synthetic oligonucleotide
auuaaucgagucuggguua

SEQ ID NO: 2444727 - RNA, 19 nt, Artificial Sequence
  Description of Artificial Sequence: Synthetic oligonucleotide
aggacucgucguuuugugg

SEQ ID NO: 2444728 - RNA, 19 nt, Artificial Sequence
  Description of Artificial Sequence: Synthetic oligonucleotide
uggggagacgguuauuagu

SEQ ID NO: 2444729 - RNA, 19 nt, Artificial Sequence
  Description of Artificial Sequence: Synthetic oligonucleotide
caucccgcagcauuagcgc

SEQ ID NO: 2444730 - RNA, 19 nt, Artificial Sequence
  Description of Artificial Sequence: Synthetic oligonucleotide
uggauaggugcuucuugcc

SEQ ID NO: 2444731 - RNA, 19 nt, Artificial Sequence
  Description of Artificial Sequence: Synthetic oligonucleotide
ucccuacugaucuuugcac

SEQ ID NO: 2444732 - RNA, 19 nt, Artificial Sequence
  Description of Artificial Sequence: Synthetic oligonucleotide
cauugagcugacuccaguc

SEQ ID NO: 2444733 - RNA, 19 nt, Artificial Sequence
  Description of Artificial Sequence: Synthetic oligonucleotide
ggcuuaugggugcagaggc

SEQ ID NO: 2444734 - RNA, 19 nt, Artificial Sequence
  Description of Artificial Sequence: Synthetic oligonucleotide
guuagcaaaggugccucgg

SEQ ID NO: 2444735 - RNA, 19 nt, Artificial Sequence
  Description of Artificial Sequence: Synthetic oligonucleotide
auagcgcaagcaaagcguc

SEQ ID NO: 2444736 - RNA, 19 nt, Artificial Sequence
  Description of Artificial Sequence: Synthetic oligonucleotide
uccuccggcagcaacugcu

SEQ ID NO: 2444737 - RNA, 19 nt, Artificial Sequence
  Description of Artificial Sequence: Synthetic oligonucleotide
acggugggcagucagcaug

SEQ ID NO: 2444738 - RNA, 19 nt, Artificial Sequence
  Description of Artificial Sequence: Synthetic oligonucleotide
gguuauuaguccaagggga

SEQ ID NO: 2444739 - RNA, 19 nt, Artificial Sequence
  Description of Artificial Sequence: Synthetic oligonucleotide
uuaugggugcagaggccag

SEQ ID NO: 2444740 - RNA, 19 nt, Artificial Sequence
  Description of Artificial Sequence: Synthetic oligonucleotide
agagcuucggaggguaagg

SEQ ID NO: 2444741 - RNA, 19 nt, Artificial Sequence
  Description of Artificial Sequence: Synthetic oligonucleotide
uagcaaaggugccucggcu

SEQ ID NO: 2444742 - RNA, 19 nt, Artificial Sequence
  Description of Artificial Sequence: Synthetic oligonucleotide
uuuuauccaucgaccuugu

SEQ ID NO: 2444743 - RNA, 19 nt, Artificial Sequence
  Description of Artificial Sequence: Synthetic oligonucleotide
ccucuugaaagacaucacg

SEQ ID NO: 2444744 - RNA, 19 nt, Artificial Sequence
  Description of Artificial Sequence: Synthetic oligonucleotide
ugccuuagucucagguucc

SEQ ID NO: 2444745 - RNA, 19 nt, Artificial Sequence
  Description of Artificial Sequence: Synthetic oligonucleotide
cugggauccauccagagcu

SEQ ID NO: 2444746 - RNA, 19 nt, Artificial Sequence
  Description of Artificial Sequence: Synthetic oligonucleotide
ucuccuucgggccaccgua

SEQ ID NO: 2444747 - RNA, 19 nt, Artificial Sequence
  Description of Artificial Sequence: Synthetic oligonucleotide
ugugcuuccuccggcagca

SEQ ID NO: 2444748 - RNA, 19 nt, Artificial Sequence
  Description of Artificial Sequence: Synthetic oligonucleotide
auuagcgccucauccucug

SEQ ID NO: 2444749 - RNA, 19 nt, Artificial Sequence
  Description of Artificial Sequence: Synthetic oligonucleotide
ugugcagagcacucugggu

SEQ ID NO: 2444750 - RNA, 19 nt, Artificial Sequence
  Description of Artificial Sequence: Synthetic oligonucleotide
uccuacgccuacuuugccu

SEQ ID NO: 2444751 - RNA, 19 nt, Artificial Sequence
  Description of Artificial Sequence: Synthetic oligonucleotide
cucaucggagucaaauuca

SEQ ID NO: 2444752 - RNA, 19 nt, Artificial Sequence
  Description of Artificial Sequence: Synthetic oligonucleotide
ugaggagcucugugcagag

SEQ ID NO: 2444753 - RNA, 19 nt, Artificial Sequence
  Description of Artificial Sequence: Synthetic oligonucleotide
aggguaagguaaugguuca

SEQ ID NO: 2444754 - RNA, 19 nt, Artificial Sequence
  Description of Artificial Sequence: Synthetic oligonucleotide
uaguuuauuuguggaacaa

SEQ ID NO: 2444755 - RNA, 19 nt, Artificial Sequence
  Description of Artificial Sequence: Synthetic oligonucleotide
uucaggacucgucguuuug

SEQ ID NO: 2444756 - RNA, 19 nt, Artificial Sequence
  Description of Artificial Sequence: Synthetic oligonucleotide
cguuuuguggggcuuaugg

SEQ ID NO: 2444757 - RNA, 19 nt, Artificial Sequence
  Description of Artificial Sequence: Synthetic oligonucleotide
cugggugauuaaucgaguc

SEQ ID NO: 2444758 - RNA, 19 nt, Artificial Sequence
  Description of Artificial Sequence: Synthetic oligonucleotide
gauagcgcaagcaaagcgu

SEQ ID NO: 2444759 - RNA, 19 nt, Artificial Sequence
  Description of Artificial Sequence: Synthetic oligonucleotide
agguaaugguucaggacuc

SEQ ID NO: 2444760 - RNA, 19 nt, Artificial Sequence
  Description of Artificial Sequence: Synthetic oligonucleotide
augacucuuuggcauguga

SEQ ID NO: 2444761 - RNA, 19 nt, Artificial Sequence
  Description of Artificial Sequence: Synthetic oligonucleotide
gcaagucuccaacucuucg

SEQ ID NO: 2444762 - RNA, 19 nt, Artificial Sequence
  Description of Artificial Sequence: Synthetic oligonucleotide
auggggagacgguuauuag

SEQ ID NO: 2444763 - RNA, 19 nt, Artificial Sequence
  Description of Artificial Sequence: Synthetic oligonucleotide
uaugggugcagaggccagg

SEQ ID NO: 2444764 - RNA, 19 nt, Artificial Sequence
  Description of Artificial Sequence: Synthetic oligonucleotide
uucgggccaccguaggaag

SEQ ID NO: 2444765 - RNA, 19 nt, Artificial Sequence
  Description of Artificial Sequence: Synthetic oligonucleotide
caaagcguccaucccgcag

SEQ ID NO: 2444766 - RNA, 19 nt, Artificial Sequence
  Description of Artificial Sequence: Synthetic oligonucleotide
uggaacaaauggggagacg

SEQ ID NO: 2444767 - RNA, 19 nt, Artificial Sequence
  Description of Artificial Sequence: Synthetic oligonucleotide
ugcacggugggcagucagc

SEQ ID NO: 2444768 - RNA, 19 nt, Artificial Sequence
  Description of Artificial Sequence: Synthetic oligonucleotide
uguaacuggccagcaaguc

SEQ ID NO: 2444769 - RNA, 19 nt, Artificial Sequence
  Description of Artificial Sequence: Synthetic oligonucleotide
gaguccaaccucuggggca

SEQ ID NO: 2444770 - RNA, 19 nt, Artificial Sequence
  Description of Artificial Sequence: Synthetic oligonucleotide
gcagauagcgcaagcaaag

SEQ ID NO: 2444771 - RNA, 19 nt, Artificial Sequence
  Description of Artificial Sequence: Synthetic oligonucleotide
gaagaguagguuaucgccu

SEQ ID NO: 2444772 - RNA, 19 nt, Artificial Sequence
  Description of Artificial Sequence: Synthetic oligonucleotide
cuuuggcaugugauccugc

SEQ ID NO: 2444773 - RNA, 19 nt, Artificial Sequence
  Description of Artificial Sequence: Synthetic oligonucleotide
agucuggguuagcaaaggu

SEQ ID NO: 2444774 - RNA, 19 nt, Artificial Sequence
  Description of Artificial Sequence: Synthetic oligonucleotide
guucccuacugaucuuugc

SEQ ID NO: 2444775 - RNA, 19 nt, Artificial Sequence
  Description of Artificial Sequence: Synthetic oligonucleotide
cuggucugugcuuccuccg

SEQ ID NO: 2444776 - RNA, 19 nt, Artificial Sequence
  Description of Artificial Sequence: Synthetic oligonucleotide
cucagguucccuacugauc

SEQ ID NO: 2444777 - RNA, 19 nt, Artificial Sequence
  Description of Artificial Sequence: Synthetic oligonucleotide
uagcgcaagcaaagcgucc

SEQ ID NO: 2444778 - RNA, 19 nt, Artificial Sequence
  Description of Artificial Sequence: Synthetic oligonucleotide
uggguuagcaaaggugccu

SEQ ID NO: 2444779 - RNA, 19 nt, Artificial Sequence
  Description of Artificial Sequence: Synthetic oligonucleotide
aguccaaccucuggggcag

SEQ ID NO: 2444780 - RNA, 19 nt, Artificial Sequence
  Description of Artificial Sequence: Synthetic oligonucleotide
auuaguccaaggggagguc

SEQ ID NO: 2444781 - RNA, 19 nt, Artificial Sequence
  Description of Artificial Sequence: Synthetic oligonucleotide
gacuccagucgucaccuuc

SEQ ID NO: 2444782 - RNA, 19 nt, Artificial Sequence
  Description of Artificial Sequence: Synthetic oligonucleotide
aggugcuucuugccugcac

SEQ ID NO: 2444783 - RNA, 19 nt, Artificial Sequence
  Description of Artificial Sequence: Synthetic oligonucleotide
gugagucuuagaaauaaua

SEQ ID NO: 2444784 - RNA, 19 nt, Artificial Sequence
  Description of Artificial Sequence: Synthetic oligonucleotide
ucaggacucgucguuuugu

SEQ ID NO: 2444785 - RNA, 19 nt, Artificial Sequence
  Description of Artificial Sequence: Synthetic oligonucleotide
acucgucguuuuguggggc

SEQ ID NO: 2444786 - RNA, 19 nt, Artificial Sequence
  Description of Artificial Sequence: Synthetic oligonucleotide
cugaucuuugcacucugga

SEQ ID NO: 2444787 - RNA, 19 nt, Artificial Sequence
  Description of Artificial Sequence: Synthetic oligonucleotide
cucugugcagagcacucug

SEQ ID NO: 2444788 - RNA, 19 nt, Artificial Sequence
  Description of Artificial Sequence: Synthetic oligonucleotide
cuuaugggugcagaggcca

SEQ ID NO: 2444789 - RNA, 19 nt, Artificial Sequence
  Description of Artificial Sequence: Synthetic oligonucleotide
ccuacuuugccucuccuuc

SEQ ID NO: 2444790 - RNA, 19 nt, Artificial Sequence
  Description of Artificial Sequence: Synthetic oligonucleotide
uccucaucggagucaaauu

SEQ ID NO: 2444791 - RNA, 19 nt, Artificial Sequence
  Description of Artificial Sequence: Synthetic oligonucleotide
cgguuauuaguccaagggg

SEQ ID NO: 2444792 - RNA, 19 nt, Artificial Sequence
  Description of Artificial Sequence: Synthetic oligonucleotide
cuguaguuuauuuguggaa

SEQ ID NO: 2444793 - RNA, 19 nt, Artificial Sequence
  Description of Artificial Sequence: Synthetic oligonucleotide
agcugacuccagucgucac

SEQ ID NO: 2444794 - RNA, 19 nt, Artificial Sequence
  Description of Artificial Sequence: Synthetic oligonucleotide
auuuugcugucuugguuuu

SEQ ID NO: 2444795 - RNA, 19 nt, Artificial Sequence
  Description of Artificial Sequence: Synthetic oligonucleotide
auccucugggauguaacug

SEQ ID NO: 2444796 - RNA, 19 nt, Artificial Sequence
  Description of Artificial Sequence: Synthetic oligonucleotide
ggugauuaaucgagucugg

SEQ ID NO: 2444797 - RNA, 19 nt, Artificial Sequence
  Description of Artificial Sequence: Synthetic oligonucleotide
caucggagucaaauucaac

SEQ ID NO: 2444798 - RNA, 19 nt, Artificial Sequence
  Description of Artificial Sequence: Synthetic oligonucleotide
cacucuggaguccaaccuc

SEQ ID NO: 2444799 - RNA, 19 nt, Artificial Sequence
  Description of Artificial Sequence: Synthetic oligonucleotide
cuuagucucagguucccua

SEQ ID NO: 2444800 - RNA, 19 nt, Artificial Sequence
  Description of Artificial Sequence: Synthetic oligonucleotide
cagauagcgcaagcaaagc

SEQ ID NO: 2444801 - RNA, 19 nt, Artificial Sequence
  Description of Artificial Sequence: Synthetic oligonucleotide
cacauugagcugacuccag

SEQ ID NO: 2444802 - RNA, 19 nt, Artificial Sequence
  Description of Artificial Sequence: Synthetic oligonucleotide
uccaucccgcagcauuagc

SEQ ID NO: 2444803 - RNA, 19 nt, Artificial Sequence
  Description of Artificial Sequence: Synthetic oligonucleotide
agacgguuauuaguccaag

SEQ ID NO: 2444804 - RNA, 19 nt, Artificial Sequence
  Description of Artificial Sequence: Synthetic oligonucleotide
caggacucgucguuuugug

SEQ ID NO: 2444805 - RNA, 19 nt, Artificial Sequence
  Description of Artificial Sequence: Synthetic oligonucleotide
aucgagucuggguuagcaa

SEQ ID NO: 2444806 - RNA, 19 nt, Artificial Sequence
  Description of Artificial Sequence: Synthetic oligonucleotide
aagcguccaucccgcagca

SEQ ID NO: 2444807 - RNA, 19 nt, Artificial Sequence
  Description of Artificial Sequence: Synthetic oligonucleotide
ugguucaggacucgucguu

SEQ ID NO: 2444808 - RNA, 19 nt, Artificial Sequence
  Description of Artificial Sequence: Synthetic oligonucleotide
gucgucaccuucccucuug

SEQ ID NO: 2444809 - RNA, 19 nt, Artificial Sequence
  Description of Artificial Sequence: Synthetic oligonucleotide
ggagacgguuauuagucca

SEQ ID NO: 2444810 - RNA, 19 nt, Artificial Sequence
  Description of Artificial Sequence: Synthetic oligonucleotide
ucaaacuggauaggugcuu

SEQ ID NO: 2444811 - RNA, 19 nt, Artificial Sequence
  Description of Artificial Sequence: Synthetic oligonucleotide
uuuauccaucgaccuuguc

SEQ ID NO: 2444812 - RNA, 19 nt, Artificial Sequence
  Description of Artificial Sequence: Synthetic oligonucleotide
ucacgacugugagucuuag

SEQ ID NO: 2444813 - RNA, 19 nt, Artificial Sequence
  Description of Artificial Sequence: Synthetic oligonucleotide
ggggagacgguuauuaguc

SEQ ID NO: 2444814 - RNA, 19 nt, Artificial Sequence
  Description of Artificial Sequence: Synthetic oligonucleotide
aacuggauaggugcuucuu

SEQ ID NO: 2444815 - RNA, 19 nt, Artificial Sequence
  Description of Artificial Sequence: Synthetic oligonucleotide
ccagucgucaccuucccuc

SEQ ID NO: 2444816 - RNA, 19 nt, Artificial Sequence
  Description of Artificial Sequence: Synthetic oligonucleotide
gguaaugguucaggacucg

SEQ ID NO: 2444817 - RNA, 19 nt, Artificial Sequence
  Description of Artificial Sequence: Synthetic oligonucleotide
ggaguccaaccucuggggc

SEQ ID NO: 2444818 - RNA, 19 nt, Artificial Sequence
  Description of Artificial Sequence: Synthetic oligonucleotide
gcguguccaggacuggucg

SEQ ID NO: 2444819 - RNA, 19 nt, Artificial Sequence
  Description of Artificial Sequence: Synthetic oligonucleotide
uucggaggguaagguaaug

SEQ ID NO: 2444820 - RNA, 19 nt, Artificial Sequence
  Description of Artificial Sequence: Synthetic oligonucleotide
uccggcagcaacugcuaua

SEQ ID NO: 2444821 - RNA, 19 nt, Artificial Sequence
  Description of Artificial Sequence: Synthetic oligonucleotide
agcacucugggugauuaau

SEQ ID NO: 2444822 - RNA, 19 nt, Artificial Sequence
  Description of Artificial Sequence: Synthetic oligonucleotide
uuugcacucuggaguccaa

SEQ ID NO: 2444823 - RNA, 19 nt, Artificial Sequence
  Description of Artificial Sequence: Synthetic oligonucleotide
uccagucgucaccuucccu

SEQ ID NO: 2444824 - RNA, 19 nt, Artificial Sequence
  Description of Artificial Sequence: Synthetic oligonucleotide
agagcacucugggugauua

SEQ ID NO: 2444825 - RNA, 19 nt, Artificial Sequence
  Description of Artificial Sequence: Synthetic oligonucleotide
agcguguccaggacugguc

SEQ ID NO: 2444826 - RNA, 19 nt, Artificial Sequence
  Description of Artificial Sequence: Synthetic oligonucleotide
guggaacaaauggggagac

SEQ ID NO: 2444827 - RNA, 19 nt, Artificial Sequence
  Description of Artificial Sequence: Synthetic oligonucleotide
ggggcuuaugggugcagag

SEQ ID NO: 2444828 - RNA, 19 nt, Artificial Sequence
  Description of Artificial Sequence: Synthetic oligonucleotide
cagagcuucggaggguaag

SEQ ID NO: 2444829 - RNA, 19 nt, Artificial Sequence
  Description of Artificial Sequence: Synthetic oligonucleotide
ucgggccaccguaggaaga

SEQ ID NO: 2444830 - RNA, 19 nt, Artificial Sequence
  Description of Artificial Sequence: Synthetic oligonucleotide
gggcuuaugggugcagagg

SEQ ID NO: 2444831 - RNA, 19 nt, Artificial Sequence
  Description of Artificial Sequence: Synthetic oligonucleotide
gaugacucuuuggcaugug

SEQ ID NO: 2444832 - RNA, 19 nt, Artificial Sequence
  Description of Artificial Sequence: Synthetic oligonucleotide
gggagacgguuauuagucc

SEQ ID NO: 2444833 - RNA, 19 nt, Artificial Sequence
  Description of Artificial Sequence: Synthetic oligonucleotide
gagacgguuauuaguccaa

SEQ ID NO: 2444834 - RNA, 19 nt, Artificial Sequence
  Description of Artificial Sequence: Synthetic oligonucleotide
caagucuccaacucuucgu

SEQ ID NO: 2444835 - RNA, 19 nt, Artificial Sequence
  Description of Artificial Sequence: Synthetic oligonucleotide
agcuucggaggguaaggua

SEQ ID NO: 2444836 - RNA, 19 nt, Artificial Sequence
  Description of Artificial Sequence: Synthetic oligonucleotide
uccaucgaccuuguccauc

SEQ ID NO: 2444837 - RNA, 19 nt, Artificial Sequence
  Description of Artificial Sequence: Synthetic oligonucleotide
gucucagguucccuacuga

SEQ ID NO: 2444838 - RNA, 19 nt, Artificial Sequence
  Description of Artificial Sequence: Synthetic oligonucleotide
auucuccuacgccuacuuu

SEQ ID NO: 2444839 - RNA, 19 nt, Artificial Sequence
  Description of Artificial Sequence: Synthetic oligonucleotide
cuccagucgucaccuuccc

SEQ ID NO: 2444840 - RNA, 19 nt, Artificial Sequence
  Description of Artificial Sequence: Synthetic oligonucleotide
uuccuccggcagcaacugc

SEQ ID NO: 2444841 - RNA, 19 nt, Artificial Sequence
  Description of Artificial Sequence: Synthetic oligonucleotide
caacugcuauagugaggag

SEQ ID NO: 2444842 - RNA, 19 nt, Artificial Sequence
  Description of Artificial Sequence: Synthetic oligonucleotide
gcuauagugaggagcucug

SEQ ID NO: 2444843 - RNA, 19 nt, Artificial Sequence
  Description of Artificial Sequence: Synthetic oligonucleotide
gcauuagcgccucauccuc

SEQ ID NO: 2444844 - RNA, 19 nt, Artificial Sequence
  Description of Artificial Sequence: Synthetic oligonucleotide
cugcacggugggcagucag

SEQ ID NO: 2444845 - RNA, 19 nt, Artificial Sequence
  Description of Artificial Sequence: Synthetic oligonucleotide
uaaucgagucuggguuagc

SEQ ID NO: 2444846 - RNA, 19 nt, Artificial Sequence
  Description of Artificial Sequence: Synthetic oligonucleotide
ccaccguaggaagaguagg

SEQ ID NO: 2444847 - RNA, 19 nt, Artificial Sequence
  Description of Artificial Sequence: Synthetic oligonucleotide
uugcacucuggaguccaac

SEQ ID NO: 2444848 - RNA, 19 nt, Artificial Sequence
  Description of Artificial Sequence: Synthetic oligonucleotide
ggagucaaauucaacauuu

SEQ ID NO: 2444849 - RNA, 19 nt, Artificial Sequence
  Description of Artificial Sequence: Synthetic oligonucleotide
guaggaagaguagguuauc

SEQ ID NO: 2444850 - RNA, 19 nt, Artificial Sequence
  Description of Artificial Sequence: Synthetic oligonucleotide
acaucacgacugugagucu

SEQ ID NO: 2444851 - RNA, 19 nt, Artificial Sequence
  Description of Artificial Sequence: Synthetic oligonucleotide
cuccuacgccuacuuugcc

SEQ ID NO: 2444852 - RNA, 19 nt, Artificial Sequence
  Description of Artificial Sequence: Synthetic oligonucleotide
gcuucggaggguaagguaa

SEQ ID NO: 2444853 - RNA, 19 nt, Artificial Sequence
  Description of Artificial Sequence: Synthetic oligonucleotide
gagcugacuccagucguca

SEQ ID NO: 2444854 - RNA, 19 nt, Artificial Sequence
  Description of Artificial Sequence: Synthetic oligonucleotide
cucuggaguccaaccucug

SEQ ID NO: 2444855 - RNA, 19 nt, Artificial Sequence
  Description of Artificial Sequence: Synthetic oligonucleotide
accguaggaagaguagguu

SEQ ID NO: 2444856 - RNA, 19 nt, Artificial Sequence
  Description of Artificial Sequence: Synthetic oligonucleotide
ccggcagcaacugcuauag

SEQ ID NO: 2444857 - RNA, 19 nt, Artificial Sequence
  Description of Artificial Sequence: Synthetic oligonucleotide
gaacaaauggggagacggu

SEQ ID NO: 2444858 - RNA, 19 nt, Artificial Sequence
  Description of Artificial Sequence: Synthetic oligonucleotide
aaauggggagacgguuauu

SEQ ID NO: 2444859 - RNA, 19 nt, Artificial Sequence
  Description of Artificial Sequence: Synthetic oligonucleotide
ucguuuuguggggcuuaug

SEQ ID NO: 2444860 - RNA, 19 nt, Artificial Sequence
  Description of Artificial Sequence: Synthetic oligonucleotide
aggugccucggcuuugcuu

SEQ ID NO: 2444861 - RNA, 19 nt, Artificial Sequence
  Description of Artificial Sequence: Synthetic oligonucleotide
ggauaggugcuucuugccu

SEQ ID NO: 2444862 - RNA, 19 nt, Artificial Sequence
  Description of Artificial Sequence: Synthetic oligonucleotide
gggcagauagcgcaagcaa

SEQ ID NO: 2444863 - RNA, 19 nt, Artificial Sequence
  Description of Artificial Sequence: Synthetic oligonucleotide
ucuugccugcacggugggc

SEQ ID NO: 2444864 - RNA, 19 nt, Artificial Sequence
  Description of Artificial Sequence: Synthetic oligonucleotide
ugggauccauccagagcuu

SEQ ID NO: 2444865 - RNA, 19 nt, Artificial Sequence
  Description of Artificial Sequence: Synthetic oligonucleotide
gacccacuguaguuuauuu

SEQ ID NO: 2444866 - RNA, 19 nt, Artificial Sequence
  Description of Artificial Sequence: Synthetic oligonucleotide
ggcagauagcgcaagcaaa

SEQ ID NO: 2444867 - RNA, 19 nt, Artificial Sequence
  Description of Artificial Sequence: Synthetic oligonucleotide
caccguaggaagaguaggu

SEQ ID NO: 2444868 - RNA, 19 nt, Artificial Sequence
  Description of Artificial Sequence: Synthetic oligonucleotide
caauucauuuugcugucuu

SEQ ID NO: 2444869 - RNA, 19 nt, Artificial Sequence
  Description of Artificial Sequence: Synthetic oligonucleotide
gcagcauuagcgccucauc

SEQ ID NO: 2444870 - RNA, 19 nt, Artificial Sequence
  Description of Artificial Sequence: Synthetic oligonucleotide
ugagcacauugagcugacu

SEQ ID NO: 2444871 - RNA, 19 nt, Artificial Sequence
  Description of Artificial Sequence: Synthetic oligonucleotide
cuucgggccaccguaggaa

SEQ ID NO: 2444872 - RNA, 19 nt, Artificial Sequence
  Description of Artificial Sequence: Synthetic oligonucleotide
uacgccuacuuugccucuc

SEQ ID NO: 2444873 - RNA, 19 nt, Artificial Sequence
  Description of Artificial Sequence: Synthetic oligonucleotide
agguucccuacugaucuuu

SEQ ID NO: 2444874 - RNA, 19 nt, Artificial Sequence
  Description of Artificial Sequence: Synthetic oligonucleotide
auccugccuuagucucagg

SEQ ID NO: 2444875 - RNA, 19 nt, Artificial Sequence
  Description of Artificial Sequence: Synthetic oligonucleotide
gccaccguaggaagaguag

SEQ ID NO: 2444876 - RNA, 19 nt, Artificial Sequence
  Description of Artificial Sequence: Synthetic oligonucleotide
guccaucccgcagcauuag

SEQ ID NO: 2444877 - RNA, 19 nt, Artificial Sequence
  Description of Artificial Sequence: Synthetic oligonucleotide
caggagaucugaugacucu

SEQ ID NO: 2444878 - RNA, 19 nt, Artificial Sequence
  Description of Artificial Sequence: Synthetic oligonucleotide
ggguaagguaaugguucag

SEQ ID NO: 2444879 - RNA, 19 nt, Artificial Sequence
  Description of Artificial Sequence: Synthetic oligonucleotide
gccagcguguccaggacug

SEQ ID NO: 2444880 - RNA, 19 nt, Artificial Sequence
  Description of Artificial Sequence: Synthetic oligonucleotide
gcuuaugggugcagaggcc

SEQ ID NO: 2444881 - RNA, 19 nt, Artificial Sequence
  Description of Artificial Sequence: Synthetic oligonucleotide
ggagccucuggucugugcu

SEQ ID NO: 2444882 - RNA, 19 nt, Artificial Sequence
  Description of Artificial Sequence: Synthetic oligonucleotide
gguucccuacugaucuuug

SEQ ID NO: 2444883 - RNA, 19 nt, Artificial Sequence
  Description of Artificial Sequence: Synthetic oligonucleotide
ggauguaacuggccagcaa

SEQ ID NO: 2444884 - RNA, 19 nt, Artificial Sequence
  Description of Artificial Sequence: Synthetic oligonucleotide
guaaugguucaggacucgu

SEQ ID NO: 2444885 - RNA, 19 nt, Artificial Sequence
  Description of Artificial Sequence: Synthetic oligonucleotide
cugacuccagucgucaccu

SEQ ID NO: 2444886 - RNA, 19 nt, Artificial Sequence
  Description of Artificial Sequence: Synthetic oligonucleotide
gcaugugauccugccuuag

SEQ ID NO: 2444887 - RNA, 19 nt, Artificial Sequence
  Description of Artificial Sequence: Synthetic oligonucleotide
cacgacugugagucuuaga

SEQ ID NO: 2444888 - RNA, 19 nt, Artificial Sequence
  Description of Artificial Sequence: Synthetic oligonucleotide
caugugauccugccuuagu

SEQ ID NO: 2444889 - RNA, 19 nt, Artificial Sequence
  Description of Artificial Sequence: Synthetic oligonucleotide
gagcacucugggugauuaa

SEQ ID NO: 2444890 - RNA, 19 nt, Artificial Sequence
  Description of Artificial Sequence: Synthetic oligonucleotide
cauuagcgccucauccucu

SEQ ID NO: 2444891 - RNA, 19 nt, Artificial Sequence
  Description of Artificial Sequence: Synthetic oligonucleotide
gagucaaauucaacauuuu

SEQ ID NO: 2444892 - RNA, 19 nt, Artificial Sequence
  Description of Artificial Sequence: Synthetic oligonucleotide
auccaucgaccuuguccau

SEQ ID NO: 2444893 - RNA, 19 nt, Artificial Sequence
  Description of Artificial Sequence: Synthetic oligonucleotide
aucacgacugugagucuua

SEQ ID NO: 2444894 - RNA, 19 nt, Artificial Sequence
  Description of Artificial Sequence: Synthetic oligonucleotide
cuacugaucuuugcacucu

SEQ ID NO: 2444895 - RNA, 19 nt, Artificial Sequence
  Description of Artificial Sequence: Synthetic oligonucleotide
caggacccacuguaguuua

SEQ ID NO: 2444896 - RNA, 19 nt, Artificial Sequence
  Description of Artificial Sequence: Synthetic oligonucleotide
ucgucguuuuguggggcuu

SEQ ID NO: 2444897 - RNA, 19 nt, Artificial Sequence
  Description of Artificial Sequence: Synthetic oligonucleotide
caucgaccuuguccaucug

SEQ ID NO: 2444898 - RNA, 19 nt, Artificial Sequence
  Description of Artificial Sequence: Synthetic oligonucleotide
cagcaagucuccaacucuu

SEQ ID NO: 2444899 - RNA, 19 nt, Artificial Sequence
  Description of Artificial Sequence: Synthetic oligonucleotide
ccguaggaagaguagguua

SEQ ID NO: 2444900 - RNA, 19 nt, Artificial Sequence
  Description of Artificial Sequence: Synthetic oligonucleotide
agucgucaccuucccucuu

SEQ ID NO: 2444901 - RNA, 19 nt, Artificial Sequence
  Description of Artificial Sequence: Synthetic oligonucleotide
gagcuucggaggguaaggu

SEQ ID NO: 2444902 - RNA, 19 nt, Artificial Sequence
  Description of Artificial Sequence: Synthetic oligonucleotide
ugccucggcuuugcuuucu

SEQ ID NO: 2444903 - RNA, 19 nt, Artificial Sequence
  Description of Artificial Sequence: Synthetic oligonucleotide
gcacucuggaguccaaccu

SEQ ID NO: 2444904 - RNA, 19 nt, Artificial Sequence
  Description of Artificial Sequence: Synthetic oligonucleotide
cuucggaggguaagguaau

SEQ ID NO: 2444905 - RNA, 19 nt, Artificial Sequence
  Description of Artificial Sequence: Synthetic oligonucleotide
guucaggacucgucguuuu

SEQ ID NO: 2444906 - RNA, 19 nt, Artificial Sequence
  Description of Artificial Sequence: Synthetic oligonucleotide
cagucgucaccuucccucu

SEQ ID NO: 2444907 - RNA, 19 nt, Artificial Sequence
  Description of Artificial Sequence: Synthetic oligonucleotide
cagaggccaggagaucuga

SEQ ID NO: 2444908 - RNA, 19 nt, Artificial Sequence
  Description of Artificial Sequence: Synthetic oligonucleotide
cuauagugaggagcucugu

SEQ ID NO: 2444909 - RNA, 19 nt, Artificial Sequence
  Description of Artificial Sequence: Synthetic oligonucleotide
gccuuagucucagguuccc

SEQ ID NO: 2444910 - RNA, 19 nt, Artificial Sequence
  Description of Artificial Sequence: Synthetic oligonucleotide
guggggcuuaugggugcag

SEQ ID NO: 2444911 - RNA, 19 nt, Artificial Sequence
  Description of Artificial Sequence: Synthetic oligonucleotide
gcacggugggcagucagca

SEQ ID NO: 2444912 - RNA, 19 nt, Artificial Sequence
  Description of Artificial Sequence: Synthetic oligonucleotide
cucgucguuuuguggggcu

SEQ ID NO: 2444913 - RNA, 19 nt, Artificial Sequence
  Description of Artificial Sequence: Synthetic oligonucleotide
ggaggguaagguaaugguu

SEQ ID NO: 2444914 - RNA, 19 nt, Artificial Sequence
  Description of Artificial Sequence: Synthetic oligonucleotide
gggauccauccagagcuuc

SEQ ID NO: 2444915 - RNA, 19 nt, Artificial Sequence
  Description of Artificial Sequence: Synthetic oligonucleotide
ugacuccagucgucaccuu

SEQ ID NO: 2444916 - RNA, 19 nt, Artificial Sequence
  Description of Artificial Sequence: Synthetic oligonucleotide
cguaggaagaguagguuau

SEQ ID NO: 2444917 - RNA, 19 nt, Artificial Sequence
  Description of Artificial Sequence: Synthetic oligonucleotide
ccaucgaccuuguccaucu

SEQ ID NO: 2444918 - RNA, 19 nt, Artificial Sequence
  Description of Artificial Sequence: Synthetic oligonucleotide
ggcaugugauccugccuua

SEQ ID NO: 2444919 - RNA, 19 nt, Artificial Sequence
  Description of Artificial Sequence: Synthetic oligonucleotide
ccagcaagucuccaacucu

SEQ ID NO: 2444920 - RNA, 19 nt, Artificial Sequence
  Description of Artificial Sequence: Synthetic oligonucleotide
cccuacugaucuuugcacu

SEQ ID NO: 2444921 - RNA, 19 nt, Artificial Sequence
  Description of Artificial Sequence: Synthetic oligonucleotide
caucacgacugugagucuu

SEQ ID NO: 2444922 - RNA, 19 nt, Artificial Sequence
  Description of Artificial Sequence: Synthetic oligonucleotide
gagccucuggucugugcuu

SEQ ID NO: 2444923 - RNA, 19 nt, Artificial Sequence
  Description of Artificial Sequence: Synthetic oligonucleotide
aggacccacuguaguuuau

SEQ ID NO: 2444924 - RNA, 19 nt, Artificial Sequence
  Description of Artificial Sequence: Synthetic oligonucleotide
cuacgccuacuuugccucu

SEQ ID NO: 2444925 - RNA, 19 nt, Artificial Sequence
  Description of Artificial Sequence: Synthetic oligonucleotide
cgacugugagucuuagaaa

SEQ ID NO: 2444926 - RNA, 19 nt, Artificial Sequence
  Description of Artificial Sequence: Synthetic oligonucleotide
gcaaagcguccaucccgca

SEQ ID NO: 2444927 - RNA, 19 nt, Artificial Sequence
  Description of Artificial Sequence: Synthetic oligonucleotide
ggccaccguaggaagagua

SEQ ID NO: 2444928 - RNA, 19 nt, Artificial Sequence
  Description of Artificial Sequence: Synthetic oligonucleotide
ggcagucagcauggccagc

SEQ ID NO: 2444929 - RNA, 19 nt, Artificial Sequence
  Description of Artificial Sequence: Synthetic oligonucleotide
gcguccaucccgcagcauu

SEQ ID NO: 2444930 - RNA, 19 nt, Artificial Sequence
  Description of Artificial Sequence: Synthetic oligonucleotide
ccuucgggccaccguagga

SEQ ID NO: 2444931 - RNA, 19 nt, Artificial Sequence
  Description of Artificial Sequence: Synthetic oligonucleotide
ccugccuuagucucagguu

SEQ ID NO: 2444932 - RNA, 19 nt, Artificial Sequence
  Description of Artificial Sequence: Synthetic oligonucleotide
gucguuuuguggggcuuau

SEQ ID NO: 2444933 - RNA, 19 nt, Artificial Sequence
  Description of Artificial Sequence: Synthetic oligonucleotide
gguucaggacucgucguuu

SEQ ID NO: 2444934 - RNA, 19 nt, Artificial Sequence
  Description of Artificial Sequence: Synthetic oligonucleotide
cgcaagcaaagcguccauc

SEQ ID NO: 2444935 - RNA, 19 nt, Artificial Sequence
  Description of Artificial Sequence: Synthetic oligonucleotide
gccuacuuugccucuccuu

SEQ ID NO: 2444936 - RNA, 19 nt, Artificial Sequence
  Description of Artificial Sequence: Synthetic oligonucleotide
cagcguguccaggacuggu

SEQ ID NO: 2444937 - RNA, 19 nt, Artificial Sequence
  Description of Artificial Sequence: Synthetic oligonucleotide
agcguccaucccgcagcau

SEQ ID NO: 2444938 - RNA, 19 nt, Artificial Sequence
  Description of Artificial Sequence: Synthetic oligonucleotide
cguccaucccgcagcauua

SEQ ID NO: 2444939 - RNA, 19 nt, Artificial Sequence
  Description of Artificial Sequence: Synthetic oligonucleotide
ggacccacuguaguuuauu

SEQ ID NO: 2444940 - RNA, 19 nt, Artificial Sequence
  Description of Artificial Sequence: Synthetic oligonucleotide
cacggugggcagucagcau

SEQ ID NO: 2444941 - RNA, 19 nt, Artificial Sequence
  Description of Artificial Sequence: Synthetic oligonucleotide
cuccggcagcaacugcuau

SEQ ID NO: 2444942 - RNA, 19 nt, Artificial Sequence
  Description of Artificial Sequence: Synthetic oligonucleotide
cccgcagcauuagcgccuc

SEQ ID NO: 2444943 - RNA, 19 nt, Artificial Sequence
  Description of Artificial Sequence: Synthetic oligonucleotide
cagguucccuacugaucuu

SEQ ID NO: 2444944 - RNA, 19 nt, Artificial Sequence
  Description of Artificial Sequence: Synthetic oligonucleotide
cccaggacccacuguaguu

SEQ ID NO: 2444945 - RNA, 19 nt, Artificial Sequence
  Description of Artificial Sequence: Synthetic oligonucleotide
gcgccucauccucugggau

SEQ ID NO: 2444946 - RNA, 19 nt, Artificial Sequence
  Description of Artificial Sequence: Synthetic oligonucleotide
ccaggacccacuguaguuu

SEQ ID NO: 2444947 - RNA, 19 nt, Artificial Sequence
  Description of Artificial Sequence: Synthetic oligonucleotide
ccuuagucucagguucccu

SEQ ID NO: 2444948 - RNA, 19 nt, Artificial Sequence
  Description of Artificial Sequence: Synthetic oligonucleotide
cgucaccuucccucuugaa

SEQ ID NO: 2444949 - RNA, 19 nt, Artificial Sequence
  Description of Artificial Sequence: Synthetic oligonucleotide
gcagagcacucugggugau

SEQ ID NO: 2444950 - RNA, 19 nt, Artificial Sequence
  Description of Artificial Sequence: Synthetic oligonucleotide
cgucguuuuguggggcuua

SEQ ID NO: 2444951 - RNA, 19 nt, Artificial Sequence
  Description of Artificial Sequence: Synthetic oligonucleotide
cagagcacucugggugauu

SEQ ID NO: 2444952 - RNA, 19 nt, Artificial Sequence
  Description of Artificial Sequence: Synthetic oligonucleotide
gggccaccguaggaagagu

SEQ ID NO: 2444953 - RNA, 19 nt, Artificial Sequence
  Description of Artificial Sequence: Synthetic oligonucleotide
ccugcacggugggcaguca

SEQ ID NO: 2444954 - RNA, 19 nt, Artificial Sequence
  Description of Artificial Sequence: Synthetic oligonucleotide
cgccuacuuugccucuccu

SEQ ID NO: 2444955 - RNA, 19 nt, Artificial Sequence
  Description of Artificial Sequence: Synthetic oligonucleotide
ccgcagcauuagcgccuca

SEQ ID NO: 2444956 - RNA, 19 nt, Artificial Sequence
  Description of Artificial Sequence: Synthetic oligonucleotide
aguauuauaaucccagugc

SEQ ID NO: 2444957 - RNA, 19 nt, Artificial Sequence
  Description of Artificial Sequence: Synthetic oligonucleotide
ucaagcaaggcacaaaagg

SEQ ID NO: 2444958 - RNA, 19 nt, Artificial Sequence
  Description of Artificial Sequence: Synthetic oligonucleotide
uuugcaagaauucugggug

SEQ ID NO: 2444959 - RNA, 19 nt, Artificial Sequence
  Description of Artificial Sequence: Synthetic oligonucleotide
ugugucucgaaucacauca

SEQ ID NO: 2444960 - RNA, 19 nt, Artificial Sequence
  Description of Artificial Sequence: Synthetic oligonucleotide
auuauaaucccagugcugg

SEQ ID NO: 2444961 - RNA, 19 nt, Artificial Sequence
  Description of Artificial Sequence: Synthetic oligonucleotide
ugcaguauuauaaucccag

SEQ ID NO: 2444962 - RNA, 19 nt, Artificial Sequence
  Description of Artificial Sequence: Synthetic oligonucleotide
ucuacauucuugcucaccc

SEQ ID NO: 2444963 - RNA, 19 nt, Artificial Sequence
  Description of Artificial Sequence: Synthetic oligonucleotide
aggauugcuaucuagacca

SEQ ID NO: 2444964 - RNA, 19 nt, Artificial Sequence
  Description of Artificial Sequence: Synthetic oligonucleotide
aacucuacauucuugcuca

SEQ ID NO: 2444965 - RNA, 19 nt, Artificial Sequence
  Description of Artificial Sequence: Synthetic oligonucleotide
aaugccagcacccauguaa

SEQ ID NO: 2444966 - RNA, 19 nt, Artificial Sequence
  Description of Artificial Sequence: Synthetic oligonucleotide
uguauagggacaguggagg

SEQ ID NO: 2444967 - RNA, 19 nt, Artificial Sequence
  Description of Artificial Sequence: Synthetic oligonucleotide
ucaguaaagacccguaaga

SEQ ID NO: 2444968 - RNA, 19 nt, Artificial Sequence
  Description of Artificial Sequence: Synthetic oligonucleotide
aacucaaacaguggcagac

SEQ ID NO: 2444969 - RNA, 19 nt, Artificial Sequence
  Description of Artificial Sequence: Synthetic oligonucleotide
auaggauugcuaucuagac

SEQ ID NO: 2444970 - RNA, 19 nt, Artificial Sequence
  Description of Artificial Sequence: Synthetic oligonucleotide
uuugagauaggauugcuau

SEQ ID NO: 2444971 - RNA, 19 nt, Artificial Sequence
  Description of Artificial Sequence: Synthetic oligonucleotide
aaucacaucagcauggcca

SEQ ID NO: 2444972 - RNA, 19 nt, Artificial Sequence
  Description of Artificial Sequence: Synthetic oligonucleotide
ucgaaucacaucagcaugg

SEQ ID NO: 2444973 - RNA, 19 nt, Artificial Sequence
  Description of Artificial Sequence: Synthetic oligonucleotide
aaagacccguaagacaucc

SEQ ID NO: 2444974 - RNA, 19 nt, Artificial Sequence
  Description of Artificial Sequence: Synthetic oligonucleotide
gaugcaguauuauaauccc

SEQ ID NO: 2444975 - RNA, 19 nt, Artificial Sequence
  Description of Artificial Sequence: Synthetic oligonucleotide
uuuguuuugacuugauuuc

SEQ ID NO: 2444976 - RNA, 19 nt, Artificial Sequence
  Description of Artificial Sequence: Synthetic oligonucleotide
uaaggaaugacaccugaga

SEQ ID NO: 2444977 - RNA, 19 nt, Artificial Sequence
  Description of Artificial Sequence: Synthetic oligonucleotide
caagcaaggcacaaaaggc

SEQ ID NO: 2444978 - RNA, 19 nt, Artificial Sequence
  Description of Artificial Sequence: Synthetic oligonucleotide
aaugacaccugagacugac

SEQ ID NO: 2444979 - RNA, 19 nt, Artificial Sequence
  Description of Artificial Sequence: Synthetic oligonucleotide
aacccagguauggugaugc

SEQ ID NO: 2444980 - RNA, 19 nt, Artificial Sequence
  Description of Artificial Sequence: Synthetic oligonucleotide
aaggcaaacucaaacagug

SEQ ID NO: 2444981 - RNA, 19 nt, Artificial Sequence
  Description of Artificial Sequence: Synthetic oligonucleotide
ucacagucaagcaaggcac

SEQ ID NO: 2444982 - RNA, 19 nt, Artificial Sequence
  Description of Artificial Sequence: Synthetic oligonucleotide
ucaucagugagaaccaagu

SEQ ID NO: 2444983 - RNA, 19 nt, Artificial Sequence
  Description of Artificial Sequence: Synthetic oligonucleotide
ucggucacagucaagcaag

SEQ ID NO: 2444984 - RNA, 19 nt, Artificial Sequence
  Description of Artificial Sequence: Synthetic oligonucleotide
ugagauaggauugcuaucu

SEQ ID NO: 2444985 - RNA, 19 nt, Artificial Sequence
  Description of Artificial Sequence: Synthetic oligonucleotide
auggccaucccucagccac

SEQ ID NO: 2444986 - RNA, 19 nt, Artificial Sequence
  Description of Artificial Sequence: Synthetic oligonucleotide
aagaggagcaagucacagg

SEQ ID NO: 2444987 - RNA, 19 nt, Artificial Sequence
  Description of Artificial Sequence: Synthetic oligonucleotide
uauuauaaucccagugcug

SEQ ID NO: 2444988 - RNA, 19 nt, Artificial Sequence
  Description of Artificial Sequence: Synthetic oligonucleotide
aguucaaaugccagcaccc

SEQ ID NO: 2444989 - RNA, 19 nt, Artificial Sequence
  Description of Artificial Sequence: Synthetic oligonucleotide
ucacuggcaagcuucauca

SEQ ID NO: 2444990 - RNA, 19 nt, Artificial Sequence
  Description of Artificial Sequence: Synthetic oligonucleotide
aaacccugcauucggaccu

SEQ ID NO: 2444991 - RNA, 19 nt, Artificial Sequence
  Description of Artificial Sequence: Synthetic oligonucleotide
uggugaugcaguauuauaa

SEQ ID NO: 2444992 - RNA, 19 nt, Artificial Sequence
  Description of Artificial Sequence: Synthetic oligonucleotide
uggacaaagugcuuggugu

SEQ ID NO: 2444993 - RNA, 19 nt, Artificial Sequence
  Description of Artificial Sequence: Synthetic oligonucleotide
gaguuugcaagaauucugg

SEQ ID NO: 2444994 - RNA, 19 nt, Artificial Sequence
  Description of Artificial Sequence: Synthetic oligonucleotide
aaccaagucccagugaaag

SEQ ID NO: 2444995 - RNA, 19 nt, Artificial Sequence
  Description of Artificial Sequence: Synthetic oligonucleotide
agccacucaguaaagaccc

SEQ ID NO: 2444996 - RNA, 19 nt, Artificial Sequence
  Description of Artificial Sequence: Synthetic oligonucleotide
aagucacaggccuucuggg

SEQ ID NO: 2444997 - RNA, 19 nt, Artificial Sequence
  Description of Artificial Sequence: Synthetic oligonucleotide
aguaaagacccguaagaca

SEQ ID NO: 2444998 - RNA, 19 nt, Artificial Sequence
  Description of Artificial Sequence: Synthetic oligonucleotide
cuaucuagaccaaucuggc

SEQ ID NO: 2444999 - RNA, 19 nt, Artificial Sequence
  Description of Artificial Sequence: Synthetic oligonucleotide
uugucccucaggaagagga

SEQ ID NO: 2445000 - RNA, 19 nt, Artificial Sequence
  Description of Artificial Sequence: Synthetic oligonucleotide
agcaccuaaggaaugacac

SEQ ID NO: 2445001 - RNA, 19 nt, Artificial Sequence
  Description of Artificial Sequence: Synthetic oligonucleotide
uauaaucccagugcugggg

SEQ ID NO: 2445002 - RNA, 19 nt, Artificial Sequence
  Description of Artificial Sequence: Synthetic oligonucleotide
acuguauagggacagugga

SEQ ID NO: 2445003 - RNA, 19 nt, Artificial Sequence
  Description of Artificial Sequence: Synthetic oligonucleotide
gaguucaaaugccagcacc

SEQ ID NO: 2445004 - RNA, 19 nt, Artificial Sequence
  Description of Artificial Sequence: Synthetic oligonucleotide
ucugcaugcacacguacac

SEQ ID NO: 2445005 - RNA, 19 nt, Artificial Sequence
  Description of Artificial Sequence: Synthetic oligonucleotide
ugcacacguacacaaaaga

SEQ ID NO: 2445006 - RNA, 19 nt, Artificial Sequence
  Description of Artificial Sequence: Synthetic oligonucleotide
ugagaaccaagucccagug

SEQ ID NO: 2445007 - RNA, 19 nt, Artificial Sequence
  Description of Artificial Sequence: Synthetic oligonucleotide
auugcuaucuagaccaauc

SEQ ID NO: 2445008 - RNA, 19 nt, Artificial Sequence
  Description of Artificial Sequence: Synthetic oligonucleotide
aggcccacuguauagggac

SEQ ID NO: 2445009 - RNA, 19 nt, Artificial Sequence
  Description of Artificial Sequence: Synthetic oligonucleotide
acggcagagaguuugcaag

SEQ ID NO: 2445010 - RNA, 19 nt, Artificial Sequence
  Description of Artificial Sequence: Synthetic oligonucleotide
caagucacaggccuucugg

SEQ ID NO: 2445011 - RNA, 19 nt, Artificial Sequence
  Description of Artificial Sequence: Synthetic oligonucleotide
agauaggauugcuaucuag

SEQ ID NO: 2445012 - RNA, 19 nt, Artificial Sequence
  Description of Artificial Sequence: Synthetic oligonucleotide
ugugcaagcgugaggaccu

SEQ ID NO: 2445013 - RNA, 19 nt, Artificial Sequence
  Description of Artificial Sequence: Synthetic oligonucleotide
agaaccaagucccagugaa

SEQ ID NO: 2445014 - RNA, 19 nt, Artificial Sequence
  Description of Artificial Sequence: Synthetic oligonucleotide
uuauaaucccagugcuggg

SEQ ID NO: 2445015 - RNA, 19 nt, Artificial Sequence
  Description of Artificial Sequence: Synthetic oligonucleotide
caguauuauaaucccagug

SEQ ID NO: 2445016 - RNA, 19 nt, Artificial Sequence
  Description of Artificial Sequence: Synthetic oligonucleotide
ugcuaucuagaccaaucug

SEQ ID NO: 2445017 - RNA, 19 nt, Artificial Sequence
  Description of Artificial Sequence: Synthetic oligonucleotide
agaauucuggguguggguc

SEQ ID NO: 2445018 - RNA, 19 nt, Artificial Sequence
  Description of Artificial Sequence: Synthetic oligonucleotide
aguuugcaagaauucuggg

SEQ ID NO: 2445019 - RNA, 19 nt, Artificial Sequence
  Description of Artificial Sequence: Synthetic oligonucleotide
ucuagaccaaucuggccag

SEQ ID NO: 2445020 - RNA, 19 nt, Artificial Sequence
  Description of Artificial Sequence: Synthetic oligonucleotide
cucaguaaagacccguaag

SEQ ID NO: 2445021 - RNA, 19 nt, Artificial Sequence
  Description of Artificial Sequence: Synthetic oligonucleotide
gaacucuacauucuugcuc

SEQ ID NO: 2445022 - RNA, 19 nt, Artificial Sequence
  Description of Artificial Sequence: Synthetic oligonucleotide
acugcagugaguugucuug

SEQ ID NO: 2445023 - RNA, 19 nt, Artificial Sequence
  Description of Artificial Sequence: Synthetic oligonucleotide
ucaguggacaaagugcuug

SEQ ID NO: 2445024 - RNA, 19 nt, Artificial Sequence
  Description of Artificial Sequence: Synthetic oligonucleotide
gauaggauugcuaucuaga

SEQ ID NO: 2445025 - RNA, 19 nt, Artificial Sequence
  Description of Artificial Sequence: Synthetic oligonucleotide
uugcuaucuagaccaaucu

SEQ ID NO: 2445026 - RNA, 19 nt, Artificial Sequence
  Description of Artificial Sequence: Synthetic oligonucleotide
ucucgaaucacaucagcau

SEQ ID NO: 2445027 - RNA, 19 nt, Artificial Sequence
  Description of Artificial Sequence: Synthetic oligonucleotide
agucaagcaaggcacaaaa

SEQ ID NO: 2445028 - RNA, 19 nt, Artificial Sequence
  Description of Artificial Sequence: Synthetic oligonucleotide
ugagacugaccucucgucu

SEQ ID NO: 2445029 - RNA, 19 nt, Artificial Sequence
  Description of Artificial Sequence: Synthetic oligonucleotide
ugaggaacaccugugccag

SEQ ID NO: 2445030 - RNA, 19 nt, Artificial Sequence
  Description of Artificial Sequence: Synthetic oligonucleotide
agagaguuugcaagaauuc

SEQ ID NO: 2445031 - RNA, 19 nt, Artificial Sequence
  Description of Artificial Sequence: Synthetic oligonucleotide
aagcgugaggaccugaguu

SEQ ID NO: 2445032 - RNA, 19 nt, Artificial Sequence
  Description of Artificial Sequence: Synthetic oligonucleotide
uggaugaggaacaccugug

SEQ ID NO: 2445033 - RNA, 19 nt, Artificial Sequence
  Description of Artificial Sequence: Synthetic oligonucleotide
cuggcaagcuucaucagug

SEQ ID NO: 2445034 - RNA, 19 nt, Artificial Sequence
  Description of Artificial Sequence: Synthetic oligonucleotide
ugcuuggugugcaagcgug

SEQ ID NO: 2445035 - RNA, 19 nt, Artificial Sequence
  Description of Artificial Sequence: Synthetic oligonucleotide
uggucggucacagucaagc

SEQ ID NO: 2445036 - RNA, 19 nt, Artificial Sequence
  Description of Artificial Sequence: Synthetic oligonucleotide
uuuugagauaggauugcua

SEQ ID NO: 2445037 - RNA, 19 nt, Artificial Sequence
  Description of Artificial Sequence: Synthetic oligonucleotide
gucacagucaagcaaggca

SEQ ID NO: 2445038 - RNA, 19 nt, Artificial Sequence
  Description of Artificial Sequence: Synthetic oligonucleotide
guugucuugucccucagga

SEQ ID NO: 2445039 - RNA, 19 nt, Artificial Sequence
  Description of Artificial Sequence: Synthetic oligonucleotide
ggcaaacucaaacaguggc

SEQ ID NO: 2445040 - RNA, 19 nt, Artificial Sequence
  Description of Artificial Sequence: Synthetic oligonucleotide
cuaaggaaugacaccugag

SEQ ID NO: 2445041 - RNA, 19 nt, Artificial Sequence
  Description of Artificial Sequence: Synthetic oligonucleotide
aagaauucugggugugggu

SEQ ID NO: 2445042 - RNA, 19 nt, Artificial Sequence
  Description of Artificial Sequence: Synthetic oligonucleotide
guaucaggaucccuggagc

SEQ ID NO: 2445043 - RNA, 19 nt, Artificial Sequence
  Description of Artificial Sequence: Synthetic oligonucleotide
ugucucgaaucacaucagc

SEQ ID NO: 2445044 - RNA, 19 nt, Artificial Sequence
  Description of Artificial Sequence: Synthetic oligonucleotide
aggagcaagucacaggccu

SEQ ID NO: 2445045 - RNA, 19 nt, Artificial Sequence
  Description of Artificial Sequence: Synthetic oligonucleotide
uggguaucaggaucccugg

SEQ ID NO: 2445046 - RNA, 19 nt, Artificial Sequence
  Description of Artificial Sequence: Synthetic oligonucleotide
cucgaaucacaucagcaug

SEQ ID NO: 2445047 - RNA, 19 nt, Artificial Sequence
  Description of Artificial Sequence: Synthetic oligonucleotide
augaggaacaccugugcca

SEQ ID NO: 2445048 - RNA, 19 nt, Artificial Sequence
  Description of Artificial Sequence: Synthetic oligonucleotide
caagaauucuggguguggg

SEQ ID NO: 2445049 - RNA, 19 nt, Artificial Sequence
  Description of Artificial Sequence: Synthetic oligonucleotide
ugaccucucgucugcaugc

SEQ ID NO: 2445050 - RNA, 19 nt, Artificial Sequence
  Description of Artificial Sequence: Synthetic oligonucleotide
aaagugcuuggugugcaag

SEQ ID NO: 2445051 - RNA, 19 nt, Artificial Sequence
  Description of Artificial Sequence: Synthetic oligonucleotide
uaucuagaccaaucuggcc

SEQ ID NO: 2445052 - RNA, 19 nt, Artificial Sequence
  Description of Artificial Sequence: Synthetic oligonucleotide
gaccaaucuggccaggaac

SEQ ID NO: 2445053 - RNA, 19 nt, Artificial Sequence
  Description of Artificial Sequence: Synthetic oligonucleotide
auucggaccucccagucca

SEQ ID NO: 2445054 - RNA, 19 nt, Artificial Sequence
  Description of Artificial Sequence: Synthetic oligonucleotide
agaguuugcaagaauucug

SEQ ID NO: 2445055 - RNA, 19 nt, Artificial Sequence
  Description of Artificial Sequence: Synthetic oligonucleotide
guggccacaaaccacucug

SEQ ID NO: 2445056 - RNA, 19 nt, Artificial Sequence
  Description of Artificial Sequence: Synthetic oligonucleotide
aaacucaaacaguggcaga

SEQ ID NO: 2445057 - RNA, 19 nt, Artificial Sequence
  Description of Artificial Sequence: Synthetic oligonucleotide
aucagcauggccaucccuc

SEQ ID NO: 2445058 - RNA, 19 nt, Artificial Sequence
  Description of Artificial Sequence: Synthetic oligonucleotide
uuggugugcaagcgugagg

SEQ ID NO: 2445059 - RNA, 19 nt, Artificial Sequence
  Description of Artificial Sequence: Synthetic oligonucleotide
ucugugucucgaaucacau

SEQ ID NO: 2445060 - RNA, 19 nt, Artificial Sequence
  Description of Artificial Sequence: Synthetic oligonucleotide
gguaucaggaucccuggag

SEQ ID NO: 2445061 - RNA, 19 nt, Artificial Sequence
  Description of Artificial Sequence: Synthetic oligonucleotide
agugcuuggugugcaagcg

SEQ ID NO: 2445062 - RNA, 19 nt, Artificial Sequence
  Description of Artificial Sequence: Synthetic oligonucleotide
caaacccugcauucggacc

SEQ ID NO: 2445063 - RNA, 19 nt, Artificial Sequence
  Description of Artificial Sequence: Synthetic oligonucleotide
acuggcaagcuucaucagu

SEQ ID NO: 2445064 - RNA, 19 nt, Artificial Sequence
  Description of Artificial Sequence: Synthetic oligonucleotide
guggacagcaccuaaggaa

SEQ ID NO: 2445065 - RNA, 19 nt, Artificial Sequence
  Description of Artificial Sequence: Synthetic oligonucleotide
gucacaggccuucugggcc

SEQ ID NO: 2445066 - RNA, 19 nt, Artificial Sequence
  Description of Artificial Sequence: Synthetic oligonucleotide
ugaaagacuuguucucaaa

SEQ ID NO: 2445067 - RNA, 19 nt, Artificial Sequence
  Description of Artificial Sequence: Synthetic oligonucleotide
gaaucacaucagcauggcc

SEQ ID NO: 2445068 - RNA, 19 nt, Artificial Sequence
  Description of Artificial Sequence: Synthetic oligonucleotide
aguugucuugucccucagg

SEQ ID NO: 2445069 - RNA, 19 nt, Artificial Sequence
  Description of Artificial Sequence: Synthetic oligonucleotide
caaaccacucugugucucg

SEQ ID NO: 2445070 - RNA, 19 nt, Artificial Sequence
  Description of Artificial Sequence: Synthetic oligonucleotide
aagauuccgugggaccugg

SEQ ID NO: 2445071 - RNA, 19 nt, Artificial Sequence
  Description of Artificial Sequence: Synthetic oligonucleotide
auagggacaguggaggcug

SEQ ID NO: 2445072 - RNA, 19 nt, Artificial Sequence
  Description of Artificial Sequence: Synthetic oligonucleotide
cacaucagcauggccaucc

SEQ ID NO: 2445073 - RNA, 19 nt, Artificial Sequence
  Description of Artificial Sequence: Synthetic oligonucleotide
auuccgugggaccugggga

SEQ ID NO: 2445074 - RNA, 19 nt, Artificial Sequence
  Description of Artificial Sequence: Synthetic oligonucleotide
caguggacaaagugcuugg

SEQ ID NO: 2445075 - RNA, 19 nt, Artificial Sequence
  Description of Artificial Sequence: Synthetic oligonucleotide
ugaguucaaaugccagcac

SEQ ID NO: 2445076 - RNA, 19 nt, Artificial Sequence
  Description of Artificial Sequence: Synthetic oligonucleotide
cauggcucaguggacaaag

SEQ ID NO: 2445077 - RNA, 19 nt, Artificial Sequence
  Description of Artificial Sequence: Synthetic oligonucleotide
acaucagcauggccauccc

SEQ ID NO: 2445078 - RNA, 19 nt, Artificial Sequence
  Description of Artificial Sequence: Synthetic oligonucleotide
acaccugagacugaccucu

SEQ ID NO: 2445079 - RNA, 19 nt, Artificial Sequence
  Description of Artificial Sequence: Synthetic oligonucleotide
cuccaaacccugcauucgg

SEQ ID NO: 2445080 - RNA, 19 nt, Artificial Sequence
  Description of Artificial Sequence: Synthetic oligonucleotide
uucaaaugccagcacccau

SEQ ID NO: 2445081 - RNA, 19 nt, Artificial Sequence
  Description of Artificial Sequence: Synthetic oligonucleotide
gugaugcaguauuauaauc

SEQ ID NO: 2445082 - RNA, 19 nt, Artificial Sequence
  Description of Artificial Sequence: Synthetic oligonucleotide
cagugaaagacuuguucuc

SEQ ID NO: 2445083 - RNA, 19 nt, Artificial Sequence
  Description of Artificial Sequence: Synthetic oligonucleotide
uugagauaggauugcuauc

SEQ ID NO: 2445084 - RNA, 19 nt, Artificial Sequence
  Description of Artificial Sequence: Synthetic oligonucleotide
uguuuugacuugauuucuu

SEQ ID NO: 2445085 - RNA, 19 nt, Artificial Sequence
  Description of Artificial Sequence: Synthetic oligonucleotide
caguaaagacccguaagac

SEQ ID NO: 2445086 - RNA, 19 nt, Artificial Sequence
  Description of Artificial Sequence: Synthetic oligonucleotide
guggacaaagugcuuggug

SEQ ID NO: 2445087 - RNA, 19 nt, Artificial Sequence
  Description of Artificial Sequence: Synthetic oligonucleotide
guaaagacccguaagacau

SEQ ID NO: 2445088 - RNA, 19 nt, Artificial Sequence
  Description of Artificial Sequence: Synthetic oligonucleotide
guauagggacaguggaggc

SEQ ID NO: 2445089 - RNA, 19 nt, Artificial Sequence
  Description of Artificial Sequence: Synthetic oligonucleotide
auucuugcucacccucccg

SEQ ID NO: 2445090 - RNA, 19 nt, Artificial Sequence
  Description of Artificial Sequence: Synthetic oligonucleotide
agugagaaccaagucccag

SEQ ID NO: 2445091 - RNA, 19 nt, Artificial Sequence
  Description of Artificial Sequence: Synthetic oligonucleotide
ugggguggguaucaggauc

SEQ ID NO: 2445092 - RNA, 19 nt, Artificial Sequence
  Description of Artificial Sequence: Synthetic oligonucleotide
acaguggaggcugggcugc

SEQ ID NO: 2445093 - RNA, 19 nt, Artificial Sequence
  Description of Artificial Sequence: Synthetic oligonucleotide
aucacaucagcauggccau

SEQ ID NO: 2445094 - RNA, 19 nt, Artificial Sequence
  Description of Artificial Sequence: Synthetic oligonucleotide
uugcaagaauucugggugu

SEQ ID NO: 2445095 - RNA, 19 nt, Artificial Sequence
  Description of Artificial Sequence: Synthetic oligonucleotide
acacguacacaaaagaguu

SEQ ID NO: 2445096 - RNA, 19 nt, Artificial Sequence
  Description of Artificial Sequence: Synthetic oligonucleotide
acguacacaaaagaguuuu

SEQ ID NO: 2445097 - RNA, 19 nt, Artificial Sequence
  Description of Artificial Sequence: Synthetic oligonucleotide
ucaggaucccuggagcuca

SEQ ID NO: 2445098 - RNA, 19 nt, Artificial Sequence
  Description of Artificial Sequence: Synthetic oligonucleotide
uauagggacaguggaggcu

SEQ ID NO: 2445099 - RNA, 19 nt, Artificial Sequence
  Description of Artificial Sequence: Synthetic oligonucleotide
guggguaucaggaucccug

SEQ ID NO: 2445100 - RNA, 19 nt, Artificial Sequence
  Description of Artificial Sequence: Synthetic oligonucleotide
aagguggacagcaccuaag

SEQ ID NO: 2445101 - RNA, 19 nt, Artificial Sequence
  Description of Artificial Sequence: Synthetic oligonucleotide
ucaggaaggcccacuguau

SEQ ID NO: 2445102 - RNA, 19 nt, Artificial Sequence
  Description of Artificial Sequence: Synthetic oligonucleotide
agagguggccucaggaagg

SEQ ID NO: 2445103 - RNA, 19 nt, Artificial Sequence
  Description of Artificial Sequence: Synthetic oligonucleotide
guuugcaagaauucugggu

SEQ ID NO: 2445104 - RNA, 19 nt, Artificial Sequence
  Description of Artificial Sequence: Synthetic oligonucleotide
ucuugcucacccucccgcc

SEQ ID NO: 2445105 - RNA, 19 nt, Artificial Sequence
  Description of Artificial Sequence: Synthetic oligonucleotide
cacaguggccacaaaccac

SEQ ID NO: 2445106 - RNA, 19 nt, Artificial Sequence
  Description of Artificial Sequence: Synthetic oligonucleotide
acagcaccuaaggaaugac

SEQ ID NO: 2445107 - RNA, 19 nt, Artificial Sequence
  Description of Artificial Sequence: Synthetic oligonucleotide
cucacuggcaagcuucauc

SEQ ID NO: 2445108 - RNA, 19 nt, Artificial Sequence
  Description of Artificial Sequence: Synthetic oligonucleotide
cugcauucggaccucccag

SEQ ID NO: 2445109 - RNA, 19 nt, Artificial Sequence
  Description of Artificial Sequence: Synthetic oligonucleotide
cacacguacacaaaagagu

SEQ ID NO: 2445110 - RNA, 19 nt, Artificial Sequence
  Description of Artificial Sequence: Synthetic oligonucleotide
uuccgugggaccuggggac

SEQ ID NO: 2445111 - RNA, 19 nt, Artificial Sequence
  Description of Artificial Sequence: Synthetic oligonucleotide
aguuggggcuguccccagc

SEQ ID NO: 2445112 - RNA, 19 nt, Artificial Sequence
  Description of Artificial Sequence: Synthetic oligonucleotide
cauugccuggaugaggaac

SEQ ID NO: 2445113 - RNA, 19 nt, Artificial Sequence
  Description of Artificial Sequence: Synthetic oligonucleotide
ucuggccaggaacucuaca

SEQ ID NO: 2445114 - RNA, 19 nt, Artificial Sequence
  Description of Artificial Sequence: Synthetic oligonucleotide
caagcuucaucagugagaa

SEQ ID NO: 2445115 - RNA, 19 nt, Artificial Sequence
  Description of Artificial Sequence: Synthetic oligonucleotide
aagacccguaagacauccc

SEQ ID NO: 2445116 - RNA, 19 nt, Artificial Sequence
  Description of Artificial Sequence: Synthetic oligonucleotide
ucacccucccgccaccucu

SEQ ID NO: 2445117 - RNA, 19 nt, Artificial Sequence
  Description of Artificial Sequence: Synthetic oligonucleotide
ugcaagaauucugggugug

SEQ ID NO: 2445118 - RNA, 19 nt, Artificial Sequence
  Description of Artificial Sequence: Synthetic oligonucleotide
cauucggaccucccagucc

SEQ ID NO: 2445119 - RNA, 19 nt, Artificial Sequence
  Description of Artificial Sequence: Synthetic oligonucleotide
accaaucuggccaggaacu

SEQ ID NO: 2445120 - RNA, 19 nt, Artificial Sequence
  Description of Artificial Sequence: Synthetic oligonucleotide
auggugaugcaguauuaua

SEQ ID NO: 2445121 - RNA, 19 nt, Artificial Sequence
  Description of Artificial Sequence: Synthetic oligonucleotide
gaucccggcucacugccug

SEQ ID NO: 2445122 - RNA, 19 nt, Artificial Sequence
  Description of Artificial Sequence: Synthetic oligonucleotide
uggcagacggcagagaguu

SEQ ID NO: 2445123 - RNA, 19 nt, Artificial Sequence
  Description of Artificial Sequence: Synthetic oligonucleotide
ggcucaguggacaaagugc

SEQ ID NO: 2445124 - RNA, 19 nt, Artificial Sequence
  Description of Artificial Sequence: Synthetic oligonucleotide
accugagacugaccucucg

SEQ ID NO: 2445125 - RNA, 19 nt, Artificial Sequence
  Description of Artificial Sequence: Synthetic oligonucleotide
gugugcaagcgugaggacc

SEQ ID NO: 2445126 - RNA, 19 nt, Artificial Sequence
  Description of Artificial Sequence: Synthetic oligonucleotide
caugcacacguacacaaaa

SEQ ID NO: 2445127 - RNA, 19 nt, Artificial Sequence
  Description of Artificial Sequence: Synthetic oligonucleotide
ugcauucggaccucccagu

SEQ ID NO: 2445128 - RNA, 19 nt, Artificial Sequence
  Description of Artificial Sequence: Synthetic oligonucleotide
cucucgucugcaugcacac

SEQ ID NO: 2445129 - RNA, 19 nt, Artificial Sequence
  Description of Artificial Sequence: Synthetic oligonucleotide
cagaucccggcucacugcc

SEQ ID NO: 2445130 - RNA, 19 nt, Artificial Sequence
  Description of Artificial Sequence: Synthetic oligonucleotide
uaaagacccguaagacauc

SEQ ID NO: 2445131 - RNA, 19 nt, Artificial Sequence
  Description of Artificial Sequence: Synthetic oligonucleotide
gcacacguacacaaaagag

SEQ ID NO: 2445132 - RNA, 19 nt, Artificial Sequence
  Description of Artificial Sequence: Synthetic oligonucleotide
uggggacauggcucagugg

SEQ ID NO: 2445133 - RNA, 19 nt, Artificial Sequence
  Description of Artificial Sequence: Synthetic oligonucleotide
uaagauuccgugggaccug

SEQ ID NO: 2445134 - RNA, 19 nt, Artificial Sequence
  Description of Artificial Sequence: Synthetic oligonucleotide
cugagacugaccucucguc

SEQ ID NO: 2445135 - RNA, 19 nt, Artificial Sequence
  Description of Artificial Sequence: Synthetic oligonucleotide
accaagucccagugaaaga

SEQ ID NO: 2445136 - RNA, 19 nt, Artificial Sequence
  Description of Artificial Sequence: Synthetic oligonucleotide
cuuggugugcaagcgugag

SEQ ID NO: 2445137 - RNA, 19 nt, Artificial Sequence
  Description of Artificial Sequence: Synthetic oligonucleotide
ucuugucccucaggaagag

SEQ ID NO: 2445138 - RNA, 19 nt, Artificial Sequence
  Description of Artificial Sequence: Synthetic oligonucleotide
acucuacauucuugcucac

SEQ ID NO: 2445139 - RNA, 19 nt, Artificial Sequence
  Description of Artificial Sequence: Synthetic oligonucleotide
ucacaggccuucugggcca

SEQ ID NO: 2445140 - RNA, 19 nt, Artificial Sequence
  Description of Artificial Sequence: Synthetic oligonucleotide
cagaguuggggcugucccc

SEQ ID NO: 2445141 - RNA, 19 nt, Artificial Sequence
  Description of Artificial Sequence: Synthetic oligonucleotide
cugaccucucgucugcaug

SEQ ID NO: 2445142 - RNA, 19 nt, Artificial Sequence
  Description of Artificial Sequence: Synthetic oligonucleotide
cucugugucucgaaucaca

SEQ ID NO: 2445143 - RNA, 19 nt, Artificial Sequence
  Description of Artificial Sequence: Synthetic oligonucleotide
augcacacguacacaaaag

SEQ ID NO: 2445144 - RNA, 19 nt, Artificial Sequence
  Description of Artificial Sequence: Synthetic oligonucleotide
gucaagcaaggcacaaaag

SEQ ID NO: 2445145 - RNA, 19 nt, Artificial Sequence
  Description of Artificial Sequence: Synthetic oligonucleotide
aaacccagguauggugaug

SEQ ID NO: 2445146 - RNA, 19 nt, Artificial Sequence
  Description of Artificial Sequence: Synthetic oligonucleotide
acaaagugcuuggugugca

SEQ ID NO: 2445147 - RNA, 19 nt, Artificial Sequence
  Description of Artificial Sequence: Synthetic oligonucleotide
caggaagaggagcaaguca

SEQ ID NO: 2445148 - RNA, 19 nt, Artificial Sequence
  Description of Artificial Sequence: Synthetic oligonucleotide
uugucuugucccucaggaa

SEQ ID NO: 2445149 - RNA, 19 nt, Artificial Sequence
  Description of Artificial Sequence: Synthetic oligonucleotide
aguggccacaaaccacucu

SEQ ID NO: 2445150 - RNA, 19 nt, Artificial Sequence
  Description of Artificial Sequence: Synthetic oligonucleotide
aaucuggccaggaacucua

SEQ ID NO: 2445151 - RNA, 19 nt, Artificial Sequence
  Description of Artificial Sequence: Synthetic oligonucleotide
aaaccacucugugucucga

SEQ ID NO: 2445152 - RNA, 19 nt, Artificial Sequence
  Description of Artificial Sequence: Synthetic oligonucleotide
gcagaguuggggcuguccc

SEQ ID NO: 2445153 - RNA, 19 nt, Artificial Sequence
  Description of Artificial Sequence: Synthetic oligonucleotide
aggaacaccugugccagcu

SEQ ID NO: 2445154 - RNA, 19 nt, Artificial Sequence
  Description of Artificial Sequence: Synthetic oligonucleotide
uggccaggaacucuacauu

SEQ ID NO: 2445155 - RNA, 19 nt, Artificial Sequence
  Description of Artificial Sequence: Synthetic oligonucleotide
ugugggucugggagaggug

SEQ ID NO: 2445156 - RNA, 19 nt, Artificial Sequence
  Description of Artificial Sequence: Synthetic oligonucleotide
cucuacauucuugcucacc

SEQ ID NO: 2445157 - RNA, 19 nt, Artificial Sequence
  Description of Artificial Sequence: Synthetic oligonucleotide
aggacagccuccacagagg

SEQ ID NO: 2445158 - RNA, 19 nt, Artificial Sequence
  Description of Artificial Sequence: Synthetic oligonucleotide
agaguuggggcugucccca

SEQ ID NO: 2445159 - RNA, 19 nt, Artificial Sequence
  Description of Artificial Sequence: Synthetic oligonucleotide
uagggacaguggaggcugg

SEQ ID NO: 2445160 - RNA, 19 nt, Artificial Sequence
  Description of Artificial Sequence: Synthetic oligonucleotide
aagucccagugaaagacuu

SEQ ID NO: 2445161 - RNA, 19 nt, Artificial Sequence
  Description of Artificial Sequence: Synthetic oligonucleotide
uggccacaaaccacucugu

SEQ ID NO: 2445162 - RNA, 19 nt, Artificial Sequence
  Description of Artificial Sequence: Synthetic oligonucleotide
accucucgucugcaugcac

SEQ ID NO: 2445163 - RNA, 19 nt, Artificial Sequence
  Description of Artificial Sequence: Synthetic oligonucleotide
gacggcagagaguuugcaa

SEQ ID NO: 2445164 - RNA, 19 nt, Artificial Sequence
  Description of Artificial Sequence: Synthetic oligonucleotide
acuggucggucacagucaa

SEQ ID NO: 2445165 - RNA, 19 nt, Artificial Sequence
  Description of Artificial Sequence: Synthetic oligonucleotide
augacaccugagacugacc

SEQ ID NO: 2445166 - RNA, 19 nt, Artificial Sequence
  Description of Artificial Sequence: Synthetic oligonucleotide
uagaccaaucuggccagga

SEQ ID NO: 2445167 - RNA, 19 nt, Artificial Sequence
  Description of Artificial Sequence: Synthetic oligonucleotide
uugcucacccucccgccac

SEQ ID NO: 2445168 - RNA, 19 nt, Artificial Sequence
  Description of Artificial Sequence: Synthetic oligonucleotide
gaccuggggacauggcuca

SEQ ID NO: 2445169 - RNA, 19 nt, Artificial Sequence
  Description of Artificial Sequence: Synthetic oligonucleotide
gguugggguggguaucagg

SEQ ID NO: 2445170 - RNA, 19 nt, Artificial Sequence
  Description of Artificial Sequence: Synthetic oligonucleotide
gucggucacagucaagcaa

SEQ ID NO: 2445171 - RNA, 19 nt, Artificial Sequence
  Description of Artificial Sequence: Synthetic oligonucleotide
agaccaaucuggccaggaa

SEQ ID NO: 2445172 - RNA, 19 nt, Artificial Sequence
  Description of Artificial Sequence: Synthetic oligonucleotide
ucucgucugcaugcacacg

SEQ ID NO: 2445173 - RNA, 19 nt, Artificial Sequence
  Description of Artificial Sequence: Synthetic oligonucleotide
agaggcagaguuggggcug

SEQ ID NO: 2445174 - RNA, 19 nt, Artificial Sequence
  Description of Artificial Sequence: Synthetic oligonucleotide
guaagauuccgugggaccu

SEQ ID NO: 2445175 - RNA, 19 nt, Artificial Sequence
  Description of Artificial Sequence: Synthetic oligonucleotide
cccagugaaagacuuguuc

SEQ ID NO: 2445176 - RNA, 19 nt, Artificial Sequence
  Description of Artificial Sequence: Synthetic oligonucleotide
ugcagugaguugucuuguc

SEQ ID NO: 2445177 - RNA, 19 nt, Artificial Sequence
  Description of Artificial Sequence: Synthetic oligonucleotide
aaccacucugugucucgaa

SEQ ID NO: 2445178 - RNA, 19 nt, Artificial Sequence
  Description of Artificial Sequence: Synthetic oligonucleotide
ggacagccuccacagaggc

SEQ ID NO: 2445179 - RNA, 19 nt, Artificial Sequence
  Description of Artificial Sequence: Synthetic oligonucleotide
ggccaggaacucuacauuc

SEQ ID NO: 2445180 - RNA, 19 nt, Artificial Sequence
  Description of Artificial Sequence: Synthetic oligonucleotide
cagagaguuugcaagaauu

SEQ ID NO: 2445181 - RNA, 19 nt, Artificial Sequence
  Description of Artificial Sequence: Synthetic oligonucleotide
aggccuucugggccacugg

SEQ ID NO: 2445182 - RNA, 19 nt, Artificial Sequence
  Description of Artificial Sequence: Synthetic oligonucleotide
aacccugcauucggaccuc

SEQ ID NO: 2445183 - RNA, 19 nt, Artificial Sequence
  Description of Artificial Sequence: Synthetic oligonucleotide
ggaucccuggagcucacug

SEQ ID NO: 2445184 - RNA, 19 nt, Artificial Sequence
  Description of Artificial Sequence: Synthetic oligonucleotide
cugugucucgaaucacauc

SEQ ID NO: 2445185 - RNA, 19 nt, Artificial Sequence
  Description of Artificial Sequence: Synthetic oligonucleotide
augcaguauuauaauccca

SEQ ID NO: 2445186 - RNA, 19 nt, Artificial Sequence
  Description of Artificial Sequence: Synthetic oligonucleotide
guucaaaugccagcaccca

SEQ ID NO: 2445187 - RNA, 19 nt, Artificial Sequence
  Description of Artificial Sequence: Synthetic oligonucleotide
gugagaaccaagucccagu

SEQ ID NO: 2445188 - RNA, 19 nt, Artificial Sequence
  Description of Artificial Sequence: Synthetic oligonucleotide
uggagcacaguggccacaa

SEQ ID NO: 2445189 - RNA, 19 nt, Artificial Sequence
  Description of Artificial Sequence: Synthetic oligonucleotide
ucccucagccacucaguaa

SEQ ID NO: 2445190 - RNA, 19 nt, Artificial Sequence
  Description of Artificial Sequence: Synthetic oligonucleotide
gcaagaauucugggugugg

SEQ ID NO: 2445191 - RNA, 19 nt, Artificial Sequence
  Description of Artificial Sequence: Synthetic oligonucleotide
gguauggugaugcaguauu

SEQ ID NO: 2445192 - RNA, 19 nt, Artificial Sequence
  Description of Artificial Sequence: Synthetic oligonucleotide
cagcaccuaaggaaugaca

SEQ ID NO: 2445193 - RNA, 19 nt, Artificial Sequence
  Description of Artificial Sequence: Synthetic oligonucleotide
aaggcccacuguauaggga

SEQ ID NO: 2445194 - RNA, 19 nt, Artificial Sequence
  Description of Artificial Sequence: Synthetic oligonucleotide
gugucucgaaucacaucag

SEQ ID NO: 2445195 - RNA, 19 nt, Artificial Sequence
  Description of Artificial Sequence: Synthetic oligonucleotide
gcaaacucaaacaguggca

SEQ ID NO: 2445196 - RNA, 19 nt, Artificial Sequence
  Description of Artificial Sequence: Synthetic oligonucleotide
ccacuggucggucacaguc

SEQ ID NO: 2445197 - RNA, 19 nt, Artificial Sequence
  Description of Artificial Sequence: Synthetic oligonucleotide
cucgucugcaugcacacgu

SEQ ID NO: 2445198 - RNA, 19 nt, Artificial Sequence
  Description of Artificial Sequence: Synthetic oligonucleotide
cacuggcaagcuucaucag

SEQ ID NO: 2445199 - RNA, 19 nt, Artificial Sequence
  Description of Artificial Sequence: Synthetic oligonucleotide
gcuccaaacccugcauucg

SEQ ID NO: 2445200 - RNA, 19 nt, Artificial Sequence
  Description of Artificial Sequence: Synthetic oligonucleotide
gggguggguaucaggaucc

SEQ ID NO: 2445201 - RNA, 19 nt, Artificial Sequence
  Description of Artificial Sequence: Synthetic oligonucleotide
ucccuggagcucacuggca

SEQ ID NO: 2445202 - RNA, 19 nt, Artificial Sequence
  Description of Artificial Sequence: Synthetic oligonucleotide
gagauaggauugcuaucua

SEQ ID NO: 2445203 - RNA, 19 nt, Artificial Sequence
  Description of Artificial Sequence: Synthetic oligonucleotide
aguggacaaagugcuuggu

SEQ ID NO: 2445204 - RNA, 19 nt, Artificial Sequence
  Description of Artificial Sequence: Synthetic oligonucleotide
aaaugccagcacccaugua

SEQ ID NO: 2445205 - RNA, 19 nt, Artificial Sequence
  Description of Artificial Sequence: Synthetic oligonucleotide
acagucaagcaaggcacaa

SEQ ID NO: 2445206 - RNA, 19 nt, Artificial Sequence
  Description of Artificial Sequence: Synthetic oligonucleotide
cacagucaagcaaggcaca

SEQ ID NO: 2445207 - RNA, 19 nt, Artificial Sequence
  Description of Artificial Sequence: Synthetic oligonucleotide
aucccucagccacucagua

SEQ ID NO: 2445208 - RNA, 19 nt, Artificial Sequence
  Description of Artificial Sequence: Synthetic oligonucleotide
ucgucugcaugcacacgua

SEQ ID NO: 2445209 - RNA, 19 nt, Artificial Sequence
  Description of Artificial Sequence: Synthetic oligonucleotide
cucccgccaccucugcagg

SEQ ID NO: 2445210 - RNA, 19 nt, Artificial Sequence
  Description of Artificial Sequence: Synthetic oligonucleotide
gucugcaugcacacguaca

SEQ ID NO: 2445211 - RNA, 19 nt, Artificial Sequence
  Description of Artificial Sequence: Synthetic oligonucleotide
uucggaccucccaguccag

SEQ ID NO: 2445212 - RNA, 19 nt, Artificial Sequence
  Description of Artificial Sequence: Synthetic oligonucleotide
ggccacaaaccacucugug

SEQ ID NO: 2445213 - RNA, 19 nt, Artificial Sequence
  Description of Artificial Sequence: Synthetic oligonucleotide
cacuggucggucacaguca

SEQ ID NO: 2445214 - RNA, 19 nt, Artificial Sequence
  Description of Artificial Sequence: Synthetic oligonucleotide
ccagugaaagacuuguucu

SEQ ID NO: 2445215 - RNA, 19 nt, Artificial Sequence
  Description of Artificial Sequence: Synthetic oligonucleotide
accuaaggaaugacaccug

SEQ ID NO: 2445216 - RNA, 19 nt, Artificial Sequence
  Description of Artificial Sequence: Synthetic oligonucleotide
gcaagcuucaucagugaga

SEQ ID NO: 2445217 - RNA, 19 nt, Artificial Sequence
  Description of Artificial Sequence: Synthetic oligonucleotide
ugcucacccucccgccacc

SEQ ID NO: 2445218 - RNA, 19 nt, Artificial Sequence
  Description of Artificial Sequence: Synthetic oligonucleotide
gaggaacaccugugccagc

SEQ ID NO: 2445219 - RNA, 19 nt, Artificial Sequence
  Description of Artificial Sequence: Synthetic oligonucleotide
ucccagugaaagacuuguu

SEQ ID NO: 2445220 - RNA, 19 nt, Artificial Sequence
  Description of Artificial Sequence: Synthetic oligonucleotide
ccaaacccugcauucggac

SEQ ID NO: 2445221 - RNA, 19 nt, Artificial Sequence
  Description of Artificial Sequence: Synthetic oligonucleotide
cuagaccaaucuggccagg

SEQ ID NO: 2445222 - RNA, 19 nt, Artificial Sequence
  Description of Artificial Sequence: Synthetic oligonucleotide
acugaccucucgucugcau

SEQ ID NO: 2445223 - RNA, 19 nt, Artificial Sequence
  Description of Artificial Sequence: Synthetic oligonucleotide
aggcugggcugccccauug

SEQ ID NO: 2445224 - RNA, 19 nt, Artificial Sequence
  Description of Artificial Sequence: Synthetic oligonucleotide
cccauugccuggaugagga

SEQ ID NO: 2445225 - RNA, 19 nt, Artificial Sequence
  Description of Artificial Sequence: Synthetic oligonucleotide
cuggccaggaacucuacau

SEQ ID NO: 2445226 - RNA, 19 nt, Artificial Sequence
  Description of Artificial Sequence: Synthetic oligonucleotide
gucccagugaaagacuugu

SEQ ID NO: 2445227 - RNA, 19 nt, Artificial Sequence
  Description of Artificial Sequence: Synthetic oligonucleotide
ggagagguggccucaggaa

SEQ ID NO: 2445228 - RNA, 19 nt, Artificial Sequence
  Description of Artificial Sequence: Synthetic oligonucleotide
ccugugccagcuccaaacc

SEQ ID NO: 2445229 - RNA, 19 nt, Artificial Sequence
  Description of Artificial Sequence: Synthetic oligonucleotide
ccuaaggaaugacaccuga

SEQ ID NO: 2445230 - RNA, 19 nt, Artificial Sequence
  Description of Artificial Sequence: Synthetic oligonucleotide
agguauggugaugcaguau

SEQ ID NO: 2445231 - RNA, 19 nt, Artificial Sequence
  Description of Artificial Sequence: Synthetic oligonucleotide
gcaagcgugaggaccugag

SEQ ID NO: 2445232 - RNA, 19 nt, Artificial Sequence
  Description of Artificial Sequence: Synthetic oligonucleotide
gaaccaagucccagugaaa

SEQ ID NO: 2445233 - RNA, 19 nt, Artificial Sequence
  Description of Artificial Sequence: Synthetic oligonucleotide
ccacucugugucucgaauc

SEQ ID NO: 2445234 - RNA, 19 nt, Artificial Sequence
  Description of Artificial Sequence: Synthetic oligonucleotide
augccagcacccauguaaa

SEQ ID NO: 2445235 - RNA, 19 nt, Artificial Sequence
  Description of Artificial Sequence: Synthetic oligonucleotide
gcugggcugccccauugcc

SEQ ID NO: 2445236 - RNA, 19 nt, Artificial Sequence
  Description of Artificial Sequence: Synthetic oligonucleotide
cccucagccacucaguaaa

SEQ ID NO: 2445237 - RNA, 19 nt, Artificial Sequence
  Description of Artificial Sequence: Synthetic oligonucleotide
agacggcagagaguuugca

SEQ ID NO: 2445238 - RNA, 19 nt, Artificial Sequence
  Description of Artificial Sequence: Synthetic oligonucleotide
gcaagucacaggccuucug

SEQ ID NO: 2445239 - RNA, 19 nt, Artificial Sequence
  Description of Artificial Sequence: Synthetic oligonucleotide
ggacauggcucaguggaca

SEQ ID NO: 2445240 - RNA, 19 nt, Artificial Sequence
  Description of Artificial Sequence: Synthetic oligonucleotide
gacugcagugaguugucuu

SEQ ID NO: 2445241 - RNA, 19 nt, Artificial Sequence
  Description of Artificial Sequence: Synthetic oligonucleotide
cuggucggucacagucaag

SEQ ID NO: 2445242 - RNA, 19 nt, Artificial Sequence
  Description of Artificial Sequence: Synthetic oligonucleotide
ucggaccucccaguccaga

SEQ ID NO: 2445243 - RNA, 19 nt, Artificial Sequence
  Description of Artificial Sequence: Synthetic oligonucleotide
caagucccagugaaagacu

SEQ ID NO: 2445244 - RNA, 19 nt, Artificial Sequence
  Description of Artificial Sequence: Synthetic oligonucleotide
guauggugaugcaguauua

SEQ ID NO: 2445245 - RNA, 19 nt, Artificial Sequence
  Description of Artificial Sequence: Synthetic oligonucleotide
uccgugggaccuggggaca

SEQ ID NO: 2445246 - RNA, 19 nt, Artificial Sequence
  Description of Artificial Sequence: Synthetic oligonucleotide
gcucaguggacaaagugcu

SEQ ID NO: 2445247 - RNA, 19 nt, Artificial Sequence
  Description of Artificial Sequence: Synthetic oligonucleotide
ccagguauggugaugcagu

SEQ ID NO: 2445248 - RNA, 19 nt, Artificial Sequence
  Description of Artificial Sequence: Synthetic oligonucleotide
gauugcuaucuagaccaau

SEQ ID NO: 2445249 - RNA, 19 nt, Artificial Sequence
  Description of Artificial Sequence: Synthetic oligonucleotide
acccagguauggugaugca

SEQ ID NO: 2445250 - RNA, 19 nt, Artificial Sequence
  Description of Artificial Sequence: Synthetic oligonucleotide
cagguauggugaugcagua

SEQ ID NO: 2445251 - RNA, 19 nt, Artificial Sequence
  Description of Artificial Sequence: Synthetic oligonucleotide
cuacauucuugcucacccu

SEQ ID NO: 2445252 - RNA, 19 nt, Artificial Sequence
  Description of Artificial Sequence: Synthetic oligonucleotide
caggaaggcccacuguaua

SEQ ID NO: 2445253 - RNA, 19 nt, Artificial Sequence
  Description of Artificial Sequence: Synthetic oligonucleotide
ggucggucacagucaagca

SEQ ID NO: 2445254 - RNA, 19 nt, Artificial Sequence
  Description of Artificial Sequence: Synthetic oligonucleotide
gccuggagcacaguggcca

SEQ ID NO: 2445255 - RNA, 19 nt, Artificial Sequence
  Description of Artificial Sequence: Synthetic oligonucleotide
gcaguauuauaaucccagu

SEQ ID NO: 2445256 - RNA, 19 nt, Artificial Sequence
  Description of Artificial Sequence: Synthetic oligonucleotide
ucccgccaccucugcagga

SEQ ID NO: 2445257 - RNA, 19 nt, Artificial Sequence
  Description of Artificial Sequence: Synthetic oligonucleotide
gcauucggaccucccaguc

SEQ ID NO: 2445258 - RNA, 19 nt, Artificial Sequence
  Description of Artificial Sequence: Synthetic oligonucleotide
cccagguauggugaugcag

SEQ ID NO: 2445259 - RNA, 19 nt, Artificial Sequence
  Description of Artificial Sequence: Synthetic oligonucleotide
gcccacuguauagggacag

SEQ ID NO: 2445260 - RNA, 19 nt, Artificial Sequence
  Description of Artificial Sequence: Synthetic oligonucleotide
gaaugacaccugagacuga

SEQ ID NO: 2445261 - RNA, 19 nt, Artificial Sequence
  Description of Artificial Sequence: Synthetic oligonucleotide
ggcgacugcagugaguugu

SEQ ID NO: 2445262 - RNA, 19 nt, Artificial Sequence
  Description of Artificial Sequence: Synthetic oligonucleotide
gacagccuccacagaggca

SEQ ID NO: 2445263 - RNA, 19 nt, Artificial Sequence
  Description of Artificial Sequence: Synthetic oligonucleotide
cacccucccgccaccucug

SEQ ID NO: 2445264 - RNA, 19 nt, Artificial Sequence
  Description of Artificial Sequence: Synthetic oligonucleotide
ggaccucccaguccagauc

SEQ ID NO: 2445265 - RNA, 19 nt, Artificial Sequence
  Description of Artificial Sequence: Synthetic oligonucleotide
gugugggucugggagaggu

SEQ ID NO: 2445266 - RNA, 19 nt, Artificial Sequence
  Description of Artificial Sequence: Synthetic oligonucleotide
auggcucaguggacaaagu

SEQ ID NO: 2445267 - RNA, 19 nt, Artificial Sequence
  Description of Artificial Sequence: Synthetic oligonucleotide
ccucucgucugcaugcaca

SEQ ID NO: 2445268 - RNA, 19 nt, Artificial Sequence
  Description of Artificial Sequence: Synthetic oligonucleotide
ggcagaguuggggcugucc

SEQ ID NO: 2445269 - RNA, 19 nt, Artificial Sequence
  Description of Artificial Sequence: Synthetic oligonucleotide
ccaccucugcaggacagcc

SEQ ID NO: 2445270 - RNA, 19 nt, Artificial Sequence
  Description of Artificial Sequence: Synthetic oligonucleotide
ggugugcaagcgugaggac

SEQ ID NO: 2445271 - RNA, 19 nt, Artificial Sequence
  Description of Artificial Sequence: Synthetic oligonucleotide
agauuccgugggaccuggg

SEQ ID NO: 2445272 - RNA, 19 nt, Artificial Sequence
  Description of Artificial Sequence: Synthetic oligonucleotide
acauggcucaguggacaaa

SEQ ID NO: 2445273 - RNA, 19 nt, Artificial Sequence
  Description of Artificial Sequence: Synthetic oligonucleotide
cacaaaccacucugugucu

SEQ ID NO: 2445274 - RNA, 19 nt, Artificial Sequence
  Description of Artificial Sequence: Synthetic oligonucleotide
gaccucucgucugcaugca

SEQ ID NO: 2445275 - RNA, 19 nt, Artificial Sequence
  Description of Artificial Sequence: Synthetic oligonucleotide
ccggcucacugccuggagc

SEQ ID NO: 2445276 - RNA, 19 nt, Artificial Sequence
  Description of Artificial Sequence: Synthetic oligonucleotide
cauggccaucccucagcca

SEQ ID NO: 2445277 - RNA, 19 nt, Artificial Sequence
  Description of Artificial Sequence: Synthetic oligonucleotide
ucacaucagcauggccauc

SEQ ID NO: 2445278 - RNA, 19 nt, Artificial Sequence
  Description of Artificial Sequence: Synthetic oligonucleotide
caccugagacugaccucuc

SEQ ID NO: 2445279 - RNA, 19 nt, Artificial Sequence
  Description of Artificial Sequence: Synthetic oligonucleotide
cgaaucacaucagcauggc

SEQ ID NO: 2445280 - RNA, 19 nt, Artificial Sequence
  Description of Artificial Sequence: Synthetic oligonucleotide
ccucccaguccagaucccg

SEQ ID NO: 2445281 - RNA, 19 nt, Artificial Sequence
  Description of Artificial Sequence: Synthetic oligonucleotide
gacugaccucucgucugca

SEQ ID NO: 2445282 - RNA, 19 nt, Artificial Sequence
  Description of Artificial Sequence: Synthetic oligonucleotide
ccucagccacucaguaaag

SEQ ID NO: 2445283 - RNA, 19 nt, Artificial Sequence
  Description of Artificial Sequence: Synthetic oligonucleotide
caggaucccuggagcucac

SEQ ID NO: 2445284 - RNA, 19 nt, Artificial Sequence
  Description of Artificial Sequence: Synthetic oligonucleotide
ggccacuggucggucacag

SEQ ID NO: 2445285 - RNA, 19 nt, Artificial Sequence
  Description of Artificial Sequence: Synthetic oligonucleotide
ccugcauucggaccuccca

SEQ ID NO: 2445286 - RNA, 19 nt, Artificial Sequence
  Description of Artificial Sequence: Synthetic oligonucleotide
gugcuuggugugcaagcgu

SEQ ID NO: 2445287 - RNA, 19 nt, Artificial Sequence
  Description of Artificial Sequence: Synthetic oligonucleotide
cagucaagcaaggcacaaa

SEQ ID NO: 2445288 - RNA, 19 nt, Artificial Sequence
  Description of Artificial Sequence: Synthetic oligonucleotide
ggguaucaggaucccugga

SEQ ID NO: 2445289 - RNA, 19 nt, Artificial Sequence
  Description of Artificial Sequence: Synthetic oligonucleotide
caaucuggccaggaacucu

SEQ ID NO: 2445290 - RNA, 19 nt, Artificial Sequence
  Description of Artificial Sequence: Synthetic oligonucleotide
gccacucaguaaagacccg

SEQ ID NO: 2445291 - RNA, 19 nt, Artificial Sequence
  Description of Artificial Sequence: Synthetic oligonucleotide
gcgugaggaccugaguuca

SEQ ID NO: 2445292 - RNA, 19 nt, Artificial Sequence
  Description of Artificial Sequence: Synthetic oligonucleotide
ucugggccacuggucgguc

SEQ ID NO: 2445293 - RNA, 19 nt, Artificial Sequence
  Description of Artificial Sequence: Synthetic oligonucleotide
ggaacaccugugccagcuc

SEQ ID NO: 2445294 - RNA, 19 nt, Artificial Sequence
  Description of Artificial Sequence: Synthetic oligonucleotide
caagcgugaggaccugagu

SEQ ID NO: 2445295 - RNA, 19 nt, Artificial Sequence
  Description of Artificial Sequence: Synthetic oligonucleotide
cacguacacaaaagaguuu

SEQ ID NO: 2445296 - RNA, 19 nt, Artificial Sequence
  Description of Artificial Sequence: Synthetic oligonucleotide
caucagcauggccaucccu

SEQ ID NO: 2445297 - RNA, 19 nt, Artificial Sequence
  Description of Artificial Sequence: Synthetic oligonucleotide
cgucugcaugcacacguac

SEQ ID NO: 2445298 - RNA, 19 nt, Artificial Sequence
  Description of Artificial Sequence: Synthetic oligonucleotide
agaucccggcucacugccu

SEQ ID NO: 2445299 - RNA, 19 nt, Artificial Sequence
  Description of Artificial Sequence: Synthetic oligonucleotide
ccaaucuggccaggaacuc

SEQ ID NO: 2445300 - RNA, 19 nt, Artificial Sequence
  Description of Artificial Sequence: Synthetic oligonucleotide
accuggggacauggcucag

SEQ ID NO: 2445301 - RNA, 19 nt, Artificial Sequence
  Description of Artificial Sequence: Synthetic oligonucleotide
cccugcauucggaccuccc

SEQ ID NO: 2445302 - RNA, 19 nt, Artificial Sequence
  Description of Artificial Sequence: Synthetic oligonucleotide
cugcagugaguugucuugu

SEQ ID NO: 2445303 - RNA, 19 nt, Artificial Sequence
  Description of Artificial Sequence: Synthetic oligonucleotide
gugcaagcgugaggaccug

SEQ ID NO: 2445304 - RNA, 19 nt, Artificial Sequence
  Description of Artificial Sequence: Synthetic oligonucleotide
ccugagacugaccucucgu

SEQ ID NO: 2445305 - RNA, 19 nt, Artificial Sequence
  Description of Artificial Sequence: Synthetic oligonucleotide
aggcagaguuggggcuguc

SEQ ID NO: 2445306 - RNA, 19 nt, Artificial Sequence
  Description of Artificial Sequence: Synthetic oligonucleotide
gcucacugccuggagcaca

SEQ ID NO: 2445307 - RNA, 19 nt, Artificial Sequence
  Description of Artificial Sequence: Synthetic oligonucleotide
ggugugggucugggagagg

SEQ ID NO: 2445308 - RNA, 19 nt, Artificial Sequence
  Description of Artificial Sequence: Synthetic oligonucleotide
gcuuggugugcaagcguga

SEQ ID NO: 2445309 - RNA, 19 nt, Artificial Sequence
  Description of Artificial Sequence: Synthetic oligonucleotide
guggcagacggcagagagu

SEQ ID NO: 2445310 - RNA, 19 nt, Artificial Sequence
  Description of Artificial Sequence: Synthetic oligonucleotide
cuggagcacaguggccaca

SEQ ID NO: 2445311 - RNA, 19 nt, Artificial Sequence
  Description of Artificial Sequence: Synthetic oligonucleotide
ggguggguaucaggauccc

SEQ ID NO: 2445312 - RNA, 19 nt, Artificial Sequence
  Description of Artificial Sequence: Synthetic oligonucleotide
cacaggccuucugggccac

SEQ ID NO: 2445313 - RNA, 19 nt, Artificial Sequence
  Description of Artificial Sequence: Synthetic oligonucleotide
ggggcgacugcagugaguu

SEQ ID NO: 2445314 - RNA, 19 nt, Artificial Sequence
  Description of Artificial Sequence: Synthetic oligonucleotide
gggcgacugcagugaguug

SEQ ID NO: 2445315 - RNA, 19 nt, Artificial Sequence
  Description of Artificial Sequence: Synthetic oligonucleotide
cagcuccaaacccugcauu

SEQ ID NO: 2445316 - RNA, 19 nt, Artificial Sequence
  Description of Artificial Sequence: Synthetic oligonucleotide
gcaugcacacguacacaaa

SEQ ID NO: 2445317 - RNA, 19 nt, Artificial Sequence
  Description of Artificial Sequence: Synthetic oligonucleotide
cgccaccucugcaggacag

SEQ ID NO: 2445318 - RNA, 19 nt, Artificial Sequence
  Description of Artificial Sequence: Synthetic oligonucleotide
gcgacugcagugaguuguc

SEQ ID NO: 2445319 - RNA, 19 nt, Artificial Sequence
  Description of Artificial Sequence: Synthetic oligonucleotide
gccuucugggccacugguc

SEQ ID NO: 2445320 - RNA, 19 nt, Artificial Sequence
  Description of Artificial Sequence: Synthetic oligonucleotide
ggauugcuaucuagaccaa

SEQ ID NO: 2445321 - RNA, 19 nt, Artificial Sequence
  Description of Artificial Sequence: Synthetic oligonucleotide
ggcccacuguauagggaca

SEQ ID NO: 2445322 - RNA, 19 nt, Artificial Sequence
  Description of Artificial Sequence: Synthetic oligonucleotide
cccgccaccucugcaggac

SEQ ID NO: 2445323 - RNA, 19 nt, Artificial Sequence
  Description of Artificial Sequence: Synthetic oligonucleotide
ggucugggagagguggccu

SEQ ID NO: 2445324 - RNA, 19 nt, Artificial Sequence
  Description of Artificial Sequence: Synthetic oligonucleotide
gguggguaucaggaucccu

SEQ ID NO: 2445325 - RNA, 19 nt, Artificial Sequence
  Description of Artificial Sequence: Synthetic oligonucleotide
ggccaucccucagccacuc

SEQ ID NO: 2445326 - RNA, 19 nt, Artificial Sequence
  Description of Artificial Sequence: Synthetic oligonucleotide
cccggcucacugccuggag

SEQ ID NO: 2445327 - RNA, 19 nt, Artificial Sequence
  Description of Artificial Sequence: Synthetic oligonucleotide
ccacucaguaaagacccgu

SEQ ID NO: 2445328 - RNA, 19 nt, Artificial Sequence
  Description of Artificial Sequence: Synthetic oligonucleotide
ccaagguggacagcaccua

SEQ ID NO: 2445329 - RNA, 19 nt, Artificial Sequence
  Description of Artificial Sequence: Synthetic oligonucleotide
gccaucccucagccacuca

SEQ ID NO: 2445330 - RNA, 19 nt, Artificial Sequence
  Description of Artificial Sequence: Synthetic oligonucleotide
ccucaggaaggcccacugu

SEQ ID NO: 2445331 - RNA, 19 nt, Artificial Sequence
  Description of Artificial Sequence: Synthetic oligonucleotide
gccacuggucggucacagu

SEQ ID NO: 2445332 - RNA, 19 nt, Artificial Sequence
  Description of Artificial Sequence: Synthetic oligonucleotide
ccgccaccucugcaggaca

SEQ ID NO: 2445333 - RNA, 19 nt, Artificial Sequence
  Description of Artificial Sequence: Synthetic oligonucleotide
gggccacuggucggucaca

SEQ ID NO: 2445334 - RNA, 19 nt, Artificial Sequence
  Description of Artificial Sequence: Synthetic oligonucleotide
cccaguccagaucccggcu

SEQ ID NO: 2445335 - RNA, 19 nt, Artificial Sequence
  Description of Artificial Sequence: Synthetic oligonucleotide
ggccucaggaaggcccacu

SEQ ID NO: 2445336 - RNA, 19 nt, Artificial Sequence
  Description of Artificial Sequence: Synthetic oligonucleotide
cgugaggaccugaguucaa

SEQ ID NO: 2445337 - RNA, 19 nt, Artificial Sequence
  Description of Artificial Sequence: Synthetic oligonucleotide
cggaccucccaguccagau

SEQ ID NO: 2445338 - RNA, 19 nt, Artificial Sequence
  Description of Artificial Sequence: Synthetic oligonucleotide
cccacuguauagggacagu

SEQ ID NO: 2445339 - RNA, 19 nt, Artificial Sequence
  Description of Artificial Sequence: Synthetic oligonucleotide
ggcagacggcagagaguuu

SEQ ID NO: 2445340 - RNA, 19 nt, Artificial Sequence
  Description of Artificial Sequence: Synthetic oligonucleotide
cgacugcagugaguugucu

SEQ ID NO: 2445341 - RNA, 19 nt, Artificial Sequence
  Description of Artificial Sequence: Synthetic oligonucleotide
ccgugggaccuggggacau

SEQ ID NO: 2445342 - RNA, 19 nt, Artificial Sequence
  Description of Artificial Sequence: Synthetic oligonucleotide
aaauauauuguauaaguuc

SEQ ID NO: 2445343 - RNA, 19 nt, Artificial Sequence
  Description of Artificial Sequence: Synthetic oligonucleotide
gaacuaaguauuuagaugg

SEQ ID NO: 2445344 - RNA, 19 nt, Artificial Sequence
  Description of Artificial Sequence: Synthetic oligonucleotide
aacuugguuguuuagaagc

SEQ ID NO: 2445345 - RNA, 19 nt, Artificial Sequence
  Description of Artificial Sequence: Synthetic oligonucleotide
aaauguuacauguaauuag

SEQ ID NO: 2445346 - RNA, 19 nt, Artificial Sequence
  Description of Artificial Sequence: Synthetic oligonucleotide
uaugugaacauuaaaauaa

SEQ ID NO: 2445347 - RNA, 19 nt, Artificial Sequence
  Description of Artificial Sequence: Synthetic oligonucleotide
aguagcauguaauaaacac

SEQ ID NO: 2445348 - RNA, 19 nt, Artificial Sequence
  Description of Artificial Sequence: Synthetic oligonucleotide
uuuuauauacacauugcag

SEQ ID NO: 2445349 - RNA, 19 nt, Artificial Sequence
  Description of Artificial Sequence: Synthetic oligonucleotide
aagccaauacuucaguagc

SEQ ID NO: 2445350 - RNA, 19 nt, Artificial Sequence
  Description of Artificial Sequence: Synthetic oligonucleotide
aauguuacauguaauuagc

SEQ ID NO: 2445351 - RNA, 19 nt, Artificial Sequence
  Description of Artificial Sequence: Synthetic oligonucleotide
uuuauauacacauugcagu

SEQ ID NO: 2445352 - RNA, 19 nt, Artificial Sequence
  Description of Artificial Sequence: Synthetic oligonucleotide
aauaaugaccugcucguac

SEQ ID NO: 2445353 - RNA, 19 nt, Artificial Sequence
  Description of Artificial Sequence: Synthetic oligonucleotide
aaagccaauacuucaguag

SEQ ID NO: 2445354 - RNA, 19 nt, Artificial Sequence
  Description of Artificial Sequence: Synthetic oligonucleotide
uuugaaacuuccaauuucc

SEQ ID NO: 2445355 - RNA, 19 nt, Artificial Sequence
  Description of Artificial Sequence: Synthetic oligonucleotide
ugaagaacuaaguauuuag

SEQ ID NO: 2445356 - RNA, 19 nt, Artificial Sequence
  Description of Artificial Sequence: Synthetic oligonucleotide
uguauguuauuuuaaguug

SEQ ID NO: 2445357 - RNA, 19 nt, Artificial Sequence
  Description of Artificial Sequence: Synthetic oligonucleotide
uguuauuuuaaguugccug

SEQ ID NO: 2445358 - RNA, 19 nt, Artificial Sequence
  Description of Artificial Sequence: Synthetic oligonucleotide
uaaacauuguccuauauuu

SEQ ID NO: 2445359 - RNA, 19 nt, Artificial Sequence
  Description of Artificial Sequence: Synthetic oligonucleotide
aacacuugcaaauguucac

SEQ ID NO: 2445360 - RNA, 19 nt, Artificial Sequence
  Description of Artificial Sequence: Synthetic oligonucleotide
cucaauaaugaccugcucg

SEQ ID NO: 2445361 - RNA, 19 nt, Artificial Sequence
  Description of Artificial Sequence: Synthetic oligonucleotide
uaaugugcuaugcugauga

SEQ ID NO: 2445362 - RNA, 19 nt, Artificial Sequence
  Description of Artificial Sequence: Synthetic oligonucleotide
aauaaacacuugcaaaugu

SEQ ID NO: 2445363 - RNA, 19 nt, Artificial Sequence
  Description of Artificial Sequence: Synthetic oligonucleotide
uuuuaaguugccuguaugc

SEQ ID NO: 2445364 - RNA, 19 nt, Artificial Sequence
  Description of Artificial Sequence: Synthetic oligonucleotide
aacauuguccuauauuugu

SEQ ID NO: 2445365 - RNA, 19 nt, Artificial Sequence
  Description of Artificial Sequence: Synthetic oligonucleotide
gagaauuuagcucauucug

SEQ ID NO: 2445366 - RNA, 19 nt, Artificial Sequence
  Description of Artificial Sequence: Synthetic oligonucleotide
cuaauaaugugcuaugcug

SEQ ID NO: 2445367 - RNA, 19 nt, Artificial Sequence
  Description of Artificial Sequence: Synthetic oligonucleotide
uauuguauaaguucugagu

SEQ ID NO: 2445368 - RNA, 19 nt, Artificial Sequence
  Description of Artificial Sequence: Synthetic oligonucleotide
ucagcagugccuaauaaug

SEQ ID NO: 2445369 - RNA, 19 nt, Artificial Sequence
  Description of Artificial Sequence: Synthetic oligonucleotide
aagaacuaaguauuuagau

SEQ ID NO: 2445370 - RNA, 19 nt, Artificial Sequence
  Description of Artificial Sequence: Synthetic oligonucleotide
agaacuaaguauuuagaug

SEQ ID NO: 2445371 - RNA, 19 nt, Artificial Sequence
  Description of Artificial Sequence: Synthetic oligonucleotide
acauguaauuagcaaaagg

SEQ ID NO: 2445372 - RNA, 19 nt, Artificial Sequence
  Description of Artificial Sequence: Synthetic oligonucleotide
aaucgugaagccuguaauc

SEQ ID NO: 2445373 - RNA, 19 nt, Artificial Sequence
  Description of Artificial Sequence: Synthetic oligonucleotide
uguaauuagcaaaagguuu

SEQ ID NO: 2445374 - RNA, 19 nt, Artificial Sequence
  Description of Artificial Sequence: Synthetic oligonucleotide
ucugaaauguuacauguaa

SEQ ID NO: 2445375 - RNA, 19 nt, Artificial Sequence
  Description of Artificial Sequence: Synthetic oligonucleotide
uaauaaugugcuaugcuga

SEQ ID NO: 2445376 - RNA, 19 nt, Artificial Sequence
  Description of Artificial Sequence: Synthetic oligonucleotide
uguaaauauauuguauaag

SEQ ID NO: 2445377 - RNA, 19 nt, Artificial Sequence
  Description of Artificial Sequence: Synthetic oligonucleotide
aauaugucgauacugugua

SEQ ID NO: 2445378 - RNA, 19 nt, Artificial Sequence
  Description of Artificial Sequence: Synthetic oligonucleotide
ugaagcuucacgaugcucu

SEQ ID NO: 2445379 - RNA, 19 nt, Artificial Sequence
  Description of Artificial Sequence: Synthetic oligonucleotide
aguuugaagaacuaaguau

SEQ ID NO: 2445380 - RNA, 19 nt, Artificial Sequence
  Description of Artificial Sequence: Synthetic oligonucleotide
cuaaguauuuagaugguug

SEQ ID NO: 2445381 - RNA, 19 nt, Artificial Sequence
  Description of Artificial Sequence: Synthetic oligonucleotide
uuagcaaaagguuuuguaa

SEQ ID NO: 2445382 - RNA, 19 nt, Artificial Sequence
  Description of Artificial Sequence: Synthetic oligonucleotide
aagccuguaaucuggcuuc

SEQ ID NO: 2445383 - RNA, 19 nt, Artificial Sequence
  Description of Artificial Sequence: Synthetic oligonucleotide
uuugaugucuucuuucucu

SEQ ID NO: 2445384 - RNA, 19 nt, Artificial Sequence
  Description of Artificial Sequence: Synthetic oligonucleotide
cuugagagaauuuagcuca

SEQ ID NO: 2445385 - RNA, 19 nt, Artificial Sequence
  Description of Artificial Sequence: Synthetic oligonucleotide
auuguauaaguucugagua

SEQ ID NO: 2445386 - RNA, 19 nt, Artificial Sequence
  Description of Artificial Sequence: Synthetic oligonucleotide
uuacauguaauuagcaaaa

SEQ ID NO: 2445387 - RNA, 19 nt, Artificial Sequence
  Description of Artificial Sequence: Synthetic oligonucleotide
uccuauauuuguaugucug

SEQ ID NO: 2445388 - RNA, 19 nt, Artificial Sequence
  Description of Artificial Sequence: Synthetic oligonucleotide
agcaaaagguuuuguaaac

SEQ ID NO: 2445389 - RNA, 19 nt, Artificial Sequence
  Description of Artificial Sequence: Synthetic oligonucleotide
uaucuaaauuucuccaucc

SEQ ID NO: 2445390 - RNA, 19 nt, Artificial Sequence
  Description of Artificial Sequence: Synthetic oligonucleotide
uuuugaaacuuccaauuuc

SEQ ID NO: 2445391 - RNA, 19 nt, Artificial Sequence
  Description of Artificial Sequence: Synthetic oligonucleotide
ucaauaaugaccugcucgu

SEQ ID NO: 2445392 - RNA, 19 nt, Artificial Sequence
  Description of Artificial Sequence: Synthetic oligonucleotide
uuuagaugguuguagaaau

SEQ ID NO: 2445393 - RNA, 19 nt, Artificial Sequence
  Description of Artificial Sequence: Synthetic oligonucleotide
uaaguucugaguauaaaua

SEQ ID NO: 2445394 - RNA, 19 nt, Artificial Sequence
  Description of Artificial Sequence: Synthetic oligonucleotide
cugaguauaaauaugucga

SEQ ID NO: 2445395 - RNA, 19 nt, Artificial Sequence
  Description of Artificial Sequence: Synthetic oligonucleotide
uucacgaugcucuucagcu

SEQ ID NO: 2445396 - RNA, 19 nt, Artificial Sequence
  Description of Artificial Sequence: Synthetic oligonucleotide
uugaaggugugcuagguca

SEQ ID NO: 2445397 - RNA, 19 nt, Artificial Sequence
  Description of Artificial Sequence: Synthetic oligonucleotide
ugaguuugaagaacuaagu

SEQ ID NO: 2445398 - RNA, 19 nt, Artificial Sequence
  Description of Artificial Sequence: Synthetic oligonucleotide
uauguuauuuuaaguugcc

SEQ ID NO: 2445399 - RNA, 19 nt, Artificial Sequence
  Description of Artificial Sequence: Synthetic oligonucleotide
aguauuuagaugguuguag

SEQ ID NO: 2445400 - RNA, 19 nt, Artificial Sequence
  Description of Artificial Sequence: Synthetic oligonucleotide
uccaauuucccuccggacc

SEQ ID NO: 2445401 - RNA, 19 nt, Artificial Sequence
  Description of Artificial Sequence: Synthetic oligonucleotide
ugugcuaugcugaugaguu

SEQ ID NO: 2445402 - RNA, 19 nt, Artificial Sequence
  Description of Artificial Sequence: Synthetic oligonucleotide
uagcauguaauaaacacuu

SEQ ID NO: 2445403 - RNA, 19 nt, Artificial Sequence
  Description of Artificial Sequence: Synthetic oligonucleotide
uguaugccaucuuauaugu

SEQ ID NO: 2445404 - RNA, 19 nt, Artificial Sequence
  Description of Artificial Sequence: Synthetic oligonucleotide
auauuguauaaguucugag

SEQ ID NO: 2445405 - RNA, 19 nt, Artificial Sequence
  Description of Artificial Sequence: Synthetic oligonucleotide
gaugguuguagaaaugaag

SEQ ID NO: 2445406 - RNA, 19 nt, Artificial Sequence
  Description of Artificial Sequence: Synthetic oligonucleotide
aaacuugguuguuuagaag

SEQ ID NO: 2445407 - RNA, 19 nt, Artificial Sequence
  Description of Artificial Sequence: Synthetic oligonucleotide
uauguggcuagaacagacg

SEQ ID NO: 2445408 - RNA, 19 nt, Artificial Sequence
  Description of Artificial Sequence: Synthetic oligonucleotide
aucguauguggcuagaaca

SEQ ID NO: 2445409 - RNA, 19 nt, Artificial Sequence
  Description of Artificial Sequence: Synthetic oligonucleotide
ugcucguacucucggaucg

SEQ ID NO: 2445410 - RNA, 19 nt, Artificial Sequence
  Description of Artificial Sequence: Synthetic oligonucleotide
ucacuugucacuucuugcc

SEQ ID NO: 2445411 - RNA, 19 nt, Artificial Sequence
  Description of Artificial Sequence: Synthetic oligonucleotide
guuacauguaauuagcaaa

SEQ ID NO: 2445412 - RNA, 19 nt, Artificial Sequence
  Description of Artificial Sequence: Synthetic oligonucleotide
aaauaugucgauacugugu

SEQ ID NO: 2445413 - RNA, 19 nt, Artificial Sequence
  Description of Artificial Sequence: Synthetic oligonucleotide
uuuaaguugccuguaugcc

SEQ ID NO: 2445414 - RNA, 19 nt, Artificial Sequence
  Description of Artificial Sequence: Synthetic oligonucleotide
aaucuggcuuccucuaguc

SEQ ID NO: 2445415 - RNA, 19 nt, Artificial Sequence
  Description of Artificial Sequence: Synthetic oligonucleotide
uauauuguauaaguucuga

SEQ ID NO: 2445416 - RNA, 19 nt, Artificial Sequence
  Description of Artificial Sequence: Synthetic oligonucleotide
uuaaguugccuguaugcca

SEQ ID NO: 2445417 - RNA, 19 nt, Artificial Sequence
  Description of Artificial Sequence: Synthetic oligonucleotide
agagaauuuagcucauucu

SEQ ID NO: 2445418 - RNA, 19 nt, Artificial Sequence
  Description of Artificial Sequence: Synthetic oligonucleotide
ugaaacuuccaauuucccu

SEQ ID NO: 2445419 - RNA, 19 nt, Artificial Sequence
  Description of Artificial Sequence: Synthetic oligonucleotide
aauaaugugcuaugcugau

SEQ ID NO: 2445420 - RNA, 19 nt, Artificial Sequence
  Description of Artificial Sequence: Synthetic oligonucleotide
auuuuaaguugccuguaug

SEQ ID NO: 2445421 - RNA, 19 nt, Artificial Sequence
  Description of Artificial Sequence: Synthetic oligonucleotide
ucuuauaugugaacauuaa

SEQ ID NO: 2445422 - RNA, 19 nt, Artificial Sequence
  Description of Artificial Sequence: Synthetic oligonucleotide
uaaauuucuccauccagaa

SEQ ID NO: 2445423 - RNA, 19 nt, Artificial Sequence
  Description of Artificial Sequence: Synthetic oligonucleotide
uuuguaugucuguaaauau

SEQ ID NO: 2445424 - RNA, 19 nt, Artificial Sequence
  Description of Artificial Sequence: Synthetic oligonucleotide
guauguuauuuuaaguugc

SEQ ID NO: 2445425 - RNA, 19 nt, Artificial Sequence
  Description of Artificial Sequence: Synthetic oligonucleotide
auaaauaugucgauacugu

SEQ ID NO: 2445426 - RNA, 19 nt, Artificial Sequence
  Description of Artificial Sequence: Synthetic oligonucleotide
cauguaauaaacacuugca

SEQ ID NO: 2445427 - RNA, 19 nt, Artificial Sequence
  Description of Artificial Sequence: Synthetic oligonucleotide
ugguuuccaauccagcuac

SEQ ID NO: 2445428 - RNA, 19 nt, Artificial Sequence
  Description of Artificial Sequence: Synthetic oligonucleotide
gagagaauuuagcucauuc

SEQ ID NO: 2445429 - RNA, 19 nt, Artificial Sequence
  Description of Artificial Sequence: Synthetic oligonucleotide
ccagcuaccauguaaauac

SEQ ID NO: 2445430 - RNA, 19 nt, Artificial Sequence
  Description of Artificial Sequence: Synthetic oligonucleotide
uaaaagccaauacuucagu

SEQ ID NO: 2445431 - RNA, 19 nt, Artificial Sequence
  Description of Artificial Sequence: Synthetic oligonucleotide
augaguuugaagaacuaag

SEQ ID NO: 2445432 - RNA, 19 nt, Artificial Sequence
  Description of Artificial Sequence: Synthetic oligonucleotide
ugugaacauuaaaauaaaa

SEQ ID NO: 2445433 - RNA, 19 nt, Artificial Sequence
  Description of Artificial Sequence: Synthetic oligonucleotide
uaugucgauacuguguaug

SEQ ID NO: 2445434 - RNA, 19 nt, Artificial Sequence
  Description of Artificial Sequence: Synthetic oligonucleotide
ugcaaauguucacuuguca

SEQ ID NO: 2445435 - RNA, 19 nt, Artificial Sequence
  Description of Artificial Sequence: Synthetic oligonucleotide
uuagaugguuguagaaaug

SEQ ID NO: 2445436 - RNA, 19 nt, Artificial Sequence
  Description of Artificial Sequence: Synthetic oligonucleotide
agaacucuagcuucuccuc

SEQ ID NO: 2445437 - RNA, 19 nt, Artificial Sequence
  Description of Artificial Sequence: Synthetic oligonucleotide
auacacauugcagugaggu

SEQ ID NO: 2445438 - RNA, 19 nt, Artificial Sequence
  Description of Artificial Sequence: Synthetic oligonucleotide
auuguccuauauuuguaug

SEQ ID NO: 2445439 - RNA, 19 nt, Artificial Sequence
  Description of Artificial Sequence: Synthetic oligonucleotide
auuagcaaaagguuuugua

SEQ ID NO: 2445440 - RNA, 19 nt, Artificial Sequence
  Description of Artificial Sequence: Synthetic oligonucleotide
gcauguaauaaacacuugc

SEQ ID NO: 2445441 - RNA, 19 nt, Artificial Sequence
  Description of Artificial Sequence: Synthetic oligonucleotide
ugucuguaaauauauugua

SEQ ID NO: 2445442 - RNA, 19 nt, Artificial Sequence
  Description of Artificial Sequence: Synthetic oligonucleotide
guaauaaacacuugcaaau

SEQ ID NO: 2445443 - RNA, 19 nt, Artificial Sequence
  Description of Artificial Sequence: Synthetic oligonucleotide
auaaugaccugcucguacu

SEQ ID NO: 2445444 - RNA, 19 nt, Artificial Sequence
  Description of Artificial Sequence: Synthetic oligonucleotide
acuugguuguuuagaagcc

SEQ ID NO: 2445445 - RNA, 19 nt, Artificial Sequence
  Description of Artificial Sequence: Synthetic oligonucleotide
uugaaacuuccaauuuccc

SEQ ID NO: 2445446 - RNA, 19 nt, Artificial Sequence
  Description of Artificial Sequence: Synthetic oligonucleotide
ugguuguagaaaugaagga

SEQ ID NO: 2445447 - RNA, 19 nt, Artificial Sequence
  Description of Artificial Sequence: Synthetic oligonucleotide
gaggaaccaucguaugugg

SEQ ID NO: 2445448 - RNA, 19 nt, Artificial Sequence
  Description of Artificial Sequence: Synthetic oligonucleotide
uccaauccagcuaccaugu

SEQ ID NO: 2445449 - RNA, 19 nt, Artificial Sequence
  Description of Artificial Sequence: Synthetic oligonucleotide
auuuguaugucuguaaaua

SEQ ID NO: 2445450 - RNA, 19 nt, Artificial Sequence
  Description of Artificial Sequence: Synthetic oligonucleotide
uaaguugccuguaugccau

SEQ ID NO: 2445451 - RNA, 19 nt, Artificial Sequence
  Description of Artificial Sequence: Synthetic oligonucleotide
uacuucaguagcauguaau

SEQ ID NO: 2445452 - RNA, 19 nt, Artificial Sequence
  Description of Artificial Sequence: Synthetic oligonucleotide
uauuuuaaguugccuguau

SEQ ID NO: 2445453 - RNA, 19 nt, Artificial Sequence
  Description of Artificial Sequence: Synthetic oligonucleotide
uuugaagaacuaaguauuu

SEQ ID NO: 2445454 - RNA, 19 nt, Artificial Sequence
  Description of Artificial Sequence: Synthetic oligonucleotide
acuugucacuucuugccuc

SEQ ID NO: 2445455 - RNA, 19 nt, Artificial Sequence
  Description of Artificial Sequence: Synthetic oligonucleotide
aaacauuguccuauauuug

SEQ ID NO: 2445456 - RNA, 19 nt, Artificial Sequence
  Description of Artificial Sequence: Synthetic oligonucleotide
uguagaaaugaaggaaaac

SEQ ID NO: 2445457 - RNA, 19 nt, Artificial Sequence
  Description of Artificial Sequence: Synthetic oligonucleotide
ugugcuaggucagaggccu

SEQ ID NO: 2445458 - RNA, 19 nt, Artificial Sequence
  Description of Artificial Sequence: Synthetic oligonucleotide
ugcuaugcugaugaguuug

SEQ ID NO: 2445459 - RNA, 19 nt, Artificial Sequence
  Description of Artificial Sequence: Synthetic oligonucleotide
ugaaggugugcuaggucag

SEQ ID NO: 2445460 - RNA, 19 nt, Artificial Sequence
  Description of Artificial Sequence: Synthetic oligonucleotide
guuauuuuaaguugccugu

SEQ ID NO: 2445461 - RNA, 19 nt, Artificial Sequence
  Description of Artificial Sequence: Synthetic oligonucleotide
uguauaaguucugaguaua

SEQ ID NO: 2445462 - RNA, 19 nt, Artificial Sequence
  Description of Artificial Sequence: Synthetic oligonucleotide
agcagugccuaauaaugug

SEQ ID NO: 2445463 - RNA, 19 nt, Artificial Sequence
  Description of Artificial Sequence: Synthetic oligonucleotide
aaauguucacuugucacuu

SEQ ID NO: 2445464 - RNA, 19 nt, Artificial Sequence
  Description of Artificial Sequence: Synthetic oligonucleotide
ugaguauaaauaugucgau

SEQ ID NO: 2445465 - RNA, 19 nt, Artificial Sequence
  Description of Artificial Sequence: Synthetic oligonucleotide
uugcagcuaaucgugaagc

SEQ ID NO: 2445466 - RNA, 19 nt, Artificial Sequence
  Description of Artificial Sequence: Synthetic oligonucleotide
gccuugacagccuugagag

SEQ ID NO: 2445467 - RNA, 19 nt, Artificial Sequence
  Description of Artificial Sequence: Synthetic oligonucleotide
ucucggaucgucuuugcaa

SEQ ID NO: 2445468 - RNA, 19 nt, Artificial Sequence
  Description of Artificial Sequence: Synthetic oligonucleotide
cacgaugcucuucagcucc

SEQ ID NO: 2445469 - RNA, 19 nt, Artificial Sequence
  Description of Artificial Sequence: Synthetic oligonucleotide
agcuaccauguaaauaccc

SEQ ID NO: 2445470 - RNA, 19 nt, Artificial Sequence
  Description of Artificial Sequence: Synthetic oligonucleotide
aaugugcuaugcugaugag

SEQ ID NO: 2445471 - RNA, 19 nt, Artificial Sequence
  Description of Artificial Sequence: Synthetic oligonucleotide
uacuguguauguuauuuua

SEQ ID NO: 2445472 - RNA, 19 nt, Artificial Sequence
  Description of Artificial Sequence: Synthetic oligonucleotide
gaagaacuaaguauuuaga

SEQ ID NO: 2445473 - RNA, 19 nt, Artificial Sequence
  Description of Artificial Sequence: Synthetic oligonucleotide
cucggaucgucuuugcaag

SEQ ID NO: 2445474 - RNA, 19 nt, Artificial Sequence
  Description of Artificial Sequence: Synthetic oligonucleotide
cagcuaaucgugaagccug

SEQ ID NO: 2445475 - RNA, 19 nt, Artificial Sequence
  Description of Artificial Sequence: Synthetic oligonucleotide
uaauuagcaaaagguuuug

SEQ ID NO: 2445476 - RNA, 19 nt, Artificial Sequence
  Description of Artificial Sequence: Synthetic oligonucleotide
aauuagcaaaagguuuugu

SEQ ID NO: 2445477 - RNA, 19 nt, Artificial Sequence
  Description of Artificial Sequence: Synthetic oligonucleotide
guauuuagaugguuguaga

SEQ ID NO: 2445478 - RNA, 19 nt, Artificial Sequence
  Description of Artificial Sequence: Synthetic oligonucleotide
auguggcuagaacagacga

SEQ ID NO: 2445479 - RNA, 19 nt, Artificial Sequence
  Description of Artificial Sequence: Synthetic oligonucleotide
cauccagaacucuagcuuc

SEQ ID NO: 2445480 - RNA, 19 nt, Artificial Sequence
  Description of Artificial Sequence: Synthetic oligonucleotide
gucacuucuugccucuccg

SEQ ID NO: 2445481 - RNA, 19 nt, Artificial Sequence
  Description of Artificial Sequence: Synthetic oligonucleotide
uguaaacauuguccuauau

SEQ ID NO: 2445482 - RNA, 19 nt, Artificial Sequence
  Description of Artificial Sequence: Synthetic oligonucleotide
ggugugcuaggucagaggc

SEQ ID NO: 2445483 - RNA, 19 nt, Artificial Sequence
  Description of Artificial Sequence: Synthetic oligonucleotide
ugcagugaggugguuacag

SEQ ID NO: 2445484 - RNA, 19 nt, Artificial Sequence
  Description of Artificial Sequence: Synthetic oligonucleotide
uguaccucgccaccaggcc

SEQ ID NO: 2445485 - RNA, 19 nt, Artificial Sequence
  Description of Artificial Sequence: Synthetic oligonucleotide
uauaaguucugaguauaaa

SEQ ID NO: 2445486 - RNA, 19 nt, Artificial Sequence
  Description of Artificial Sequence: Synthetic oligonucleotide
aucuaaauuucuccaucca

SEQ ID NO: 2445487 - RNA, 19 nt, Artificial Sequence
  Description of Artificial Sequence: Synthetic oligonucleotide
gaguuugaagaacuaagua

SEQ ID NO: 2445488 - RNA, 19 nt, Artificial Sequence
  Description of Artificial Sequence: Synthetic oligonucleotide
uccauccagaacucuagcu

SEQ ID NO: 2445489 - RNA, 19 nt, Artificial Sequence
  Description of Artificial Sequence: Synthetic oligonucleotide
agaauuuagcucauucugu

SEQ ID NO: 2445490 - RNA, 19 nt, Artificial Sequence
  Description of Artificial Sequence: Synthetic oligonucleotide
cuugcagcuaaucgugaag

SEQ ID NO: 2445491 - RNA, 19 nt, Artificial Sequence
  Description of Artificial Sequence: Synthetic oligonucleotide
aguucugaguauaaauaug

SEQ ID NO: 2445492 - RNA, 19 nt, Artificial Sequence
  Description of Artificial Sequence: Synthetic oligonucleotide
uugccuuuggaaucuuuga

SEQ ID NO: 2445493 - RNA, 19 nt, Artificial Sequence
  Description of Artificial Sequence: Synthetic oligonucleotide
ucgauacuguguauguuau

SEQ ID NO: 2445494 - RNA, 19 nt, Artificial Sequence
  Description of Artificial Sequence: Synthetic oligonucleotide
auguucacuugucacuucu

SEQ ID NO: 2445495 - RNA, 19 nt, Artificial Sequence
  Description of Artificial Sequence: Synthetic oligonucleotide
uguccuauauuuguauguc

SEQ ID NO: 2445496 - RNA, 19 nt, Artificial Sequence
  Description of Artificial Sequence: Synthetic oligonucleotide
ugaccugcucguacucucg

SEQ ID NO: 2445497 - RNA, 19 nt, Artificial Sequence
  Description of Artificial Sequence: Synthetic oligonucleotide
aaccaucguauguggcuag

SEQ ID NO: 2445498 - RNA, 19 nt, Artificial Sequence
  Description of Artificial Sequence: Synthetic oligonucleotide
uguaaucuggcuuccucua

SEQ ID NO: 2445499 - RNA, 19 nt, Artificial Sequence
  Description of Artificial Sequence: Synthetic oligonucleotide
aucgugaagccuguaaucu

SEQ ID NO: 2445500 - RNA, 19 nt, Artificial Sequence
  Description of Artificial Sequence: Synthetic oligonucleotide
ugcagcuaaucgugaagcc

SEQ ID NO: 2445501 - RNA, 19 nt, Artificial Sequence
  Description of Artificial Sequence: Synthetic oligonucleotide
aauacuucaguagcaugua

SEQ ID NO: 2445502 - RNA, 19 nt, Artificial Sequence
  Description of Artificial Sequence: Synthetic oligonucleotide
augucgauacuguguaugu

SEQ ID NO: 2445503 - RNA, 19 nt, Artificial Sequence
  Description of Artificial Sequence: Synthetic oligonucleotide
aaggugugcuaggucagag

SEQ ID NO: 2445504 - RNA, 19 nt, Artificial Sequence
  Description of Artificial Sequence: Synthetic oligonucleotide
uugcaaauguucacuuguc

SEQ ID NO: 2445505 - RNA, 19 nt, Artificial Sequence
  Description of Artificial Sequence: Synthetic oligonucleotide
uguggcuagaacagacgaa

SEQ ID NO: 2445506 - RNA, 19 nt, Artificial Sequence
  Description of Artificial Sequence: Synthetic oligonucleotide
auguaauuagcaaaagguu

SEQ ID NO: 2445507 - RNA, 19 nt, Artificial Sequence
  Description of Artificial Sequence: Synthetic oligonucleotide
uugguuguuuagaagccuu

SEQ ID NO: 2445508 - RNA, 19 nt, Artificial Sequence
  Description of Artificial Sequence: Synthetic oligonucleotide
guaaucuggcuuccucuag

SEQ ID NO: 2445509 - RNA, 19 nt, Artificial Sequence
  Description of Artificial Sequence: Synthetic oligonucleotide
uucuccauccagaacucua

SEQ ID NO: 2445510 - RNA, 19 nt, Artificial Sequence
  Description of Artificial Sequence: Synthetic oligonucleotide
ucgccaccaggccugaagc

SEQ ID NO: 2445511 - RNA, 19 nt, Artificial Sequence
  Description of Artificial Sequence: Synthetic oligonucleotide
ucgugaagccuguaaucug

SEQ ID NO: 2445512 - RNA, 19 nt, Artificial Sequence
  Description of Artificial Sequence: Synthetic oligonucleotide
cagccuugagagaauuuag

SEQ ID NO: 2445513 - RNA, 19 nt, Artificial Sequence
  Description of Artificial Sequence: Synthetic oligonucleotide
aggugguuacagcagauuu

SEQ ID NO: 2445514 - RNA, 19 nt, Artificial Sequence
  Description of Artificial Sequence: Synthetic oligonucleotide
aaugaccugcucguacucu

SEQ ID NO: 2445515 - RNA, 19 nt, Artificial Sequence
  Description of Artificial Sequence: Synthetic oligonucleotide
cuguaccucgccaccaggc

SEQ ID NO: 2445516 - RNA, 19 nt, Artificial Sequence
  Description of Artificial Sequence: Synthetic oligonucleotide
aacuaaguauuuagauggu

SEQ ID NO: 2445517 - RNA, 19 nt, Artificial Sequence
  Description of Artificial Sequence: Synthetic oligonucleotide
gucgauacuguguauguua

SEQ ID NO: 2445518 - RNA, 19 nt, Artificial Sequence
  Description of Artificial Sequence: Synthetic oligonucleotide
guauguggcuagaacagac

SEQ ID NO: 2445519 - RNA, 19 nt, Artificial Sequence
  Description of Artificial Sequence: Synthetic oligonucleotide
cagccgguccucaauaaug

SEQ ID NO: 2445520 - RNA, 19 nt, Artificial Sequence
  Description of Artificial Sequence: Synthetic oligonucleotide
agcucauucuguuuugcuu

SEQ ID NO: 2445521 - RNA, 19 nt, Artificial Sequence
  Description of Artificial Sequence: Synthetic oligonucleotide
uuauuuuaaguugccugua

SEQ ID NO: 2445522 - RNA, 19 nt, Artificial Sequence
  Description of Artificial Sequence: Synthetic oligonucleotide
ugaugaguuugaagaacua

SEQ ID NO: 2445523 - RNA, 19 nt, Artificial Sequence
  Description of Artificial Sequence: Synthetic oligonucleotide
acacuugcaaauguucacu

SEQ ID NO: 2445524 - RNA, 19 nt, Artificial Sequence
  Description of Artificial Sequence: Synthetic oligonucleotide
uuccaauuucccuccggac

SEQ ID NO: 2445525 - RNA, 19 nt, Artificial Sequence
  Description of Artificial Sequence: Synthetic oligonucleotide
ucggaucgucuuugcaagg

SEQ ID NO: 2445526 - RNA, 19 nt, Artificial Sequence
  Description of Artificial Sequence: Synthetic oligonucleotide
aaguauuuagaugguugua

SEQ ID NO: 2445527 - RNA, 19 nt, Artificial Sequence
  Description of Artificial Sequence: Synthetic oligonucleotide
uccggaccacuguaccucg

SEQ ID NO: 2445528 - RNA, 19 nt, Artificial Sequence
  Description of Artificial Sequence: Synthetic oligonucleotide
aucuuauaugugaacauua

SEQ ID NO: 2445529 - RNA, 19 nt, Artificial Sequence
  Description of Artificial Sequence: Synthetic oligonucleotide
uaaugaccugcucguacuc

SEQ ID NO: 2445530 - RNA, 19 nt, Artificial Sequence
  Description of Artificial Sequence: Synthetic oligonucleotide
ggaaaacuugguuguuuag

SEQ ID NO: 2445531 - RNA, 19 nt, Artificial Sequence
  Description of Artificial Sequence: Synthetic oligonucleotide
caaauguucacuugucacu

SEQ ID NO: 2445532 - RNA, 19 nt, Artificial Sequence
  Description of Artificial Sequence: Synthetic oligonucleotide
gaauuuagcucauucuguu

SEQ ID NO: 2445533 - RNA, 19 nt, Artificial Sequence
  Description of Artificial Sequence: Synthetic oligonucleotide
uaccucgccaccaggccug

SEQ ID NO: 2445534 - RNA, 19 nt, Artificial Sequence
  Description of Artificial Sequence: Synthetic oligonucleotide
auguuauuuuaaguugccu

SEQ ID NO: 2445535 - RNA, 19 nt, Artificial Sequence
  Description of Artificial Sequence: Synthetic oligonucleotide
aggaaccaucguauguggc

SEQ ID NO: 2445536 - RNA, 19 nt, Artificial Sequence
  Description of Artificial Sequence: Synthetic oligonucleotide
uagcucauucuguuuugcu

SEQ ID NO: 2445537 - RNA, 19 nt, Artificial Sequence
  Description of Artificial Sequence: Synthetic oligonucleotide
acagccuugagagaauuua

SEQ ID NO: 2445538 - RNA, 19 nt, Artificial Sequence
  Description of Artificial Sequence: Synthetic oligonucleotide
gaguauaaauaugucgaua

SEQ ID NO: 2445539 - RNA, 19 nt, Artificial Sequence
  Description of Artificial Sequence: Synthetic oligonucleotide
gcuaccauguaaauacccc

SEQ ID NO: 2445540 - RNA, 19 nt, Artificial Sequence
  Description of Artificial Sequence: Synthetic oligonucleotide
gguuguagaaaugaaggaa

SEQ ID NO: 2445541 - RNA, 19 nt, Artificial Sequence
  Description of Artificial Sequence: Synthetic oligonucleotide
cuuccaauuucccuccgga

SEQ ID NO: 2445542 - RNA, 19 nt, Artificial Sequence
  Description of Artificial Sequence: Synthetic oligonucleotide
ugccaucuuauaugugaac

SEQ ID NO: 2445543 - RNA, 19 nt, Artificial Sequence
  Description of Artificial Sequence: Synthetic oligonucleotide
cuaaucgugaagccuguaa

SEQ ID NO: 2445544 - RNA, 19 nt, Artificial Sequence
  Description of Artificial Sequence: Synthetic oligonucleotide
ugaggugguuacagcagau

SEQ ID NO: 2445545 - RNA, 19 nt, Artificial Sequence
  Description of Artificial Sequence: Synthetic oligonucleotide
ggucuugaaggugugcuag

SEQ ID NO: 2445546 - RNA, 19 nt, Artificial Sequence
  Description of Artificial Sequence: Synthetic oligonucleotide
auacuucaguagcauguaa

SEQ ID NO: 2445547 - RNA, 19 nt, Artificial Sequence
  Description of Artificial Sequence: Synthetic oligonucleotide
ucguacucucggaucgucu

SEQ ID NO: 2445548 - RNA, 19 nt, Artificial Sequence
  Description of Artificial Sequence: Synthetic oligonucleotide
uccugggcauuuugaaacu

SEQ ID NO: 2445549 - RNA, 19 nt, Artificial Sequence
  Description of Artificial Sequence: Synthetic oligonucleotide
guauaaauaugucgauacu

SEQ ID NO: 2445550 - RNA, 19 nt, Artificial Sequence
  Description of Artificial Sequence: Synthetic oligonucleotide
guagcauguaauaaacacu

SEQ ID NO: 2445551 - RNA, 19 nt, Artificial Sequence
  Description of Artificial Sequence: Synthetic oligonucleotide
uggcuagaacagacgaaaa

SEQ ID NO: 2445552 - RNA, 19 nt, Artificial Sequence
  Description of Artificial Sequence: Synthetic oligonucleotide
guggcuagaacagacgaaa

SEQ ID NO: 2445553 - RNA, 19 nt, Artificial Sequence
  Description of Artificial Sequence: Synthetic oligonucleotide
cgugaagccuguaaucugg

SEQ ID NO: 2445554 - RNA, 19 nt, Artificial Sequence
  Description of Artificial Sequence: Synthetic oligonucleotide
uccagcuaccauguaaaua

SEQ ID NO: 2445555 - RNA, 19 nt, Artificial Sequence
  Description of Artificial Sequence: Synthetic oligonucleotide
acuaaguauuuagaugguu

SEQ ID NO: 2445556 - RNA, 19 nt, Artificial Sequence
  Description of Artificial Sequence: Synthetic oligonucleotide
caaaagguuuuguaaacau

SEQ ID NO: 2445557 - RNA, 19 nt, Artificial Sequence
  Description of Artificial Sequence: Synthetic oligonucleotide
cagcuaccauguaaauacc

SEQ ID NO: 2445558 - RNA, 19 nt, Artificial Sequence
  Description of Artificial Sequence: Synthetic oligonucleotide
agucagcagugccuaauaa

SEQ ID NO: 2445559 - RNA, 19 nt, Artificial Sequence
  Description of Artificial Sequence: Synthetic oligonucleotide
uuuccagccgguccucaau

SEQ ID NO: 2445560 - RNA, 19 nt, Artificial Sequence
  Description of Artificial Sequence: Synthetic oligonucleotide
cucgccaccaggccugaag

SEQ ID NO: 2445561 - RNA, 19 nt, Artificial Sequence
  Description of Artificial Sequence: Synthetic oligonucleotide
augugcuaugcugaugagu

SEQ ID NO: 2445562 - RNA, 19 nt, Artificial Sequence
  Description of Artificial Sequence: Synthetic oligonucleotide
ccgguccucaauaaugacc

SEQ ID NO: 2445563 - RNA, 19 nt, Artificial Sequence
  Description of Artificial Sequence: Synthetic oligonucleotide
ggugguuacagcagauuug

SEQ ID NO: 2445564 - RNA, 19 nt, Artificial Sequence
  Description of Artificial Sequence: Synthetic oligonucleotide
ugcuaggucagaggccuug

SEQ ID NO: 2445565 - RNA, 19 nt, Artificial Sequence
  Description of Artificial Sequence: Synthetic oligonucleotide
gccaucuuauaugugaaca

SEQ ID NO: 2445566 - RNA, 19 nt, Artificial Sequence
  Description of Artificial Sequence: Synthetic oligonucleotide
caguagcauguaauaaaca

SEQ ID NO: 2445567 - RNA, 19 nt, Artificial Sequence
  Description of Artificial Sequence: Synthetic oligonucleotide
uguucacuugucacuucuu

SEQ ID NO: 2445568 - RNA, 19 nt, Artificial Sequence
  Description of Artificial Sequence: Synthetic oligonucleotide
gacuucugaaauguuacau

SEQ ID NO: 2445569 - RNA, 19 nt, Artificial Sequence
  Description of Artificial Sequence: Synthetic oligonucleotide
uuccagccgguccucaaua

SEQ ID NO: 2445570 - RNA, 19 nt, Artificial Sequence
  Description of Artificial Sequence: Synthetic oligonucleotide
ugguuacagcagauuugac

SEQ ID NO: 2445571 - RNA, 19 nt, Artificial Sequence
  Description of Artificial Sequence: Synthetic oligonucleotide
ucgucuuugcaaggucuug

SEQ ID NO: 2445572 - RNA, 19 nt, Artificial Sequence
  Description of Artificial Sequence: Synthetic oligonucleotide
agcauguaauaaacacuug

SEQ ID NO: 2445573 - RNA, 19 nt, Artificial Sequence
  Description of Artificial Sequence: Synthetic oligonucleotide
agugccuaauaaugugcua

SEQ ID NO: 2445574 - RNA, 19 nt, Artificial Sequence
  Description of Artificial Sequence: Synthetic oligonucleotide
auaugucgauacuguguau

SEQ ID NO: 2445575 - RNA, 19 nt, Artificial Sequence
  Description of Artificial Sequence: Synthetic oligonucleotide
gaaccaucguauguggcua

SEQ ID NO: 2445576 - RNA, 19 nt, Artificial Sequence
  Description of Artificial Sequence: Synthetic oligonucleotide
guauaaguucugaguauaa

SEQ ID NO: 2445577 - RNA, 19 nt, Artificial Sequence
  Description of Artificial Sequence: Synthetic oligonucleotide
ccaauacuucaguagcaug

SEQ ID NO: 2445578 - RNA, 19 nt, Artificial Sequence
  Description of Artificial Sequence: Synthetic oligonucleotide
aauuucccuccggaccacu

SEQ ID NO: 2445579 - RNA, 19 nt, Artificial Sequence
  Description of Artificial Sequence: Synthetic oligonucleotide
gaucgucuuugcaaggucu

SEQ ID NO: 2445580 - RNA, 19 nt, Artificial Sequence
  Description of Artificial Sequence: Synthetic oligonucleotide
uuccucuagucagcagugc

SEQ ID NO: 2445581 - RNA, 19 nt, Artificial Sequence
  Description of Artificial Sequence: Synthetic oligonucleotide
cuaggucagaggccuugac

SEQ ID NO: 2445582 - RNA, 19 nt, Artificial Sequence
  Description of Artificial Sequence: Synthetic oligonucleotide
agccaauacuucaguagca

SEQ ID NO: 2445583 - RNA, 19 nt, Artificial Sequence
  Description of Artificial Sequence: Synthetic oligonucleotide
ggugguuuccaauccagcu

SEQ ID NO: 2445584 - RNA, 19 nt, Artificial Sequence
  Description of Artificial Sequence: Synthetic oligonucleotide
aguugccuguaugccaucu

SEQ ID NO: 2445585 - RNA, 19 nt, Artificial Sequence
  Description of Artificial Sequence: Synthetic oligonucleotide
ucuagucagcagugccuaa

SEQ ID NO: 2445586 - RNA, 19 nt, Artificial Sequence
  Description of Artificial Sequence: Synthetic oligonucleotide
cauuguccuauauuuguau

SEQ ID NO: 2445587 - RNA, 19 nt, Artificial Sequence
  Description of Artificial Sequence: Synthetic oligonucleotide
cuguaaucuggcuuccucu

SEQ ID NO: 2445588 - RNA, 19 nt, Artificial Sequence
  Description of Artificial Sequence: Synthetic oligonucleotide
gucuguaaauauauuguau

SEQ ID NO: 2445589 - RNA, 19 nt, Artificial Sequence
  Description of Artificial Sequence: Synthetic oligonucleotide
gcaaaagguuuuguaaaca

SEQ ID NO: 2445590 - RNA, 19 nt, Artificial Sequence
  Description of Artificial Sequence: Synthetic oligonucleotide
cugcucguacucucggauc

SEQ ID NO: 2445591 - RNA, 19 nt, Artificial Sequence
  Description of Artificial Sequence: Synthetic oligonucleotide
ggaaccaucguauguggcu

SEQ ID NO: 2445592 - RNA, 19 nt, Artificial Sequence
  Description of Artificial Sequence: Synthetic oligonucleotide
agccgguccucaauaauga

SEQ ID NO: 2445593 - RNA, 19 nt, Artificial Sequence
  Description of Artificial Sequence: Synthetic oligonucleotide
uccagccgguccucaauaa

SEQ ID NO: 2445594 - RNA, 19 nt, Artificial Sequence
  Description of Artificial Sequence: Synthetic oligonucleotide
acauuguccuauauuugua

SEQ ID NO: 2445595 - RNA, 19 nt, Artificial Sequence
  Description of Artificial Sequence: Synthetic oligonucleotide
aggccugaagcuucacgau

SEQ ID NO: 2445596 - RNA, 19 nt, Artificial Sequence
  Description of Artificial Sequence: Synthetic oligonucleotide
guccuauauuuguaugucu

SEQ ID NO: 2445597 - RNA, 19 nt, Artificial Sequence
  Description of Artificial Sequence: Synthetic oligonucleotide
aggucuugaaggugugcua

SEQ ID NO: 2445598 - RNA, 19 nt, Artificial Sequence
  Description of Artificial Sequence: Synthetic oligonucleotide
ugucgauacuguguauguu

SEQ ID NO: 2445599 - RNA, 19 nt, Artificial Sequence
  Description of Artificial Sequence: Synthetic oligonucleotide
gugaagccuguaaucuggc

SEQ ID NO: 2445600 - RNA, 19 nt, Artificial Sequence
  Description of Artificial Sequence: Synthetic oligonucleotide
cugaaauguuacauguaau

SEQ ID NO: 2445601 - RNA, 19 nt, Artificial Sequence
  Description of Artificial Sequence: Synthetic oligonucleotide
gucagcagugccuaauaau

SEQ ID NO: 2445602 - RNA, 19 nt, Artificial Sequence
  Description of Artificial Sequence: Synthetic oligonucleotide
ucccuccggaccacuguac

SEQ ID NO: 2445603 - RNA, 19 nt, Artificial Sequence
  Description of Artificial Sequence: Synthetic oligonucleotide
cuccggaccacuguaccuc

SEQ ID NO: 2445604 - RNA, 19 nt, Artificial Sequence
  Description of Artificial Sequence: Synthetic oligonucleotide
gcauuuugaaacuuccaau

SEQ ID NO: 2445605 - RNA, 19 nt, Artificial Sequence
  Description of Artificial Sequence: Synthetic oligonucleotide
cagagcagugggugguuuc

SEQ ID NO: 2445606 - RNA, 19 nt, Artificial Sequence
  Description of Artificial Sequence: Synthetic oligonucleotide
agcagugggugguuuccaa

SEQ ID NO: 2445607 - RNA, 19 nt, Artificial Sequence
  Description of Artificial Sequence: Synthetic oligonucleotide
ccaauuucccuccggacca

SEQ ID NO: 2445608 - RNA, 19 nt, Artificial Sequence
  Description of Artificial Sequence: Synthetic oligonucleotide
auccagcuaccauguaaau

SEQ ID NO: 2445609 - RNA, 19 nt, Artificial Sequence
  Description of Artificial Sequence: Synthetic oligonucleotide
gugccuaauaaugugcuau

SEQ ID NO: 2445610 - RNA, 19 nt, Artificial Sequence
  Description of Artificial Sequence: Synthetic oligonucleotide
gccuugagagaauuuagcu

SEQ ID NO: 2445611 - RNA, 19 nt, Artificial Sequence
  Description of Artificial Sequence: Synthetic oligonucleotide
gugugcuaggucagaggcc

SEQ ID NO: 2445612 - RNA, 19 nt, Artificial Sequence
  Description of Artificial Sequence: Synthetic oligonucleotide
guaugccaucuuauaugug

SEQ ID NO: 2445613 - RNA, 19 nt, Artificial Sequence
  Description of Artificial Sequence: Synthetic oligonucleotide
cagugccuaauaaugugcu

SEQ ID NO: 2445614 - RNA, 19 nt, Artificial Sequence
  Description of Artificial Sequence: Synthetic oligonucleotide
ccguuuuccuucuccuugc

SEQ ID NO: 2445615 - RNA, 19 nt, Artificial Sequence
  Description of Artificial Sequence: Synthetic oligonucleotide
gaaggugugcuaggucaga

SEQ ID NO: 2445616 - RNA, 19 nt, Artificial Sequence
  Description of Artificial Sequence: Synthetic oligonucleotide
accugcucguacucucgga

SEQ ID NO: 2445617 - RNA, 19 nt, Artificial Sequence
  Description of Artificial Sequence: Synthetic oligonucleotide
ccccuugcagcuaaucgug

SEQ ID NO: 2445618 - RNA, 19 nt, Artificial Sequence
  Description of Artificial Sequence: Synthetic oligonucleotide
ggaucgucuuugcaagguc

SEQ ID NO: 2445619 - RNA, 19 nt, Artificial Sequence
  Description of Artificial Sequence: Synthetic oligonucleotide
uccagaacucuagcuucuc

SEQ ID NO: 2445620 - RNA, 19 nt, Artificial Sequence
  Description of Artificial Sequence: Synthetic oligonucleotide
cagcagugccuaauaaugu

SEQ ID NO: 2445621 - RNA, 19 nt, Artificial Sequence
  Description of Artificial Sequence: Synthetic oligonucleotide
uugcagugaggugguuaca

SEQ ID NO: 2445622 - RNA, 19 nt, Artificial Sequence
  Description of Artificial Sequence: Synthetic oligonucleotide
aucgucuuugcaaggucuu

SEQ ID NO: 2445623 - RNA, 19 nt, Artificial Sequence
  Description of Artificial Sequence: Synthetic oligonucleotide
cucguacucucggaucguc

SEQ ID NO: 2445624 - RNA, 19 nt, Artificial Sequence
  Description of Artificial Sequence: Synthetic oligonucleotide
cucuagucagcagugccua

SEQ ID NO: 2445625 - RNA, 19 nt, Artificial Sequence
  Description of Artificial Sequence: Synthetic oligonucleotide
guaccucgccaccaggccu

SEQ ID NO: 2445626 - RNA, 19 nt, Artificial Sequence
  Description of Artificial Sequence: Synthetic oligonucleotide
accaucguauguggcuaga

SEQ ID NO: 2445627 - RNA, 19 nt, Artificial Sequence
  Description of Artificial Sequence: Synthetic oligonucleotide
gggugguuuccaauccagc

SEQ ID NO: 2445628 - RNA, 19 nt, Artificial Sequence
  Description of Artificial Sequence: Synthetic oligonucleotide
caauuucccuccggaccac

SEQ ID NO: 2445629 - RNA, 19 nt, Artificial Sequence
  Description of Artificial Sequence: Synthetic oligonucleotide
ccuauauuuguaugucugu

SEQ ID NO: 2445630 - RNA, 19 nt, Artificial Sequence
  Description of Artificial Sequence: Synthetic oligonucleotide
ggaccacuguaccucgcca

SEQ ID NO: 2445631 - RNA, 19 nt, Artificial Sequence
  Description of Artificial Sequence: Synthetic oligonucleotide
cacuugcaaauguucacuu

SEQ ID NO: 2445632 - RNA, 19 nt, Artificial Sequence
  Description of Artificial Sequence: Synthetic oligonucleotide
cuaugcugaugaguuugaa

SEQ ID NO: 2445633 - RNA, 19 nt, Artificial Sequence
  Description of Artificial Sequence: Synthetic oligonucleotide
cugugucuuuaucuaaauu

SEQ ID NO: 2445634 - RNA, 19 nt, Artificial Sequence
  Description of Artificial Sequence: Synthetic oligonucleotide
ccuguaugccaucuuauau

SEQ ID NO: 2445635 - RNA, 19 nt, Artificial Sequence
  Description of Artificial Sequence: Synthetic oligonucleotide
gcagcuaaucgugaagccu

SEQ ID NO: 2445636 - RNA, 19 nt, Artificial Sequence
  Description of Artificial Sequence: Synthetic oligonucleotide
gcaaggucuugaaggugug

SEQ ID NO: 2445637 - RNA, 19 nt, Artificial Sequence
  Description of Artificial Sequence: Synthetic oligonucleotide
gguuuccaauccagcuacc

SEQ ID NO: 2445638 - RNA, 19 nt, Artificial Sequence
  Description of Artificial Sequence: Synthetic oligonucleotide
gccuguaugccaucuuaua

SEQ ID NO: 2445639 - RNA, 19 nt, Artificial Sequence
  Description of Artificial Sequence: Synthetic oligonucleotide
gcuaugcugaugaguuuga

SEQ ID NO: 2445640 - RNA, 19 nt, Artificial Sequence
  Description of Artificial Sequence: Synthetic oligonucleotide
gccgguccucaauaaugac

SEQ ID NO: 2445641 - RNA, 19 nt, Artificial Sequence
  Description of Artificial Sequence: Synthetic oligonucleotide
guaugucuguaaauauauu

SEQ ID NO: 2445642 - RNA, 19 nt, Artificial Sequence
  Description of Artificial Sequence: Synthetic oligonucleotide
ccaucuuauaugugaacau

SEQ ID NO: 2445643 - RNA, 19 nt, Artificial Sequence
  Description of Artificial Sequence: Synthetic oligonucleotide
cuagucagcagugccuaau

SEQ ID NO: 2445644 - RNA, 19 nt, Artificial Sequence
  Description of Artificial Sequence: Synthetic oligonucleotide
acgaugcucuucagcucca

SEQ ID NO: 2445645 - RNA, 19 nt, Artificial Sequence
  Description of Artificial Sequence: Synthetic oligonucleotide
gaggugguuacagcagauu

SEQ ID NO: 2445646 - RNA, 19 nt, Artificial Sequence
  Description of Artificial Sequence: Synthetic oligonucleotide
ccuugcagcuaaucgugaa

SEQ ID NO: 2445647 - RNA, 19 nt, Artificial Sequence
  Description of Artificial Sequence: Synthetic oligonucleotide
gguuguuuagaagccuuuu

SEQ ID NO: 2445648 - RNA, 19 nt, Artificial Sequence
  Description of Artificial Sequence: Synthetic oligonucleotide
gccaauacuucaguagcau

SEQ ID NO: 2445649 - RNA, 19 nt, Artificial Sequence
  Description of Artificial Sequence: Synthetic oligonucleotide
cgucuuugcaaggucuuga

SEQ ID NO: 2445650 - RNA, 19 nt, Artificial Sequence
  Description of Artificial Sequence: Synthetic oligonucleotide
gugcuaugcugaugaguuu

SEQ ID NO: 2445651 - RNA, 19 nt, Artificial Sequence
  Description of Artificial Sequence: Synthetic oligonucleotide
ccuugacagccuugagaga

SEQ ID NO: 2445652 - RNA, 19 nt, Artificial Sequence
  Description of Artificial Sequence: Synthetic oligonucleotide
cccuugcagcuaaucguga

SEQ ID NO: 2445653 - RNA, 19 nt, Artificial Sequence
  Description of Artificial Sequence: Synthetic oligonucleotide
cguauguggcuagaacaga

SEQ ID NO: 2445654 - RNA, 19 nt, Artificial Sequence
  Description of Artificial Sequence: Synthetic oligonucleotide
ccggaccacuguaccucgc

SEQ ID NO: 2445655 - RNA, 19 nt, Artificial Sequence
  Description of Artificial Sequence: Synthetic oligonucleotide
ccacuguaccucgccacca

SEQ ID NO: 2445656 - RNA, 19 nt, Artificial Sequence
  Description of Artificial Sequence: Synthetic oligonucleotide
accucgccaccaggccuga

SEQ ID NO: 2445657 - RNA, 19 nt, Artificial Sequence
  Description of Artificial Sequence: Synthetic oligonucleotide
ccuccggaccacuguaccu

SEQ ID NO: 2445658 - RNA, 19 nt, Artificial Sequence
  Description of Artificial Sequence: Synthetic oligonucleotide
ccugaagcuucacgaugcu

SEQ ID NO: 2445659 - RNA, 19 nt, Artificial Sequence
  Description of Artificial Sequence: Synthetic oligonucleotide
cguacucucggaucgucuu

SEQ ID NO: 2445660 - RNA, 19 nt, Artificial Sequence
  Description of Artificial Sequence: Synthetic oligonucleotide
gcucguacucucggaucgu

SEQ ID NO: 2445661 - RNA, 19 nt, Artificial Sequence
  Description of Artificial Sequence: Synthetic oligonucleotide
cggaucgucuuugcaaggu

SEQ ID NO: 2445662 - RNA, 19 nt, Artificial Sequence
  Description of Artificial Sequence: Synthetic oligonucleotide
cgauacuguguauguuauu

SEQ ID NO: 2445663 - RNA, 19 nt, Artificial Sequence
  Description of Artificial Sequence: Synthetic oligonucleotide
gugcuaggucagaggccuu

SEQ ID NO: 2445664 - RNA, 19 nt, Artificial Sequence
  Description of Artificial Sequence: Synthetic oligonucleotide
ccucgccaccaggccugaa

SEQ ID NO: 2445665 - RNA, 19 nt, Artificial Sequence
  Description of Artificial Sequence: Synthetic oligonucleotide
aauaucauuugcuugagag

SEQ ID NO: 2445666 - RNA, 19 nt, Artificial Sequence
  Description of Artificial Sequence: Synthetic oligonucleotide
aacauuucugcucuccucc

SEQ ID NO: 2445667 - RNA, 19 nt, Artificial Sequence
  Description of Artificial Sequence: Synthetic oligonucleotide
uaagauuaaaacuauuuca

SEQ ID NO: 2445668 - RNA, 19 nt, Artificial Sequence
  Description of Artificial Sequence: Synthetic oligonucleotide
aaaacuucuuuuccuaagg

SEQ ID NO: 2445669 - RNA, 19 nt, Artificial Sequence
  Description of Artificial Sequence: Synthetic oligonucleotide
agagauuccaguuugcuuc

SEQ ID NO: 2445670 - RNA, 19 nt, Artificial Sequence
  Description of Artificial Sequence: Synthetic oligonucleotide
auuucuuacagagagcugc

SEQ ID NO: 2445671 - RNA, 19 nt, Artificial Sequence
  Description of Artificial Sequence: Synthetic oligonucleotide
aagaauaucauuugcuuga

SEQ ID NO: 2445672 - RNA, 19 nt, Artificial Sequence
  Description of Artificial Sequence: Synthetic oligonucleotide
ucaauuucaaacuucugcc

SEQ ID NO: 2445673 - RNA, 19 nt, Artificial Sequence
  Description of Artificial Sequence: Synthetic oligonucleotide
acguugauaagauuaaaac

SEQ ID NO: 2445674 - RNA, 19 nt, Artificial Sequence
  Description of Artificial Sequence: Synthetic oligonucleotide
aaugaaugcgucuuaguug

SEQ ID NO: 2445675 - RNA, 19 nt, Artificial Sequence
  Description of Artificial Sequence: Synthetic oligonucleotide
uuaaaacuauuucaaacug

SEQ ID NO: 2445676 - RNA, 19 nt, Artificial Sequence
  Description of Artificial Sequence: Synthetic oligonucleotide
aaauauaucucucaaucaa

SEQ ID NO: 2445677 - RNA, 19 nt, Artificial Sequence
  Description of Artificial Sequence: Synthetic oligonucleotide
auaguuacuacuaacagag

SEQ ID NO: 2445678 - RNA, 19 nt, Artificial Sequence
  Description of Artificial Sequence: Synthetic oligonucleotide
aauaguuacuacuaacaga

SEQ ID NO: 2445679 - RNA, 19 nt, Artificial Sequence
  Description of Artificial Sequence: Synthetic oligonucleotide
uuuguuauaaagucacugc

SEQ ID NO: 2445680 - RNA, 19 nt, Artificial Sequence
  Description of Artificial Sequence: Synthetic oligonucleotide
aguaguucuaagaaaauac

SEQ ID NO: 2445681 - RNA, 19 nt, Artificial Sequence
  Description of Artificial Sequence: Synthetic oligonucleotide
uucaccacaaaaccaauag

SEQ ID NO: 2445682 - RNA, 19 nt, Artificial Sequence
  Description of Artificial Sequence: Synthetic oligonucleotide
aaugcgucuuaguugugcc

SEQ ID NO: 2445683 - RNA, 19 nt, Artificial Sequence
  Description of Artificial Sequence: Synthetic oligonucleotide
uucucuuucacgaucuggg

SEQ ID NO: 2445684 - RNA, 19 nt, Artificial Sequence
  Description of Artificial Sequence: Synthetic oligonucleotide
caaaauauaucucucaauc

SEQ ID NO: 2445685 - RNA, 19 nt, Artificial Sequence
  Description of Artificial Sequence: Synthetic oligonucleotide
guugaaaggguguuuagcg

SEQ ID NO: 2445686 - RNA, 19 nt, Artificial Sequence
  Description of Artificial Sequence: Synthetic oligonucleotide
aauuucaaacuucugccug

SEQ ID NO: 2445687 - RNA, 19 nt, Artificial Sequence
  Description of Artificial Sequence: Synthetic oligonucleotide
ucuaagaaaauacaagaua

SEQ ID NO: 2445688 - RNA, 19 nt, Artificial Sequence
  Description of Artificial Sequence: Synthetic oligonucleotide
uuguuauaaagucacugcc

SEQ ID NO: 2445689 - RNA, 19 nt, Artificial Sequence
  Description of Artificial Sequence: Synthetic oligonucleotide
ucaaagagauuccaguuug

SEQ ID NO: 2445690 - RNA, 19 nt, Artificial Sequence
  Description of Artificial Sequence: Synthetic oligonucleotide
uguucuuuguuauaaaguc

SEQ ID NO: 2445691 - RNA, 19 nt, Artificial Sequence
  Description of Artificial Sequence: Synthetic oligonucleotide
acaacuggagucuugaugu

SEQ ID NO: 2445692 - RNA, 19 nt, Artificial Sequence
  Description of Artificial Sequence: Synthetic oligonucleotide
auacacaaaauauaucucu

SEQ ID NO: 2445693 - RNA, 19 nt, Artificial Sequence
  Description of Artificial Sequence: Synthetic oligonucleotide
agaugugcaacauacguug

SEQ ID NO: 2445694 - RNA, 19 nt, Artificial Sequence
  Description of Artificial Sequence: Synthetic oligonucleotide
aauaaaacuucuuuuccua

SEQ ID NO: 2445695 - RNA, 19 nt, Artificial Sequence
  Description of Artificial Sequence: Synthetic oligonucleotide
cucucaaucaaagagauuc

SEQ ID NO: 2445696 - RNA, 19 nt, Artificial Sequence
  Description of Artificial Sequence: Synthetic oligonucleotide
cauugucucaauuucaaac

SEQ ID NO: 2445697 - RNA, 19 nt, Artificial Sequence
  Description of Artificial Sequence: Synthetic oligonucleotide
uaucucucaaucaaagaga

SEQ ID NO: 2445698 - RNA, 19 nt, Artificial Sequence
  Description of Artificial Sequence: Synthetic oligonucleotide
accaauaguuacuacuaac

SEQ ID NO: 2445699 - RNA, 19 nt, Artificial Sequence
  Description of Artificial Sequence: Synthetic oligonucleotide
ucaaucaaagagauuccag

SEQ ID NO: 2445700 - RNA, 19 nt, Artificial Sequence
  Description of Artificial Sequence: Synthetic oligonucleotide
cuugcaucagcaauaaaac

SEQ ID NO: 2445701 - RNA, 19 nt, Artificial Sequence
  Description of Artificial Sequence: Synthetic oligonucleotide
cagcauauuucuuacagag

SEQ ID NO: 2445702 - RNA, 19 nt, Artificial Sequence
  Description of Artificial Sequence: Synthetic oligonucleotide
acuauuucaaacugcugag

SEQ ID NO: 2445703 - RNA, 19 nt, Artificial Sequence
  Description of Artificial Sequence: Synthetic oligonucleotide
agaagaucagcauauuucu

SEQ ID NO: 2445704 - RNA, 19 nt, Artificial Sequence
  Description of Artificial Sequence: Synthetic oligonucleotide
aaacaugucuucuuucacu

SEQ ID NO: 2445705 - RNA, 19 nt, Artificial Sequence
  Description of Artificial Sequence: Synthetic oligonucleotide
uguuauaaagucacugccu

SEQ ID NO: 2445706 - RNA, 19 nt, Artificial Sequence
  Description of Artificial Sequence: Synthetic oligonucleotide
ugcaucagcaauaaaacuu

SEQ ID NO: 2445707 - RNA, 19 nt, Artificial Sequence
  Description of Artificial Sequence: Synthetic oligonucleotide
gcauauuucuuacagagag

SEQ ID NO: 2445708 - RNA, 19 nt, Artificial Sequence
  Description of Artificial Sequence: Synthetic oligonucleotide
aagauuaaaacuauuucaa

SEQ ID NO: 2445709 - RNA, 19 nt, Artificial Sequence
  Description of Artificial Sequence: Synthetic oligonucleotide
agaucagcauauuucuuac

SEQ ID NO: 2445710 - RNA, 19 nt, Artificial Sequence
  Description of Artificial Sequence: Synthetic oligonucleotide
ucagcaauaaaacuucuuu

SEQ ID NO: 2445711 - RNA, 19 nt, Artificial Sequence
  Description of Artificial Sequence: Synthetic oligonucleotide
uaaaacuucuuuuccuaag

SEQ ID NO: 2445712 - RNA, 19 nt, Artificial Sequence
  Description of Artificial Sequence: Synthetic oligonucleotide
cuucuaacccacaaauucc

SEQ ID NO: 2445713 - RNA, 19 nt, Artificial Sequence
  Description of Artificial Sequence: Synthetic oligonucleotide
augaaugcgucuuaguugu

SEQ ID NO: 2445714 - RNA, 19 nt, Artificial Sequence
  Description of Artificial Sequence: Synthetic oligonucleotide
aguucuaagaaaauacaag

SEQ ID NO: 2445715 - RNA, 19 nt, Artificial Sequence
  Description of Artificial Sequence: Synthetic oligonucleotide
uauacacaaaauauaucuc

SEQ ID NO: 2445716 - RNA, 19 nt, Artificial Sequence
  Description of Artificial Sequence: Synthetic oligonucleotide
aagaucagcauauuucuua

SEQ ID NO: 2445717 - RNA, 19 nt, Artificial Sequence
  Description of Artificial Sequence: Synthetic oligonucleotide
uuacuacuaacagaggaag

SEQ ID NO: 2445718 - RNA, 19 nt, Artificial Sequence
  Description of Artificial Sequence: Synthetic oligonucleotide
uaacccacaaauuccagcu

SEQ ID NO: 2445719 - RNA, 19 nt, Artificial Sequence
  Description of Artificial Sequence: Synthetic oligonucleotide
ucuuacagagagcugccag

SEQ ID NO: 2445720 - RNA, 19 nt, Artificial Sequence
  Description of Artificial Sequence: Synthetic oligonucleotide
uuuuccuaaggucuucucu

SEQ ID NO: 2445721 - RNA, 19 nt, Artificial Sequence
  Description of Artificial Sequence: Synthetic oligonucleotide
cagaagaucagcauauuuc

SEQ ID NO: 2445722 - RNA, 19 nt, Artificial Sequence
  Description of Artificial Sequence: Synthetic oligonucleotide
uuuacaaaacaugucuucu

SEQ ID NO: 2445723 - RNA, 19 nt, Artificial Sequence
  Description of Artificial Sequence: Synthetic oligonucleotide
uacguugauaagauuaaaa

SEQ ID NO: 2445724 - RNA, 19 nt, Artificial Sequence
  Description of Artificial Sequence: Synthetic oligonucleotide
uuuagcgcuugcaucagca

SEQ ID NO: 2445725 - RNA, 19 nt, Artificial Sequence
  Description of Artificial Sequence: Synthetic oligonucleotide
aaacuucuuuuccuaaggu

SEQ ID NO: 2445726 - RNA, 19 nt, Artificial Sequence
  Description of Artificial Sequence: Synthetic oligonucleotide
ugaaaggguguuuagcgcu

SEQ ID NO: 2445727 - RNA, 19 nt, Artificial Sequence
  Description of Artificial Sequence: Synthetic oligonucleotide
ucuugauuccugugcacgg

SEQ ID NO: 2445728 - RNA, 19 nt, Artificial Sequence
  Description of Artificial Sequence: Synthetic oligonucleotide
uccuguaccacauaacguc

SEQ ID NO: 2445729 - RNA, 19 nt, Artificial Sequence
  Description of Artificial Sequence: Synthetic oligonucleotide
uugauaagauuaaaacuau

SEQ ID NO: 2445730 - RNA, 19 nt, Artificial Sequence
  Description of Artificial Sequence: Synthetic oligonucleotide
uacacaaaauauaucucuc

SEQ ID NO: 2445731 - RNA, 19 nt, Artificial Sequence
  Description of Artificial Sequence: Synthetic oligonucleotide
ucuuaguugugccaccaca

SEQ ID NO: 2445732 - RNA, 19 nt, Artificial Sequence
  Description of Artificial Sequence: Synthetic oligonucleotide
uauaucucucaaucaaaga

SEQ ID NO: 2445733 - RNA, 19 nt, Artificial Sequence
  Description of Artificial Sequence: Synthetic oligonucleotide
cuaagaaaauacaagauau

SEQ ID NO: 2445734 - RNA, 19 nt, Artificial Sequence
  Description of Artificial Sequence: Synthetic oligonucleotide
aguaccgccgccucuuccc

SEQ ID NO: 2445735 - RNA, 19 nt, Artificial Sequence
  Description of Artificial Sequence: Synthetic oligonucleotide
cuaacagaggaaguuauac

SEQ ID NO: 2445736 - RNA, 19 nt, Artificial Sequence
  Description of Artificial Sequence: Synthetic oligonucleotide
uccaguuugcuucuugcca

SEQ ID NO: 2445737 - RNA, 19 nt, Artificial Sequence
  Description of Artificial Sequence: Synthetic oligonucleotide
auuucaaacugcugagcag

SEQ ID NO: 2445738 - RNA, 19 nt, Artificial Sequence
  Description of Artificial Sequence: Synthetic oligonucleotide
auauaucucucaaucaaag

SEQ ID NO: 2445739 - RNA, 19 nt, Artificial Sequence
  Description of Artificial Sequence: Synthetic oligonucleotide
auccccuuccaaugaaugc

SEQ ID NO: 2445740 - RNA, 19 nt, Artificial Sequence
  Description of Artificial Sequence: Synthetic oligonucleotide
uucucuugauuccugugca

SEQ ID NO: 2445741 - RNA, 19 nt, Artificial Sequence
  Description of Artificial Sequence: Synthetic oligonucleotide
uccccuuccaaugaaugcg

SEQ ID NO: 2445742 - RNA, 19 nt, Artificial Sequence
  Description of Artificial Sequence: Synthetic oligonucleotide
cuaacccacaaauuccagc

SEQ ID NO: 2445743 - RNA, 19 nt, Artificial Sequence
  Description of Artificial Sequence: Synthetic oligonucleotide
cuuacagagagcugccagc

SEQ ID NO: 2445744 - RNA, 19 nt, Artificial Sequence
  Description of Artificial Sequence: Synthetic oligonucleotide
uugaaaggguguuuagcgc

SEQ ID NO: 2445745 - RNA, 19 nt, Artificial Sequence
  Description of Artificial Sequence: Synthetic oligonucleotide
caucaggaggaccuguucg

SEQ ID NO: 2445746 - RNA, 19 nt, Artificial Sequence
  Description of Artificial Sequence: Synthetic oligonucleotide
uuucuuacagagagcugcc

SEQ ID NO: 2445747 - RNA, 19 nt, Artificial Sequence
  Description of Artificial Sequence: Synthetic oligonucleotide
auaucauuugcuugagagu

SEQ ID NO: 2445748 - RNA, 19 nt, Artificial Sequence
  Description of Artificial Sequence: Synthetic oligonucleotide
aaagagauuccaguuugcu

SEQ ID NO: 2445749 - RNA, 19 nt, Artificial Sequence
  Description of Artificial Sequence: Synthetic oligonucleotide
aggcagaugugcaacauac

SEQ ID NO: 2445750 - RNA, 19 nt, Artificial Sequence
  Description of Artificial Sequence: Synthetic oligonucleotide
acaaaauauaucucucaau

SEQ ID NO: 2445751 - RNA, 19 nt, Artificial Sequence
  Description of Artificial Sequence: Synthetic oligonucleotide
ugcaacauacguugauaag

SEQ ID NO: 2445752 - RNA, 19 nt, Artificial Sequence
  Description of Artificial Sequence: Synthetic oligonucleotide
agauuaaaacuauuucaaa

SEQ ID NO: 2445753 - RNA, 19 nt, Artificial Sequence
  Description of Artificial Sequence: Synthetic oligonucleotide
aagaaaauuuucaccacaa

SEQ ID NO: 2445754 - RNA, 19 nt, Artificial Sequence
  Description of Artificial Sequence: Synthetic oligonucleotide
uguaccacauaacguccag

SEQ ID NO: 2445755 - RNA, 19 nt, Artificial Sequence
  Description of Artificial Sequence: Synthetic oligonucleotide
ggagucuugauguugaaga

SEQ ID NO: 2445756 - RNA, 19 nt, Artificial Sequence
  Description of Artificial Sequence: Synthetic oligonucleotide
gcaauaaaacuucuuuucc

SEQ ID NO: 2445757 - RNA, 19 nt, Artificial Sequence
  Description of Artificial Sequence: Synthetic oligonucleotide
gauuccugugcacggaaug

SEQ ID NO: 2445758 - RNA, 19 nt, Artificial Sequence
  Description of Artificial Sequence: Synthetic oligonucleotide
uaguugugccaccacaacu

SEQ ID NO: 2445759 - RNA, 19 nt, Artificial Sequence
  Description of Artificial Sequence: Synthetic oligonucleotide
cuugcuguguucacucugc

SEQ ID NO: 2445760 - RNA, 19 nt, Artificial Sequence
  Description of Artificial Sequence: Synthetic oligonucleotide
ucuaacccacaaauuccag

SEQ ID NO: 2445761 - RNA, 19 nt, Artificial Sequence
  Description of Artificial Sequence: Synthetic oligonucleotide
uacuaacagaggaaguuau

SEQ ID NO: 2445762 - RNA, 19 nt, Artificial Sequence
  Description of Artificial Sequence: Synthetic oligonucleotide
caaaacaugucuucuuuca

SEQ ID NO: 2445763 - RNA, 19 nt, Artificial Sequence
  Description of Artificial Sequence: Synthetic oligonucleotide
acauacguugauaagauua

SEQ ID NO: 2445764 - RNA, 19 nt, Artificial Sequence
  Description of Artificial Sequence: Synthetic oligonucleotide
ggaaguuauacacaaaaua

SEQ ID NO: 2445765 - RNA, 19 nt, Artificial Sequence
  Description of Artificial Sequence: Synthetic oligonucleotide
uauuucuuacagagagcug

SEQ ID NO: 2445766 - RNA, 19 nt, Artificial Sequence
  Description of Artificial Sequence: Synthetic oligonucleotide
uaguuacuacuaacagagg

SEQ ID NO: 2445767 - RNA, 19 nt, Artificial Sequence
  Description of Artificial Sequence: Synthetic oligonucleotide
uugcaucagcaauaaaacu

SEQ ID NO: 2445768 - RNA, 19 nt, Artificial Sequence
  Description of Artificial Sequence: Synthetic oligonucleotide
guguuuagcgcuugcauca

SEQ ID NO: 2445769 - RNA, 19 nt, Artificial Sequence
  Description of Artificial Sequence: Synthetic oligonucleotide
cacaacuggagucuugaug

SEQ ID NO: 2445770 - RNA, 19 nt, Artificial Sequence
  Description of Artificial Sequence: Synthetic oligonucleotide
uccaaugaaugcgucuuag

SEQ ID NO: 2445771 - RNA, 19 nt, Artificial Sequence
  Description of Artificial Sequence: Synthetic oligonucleotide
ucucaauuucaaacuucug

SEQ ID NO: 2445772 - RNA, 19 nt, Artificial Sequence
  Description of Artificial Sequence: Synthetic oligonucleotide
ugauaagauuaaaacuauu

SEQ ID NO: 2445773 - RNA, 19 nt, Artificial Sequence
  Description of Artificial Sequence: Synthetic oligonucleotide
cucuugauuccugugcacg

SEQ ID NO: 2445774 - RNA, 19 nt, Artificial Sequence
  Description of Artificial Sequence: Synthetic oligonucleotide
uacuacuaacagaggaagu

SEQ ID NO: 2445775 - RNA, 19 nt, Artificial Sequence
  Description of Artificial Sequence: Synthetic oligonucleotide
uguucgagcuucucgucca

SEQ ID NO: 2445776 - RNA, 19 nt, Artificial Sequence
  Description of Artificial Sequence: Synthetic oligonucleotide
gaaugcgucuuaguugugc

SEQ ID NO: 2445777 - RNA, 19 nt, Artificial Sequence
  Description of Artificial Sequence: Synthetic oligonucleotide
ucucuuucacgaucugggc

SEQ ID NO: 2445778 - RNA, 19 nt, Artificial Sequence
  Description of Artificial Sequence: Synthetic oligonucleotide
uuauaaagucacugccuuc

SEQ ID NO: 2445779 - RNA, 19 nt, Artificial Sequence
  Description of Artificial Sequence: Synthetic oligonucleotide
accuguucgagcuucucgu

SEQ ID NO: 2445780 - RNA, 19 nt, Artificial Sequence
  Description of Artificial Sequence: Synthetic oligonucleotide
ucaguagccuccucaguac

SEQ ID NO: 2445781 - RNA, 19 nt, Artificial Sequence
  Description of Artificial Sequence: Synthetic oligonucleotide
caaagagauuccaguuugc

SEQ ID NO: 2445782 - RNA, 19 nt, Artificial Sequence
  Description of Artificial Sequence: Synthetic oligonucleotide
uucauuuguuucugaacau

SEQ ID NO: 2445783 - RNA, 19 nt, Artificial Sequence
  Description of Artificial Sequence: Synthetic oligonucleotide
agaaaauuuucaccacaaa

SEQ ID NO: 2445784 - RNA, 19 nt, Artificial Sequence
  Description of Artificial Sequence: Synthetic oligonucleotide
aaacuucugccugggacug

SEQ ID NO: 2445785 - RNA, 19 nt, Artificial Sequence
  Description of Artificial Sequence: Synthetic oligonucleotide
guugugccaccacaacugg

SEQ ID NO: 2445786 - RNA, 19 nt, Artificial Sequence
  Description of Artificial Sequence: Synthetic oligonucleotide
acguccaguaguucuaaga

SEQ ID NO: 2445787 - RNA, 19 nt, Artificial Sequence
  Description of Artificial Sequence: Synthetic oligonucleotide
cuauuucaaacugcugagc

SEQ ID NO: 2445788 - RNA, 19 nt, Artificial Sequence
  Description of Artificial Sequence: Synthetic oligonucleotide
uccuaaggucuucucuuug

SEQ ID NO: 2445789 - RNA, 19 nt, Artificial Sequence
  Description of Artificial Sequence: Synthetic oligonucleotide
gaacauuucugcucuccuc

SEQ ID NO: 2445790 - RNA, 19 nt, Artificial Sequence
  Description of Artificial Sequence: Synthetic oligonucleotide
cauacguugauaagauuaa

SEQ ID NO: 2445791 - RNA, 19 nt, Artificial Sequence
  Description of Artificial Sequence: Synthetic oligonucleotide
aacguccaguaguucuaag

SEQ ID NO: 2445792 - RNA, 19 nt, Artificial Sequence
  Description of Artificial Sequence: Synthetic oligonucleotide
ugggcuugcuucuucugca

SEQ ID NO: 2445793 - RNA, 19 nt, Artificial Sequence
  Description of Artificial Sequence: Synthetic oligonucleotide
gauguugaagaauaucauu

SEQ ID NO: 2445794 - RNA, 19 nt, Artificial Sequence
  Description of Artificial Sequence: Synthetic oligonucleotide
cacgaucugggcuugcuuc

SEQ ID NO: 2445795 - RNA, 19 nt, Artificial Sequence
  Description of Artificial Sequence: Synthetic oligonucleotide
guuacuacuaacagaggaa

SEQ ID NO: 2445796 - RNA, 19 nt, Artificial Sequence
  Description of Artificial Sequence: Synthetic oligonucleotide
caaucaaagagauuccagu

SEQ ID NO: 2445797 - RNA, 19 nt, Artificial Sequence
  Description of Artificial Sequence: Synthetic oligonucleotide
cauccccuuccaaugaaug

SEQ ID NO: 2445798 - RNA, 19 nt, Artificial Sequence
  Description of Artificial Sequence: Synthetic oligonucleotide
aacauacguugauaagauu

SEQ ID NO: 2445799 - RNA, 19 nt, Artificial Sequence
  Description of Artificial Sequence: Synthetic oligonucleotide
ugcgucuuaguugugccac

SEQ ID NO: 2445800 - RNA, 19 nt, Artificial Sequence
  Description of Artificial Sequence: Synthetic oligonucleotide
ccaauaguuacuacuaaca

SEQ ID NO: 2445801 - RNA, 19 nt, Artificial Sequence
  Description of Artificial Sequence: Synthetic oligonucleotide
cuguucgagcuucucgucc

SEQ ID NO: 2445802 - RNA, 19 nt, Artificial Sequence
  Description of Artificial Sequence: Synthetic oligonucleotide
cauaacguccaguaguucu

SEQ ID NO: 2445803 - RNA, 19 nt, Artificial Sequence
  Description of Artificial Sequence: Synthetic oligonucleotide
ugugcaacauacguugaua

SEQ ID NO: 2445804 - RNA, 19 nt, Artificial Sequence
  Description of Artificial Sequence: Synthetic oligonucleotide
uugauuccugugcacggaa

SEQ ID NO: 2445805 - RNA, 19 nt, Artificial Sequence
  Description of Artificial Sequence: Synthetic oligonucleotide
gcaacauacguugauaaga

SEQ ID NO: 2445806 - RNA, 19 nt, Artificial Sequence
  Description of Artificial Sequence: Synthetic oligonucleotide
gcuugcaucagcaauaaaa

SEQ ID NO: 2445807 - RNA, 19 nt, Artificial Sequence
  Description of Artificial Sequence: Synthetic oligonucleotide
aagauggccuugcuguguu

SEQ ID NO: 2445808 - RNA, 19 nt, Artificial Sequence
  Description of Artificial Sequence: Synthetic oligonucleotide
ucauuuguuucugaacauu

SEQ ID NO: 2445809 - RNA, 19 nt, Artificial Sequence
  Description of Artificial Sequence: Synthetic oligonucleotide
aucucucaaucaaagagau

SEQ ID NO: 2445810 - RNA, 19 nt, Artificial Sequence
  Description of Artificial Sequence: Synthetic oligonucleotide
uagcgcuugcaucagcaau

SEQ ID NO: 2445811 - RNA, 19 nt, Artificial Sequence
  Description of Artificial Sequence: Synthetic oligonucleotide
gaauaucauuugcuugaga

SEQ ID NO: 2445812 - RNA, 19 nt, Artificial Sequence
  Description of Artificial Sequence: Synthetic oligonucleotide
gguguuuagcgcuugcauc

SEQ ID NO: 2445813 - RNA, 19 nt, Artificial Sequence
  Description of Artificial Sequence: Synthetic oligonucleotide
uucauccccuuccaaugaa

SEQ ID NO: 2445814 - RNA, 19 nt, Artificial Sequence
  Description of Artificial Sequence: Synthetic oligonucleotide
gagucuugauguugaagaa

SEQ ID NO: 2445815 - RNA, 19 nt, Artificial Sequence
  Description of Artificial Sequence: Synthetic oligonucleotide
ucucuugauuccugugcac

SEQ ID NO: 2445816 - RNA, 19 nt, Artificial Sequence
  Description of Artificial Sequence: Synthetic oligonucleotide
aguagccuccucaguaccg

SEQ ID NO: 2445817 - RNA, 19 nt, Artificial Sequence
  Description of Artificial Sequence: Synthetic oligonucleotide
aggugaacuuucucuuuca

SEQ ID NO: 2445818 - RNA, 19 nt, Artificial Sequence
  Description of Artificial Sequence: Synthetic oligonucleotide
uguuuagcgcuugcaucag

SEQ ID NO: 2445819 - RNA, 19 nt, Artificial Sequence
  Description of Artificial Sequence: Synthetic oligonucleotide
uccuccagaagaucagcau

SEQ ID NO: 2445820 - RNA, 19 nt, Artificial Sequence
  Description of Artificial Sequence: Synthetic oligonucleotide
gguugaaaggguguuuagc

SEQ ID NO: 2445821 - RNA, 19 nt, Artificial Sequence
  Description of Artificial Sequence: Synthetic oligonucleotide
aaaggguguuuagcgcuug

SEQ ID NO: 2445822 - RNA, 19 nt, Artificial Sequence
  Description of Artificial Sequence: Synthetic oligonucleotide
uucaaacuucugccuggga

SEQ ID NO: 2445823 - RNA, 19 nt, Artificial Sequence
  Description of Artificial Sequence: Synthetic oligonucleotide
augugcaacauacguugau

SEQ ID NO: 2445824 - RNA, 19 nt, Artificial Sequence
  Description of Artificial Sequence: Synthetic oligonucleotide
ugugcacggaaugcugagc

SEQ ID NO: 2445825 - RNA, 19 nt, Artificial Sequence
  Description of Artificial Sequence: Synthetic oligonucleotide
accacaacuggagucuuga

SEQ ID NO: 2445826 - RNA, 19 nt, Artificial Sequence
  Description of Artificial Sequence: Synthetic oligonucleotide
gauggccuugcuguguuca

SEQ ID NO: 2445827 - RNA, 19 nt, Artificial Sequence
  Description of Artificial Sequence: Synthetic oligonucleotide
cugugcacggaaugcugag

SEQ ID NO: 2445828 - RNA, 19 nt, Artificial Sequence
  Description of Artificial Sequence: Synthetic oligonucleotide
caggaauuucuucucuuga

SEQ ID NO: 2445829 - RNA, 19 nt, Artificial Sequence
  Description of Artificial Sequence: Synthetic oligonucleotide
caggaggaccuguucgagc

SEQ ID NO: 2445830 - RNA, 19 nt, Artificial Sequence
  Description of Artificial Sequence: Synthetic oligonucleotide
ccuguaccacauaacgucc

SEQ ID NO: 2445831 - RNA, 19 nt, Artificial Sequence
  Description of Artificial Sequence: Synthetic oligonucleotide
cacucugaguccugcuggc

SEQ ID NO: 2445832 - RNA, 19 nt, Artificial Sequence
  Description of Artificial Sequence: Synthetic oligonucleotide
ugauuccugugcacggaau

SEQ ID NO: 2445833 - RNA, 19 nt, Artificial Sequence
  Description of Artificial Sequence: Synthetic oligonucleotide
cucaguagccuccucagua

SEQ ID NO: 2445834 - RNA, 19 nt, Artificial Sequence
  Description of Artificial Sequence: Synthetic oligonucleotide
uuagcgcuugcaucagcaa

SEQ ID NO: 2445835 - RNA, 19 nt, Artificial Sequence
  Description of Artificial Sequence: Synthetic oligonucleotide
caguagccuccucaguacc

SEQ ID NO: 2445836 - RNA, 19 nt, Artificial Sequence
  Description of Artificial Sequence: Synthetic oligonucleotide
acauaacguccaguaguuc

SEQ ID NO: 2445837 - RNA, 19 nt, Artificial Sequence
  Description of Artificial Sequence: Synthetic oligonucleotide
gcaucagcaauaaaacuuc

SEQ ID NO: 2445838 - RNA, 19 nt, Artificial Sequence
  Description of Artificial Sequence: Synthetic oligonucleotide
auaaagucacugccuucau

SEQ ID NO: 2445839 - RNA, 19 nt, Artificial Sequence
  Description of Artificial Sequence: Synthetic oligonucleotide
uuuguuccugcugcacucu

SEQ ID NO: 2445840 - RNA, 19 nt, Artificial Sequence
  Description of Artificial Sequence: Synthetic oligonucleotide
agcauauuucuuacagaga

SEQ ID NO: 2445841 - RNA, 19 nt, Artificial Sequence
  Description of Artificial Sequence: Synthetic oligonucleotide
uuccaaugaaugcgucuua

SEQ ID NO: 2445842 - RNA, 19 nt, Artificial Sequence
  Description of Artificial Sequence: Synthetic oligonucleotide
caguuugcuucuugccaag

SEQ ID NO: 2445843 - RNA, 19 nt, Artificial Sequence
  Description of Artificial Sequence: Synthetic oligonucleotide
uuccugugcacggaaugcu

SEQ ID NO: 2445844 - RNA, 19 nt, Artificial Sequence
  Description of Artificial Sequence: Synthetic oligonucleotide
ccuucauccccuuccaaug

SEQ ID NO: 2445845 - RNA, 19 nt, Artificial Sequence
  Description of Artificial Sequence: Synthetic oligonucleotide
gucucaauuucaaacuucu

SEQ ID NO: 2445846 - RNA, 19 nt, Artificial Sequence
  Description of Artificial Sequence: Synthetic oligonucleotide
guuuagcgcuugcaucagc

SEQ ID NO: 2445847 - RNA, 19 nt, Artificial Sequence
  Description of Artificial Sequence: Synthetic oligonucleotide
ucgccguucgccccuucgc

SEQ ID NO: 2445848 - RNA, 19 nt, Artificial Sequence
  Description of Artificial Sequence: Synthetic oligonucleotide
uucgagcuucucguccagg

SEQ ID NO: 2445849 - RNA, 19 nt, Artificial Sequence
  Description of Artificial Sequence: Synthetic oligonucleotide
caauuucaaacuucugccu

SEQ ID NO: 2445850 - RNA, 19 nt, Artificial Sequence
  Description of Artificial Sequence: Synthetic oligonucleotide
uuccuaaggucuucucuuu

SEQ ID NO: 2445851 - RNA, 19 nt, Artificial Sequence
  Description of Artificial Sequence: Synthetic oligonucleotide
caacauacguugauaagau

SEQ ID NO: 2445852 - RNA, 19 nt, Artificial Sequence
  Description of Artificial Sequence: Synthetic oligonucleotide
uucuuacagagagcugcca

SEQ ID NO: 2445853 - RNA, 19 nt, Artificial Sequence
  Description of Artificial Sequence: Synthetic oligonucleotide
ugaaugcgucuuaguugug

SEQ ID NO: 2445854 - RNA, 19 nt, Artificial Sequence
  Description of Artificial Sequence: Synthetic oligonucleotide
guccaguaguucuaagaaa

SEQ ID NO: 2445855 - RNA, 19 nt, Artificial Sequence
  Description of Artificial Sequence: Synthetic oligonucleotide
acggaaugcugagcucacc

SEQ ID NO: 2445856 - RNA, 19 nt, Artificial Sequence
  Description of Artificial Sequence: Synthetic oligonucleotide
guagccuccucaguaccgc

SEQ ID NO: 2445857 - RNA, 19 nt, Artificial Sequence
  Description of Artificial Sequence: Synthetic oligonucleotide
gggacugccucgccguucg

SEQ ID NO: 2445858 - RNA, 19 nt, Artificial Sequence
  Description of Artificial Sequence: Synthetic oligonucleotide
augcgucuuaguugugcca

SEQ ID NO: 2445859 - RNA, 19 nt, Artificial Sequence
  Description of Artificial Sequence: Synthetic oligonucleotide
ucucucaaucaaagagauu

SEQ ID NO: 2445860 - RNA, 19 nt, Artificial Sequence
  Description of Artificial Sequence: Synthetic oligonucleotide
auacguugauaagauuaaa

SEQ ID NO: 2445861 - RNA, 19 nt, Artificial Sequence
  Description of Artificial Sequence: Synthetic oligonucleotide
cuucauccccuuccaauga

SEQ ID NO: 2445862 - RNA, 19 nt, Artificial Sequence
  Description of Artificial Sequence: Synthetic oligonucleotide
uucacgaucugggcuugcu

SEQ ID NO: 2445863 - RNA, 19 nt, Artificial Sequence
  Description of Artificial Sequence: Synthetic oligonucleotide
auaacguccaguaguucua

SEQ ID NO: 2445864 - RNA, 19 nt, Artificial Sequence
  Description of Artificial Sequence: Synthetic oligonucleotide
cuguaccacauaacgucca

SEQ ID NO: 2445865 - RNA, 19 nt, Artificial Sequence
  Description of Artificial Sequence: Synthetic oligonucleotide
uaacguccaguaguucuaa

SEQ ID NO: 2445866 - RNA, 19 nt, Artificial Sequence
  Description of Artificial Sequence: Synthetic oligonucleotide
cacggaaugcugagcucac

SEQ ID NO: 2445867 - RNA, 19 nt, Artificial Sequence
  Description of Artificial Sequence: Synthetic oligonucleotide
ggguugaaaggguguuuag

SEQ ID NO: 2445868 - RNA, 19 nt, Artificial Sequence
  Description of Artificial Sequence: Synthetic oligonucleotide
ugcacggaaugcugagcuc

SEQ ID NO: 2445869 - RNA, 19 nt, Artificial Sequence
  Description of Artificial Sequence: Synthetic oligonucleotide
cucgccguucgccccuucg

SEQ ID NO: 2445870 - RNA, 19 nt, Artificial Sequence
  Description of Artificial Sequence: Synthetic oligonucleotide
gacugccucgccguucgcc

SEQ ID NO: 2445871 - RNA, 19 nt, Artificial Sequence
  Description of Artificial Sequence: Synthetic oligonucleotide
aucagcaauaaaacuucuu

SEQ ID NO: 2445872 - RNA, 19 nt, Artificial Sequence
  Description of Artificial Sequence: Synthetic oligonucleotide
guucgagcuucucguccag

SEQ ID NO: 2445873 - RNA, 19 nt, Artificial Sequence
  Description of Artificial Sequence: Synthetic oligonucleotide
cguugauaagauuaaaacu

SEQ ID NO: 2445874 - RNA, 19 nt, Artificial Sequence
  Description of Artificial Sequence: Synthetic oligonucleotide
agcgcuugcaucagcaaua

SEQ ID NO: 2445875 - RNA, 19 nt, Artificial Sequence
  Description of Artificial Sequence: Synthetic oligonucleotide
gucuuaguugugccaccac

SEQ ID NO: 2445876 - RNA, 19 nt, Artificial Sequence
  Description of Artificial Sequence: Synthetic oligonucleotide
ggcagaugugcaacauacg

SEQ ID NO: 2445877 - RNA, 19 nt, Artificial Sequence
  Description of Artificial Sequence: Synthetic oligonucleotide
aggguguuuagcgcuugca

SEQ ID NO: 2445878 - RNA, 19 nt, Artificial Sequence
  Description of Artificial Sequence: Synthetic oligonucleotide
agccuccucaguaccgccg

SEQ ID NO: 2445879 - RNA, 19 nt, Artificial Sequence
  Description of Artificial Sequence: Synthetic oligonucleotide
acuaacagaggaaguuaua

SEQ ID NO: 2445880 - RNA, 19 nt, Artificial Sequence
  Description of Artificial Sequence: Synthetic oligonucleotide
cuugauuccugugcacgga

SEQ ID NO: 2445881 - RNA, 19 nt, Artificial Sequence
  Description of Artificial Sequence: Synthetic oligonucleotide
cuuucacgaucugggcuug

SEQ ID NO: 2445882 - RNA, 19 nt, Artificial Sequence
  Description of Artificial Sequence: Synthetic oligonucleotide
caccacaacuggagucuug

SEQ ID NO: 2445883 - RNA, 19 nt, Artificial Sequence
  Description of Artificial Sequence: Synthetic oligonucleotide
cacauaacguccaguaguu

SEQ ID NO: 2445884 - RNA, 19 nt, Artificial Sequence
  Description of Artificial Sequence: Synthetic oligonucleotide
cuccuguaccacauaacgu

SEQ ID NO: 2445885 - RNA, 19 nt, Artificial Sequence
  Description of Artificial Sequence: Synthetic oligonucleotide
ugccuucauccccuuccaa

SEQ ID NO: 2445886 - RNA, 19 nt, Artificial Sequence
  Description of Artificial Sequence: Synthetic oligonucleotide
ggccuugcuguguucacuc

SEQ ID NO: 2445887 - RNA, 19 nt, Artificial Sequence
  Description of Artificial Sequence: Synthetic oligonucleotide
guaccgccgccucuucccc

SEQ ID NO: 2445888 - RNA, 19 nt, Artificial Sequence
  Description of Artificial Sequence: Synthetic oligonucleotide
uuucacgaucugggcuugc

SEQ ID NO: 2445889 - RNA, 19 nt, Artificial Sequence
  Description of Artificial Sequence: Synthetic oligonucleotide
ccacauaacguccaguagu

SEQ ID NO: 2445890 - RNA, 19 nt, Artificial Sequence
  Description of Artificial Sequence: Synthetic oligonucleotide
agcuucucguccaggaauu

SEQ ID NO: 2445891 - RNA, 19 nt, Artificial Sequence
  Description of Artificial Sequence: Synthetic oligonucleotide
cuuccaaugaaugcgucuu

SEQ ID NO: 2445892 - RNA, 19 nt, Artificial Sequence
  Description of Artificial Sequence: Synthetic oligonucleotide
gcacggaaugcugagcuca

SEQ ID NO: 2445893 - RNA, 19 nt, Artificial Sequence
  Description of Artificial Sequence: Synthetic oligonucleotide
cuucgcccucaguagccuc

SEQ ID NO: 2445894 - RNA, 19 nt, Artificial Sequence
  Description of Artificial Sequence: Synthetic oligonucleotide
ugccucgccguucgccccu

SEQ ID NO: 2445895 - RNA, 19 nt, Artificial Sequence
  Description of Artificial Sequence: Synthetic oligonucleotide
ccaguuugcuucuugccaa

SEQ ID NO: 2445896 - RNA, 19 nt, Artificial Sequence
  Description of Artificial Sequence: Synthetic oligonucleotide
gccccuucgcccucaguag

SEQ ID NO: 2445897 - RNA, 19 nt, Artificial Sequence
  Description of Artificial Sequence: Synthetic oligonucleotide
ugggguugaaaggguguuu

SEQ ID NO: 2445898 - RNA, 19 nt, Artificial Sequence
  Description of Artificial Sequence: Synthetic oligonucleotide
cugccucgccguucgcccc

SEQ ID NO: 2445899 - RNA, 19 nt, Artificial Sequence
  Description of Artificial Sequence: Synthetic oligonucleotide
uucgccccuucgcccucag

SEQ ID NO: 2445900 - RNA, 19 nt, Artificial Sequence
  Description of Artificial Sequence: Synthetic oligonucleotide
uggccaucaggaggaccug

SEQ ID NO: 2445901 - RNA, 19 nt, Artificial Sequence
  Description of Artificial Sequence: Synthetic oligonucleotide
cccuucgcccucaguagcc

SEQ ID NO: 2445902 - RNA, 19 nt, Artificial Sequence
  Description of Artificial Sequence: Synthetic oligonucleotide
cuaaggucuucucuuuguu

SEQ ID NO: 2445903 - RNA, 19 nt, Artificial Sequence
  Description of Artificial Sequence: Synthetic oligonucleotide
gcgucuuaguugugccacc

SEQ ID NO: 2445904 - RNA, 19 nt, Artificial Sequence
  Description of Artificial Sequence: Synthetic oligonucleotide
gccguucgccccuucgccc

SEQ ID NO: 2445905 - RNA, 19 nt, Artificial Sequence
  Description of Artificial Sequence: Synthetic oligonucleotide
ugggacugccucgccguuc

SEQ ID NO: 2445906 - RNA, 19 nt, Artificial Sequence
  Description of Artificial Sequence: Synthetic oligonucleotide
gggguugaaaggguguuua

SEQ ID NO: 2445907 - RNA, 19 nt, Artificial Sequence
  Description of Artificial Sequence: Synthetic oligonucleotide
cacuucuaacccacaaauu

SEQ ID NO: 2445908 - RNA, 19 nt, Artificial Sequence
  Description of Artificial Sequence: Synthetic oligonucleotide
ccugugcacggaaugcuga

SEQ ID NO: 2445909 - RNA, 19 nt, Artificial Sequence
  Description of Artificial Sequence: Synthetic oligonucleotide
gaaaggguguuuagcgcuu

SEQ ID NO: 2445910 - RNA, 19 nt, Artificial Sequence
  Description of Artificial Sequence: Synthetic oligonucleotide
ggcuugcuucuucugcaga

SEQ ID NO: 2445911 - RNA, 19 nt, Artificial Sequence
  Description of Artificial Sequence: Synthetic oligonucleotide
ccuguucgagcuucucguc

SEQ ID NO: 2445912 - RNA, 19 nt, Artificial Sequence
  Description of Artificial Sequence: Synthetic oligonucleotide
ggguguuuagcgcuugcau

SEQ ID NO: 2445913 - RNA, 19 nt, Artificial Sequence
  Description of Artificial Sequence: Synthetic oligonucleotide
ucgcccucaguagccuccu

SEQ ID NO: 2445914 - RNA, 19 nt, Artificial Sequence
  Description of Artificial Sequence: Synthetic oligonucleotide
cuggagucuugauguugaa

SEQ ID NO: 2445915 - RNA, 19 nt, Artificial Sequence
  Description of Artificial Sequence: Synthetic oligonucleotide
ccccuucgcccucaguagc

SEQ ID NO: 2445916 - RNA, 19 nt, Artificial Sequence
  Description of Artificial Sequence: Synthetic oligonucleotide
guaccacauaacguccagu

SEQ ID NO: 2445917 - RNA, 19 nt, Artificial Sequence
  Description of Artificial Sequence: Synthetic oligonucleotide
ccuaaggucuucucuuugu

SEQ ID NO: 2445918 - RNA, 19 nt, Artificial Sequence
  Description of Artificial Sequence: Synthetic oligonucleotide
cggaaugcugagcucacca

SEQ ID NO: 2445919 - RNA, 19 nt, Artificial Sequence
  Description of Artificial Sequence: Synthetic oligonucleotide
ccauugucucaauuucaaa

SEQ ID NO: 2445920 - RNA, 19 nt, Artificial Sequence
  Description of Artificial Sequence: Synthetic oligonucleotide
gcgcugccuccucaauccg

SEQ ID NO: 2445921 - RNA, 19 nt, Artificial Sequence
  Description of Artificial Sequence: Synthetic oligonucleotide
cugaguccugcuggccauc

SEQ ID NO: 2445922 - RNA, 19 nt, Artificial Sequence
  Description of Artificial Sequence: Synthetic oligonucleotide
ccuuccaaugaaugcgucu

SEQ ID NO: 2445923 - RNA, 19 nt, Artificial Sequence
  Description of Artificial Sequence: Synthetic oligonucleotide
cccuuccaaugaaugcguc

SEQ ID NO: 2445924 - RNA, 19 nt, Artificial Sequence
  Description of Artificial Sequence: Synthetic oligonucleotide
ccaaugaaugcgucuuagu

SEQ ID NO: 2445925 - RNA, 19 nt, Artificial Sequence
  Description of Artificial Sequence: Synthetic oligonucleotide
cgccguucgccccuucgcc

SEQ ID NO: 2445926 - RNA, 19 nt, Artificial Sequence
  Description of Artificial Sequence: Synthetic oligonucleotide
cucaguaccgccgccucuu

SEQ ID NO: 2445927 - RNA, 19 nt, Artificial Sequence
  Description of Artificial Sequence: Synthetic oligonucleotide
ccgcgcugccuccucaauc

SEQ ID NO: 2445928 - RNA, 19 nt, Artificial Sequence
  Description of Artificial Sequence: Synthetic oligonucleotide
cugggguugaaaggguguu

SEQ ID NO: 2445929 - RNA, 19 nt, Artificial Sequence
  Description of Artificial Sequence: Synthetic oligonucleotide
gcgcuugcaucagcaauaa

SEQ ID NO: 2445930 - RNA, 19 nt, Artificial Sequence
  Description of Artificial Sequence: Synthetic oligonucleotide
ccugggacugccucgccgu

SEQ ID NO: 2445931 - RNA, 19 nt, Artificial Sequence
  Description of Artificial Sequence: Synthetic oligonucleotide
guucgccccuucgcccuca

SEQ ID NO: 2445932 - RNA, 19 nt, Artificial Sequence
  Description of Artificial Sequence: Synthetic oligonucleotide
cgucuuaguugugccacca

SEQ ID NO: 2445933 - RNA, 19 nt, Artificial Sequence
  Description of Artificial Sequence: Synthetic oligonucleotide
cagcuucuccucugggguu

SEQ ID NO: 2445934 - RNA, 19 nt, Artificial Sequence
  Description of Artificial Sequence: Synthetic oligonucleotide
ggacugccucgccguucgc

SEQ ID NO: 2445935 - RNA, 19 nt, Artificial Sequence
  Description of Artificial Sequence: Synthetic oligonucleotide
ccguucgccccuucgcccu

SEQ ID NO: 2445936 - RNA, 19 nt, Artificial Sequence
  Description of Artificial Sequence: Synthetic oligonucleotide
ccacaacuggagucuugau

SEQ ID NO: 2445937 - RNA, 19 nt, Artificial Sequence
  Description of Artificial Sequence: Synthetic oligonucleotide
cguucgccccuucgcccuc

SEQ ID NO: 2445938 - RNA, 19 nt, Artificial Sequence
  Description of Artificial Sequence: Synthetic oligonucleotide
ccacaaauuccagcuucuu

SEQ ID NO: 2445939 - RNA, 19 nt, Artificial Sequence
  Description of Artificial Sequence: Synthetic oligonucleotide
ccuucgcccucaguagccu

SEQ ID NO: 2445940 - RNA, 19 nt, Artificial Sequence
  Description of Artificial Sequence: Synthetic oligonucleotide
ccccgcgcugccuccucaa

SEQ ID NO: 2445941 - RNA, 19 nt, Artificial Sequence
  Description of Artificial Sequence: Synthetic oligonucleotide
cgcuugcaucagcaauaaa

SEQ ID NO: 2445942 - RNA, 19 nt, Artificial Sequence
  Description of Artificial Sequence: Synthetic oligonucleotide
ccucgccguucgccccuuc

SEQ ID NO: 2445943 - RNA, 19 nt, Artificial Sequence
  Description of Artificial Sequence: Synthetic oligonucleotide
cccgcgcugccuccucaau

SEQ ID NO: 2445944 - RNA, 19 nt, Artificial Sequence
  Description of Artificial Sequence: Synthetic oligonucleotide
gccucgccguucgccccuu

SEQ ID NO: 2445945 - RNA, 19 nt, Artificial Sequence
  Description of Artificial Sequence: Synthetic oligonucleotide
agcuaaaguaauuagaagc

SEQ ID NO: 2445946 - RNA, 19 nt, Artificial Sequence
  Description of Artificial Sequence: Synthetic oligonucleotide
agaaguaauucccuaaagc

SEQ ID NO: 2445947 - RNA, 19 nt, Artificial Sequence
  Description of Artificial Sequence: Synthetic oligonucleotide
aagcagaaguuucagaugg

SEQ ID NO: 2445948 - RNA, 19 nt, Artificial Sequence
  Description of Artificial Sequence: Synthetic oligonucleotide
gaaguaauucccuaaagcc

SEQ ID NO: 2445949 - RNA, 19 nt, Artificial Sequence
  Description of Artificial Sequence: Synthetic oligonucleotide
uaaaguaauuagaagcggg

SEQ ID NO: 2445950 - RNA, 19 nt, Artificial Sequence
  Description of Artificial Sequence: Synthetic oligonucleotide
aagacuuguaagcagaagu

SEQ ID NO: 2445951 - RNA, 19 nt, Artificial Sequence
  Description of Artificial Sequence: Synthetic oligonucleotide
uuauuugugcacuugagga

SEQ ID NO: 2445952 - RNA, 19 nt, Artificial Sequence
  Description of Artificial Sequence: Synthetic oligonucleotide
uauucaacagcagauagag

SEQ ID NO: 2445953 - RNA, 19 nt, Artificial Sequence
  Description of Artificial Sequence: Synthetic oligonucleotide
gauuugaugacaauaagac

SEQ ID NO: 2445954 - RNA, 19 nt, Artificial Sequence
  Description of Artificial Sequence: Synthetic oligonucleotide
cuuuagaguagauagcugc

SEQ ID NO: 2445955 - RNA, 19 nt, Artificial Sequence
  Description of Artificial Sequence: Synthetic oligonucleotide
aauauguugggauuuugga

SEQ ID NO: 2445956 - RNA, 19 nt, Artificial Sequence
  Description of Artificial Sequence: Synthetic oligonucleotide
ugaguuuaucacuuggccg

SEQ ID NO: 2445957 - RNA, 19 nt, Artificial Sequence
  Description of Artificial Sequence: Synthetic oligonucleotide
ucagcuaaaguaauuagaa

SEQ ID NO: 2445958 - RNA, 19 nt, Artificial Sequence
  Description of Artificial Sequence: Synthetic oligonucleotide
uguccuuugaucauaauua

SEQ ID NO: 2445959 - RNA, 19 nt, Artificial Sequence
  Description of Artificial Sequence: Synthetic oligonucleotide
ugguuaaugaggaagauuu

SEQ ID NO: 2445960 - RNA, 19 nt, Artificial Sequence
  Description of Artificial Sequence: Synthetic oligonucleotide
uugacugcucaccaaaggg

SEQ ID NO: 2445961 - RNA, 19 nt, Artificial Sequence
  Description of Artificial Sequence: Synthetic oligonucleotide
cuuugucucccuuagaccc

SEQ ID NO: 2445962 - RNA, 19 nt, Artificial Sequence
  Description of Artificial Sequence: Synthetic oligonucleotide
uagauagcugcaaaugccg

SEQ ID NO: 2445963 - RNA, 19 nt, Artificial Sequence
  Description of Artificial Sequence: Synthetic oligonucleotide
gacaauaagacuugcacuc

SEQ ID NO: 2445964 - RNA, 19 nt, Artificial Sequence
  Description of Artificial Sequence: Synthetic oligonucleotide
uguaaucuguguuuuacug

SEQ ID NO: 2445965 - RNA, 19 nt, Artificial Sequence
  Description of Artificial Sequence: Synthetic oligonucleotide
uugaccagaaguaauuccc

SEQ ID NO: 2445966 - RNA, 19 nt, Artificial Sequence
  Description of Artificial Sequence: Synthetic oligonucleotide
agauagagcaauauguugg

SEQ ID NO: 2445967 - RNA, 19 nt, Artificial Sequence
  Description of Artificial Sequence: Synthetic oligonucleotide
gaucauaauuaccuguugc

SEQ ID NO: 2445968 - RNA, 19 nt, Artificial Sequence
  Description of Artificial Sequence: Synthetic oligonucleotide
auuucaggaggacauuccc

SEQ ID NO: 2445969 - RNA, 19 nt, Artificial Sequence
  Description of Artificial Sequence: Synthetic oligonucleotide
ucuuuggacacaaagguau

SEQ ID NO: 2445970 - RNA, 19 nt, Artificial Sequence
  Description of Artificial Sequence: Synthetic oligonucleotide
aggaaugccgccuuuagag

SEQ ID NO: 2445971 - RNA, 19 nt, Artificial Sequence
  Description of Artificial Sequence: Synthetic oligonucleotide
uggacacaaagguauaagg

SEQ ID NO: 2445972 - RNA, 19 nt, Artificial Sequence
  Description of Artificial Sequence: Synthetic oligonucleotide
uugaguuuaucacuuggcc

SEQ ID NO: 2445973 - RNA, 19 nt, Artificial Sequence
  Description of Artificial Sequence: Synthetic oligonucleotide
acuuaguccucuuucaaag

SEQ ID NO: 2445974 - RNA, 19 nt, Artificial Sequence
  Description of Artificial Sequence: Synthetic oligonucleotide
uuugaucauaauuaccugu

SEQ ID NO: 2445975 - RNA, 19 nt, Artificial Sequence
  Description of Artificial Sequence: Synthetic oligonucleotide
aauuucaggaggacauucc

SEQ ID NO: 2445976 - RNA, 19 nt, Artificial Sequence
  Description of Artificial Sequence: Synthetic oligonucleotide
acuuaauuguaccagugca

SEQ ID NO: 2445977 - RNA, 19 nt, Artificial Sequence
  Description of Artificial Sequence: Synthetic oligonucleotide
ugaggauguccuuugauca

SEQ ID NO: 2445978 - RNA, 19 nt, Artificial Sequence
  Description of Artificial Sequence: Synthetic oligonucleotide
ugacugcucaccaaagggg

SEQ ID NO: 2445979 - RNA, 19 nt, Artificial Sequence
  Description of Artificial Sequence: Synthetic oligonucleotide
aguaauuagaagcggguca

SEQ ID NO: 2445980 - RNA, 19 nt, Artificial Sequence
  Description of Artificial Sequence: Synthetic oligonucleotide
uuggauuugaugacaauaa

SEQ ID NO: 2445981 - RNA, 19 nt, Artificial Sequence
  Description of Artificial Sequence: Synthetic oligonucleotide
uuuggguugaguuuaucac

SEQ ID NO: 2445982 - RNA, 19 nt, Artificial Sequence
  Description of Artificial Sequence: Synthetic oligonucleotide
ucaagugcacaucuccagg

SEQ ID NO: 2445983 - RNA, 19 nt, Artificial Sequence
  Description of Artificial Sequence: Synthetic oligonucleotide
acuuucaccccgcuugucc

SEQ ID NO: 2445984 - RNA, 19 nt, Artificial Sequence
  Description of Artificial Sequence: Synthetic oligonucleotide
uucucaagugcacaucucc

SEQ ID NO: 2445985 - RNA, 19 nt, Artificial Sequence
  Description of Artificial Sequence: Synthetic oligonucleotide
auaagacuugcacucccgc

SEQ ID NO: 2445986 - RNA, 19 nt, Artificial Sequence
  Description of Artificial Sequence: Synthetic oligonucleotide
aaguaauuagaagcggguc

SEQ ID NO: 2445987 - RNA, 19 nt, Artificial Sequence
  Description of Artificial Sequence: Synthetic oligonucleotide
caauauguugggauuuugg

SEQ ID NO: 2445988 - RNA, 19 nt, Artificial Sequence
  Description of Artificial Sequence: Synthetic oligonucleotide
uguaccagugcacuuaguc

SEQ ID NO: 2445989 - RNA, 19 nt, Artificial Sequence
  Description of Artificial Sequence: Synthetic oligonucleotide
auaagggugcuuugucucc

SEQ ID NO: 2445990 - RNA, 19 nt, Artificial Sequence
  Description of Artificial Sequence: Synthetic oligonucleotide
ugacaauaagacuugcacu

SEQ ID NO: 2445991 - RNA, 19 nt, Artificial Sequence
  Description of Artificial Sequence: Synthetic oligonucleotide
agugcuguguuuuauuugu

SEQ ID NO: 2445992 - RNA, 19 nt, Artificial Sequence
  Description of Artificial Sequence: Synthetic oligonucleotide
uuaguccucuuucaaagac

SEQ ID NO: 2445993 - RNA, 19 nt, Artificial Sequence
  Description of Artificial Sequence: Synthetic oligonucleotide
ucagagaugggccaacgac

SEQ ID NO: 2445994 - RNA, 19 nt, Artificial Sequence
  Description of Artificial Sequence: Synthetic oligonucleotide
gaguuuaucacuuggccga

SEQ ID NO: 2445995 - RNA, 19 nt, Artificial Sequence
  Description of Artificial Sequence: Synthetic oligonucleotide
ugcuuugucucccuuagac

SEQ ID NO: 2445996 - RNA, 19 nt, Artificial Sequence
  Description of Artificial Sequence: Synthetic oligonucleotide
auuagaagcgggucaaaug

SEQ ID NO: 2445997 - RNA, 19 nt, Artificial Sequence
  Description of Artificial Sequence: Synthetic oligonucleotide
agaaguuucagauggccgu

SEQ ID NO: 2445998 - RNA, 19 nt, Artificial Sequence
  Description of Artificial Sequence: Synthetic oligonucleotide
ucaggagcacccuugacca

SEQ ID NO: 2445999 - RNA, 19 nt, Artificial Sequence
  Description of Artificial Sequence: Synthetic oligonucleotide
uuuaucacuuggccgagga

SEQ ID NO: 2446000 - RNA, 19 nt, Artificial Sequence
  Description of Artificial Sequence: Synthetic oligonucleotide
augaggaagauuugcuccg

SEQ ID NO: 2446001 - RNA, 19 nt, Artificial Sequence
  Description of Artificial Sequence: Synthetic oligonucleotide
gcuaaaguaauuagaagcg

SEQ ID NO: 2446002 - RNA, 19 nt, Artificial Sequence
  Description of Artificial Sequence: Synthetic oligonucleotide
cuuaauuguaccagugcac

SEQ ID NO: 2446003 - RNA, 19 nt, Artificial Sequence
  Description of Artificial Sequence: Synthetic oligonucleotide
guuaaugaggaagauuugc

SEQ ID NO: 2446004 - RNA, 19 nt, Artificial Sequence
  Description of Artificial Sequence: Synthetic oligonucleotide
aaagguauaagggugcuuu

SEQ ID NO: 2446005 - RNA, 19 nt, Artificial Sequence
  Description of Artificial Sequence: Synthetic oligonucleotide
uccaacuuuugcaaggcac

SEQ ID NO: 2446006 - RNA, 19 nt, Artificial Sequence
  Description of Artificial Sequence: Synthetic oligonucleotide
uucaggaggacauucccgc

SEQ ID NO: 2446007 - RNA, 19 nt, Artificial Sequence
  Description of Artificial Sequence: Synthetic oligonucleotide
aaguaauucccuaaagccu

SEQ ID NO: 2446008 - RNA, 19 nt, Artificial Sequence
  Description of Artificial Sequence: Synthetic oligonucleotide
uucagcacagggaugaguc

SEQ ID NO: 2446009 - RNA, 19 nt, Artificial Sequence
  Description of Artificial Sequence: Synthetic oligonucleotide
uuaauuguaccagugcacu

SEQ ID NO: 2446010 - RNA, 19 nt, Artificial Sequence
  Description of Artificial Sequence: Synthetic oligonucleotide
auaauuaccuguugcuucu

SEQ ID NO: 2446011 - RNA, 19 nt, Artificial Sequence
  Description of Artificial Sequence: Synthetic oligonucleotide
cauguaccaaucugcaagg

SEQ ID NO: 2446012 - RNA, 19 nt, Artificial Sequence
  Description of Artificial Sequence: Synthetic oligonucleotide
cuugaccagaaguaauucc

SEQ ID NO: 2446013 - RNA, 19 nt, Artificial Sequence
  Description of Artificial Sequence: Synthetic oligonucleotide
cuaaaguaauuagaagcgg

SEQ ID NO: 2446014 - RNA, 19 nt, Artificial Sequence
  Description of Artificial Sequence: Synthetic oligonucleotide
uucagauggccguucagag

SEQ ID NO: 2446015 - RNA, 19 nt, Artificial Sequence
  Description of Artificial Sequence: Synthetic oligonucleotide
acccacacuuaauuguacc

SEQ ID NO: 2446016 - RNA, 19 nt, Artificial Sequence
  Description of Artificial Sequence: Synthetic oligonucleotide
uaucacuuggccgaggaug

SEQ ID NO: 2446017 - RNA, 19 nt, Artificial Sequence
  Description of Artificial Sequence: Synthetic oligonucleotide
aaaguaauuagaagcgggu

SEQ ID NO: 2446018 - RNA, 19 nt, Artificial Sequence
  Description of Artificial Sequence: Synthetic oligonucleotide
ugcuccaacuuuugcaagg

SEQ ID NO: 2446019 - RNA, 19 nt, Artificial Sequence
  Description of Artificial Sequence: Synthetic oligonucleotide
aauaagacuugcacucccg

SEQ ID NO: 2446020 - RNA, 19 nt, Artificial Sequence
  Description of Artificial Sequence: Synthetic oligonucleotide
agcagauagagcaauaugu

SEQ ID NO: 2446021 - RNA, 19 nt, Artificial Sequence
  Description of Artificial Sequence: Synthetic oligonucleotide
uuuggauuugaugacaaua

SEQ ID NO: 2446022 - RNA, 19 nt, Artificial Sequence
  Description of Artificial Sequence: Synthetic oligonucleotide
uggaagaauuucaggagga

SEQ ID NO: 2446023 - RNA, 19 nt, Artificial Sequence
  Description of Artificial Sequence: Synthetic oligonucleotide
uauaagggugcuuugucuc

SEQ ID NO: 2446024 - RNA, 19 nt, Artificial Sequence
  Description of Artificial Sequence: Synthetic oligonucleotide
uccuuugaucauaauuacc

SEQ ID NO: 2446025 - RNA, 19 nt, Artificial Sequence
  Description of Artificial Sequence: Synthetic oligonucleotide
gauagcugcaaaugccgag

SEQ ID NO: 2446026 - RNA, 19 nt, Artificial Sequence
  Description of Artificial Sequence: Synthetic oligonucleotide
acuuguaagcagaaguuuc

SEQ ID NO: 2446027 - RNA, 19 nt, Artificial Sequence
  Description of Artificial Sequence: Synthetic oligonucleotide
gaggaugaacccuucuugc

SEQ ID NO: 2446028 - RNA, 19 nt, Artificial Sequence
  Description of Artificial Sequence: Synthetic oligonucleotide
ucccuuauucaacagcaga

SEQ ID NO: 2446029 - RNA, 19 nt, Artificial Sequence
  Description of Artificial Sequence: Synthetic oligonucleotide
cagaaguuucagauggccg

SEQ ID NO: 2446030 - RNA, 19 nt, Artificial Sequence
  Description of Artificial Sequence: Synthetic oligonucleotide
uaaugaggaagauuugcuc

SEQ ID NO: 2446031 - RNA, 19 nt, Artificial Sequence
  Description of Artificial Sequence: Synthetic oligonucleotide
ugcuguguuuuauuugugc

SEQ ID NO: 2446032 - RNA, 19 nt, Artificial Sequence
  Description of Artificial Sequence: Synthetic oligonucleotide
uaccaaucugcaaggaaug

SEQ ID NO: 2446033 - RNA, 19 nt, Artificial Sequence
  Description of Artificial Sequence: Synthetic oligonucleotide
uagacccucagcuaaagua

SEQ ID NO: 2446034 - RNA, 19 nt, Artificial Sequence
  Description of Artificial Sequence: Synthetic oligonucleotide
auauguugggauuuuggau

SEQ ID NO: 2446035 - RNA, 19 nt, Artificial Sequence
  Description of Artificial Sequence: Synthetic oligonucleotide
uuggguugaguuuaucacu

SEQ ID NO: 2446036 - RNA, 19 nt, Artificial Sequence
  Description of Artificial Sequence: Synthetic oligonucleotide
uugaggauguccuuugauc

SEQ ID NO: 2446037 - RNA, 19 nt, Artificial Sequence
  Description of Artificial Sequence: Synthetic oligonucleotide
cagauagagcaauauguug

SEQ ID NO: 2446038 - RNA, 19 nt, Artificial Sequence
  Description of Artificial Sequence: Synthetic oligonucleotide
aagauuugcuccgcugaac

SEQ ID NO: 2446039 - RNA, 19 nt, Artificial Sequence
  Description of Artificial Sequence: Synthetic oligonucleotide
ugcacucccgccaugcugc

SEQ ID NO: 2446040 - RNA, 19 nt, Artificial Sequence
  Description of Artificial Sequence: Synthetic oligonucleotide
ucaucagaauggaccagag

SEQ ID NO: 2446041 - RNA, 19 nt, Artificial Sequence
  Description of Artificial Sequence: Synthetic oligonucleotide
agauuugcuccgcugaacu

SEQ ID NO: 2446042 - RNA, 19 nt, Artificial Sequence
  Description of Artificial Sequence: Synthetic oligonucleotide
aucugcaaggaaugccgcc

SEQ ID NO: 2446043 - RNA, 19 nt, Artificial Sequence
  Description of Artificial Sequence: Synthetic oligonucleotide
gacacaaagguauaagggu

SEQ ID NO: 2446044 - RNA, 19 nt, Artificial Sequence
  Description of Artificial Sequence: Synthetic oligonucleotide
cuuugaucauaauuaccug

SEQ ID NO: 2446045 - RNA, 19 nt, Artificial Sequence
  Description of Artificial Sequence: Synthetic oligonucleotide
uguaccaaucugcaaggaa

SEQ ID NO: 2446046 - RNA, 19 nt, Artificial Sequence
  Description of Artificial Sequence: Synthetic oligonucleotide
gaguagauagcugcaaaug

SEQ ID NO: 2446047 - RNA, 19 nt, Artificial Sequence
  Description of Artificial Sequence: Synthetic oligonucleotide
ucuugacugcucaccaaag

SEQ ID NO: 2446048 - RNA, 19 nt, Artificial Sequence
  Description of Artificial Sequence: Synthetic oligonucleotide
ucucaagugcacaucucca

SEQ ID NO: 2446049 - RNA, 19 nt, Artificial Sequence
  Description of Artificial Sequence: Synthetic oligonucleotide
guaccagugcacuuagucc

SEQ ID NO: 2446050 - RNA, 19 nt, Artificial Sequence
  Description of Artificial Sequence: Synthetic oligonucleotide
cuugacugcucaccaaagg

SEQ ID NO: 2446051 - RNA, 19 nt, Artificial Sequence
  Description of Artificial Sequence: Synthetic oligonucleotide
auuguaccagugcacuuag

SEQ ID NO: 2446052 - RNA, 19 nt, Artificial Sequence
  Description of Artificial Sequence: Synthetic oligonucleotide
auuagccucuuggaaagac

SEQ ID NO: 2446053 - RNA, 19 nt, Artificial Sequence
  Description of Artificial Sequence: Synthetic oligonucleotide
uaagacuugcacucccgcc

SEQ ID NO: 2446054 - RNA, 19 nt, Artificial Sequence
  Description of Artificial Sequence: Synthetic oligonucleotide
cacuuaauuguaccagugc

SEQ ID NO: 2446055 - RNA, 19 nt, Artificial Sequence
  Description of Artificial Sequence: Synthetic oligonucleotide
acuuggccgaggaugaacc

SEQ ID NO: 2446056 - RNA, 19 nt, Artificial Sequence
  Description of Artificial Sequence: Synthetic oligonucleotide
aacugguuaaugaggaaga

SEQ ID NO: 2446057 - RNA, 19 nt, Artificial Sequence
  Description of Artificial Sequence: Synthetic oligonucleotide
uacuccgauuucugcaugg

SEQ ID NO: 2446058 - RNA, 19 nt, Artificial Sequence
  Description of Artificial Sequence: Synthetic oligonucleotide
auuugugcacuugaggaug

SEQ ID NO: 2446059 - RNA, 19 nt, Artificial Sequence
  Description of Artificial Sequence: Synthetic oligonucleotide
aauuaccuguugcuucugu

SEQ ID NO: 2446060 - RNA, 19 nt, Artificial Sequence
  Description of Artificial Sequence: Synthetic oligonucleotide
ugcacuuaguccucuuuca

SEQ ID NO: 2446061 - RNA, 19 nt, Artificial Sequence
  Description of Artificial Sequence: Synthetic oligonucleotide
aauuguaccagugcacuua

SEQ ID NO: 2446062 - RNA, 19 nt, Artificial Sequence
  Description of Artificial Sequence: Synthetic oligonucleotide
aauuagaagcgggucaaau

SEQ ID NO: 2446063 - RNA, 19 nt, Artificial Sequence
  Description of Artificial Sequence: Synthetic oligonucleotide
uuucagauggccguucaga

SEQ ID NO: 2446064 - RNA, 19 nt, Artificial Sequence
  Description of Artificial Sequence: Synthetic oligonucleotide
caauaagacuugcacuccc

SEQ ID NO: 2446065 - RNA, 19 nt, Artificial Sequence
  Description of Artificial Sequence: Synthetic oligonucleotide
uguuuuauuugugcacuug

SEQ ID NO: 2446066 - RNA, 19 nt, Artificial Sequence
  Description of Artificial Sequence: Synthetic oligonucleotide
auguccuuugaucauaauu

SEQ ID NO: 2446067 - RNA, 19 nt, Artificial Sequence
  Description of Artificial Sequence: Synthetic oligonucleotide
uccgauuucugcauggcuu

SEQ ID NO: 2446068 - RNA, 19 nt, Artificial Sequence
  Description of Artificial Sequence: Synthetic oligonucleotide
cagcuaaaguaauuagaag

SEQ ID NO: 2446069 - RNA, 19 nt, Artificial Sequence
  Description of Artificial Sequence: Synthetic oligonucleotide
ccauguaccaaucugcaag

SEQ ID NO: 2446070 - RNA, 19 nt, Artificial Sequence
  Description of Artificial Sequence: Synthetic oligonucleotide
ugaccagaaguaauucccu

SEQ ID NO: 2446071 - RNA, 19 nt, Artificial Sequence
  Description of Artificial Sequence: Synthetic oligonucleotide
cucagcuaaaguaauuaga

SEQ ID NO: 2446072 - RNA, 19 nt, Artificial Sequence
  Description of Artificial Sequence: Synthetic oligonucleotide
gauggccguucagagaugg

SEQ ID NO: 2446073 - RNA, 19 nt, Artificial Sequence
  Description of Artificial Sequence: Synthetic oligonucleotide
uguguuuuacugagccaug

SEQ ID NO: 2446074 - RNA, 19 nt, Artificial Sequence
  Description of Artificial Sequence: Synthetic oligonucleotide
guaaucuguguuuuacuga

SEQ ID NO: 2446075 - RNA, 19 nt, Artificial Sequence
  Description of Artificial Sequence: Synthetic oligonucleotide
aaggaaugccgccuuuaga

SEQ ID NO: 2446076 - RNA, 19 nt, Artificial Sequence
  Description of Artificial Sequence: Synthetic oligonucleotide
acuugcacucccgccaugc

SEQ ID NO: 2446077 - RNA, 19 nt, Artificial Sequence
  Description of Artificial Sequence: Synthetic oligonucleotide
uuguaagcagaaguuucag

SEQ ID NO: 2446078 - RNA, 19 nt, Artificial Sequence
  Description of Artificial Sequence: Synthetic oligonucleotide
agaugggccaacgacccac

SEQ ID NO: 2446079 - RNA, 19 nt, Artificial Sequence
  Description of Artificial Sequence: Synthetic oligonucleotide
cuuucaccccgcuuguccc

SEQ ID NO: 2446080 - RNA, 19 nt, Artificial Sequence
  Description of Artificial Sequence: Synthetic oligonucleotide
uggguugaguuuaucacuu

SEQ ID NO: 2446081 - RNA, 19 nt, Artificial Sequence
  Description of Artificial Sequence: Synthetic oligonucleotide
gaauuucaggaggacauuc

SEQ ID NO: 2446082 - RNA, 19 nt, Artificial Sequence
  Description of Artificial Sequence: Synthetic oligonucleotide
aagugcacaucuccagggu

SEQ ID NO: 2446083 - RNA, 19 nt, Artificial Sequence
  Description of Artificial Sequence: Synthetic oligonucleotide
ucucccuuagacccucagc

SEQ ID NO: 2446084 - RNA, 19 nt, Artificial Sequence
  Description of Artificial Sequence: Synthetic oligonucleotide
cuucuuuggacacaaaggu

SEQ ID NO: 2446085 - RNA, 19 nt, Artificial Sequence
  Description of Artificial Sequence: Synthetic oligonucleotide
uggcuucacuuucaccccg

SEQ ID NO: 2446086 - RNA, 19 nt, Artificial Sequence
  Description of Artificial Sequence: Synthetic oligonucleotide
ccgccuuuagaguagauag

SEQ ID NO: 2446087 - RNA, 19 nt, Artificial Sequence
  Description of Artificial Sequence: Synthetic oligonucleotide
ucuguguuuuacugagcca

SEQ ID NO: 2446088 - RNA, 19 nt, Artificial Sequence
  Description of Artificial Sequence: Synthetic oligonucleotide
uccgcugaacuguagugcu

SEQ ID NO: 2446089 - RNA, 19 nt, Artificial Sequence
  Description of Artificial Sequence: Synthetic oligonucleotide
aguaauucccuaaagccuu

SEQ ID NO: 2446090 - RNA, 19 nt, Artificial Sequence
  Description of Artificial Sequence: Synthetic oligonucleotide
uuugugcacuugaggaugu

SEQ ID NO: 2446091 - RNA, 19 nt, Artificial Sequence
  Description of Artificial Sequence: Synthetic oligonucleotide
aaugccgccuuuagaguag

SEQ ID NO: 2446092 - RNA, 19 nt, Artificial Sequence
  Description of Artificial Sequence: Synthetic oligonucleotide
uacugagccauguaccaau

SEQ ID NO: 2446093 - RNA, 19 nt, Artificial Sequence
  Description of Artificial Sequence: Synthetic oligonucleotide
ggaugaacccuucuugcag

SEQ ID NO: 2446094 - RNA, 19 nt, Artificial Sequence
  Description of Artificial Sequence: Synthetic oligonucleotide
uagaagcgggucaaaugga

SEQ ID NO: 2446095 - RNA, 19 nt, Artificial Sequence
  Description of Artificial Sequence: Synthetic oligonucleotide
ucauaauuaccuguugcuu

SEQ ID NO: 2446096 - RNA, 19 nt, Artificial Sequence
  Description of Artificial Sequence: Synthetic oligonucleotide
uucagagaugggccaacga

SEQ ID NO: 2446097 - RNA, 19 nt, Artificial Sequence
  Description of Artificial Sequence: Synthetic oligonucleotide
ucuggagaacugguuaaug

SEQ ID NO: 2446098 - RNA, 19 nt, Artificial Sequence
  Description of Artificial Sequence: Synthetic oligonucleotide
auuugcuccgcugaacugu

SEQ ID NO: 2446099 - RNA, 19 nt, Artificial Sequence
  Description of Artificial Sequence: Synthetic oligonucleotide
auggcuuuugcuggcuccc

SEQ ID NO: 2446100 - RNA, 19 nt, Artificial Sequence
  Description of Artificial Sequence: Synthetic oligonucleotide
accagaaguaauucccuaa

SEQ ID NO: 2446101 - RNA, 19 nt, Artificial Sequence
  Description of Artificial Sequence: Synthetic oligonucleotide
uagccucuuggaaagacuu

SEQ ID NO: 2446102 - RNA, 19 nt, Artificial Sequence
  Description of Artificial Sequence: Synthetic oligonucleotide
cuggguagcaaugguacag

SEQ ID NO: 2446103 - RNA, 19 nt, Artificial Sequence
  Description of Artificial Sequence: Synthetic oligonucleotide
guagcaaugguacagcuuu

SEQ ID NO: 2446104 - RNA, 19 nt, Artificial Sequence
  Description of Artificial Sequence: Synthetic oligonucleotide
uuagaguagauagcugcaa

SEQ ID NO: 2446105 - RNA, 19 nt, Artificial Sequence
  Description of Artificial Sequence: Synthetic oligonucleotide
cuggagaacugguuaauga

SEQ ID NO: 2446106 - RNA, 19 nt, Artificial Sequence
  Description of Artificial Sequence: Synthetic oligonucleotide
uuucaccccgcuugucccg

SEQ ID NO: 2446107 - RNA, 19 nt, Artificial Sequence
  Description of Artificial Sequence: Synthetic oligonucleotide
uguagugcuguguuuuauu

SEQ ID NO: 2446108 - RNA, 19 nt, Artificial Sequence
  Description of Artificial Sequence: Synthetic oligonucleotide
uugcacucccgccaugcug

SEQ ID NO: 2446109 - RNA, 19 nt, Artificial Sequence
  Description of Artificial Sequence: Synthetic oligonucleotide
ggugcuuugucucccuuag

SEQ ID NO: 2446110 - RNA, 19 nt, Artificial Sequence
  Description of Artificial Sequence: Synthetic oligonucleotide
uggccguucagagaugggc

SEQ ID NO: 2446111 - RNA, 19 nt, Artificial Sequence
  Description of Artificial Sequence: Synthetic oligonucleotide
uuagacccucagcuaaagu

SEQ ID NO: 2446112 - RNA, 19 nt, Artificial Sequence
  Description of Artificial Sequence: Synthetic oligonucleotide
gaacccuucuugcagccuc

SEQ ID NO: 2446113 - RNA, 19 nt, Artificial Sequence
  Description of Artificial Sequence: Synthetic oligonucleotide
auucaacagcagauagagc

SEQ ID NO: 2446114 - RNA, 19 nt, Artificial Sequence
  Description of Artificial Sequence: Synthetic oligonucleotide
aggacauucccgcuguaau

SEQ ID NO: 2446115 - RNA, 19 nt, Artificial Sequence
  Description of Artificial Sequence: Synthetic oligonucleotide
aucaucagaauggaccaga

SEQ ID NO: 2446116 - RNA, 19 nt, Artificial Sequence
  Description of Artificial Sequence: Synthetic oligonucleotide
ucuggguagcaaugguaca

SEQ ID NO: 2446117 - RNA, 19 nt, Artificial Sequence
  Description of Artificial Sequence: Synthetic oligonucleotide
agcucuugacugcucacca

SEQ ID NO: 2446118 - RNA, 19 nt, Artificial Sequence
  Description of Artificial Sequence: Synthetic oligonucleotide
uggugauggguucuuugaa

SEQ ID NO: 2446119 - RNA, 19 nt, Artificial Sequence
  Description of Artificial Sequence: Synthetic oligonucleotide
caucagaauggaccagagc

SEQ ID NO: 2446120 - RNA, 19 nt, Artificial Sequence
  Description of Artificial Sequence: Synthetic oligonucleotide
ggauuuuggauuugaugac

SEQ ID NO: 2446121 - RNA, 19 nt, Artificial Sequence
  Description of Artificial Sequence: Synthetic oligonucleotide
cagcagauagagcaauaug

SEQ ID NO: 2446122 - RNA, 19 nt, Artificial Sequence
  Description of Artificial Sequence: Synthetic oligonucleotide
aauggaccagagcugccuu

SEQ ID NO: 2446123 - RNA, 19 nt, Artificial Sequence
  Description of Artificial Sequence: Synthetic oligonucleotide
acacuuaauuguaccagug

SEQ ID NO: 2446124 - RNA, 19 nt, Artificial Sequence
  Description of Artificial Sequence: Synthetic oligonucleotide
uuucucaagugcacaucuc

SEQ ID NO: 2446125 - RNA, 19 nt, Artificial Sequence
  Description of Artificial Sequence: Synthetic oligonucleotide
gucuggguagcaaugguac

SEQ ID NO: 2446126 - RNA, 19 nt, Artificial Sequence
  Description of Artificial Sequence: Synthetic oligonucleotide
gaaugccgccuuuagagua

SEQ ID NO: 2446127 - RNA, 19 nt, Artificial Sequence
  Description of Artificial Sequence: Synthetic oligonucleotide
ugcuccgcugaacuguagu

SEQ ID NO: 2446128 - RNA, 19 nt, Artificial Sequence
  Description of Artificial Sequence: Synthetic oligonucleotide
aauucccuaaagccuucuu

SEQ ID NO: 2446129 - RNA, 19 nt, Artificial Sequence
  Description of Artificial Sequence: Synthetic oligonucleotide
ugcauggcuucacuuucac

SEQ ID NO: 2446130 - RNA, 19 nt, Artificial Sequence
  Description of Artificial Sequence: Synthetic oligonucleotide
ucacuuucaccccgcuugu

SEQ ID NO: 2446131 - RNA, 19 nt, Artificial Sequence
  Description of Artificial Sequence: Synthetic oligonucleotide
aaugccgagggagcucuug

SEQ ID NO: 2446132 - RNA, 19 nt, Artificial Sequence
  Description of Artificial Sequence: Synthetic oligonucleotide
ccauuagccucuuggaaag

SEQ ID NO: 2446133 - RNA, 19 nt, Artificial Sequence
  Description of Artificial Sequence: Synthetic oligonucleotide
ugauggguucuuugaauuu

SEQ ID NO: 2446134 - RNA, 19 nt, Artificial Sequence
  Description of Artificial Sequence: Synthetic oligonucleotide
uggguagcaaugguacagc

SEQ ID NO: 2446135 - RNA, 19 nt, Artificial Sequence
  Description of Artificial Sequence: Synthetic oligonucleotide
ggucaaauggaagaauuuc

SEQ ID NO: 2446136 - RNA, 19 nt, Artificial Sequence
  Description of Artificial Sequence: Synthetic oligonucleotide
auuaccuguugcuucuguu

SEQ ID NO: 2446137 - RNA, 19 nt, Artificial Sequence
  Description of Artificial Sequence: Synthetic oligonucleotide
guuucagauggccguucag

SEQ ID NO: 2446138 - RNA, 19 nt, Artificial Sequence
  Description of Artificial Sequence: Synthetic oligonucleotide
ugcaaaugccgagggagcu

SEQ ID NO: 2446139 - RNA, 19 nt, Artificial Sequence
  Description of Artificial Sequence: Synthetic oligonucleotide
ccuuugaucauaauuaccu

SEQ ID NO: 2446140 - RNA, 19 nt, Artificial Sequence
  Description of Artificial Sequence: Synthetic oligonucleotide
uugggauuuuggauuugau

SEQ ID NO: 2446141 - RNA, 19 nt, Artificial Sequence
  Description of Artificial Sequence: Synthetic oligonucleotide
aggaggacauucccgcugu

SEQ ID NO: 2446142 - RNA, 19 nt, Artificial Sequence
  Description of Artificial Sequence: Synthetic oligonucleotide
uaauuguaccagugcacuu

SEQ ID NO: 2446143 - RNA, 19 nt, Artificial Sequence
  Description of Artificial Sequence: Synthetic oligonucleotide
uuucaggagcacccuugac

SEQ ID NO: 2446144 - RNA, 19 nt, Artificial Sequence
  Description of Artificial Sequence: Synthetic oligonucleotide
cuuaguccucuuucaaaga

SEQ ID NO: 2446145 - RNA, 19 nt, Artificial Sequence
  Description of Artificial Sequence: Synthetic oligonucleotide
ugggccaacgacccacacu

SEQ ID NO: 2446146 - RNA, 19 nt, Artificial Sequence
  Description of Artificial Sequence: Synthetic oligonucleotide
cuuagacccucagcuaaag

SEQ ID NO: 2446147 - RNA, 19 nt, Artificial Sequence
  Description of Artificial Sequence: Synthetic oligonucleotide
gagcucuugacugcucacc

SEQ ID NO: 2446148 - RNA, 19 nt, Artificial Sequence
  Description of Artificial Sequence: Synthetic oligonucleotide
ugaggaagauuugcuccgc

SEQ ID NO: 2446149 - RNA, 19 nt, Artificial Sequence
  Description of Artificial Sequence: Synthetic oligonucleotide
uuugcuccgcugaacugua

SEQ ID NO: 2446150 - RNA, 19 nt, Artificial Sequence
  Description of Artificial Sequence: Synthetic oligonucleotide
ggaaagacuuguaagcaga

SEQ ID NO: 2446151 - RNA, 19 nt, Artificial Sequence
  Description of Artificial Sequence: Synthetic oligonucleotide
cuccgcugaacuguagugc

SEQ ID NO: 2446152 - RNA, 19 nt, Artificial Sequence
  Description of Artificial Sequence: Synthetic oligonucleotide
gugcacuuaguccucuuuc

SEQ ID NO: 2446153 - RNA, 19 nt, Artificial Sequence
  Description of Artificial Sequence: Synthetic oligonucleotide
acagcagauagagcaauau

SEQ ID NO: 2446154 - RNA, 19 nt, Artificial Sequence
  Description of Artificial Sequence: Synthetic oligonucleotide
guauaagggugcuuugucu

SEQ ID NO: 2446155 - RNA, 19 nt, Artificial Sequence
  Description of Artificial Sequence: Synthetic oligonucleotide
auguugggauuuuggauuu

SEQ ID NO: 2446156 - RNA, 19 nt, Artificial Sequence
  Description of Artificial Sequence: Synthetic oligonucleotide
agacuuguaagcagaaguu

SEQ ID NO: 2446157 - RNA, 19 nt, Artificial Sequence
  Description of Artificial Sequence: Synthetic oligonucleotide
cucccuuauucaacagcag

SEQ ID NO: 2446158 - RNA, 19 nt, Artificial Sequence
  Description of Artificial Sequence: Synthetic oligonucleotide
agacccucagcuaaaguaa

SEQ ID NO: 2446159 - RNA, 19 nt, Artificial Sequence
  Description of Artificial Sequence: Synthetic oligonucleotide
cuuggccgaggaugaaccc

SEQ ID NO: 2446160 - RNA, 19 nt, Artificial Sequence
  Description of Artificial Sequence: Synthetic oligonucleotide
agguauaagggugcuuugu

SEQ ID NO: 2446161 - RNA, 19 nt, Artificial Sequence
  Description of Artificial Sequence: Synthetic oligonucleotide
aagccuucuuuggacacaa

SEQ ID NO: 2446162 - RNA, 19 nt, Artificial Sequence
  Description of Artificial Sequence: Synthetic oligonucleotide
aguuuaucacuuggccgag

SEQ ID NO: 2446163 - RNA, 19 nt, Artificial Sequence
  Description of Artificial Sequence: Synthetic oligonucleotide
cucccuuagacccucagcu

SEQ ID NO: 2446164 - RNA, 19 nt, Artificial Sequence
  Description of Artificial Sequence: Synthetic oligonucleotide
acaaagguauaagggugcu

SEQ ID NO: 2446165 - RNA, 19 nt, Artificial Sequence
  Description of Artificial Sequence: Synthetic oligonucleotide
aucacuuggccgaggauga

SEQ ID NO: 2446166 - RNA, 19 nt, Artificial Sequence
  Description of Artificial Sequence: Synthetic oligonucleotide
cucuuggaaagacuuguaa

SEQ ID NO: 2446167 - RNA, 19 nt, Artificial Sequence
  Description of Artificial Sequence: Synthetic oligonucleotide
agugcacaucuccagggua

SEQ ID NO: 2446168 - RNA, 19 nt, Artificial Sequence
  Description of Artificial Sequence: Synthetic oligonucleotide
caacuuuugcaaggcacug

SEQ ID NO: 2446169 - RNA, 19 nt, Artificial Sequence
  Description of Artificial Sequence: Synthetic oligonucleotide
ucaggaggacauucccgcu

SEQ ID NO: 2446170 - RNA, 19 nt, Artificial Sequence
  Description of Artificial Sequence: Synthetic oligonucleotide
ccucagcuaaaguaauuag

SEQ ID NO: 2446171 - RNA, 19 nt, Artificial Sequence
  Description of Artificial Sequence: Synthetic oligonucleotide
caggaggacauucccgcug

SEQ ID NO: 2446172 - RNA, 19 nt, Artificial Sequence
  Description of Artificial Sequence: Synthetic oligonucleotide
augagucuggguagcaaug

SEQ ID NO: 2446173 - RNA, 19 nt, Artificial Sequence
  Description of Artificial Sequence: Synthetic oligonucleotide
agugcacuuaguccucuuu

SEQ ID NO: 2446174 - RNA, 19 nt, Artificial Sequence
  Description of Artificial Sequence: Synthetic oligonucleotide
ucccgcuguaaucuguguu

SEQ ID NO: 2446175 - RNA, 19 nt, Artificial Sequence
  Description of Artificial Sequence: Synthetic oligonucleotide
guugggauuuuggauuuga

SEQ ID NO: 2446176 - RNA, 19 nt, Artificial Sequence
  Description of Artificial Sequence: Synthetic oligonucleotide
guaccaaucugcaaggaau

SEQ ID NO: 2446177 - RNA, 19 nt, Artificial Sequence
  Description of Artificial Sequence: Synthetic oligonucleotide
uuacugagccauguaccaa

SEQ ID NO: 2446178 - RNA, 19 nt, Artificial Sequence
  Description of Artificial Sequence: Synthetic oligonucleotide
acugagccauguaccaauc

SEQ ID NO: 2446179 - RNA, 19 nt, Artificial Sequence
  Description of Artificial Sequence: Synthetic oligonucleotide
auagagcaauauguuggga

SEQ ID NO: 2446180 - RNA, 19 nt, Artificial Sequence
  Description of Artificial Sequence: Synthetic oligonucleotide
uaauuaccuguugcuucug

SEQ ID NO: 2446181 - RNA, 19 nt, Artificial Sequence
  Description of Artificial Sequence: Synthetic oligonucleotide
guuuaucacuuggccgagg

SEQ ID NO: 2446182 - RNA, 19 nt, Artificial Sequence
  Description of Artificial Sequence: Synthetic oligonucleotide
ggcucccuuauucaacagc

SEQ ID NO: 2446183 - RNA, 19 nt, Artificial Sequence
  Description of Artificial Sequence: Synthetic oligonucleotide
cacuuaguccucuuucaaa

SEQ ID NO: 2446184 - RNA, 19 nt, Artificial Sequence
  Description of Artificial Sequence: Synthetic oligonucleotide
cucuugacugcucaccaaa

SEQ ID NO: 2446185 - RNA, 19 nt, Artificial Sequence
  Description of Artificial Sequence: Synthetic oligonucleotide
uaauucccuaaagccuucu

SEQ ID NO: 2446186 - RNA, 19 nt, Artificial Sequence
  Description of Artificial Sequence: Synthetic oligonucleotide
cagauggccguucagagau

SEQ ID NO: 2446187 - RNA, 19 nt, Artificial Sequence
  Description of Artificial Sequence: Synthetic oligonucleotide
gaccagaaguaauucccua

SEQ ID NO: 2446188 - RNA, 19 nt, Artificial Sequence
  Description of Artificial Sequence: Synthetic oligonucleotide
uccaggguacuccgauuuc

SEQ ID NO: 2446189 - RNA, 19 nt, Artificial Sequence
  Description of Artificial Sequence: Synthetic oligonucleotide
agauagcugcaaaugccga

SEQ ID NO: 2446190 - RNA, 19 nt, Artificial Sequence
  Description of Artificial Sequence: Synthetic oligonucleotide
guacuccgauuucugcaug

SEQ ID NO: 2446191 - RNA, 19 nt, Artificial Sequence
  Description of Artificial Sequence: Synthetic oligonucleotide
uggccgaggaugaacccuu

SEQ ID NO: 2446192 - RNA, 19 nt, Artificial Sequence
  Description of Artificial Sequence: Synthetic oligonucleotide
uggcucccuuauucaacag

SEQ ID NO: 2446193 - RNA, 19 nt, Artificial Sequence
  Description of Artificial Sequence: Synthetic oligonucleotide
uaauuagaagcgggucaaa

SEQ ID NO: 2446194 - RNA, 19 nt, Artificial Sequence
  Description of Artificial Sequence: Synthetic oligonucleotide
ggguacuccgauuucugca

SEQ ID NO: 2446195 - RNA, 19 nt, Artificial Sequence
  Description of Artificial Sequence: Synthetic oligonucleotide
cacacuuaauuguaccagu

SEQ ID NO: 2446196 - RNA, 19 nt, Artificial Sequence
  Description of Artificial Sequence: Synthetic oligonucleotide
ccacacuuaauuguaccag

SEQ ID NO: 2446197 - RNA, 19 nt, Artificial Sequence
  Description of Artificial Sequence: Synthetic oligonucleotide
gguuaaugaggaagauuug

SEQ ID NO: 2446198 - RNA, 19 nt, Artificial Sequence
  Description of Artificial Sequence: Synthetic oligonucleotide
auucccgcuguaaucugug

SEQ ID NO: 2446199 - RNA, 19 nt, Artificial Sequence
  Description of Artificial Sequence: Synthetic oligonucleotide
gcucccuuauucaacagca

SEQ ID NO: 2446200 - RNA, 19 nt, Artificial Sequence
  Description of Artificial Sequence: Synthetic oligonucleotide
ucccuuagacccucagcua

SEQ ID NO: 2446201 - RNA, 19 nt, Artificial Sequence
  Description of Artificial Sequence: Synthetic oligonucleotide
uguugggauuuuggauuug

SEQ ID NO: 2446202 - RNA, 19 nt, Artificial Sequence
  Description of Artificial Sequence: Synthetic oligonucleotide
cuugcagccucuggagaac

SEQ ID NO: 2446203 - RNA, 19 nt, Artificial Sequence
  Description of Artificial Sequence: Synthetic oligonucleotide
uuguaccagugcacuuagu

SEQ ID NO: 2446204 - RNA, 19 nt, Artificial Sequence
  Description of Artificial Sequence: Synthetic oligonucleotide
cuguguuuuacugagccau

SEQ ID NO: 2446205 - RNA, 19 nt, Artificial Sequence
  Description of Artificial Sequence: Synthetic oligonucleotide
ccgagggagcucuugacug

SEQ ID NO: 2446206 - RNA, 19 nt, Artificial Sequence
  Description of Artificial Sequence: Synthetic oligonucleotide
gucucccuuagacccucag

SEQ ID NO: 2446207 - RNA, 19 nt, Artificial Sequence
  Description of Artificial Sequence: Synthetic oligonucleotide
ggaagaauuucaggaggac

SEQ ID NO: 2446208 - RNA, 19 nt, Artificial Sequence
  Description of Artificial Sequence: Synthetic oligonucleotide
agcgggucaaauggaagaa

SEQ ID NO: 2446209 - RNA, 19 nt, Artificial Sequence
  Description of Artificial Sequence: Synthetic oligonucleotide
cugagaaagcagcauggcu

SEQ ID NO: 2446210 - RNA, 19 nt, Artificial Sequence
  Description of Artificial Sequence: Synthetic oligonucleotide
gcuccgcugaacuguagug

SEQ ID NO: 2446211 - RNA, 19 nt, Artificial Sequence
  Description of Artificial Sequence: Synthetic oligonucleotide
gauggguucuuugaauuuu

SEQ ID NO: 2446212 - RNA, 19 nt, Artificial Sequence
  Description of Artificial Sequence: Synthetic oligonucleotide
gaauggaccagagcugccu

SEQ ID NO: 2446213 - RNA, 19 nt, Artificial Sequence
  Description of Artificial Sequence: Synthetic oligonucleotide
accagugcacuuaguccuc

SEQ ID NO: 2446214 - RNA, 19 nt, Artificial Sequence
  Description of Artificial Sequence: Synthetic oligonucleotide
uugcuccgcugaacuguag

SEQ ID NO: 2446215 - RNA, 19 nt, Artificial Sequence
  Description of Artificial Sequence: Synthetic oligonucleotide
uagcaaugguacagcuuuu

SEQ ID NO: 2446216 - RNA, 19 nt, Artificial Sequence
  Description of Artificial Sequence: Synthetic oligonucleotide
ugaacccuucuugcagccu

SEQ ID NO: 2446217 - RNA, 19 nt, Artificial Sequence
  Description of Artificial Sequence: Synthetic oligonucleotide
ggccguucagagaugggcc

SEQ ID NO: 2446218 - RNA, 19 nt, Artificial Sequence
  Description of Artificial Sequence: Synthetic oligonucleotide
uucaccccgcuugucccgc

SEQ ID NO: 2446219 - RNA, 19 nt, Artificial Sequence
  Description of Artificial Sequence: Synthetic oligonucleotide
gaggacauucccgcuguaa

SEQ ID NO: 2446220 - RNA, 19 nt, Artificial Sequence
  Description of Artificial Sequence: Synthetic oligonucleotide
auguaccaaucugcaagga

SEQ ID NO: 2446221 - RNA, 19 nt, Artificial Sequence
  Description of Artificial Sequence: Synthetic oligonucleotide
ucuccaggguacuccgauu

SEQ ID NO: 2446222 - RNA, 19 nt, Artificial Sequence
  Description of Artificial Sequence: Synthetic oligonucleotide
gcaauauguugggauuuug

SEQ ID NO: 2446223 - RNA, 19 nt, Artificial Sequence
  Description of Artificial Sequence: Synthetic oligonucleotide
ccgauuucugcauggcuuc

SEQ ID NO: 2446224 - RNA, 19 nt, Artificial Sequence
  Description of Artificial Sequence: Synthetic oligonucleotide
gaggauguccuuugaucau

SEQ ID NO: 2446225 - RNA, 19 nt, Artificial Sequence
  Description of Artificial Sequence: Synthetic oligonucleotide
cuugucccgccugucccgc

SEQ ID NO: 2446226 - RNA, 19 nt, Artificial Sequence
  Description of Artificial Sequence: Synthetic oligonucleotide
ggguugaguuuaucacuug

SEQ ID NO: 2446227 - RNA, 19 nt, Artificial Sequence
  Description of Artificial Sequence: Synthetic oligonucleotide
gugcuguguuuuauuugug

SEQ ID NO: 2446228 - RNA, 19 nt, Artificial Sequence
  Description of Artificial Sequence: Synthetic oligonucleotide
gaggaagauuugcuccgcu

SEQ ID NO: 2446229 - RNA, 19 nt, Artificial Sequence
  Description of Artificial Sequence: Synthetic oligonucleotide
ugcucaccaaagggguuaa

SEQ ID NO: 2446230 - RNA, 19 nt, Artificial Sequence
  Description of Artificial Sequence: Synthetic oligonucleotide
acccuugaccagaaguaau

SEQ ID NO: 2446231 - RNA, 19 nt, Artificial Sequence
  Description of Artificial Sequence: Synthetic oligonucleotide
ggagcucuugacugcucac

SEQ ID NO: 2446232 - RNA, 19 nt, Artificial Sequence
  Description of Artificial Sequence: Synthetic oligonucleotide
cuccaacuuuugcaaggca

SEQ ID NO: 2446233 - RNA, 19 nt, Artificial Sequence
  Description of Artificial Sequence: Synthetic oligonucleotide
guguuuuacugagccaugu

SEQ ID NO: 2446234 - RNA, 19 nt, Artificial Sequence
  Description of Artificial Sequence: Synthetic oligonucleotide
gagaugggccaacgaccca

SEQ ID NO: 2446235 - RNA, 19 nt, Artificial Sequence
  Description of Artificial Sequence: Synthetic oligonucleotide
ggugauggguucuuugaau

SEQ ID NO: 2446236 - RNA, 19 nt, Artificial Sequence
  Description of Artificial Sequence: Synthetic oligonucleotide
cuugaggauguccuuugau

SEQ ID NO: 2446237 - RNA, 19 nt, Artificial Sequence
  Description of Artificial Sequence: Synthetic oligonucleotide
caggagcacccuugaccag

SEQ ID NO: 2446238 - RNA, 19 nt, Artificial Sequence
  Description of Artificial Sequence: Synthetic oligonucleotide
cuguuucucaagugcacau

SEQ ID NO: 2446239 - RNA, 19 nt, Artificial Sequence
  Description of Artificial Sequence: Synthetic oligonucleotide
gagcaauauguugggauuu

SEQ ID NO: 2446240 - RNA, 19 nt, Artificial Sequence
  Description of Artificial Sequence: Synthetic oligonucleotide
gguacuccgauuucugcau

SEQ ID NO: 2446241 - RNA, 19 nt, Artificial Sequence
  Description of Artificial Sequence: Synthetic oligonucleotide
ccuugaccagaaguaauuc

SEQ ID NO: 2446242 - RNA, 19 nt, Artificial Sequence
  Description of Artificial Sequence: Synthetic oligonucleotide
gccaacgacccacacuuaa

SEQ ID NO: 2446243 - RNA, 19 nt, Artificial Sequence
  Description of Artificial Sequence: Synthetic oligonucleotide
auggccguucagagauggg

SEQ ID NO: 2446244 - RNA, 19 nt, Artificial Sequence
  Description of Artificial Sequence: Synthetic oligonucleotide
cgccuuuagaguagauagc

SEQ ID NO: 2446245 - RNA, 19 nt, Artificial Sequence
  Description of Artificial Sequence: Synthetic oligonucleotide
ccaacuuuugcaaggcacu

SEQ ID NO: 2446246 - RNA, 19 nt, Artificial Sequence
  Description of Artificial Sequence: Synthetic oligonucleotide
gcacuuaguccucuuucaa

SEQ ID NO: 2446247 - RNA, 19 nt, Artificial Sequence
  Description of Artificial Sequence: Synthetic oligonucleotide
uuuuguccauuagccucuu

SEQ ID NO: 2446248 - RNA, 19 nt, Artificial Sequence
  Description of Artificial Sequence: Synthetic oligonucleotide
uggcuuuugcuggcucccu

SEQ ID NO: 2446249 - RNA, 19 nt, Artificial Sequence
  Description of Artificial Sequence: Synthetic oligonucleotide
gaaguuucagauggccguu

SEQ ID NO: 2446250 - RNA, 19 nt, Artificial Sequence
  Description of Artificial Sequence: Synthetic oligonucleotide
gcuggcucccuuauucaac

SEQ ID NO: 2446251 - RNA, 19 nt, Artificial Sequence
  Description of Artificial Sequence: Synthetic oligonucleotide
cacccuugaccagaaguaa

SEQ ID NO: 2446252 - RNA, 19 nt, Artificial Sequence
  Description of Artificial Sequence: Synthetic oligonucleotide
ggaaugccgccuuuagagu

SEQ ID NO: 2446253 - RNA, 19 nt, Artificial Sequence
  Description of Artificial Sequence: Synthetic oligonucleotide
cugcucaccaaagggguua

SEQ ID NO: 2446254 - RNA, 19 nt, Artificial Sequence
  Description of Artificial Sequence: Synthetic oligonucleotide
gugcuuugucucccuuaga

SEQ ID NO: 2446255 - RNA, 19 nt, Artificial Sequence
  Description of Artificial Sequence: Synthetic oligonucleotide
cccuaaagccuucuuugga

SEQ ID NO: 2446256 - RNA, 19 nt, Artificial Sequence
  Description of Artificial Sequence: Synthetic oligonucleotide
cccuuagacccucagcuaa

SEQ ID NO: 2446257 - RNA, 19 nt, Artificial Sequence
  Description of Artificial Sequence: Synthetic oligonucleotide
cccuuauucaacagcagau

SEQ ID NO: 2446258 - RNA, 19 nt, Artificial Sequence
  Description of Artificial Sequence: Synthetic oligonucleotide
gcacccuugaccagaagua

SEQ ID NO: 2446259 - RNA, 19 nt, Artificial Sequence
  Description of Artificial Sequence: Synthetic oligonucleotide
cuccaggguacuccgauuu

SEQ ID NO: 2446260 - RNA, 19 nt, Artificial Sequence
  Description of Artificial Sequence: Synthetic oligonucleotide
gcuuuugcuggcucccuua

SEQ ID NO: 2446261 - RNA, 19 nt, Artificial Sequence
  Description of Artificial Sequence: Synthetic oligonucleotide
ugccgccuuuagaguagau

SEQ ID NO: 2446262 - RNA, 19 nt, Artificial Sequence
  Description of Artificial Sequence: Synthetic oligonucleotide
gcagauagagcaauauguu

SEQ ID NO: 2446263 - RNA, 19 nt, Artificial Sequence
  Description of Artificial Sequence: Synthetic oligonucleotide
cauuagccucuuggaaaga

SEQ ID NO: 2446264 - RNA, 19 nt, Artificial Sequence
  Description of Artificial Sequence: Synthetic oligonucleotide
agauggccguucagagaug

SEQ ID NO: 2446265 - RNA, 19 nt, Artificial Sequence
  Description of Artificial Sequence: Synthetic oligonucleotide
cugguuaaugaggaagauu

SEQ ID NO: 2446266 - RNA, 19 nt, Artificial Sequence
  Description of Artificial Sequence: Synthetic oligonucleotide
cuuuugcuggcucccuuau

SEQ ID NO: 2446267 - RNA, 19 nt, Artificial Sequence
  Description of Artificial Sequence: Synthetic oligonucleotide
gccauguaccaaucugcaa

SEQ ID NO: 2446268 - RNA, 19 nt, Artificial Sequence
  Description of Artificial Sequence: Synthetic oligonucleotide
augccgccuuuagaguaga

SEQ ID NO: 2446269 - RNA, 19 nt, Artificial Sequence
  Description of Artificial Sequence: Synthetic oligonucleotide
acccucagcuaaaguaauu

SEQ ID NO: 2446270 - RNA, 19 nt, Artificial Sequence
  Description of Artificial Sequence: Synthetic oligonucleotide
gcaaaugccgagggagcuc

SEQ ID NO: 2446271 - RNA, 19 nt, Artificial Sequence
  Description of Artificial Sequence: Synthetic oligonucleotide
cccgccaugcugcuccaac

SEQ ID NO: 2446272 - RNA, 19 nt, Artificial Sequence
  Description of Artificial Sequence: Synthetic oligonucleotide
cagccucuggagaacuggu

SEQ ID NO: 2446273 - RNA, 19 nt, Artificial Sequence
  Description of Artificial Sequence: Synthetic oligonucleotide
cccucagcuaaaguaauua

SEQ ID NO: 2446274 - RNA, 19 nt, Artificial Sequence
  Description of Artificial Sequence: Synthetic oligonucleotide
gcucuugacugcucaccaa

SEQ ID NO: 2446275 - RNA, 19 nt, Artificial Sequence
  Description of Artificial Sequence: Synthetic oligonucleotide
ccgcuugucccgccugucc

SEQ ID NO: 2446276 - RNA, 19 nt, Artificial Sequence
  Description of Artificial Sequence: Synthetic oligonucleotide
gucccgccugucccgccgc

SEQ ID NO: 2446277 - RNA, 19 nt, Artificial Sequence
  Description of Artificial Sequence: Synthetic oligonucleotide
cacagggaugagucugggu

SEQ ID NO: 2446278 - RNA, 19 nt, Artificial Sequence
  Description of Artificial Sequence: Synthetic oligonucleotide
ccuuagacccucagcuaaa

SEQ ID NO: 2446279 - RNA, 19 nt, Artificial Sequence
  Description of Artificial Sequence: Synthetic oligonucleotide
ccgcugaacuguagugcug

SEQ ID NO: 2446280 - RNA, 19 nt, Artificial Sequence
  Description of Artificial Sequence: Synthetic oligonucleotide
gccgccuuuagaguagaua

SEQ ID NO: 2446281 - RNA, 19 nt, Artificial Sequence
  Description of Artificial Sequence: Synthetic oligonucleotide
ccgccugucccgccgcucc

SEQ ID NO: 2446282 - RNA, 19 nt, Artificial Sequence
  Description of Artificial Sequence: Synthetic oligonucleotide
cuugcacucccgccaugcu

SEQ ID NO: 2446283 - RNA, 19 nt, Artificial Sequence
  Description of Artificial Sequence: Synthetic oligonucleotide
gggucaaauggaagaauuu

SEQ ID NO: 2446284 - RNA, 19 nt, Artificial Sequence
  Description of Artificial Sequence: Synthetic oligonucleotide
gguagcaaugguacagcuu

SEQ ID NO: 2446285 - RNA, 19 nt, Artificial Sequence
  Description of Artificial Sequence: Synthetic oligonucleotide
cgacccacacuuaauugua

SEQ ID NO: 2446286 - RNA, 19 nt, Artificial Sequence
  Description of Artificial Sequence: Synthetic oligonucleotide
ggagcacccuugaccagaa

SEQ ID NO: 2446287 - RNA, 19 nt, Artificial Sequence
  Description of Artificial Sequence: Synthetic oligonucleotide
cccgcuguaaucuguguuu

SEQ ID NO: 2446288 - RNA, 19 nt, Artificial Sequence
  Description of Artificial Sequence: Synthetic oligonucleotide
caaagguauaagggugcuu

SEQ ID NO: 2446289 - RNA, 19 nt, Artificial Sequence
  Description of Artificial Sequence: Synthetic oligonucleotide
cugcaaggaaugccgccuu

SEQ ID NO: 2446290 - RNA, 19 nt, Artificial Sequence
  Description of Artificial Sequence: Synthetic oligonucleotide
ccaacgacccacacuuaau

SEQ ID NO: 2446291 - RNA, 19 nt, Artificial Sequence
  Description of Artificial Sequence: Synthetic oligonucleotide
cgggucaaauggaagaauu

SEQ ID NO: 2446292 - RNA, 19 nt, Artificial Sequence
  Description of Artificial Sequence: Synthetic oligonucleotide
ccaugcugcuccaacuuuu

SEQ ID NO: 2446293 - RNA, 19 nt, Artificial Sequence
  Description of Artificial Sequence: Synthetic oligonucleotide
ccaggguacuccgauuucu

SEQ ID NO: 2446294 - RNA, 19 nt, Artificial Sequence
  Description of Artificial Sequence: Synthetic oligonucleotide
cacucccgccaugcugcuc

SEQ ID NO: 2446295 - RNA, 19 nt, Artificial Sequence
  Description of Artificial Sequence: Synthetic oligonucleotide
gccgaggaugaacccuucu

SEQ ID NO: 2446296 - RNA, 19 nt, Artificial Sequence
  Description of Artificial Sequence: Synthetic oligonucleotide
ucccgccaugcugcuccaa

SEQ ID NO: 2446297 - RNA, 19 nt, Artificial Sequence
  Description of Artificial Sequence: Synthetic oligonucleotide
cucccgccaugcugcucca

SEQ ID NO: 2446298 - RNA, 19 nt, Artificial Sequence
  Description of Artificial Sequence: Synthetic oligonucleotide
ccgaggaugaacccuucuu

SEQ ID NO: 2446299 - RNA, 19 nt, Artificial Sequence
  Description of Artificial Sequence: Synthetic oligonucleotide
ggaggacauucccgcugua

SEQ ID NO: 2446300 - RNA, 19 nt, Artificial Sequence
  Description of Artificial Sequence: Synthetic oligonucleotide
ggcuuuugcuggcucccuu

SEQ ID NO: 2446301 - RNA, 19 nt, Artificial Sequence
  Description of Artificial Sequence: Synthetic oligonucleotide
cagugcacuuaguccucuu

SEQ ID NO: 2446302 - RNA, 19 nt, Artificial Sequence
  Description of Artificial Sequence: Synthetic oligonucleotide
ggccgaggaugaacccuuc

SEQ ID NO: 2446303 - RNA, 19 nt, Artificial Sequence
  Description of Artificial Sequence: Synthetic oligonucleotide
gcgggucaaauggaagaau

SEQ ID NO: 2446304 - RNA, 19 nt, Artificial Sequence
  Description of Artificial Sequence: Synthetic oligonucleotide
cgcugaacuguagugcugu

SEQ ID NO: 2446305 - RNA, 19 nt, Artificial Sequence
  Description of Artificial Sequence: Synthetic oligonucleotide
cgauuucugcauggcuuca

SEQ ID NO: 2446306 - RNA, 19 nt, Artificial Sequence
  Description of Artificial Sequence: Synthetic oligonucleotide
cgcuguaaucuguguuuua

SEQ ID NO: 2446307 - RNA, 19 nt, Artificial Sequence
  Description of Artificial Sequence: Synthetic oligonucleotide
ccagugcacuuaguccucu

SEQ ID NO: 2446308 - RNA, 19 nt, Artificial Sequence
  Description of Artificial Sequence: Synthetic oligonucleotide
ggccaacgacccacacuua

SEQ ID NO: 2446309 - RNA, 19 nt, Artificial Sequence
  Description of Artificial Sequence: Synthetic oligonucleotide
gcacucccgccaugcugcu

SEQ ID NO: 2446310 - RNA, 19 nt, Artificial Sequence
  Description of Artificial Sequence: Synthetic oligonucleotide
ccgcuguaaucuguguuuu

SEQ ID NO: 2446311 - RNA, 19 nt, Artificial Sequence
  Description of Artificial Sequence: Synthetic oligonucleotide
ugagaguagacaaaggaag

SEQ ID NO: 2446312 - RNA, 19 nt, Artificial Sequence
  Description of Artificial Sequence: Synthetic oligonucleotide
aaccaggacaguuaacugc

SEQ ID NO: 2446313 - RNA, 19 nt, Artificial Sequence
  Description of Artificial Sequence: Synthetic oligonucleotide
aagaguuaaggacaagccg

SEQ ID NO: 2446314 - RNA, 19 nt, Artificial Sequence
  Description of Artificial Sequence: Synthetic oligonucleotide
agugccaagaguuaaggac

SEQ ID NO: 2446315 - RNA, 19 nt, Artificial Sequence
  Description of Artificial Sequence: Synthetic oligonucleotide
aggacaguuaacugcagcc

SEQ ID NO: 2446316 - RNA, 19 nt, Artificial Sequence
  Description of Artificial Sequence: Synthetic oligonucleotide
uuaaggacaagccggcagg

SEQ ID NO: 2446317 - RNA, 19 nt, Artificial Sequence
  Description of Artificial Sequence: Synthetic oligonucleotide
aaguacaggauguuggaca

SEQ ID NO: 2446318 - RNA, 19 nt, Artificial Sequence
  Description of Artificial Sequence: Synthetic oligonucleotide
aaaccugaaggugaggccg

SEQ ID NO: 2446319 - RNA, 19 nt, Artificial Sequence
  Description of Artificial Sequence: Synthetic oligonucleotide
cagaagaugggucaguggg

SEQ ID NO: 2446320 - RNA, 19 nt, Artificial Sequence
  Description of Artificial Sequence: Synthetic oligonucleotide
agaguuaaggacaagccgg

SEQ ID NO: 2446321 - RNA, 19 nt, Artificial Sequence
  Description of Artificial Sequence: Synthetic oligonucleotide
aagaaggcgucugacagcg

SEQ ID NO: 2446322 - RNA, 19 nt, Artificial Sequence
  Description of Artificial Sequence: Synthetic oligonucleotide
ucuccaguugacagaaucg

SEQ ID NO: 2446323 - RNA, 19 nt, Artificial Sequence
  Description of Artificial Sequence: Synthetic oligonucleotide
aguacaggauguuggacac

SEQ ID NO: 2446324 - RNA, 19 nt, Artificial Sequence
  Description of Artificial Sequence: Synthetic oligonucleotide
gacaaguacaggauguugg

SEQ ID NO: 2446325 - RNA, 19 nt, Artificial Sequence
  Description of Artificial Sequence: Synthetic oligonucleotide
guuaacugcagccaagagc

SEQ ID NO: 2446326 - RNA, 19 nt, Artificial Sequence
  Description of Artificial Sequence: Synthetic oligonucleotide
uguggagccagcuucaaac

SEQ ID NO: 2446327 - RNA, 19 nt, Artificial Sequence
  Description of Artificial Sequence: Synthetic oligonucleotide
caagaguuaaggacaagcc

SEQ ID NO: 2446328 - RNA, 19 nt, Artificial Sequence
  Description of Artificial Sequence: Synthetic oligonucleotide
uugagaguagacaaaggaa

SEQ ID NO: 2446329 - RNA, 19 nt, Artificial Sequence
  Description of Artificial Sequence: Synthetic oligonucleotide
acaaaggaaggagauggcc

SEQ ID NO: 2446330 - RNA, 19 nt, Artificial Sequence
  Description of Artificial Sequence: Synthetic oligonucleotide
aucuccaguugacagaauc

SEQ ID NO: 2446331 - RNA, 19 nt, Artificial Sequence
  Description of Artificial Sequence: Synthetic oligonucleotide
ugguuggaaacucgggugg

SEQ ID NO: 2446332 - RNA, 19 nt, Artificial Sequence
  Description of Artificial Sequence: Synthetic oligonucleotide
aaggcaccguuccaugagc

SEQ ID NO: 2446333 - RNA, 19 nt, Artificial Sequence
  Description of Artificial Sequence: Synthetic oligonucleotide
agugaacccaaccaggaca

SEQ ID NO: 2446334 - RNA, 19 nt, Artificial Sequence
  Description of Artificial Sequence: Synthetic oligonucleotide
accucuacucuccuagggc

SEQ ID NO: 2446335 - RNA, 19 nt, Artificial Sequence
  Description of Artificial Sequence: Synthetic oligonucleotide
gagugacaaggccagaaag

SEQ ID NO: 2446336 - RNA, 19 nt, Artificial Sequence
  Description of Artificial Sequence: Synthetic oligonucleotide
uuuuggacaggggacauca

SEQ ID NO: 2446337 - RNA, 19 nt, Artificial Sequence
  Description of Artificial Sequence: Synthetic oligonucleotide
uggacaggggacaucagca

SEQ ID NO: 2446338 - RNA, 19 nt, Artificial Sequence
  Description of Artificial Sequence: Synthetic oligonucleotide
guuaaggacaagccggcag

SEQ ID NO: 2446339 - RNA, 19 nt, Artificial Sequence
  Description of Artificial Sequence: Synthetic oligonucleotide
uaucuccauccccaguugg

SEQ ID NO: 2446340 - RNA, 19 nt, Artificial Sequence
  Description of Artificial Sequence: Synthetic oligonucleotide
aaacucggguggcuauacc

SEQ ID NO: 2446341 - RNA, 19 nt, Artificial Sequence
  Description of Artificial Sequence: Synthetic oligonucleotide
uucugguuggaaacucggg

SEQ ID NO: 2446342 - RNA, 19 nt, Artificial Sequence
  Description of Artificial Sequence: Synthetic oligonucleotide
aagcugguguccuugggcu

SEQ ID NO: 2446343 - RNA, 19 nt, Artificial Sequence
  Description of Artificial Sequence: Synthetic oligonucleotide
uguuggacacagcugggca

SEQ ID NO: 2446344 - RNA, 19 nt, Artificial Sequence
  Description of Artificial Sequence: Synthetic oligonucleotide
ugagcugcgacuccuggcu

SEQ ID NO: 2446345 - RNA, 19 nt, Artificial Sequence
  Description of Artificial Sequence: Synthetic oligonucleotide
cauugagaguagacaaagg

SEQ ID NO: 2446346 - RNA, 19 nt, Artificial Sequence
  Description of Artificial Sequence: Synthetic oligonucleotide
aaucgguucugguuggaaa

SEQ ID NO: 2446347 - RNA, 19 nt, Artificial Sequence
  Description of Artificial Sequence: Synthetic oligonucleotide
cuggaucuccaguugacag

SEQ ID NO: 2446348 - RNA, 19 nt, Artificial Sequence
  Description of Artificial Sequence: Synthetic oligonucleotide
gaaggcgucugacagcgug

SEQ ID NO: 2446349 - RNA, 19 nt, Artificial Sequence
  Description of Artificial Sequence: Synthetic oligonucleotide
aguggggugucccucaugu

SEQ ID NO: 2446350 - RNA, 19 nt, Artificial Sequence
  Description of Artificial Sequence: Synthetic oligonucleotide
cucuagaaggcaccguucc

SEQ ID NO: 2446351 - RNA, 19 nt, Artificial Sequence
  Description of Artificial Sequence: Synthetic oligonucleotide
augagcugcgacuccuggc

SEQ ID NO: 2446352 - RNA, 19 nt, Artificial Sequence
  Description of Artificial Sequence: Synthetic oligonucleotide
gaaggcaccguuccaugag

SEQ ID NO: 2446353 - RNA, 19 nt, Artificial Sequence
  Description of Artificial Sequence: Synthetic oligonucleotide
aaagggacaugugccauca

SEQ ID NO: 2446354 - RNA, 19 nt, Artificial Sequence
  Description of Artificial Sequence: Synthetic oligonucleotide
agaaagcugguguccuugg

SEQ ID NO: 2446355 - RNA, 19 nt, Artificial Sequence
  Description of Artificial Sequence: Synthetic oligonucleotide
uugacagaaucgguucugg

SEQ ID NO: 2446356 - RNA, 19 nt, Artificial Sequence
  Description of Artificial Sequence: Synthetic oligonucleotide
uggaaagggacaugugcca

SEQ ID NO: 2446357 - RNA, 19 nt, Artificial Sequence
  Description of Artificial Sequence: Synthetic oligonucleotide
cugguuggaaacucgggug

SEQ ID NO: 2446358 - RNA, 19 nt, Artificial Sequence
  Description of Artificial Sequence: Synthetic oligonucleotide
ugggcacacaccauugaga

SEQ ID NO: 2446359 - RNA, 19 nt, Artificial Sequence
  Description of Artificial Sequence: Synthetic oligonucleotide
cuccaguugacagaaucgg

SEQ ID NO: 2446360 - RNA, 19 nt, Artificial Sequence
  Description of Artificial Sequence: Synthetic oligonucleotide
ucuccuagggcgugggcag

SEQ ID NO: 2446361 - RNA, 19 nt, Artificial Sequence
  Description of Artificial Sequence: Synthetic oligonucleotide
gugccaucaguccagggcc

SEQ ID NO: 2446362 - RNA, 19 nt, Artificial Sequence
  Description of Artificial Sequence: Synthetic oligonucleotide
caaaccugaaggugaggcc

SEQ ID NO: 2446363 - RNA, 19 nt, Artificial Sequence
  Description of Artificial Sequence: Synthetic oligonucleotide
aguuaacugcagccaagag

SEQ ID NO: 2446364 - RNA, 19 nt, Artificial Sequence
  Description of Artificial Sequence: Synthetic oligonucleotide
gacaugugccaucagucca

SEQ ID NO: 2446365 - RNA, 19 nt, Artificial Sequence
  Description of Artificial Sequence: Synthetic oligonucleotide
aggacagcaccuaccaggc

SEQ ID NO: 2446366 - RNA, 19 nt, Artificial Sequence
  Description of Artificial Sequence: Synthetic oligonucleotide
ucuguaucuccauccccag

SEQ ID NO: 2446367 - RNA, 19 nt, Artificial Sequence
  Description of Artificial Sequence: Synthetic oligonucleotide
ugucccucaugucaccgug

SEQ ID NO: 2446368 - RNA, 19 nt, Artificial Sequence
  Description of Artificial Sequence: Synthetic oligonucleotide
ucuagaaggcaccguucca

SEQ ID NO: 2446369 - RNA, 19 nt, Artificial Sequence
  Description of Artificial Sequence: Synthetic oligonucleotide
aguugacagaaucgguucu

SEQ ID NO: 2446370 - RNA, 19 nt, Artificial Sequence
  Description of Artificial Sequence: Synthetic oligonucleotide
ugugaggcuggauccucgg

SEQ ID NO: 2446371 - RNA, 19 nt, Artificial Sequence
  Description of Artificial Sequence: Synthetic oligonucleotide
cuaccaggcaccucuacuc

SEQ ID NO: 2446372 - RNA, 19 nt, Artificial Sequence
  Description of Artificial Sequence: Synthetic oligonucleotide
caagagcauggaaagggac

SEQ ID NO: 2446373 - RNA, 19 nt, Artificial Sequence
  Description of Artificial Sequence: Synthetic oligonucleotide
aguagacaaaggaaggaga

SEQ ID NO: 2446374 - RNA, 19 nt, Artificial Sequence
  Description of Artificial Sequence: Synthetic oligonucleotide
aucaguccagggccgaguc

SEQ ID NO: 2446375 - RNA, 19 nt, Artificial Sequence
  Description of Artificial Sequence: Synthetic oligonucleotide
uggaucuccaguugacaga

SEQ ID NO: 2446376 - RNA, 19 nt, Artificial Sequence
  Description of Artificial Sequence: Synthetic oligonucleotide
uccaguugacagaaucggu

SEQ ID NO: 2446377 - RNA, 19 nt, Artificial Sequence
  Description of Artificial Sequence: Synthetic oligonucleotide
caagaaagccuccagccca

SEQ ID NO: 2446378 - RNA, 19 nt, Artificial Sequence
  Description of Artificial Sequence: Synthetic oligonucleotide
caguugacagaaucgguuc

SEQ ID NO: 2446379 - RNA, 19 nt, Artificial Sequence
  Description of Artificial Sequence: Synthetic oligonucleotide
gggcacacaccauugagag

SEQ ID NO: 2446380 - RNA, 19 nt, Artificial Sequence
  Description of Artificial Sequence: Synthetic oligonucleotide
cacccacugagaauggcag

SEQ ID NO: 2446381 - RNA, 19 nt, Artificial Sequence
  Description of Artificial Sequence: Synthetic oligonucleotide
agaguagacaaaggaagga

SEQ ID NO: 2446382 - RNA, 19 nt, Artificial Sequence
  Description of Artificial Sequence: Synthetic oligonucleotide
agggacaugugccaucagu

SEQ ID NO: 2446383 - RNA, 19 nt, Artificial Sequence
  Description of Artificial Sequence: Synthetic oligonucleotide
acacaggcggcgcuggauc

SEQ ID NO: 2446384 - RNA, 19 nt, Artificial Sequence
  Description of Artificial Sequence: Synthetic oligonucleotide
uagacaaaggaaggagaug

SEQ ID NO: 2446385 - RNA, 19 nt, Artificial Sequence
  Description of Artificial Sequence: Synthetic oligonucleotide
aagccuccagcccaaacua

SEQ ID NO: 2446386 - RNA, 19 nt, Artificial Sequence
  Description of Artificial Sequence: Synthetic oligonucleotide
aggccagaaagcugguguc

SEQ ID NO: 2446387 - RNA, 19 nt, Artificial Sequence
  Description of Artificial Sequence: Synthetic oligonucleotide
guucugguuggaaacucgg

SEQ ID NO: 2446388 - RNA, 19 nt, Artificial Sequence
  Description of Artificial Sequence: Synthetic oligonucleotide
ucugacagcgugugacgcc

SEQ ID NO: 2446389 - RNA, 19 nt, Artificial Sequence
  Description of Artificial Sequence: Synthetic oligonucleotide
uuggcucuagaaggcaccg

SEQ ID NO: 2446390 - RNA, 19 nt, Artificial Sequence
  Description of Artificial Sequence: Synthetic oligonucleotide
uggagccagcuucaaaccu

SEQ ID NO: 2446391 - RNA, 19 nt, Artificial Sequence
  Description of Artificial Sequence: Synthetic oligonucleotide
acucaggacagcaccuacc

SEQ ID NO: 2446392 - RNA, 19 nt, Artificial Sequence
  Description of Artificial Sequence: Synthetic oligonucleotide
gauguuggacacagcuggg

SEQ ID NO: 2446393 - RNA, 19 nt, Artificial Sequence
  Description of Artificial Sequence: Synthetic oligonucleotide
accccuacugggcacuggg

SEQ ID NO: 2446394 - RNA, 19 nt, Artificial Sequence
  Description of Artificial Sequence: Synthetic oligonucleotide
uagaaggcaccguuccaug

SEQ ID NO: 2446395 - RNA, 19 nt, Artificial Sequence
  Description of Artificial Sequence: Synthetic oligonucleotide
ggcaccucuacucuccuag

SEQ ID NO: 2446396 - RNA, 19 nt, Artificial Sequence
  Description of Artificial Sequence: Synthetic oligonucleotide
acagcgugugacgccaagc

SEQ ID NO: 2446397 - RNA, 19 nt, Artificial Sequence
  Description of Artificial Sequence: Synthetic oligonucleotide
agcuucaaaccugaaggug

SEQ ID NO: 2446398 - RNA, 19 nt, Artificial Sequence
  Description of Artificial Sequence: Synthetic oligonucleotide
agaauggcaggcucuguau

SEQ ID NO: 2446399 - RNA, 19 nt, Artificial Sequence
  Description of Artificial Sequence: Synthetic oligonucleotide
caccauugagaguagacaa

SEQ ID NO: 2446400 - RNA, 19 nt, Artificial Sequence
  Description of Artificial Sequence: Synthetic oligonucleotide
ggucugggcagacacaggc

SEQ ID NO: 2446401 - RNA, 19 nt, Artificial Sequence
  Description of Artificial Sequence: Synthetic oligonucleotide
ccaagaguuaaggacaagc

SEQ ID NO: 2446402 - RNA, 19 nt, Artificial Sequence
  Description of Artificial Sequence: Synthetic oligonucleotide
caugucaccgugucccuug

SEQ ID NO: 2446403 - RNA, 19 nt, Artificial Sequence
  Description of Artificial Sequence: Synthetic oligonucleotide
gugacgccaagccaccucc

SEQ ID NO: 2446404 - RNA, 19 nt, Artificial Sequence
  Description of Artificial Sequence: Synthetic oligonucleotide
cagcgugugacgccaagcc

SEQ ID NO: 2446405 - RNA, 19 nt, Artificial Sequence
  Description of Artificial Sequence: Synthetic oligonucleotide
caccucuacucuccuaggg

SEQ ID NO: 2446406 - RNA, 19 nt, Artificial Sequence
  Description of Artificial Sequence: Synthetic oligonucleotide
agccguacauccucagcag

SEQ ID NO: 2446407 - RNA, 19 nt, Artificial Sequence
  Description of Artificial Sequence: Synthetic oligonucleotide
gaaagggacaugugccauc

SEQ ID NO: 2446408 - RNA, 19 nt, Artificial Sequence
  Description of Artificial Sequence: Synthetic oligonucleotide
cugggcacacaccauugag

SEQ ID NO: 2446409 - RNA, 19 nt, Artificial Sequence
  Description of Artificial Sequence: Synthetic oligonucleotide
ccucuacucuccuagggcg

SEQ ID NO: 2446410 - RNA, 19 nt, Artificial Sequence
  Description of Artificial Sequence: Synthetic oligonucleotide
gcugugugaggcuggaucc

SEQ ID NO: 2446411 - RNA, 19 nt, Artificial Sequence
  Description of Artificial Sequence: Synthetic oligonucleotide
accaggacaguuaacugca

SEQ ID NO: 2446412 - RNA, 19 nt, Artificial Sequence
  Description of Artificial Sequence: Synthetic oligonucleotide
agagcauggaaagggacau

SEQ ID NO: 2446413 - RNA, 19 nt, Artificial Sequence
  Description of Artificial Sequence: Synthetic oligonucleotide
agaaggcaccguuccauga

SEQ ID NO: 2446414 - RNA, 19 nt, Artificial Sequence
  Description of Artificial Sequence: Synthetic oligonucleotide
uaccaggcaccucuacucu

SEQ ID NO: 2446415 - RNA, 19 nt, Artificial Sequence
  Description of Artificial Sequence: Synthetic oligonucleotide
ugggcagccguacauccuc

SEQ ID NO: 2446416 - RNA, 19 nt, Artificial Sequence
  Description of Artificial Sequence: Synthetic oligonucleotide
gguggcuauacccagccca

SEQ ID NO: 2446417 - RNA, 19 nt, Artificial Sequence
  Description of Artificial Sequence: Synthetic oligonucleotide
gacaaaggaaggagauggc

SEQ ID NO: 2446418 - RNA, 19 nt, Artificial Sequence
  Description of Artificial Sequence: Synthetic oligonucleotide
guggagccagcuucaaacc

SEQ ID NO: 2446419 - RNA, 19 nt, Artificial Sequence
  Description of Artificial Sequence: Synthetic oligonucleotide
uucaaaccugaaggugagg

SEQ ID NO: 2446420 - RNA, 19 nt, Artificial Sequence
  Description of Artificial Sequence: Synthetic oligonucleotide
guugacagaaucgguucug

SEQ ID NO: 2446421 - RNA, 19 nt, Artificial Sequence
  Description of Artificial Sequence: Synthetic oligonucleotide
accaggcaccucuacucuc

SEQ ID NO: 2446422 - RNA, 19 nt, Artificial Sequence
  Description of Artificial Sequence: Synthetic oligonucleotide
ugugacgccaagccaccuc

SEQ ID NO: 2446423 - RNA, 19 nt, Artificial Sequence
  Description of Artificial Sequence: Synthetic oligonucleotide
acaguuaacugcagccaag

SEQ ID NO: 2446424 - RNA, 19 nt, Artificial Sequence
  Description of Artificial Sequence: Synthetic oligonucleotide
aggugaggccgcugaggcc

SEQ ID NO: 2446425 - RNA, 19 nt, Artificial Sequence
  Description of Artificial Sequence: Synthetic oligonucleotide
agggacaaguacaggaugu

SEQ ID NO: 2446426 - RNA, 19 nt, Artificial Sequence
  Description of Artificial Sequence: Synthetic oligonucleotide
agaugggucaguggggugu

SEQ ID NO: 2446427 - RNA, 19 nt, Artificial Sequence
  Description of Artificial Sequence: Synthetic oligonucleotide
ccucaugucaccguguccc

SEQ ID NO: 2446428 - RNA, 19 nt, Artificial Sequence
  Description of Artificial Sequence: Synthetic oligonucleotide
caccguuccaugagcugcg

SEQ ID NO: 2446429 - RNA, 19 nt, Artificial Sequence
  Description of Artificial Sequence: Synthetic oligonucleotide
cucaggacagcaccuacca

SEQ ID NO: 2446430 - RNA, 19 nt, Artificial Sequence
  Description of Artificial Sequence: Synthetic oligonucleotide
aucagcagaugcaggagug

SEQ ID NO: 2446431 - RNA, 19 nt, Artificial Sequence
  Description of Artificial Sequence: Synthetic oligonucleotide
cagccguacauccucagca

SEQ ID NO: 2446432 - RNA, 19 nt, Artificial Sequence
  Description of Artificial Sequence: Synthetic oligonucleotide
gacgccaagccaccuccag

SEQ ID NO: 2446433 - RNA, 19 nt, Artificial Sequence
  Description of Artificial Sequence: Synthetic oligonucleotide
gagaauggcaggcucugua

SEQ ID NO: 2446434 - RNA, 19 nt, Artificial Sequence
  Description of Artificial Sequence: Synthetic oligonucleotide
uccccaguuggcucuagaa

SEQ ID NO: 2446435 - RNA, 19 nt, Artificial Sequence
  Description of Artificial Sequence: Synthetic oligonucleotide
acagugaacccaaccagga

SEQ ID NO: 2446436 - RNA, 19 nt, Artificial Sequence
  Description of Artificial Sequence: Synthetic oligonucleotide
guaucuccauccccaguug

SEQ ID NO: 2446437 - RNA, 19 nt, Artificial Sequence
  Description of Artificial Sequence: Synthetic oligonucleotide
ccauugagaguagacaaag

SEQ ID NO: 2446438 - RNA, 19 nt, Artificial Sequence
  Description of Artificial Sequence: Synthetic oligonucleotide
ucuccauccccaguuggcu

SEQ ID NO: 2446439 - RNA, 19 nt, Artificial Sequence
  Description of Artificial Sequence: Synthetic oligonucleotide
gaaacucggguggcuauac

SEQ ID NO: 2446440 - RNA, 19 nt, Artificial Sequence
  Description of Artificial Sequence: Synthetic oligonucleotide
ucuacucuccuagggcgug

SEQ ID NO: 2446441 - RNA, 19 nt, Artificial Sequence
  Description of Artificial Sequence: Synthetic oligonucleotide
accuaccaggcaccucuac

SEQ ID NO: 2446442 - RNA, 19 nt, Artificial Sequence
  Description of Artificial Sequence: Synthetic oligonucleotide
guguccagggacaaguaca

SEQ ID NO: 2446443 - RNA, 19 nt, Artificial Sequence
  Description of Artificial Sequence: Synthetic oligonucleotide
ucccucaugucaccguguc

SEQ ID NO: 2446444 - RNA, 19 nt, Artificial Sequence
  Description of Artificial Sequence: Synthetic oligonucleotide
acugagaauggcaggcucu

SEQ ID NO: 2446445 - RNA, 19 nt, Artificial Sequence
  Description of Artificial Sequence: Synthetic oligonucleotide
ggcuauacccagcccacag

SEQ ID NO: 2446446 - RNA, 19 nt, Artificial Sequence
  Description of Artificial Sequence: Synthetic oligonucleotide
gcuauacccagcccacagg

SEQ ID NO: 2446447 - RNA, 19 nt, Artificial Sequence
  Description of Artificial Sequence: Synthetic oligonucleotide
aggauguuggacacagcug

SEQ ID NO: 2446448 - RNA, 19 nt, Artificial Sequence
  Description of Artificial Sequence: Synthetic oligonucleotide
ucagcagaugcaggaguga

SEQ ID NO: 2446449 - RNA, 19 nt, Artificial Sequence
  Description of Artificial Sequence: Synthetic oligonucleotide
agcgugugacgccaagcca

SEQ ID NO: 2446450 - RNA, 19 nt, Artificial Sequence
  Description of Artificial Sequence: Synthetic oligonucleotide
uccucggcgucacucccug

SEQ ID NO: 2446451 - RNA, 19 nt, Artificial Sequence
  Description of Artificial Sequence: Synthetic oligonucleotide
gguucugguuggaaacucg

SEQ ID NO: 2446452 - RNA, 19 nt, Artificial Sequence
  Description of Artificial Sequence: Synthetic oligonucleotide
ucggguggcuauacccagc

SEQ ID NO: 2446453 - RNA, 19 nt, Artificial Sequence
  Description of Artificial Sequence: Synthetic oligonucleotide
caccgugucccuuguggag

SEQ ID NO: 2446454 - RNA, 19 nt, Artificial Sequence
  Description of Artificial Sequence: Synthetic oligonucleotide
ugucccuuguggagccagc

SEQ ID NO: 2446455 - RNA, 19 nt, Artificial Sequence
  Description of Artificial Sequence: Synthetic oligonucleotide
ucgguucugguuggaaacu

SEQ ID NO: 2446456 - RNA, 19 nt, Artificial Sequence
  Description of Artificial Sequence: Synthetic oligonucleotide
ccaguuggcucuagaaggc

SEQ ID NO: 2446457 - RNA, 19 nt, Artificial Sequence
  Description of Artificial Sequence: Synthetic oligonucleotide
cagugaacccaaccaggac

SEQ ID NO: 2446458 - RNA, 19 nt, Artificial Sequence
  Description of Artificial Sequence: Synthetic oligonucleotide
cuugggcugugugaggcug

SEQ ID NO: 2446459 - RNA, 19 nt, Artificial Sequence
  Description of Artificial Sequence: Synthetic oligonucleotide
acccaaccaggacaguuaa

SEQ ID NO: 2446460 - RNA, 19 nt, Artificial Sequence
  Description of Artificial Sequence: Synthetic oligonucleotide
augugccaucaguccaggg

SEQ ID NO: 2446461 - RNA, 19 nt, Artificial Sequence
  Description of Artificial Sequence: Synthetic oligonucleotide
gucugacagcgugugacgc

SEQ ID NO: 2446462 - RNA, 19 nt, Artificial Sequence
  Description of Artificial Sequence: Synthetic oligonucleotide
aggagugacaaggccagaa

SEQ ID NO: 2446463 - RNA, 19 nt, Artificial Sequence
  Description of Artificial Sequence: Synthetic oligonucleotide
guagacaaaggaaggagau

SEQ ID NO: 2446464 - RNA, 19 nt, Artificial Sequence
  Description of Artificial Sequence: Synthetic oligonucleotide
cuauacccagcccacaggu

SEQ ID NO: 2446465 - RNA, 19 nt, Artificial Sequence
  Description of Artificial Sequence: Synthetic oligonucleotide
gucugggcagacacaggcg

SEQ ID NO: 2446466 - RNA, 19 nt, Artificial Sequence
  Description of Artificial Sequence: Synthetic oligonucleotide
ggacaagccggcaggagcc

SEQ ID NO: 2446467 - RNA, 19 nt, Artificial Sequence
  Description of Artificial Sequence: Synthetic oligonucleotide
cagcagaugcaggagugac

SEQ ID NO: 2446468 - RNA, 19 nt, Artificial Sequence
  Description of Artificial Sequence: Synthetic oligonucleotide
guacauccucagcagccac

SEQ ID NO: 2446469 - RNA, 19 nt, Artificial Sequence
  Description of Artificial Sequence: Synthetic oligonucleotide
ccagaagaugggucagugg

SEQ ID NO: 2446470 - RNA, 19 nt, Artificial Sequence
  Description of Artificial Sequence: Synthetic oligonucleotide
ggacaaguacaggauguug

SEQ ID NO: 2446471 - RNA, 19 nt, Artificial Sequence
  Description of Artificial Sequence: Synthetic oligonucleotide
ugugugaggcuggauccuc

SEQ ID NO: 2446472 - RNA, 19 nt, Artificial Sequence
  Description of Artificial Sequence: Synthetic oligonucleotide
cacacaccauugagaguag

SEQ ID NO: 2446473 - RNA, 19 nt, Artificial Sequence
  Description of Artificial Sequence: Synthetic oligonucleotide
caugugccaucaguccagg

SEQ ID NO: 2446474 - RNA, 19 nt, Artificial Sequence
  Description of Artificial Sequence: Synthetic oligonucleotide
ggauccucggcgucacucc

SEQ ID NO: 2446475 - RNA, 19 nt, Artificial Sequence
  Description of Artificial Sequence: Synthetic oligonucleotide
agggacacccacugagaau

SEQ ID NO: 2446476 - RNA, 19 nt, Artificial Sequence
  Description of Artificial Sequence: Synthetic oligonucleotide
agcugguguccuugggcug

SEQ ID NO: 2446477 - RNA, 19 nt, Artificial Sequence
  Description of Artificial Sequence: Synthetic oligonucleotide
ucccagcaagaaagccucc

SEQ ID NO: 2446478 - RNA, 19 nt, Artificial Sequence
  Description of Artificial Sequence: Synthetic oligonucleotide
cccagggacacccacugag

SEQ ID NO: 2446479 - RNA, 19 nt, Artificial Sequence
  Description of Artificial Sequence: Synthetic oligonucleotide
gugugaggcuggauccucg

SEQ ID NO: 2446480 - RNA, 19 nt, Artificial Sequence
  Description of Artificial Sequence: Synthetic oligonucleotide
accauugagaguagacaaa

SEQ ID NO: 2446481 - RNA, 19 nt, Artificial Sequence
  Description of Artificial Sequence: Synthetic oligonucleotide
acucggguggcuauaccca

SEQ ID NO: 2446482 - RNA, 19 nt, Artificial Sequence
  Description of Artificial Sequence: Synthetic oligonucleotide
cccgacucaggacagcacc

SEQ ID NO: 2446483 - RNA, 19 nt, Artificial Sequence
  Description of Artificial Sequence: Synthetic oligonucleotide
cuagggcgugggcaguccc

SEQ ID NO: 2446484 - RNA, 19 nt, Artificial Sequence
  Description of Artificial Sequence: Synthetic oligonucleotide
caguuaacugcagccaaga

SEQ ID NO: 2446485 - RNA, 19 nt, Artificial Sequence
  Description of Artificial Sequence: Synthetic oligonucleotide
cccacugagaauggcaggc

SEQ ID NO: 2446486 - RNA, 19 nt, Artificial Sequence
  Description of Artificial Sequence: Synthetic oligonucleotide
gcaccguuccaugagcugc

SEQ ID NO: 2446487 - RNA, 19 nt, Artificial Sequence
  Description of Artificial Sequence: Synthetic oligonucleotide
ugagaauggcaggcucugu

SEQ ID NO: 2446488 - RNA, 19 nt, Artificial Sequence
  Description of Artificial Sequence: Synthetic oligonucleotide
ggugucccucaugucaccg

SEQ ID NO: 2446489 - RNA, 19 nt, Artificial Sequence
  Description of Artificial Sequence: Synthetic oligonucleotide
ugucaccgugucccuugug

SEQ ID NO: 2446490 - RNA, 19 nt, Artificial Sequence
  Description of Artificial Sequence: Synthetic oligonucleotide
cucccuggucacacacccg

SEQ ID NO: 2446491 - RNA, 19 nt, Artificial Sequence
  Description of Artificial Sequence: Synthetic oligonucleotide
gcucuguaucuccaucccc

SEQ ID NO: 2446492 - RNA, 19 nt, Artificial Sequence
  Description of Artificial Sequence: Synthetic oligonucleotide
cagugccaagaguuaagga

SEQ ID NO: 2446493 - RNA, 19 nt, Artificial Sequence
  Description of Artificial Sequence: Synthetic oligonucleotide
agccuccagcccaaacuac

SEQ ID NO: 2446494 - RNA, 19 nt, Artificial Sequence
  Description of Artificial Sequence: Synthetic oligonucleotide
gucaguggggugucccuca

SEQ ID NO: 2446495 - RNA, 19 nt, Artificial Sequence
  Description of Artificial Sequence: Synthetic oligonucleotide
cucuccuagggcgugggca

SEQ ID NO: 2446496 - RNA, 19 nt, Artificial Sequence
  Description of Artificial Sequence: Synthetic oligonucleotide
ggacaguuaacugcagcca

SEQ ID NO: 2446497 - RNA, 19 nt, Artificial Sequence
  Description of Artificial Sequence: Synthetic oligonucleotide
ucggcgucacucccugguc

SEQ ID NO: 2446498 - RNA, 19 nt, Artificial Sequence
  Description of Artificial Sequence: Synthetic oligonucleotide
cugacagcgugugacgcca

SEQ ID NO: 2446499 - RNA, 19 nt, Artificial Sequence
  Description of Artificial Sequence: Synthetic oligonucleotide
ccuacugggcacuggggug

SEQ ID NO: 2446500 - RNA, 19 nt, Artificial Sequence
  Description of Artificial Sequence: Synthetic oligonucleotide
ccaagccaccuccagugcc

SEQ ID NO: 2446501 - RNA, 19 nt, Artificial Sequence
  Description of Artificial Sequence: Synthetic oligonucleotide
ucccuuguggagccagcuu

SEQ ID NO: 2446502 - RNA, 19 nt, Artificial Sequence
  Description of Artificial Sequence: Synthetic oligonucleotide
gccggcaggagccucucag

SEQ ID NO: 2446503 - RNA, 19 nt, Artificial Sequence
  Description of Artificial Sequence: Synthetic oligonucleotide
aagccggcaggagccucuc

SEQ ID NO: 2446504 - RNA, 19 nt, Artificial Sequence
  Description of Artificial Sequence: Synthetic oligonucleotide
gaaucgguucugguuggaa

SEQ ID NO: 2446505 - RNA, 19 nt, Artificial Sequence
  Description of Artificial Sequence: Synthetic oligonucleotide
acaagccggcaggagccuc

SEQ ID NO: 2446506 - RNA, 19 nt, Artificial Sequence
  Description of Artificial Sequence: Synthetic oligonucleotide
gcaccucuacucuccuagg

SEQ ID NO: 2446507 - RNA, 19 nt, Artificial Sequence
  Description of Artificial Sequence: Synthetic oligonucleotide
gcgucugacagcgugugac

SEQ ID NO: 2446508 - RNA, 19 nt, Artificial Sequence
  Description of Artificial Sequence: Synthetic oligonucleotide
gcgugugacgccaagccac

SEQ ID NO: 2446509 - RNA, 19 nt, Artificial Sequence
  Description of Artificial Sequence: Synthetic oligonucleotide
gucacacacccgacucagg

SEQ ID NO: 2446510 - RNA, 19 nt, Artificial Sequence
  Description of Artificial Sequence: Synthetic oligonucleotide
aggcgucugacagcgugug

SEQ ID NO: 2446511 - RNA, 19 nt, Artificial Sequence
  Description of Artificial Sequence: Synthetic oligonucleotide
gcaccuaccaggcaccucu

SEQ ID NO: 2446512 - RNA, 19 nt, Artificial Sequence
  Description of Artificial Sequence: Synthetic oligonucleotide
cacuggggugguguccagg

SEQ ID NO: 2446513 - RNA, 19 nt, Artificial Sequence
  Description of Artificial Sequence: Synthetic oligonucleotide
agcaccuaccaggcaccuc

SEQ ID NO: 2446514 - RNA, 19 nt, Artificial Sequence
  Description of Artificial Sequence: Synthetic oligonucleotide
uggcuauacccagcccaca

SEQ ID NO: 2446515 - RNA, 19 nt, Artificial Sequence
  Description of Artificial Sequence: Synthetic oligonucleotide
acccgacucaggacagcac

SEQ ID NO: 2446516 - RNA, 19 nt, Artificial Sequence
  Description of Artificial Sequence: Synthetic oligonucleotide
agaaucgguucugguugga

SEQ ID NO: 2446517 - RNA, 19 nt, Artificial Sequence
  Description of Artificial Sequence: Synthetic oligonucleotide
aggccaccaagaaggcguc

SEQ ID NO: 2446518 - RNA, 19 nt, Artificial Sequence
  Description of Artificial Sequence: Synthetic oligonucleotide
ccaagagcauggaaaggga

SEQ ID NO: 2446519 - RNA, 19 nt, Artificial Sequence
  Description of Artificial Sequence: Synthetic oligonucleotide
cuagaaggcaccguuccau

SEQ ID NO: 2446520 - RNA, 19 nt, Artificial Sequence
  Description of Artificial Sequence: Synthetic oligonucleotide
ccgagucccagggacaccc

SEQ ID NO: 2446521 - RNA, 19 nt, Artificial Sequence
  Description of Artificial Sequence: Synthetic oligonucleotide
ugaacccaaccaggacagu

SEQ ID NO: 2446522 - RNA, 19 nt, Artificial Sequence
  Description of Artificial Sequence: Synthetic oligonucleotide
caggggacaucagcagaug

SEQ ID NO: 2446523 - RNA, 19 nt, Artificial Sequence
  Description of Artificial Sequence: Synthetic oligonucleotide
ggccgcugaggccaccaag

SEQ ID NO: 2446524 - RNA, 19 nt, Artificial Sequence
  Description of Artificial Sequence: Synthetic oligonucleotide
ucaugucaccgugucccuu

SEQ ID NO: 2446525 - RNA, 19 nt, Artificial Sequence
  Description of Artificial Sequence: Synthetic oligonucleotide
ugacagcgugugacgccaa

SEQ ID NO: 2446526 - RNA, 19 nt, Artificial Sequence
  Description of Artificial Sequence: Synthetic oligonucleotide
uggcucuagaaggcaccgu

SEQ ID NO: 2446527 - RNA, 19 nt, Artificial Sequence
  Description of Artificial Sequence: Synthetic oligonucleotide
ggcgucacucccuggucac

SEQ ID NO: 2446528 - RNA, 19 nt, Artificial Sequence
  Description of Artificial Sequence: Synthetic oligonucleotide
gucacucccuggucacaca

SEQ ID NO: 2446529 - RNA, 19 nt, Artificial Sequence
  Description of Artificial Sequence: Synthetic oligonucleotide
cagccacagccauccaaca

SEQ ID NO: 2446530 - RNA, 19 nt, Artificial Sequence
  Description of Artificial Sequence: Synthetic oligonucleotide
ggacacccacugagaaugg

SEQ ID NO: 2446531 - RNA, 19 nt, Artificial Sequence
  Description of Artificial Sequence: Synthetic oligonucleotide
cacccgacucaggacagca

SEQ ID NO: 2446532 - RNA, 19 nt, Artificial Sequence
  Description of Artificial Sequence: Synthetic oligonucleotide
cucuacucuccuagggcgu

SEQ ID NO: 2446533 - RNA, 19 nt, Artificial Sequence
  Description of Artificial Sequence: Synthetic oligonucleotide
caguuggcucuagaaggca

SEQ ID NO: 2446534 - RNA, 19 nt, Artificial Sequence
  Description of Artificial Sequence: Synthetic oligonucleotide
cgugugacgccaagccacc

SEQ ID NO: 2446535 - RNA, 19 nt, Artificial Sequence
  Description of Artificial Sequence: Synthetic oligonucleotide
caguggggugucccucaug

SEQ ID NO: 2446536 - RNA, 19 nt, Artificial Sequence
  Description of Artificial Sequence: Synthetic oligonucleotide
gcuggaucuccaguugaca

SEQ ID NO: 2446537 - RNA, 19 nt, Artificial Sequence
  Description of Artificial Sequence: Synthetic oligonucleotide
cucggcgucacucccuggu

SEQ ID NO: 2446538 - RNA, 19 nt, Artificial Sequence
  Description of Artificial Sequence: Synthetic oligonucleotide
ccgugucccuuguggagcc

SEQ ID NO: 2446539 - RNA, 19 nt, Artificial Sequence
  Description of Artificial Sequence: Synthetic oligonucleotide
gaggccgcugaggccacca

SEQ ID NO: 2446540 - RNA, 19 nt, Artificial Sequence
  Description of Artificial Sequence: Synthetic oligonucleotide
gcucuagaaggcaccguuc

SEQ ID NO: 2446541 - RNA, 19 nt, Artificial Sequence
  Description of Artificial Sequence: Synthetic oligonucleotide
gcugggcacacaccauuga

SEQ ID NO: 2446542 - RNA, 19 nt, Artificial Sequence
  Description of Artificial Sequence: Synthetic oligonucleotide
ggcucuagaaggcaccguu

SEQ ID NO: 2446543 - RNA, 19 nt, Artificial Sequence
  Description of Artificial Sequence: Synthetic oligonucleotide
gccgcugaggccaccaaga

SEQ ID NO: 2446544 - RNA, 19 nt, Artificial Sequence
  Description of Artificial Sequence: Synthetic oligonucleotide
ccaguugacagaaucgguu

SEQ ID NO: 2446545 - RNA, 19 nt, Artificial Sequence
  Description of Artificial Sequence: Synthetic oligonucleotide
caccccuacugggcacugg

SEQ ID NO: 2446546 - RNA, 19 nt, Artificial Sequence
  Description of Artificial Sequence: Synthetic oligonucleotide
ccccuacugggcacugggg

SEQ ID NO: 2446547 - RNA, 19 nt, Artificial Sequence
  Description of Artificial Sequence: Synthetic oligonucleotide
cccucccagcaagaaagcc

SEQ ID NO: 2446548 - RNA, 19 nt, Artificial Sequence
  Description of Artificial Sequence: Synthetic oligonucleotide
ggguggcuauacccagccc

SEQ ID NO: 2446549 - RNA, 19 nt, Artificial Sequence
  Description of Artificial Sequence: Synthetic oligonucleotide
ccaugagcugcgacuccug

SEQ ID NO: 2446550 - RNA, 19 nt, Artificial Sequence
  Description of Artificial Sequence: Synthetic oligonucleotide
gccaagaguuaaggacaag

SEQ ID NO: 2446551 - RNA, 19 nt, Artificial Sequence
  Description of Artificial Sequence: Synthetic oligonucleotide
gucccagcugggcagccgu

SEQ ID NO: 2446552 - RNA, 19 nt, Artificial Sequence
  Description of Artificial Sequence: Synthetic oligonucleotide
gugucccucaugucaccgu

SEQ ID NO: 2446553 - RNA, 19 nt, Artificial Sequence
  Description of Artificial Sequence: Synthetic oligonucleotide
cucaugucaccgugucccu

SEQ ID NO: 2446554 - RNA, 19 nt, Artificial Sequence
  Description of Artificial Sequence: Synthetic oligonucleotide
caagccggcaggagccucu

SEQ ID NO: 2446555 - RNA, 19 nt, Artificial Sequence
  Description of Artificial Sequence: Synthetic oligonucleotide
gcucccucccagcaagaaa

SEQ ID NO: 2446556 - RNA, 19 nt, Artificial Sequence
  Description of Artificial Sequence: Synthetic oligonucleotide
aggagccucucagcucccu

SEQ ID NO: 2446557 - RNA, 19 nt, Artificial Sequence
  Description of Artificial Sequence: Synthetic oligonucleotide
cuuguggagccagcuucaa

SEQ ID NO: 2446558 - RNA, 19 nt, Artificial Sequence
  Description of Artificial Sequence: Synthetic oligonucleotide
accguuccaugagcugcga

SEQ ID NO: 2446559 - RNA, 19 nt, Artificial Sequence
  Description of Artificial Sequence: Synthetic oligonucleotide
cguuccaugagcugcgacu

SEQ ID NO: 2446560 - RNA, 19 nt, Artificial Sequence
  Description of Artificial Sequence: Synthetic oligonucleotide
cugguguccuugggcugug

SEQ ID NO: 2446561 - RNA, 19 nt, Artificial Sequence
  Description of Artificial Sequence: Synthetic oligonucleotide
gcgugggcagucccagcug

SEQ ID NO: 2446562 - RNA, 19 nt, Artificial Sequence
  Description of Artificial Sequence: Synthetic oligonucleotide
gcuggauccucggcgucac

SEQ ID NO: 2446563 - RNA, 19 nt, Artificial Sequence
  Description of Artificial Sequence: Synthetic oligonucleotide
ggaaagggacaugugccau

SEQ ID NO: 2446564 - RNA, 19 nt, Artificial Sequence
  Description of Artificial Sequence: Synthetic oligonucleotide
aguccagggccgaguccca

SEQ ID NO: 2446565 - RNA, 19 nt, Artificial Sequence
  Description of Artificial Sequence: Synthetic oligonucleotide
gucccuuguggagccagcu

SEQ ID NO: 2446566 - RNA, 19 nt, Artificial Sequence
  Description of Artificial Sequence: Synthetic oligonucleotide
aggccgcugaggccaccaa

SEQ ID NO: 2446567 - RNA, 19 nt, Artificial Sequence
  Description of Artificial Sequence: Synthetic oligonucleotide
gcagucccagcugggcagc

SEQ ID NO: 2446568 - RNA, 19 nt, Artificial Sequence
  Description of Artificial Sequence: Synthetic oligonucleotide
gacaagccggcaggagccu

SEQ ID NO: 2446569 - RNA, 19 nt, Artificial Sequence
  Description of Artificial Sequence: Synthetic oligonucleotide
caucaguccagggccgagu

SEQ ID NO: 2446570 - RNA, 19 nt, Artificial Sequence
  Description of Artificial Sequence: Synthetic oligonucleotide
cagcucccucccagcaaga

SEQ ID NO: 2446571 - RNA, 19 nt, Artificial Sequence
  Description of Artificial Sequence: Synthetic oligonucleotide
ccuagggcgugggcagucc

SEQ ID NO: 2446572 - RNA, 19 nt, Artificial Sequence
  Description of Artificial Sequence: Synthetic oligonucleotide
cgucacucccuggucacac

SEQ ID NO: 2446573 - RNA, 19 nt, Artificial Sequence
  Description of Artificial Sequence: Synthetic oligonucleotide
agaaggcgucugacagcgu

SEQ ID NO: 2446574 - RNA, 19 nt, Artificial Sequence
  Description of Artificial Sequence: Synthetic oligonucleotide
ggcacacaccauugagagu

SEQ ID NO: 2446575 - RNA, 19 nt, Artificial Sequence
  Description of Artificial Sequence: Synthetic oligonucleotide
ccagcccacaggugguuga

SEQ ID NO: 2446576 - RNA, 19 nt, Artificial Sequence
  Description of Artificial Sequence: Synthetic oligonucleotide
ccguuccaugagcugcgac

SEQ ID NO: 2446577 - RNA, 19 nt, Artificial Sequence
  Description of Artificial Sequence: Synthetic oligonucleotide
caacaccaggggcaccccu

SEQ ID NO: 2446578 - RNA, 19 nt, Artificial Sequence
  Description of Artificial Sequence: Synthetic oligonucleotide
ggcgucugacagcguguga

SEQ ID NO: 2446579 - RNA, 19 nt, Artificial Sequence
  Description of Artificial Sequence: Synthetic oligonucleotide
ccaucaguccagggccgag

SEQ ID NO: 2446580 - RNA, 19 nt, Artificial Sequence
  Description of Artificial Sequence: Synthetic oligonucleotide
gggcaccccuacugggcac

SEQ ID NO: 2446581 - RNA, 19 nt, Artificial Sequence
  Description of Artificial Sequence: Synthetic oligonucleotide
gcugguguccuugggcugu

SEQ ID NO: 2446582 - RNA, 19 nt, Artificial Sequence
  Description of Artificial Sequence: Synthetic oligonucleotide
cccuacugggcacuggggu

SEQ ID NO: 2446583 - RNA, 19 nt, Artificial Sequence
  Description of Artificial Sequence: Synthetic oligonucleotide
cguacauccucagcagcca

SEQ ID NO: 2446584 - RNA, 19 nt, Artificial Sequence
  Description of Artificial Sequence: Synthetic oligonucleotide
ccuccagugccaagaguua

SEQ ID NO: 2446585 - RNA, 19 nt, Artificial Sequence
  Description of Artificial Sequence: Synthetic oligonucleotide
cccagcugggcagccguac

SEQ ID NO: 2446586 - RNA, 19 nt, Artificial Sequence
  Description of Artificial Sequence: Synthetic oligonucleotide
caccuccagugccaagagu

SEQ ID NO: 2446587 - RNA, 19 nt, Artificial Sequence
  Description of Artificial Sequence: Synthetic oligonucleotide
cagggccgagucccaggga

SEQ ID NO: 2446588 - RNA, 19 nt, Artificial Sequence
  Description of Artificial Sequence: Synthetic oligonucleotide
caccuaccaggcaccucua

SEQ ID NO: 2446589 - RNA, 19 nt, Artificial Sequence
  Description of Artificial Sequence: Synthetic oligonucleotide
gucccucaugucaccgugu

SEQ ID NO: 2446590 - RNA, 19 nt, Artificial Sequence
  Description of Artificial Sequence: Synthetic oligonucleotide
ccucggcgucacucccugg

SEQ ID NO: 2446591 - RNA, 19 nt, Artificial Sequence
  Description of Artificial Sequence: Synthetic oligonucleotide
ccgacucaggacagcaccu

SEQ ID NO: 2446592 - RNA, 19 nt, Artificial Sequence
  Description of Artificial Sequence: Synthetic oligonucleotide
gggacaaguacaggauguu

SEQ ID NO: 2446593 - RNA, 19 nt, Artificial Sequence
  Description of Artificial Sequence: Synthetic oligonucleotide
ggacacagcugggcacaca

SEQ ID NO: 2446594 - RNA, 19 nt, Artificial Sequence
  Description of Artificial Sequence: Synthetic oligonucleotide
gggcagccguacauccuca

SEQ ID NO: 2446595 - RNA, 19 nt, Artificial Sequence
  Description of Artificial Sequence: Synthetic oligonucleotide
gugugacgccaagccaccu

SEQ ID NO: 2446596 - RNA, 19 nt, Artificial Sequence
  Description of Artificial Sequence: Synthetic oligonucleotide
gggugguguccagggacaa

SEQ ID NO: 2446597 - RNA, 19 nt, Artificial Sequence
  Description of Artificial Sequence: Synthetic oligonucleotide
gccgagucccagggacacc

SEQ ID NO: 2446598 - RNA, 19 nt, Artificial Sequence
  Description of Artificial Sequence: Synthetic oligonucleotide
gcaccccuacugggcacug

SEQ ID NO: 2446599 - RNA, 19 nt, Artificial Sequence
  Description of Artificial Sequence: Synthetic oligonucleotide
cggcgucacucccugguca

SEQ ID NO: 2446600 - RNA, 19 nt, Artificial Sequence
  Description of Artificial Sequence: Synthetic oligonucleotide
ggcaccccuacugggcacu

SEQ ID NO: 2446601 - RNA, 19 nt, Artificial Sequence
  Description of Artificial Sequence: Synthetic oligonucleotide
cugcgacuccuggcugcca

SEQ ID NO: 2446602 - RNA, 19 nt, Artificial Sequence
  Description of Artificial Sequence: Synthetic oligonucleotide
caccaggggcaccccuacu

SEQ ID NO: 2446603 - RNA, 19 nt, Artificial Sequence
  Description of Artificial Sequence: Synthetic oligonucleotide
gcgucacucccuggucaca

SEQ ID NO: 2446604 - RNA, 19 nt, Artificial Sequence
  Description of Artificial Sequence: Synthetic oligonucleotide
ccacugagaauggcaggcu

SEQ ID NO: 2446605 - RNA, 19 nt, Artificial Sequence
  Description of Artificial Sequence: Synthetic oligonucleotide
ggccccaggcugugcuaau

SEQ ID NO: 2446606 - RNA, 19 nt, Artificial Sequence
  Description of Artificial Sequence: Synthetic oligonucleotide
ccuggcugccaggcagggu

SEQ ID NO: 2446607 - RNA, 19 nt, Artificial Sequence
  Description of Artificial Sequence: Synthetic oligonucleotide
aguuaaaacagauauggcc

SEQ ID NO: 2446608 - RNA, 19 nt, Artificial Sequence
  Description of Artificial Sequence: Synthetic oligonucleotide
ugccuuuucauuccgaagg

SEQ ID NO: 2446609 - RNA, 19 nt, Artificial Sequence
  Description of Artificial Sequence: Synthetic oligonucleotide
uguacuuuccucuuuggag

SEQ ID NO: 2446610 - RNA, 19 nt, Artificial Sequence
  Description of Artificial Sequence: Synthetic oligonucleotide
ugguguaggaaugagaggg

SEQ ID NO: 2446611 - RNA, 19 nt, Artificial Sequence
  Description of Artificial Sequence: Synthetic oligonucleotide
guuaaaacagauauggccc

SEQ ID NO: 2446612 - RNA, 19 nt, Artificial Sequence
  Description of Artificial Sequence: Synthetic oligonucleotide
aggaaacaaggccaggucc

SEQ ID NO: 2446613 - RNA, 19 nt, Artificial Sequence
  Description of Artificial Sequence: Synthetic oligonucleotide
aagggcuugagugaugagc

SEQ ID NO: 2446614 - RNA, 19 nt, Artificial Sequence
  Description of Artificial Sequence: Synthetic oligonucleotide
uugcuuuucucauacuugg

SEQ ID NO: 2446615 - RNA, 19 nt, Artificial Sequence
  Description of Artificial Sequence: Synthetic oligonucleotide
auuccaaagaggcaggcag

SEQ ID NO: 2446616 - RNA, 19 nt, Artificial Sequence
  Description of Artificial Sequence: Synthetic oligonucleotide
cuuuucucauacuuggucc

SEQ ID NO: 2446617 - RNA, 19 nt, Artificial Sequence
  Description of Artificial Sequence: Synthetic oligonucleotide
ucauacuugguccaguuaa

SEQ ID NO: 2446618 - RNA, 19 nt, Artificial Sequence
  Description of Artificial Sequence: Synthetic oligonucleotide
auuccgaagggcuugagug

SEQ ID NO: 2446619 - RNA, 19 nt, Artificial Sequence
  Description of Artificial Sequence: Synthetic oligonucleotide
cugaagagaagauccaagg

SEQ ID NO: 2446620 - RNA, 19 nt, Artificial Sequence
  Description of Artificial Sequence: Synthetic oligonucleotide
uuggacuguaccuccaugg

SEQ ID NO: 2446621 - RNA, 19 nt, Artificial Sequence
  Description of Artificial Sequence: Synthetic oligonucleotide
aaagacugaguggaggagg

SEQ ID NO: 2446622 - RNA, 19 nt, Artificial Sequence
  Description of Artificial Sequence: Synthetic oligonucleotide
aucucgguagccuuggagg

SEQ ID NO: 2446623 - RNA, 19 nt, Artificial Sequence
  Description of Artificial Sequence: Synthetic oligonucleotide
uuaaaacagauauggcccc

SEQ ID NO: 2446624 - RNA, 19 nt, Artificial Sequence
  Description of Artificial Sequence: Synthetic oligonucleotide
aaaagggcaaguucagccu

SEQ ID NO: 2446625 - RNA, 19 nt, Artificial Sequence
  Description of Artificial Sequence: Synthetic oligonucleotide
aguucagccucagagaggg

SEQ ID NO: 2446626 - RNA, 19 nt, Artificial Sequence
  Description of Artificial Sequence: Synthetic oligonucleotide
  modified_base (15)..(15): a, c, u, g, unknown or other
ugaagcaggaugugnaccc

SEQ ID NO: 2446627 - RNA, 19 nt, Artificial Sequence
  Description of Artificial Sequence: Synthetic oligonucleotide
aaacagauauggccccugg

SEQ ID NO: 2446628 - RNA, 19 nt, Artificial Sequence
  Description of Artificial Sequence: Synthetic oligonucleotide
gaagucuuugcuuuucuca

SEQ ID NO: 2446629 - RNA, 19 nt, Artificial Sequence
  Description of Artificial Sequence: Synthetic oligonucleotide
uuucacaccuucccgucgg

SEQ ID NO: 2446630 - RNA, 19 nt, Artificial Sequence
  Description of Artificial Sequence: Synthetic oligonucleotide
caaguucagccucagagag

SEQ ID NO: 2446631 - RNA, 19 nt, Artificial Sequence
  Description of Artificial Sequence: Synthetic oligonucleotide
aagacugaguggaggaggc

SEQ ID NO: 2446632 - RNA, 19 nt, Artificial Sequence
  Description of Artificial Sequence: Synthetic oligonucleotide
  modified_base (7)..(7): a, c, u, g, unknown or other
gaugugnaccccaucucgg

SEQ ID NO: 2446633 - RNA, 19 nt, Artificial Sequence
  Description of Artificial Sequence: Synthetic oligonucleotide
aagagaagauccaaggccu

SEQ ID NO: 2446634 - RNA, 19 nt, Artificial Sequence
  Description of Artificial Sequence: Synthetic oligonucleotide
aaggguccacuccucaagg

SEQ ID NO: 2446635 - RNA, 19 nt, Artificial Sequence
  Description of Artificial Sequence: Synthetic oligonucleotide
uguaggaaugagaggggag

SEQ ID NO: 2446636 - RNA, 19 nt, Artificial Sequence
  Description of Artificial Sequence: Synthetic oligonucleotide
ggcaaguucagccucagag

SEQ ID NO: 2446637 - RNA, 19 nt, Artificial Sequence
  Description of Artificial Sequence: Synthetic oligonucleotide
agucuuuuggacuguaccu

SEQ ID NO: 2446638 - RNA, 19 nt, Artificial Sequence
  Description of Artificial Sequence: Synthetic oligonucleotide
uuuucacaccuucccgucg

SEQ ID NO: 2446639 - RNA, 19 nt, Artificial Sequence
  Description of Artificial Sequence: Synthetic oligonucleotide
caagucugauuccaaagag

SEQ ID NO: 2446640 - RNA, 19 nt, Artificial Sequence
  Description of Artificial Sequence: Synthetic oligonucleotide
ucuuuuggacuguaccucc

SEQ ID NO: 2446641 - RNA, 19 nt, Artificial Sequence
  Description of Artificial Sequence: Synthetic oligonucleotide
uuuucucauacuuggucca

SEQ ID NO: 2446642 - RNA, 19 nt, Artificial Sequence
  Description of Artificial Sequence: Synthetic oligonucleotide
agauccaaggccuccuggg

SEQ ID NO: 2446643 - RNA, 19 nt, Artificial Sequence
  Description of Artificial Sequence: Synthetic oligonucleotide
guaggaaugagaggggagg

SEQ ID NO: 2446644 - RNA, 19 nt, Artificial Sequence
  Description of Artificial Sequence: Synthetic oligonucleotide
aacaaggccaggucccaag

SEQ ID NO: 2446645 - RNA, 19 nt, Artificial Sequence
  Description of Artificial Sequence: Synthetic oligonucleotide
uuccaaagaggcaggcagg

SEQ ID NO: 2446646 - RNA, 19 nt, Artificial Sequence
  Description of Artificial Sequence: Synthetic oligonucleotide
aggcaguaugcacagguuc

SEQ ID NO: 2446647 - RNA, 19 nt, Artificial Sequence
  Description of Artificial Sequence: Synthetic oligonucleotide
gagugaugagcucuguggc

SEQ ID NO: 2446648 - RNA, 19 nt, Artificial Sequence
  Description of Artificial Sequence: Synthetic oligonucleotide
aaagaggcaggcagguugg

SEQ ID NO: 2446649 - RNA, 19 nt, Artificial Sequence
  Description of Artificial Sequence: Synthetic oligonucleotide
cucuuuggaguaagggucg

SEQ ID NO: 2446650 - RNA, 19 nt, Artificial Sequence
  Description of Artificial Sequence: Synthetic oligonucleotide
cagucuuuuggacuguacc

SEQ ID NO: 2446651 - RNA, 19 nt, Artificial Sequence
  Description of Artificial Sequence: Synthetic oligonucleotide
gaaggguccacuccucaag

SEQ ID NO: 2446652 - RNA, 19 nt, Artificial Sequence
  Description of Artificial Sequence: Synthetic oligonucleotide
aaacagacaggcaggacca

SEQ ID NO: 2446653 - RNA, 19 nt, Artificial Sequence
  Description of Artificial Sequence: Synthetic oligonucleotide
gacuguaccuccauggcug

SEQ ID NO: 2446654 - RNA, 19 nt, Artificial Sequence
  Description of Artificial Sequence: Synthetic oligonucleotide
  modified_base (8)..(8): a, c, u, g, unknown or other
ggaugugnaccccaucucg

SEQ ID NO: 2446655 - RNA, 19 nt, Artificial Sequence
  Description of Artificial Sequence: Synthetic oligonucleotide
uacuugguccaguuaaaac

SEQ ID NO: 2446656 - RNA, 19 nt, Artificial Sequence
  Description of Artificial Sequence: Synthetic oligonucleotide
agagcaggaaacaaggcca

SEQ ID NO: 2446657 - RNA, 19 nt, Artificial Sequence
  Description of Artificial Sequence: Synthetic oligonucleotide
caguuaaaacagauauggc

SEQ ID NO: 2446658 - RNA, 19 nt, Artificial Sequence
  Description of Artificial Sequence: Synthetic oligonucleotide
aaguucaagucugauucca

SEQ ID NO: 2446659 - RNA, 19 nt, Artificial Sequence
  Description of Artificial Sequence: Synthetic oligonucleotide
ucaaggcaauugcccaugg

SEQ ID NO: 2446660 - RNA, 19 nt, Artificial Sequence
  Description of Artificial Sequence: Synthetic oligonucleotide
ggcaauugcccauggaggg

SEQ ID NO: 2446661 - RNA, 19 nt, Artificial Sequence
  Description of Artificial Sequence: Synthetic oligonucleotide
  modified_base (4)..(4): a, c, u, g, unknown or other
gugnaccccaucucgguag

SEQ ID NO: 2446662 - RNA, 19 nt, Artificial Sequence
  Description of Artificial Sequence: Synthetic oligonucleotide
agugcugucacagcugaag

SEQ ID NO: 2446663 - RNA, 19 nt, Artificial Sequence
  Description of Artificial Sequence: Synthetic oligonucleotide
uuuggacuguaccuccaug

SEQ ID NO: 2446664 - RNA, 19 nt, Artificial Sequence
  Description of Artificial Sequence: Synthetic oligonucleotide
ugcugucacagcugaagag

SEQ ID NO: 2446665 - RNA, 19 nt, Artificial Sequence
  Description of Artificial Sequence: Synthetic oligonucleotide
gacgguaggggauccacug

SEQ ID NO: 2446666 - RNA, 19 nt, Artificial Sequence
  Description of Artificial Sequence: Synthetic oligonucleotide
uccucaaggcaauugccca

SEQ ID NO: 2446667 - RNA, 19 nt, Artificial Sequence
  Description of Artificial Sequence: Synthetic oligonucleotide
  modified_base (9)..(9): a, c, u, g, unknown or other
aggaugugnaccccaucuc

SEQ ID NO: 2446668 - RNA, 19 nt, Artificial Sequence
  Description of Artificial Sequence: Synthetic oligonucleotide
aggaaagacugaguggagg

SEQ ID NO: 2446669 - RNA, 19 nt, Artificial Sequence
  Description of Artificial Sequence: Synthetic oligonucleotide
uggacuguaccuccauggc

SEQ ID NO: 2446670 - RNA, 19 nt, Artificial Sequence
  Description of Artificial Sequence: Synthetic oligonucleotide
agccuuggagggcagcagc

SEQ ID NO: 2446671 - RNA, 19 nt, Artificial Sequence
  Description of Artificial Sequence: Synthetic oligonucleotide
cauggagggucucugcccg

SEQ ID NO: 2446672 - RNA, 19 nt, Artificial Sequence
  Description of Artificial Sequence: Synthetic oligonucleotide
agccccugccuuuucauuc

SEQ ID NO: 2446673 - RNA, 19 nt, Artificial Sequence
  Description of Artificial Sequence: Synthetic oligonucleotide
uuuucauuccgaagggcuu

SEQ ID NO: 2446674 - RNA, 19 nt, Artificial Sequence
  Description of Artificial Sequence: Synthetic oligonucleotide
aaaacagauauggccccug

SEQ ID NO: 2446675 - RNA, 19 nt, Artificial Sequence
  Description of Artificial Sequence: Synthetic oligonucleotide
ugguccaguuaaaacagau

SEQ ID NO: 2446676 - RNA, 19 nt, Artificial Sequence
  Description of Artificial Sequence: Synthetic oligonucleotide
uuucauuccgaagggcuug

SEQ ID NO: 2446677 - RNA, 19 nt, Artificial Sequence
  Description of Artificial Sequence: Synthetic oligonucleotide
ucacccgagaucccugaag

SEQ ID NO: 2446678 - RNA, 19 nt, Artificial Sequence
  Description of Artificial Sequence: Synthetic oligonucleotide
aaggccaggucccaaggaa

SEQ ID NO: 2446679 - RNA, 19 nt, Artificial Sequence
  Description of Artificial Sequence: Synthetic oligonucleotide
uuggaguaagggucgaaaa

SEQ ID NO: 2446680 - RNA, 19 nt, Artificial Sequence
  Description of Artificial Sequence: Synthetic oligonucleotide
cugauuccaaagaggcagg

SEQ ID NO: 2446681 - RNA, 19 nt, Artificial Sequence
  Description of Artificial Sequence: Synthetic oligonucleotide
ugccagcucaccagugugg

SEQ ID NO: 2446682 - RNA, 19 nt, Artificial Sequence
  Description of Artificial Sequence: Synthetic oligonucleotide
aggcaauugcccauggagg

SEQ ID NO: 2446683 - RNA, 19 nt, Artificial Sequence
  Description of Artificial Sequence: Synthetic oligonucleotide
uuccucagugcugucacag

SEQ ID NO: 2446684 - RNA, 19 nt, Artificial Sequence
  Description of Artificial Sequence: Synthetic oligonucleotide
gaccagaaguucaagucug

SEQ ID NO: 2446685 - RNA, 19 nt, Artificial Sequence
  Description of Artificial Sequence: Synthetic oligonucleotide
auaaaacagacaggcagga

SEQ ID NO: 2446686 - RNA, 19 nt, Artificial Sequence
  Description of Artificial Sequence: Synthetic oligonucleotide
gaaagacugaguggaggag

SEQ ID NO: 2446687 - RNA, 19 nt, Artificial Sequence
  Description of Artificial Sequence: Synthetic oligonucleotide
acaaggccaggucccaagg

SEQ ID NO: 2446688 - RNA, 19 nt, Artificial Sequence
  Description of Artificial Sequence: Synthetic oligonucleotide
cacccgagaucccugaagc

SEQ ID NO: 2446689 - RNA, 19 nt, Artificial Sequence
  Description of Artificial Sequence: Synthetic oligonucleotide
ugguccagucuuuuggacu

SEQ ID NO: 2446690 - RNA, 19 nt, Artificial Sequence
  Description of Artificial Sequence: Synthetic oligonucleotide
aggguccacuccucaaggc

SEQ ID NO: 2446691 - RNA, 19 nt, Artificial Sequence
  Description of Artificial Sequence: Synthetic oligonucleotide
gauccaaggccuccugggc

SEQ ID NO: 2446692 - RNA, 19 nt, Artificial Sequence
  Description of Artificial Sequence: Synthetic oligonucleotide
agcucuguggccuggcuca

SEQ ID NO: 2446693 - RNA, 19 nt, Artificial Sequence
  Description of Artificial Sequence: Synthetic oligonucleotide
uccaacuccuccuggcccc

SEQ ID NO: 2446694 - RNA, 19 nt, Artificial Sequence
  Description of Artificial Sequence: Synthetic oligonucleotide
agggcuagacgguagggga

SEQ ID NO: 2446695 - RNA, 19 nt, Artificial Sequence
  Description of Artificial Sequence: Synthetic oligonucleotide
gguucucccauccucagac

SEQ ID NO: 2446696 - RNA, 19 nt, Artificial Sequence
  Description of Artificial Sequence: Synthetic oligonucleotide
  modified_base (14)..(14): a, c, u, g, unknown or other
gaagcaggaugugnacccc

SEQ ID NO: 2446697 - RNA, 19 nt, Artificial Sequence
  Description of Artificial Sequence: Synthetic oligonucleotide
guagccgggccucaucagg

SEQ ID NO: 2446698 - RNA, 19 nt, Artificial Sequence
  Description of Artificial Sequence: Synthetic oligonucleotide
gucacagcugaagagaaga

SEQ ID NO: 2446699 - RNA, 19 nt, Artificial Sequence
  Description of Artificial Sequence: Synthetic oligonucleotide
gugguguaggaaugagagg

SEQ ID NO: 2446700 - RNA, 19 nt, Artificial Sequence
  Description of Artificial Sequence: Synthetic oligonucleotide
  modified_base (3)..(3): a, c, u, g, unknown or other
ugnaccccaucucgguagc

SEQ ID NO: 2446701 - RNA, 19 nt, Artificial Sequence
  Description of Artificial Sequence: Synthetic oligonucleotide
uuccgaagggcuugaguga

SEQ ID NO: 2446702 - RNA, 19 nt, Artificial Sequence
  Description of Artificial Sequence: Synthetic oligonucleotide
uaggaaugagaggggaggc

SEQ ID NO: 2446703 - RNA, 19 nt, Artificial Sequence
  Description of Artificial Sequence: Synthetic oligonucleotide
gguuccaagagcaggaaac

SEQ ID NO: 2446704 - RNA, 19 nt, Artificial Sequence
  Description of Artificial Sequence: Synthetic oligonucleotide
uaggggauccacuggcaca

SEQ ID NO: 2446705 - RNA, 19 nt, Artificial Sequence
  Description of Artificial Sequence: Synthetic oligonucleotide
gucccaaggaaagacugag

SEQ ID NO: 2446706 - RNA, 19 nt, Artificial Sequence
  Description of Artificial Sequence: Synthetic oligonucleotide
guacuuuccucuuuggagu

SEQ ID NO: 2446707 - RNA, 19 nt, Artificial Sequence
  Description of Artificial Sequence: Synthetic oligonucleotide
gguccagucuuuuggacug

SEQ ID NO: 2446708 - RNA, 19 nt, Artificial Sequence
  Description of Artificial Sequence: Synthetic oligonucleotide
cauccaacuccuccuggcc

SEQ ID NO: 2446709 - RNA, 19 nt, Artificial Sequence
  Description of Artificial Sequence: Synthetic oligonucleotide
caucucgguagccuuggag

SEQ ID NO: 2446710 - RNA, 19 nt, Artificial Sequence
  Description of Artificial Sequence: Synthetic oligonucleotide
  modified_base (5)..(5): a, c, u, g, unknown or other
ugugnaccccaucucggua

SEQ ID NO: 2446711 - RNA, 19 nt, Artificial Sequence
  Description of Artificial Sequence: Synthetic oligonucleotide
ggagcugagaagucuuugc

SEQ ID NO: 2446712 - RNA, 19 nt, Artificial Sequence
  Description of Artificial Sequence: Synthetic oligonucleotide
agggcuugagugaugagcu

SEQ ID NO: 2446713 - RNA, 19 nt, Artificial Sequence
  Description of Artificial Sequence: Synthetic oligonucleotide
ggaaagacugaguggagga

SEQ ID NO: 2446714 - RNA, 19 nt, Artificial Sequence
  Description of Artificial Sequence: Synthetic oligonucleotide
uggagcugaugucccagga

SEQ ID NO: 2446715 - RNA, 19 nt, Artificial Sequence
  Description of Artificial Sequence: Synthetic oligonucleotide
ugauuccaaagaggcaggc

SEQ ID NO: 2446716 - RNA, 19 nt, Artificial Sequence
  Description of Artificial Sequence: Synthetic oligonucleotide
aaggaaagacugaguggag

SEQ ID NO: 2446717 - RNA, 19 nt, Artificial Sequence
  Description of Artificial Sequence: Synthetic oligonucleotide
aaugagaggggaggcagua

SEQ ID NO: 2446718 - RNA, 19 nt, Artificial Sequence
  Description of Artificial Sequence: Synthetic oligonucleotide
cugccuuuucauuccgaag

SEQ ID NO: 2446719 - RNA, 19 nt, Artificial Sequence
  Description of Artificial Sequence: Synthetic oligonucleotide
uaaaacagauauggccccu

SEQ ID NO: 2446720 - RNA, 19 nt, Artificial Sequence
  Description of Artificial Sequence: Synthetic oligonucleotide
ucaucaggaggugguguag

SEQ ID NO: 2446721 - RNA, 19 nt, Artificial Sequence
  Description of Artificial Sequence: Synthetic oligonucleotide
uccaaagaggcaggcaggu

SEQ ID NO: 2446722 - RNA, 19 nt, Artificial Sequence
  Description of Artificial Sequence: Synthetic oligonucleotide
  modified_base (6)..(6): a, c, u, g, unknown or other
augugnaccccaucucggu

SEQ ID NO: 2446723 - RNA, 19 nt, Artificial Sequence
  Description of Artificial Sequence: Synthetic oligonucleotide
ggaaacaaggccagguccc

SEQ ID NO: 2446724 - RNA, 19 nt, Artificial Sequence
  Description of Artificial Sequence: Synthetic oligonucleotide
uucacaccuucccgucggg

SEQ ID NO: 2446725 - RNA, 19 nt, Artificial Sequence
  Description of Artificial Sequence: Synthetic oligonucleotide
acaccuucccgucgggcag

SEQ ID NO: 2446726 - RNA, 19 nt, Artificial Sequence
  Description of Artificial Sequence: Synthetic oligonucleotide
gccucagguacucagcugc

SEQ ID NO: 2446727 - RNA, 19 nt, Artificial Sequence
  Description of Artificial Sequence: Synthetic oligonucleotide
ggaaugagaggggaggcag

SEQ ID NO: 2446728 - RNA, 19 nt, Artificial Sequence
  Description of Artificial Sequence: Synthetic oligonucleotide
gcuuuucucauacuugguc

SEQ ID NO: 2446729 - RNA, 19 nt, Artificial Sequence
  Description of Artificial Sequence: Synthetic oligonucleotide
gaguagccgggccucauca

SEQ ID NO: 2446730 - RNA, 19 nt, Artificial Sequence
  Description of Artificial Sequence: Synthetic oligonucleotide
agcugagaagucuuugcuu

SEQ ID NO: 2446731 - RNA, 19 nt, Artificial Sequence
  Description of Artificial Sequence: Synthetic oligonucleotide
caucaggaggugguguagg

SEQ ID NO: 2446732 - RNA, 19 nt, Artificial Sequence
  Description of Artificial Sequence: Synthetic oligonucleotide
  modified_base (10)..(10): a, c, u, g, unknown or other
caggaugugnaccccaucu

SEQ ID NO: 2446733 - RNA, 19 nt, Artificial Sequence
  Description of Artificial Sequence: Synthetic oligonucleotide
uggagcugagaagucuuug

SEQ ID NO: 2446734 - RNA, 19 nt, Artificial Sequence
  Description of Artificial Sequence: Synthetic oligonucleotide
uagccgggccucaucagga

SEQ ID NO: 2446735 - RNA, 19 nt, Artificial Sequence
  Description of Artificial Sequence: Synthetic oligonucleotide
gccuuuucauuccgaaggg

SEQ ID NO: 2446736 - RNA, 19 nt, Artificial Sequence
  Description of Artificial Sequence: Synthetic oligonucleotide
gaugucccaggaagggucc

SEQ ID NO: 2446737 - RNA, 19 nt, Artificial Sequence
  Description of Artificial Sequence: Synthetic oligonucleotide
gaggggaggcaguaugcac

SEQ ID NO: 2446738 - RNA, 19 nt, Artificial Sequence
  Description of Artificial Sequence: Synthetic oligonucleotide
gaugcuuccucagugcugu

SEQ ID NO: 2446739 - RNA, 19 nt, Artificial Sequence
  Description of Artificial Sequence: Synthetic oligonucleotide
gagaggggaggcaguaugc

SEQ ID NO: 2446740 - RNA, 19 nt, Artificial Sequence
  Description of Artificial Sequence: Synthetic oligonucleotide
gcugaagagaagauccaag

SEQ ID NO: 2446741 - RNA, 19 nt, Artificial Sequence
  Description of Artificial Sequence: Synthetic oligonucleotide
guaggggauccacuggcac

SEQ ID NO: 2446742 - RNA, 19 nt, Artificial Sequence
  Description of Artificial Sequence: Synthetic oligonucleotide
agauauggccccugggguu

SEQ ID NO: 2446743 - RNA, 19 nt, Artificial Sequence
  Description of Artificial Sequence: Synthetic oligonucleotide
aggucccaaggaaagacug

SEQ ID NO: 2446744 - RNA, 19 nt, Artificial Sequence
  Description of Artificial Sequence: Synthetic oligonucleotide
uacuuuccucuuuggagua

SEQ ID NO: 2446745 - RNA, 19 nt, Artificial Sequence
  Description of Artificial Sequence: Synthetic oligonucleotide
ucuuugcuuuucucauacu

SEQ ID NO: 2446746 - RNA, 19 nt, Artificial Sequence
  Description of Artificial Sequence: Synthetic oligonucleotide
ggcaguaugcacagguucc

SEQ ID NO: 2446747 - RNA, 19 nt, Artificial Sequence
  Description of Artificial Sequence: Synthetic oligonucleotide
gaggugguguaggaaugag

SEQ ID NO: 2446748 - RNA, 19 nt, Artificial Sequence
  Description of Artificial Sequence: Synthetic oligonucleotide
gauuccaaagaggcaggca

SEQ ID NO: 2446749 - RNA, 19 nt, Artificial Sequence
  Description of Artificial Sequence: Synthetic oligonucleotide
uuccgcaggcaguggcugg

SEQ ID NO: 2446750 - RNA, 19 nt, Artificial Sequence
  Description of Artificial Sequence: Synthetic oligonucleotide
cagggcuagacgguagggg

SEQ ID NO: 2446751 - RNA, 19 nt, Artificial Sequence
  Description of Artificial Sequence: Synthetic oligonucleotide
uuccaagagcaggaaacaa

SEQ ID NO: 2446752 - RNA, 19 nt, Artificial Sequence
  Description of Artificial Sequence: Synthetic oligonucleotide
uuuccgcaggcaguggcug

SEQ ID NO: 2446753 - RNA, 19 nt, Artificial Sequence
  Description of Artificial Sequence: Synthetic oligonucleotide
agaagauccaaggccuccu

SEQ ID NO: 2446754 - RNA, 19 nt, Artificial Sequence
  Description of Artificial Sequence: Synthetic oligonucleotide
aguagccgggccucaucag

SEQ ID NO: 2446755 - RNA, 19 nt, Artificial Sequence
  Description of Artificial Sequence: Synthetic oligonucleotide
uccucagugcugucacagc

SEQ ID NO: 2446756 - RNA, 19 nt, Artificial Sequence
  Description of Artificial Sequence: Synthetic oligonucleotide
gaugagcucuguggccugg

SEQ ID NO: 2446757 - RNA, 19 nt, Artificial Sequence
  Description of Artificial Sequence: Synthetic oligonucleotide
uagacgguaggggauccac

SEQ ID NO: 2446758 - RNA, 19 nt, Artificial Sequence
  Description of Artificial Sequence: Synthetic oligonucleotide
cucagguaagcuggggcag

SEQ ID NO: 2446759 - RNA, 19 nt, Artificial Sequence
  Description of Artificial Sequence: Synthetic oligonucleotide
auggagggucucugcccgc

SEQ ID NO: 2446760 - RNA, 19 nt, Artificial Sequence
  Description of Artificial Sequence: Synthetic oligonucleotide
ugaugagcucuguggccug

SEQ ID NO: 2446761 - RNA, 19 nt, Artificial Sequence
  Description of Artificial Sequence: Synthetic oligonucleotide
caauugcccauggaggguc

SEQ ID NO: 2446762 - RNA, 19 nt, Artificial Sequence
  Description of Artificial Sequence: Synthetic oligonucleotide
aggaaggguccacuccuca

SEQ ID NO: 2446763 - RNA, 19 nt, Artificial Sequence
  Description of Artificial Sequence: Synthetic oligonucleotide
gagcugagaagucuuugcu

SEQ ID NO: 2446764 - RNA, 19 nt, Artificial Sequence
  Description of Artificial Sequence: Synthetic oligonucleotide
ggcucagguaagcuggggc

SEQ ID NO: 2446765 - RNA, 19 nt, Artificial Sequence
  Description of Artificial Sequence: Synthetic oligonucleotide
gcaaguucagccucagaga

SEQ ID NO: 2446766 - RNA, 19 nt, Artificial Sequence
  Description of Artificial Sequence: Synthetic oligonucleotide
agcuggaugcuuccucagu

SEQ ID NO: 2446767 - RNA, 19 nt, Artificial Sequence
  Description of Artificial Sequence: Synthetic oligonucleotide
cuggcucagguaagcuggg

SEQ ID NO: 2446768 - RNA, 19 nt, Artificial Sequence
  Description of Artificial Sequence: Synthetic oligonucleotide
auacuugguccaguuaaaa

SEQ ID NO: 2446769 - RNA, 19 nt, Artificial Sequence
  Description of Artificial Sequence: Synthetic oligonucleotide
ccgagaucccugaagcagg

SEQ ID NO: 2446770 - RNA, 19 nt, Artificial Sequence
  Description of Artificial Sequence: Synthetic oligonucleotide
agcauaagccccugccuuu

SEQ ID NO: 2446771 - RNA, 19 nt, Artificial Sequence
  Description of Artificial Sequence: Synthetic oligonucleotide
cuucccgucgggcagggga

SEQ ID NO: 2446772 - RNA, 19 nt, Artificial Sequence
  Description of Artificial Sequence: Synthetic oligonucleotide
ugagcucuguggccuggcu

SEQ ID NO: 2446773 - RNA, 19 nt, Artificial Sequence
  Description of Artificial Sequence: Synthetic oligonucleotide
cucugcccgccucagguac

SEQ ID NO: 2446774 - RNA, 19 nt, Artificial Sequence
  Description of Artificial Sequence: Synthetic oligonucleotide
  modified_base (13)..(13): a, c, u, g, unknown or other
aagcaggaugugnacccca

SEQ ID NO: 2446775 - RNA, 19 nt, Artificial Sequence
  Description of Artificial Sequence: Synthetic oligonucleotide
auccacuggcacauccaac

SEQ ID NO: 2446776 - RNA, 19 nt, Artificial Sequence
  Description of Artificial Sequence: Synthetic oligonucleotide
gaaacaaggccagguccca

SEQ ID NO: 2446777 - RNA, 19 nt, Artificial Sequence
  Description of Artificial Sequence: Synthetic oligonucleotide
uucauuccgaagggcuuga

SEQ ID NO: 2446778 - RNA, 19 nt, Artificial Sequence
  Description of Artificial Sequence: Synthetic oligonucleotide
aagggcaaguucagccuca

SEQ ID NO: 2446779 - RNA, 19 nt, Artificial Sequence
  Description of Artificial Sequence: Synthetic oligonucleotide
gugcugucacagcugaaga

SEQ ID NO: 2446780 - RNA, 19 nt, Artificial Sequence
  Description of Artificial Sequence: Synthetic oligonucleotide
uccgaagggcuugagugau

SEQ ID NO: 2446781 - RNA, 19 nt, Artificial Sequence
  Description of Artificial Sequence: Synthetic oligonucleotide
ucuuuggaguaagggucga

SEQ ID NO: 2446782 - RNA, 19 nt, Artificial Sequence
  Description of Artificial Sequence: Synthetic oligonucleotide
augagcucuguggccuggc

SEQ ID NO: 2446783 - RNA, 19 nt, Artificial Sequence
  Description of Artificial Sequence: Synthetic oligonucleotide
cagguucucccauccucag

SEQ ID NO: 2446784 - RNA, 19 nt, Artificial Sequence
  Description of Artificial Sequence: Synthetic oligonucleotide
agcaggaaacaaggccagg

SEQ ID NO: 2446785 - RNA, 19 nt, Artificial Sequence
  Description of Artificial Sequence: Synthetic oligonucleotide
ugggaccuguacuuuccuc

SEQ ID NO: 2446786 - RNA, 19 nt, Artificial Sequence
  Description of Artificial Sequence: Synthetic oligonucleotide
cacaccuucccgucgggca

SEQ ID NO: 2446787 - RNA, 19 nt, Artificial Sequence
  Description of Artificial Sequence: Synthetic oligonucleotide
aggaaugagaggggaggca

SEQ ID NO: 2446788 - RNA, 19 nt, Artificial Sequence
  Description of Artificial Sequence: Synthetic oligonucleotide
acaggcaggaccagaaguu

SEQ ID NO: 2446789 - RNA, 19 nt, Artificial Sequence
  Description of Artificial Sequence: Synthetic oligonucleotide
ugggucacccgagaucccu

SEQ ID NO: 2446790 - RNA, 19 nt, Artificial Sequence
  Description of Artificial Sequence: Synthetic oligonucleotide
cuccuuuccgcaggcagug

SEQ ID NO: 2446791 - RNA, 19 nt, Artificial Sequence
  Description of Artificial Sequence: Synthetic oligonucleotide
aagccccugccuuuucauu

SEQ ID NO: 2446792 - RNA, 19 nt, Artificial Sequence
  Description of Artificial Sequence: Synthetic oligonucleotide
ggagcuggaugcuuccuca

SEQ ID NO: 2446793 - RNA, 19 nt, Artificial Sequence
  Description of Artificial Sequence: Synthetic oligonucleotide
gcucagguaagcuggggca

SEQ ID NO: 2446794 - RNA, 19 nt, Artificial Sequence
  Description of Artificial Sequence: Synthetic oligonucleotide
uccccaagguucccugguc

SEQ ID NO: 2446795 - RNA, 19 nt, Artificial Sequence
  Description of Artificial Sequence: Synthetic oligonucleotide
ucccugguccagucuuuug

SEQ ID NO: 2446796 - RNA, 19 nt, Artificial Sequence
  Description of Artificial Sequence: Synthetic oligonucleotide
uggcuggaguagccgggcc

SEQ ID NO: 2446797 - RNA, 19 nt, Artificial Sequence
  Description of Artificial Sequence: Synthetic oligonucleotide
cagguuggagcugagaagu

SEQ ID NO: 2446798 - RNA, 19 nt, Artificial Sequence
  Description of Artificial Sequence: Synthetic oligonucleotide
uggcucagguaagcugggg

SEQ ID NO: 2446799 - RNA, 19 nt, Artificial Sequence
  Description of Artificial Sequence: Synthetic oligonucleotide
uucccgucgggcaggggau

SEQ ID NO: 2446800 - RNA, 19 nt, Artificial Sequence
  Description of Artificial Sequence: Synthetic oligonucleotide
ggaccagaaguucaagucu

SEQ ID NO: 2446801 - RNA, 19 nt, Artificial Sequence
  Description of Artificial Sequence: Synthetic oligonucleotide
acccgagaucccugaagca

SEQ ID NO: 2446802 - RNA, 19 nt, Artificial Sequence
  Description of Artificial Sequence: Synthetic oligonucleotide
auauggccccugggguucc

SEQ ID NO: 2446803 - RNA, 19 nt, Artificial Sequence
  Description of Artificial Sequence: Synthetic oligonucleotide
aaacaaggccaggucccaa

SEQ ID NO: 2446804 - RNA, 19 nt, Artificial Sequence
  Description of Artificial Sequence: Synthetic oligonucleotide
agguucucccauccucaga

SEQ ID NO: 2446805 - RNA, 19 nt, Artificial Sequence
  Description of Artificial Sequence: Synthetic oligonucleotide
ucacaccuucccgucgggc

SEQ ID NO: 2446806 - RNA, 19 nt, Artificial Sequence
  Description of Artificial Sequence: Synthetic oligonucleotide
uggagggucucugcccgcc

SEQ ID NO: 2446807 - RNA, 19 nt, Artificial Sequence
  Description of Artificial Sequence: Synthetic oligonucleotide
ucccaggaaggguccacuc

SEQ ID NO: 2446808 - RNA, 19 nt, Artificial Sequence
  Description of Artificial Sequence: Synthetic oligonucleotide
ugcccauggagggucucug

SEQ ID NO: 2446809 - RNA, 19 nt, Artificial Sequence
  Description of Artificial Sequence: Synthetic oligonucleotide
ggaugggucacccgagauc

SEQ ID NO: 2446810 - RNA, 19 nt, Artificial Sequence
  Description of Artificial Sequence: Synthetic oligonucleotide
guagccuuggagggcagca

SEQ ID NO: 2446811 - RNA, 19 nt, Artificial Sequence
  Description of Artificial Sequence: Synthetic oligonucleotide
cucgguagccuuggagggc

SEQ ID NO: 2446812 - RNA, 19 nt, Artificial Sequence
  Description of Artificial Sequence: Synthetic oligonucleotide
cucaucaggagguggugua

SEQ ID NO: 2446813 - RNA, 19 nt, Artificial Sequence
  Description of Artificial Sequence: Synthetic oligonucleotide
ucugcccgccucagguacu

SEQ ID NO: 2446814 - RNA, 19 nt, Artificial Sequence
  Description of Artificial Sequence: Synthetic oligonucleotide
aggugguguaggaaugaga

SEQ ID NO: 2446815 - RNA, 19 nt, Artificial Sequence
  Description of Artificial Sequence: Synthetic oligonucleotide
ccauggagggucucugccc

SEQ ID NO: 2446816 - RNA, 19 nt, Artificial Sequence
  Description of Artificial Sequence: Synthetic oligonucleotide
uccuuuccgcaggcagugg

SEQ ID NO: 2446817 - RNA, 19 nt, Artificial Sequence
  Description of Artificial Sequence: Synthetic oligonucleotide
uggccccugggguuccaag

SEQ ID NO: 2446818 - RNA, 19 nt, Artificial Sequence
  Description of Artificial Sequence: Synthetic oligonucleotide
ggguccacuccucaaggca

SEQ ID NO: 2446819 - RNA, 19 nt, Artificial Sequence
  Description of Artificial Sequence: Synthetic oligonucleotide
cagauauggccccuggggu

SEQ ID NO: 2446820 - RNA, 19 nt, Artificial Sequence
  Description of Artificial Sequence: Synthetic oligonucleotide
gggaccuguacuuuccucu

SEQ ID NO: 2446821 - RNA, 19 nt, Artificial Sequence
  Description of Artificial Sequence: Synthetic oligonucleotide
cccgagaucccugaagcag

SEQ ID NO: 2446822 - RNA, 19 nt, Artificial Sequence
  Description of Artificial Sequence: Synthetic oligonucleotide
gcugagaagucuuugcuuu

SEQ ID NO: 2446823 - RNA, 19 nt, Artificial Sequence
  Description of Artificial Sequence: Synthetic oligonucleotide
auugcccauggagggucuc

SEQ ID NO: 2446824 - RNA, 19 nt, Artificial Sequence
  Description of Artificial Sequence: Synthetic oligonucleotide
ccuuuccgcaggcaguggc

SEQ ID NO: 2446825 - RNA, 19 nt, Artificial Sequence
  Description of Artificial Sequence: Synthetic oligonucleotide
cccauggagggucucugcc

SEQ ID NO: 2446826 - RNA, 19 nt, Artificial Sequence
  Description of Artificial Sequence: Synthetic oligonucleotide
  modified_base (2)..(2): a, c, u, g, unknown or other
gnaccccaucucgguagcc

SEQ ID NO: 2446827 - RNA, 19 nt, Artificial Sequence
  Description of Artificial Sequence: Synthetic oligonucleotide
ccaggucccaaggaaagac

SEQ ID NO: 2446828 - RNA, 19 nt, Artificial Sequence
  Description of Artificial Sequence: Synthetic oligonucleotide
uugcccauggagggucucu

SEQ ID NO: 2446829 - RNA, 19 nt, Artificial Sequence
  Description of Artificial Sequence: Synthetic oligonucleotide
cauaagccccugccuuuuc

SEQ ID NO: 2446830 - RNA, 19 nt, Artificial Sequence
  Description of Artificial Sequence: Synthetic oligonucleotide
ggcacauccaacuccuccu

SEQ ID NO: 2446831 - RNA, 19 nt, Artificial Sequence
  Description of Artificial Sequence: Synthetic oligonucleotide
ggccaggucccaaggaaag

SEQ ID NO: 2446832 - RNA, 19 nt, Artificial Sequence
  Description of Artificial Sequence: Synthetic oligonucleotide
agggcaaguucagccucag

SEQ ID NO: 2446833 - RNA, 19 nt, Artificial Sequence
  Description of Artificial Sequence: Synthetic oligonucleotide
ccuuuucauuccgaagggc

SEQ ID NO: 2446834 - RNA, 19 nt, Artificial Sequence
  Description of Artificial Sequence: Synthetic oligonucleotide
caaggcaauugcccaugga

SEQ ID NO: 2446835 - RNA, 19 nt, Artificial Sequence
  Description of Artificial Sequence: Synthetic oligonucleotide
agguucccugguccagucu

SEQ ID NO: 2446836 - RNA, 19 nt, Artificial Sequence
  Description of Artificial Sequence: Synthetic oligonucleotide
caaggccaggucccaagga

SEQ ID NO: 2446837 - RNA, 19 nt, Artificial Sequence
  Description of Artificial Sequence: Synthetic oligonucleotide
accccaucucgguagccuu

SEQ ID NO: 2446838 - RNA, 19 nt, Artificial Sequence
  Description of Artificial Sequence: Synthetic oligonucleotide
gcugggaccuguacuuucc

SEQ ID NO: 2446839 - RNA, 19 nt, Artificial Sequence
  Description of Artificial Sequence: Synthetic oligonucleotide
augggucacccgagauccc

SEQ ID NO: 2446840 - RNA, 19 nt, Artificial Sequence
  Description of Artificial Sequence: Synthetic oligonucleotide
gugcuggagcugauguccc

SEQ ID NO: 2446841 - RNA, 19 nt, Artificial Sequence
  Description of Artificial Sequence: Synthetic oligonucleotide
cucauacuugguccaguua

SEQ ID NO: 2446842 - RNA, 19 nt, Artificial Sequence
  Description of Artificial Sequence: Synthetic oligonucleotide
gaccucggggcuggggagc

SEQ ID NO: 2446843 - RNA, 19 nt, Artificial Sequence
  Description of Artificial Sequence: Synthetic oligonucleotide
ccccaagguucccuggucc

SEQ ID NO: 2446844 - RNA, 19 nt, Artificial Sequence
  Description of Artificial Sequence: Synthetic oligonucleotide
agacgguaggggauccacu

SEQ ID NO: 2446845 - RNA, 19 nt, Artificial Sequence
  Description of Artificial Sequence: Synthetic oligonucleotide
ggaugcuuccucagugcug

SEQ ID NO: 2446846 - RNA, 19 nt, Artificial Sequence
  Description of Artificial Sequence: Synthetic oligonucleotide
gcuccccaagguucccugg

SEQ ID NO: 2446847 - RNA, 19 nt, Artificial Sequence
  Description of Artificial Sequence: Synthetic oligonucleotide
cauuccgaagggcuugagu

SEQ ID NO: 2446848 - RNA, 19 nt, Artificial Sequence
  Description of Artificial Sequence: Synthetic oligonucleotide
gccccugccuuuucauucc

SEQ ID NO: 2446849 - RNA, 19 nt, Artificial Sequence
  Description of Artificial Sequence: Synthetic oligonucleotide
gcagggcuagacgguaggg

SEQ ID NO: 2446850 - RNA, 19 nt, Artificial Sequence
  Description of Artificial Sequence: Synthetic oligonucleotide
cuuuccgcaggcaguggcu

SEQ ID NO: 2446851 - RNA, 19 nt, Artificial Sequence
  Description of Artificial Sequence: Synthetic oligonucleotide
ccucagguacucagcugcc

SEQ ID NO: 2446852 - RNA, 19 nt, Artificial Sequence
  Description of Artificial Sequence: Synthetic oligonucleotide
gaaugagaggggaggcagu

SEQ ID NO: 2446853 - RNA, 19 nt, Artificial Sequence
  Description of Artificial Sequence: Synthetic oligonucleotide
cgguaggggauccacuggc

SEQ ID NO: 2446854 - RNA, 19 nt, Artificial Sequence
  Description of Artificial Sequence: Synthetic oligonucleotide
gcagguucucccauccuca

SEQ ID NO: 2446855 - RNA, 19 nt, Artificial Sequence
  Description of Artificial Sequence: Synthetic oligonucleotide
ggacuguaccuccauggcu

SEQ ID NO: 2446856 - RNA, 19 nt, Artificial Sequence
  Description of Artificial Sequence: Synthetic oligonucleotide
ggaaggguccacuccucaa

SEQ ID NO: 2446857 - RNA, 19 nt, Artificial Sequence
  Description of Artificial Sequence: Synthetic oligonucleotide
aggccaggucccaaggaaa

SEQ ID NO: 2446858 - RNA, 19 nt, Artificial Sequence
  Description of Artificial Sequence: Synthetic oligonucleotide
caccuucccgucgggcagg

SEQ ID NO: 2446859 - RNA, 19 nt, Artificial Sequence
  Description of Artificial Sequence: Synthetic oligonucleotide
ggucucugcccgccucagg

SEQ ID NO: 2446860 - RNA, 19 nt, Artificial Sequence
  Description of Artificial Sequence: Synthetic oligonucleotide
ggcuccccaagguucccug

SEQ ID NO: 2446861 - RNA, 19 nt, Artificial Sequence
  Description of Artificial Sequence: Synthetic oligonucleotide
gguccacuccucaaggcaa

SEQ ID NO: 2446862 - RNA, 19 nt, Artificial Sequence
  Description of Artificial Sequence: Synthetic oligonucleotide
guuggagcugagaagucuu

SEQ ID NO: 2446863 - RNA, 19 nt, Artificial Sequence
  Description of Artificial Sequence: Synthetic oligonucleotide
gguccaguuaaaacagaua

SEQ ID NO: 2446864 - RNA, 19 nt, Artificial Sequence
  Description of Artificial Sequence: Synthetic oligonucleotide
uucccugguccagucuuuu

SEQ ID NO: 2446865 - RNA, 19 nt, Artificial Sequence
  Description of Artificial Sequence: Synthetic oligonucleotide
caggucccaaggaaagacu

SEQ ID NO: 2446866 - RNA, 19 nt, Artificial Sequence
  Description of Artificial Sequence: Synthetic oligonucleotide
caggcagguuggagcugag

SEQ ID NO: 2446867 - RNA, 19 nt, Artificial Sequence
  Description of Artificial Sequence: Synthetic oligonucleotide
gcuagacgguaggggaucc

SEQ ID NO: 2446868 - RNA, 19 nt, Artificial Sequence
  Description of Artificial Sequence: Synthetic oligonucleotide
gcccgccucagguacucag

SEQ ID NO: 2446869 - RNA, 19 nt, Artificial Sequence
  Description of Artificial Sequence: Synthetic oligonucleotide
ggucccaaggaaagacuga

SEQ ID NO: 2446870 - RNA, 19 nt, Artificial Sequence
  Description of Artificial Sequence: Synthetic oligonucleotide
ccugccuuuucauuccgaa

SEQ ID NO: 2446871 - RNA, 19 nt, Artificial Sequence
  Description of Artificial Sequence: Synthetic oligonucleotide
guucagccucagagagggg

SEQ ID NO: 2446872 - RNA, 19 nt, Artificial Sequence
  Description of Artificial Sequence: Synthetic oligonucleotide
gcaggaaacaaggccaggu

SEQ ID NO: 2446873 - RNA, 19 nt, Artificial Sequence
  Description of Artificial Sequence: Synthetic oligonucleotide
ggucacccgagaucccuga

SEQ ID NO: 2446874 - RNA, 19 nt, Artificial Sequence
  Description of Artificial Sequence: Synthetic oligonucleotide
cccgccucagguacucagc

SEQ ID NO: 2446875 - RNA, 19 nt, Artificial Sequence
  Description of Artificial Sequence: Synthetic oligonucleotide
gguuggagcugagaagucu

SEQ ID NO: 2446876 - RNA, 19 nt, Artificial Sequence
  Description of Artificial Sequence: Synthetic oligonucleotide
uggcuccccaagguucccu

SEQ ID NO: 2446877 - RNA, 19 nt, Artificial Sequence
  Description of Artificial Sequence: Synthetic oligonucleotide
cagcauaagccccugccuu

SEQ ID NO: 2446878 - RNA, 19 nt, Artificial Sequence
  Description of Artificial Sequence: Synthetic oligonucleotide
accuucccgucgggcaggg

SEQ ID NO: 2446879 - RNA, 19 nt, Artificial Sequence
  Description of Artificial Sequence: Synthetic oligonucleotide
ccuggccccuccuuuccgc

SEQ ID NO: 2446880 - RNA, 19 nt, Artificial Sequence
  Description of Artificial Sequence: Synthetic oligonucleotide
ggcuagacgguaggggauc

SEQ ID NO: 2446881 - RNA, 19 nt, Artificial Sequence
  Description of Artificial Sequence: Synthetic oligonucleotide
ggaguagccgggccucauc

SEQ ID NO: 2446882 - RNA, 19 nt, Artificial Sequence
  Description of Artificial Sequence: Synthetic oligonucleotide
  modified_base (11)..(11): a, c, u, g, unknown or other
gcaggaugugnaccccauc

SEQ ID NO: 2446883 - RNA, 19 nt, Artificial Sequence
  Description of Artificial Sequence: Synthetic oligonucleotide
cuuuggaguaagggucgaa

SEQ ID NO: 2446884 - RNA, 19 nt, Artificial Sequence
  Description of Artificial Sequence: Synthetic oligonucleotide
gguaggggauccacuggca

SEQ ID NO: 2446885 - RNA, 19 nt, Artificial Sequence
  Description of Artificial Sequence: Synthetic oligonucleotide
ggccccugggguuccaaga

SEQ ID NO: 2446886 - RNA, 19 nt, Artificial Sequence
  Description of Artificial Sequence: Synthetic oligonucleotide
cuggccccuccuuuccgca

SEQ ID NO: 2446887 - RNA, 19 nt, Artificial Sequence
  Description of Artificial Sequence: Synthetic oligonucleotide
aggcagguuggagcugaga

SEQ ID NO: 2446888 - RNA, 19 nt, Artificial Sequence
  Description of Artificial Sequence: Synthetic oligonucleotide
gguagccuuggagggcagc

SEQ ID NO: 2446889 - RNA, 19 nt, Artificial Sequence
  Description of Artificial Sequence: Synthetic oligonucleotide
gcccauggagggucucugc

SEQ ID NO: 2446890 - RNA, 19 nt, Artificial Sequence
  Description of Artificial Sequence: Synthetic oligonucleotide
gcaggcagguuggagcuga

SEQ ID NO: 2446891 - RNA, 19 nt, Artificial Sequence
  Description of Artificial Sequence: Synthetic oligonucleotide
ccaagguucccugguccag

SEQ ID NO: 2446892 - RNA, 19 nt, Artificial Sequence
  Description of Artificial Sequence: Synthetic oligonucleotide
guucucccauccucagacu

SEQ ID NO: 2446893 - RNA, 19 nt, Artificial Sequence
  Description of Artificial Sequence: Synthetic oligonucleotide
gguucccugguccagucuu

SEQ ID NO: 2446894 - RNA, 19 nt, Artificial Sequence
  Description of Artificial Sequence: Synthetic oligonucleotide
gucacccgagaucccugaa

SEQ ID NO: 2446895 - RNA, 19 nt, Artificial Sequence
  Description of Artificial Sequence: Synthetic oligonucleotide
ggaggaggcuggcagugcu

SEQ ID NO: 2446896 - RNA, 19 nt, Artificial Sequence
  Description of Artificial Sequence: Synthetic oligonucleotide
cuggcuccccaagguuccc

SEQ ID NO: 2446897 - RNA, 19 nt, Artificial Sequence
  Description of Artificial Sequence: Synthetic oligonucleotide
gcuggaguagccgggccuc

SEQ ID NO: 2446898 - RNA, 19 nt, Artificial Sequence
  Description of Artificial Sequence: Synthetic oligonucleotide
gaccuguacuuuccucuuu

SEQ ID NO: 2446899 - RNA, 19 nt, Artificial Sequence
  Description of Artificial Sequence: Synthetic oligonucleotide
ccacuccucaaggcaauug

SEQ ID NO: 2446900 - RNA, 19 nt, Artificial Sequence
  Description of Artificial Sequence: Synthetic oligonucleotide
gucgggcaggggauggguc

SEQ ID NO: 2446901 - RNA, 19 nt, Artificial Sequence
  Description of Artificial Sequence: Synthetic oligonucleotide
cugagaagucuuugcuuuu

SEQ ID NO: 2446902 - RNA, 19 nt, Artificial Sequence
  Description of Artificial Sequence: Synthetic oligonucleotide
cuagacgguaggggaucca

SEQ ID NO: 2446903 - RNA, 19 nt, Artificial Sequence
  Description of Artificial Sequence: Synthetic oligonucleotide
gaggcaguaugcacagguu

SEQ ID NO: 2446904 - RNA, 19 nt, Artificial Sequence
  Description of Artificial Sequence: Synthetic oligonucleotide
ccucagugcugucacagcu

SEQ ID NO: 2446905 - RNA, 19 nt, Artificial Sequence
  Description of Artificial Sequence: Synthetic oligonucleotide
ccaggaaggguccacuccu

SEQ ID NO: 2446906 - RNA, 19 nt, Artificial Sequence
  Description of Artificial Sequence: Synthetic oligonucleotide
ccuccuggccccuccuuuc

SEQ ID NO: 2446907 - RNA, 19 nt, Artificial Sequence
  Description of Artificial Sequence: Synthetic oligonucleotide
cccaagguucccuggucca

SEQ ID NO: 2446908 - RNA, 19 nt, Artificial Sequence
  Description of Artificial Sequence: Synthetic oligonucleotide
ggggcugggaccuguacuu

SEQ ID NO: 2446909 - RNA, 19 nt, Artificial Sequence
  Description of Artificial Sequence: Synthetic oligonucleotide
caagguucccugguccagu

SEQ ID NO: 2446910 - RNA, 19 nt, Artificial Sequence
  Description of Artificial Sequence: Synthetic oligonucleotide
cgaagggcuugagugauga

SEQ ID NO: 2446911 - RNA, 19 nt, Artificial Sequence
  Description of Artificial Sequence: Synthetic oligonucleotide
gggcagggcuagacgguag

SEQ ID NO: 2446912 - RNA, 19 nt, Artificial Sequence
  Description of Artificial Sequence: Synthetic oligonucleotide
ggcuggaguagccgggccu

SEQ ID NO: 2446913 - RNA, 19 nt, Artificial Sequence
  Description of Artificial Sequence: Synthetic oligonucleotide
cugggaccuguacuuuccu

SEQ ID NO: 2446914 - RNA, 19 nt, Artificial Sequence
  Description of Artificial Sequence: Synthetic oligonucleotide
gcaguaugcacagguuccu

SEQ ID NO: 2446915 - RNA, 19 nt, Artificial Sequence
  Description of Artificial Sequence: Synthetic oligonucleotide
ccgaagggcuugagugaug

SEQ ID NO: 2446916 - RNA, 19 nt, Artificial Sequence
  Description of Artificial Sequence: Synthetic oligonucleotide
ggaccuguacuuuccucuu

SEQ ID NO: 2446917 - RNA, 19 nt, Artificial Sequence
  Description of Artificial Sequence: Synthetic oligonucleotide
cagugcugucacagcugaa

SEQ ID NO: 2446918 - RNA, 19 nt, Artificial Sequence
  Description of Artificial Sequence: Synthetic oligonucleotide
cuggaguagccgggccuca

SEQ ID NO: 2446919 - RNA, 19 nt, Artificial Sequence
  Description of Artificial Sequence: Synthetic oligonucleotide
gcaauugcccauggagggu

SEQ ID NO: 2446920 - RNA, 19 nt, Artificial Sequence
  Description of Artificial Sequence: Synthetic oligonucleotide
gggcaaguucagccucaga

SEQ ID NO: 2446921 - RNA, 19 nt, Artificial Sequence
  Description of Artificial Sequence: Synthetic oligonucleotide
cagguaagcuggggcaggu

SEQ ID NO: 2446922 - RNA, 19 nt, Artificial Sequence
  Description of Artificial Sequence: Synthetic oligonucleotide
gagaucccugaagcaggau

SEQ ID NO: 2446923 - RNA, 19 nt, Artificial Sequence
  Description of Artificial Sequence: Synthetic oligonucleotide
guccacuccucaaggcaau

SEQ ID NO: 2446924 - RNA, 19 nt, Artificial Sequence
  Description of Artificial Sequence: Synthetic oligonucleotide
ccgggccucaucaggaggu

SEQ ID NO: 2446925 - RNA, 19 nt, Artificial Sequence
  Description of Artificial Sequence: Synthetic oligonucleotide
caacuccuccuggccccuc

SEQ ID NO: 2446926 - RNA, 19 nt, Artificial Sequence
  Description of Artificial Sequence: Synthetic oligonucleotide
cccugccuuuucauuccga

SEQ ID NO: 2446927 - RNA, 19 nt, Artificial Sequence
  Description of Artificial Sequence: Synthetic oligonucleotide
guucccugguccagucuuu

SEQ ID NO: 2446928 - RNA, 19 nt, Artificial Sequence
  Description of Artificial Sequence: Synthetic oligonucleotide
ccgucgggcaggggauggg

SEQ ID NO: 2446929 - RNA, 19 nt, Artificial Sequence
  Description of Artificial Sequence: Synthetic oligonucleotide
ccgccucagguacucagcu

SEQ ID NO: 2446930 - RNA, 19 nt, Artificial Sequence
  Description of Artificial Sequence: Synthetic oligonucleotide
gguacucagcugccuucuu

SEQ ID NO: 2446931 - RNA, 19 nt, Artificial Sequence
  Description of Artificial Sequence: Synthetic oligonucleotide
ggagggucucugcccgccu

SEQ ID NO: 2446932 - RNA, 19 nt, Artificial Sequence
  Description of Artificial Sequence: Synthetic oligonucleotide
gggcuagacgguaggggau

SEQ ID NO: 2446933 - RNA, 19 nt, Artificial Sequence
  Description of Artificial Sequence: Synthetic oligonucleotide
gcauaagccccugccuuuu

SEQ ID NO: 2446934 - RNA, 19 nt, Artificial Sequence
  Description of Artificial Sequence: Synthetic oligonucleotide
gggcagguucucccauccu

SEQ ID NO: 2446935 - RNA, 19 nt, Artificial Sequence
  Description of Artificial Sequence: Synthetic oligonucleotide
ccgcaggcaguggcuggag

SEQ ID NO: 2446936 - RNA, 19 nt, Artificial Sequence
  Description of Artificial Sequence: Synthetic oligonucleotide
ccaucucgguagccuugga

SEQ ID NO: 2446937 - RNA, 19 nt, Artificial Sequence
  Description of Artificial Sequence: Synthetic oligonucleotide
cgguagccuuggagggcag

SEQ ID NO: 2446938 - RNA, 19 nt, Artificial Sequence
  Description of Artificial Sequence: Synthetic oligonucleotide
ccuucccgucgggcagggg

SEQ ID NO: 2446939 - RNA, 19 nt, Artificial Sequence
  Description of Artificial Sequence: Synthetic oligonucleotide
ccagcucaccagugugggu

SEQ ID NO: 2446940 - RNA, 19 nt, Artificial Sequence
  Description of Artificial Sequence: Synthetic oligonucleotide
gcuggggagcuggaugcuu

SEQ ID NO: 2446941 - RNA, 19 nt, Artificial Sequence
  Description of Artificial Sequence: Synthetic oligonucleotide
ggcuggggagcuggaugcu

SEQ ID NO: 2446942 - RNA, 19 nt, Artificial Sequence
  Description of Artificial Sequence: Synthetic oligonucleotide
cgcaggcaguggcuggagu

SEQ ID NO: 2446943 - RNA, 19 nt, Artificial Sequence
  Description of Artificial Sequence: Synthetic oligonucleotide
cgucgggcaggggaugggu

SEQ ID NO: 2446944 - RNA, 19 nt, Artificial Sequence
  Description of Artificial Sequence: Synthetic oligonucleotide
  modified_base (1)..(1): a, c, u, g, unknown or other
naccccaucucgguagccu

SEQ ID NO: 2446945 - RNA, 19 nt, Artificial Sequence
  Description of Artificial Sequence: Synthetic oligonucleotide
uuuauauauauauaaacgg

SEQ ID NO: 2446946 - RNA, 19 nt, Artificial Sequence
  Description of Artificial Sequence: Synthetic oligonucleotide
uauauauauauaaacgggg

SEQ ID NO: 2446947 - RNA, 19 nt, Artificial Sequence
  Description of Artificial Sequence: Synthetic oligonucleotide
uuauauauauauaaacggg

SEQ ID NO: 2446948 - RNA, 19 nt, Artificial Sequence
  Description of Artificial Sequence: Synthetic oligonucleotide
uuuauuuauauauauauaa

SEQ ID NO: 2446949 - RNA, 19 nt, Artificial Sequence
  Description of Artificial Sequence: Synthetic oligonucleotide
acuguuggaacucagauuc

SEQ ID NO: 2446950 - RNA, 19 nt, Artificial Sequence
  Description of Artificial Sequence: Synthetic oligonucleotide
auuuauauauauauaaacg

SEQ ID NO: 2446951 - RNA, 19 nt, Artificial Sequence
  Description of Artificial Sequence: Synthetic oligonucleotide
uauuuauauauauauaaac

SEQ ID NO: 2446952 - RNA, 19 nt, Artificial Sequence
  Description of Artificial Sequence: Synthetic oligonucleotide
ugcacaaagaccuauuagg

SEQ ID NO: 2446953 - RNA, 19 nt, Artificial Sequence
  Description of Artificial Sequence: Synthetic oligonucleotide
uccagaauggaaaacgcgg

SEQ ID NO: 2446954 - RNA, 19 nt, Artificial Sequence
  Description of Artificial Sequence: Synthetic oligonucleotide
acacaaguaggcuuggugc

SEQ ID NO: 2446955 - RNA, 19 nt, Artificial Sequence
  Description of Artificial Sequence: Synthetic oligonucleotide
ucuuuauacacaaguaggc

SEQ ID NO: 2446956 - RNA, 19 nt, Artificial Sequence
  Description of Artificial Sequence: Synthetic oligonucleotide
uaaaacuauguccuuagca

SEQ ID NO: 2446957 - RNA, 19 nt, Artificial Sequence
  Description of Artificial Sequence: Synthetic oligonucleotide
ugucguucuauuuauaucu

SEQ ID NO: 2446958 - RNA, 19 nt, Artificial Sequence
  Description of Artificial Sequence: Synthetic oligonucleotide
uccucuugcacaaagaccu

SEQ ID NO: 2446959 - RNA, 19 nt, Artificial Sequence
  Description of Artificial Sequence: Synthetic oligonucleotide
uuaguucugacaucugucg

SEQ ID NO: 2446960 - RNA, 19 nt, Artificial Sequence
  Description of Artificial Sequence: Synthetic oligonucleotide
caguucaagagauaaauag

SEQ ID NO: 2446961 - RNA, 19 nt, Artificial Sequence
  Description of Artificial Sequence: Synthetic oligonucleotide
aaggcuuugguguggggcc

SEQ ID NO: 2446962 - RNA, 19 nt, Artificial Sequence
  Description of Artificial Sequence: Synthetic oligonucleotide
aagaacgccugcuuagccc

SEQ ID NO: 2446963 - RNA, 19 nt, Artificial Sequence
  Description of Artificial Sequence: Synthetic oligonucleotide
uuauuuauauauauauaaa

SEQ ID NO: 2446964 - RNA, 19 nt, Artificial Sequence
  Description of Artificial Sequence: Synthetic oligonucleotide
agagauaaauagcaucugg

SEQ ID NO: 2446965 - RNA, 19 nt, Artificial Sequence
  Description of Artificial Sequence: Synthetic oligonucleotide
uuaggaguuaggccgacgg

SEQ ID NO: 2446966 - RNA, 19 nt, Artificial Sequence
  Description of Artificial Sequence: Synthetic oligonucleotide
gaaguuugacaacuguugg

SEQ ID NO: 2446967 - RNA, 19 nt, Artificial Sequence
  Description of Artificial Sequence: Synthetic oligonucleotide
ccuauuaggaguuaggccg

SEQ ID NO: 2446968 - RNA, 19 nt, Artificial Sequence
  Description of Artificial Sequence: Synthetic oligonucleotide
aacagaaggcacuucucgg

SEQ ID NO: 2446969 - RNA, 19 nt, Artificial Sequence
  Description of Artificial Sequence: Synthetic oligonucleotide
aguucaagagauaaauagc

SEQ ID NO: 2446970 - RNA, 19 nt, Artificial Sequence
  Description of Artificial Sequence: Synthetic oligonucleotide
auagcaucugguuaaaacu

SEQ ID NO: 2446971 - RNA, 19 nt, Artificial Sequence
  Description of Artificial Sequence: Synthetic oligonucleotide
aucuuuauacacaaguagg

SEQ ID NO: 2446972 - RNA, 19 nt, Artificial Sequence
  Description of Artificial Sequence: Synthetic oligonucleotide
ucaagagauaaauagcauc

SEQ ID NO: 2446973 - RNA, 19 nt, Artificial Sequence
  Description of Artificial Sequence: Synthetic oligonucleotide
guuaaaacuauguccuuag

SEQ ID NO: 2446974 - RNA, 19 nt, Artificial Sequence
  Description of Artificial Sequence: Synthetic oligonucleotide
uuugacaacuguuggaacu

SEQ ID NO: 2446975 - RNA, 19 nt, Artificial Sequence
  Description of Artificial Sequence: Synthetic oligonucleotide
aaacuuaguucugacaucu

SEQ ID NO: 2446976 - RNA, 19 nt, Artificial Sequence
  Description of Artificial Sequence: Synthetic oligonucleotide
ugcuaacuugcucagcgcg

SEQ ID NO: 2446977 - RNA, 19 nt, Artificial Sequence
  Description of Artificial Sequence: Synthetic oligonucleotide
agaacuggccgcgagauac

SEQ ID NO: 2446978 - RNA, 19 nt, Artificial Sequence
  Description of Artificial Sequence: Synthetic oligonucleotide
aacuauguccuuagcaaac

SEQ ID NO: 2446979 - RNA, 19 nt, Artificial Sequence
  Description of Artificial Sequence: Synthetic oligonucleotide
aguguaacuuuauuuauau

SEQ ID NO: 2446980 - RNA, 19 nt, Artificial Sequence
  Description of Artificial Sequence: Synthetic oligonucleotide
uggacucacaccaaaacaa

SEQ ID NO: 2446981 - RNA, 19 nt, Artificial Sequence
  Description of Artificial Sequence: Synthetic oligonucleotide
aucugguuaaaacuauguc

SEQ ID NO: 2446982 - RNA, 19 nt, Artificial Sequence
  Description of Artificial Sequence: Synthetic oligonucleotide
uuuauacacaaguaggcuu

SEQ ID NO: 2446983 - RNA, 19 nt, Artificial Sequence
  Description of Artificial Sequence: Synthetic oligonucleotide
aaaggguggugcuaacuug

SEQ ID NO: 2446984 - RNA, 19 nt, Artificial Sequence
  Description of Artificial Sequence: Synthetic oligonucleotide
aaacuauguccuuagcaaa

SEQ ID NO: 2446985 - RNA, 19 nt, Artificial Sequence
  Description of Artificial Sequence: Synthetic oligonucleotide
uuggauucuggacucacac

SEQ ID NO: 2446986 - RNA, 19 nt, Artificial Sequence
  Description of Artificial Sequence: Synthetic oligonucleotide
ucuagagcgccuaggguag

SEQ ID NO: 2446987 - RNA, 19 nt, Artificial Sequence
  Description of Artificial Sequence: Synthetic oligonucleotide
aacgaaguuugacaacugu

SEQ ID NO: 2446988 - RNA, 19 nt, Artificial Sequence
  Description of Artificial Sequence: Synthetic oligonucleotide
aaguuugacaacuguugga

SEQ ID NO: 2446989 - RNA, 19 nt, Artificial Sequence
  Description of Artificial Sequence: Synthetic oligonucleotide
aacuucuugcccuccccac

SEQ ID NO: 2446990 - RNA, 19 nt, Artificial Sequence
  Description of Artificial Sequence: Synthetic oligonucleotide
ugagcaacgcggcaugugc

SEQ ID NO: 2446991 - RNA, 19 nt, Artificial Sequence
  Description of Artificial Sequence: Synthetic oligonucleotide
ggugcuaacuugcucagcg

SEQ ID NO: 2446992 - RNA, 19 nt, Artificial Sequence
  Description of Artificial Sequence: Synthetic oligonucleotide
ugugcuucggccgaccagg

SEQ ID NO: 2446993 - RNA, 19 nt, Artificial Sequence
  Description of Artificial Sequence: Synthetic oligonucleotide
guucaagagauaaauagca

SEQ ID NO: 2446994 - RNA, 19 nt, Artificial Sequence
  Description of Artificial Sequence: Synthetic oligonucleotide
agaauggaaaacgcggacg

SEQ ID NO: 2446995 - RNA, 19 nt, Artificial Sequence
  Description of Artificial Sequence: Synthetic oligonucleotide
uccuuagcaaacuuaguuc

SEQ ID NO: 2446996 - RNA, 19 nt, Artificial Sequence
  Description of Artificial Sequence: Synthetic oligonucleotide
uucuauuuauaucuuuaua

SEQ ID NO: 2446997 - RNA, 19 nt, Artificial Sequence
  Description of Artificial Sequence: Synthetic oligonucleotide
agaguuuggucagaggccg

SEQ ID NO: 2446998 - RNA, 19 nt, Artificial Sequence
  Description of Artificial Sequence: Synthetic oligonucleotide
ugucugcaagaacuggccg

SEQ ID NO: 2446999 - RNA, 19 nt, Artificial Sequence
  Description of Artificial Sequence: Synthetic oligonucleotide
gaauggaaaacgcggacga

SEQ ID NO: 2447000 - RNA, 19 nt, Artificial Sequence
  Description of Artificial Sequence: Synthetic oligonucleotide
cuuaguucugacaucuguc

SEQ ID NO: 2447001 - RNA, 19 nt, Artificial Sequence
  Description of Artificial Sequence: Synthetic oligonucleotide
cacaaguaggcuuggugcg

SEQ ID NO: 2447002 - RNA, 19 nt, Artificial Sequence
  Description of Artificial Sequence: Synthetic oligonucleotide
agauaaauagcaucugguu

SEQ ID NO: 2447003 - RNA, 19 nt, Artificial Sequence
  Description of Artificial Sequence: Synthetic oligonucleotide
uguagaguuuggucagagg

SEQ ID NO: 2447004 - RNA, 19 nt, Artificial Sequence
  Description of Artificial Sequence: Synthetic oligonucleotide
aacucagauuccagaaugg

SEQ ID NO: 2447005 - RNA, 19 nt, Artificial Sequence
  Description of Artificial Sequence: Synthetic oligonucleotide
acgaguccaggucccaucc

SEQ ID NO: 2447006 - RNA, 19 nt, Artificial Sequence
  Description of Artificial Sequence: Synthetic oligonucleotide
aagaccuauuaggaguuag

SEQ ID NO: 2447007 - RNA, 19 nt, Artificial Sequence
  Description of Artificial Sequence: Synthetic oligonucleotide
uucaagagauaaauagcau

SEQ ID NO: 2447008 - RNA, 19 nt, Artificial Sequence
  Description of Artificial Sequence: Synthetic oligonucleotide
ggcuccggcaaacagaagg

SEQ ID NO: 2447009 - RNA, 19 nt, Artificial Sequence
  Description of Artificial Sequence: Synthetic oligonucleotide
gaccuauuaggaguuaggc

SEQ ID NO: 2447010 - RNA, 19 nt, Artificial Sequence
  Description of Artificial Sequence: Synthetic oligonucleotide
aagagauaaauagcaucug

SEQ ID NO: 2447011 - RNA, 19 nt, Artificial Sequence
  Description of Artificial Sequence: Synthetic oligonucleotide
cuggccgcgagauacggcg

SEQ ID NO: 2447012 - RNA, 19 nt, Artificial Sequence
  Description of Artificial Sequence: Synthetic oligonucleotide
cucucuagagcgccuaggg

SEQ ID NO: 2447013 - RNA, 19 nt, Artificial Sequence
  Description of Artificial Sequence: Synthetic oligonucleotide
cagauugcccuggagaggg

SEQ ID NO: 2447014 - RNA, 19 nt, Artificial Sequence
  Description of Artificial Sequence: Synthetic oligonucleotide
aacuguuggaacucagauu

SEQ ID NO: 2447015 - RNA, 19 nt, Artificial Sequence
  Description of Artificial Sequence: Synthetic oligonucleotide
uaggaguuaggccgacggg

SEQ ID NO: 2447016 - RNA, 19 nt, Artificial Sequence
  Description of Artificial Sequence: Synthetic oligonucleotide
cuuuauuuauauauauaua

SEQ ID NO: 2447017 - RNA, 19 nt, Artificial Sequence
  Description of Artificial Sequence: Synthetic oligonucleotide
uggaaaacgcggacgaguc

SEQ ID NO: 2447018 - RNA, 19 nt, Artificial Sequence
  Description of Artificial Sequence: Synthetic oligonucleotide
uuuggucagaggccgcgag

SEQ ID NO: 2447019 - RNA, 19 nt, Artificial Sequence
  Description of Artificial Sequence: Synthetic oligonucleotide
acaucugucguucuauuua

SEQ ID NO: 2447020 - RNA, 19 nt, Artificial Sequence
  Description of Artificial Sequence: Synthetic oligonucleotide
aguuugacaacuguuggaa

SEQ ID NO: 2447021 - RNA, 19 nt, Artificial Sequence
  Description of Artificial Sequence: Synthetic oligonucleotide
cuccucuugcacaaagacc

SEQ ID NO: 2447022 - RNA, 19 nt, Artificial Sequence
  Description of Artificial Sequence: Synthetic oligonucleotide
gaggccgcgaggucaaagg

SEQ ID NO: 2447023 - RNA, 19 nt, Artificial Sequence
  Description of Artificial Sequence: Synthetic oligonucleotide
aggccgacgggacugcgcc

SEQ ID NO: 2447024 - RNA, 19 nt, Artificial Sequence
  Description of Artificial Sequence: Synthetic oligonucleotide
ggauucuggacucacacca

SEQ ID NO: 2447025 - RNA, 19 nt, Artificial Sequence
  Description of Artificial Sequence: Synthetic oligonucleotide
uccaggucccauccgcacg

SEQ ID NO: 2447026 - RNA, 19 nt, Artificial Sequence
  Description of Artificial Sequence: Synthetic oligonucleotide
gaaaacgcggacgagucca

SEQ ID NO: 2447027 - RNA, 19 nt, Artificial Sequence
  Description of Artificial Sequence: Synthetic oligonucleotide
agaacgccugcuuagcccu

SEQ ID NO: 2447028 - RNA, 19 nt, Artificial Sequence
  Description of Artificial Sequence: Synthetic oligonucleotide
ugcaagaacuggccgcgag

SEQ ID NO: 2447029 - RNA, 19 nt, Artificial Sequence
  Description of Artificial Sequence: Synthetic oligonucleotide
uccggcaaacagaaggcac

SEQ ID NO: 2447030 - RNA, 19 nt, Artificial Sequence
  Description of Artificial Sequence: Synthetic oligonucleotide
aauggaaaacgcggacgag

SEQ ID NO: 2447031 - RNA, 19 nt, Artificial Sequence
  Description of Artificial Sequence: Synthetic oligonucleotide
uuggucagaggccgcgagg

SEQ ID NO: 2447032 - RNA, 19 nt, Artificial Sequence
  Description of Artificial Sequence: Synthetic oligonucleotide
uggauucuggacucacacc

SEQ ID NO: 2447033 - RNA, 19 nt, Artificial Sequence
  Description of Artificial Sequence: Synthetic oligonucleotide
gucugcaagaacuggccgc

SEQ ID NO: 2447034 - RNA, 19 nt, Artificial Sequence
  Description of Artificial Sequence: Synthetic oligonucleotide
cuucggccgaccaggaggg

SEQ ID NO: 2447035 - RNA, 19 nt, Artificial Sequence
  Description of Artificial Sequence: Synthetic oligonucleotide
uuguccugagcaacgcggc

SEQ ID NO: 2447036 - RNA, 19 nt, Artificial Sequence
  Description of Artificial Sequence: Synthetic oligonucleotide
ucggcuccggcaaacagaa

SEQ ID NO: 2447037 - RNA, 19 nt, Artificial Sequence
  Description of Artificial Sequence: Synthetic oligonucleotide
gguggugcuaacuugcuca

SEQ ID NO: 2447038 - RNA, 19 nt, Artificial Sequence
  Description of Artificial Sequence: Synthetic oligonucleotide
uuggcaugcugccucgcgc

SEQ ID NO: 2447039 - RNA, 19 nt, Artificial Sequence
  Description of Artificial Sequence: Synthetic oligonucleotide
caaacuuaguucugacauc

SEQ ID NO: 2447040 - RNA, 19 nt, Artificial Sequence
  Description of Artificial Sequence: Synthetic oligonucleotide
uaacuugcucagcgcgugg

SEQ ID NO: 2447041 - RNA, 19 nt, Artificial Sequence
  Description of Artificial Sequence: Synthetic oligonucleotide
cugucguucuauuuauauc

SEQ ID NO: 2447042 - RNA, 19 nt, Artificial Sequence
  Description of Artificial Sequence: Synthetic oligonucleotide
accgcaauggcaguucaag

SEQ ID NO: 2447043 - RNA, 19 nt, Artificial Sequence
  Description of Artificial Sequence: Synthetic oligonucleotide
agaccuauuaggaguuagg

SEQ ID NO: 2447044 - RNA, 19 nt, Artificial Sequence
  Description of Artificial Sequence: Synthetic oligonucleotide
gcuucggccgaccaggagg

SEQ ID NO: 2447045 - RNA, 19 nt, Artificial Sequence
  Description of Artificial Sequence: Synthetic oligonucleotide
ucucuagagcgccuagggu

SEQ ID NO: 2447046 - RNA, 19 nt, Artificial Sequence
  Description of Artificial Sequence: Synthetic oligonucleotide
gagcgccuaggguaggagg

SEQ ID NO: 2447047 - RNA, 19 nt, Artificial Sequence
  Description of Artificial Sequence: Synthetic oligonucleotide
aguucugacaucugucguu

SEQ ID NO: 2447048 - RNA, 19 nt, Artificial Sequence
  Description of Artificial Sequence: Synthetic oligonucleotide
uguccuuagcaaacuuagu

SEQ ID NO: 2447049 - RNA, 19 nt, Artificial Sequence
  Description of Artificial Sequence: Synthetic oligonucleotide
aguuuggucagaggccgcg

SEQ ID NO: 2447050 - RNA, 19 nt, Artificial Sequence
  Description of Artificial Sequence: Synthetic oligonucleotide
cagaauggaaaacgcggac

SEQ ID NO: 2447051 - RNA, 19 nt, Artificial Sequence
  Description of Artificial Sequence: Synthetic oligonucleotide
caagaacgccugcuuagcc

SEQ ID NO: 2447052 - RNA, 19 nt, Artificial Sequence
  Description of Artificial Sequence: Synthetic oligonucleotide
agcgcguggaccgcaaugg

SEQ ID NO: 2447053 - RNA, 19 nt, Artificial Sequence
  Description of Artificial Sequence: Synthetic oligonucleotide
aacuggccgcgagauacgg

SEQ ID NO: 2447054 - RNA, 19 nt, Artificial Sequence
  Description of Artificial Sequence: Synthetic oligonucleotide
ucugacaucugucguucua

SEQ ID NO: 2447055 - RNA, 19 nt, Artificial Sequence
  Description of Artificial Sequence: Synthetic oligonucleotide
ggucguguuguccugagca

SEQ ID NO: 2447056 - RNA, 19 nt, Artificial Sequence
  Description of Artificial Sequence: Synthetic oligonucleotide
acaaguaggcuuggugcgg

SEQ ID NO: 2447057 - RNA, 19 nt, Artificial Sequence
  Description of Artificial Sequence: Synthetic oligonucleotide
aaacgaaguuugacaacug

SEQ ID NO: 2447058 - RNA, 19 nt, Artificial Sequence
  Description of Artificial Sequence: Synthetic oligonucleotide
ucuugcacaaagaccuauu

SEQ ID NO: 2447059 - RNA, 19 nt, Artificial Sequence
  Description of Artificial Sequence: Synthetic oligonucleotide
guuugacaacuguuggaac

SEQ ID NO: 2447060 - RNA, 19 nt, Artificial Sequence
  Description of Artificial Sequence: Synthetic oligonucleotide
cucuagagcgccuagggua

SEQ ID NO: 2447061 - RNA, 19 nt, Artificial Sequence
  Description of Artificial Sequence: Synthetic oligonucleotide
ugcggguuggauucuggac

SEQ ID NO: 2447062 - RNA, 19 nt, Artificial Sequence
  Description of Artificial Sequence: Synthetic oligonucleotide
cuuggcaugcugccucgcg

SEQ ID NO: 2447063 - RNA, 19 nt, Artificial Sequence
  Description of Artificial Sequence: Synthetic oligonucleotide
aggaguuaggccgacggga

SEQ ID NO: 2447064 - RNA, 19 nt, Artificial Sequence
  Description of Artificial Sequence: Synthetic oligonucleotide
uccugagcaacgcggcaug

SEQ ID NO: 2447065 - RNA, 19 nt, Artificial Sequence
  Description of Artificial Sequence: Synthetic oligonucleotide
cgaaguuugacaacuguug

SEQ ID NO: 2447066 - RNA, 19 nt, Artificial Sequence
  Description of Artificial Sequence: Synthetic oligonucleotide
agcgccuaggguaggaggg

SEQ ID NO: 2447067 - RNA, 19 nt, Artificial Sequence
  Description of Artificial Sequence: Synthetic oligonucleotide
acuauguccuuagcaaacu

SEQ ID NO: 2447068 - RNA, 19 nt, Artificial Sequence
  Description of Artificial Sequence: Synthetic oligonucleotide
aguuaggccgacgggacug

SEQ ID NO: 2447069 - RNA, 19 nt, Artificial Sequence
  Description of Artificial Sequence: Synthetic oligonucleotide
uuagcccuggccccacccc

SEQ ID NO: 2447070 - RNA, 19 nt, Artificial Sequence
  Description of Artificial Sequence: Synthetic oligonucleotide
ucaaaggguggugcuaacu

SEQ ID NO: 2447071 - RNA, 19 nt, Artificial Sequence
  Description of Artificial Sequence: Synthetic oligonucleotide
gggaaacgaaguuugacaa

SEQ ID NO: 2447072 - RNA, 19 nt, Artificial Sequence
  Description of Artificial Sequence: Synthetic oligonucleotide
gcaaacuuaguucugacau

SEQ ID NO: 2447073 - RNA, 19 nt, Artificial Sequence
  Description of Artificial Sequence: Synthetic oligonucleotide
guuggaacucagauuccag

SEQ ID NO: 2447074 - RNA, 19 nt, Artificial Sequence
  Description of Artificial Sequence: Synthetic oligonucleotide
uuugcccgggaggaucugg

SEQ ID NO: 2447075 - RNA, 19 nt, Artificial Sequence
  Description of Artificial Sequence: Synthetic oligonucleotide
aggccgcgaggucaaaggg

SEQ ID NO: 2447076 - RNA, 19 nt, Artificial Sequence
  Description of Artificial Sequence: Synthetic oligonucleotide
aggucguguuguccugagc

SEQ ID NO: 2447077 - RNA, 19 nt, Artificial Sequence
  Description of Artificial Sequence: Synthetic oligonucleotide
gaugugggugcaguguaac

SEQ ID NO: 2447078 - RNA, 19 nt, Artificial Sequence
  Description of Artificial Sequence: Synthetic oligonucleotide
ucguucuauuuauaucuuu

SEQ ID NO: 2447079 - RNA, 19 nt, Artificial Sequence
  Description of Artificial Sequence: Synthetic oligonucleotide
ucuggcggggcuuggcaug

SEQ ID NO: 2447080 - RNA, 19 nt, Artificial Sequence
  Description of Artificial Sequence: Synthetic oligonucleotide
cuaacuugcucagcgcgug

SEQ ID NO: 2447081 - RNA, 19 nt, Artificial Sequence
  Description of Artificial Sequence: Synthetic oligonucleotide
gugucugcaagaacuggcc

SEQ ID NO: 2447082 - RNA, 19 nt, Artificial Sequence
  Description of Artificial Sequence: Synthetic oligonucleotide
auuaggaguuaggccgacg

SEQ ID NO: 2447083 - RNA, 19 nt, Artificial Sequence
  Description of Artificial Sequence: Synthetic oligonucleotide
uaaauagcaucugguuaaa

SEQ ID NO: 2447084 - RNA, 19 nt, Artificial Sequence
  Description of Artificial Sequence: Synthetic oligonucleotide
cuauuaggaguuaggccga

SEQ ID NO: 2447085 - RNA, 19 nt, Artificial Sequence
  Description of Artificial Sequence: Synthetic oligonucleotide
acgcggacgaguccagguc

SEQ ID NO: 2447086 - RNA, 19 nt, Artificial Sequence
  Description of Artificial Sequence: Synthetic oligonucleotide
ugaugugggugcaguguaa

SEQ ID NO: 2447087 - RNA, 19 nt, Artificial Sequence
  Description of Artificial Sequence: Synthetic oligonucleotide
ugucgcucggcuccggcaa

SEQ ID NO: 2447088 - RNA, 19 nt, Artificial Sequence
  Description of Artificial Sequence: Synthetic oligonucleotide
ggguguagaguuuggucag

SEQ ID NO: 2447089 - RNA, 19 nt, Artificial Sequence
  Description of Artificial Sequence: Synthetic oligonucleotide
aaauagcaucugguuaaaa

SEQ ID NO: 2447090 - RNA, 19 nt, Artificial Sequence
  Description of Artificial Sequence: Synthetic oligonucleotide
cuuagcccuggccccaccc

SEQ ID NO: 2447091 - RNA, 19 nt, Artificial Sequence
  Description of Artificial Sequence: Synthetic oligonucleotide
aaacgcggacgaguccagg

SEQ ID NO: 2447092 - RNA, 19 nt, Artificial Sequence
  Description of Artificial Sequence: Synthetic oligonucleotide
uguggggccuccucuugca

SEQ ID NO: 2447093 - RNA, 19 nt, Artificial Sequence
  Description of Artificial Sequence: Synthetic oligonucleotide
guguagaguuuggucagag

SEQ ID NO: 2447094 - RNA, 19 nt, Artificial Sequence
  Description of Artificial Sequence: Synthetic oligonucleotide
gaggucguguuguccugag

SEQ ID NO: 2447095 - RNA, 19 nt, Artificial Sequence
  Description of Artificial Sequence: Synthetic oligonucleotide
caucugguuaaaacuaugu

SEQ ID NO: 2447096 - RNA, 19 nt, Artificial Sequence
  Description of Artificial Sequence: Synthetic oligonucleotide
aaaacgcggacgaguccag

SEQ ID NO: 2447097 - RNA, 19 nt, Artificial Sequence
  Description of Artificial Sequence: Synthetic oligonucleotide
augugcuucggccgaccag

SEQ ID NO: 2447098 - RNA, 19 nt, Artificial Sequence
  Description of Artificial Sequence: Synthetic oligonucleotide
ucguguuguccugagcaac

SEQ ID NO: 2447099 - RNA, 19 nt, Artificial Sequence
  Description of Artificial Sequence: Synthetic oligonucleotide
uggcaguucaagagauaaa

SEQ ID NO: 2447100 - RNA, 19 nt, Artificial Sequence
  Description of Artificial Sequence: Synthetic oligonucleotide
caacgcggcaugugcuucg

SEQ ID NO: 2447101 - RNA, 19 nt, Artificial Sequence
  Description of Artificial Sequence: Synthetic oligonucleotide
gcaauggcaguucaagaga

SEQ ID NO: 2447102 - RNA, 19 nt, Artificial Sequence
  Description of Artificial Sequence: Synthetic oligonucleotide
gacgaggucguguuguccu

SEQ ID NO: 2447103 - RNA, 19 nt, Artificial Sequence
  Description of Artificial Sequence: Synthetic oligonucleotide
cacagcucucuagagcgcc

SEQ ID NO: 2447104 - RNA, 19 nt, Artificial Sequence
  Description of Artificial Sequence: Synthetic oligonucleotide
guccuuagcaaacuuaguu

SEQ ID NO: 2447105 - RNA, 19 nt, Artificial Sequence
  Description of Artificial Sequence: Synthetic oligonucleotide
acgggacugcgcccuagcg

SEQ ID NO: 2447106 - RNA, 19 nt, Artificial Sequence
  Description of Artificial Sequence: Synthetic oligonucleotide
gaccaggagggcagugucg

SEQ ID NO: 2447107 - RNA, 19 nt, Artificial Sequence
  Description of Artificial Sequence: Synthetic oligonucleotide
cuuuauacacaaguaggcu

SEQ ID NO: 2447108 - RNA, 19 nt, Artificial Sequence
  Description of Artificial Sequence: Synthetic oligonucleotide
aacuuaguucugacaucug

SEQ ID NO: 2447109 - RNA, 19 nt, Artificial Sequence
  Description of Artificial Sequence: Synthetic oligonucleotide
gacgaguccaggucccauc

SEQ ID NO: 2447110 - RNA, 19 nt, Artificial Sequence
  Description of Artificial Sequence: Synthetic oligonucleotide
aacgcggcaugugcuucgg

SEQ ID NO: 2447111 - RNA, 19 nt, Artificial Sequence
  Description of Artificial Sequence: Synthetic oligonucleotide
caguguaacuuuauuuaua

SEQ ID NO: 2447112 - RNA, 19 nt, Artificial Sequence
  Description of Artificial Sequence: Synthetic oligonucleotide
gugcuaacuugcucagcgc

SEQ ID NO: 2447113 - RNA, 19 nt, Artificial Sequence
  Description of Artificial Sequence: Synthetic oligonucleotide
gaacuggccgcgagauacg

SEQ ID NO: 2447114 - RNA, 19 nt, Artificial Sequence
  Description of Artificial Sequence: Synthetic oligonucleotide
acgaaguuugacaacuguu

SEQ ID NO: 2447115 - RNA, 19 nt, Artificial Sequence
  Description of Artificial Sequence: Synthetic oligonucleotide
acugcgcccuagcgguggc

SEQ ID NO: 2447116 - RNA, 19 nt, Artificial Sequence
  Description of Artificial Sequence: Synthetic oligonucleotide
gacugcgcccuagcggugg

SEQ ID NO: 2447117 - RNA, 19 nt, Artificial Sequence
  Description of Artificial Sequence: Synthetic oligonucleotide
ugacaucugucguucuauu

SEQ ID NO: 2447118 - RNA, 19 nt, Artificial Sequence
  Description of Artificial Sequence: Synthetic oligonucleotide
uaggccgacgggacugcgc

SEQ ID NO: 2447119 - RNA, 19 nt, Artificial Sequence
  Description of Artificial Sequence: Synthetic oligonucleotide
gugccucgguggcagauug

SEQ ID NO: 2447120 - RNA, 19 nt, Artificial Sequence
  Description of Artificial Sequence: Synthetic oligonucleotide
aaguaggcuuggugcgggu

SEQ ID NO: 2447121 - RNA, 19 nt, Artificial Sequence
  Description of Artificial Sequence: Synthetic oligonucleotide
gcacaaagaccuauuagga

SEQ ID NO: 2447122 - RNA, 19 nt, Artificial Sequence
  Description of Artificial Sequence: Synthetic oligonucleotide
ucgguggcagauugcccug

SEQ ID NO: 2447123 - RNA, 19 nt, Artificial Sequence
  Description of Artificial Sequence: Synthetic oligonucleotide
agggaccggggcaagagug

SEQ ID NO: 2447124 - RNA, 19 nt, Artificial Sequence
  Description of Artificial Sequence: Synthetic oligonucleotide
gcggcaugugcuucggccg

SEQ ID NO: 2447125 - RNA, 19 nt, Artificial Sequence
  Description of Artificial Sequence: Synthetic oligonucleotide
gcaagagugccucgguggc

SEQ ID NO: 2447126 - RNA, 19 nt, Artificial Sequence
  Description of Artificial Sequence: Synthetic oligonucleotide
cccaagaacgccugcuuag

SEQ ID NO: 2447127 - RNA, 19 nt, Artificial Sequence
  Description of Artificial Sequence: Synthetic oligonucleotide
cccacccgccccaagaacg

SEQ ID NO: 2447128 - RNA, 19 nt, Artificial Sequence
  Description of Artificial Sequence: Synthetic oligonucleotide
uauuaggaguuaggccgac

SEQ ID NO: 2447129 - RNA, 19 nt, Artificial Sequence
  Description of Artificial Sequence: Synthetic oligonucleotide
agcaucugguuaaaacuau

SEQ ID NO: 2447130 - RNA, 19 nt, Artificial Sequence
  Description of Artificial Sequence: Synthetic oligonucleotide
aagaacuggccgcgagaua

SEQ ID NO: 2447131 - RNA, 19 nt, Artificial Sequence
  Description of Artificial Sequence: Synthetic oligonucleotide
gacgggacugcgcccuagc

SEQ ID NO: 2447132 - RNA, 19 nt, Artificial Sequence
  Description of Artificial Sequence: Synthetic oligonucleotide
cguguuguccugagcaacg

SEQ ID NO: 2447133 - RNA, 19 nt, Artificial Sequence
  Description of Artificial Sequence: Synthetic oligonucleotide
ggaaaacgcggacgagucc

SEQ ID NO: 2447134 - RNA, 19 nt, Artificial Sequence
  Description of Artificial Sequence: Synthetic oligonucleotide
ccugcuuagcccuggcccc

SEQ ID NO: 2447135 - RNA, 19 nt, Artificial Sequence
  Description of Artificial Sequence: Synthetic oligonucleotide
aaagaccuauuaggaguua

SEQ ID NO: 2447136 - RNA, 19 nt, Artificial Sequence
  Description of Artificial Sequence: Synthetic oligonucleotide
uuaggccgacgggacugcg

SEQ ID NO: 2447137 - RNA, 19 nt, Artificial Sequence
  Description of Artificial Sequence: Synthetic oligonucleotide
uggggucuucccucccacc

SEQ ID NO: 2447138 - RNA, 19 nt, Artificial Sequence
  Description of Artificial Sequence: Synthetic oligonucleotide
acgaggucguguuguccug

SEQ ID NO: 2447139 - RNA, 19 nt, Artificial Sequence
  Description of Artificial Sequence: Synthetic oligonucleotide
ccuuagcaaacuuaguucu

SEQ ID NO: 2447140 - RNA, 19 nt, Artificial Sequence
  Description of Artificial Sequence: Synthetic oligonucleotide
gcguggaccgcaauggcag

SEQ ID NO: 2447141 - RNA, 19 nt, Artificial Sequence
  Description of Artificial Sequence: Synthetic oligonucleotide
agcaacgcggcaugugcuu

SEQ ID NO: 2447142 - RNA, 19 nt, Artificial Sequence
  Description of Artificial Sequence: Synthetic oligonucleotide
ucggccgaccaggagggca

SEQ ID NO: 2447143 - RNA, 19 nt, Artificial Sequence
  Description of Artificial Sequence: Synthetic oligonucleotide
guguuguccugagcaacgc

SEQ ID NO: 2447144 - RNA, 19 nt, Artificial Sequence
  Description of Artificial Sequence: Synthetic oligonucleotide
guguggggccuccucuugc

SEQ ID NO: 2447145 - RNA, 19 nt, Artificial Sequence
  Description of Artificial Sequence: Synthetic oligonucleotide
caaagaccuauuaggaguu

SEQ ID NO: 2447146 - RNA, 19 nt, Artificial Sequence
  Description of Artificial Sequence: Synthetic oligonucleotide
agaggccgcgaggucaaag

SEQ ID NO: 2447147 - RNA, 19 nt, Artificial Sequence
  Description of Artificial Sequence: Synthetic oligonucleotide
ucgcgcuggggucuucccu

SEQ ID NO: 2447148 - RNA, 19 nt, Artificial Sequence
  Description of Artificial Sequence: Synthetic oligonucleotide
uccccacccgccccaagaa

SEQ ID NO: 2447149 - RNA, 19 nt, Artificial Sequence
  Description of Artificial Sequence: Synthetic oligonucleotide
ccagaauggaaaacgcgga

SEQ ID NO: 2447150 - RNA, 19 nt, Artificial Sequence
  Description of Artificial Sequence: Synthetic oligonucleotide
uacggcgcggcugcuuugc

SEQ ID NO: 2447151 - RNA, 19 nt, Artificial Sequence
  Description of Artificial Sequence: Synthetic oligonucleotide
uggaccgcaauggcaguuc

SEQ ID NO: 2447152 - RNA, 19 nt, Artificial Sequence
  Description of Artificial Sequence: Synthetic oligonucleotide
agagcgccuaggguaggag

SEQ ID NO: 2447153 - RNA, 19 nt, Artificial Sequence
  Description of Artificial Sequence: Synthetic oligonucleotide
ggcaguucaagagauaaau

SEQ ID NO: 2447154 - RNA, 19 nt, Artificial Sequence
  Description of Artificial Sequence: Synthetic oligonucleotide
gacaucugucguucuauuu

SEQ ID NO: 2447155 - RNA, 19 nt, Artificial Sequence
  Description of Artificial Sequence: Synthetic oligonucleotide
guuggauucuggacucaca

SEQ ID NO: 2447156 - RNA, 19 nt, Artificial Sequence
  Description of Artificial Sequence: Synthetic oligonucleotide
gucccauccgcacgccgcc

SEQ ID NO: 2447157 - RNA, 19 nt, Artificial Sequence
  Description of Artificial Sequence: Synthetic oligonucleotide
ugcgcccuagcgguggcca

SEQ ID NO: 2447158 - RNA, 19 nt, Artificial Sequence
  Description of Artificial Sequence: Synthetic oligonucleotide
uggccgcgagauacggcgc

SEQ ID NO: 2447159 - RNA, 19 nt, Artificial Sequence
  Description of Artificial Sequence: Synthetic oligonucleotide
aggcacuucucggggcugg

SEQ ID NO: 2447160 - RNA, 19 nt, Artificial Sequence
  Description of Artificial Sequence: Synthetic oligonucleotide
ugccucgguggcagauugc

SEQ ID NO: 2447161 - RNA, 19 nt, Artificial Sequence
  Description of Artificial Sequence: Synthetic oligonucleotide
cuaggguaggagggaccgg

SEQ ID NO: 2447162 - RNA, 19 nt, Artificial Sequence
  Description of Artificial Sequence: Synthetic oligonucleotide
acggcgcggcugcuuugcc

SEQ ID NO: 2447163 - RNA, 19 nt, Artificial Sequence
  Description of Artificial Sequence: Synthetic oligonucleotide
gucaaaggguggugcuaac

SEQ ID NO: 2447164 - RNA, 19 nt, Artificial Sequence
  Description of Artificial Sequence: Synthetic oligonucleotide
acgcggcaugugcuucggc

SEQ ID NO: 2447165 - RNA, 19 nt, Artificial Sequence
  Description of Artificial Sequence: Synthetic oligonucleotide
gucguguuguccugagcaa

SEQ ID NO: 2447166 - RNA, 19 nt, Artificial Sequence
  Description of Artificial Sequence: Synthetic oligonucleotide
uagagcgccuaggguagga

SEQ ID NO: 2447167 - RNA, 19 nt, Artificial Sequence
  Description of Artificial Sequence: Synthetic oligonucleotide
gcagauugcccuggagagg

SEQ ID NO: 2447168 - RNA, 19 nt, Artificial Sequence
  Description of Artificial Sequence: Synthetic oligonucleotide
caucugucguucuauuuau

SEQ ID NO: 2447169 - RNA, 19 nt, Artificial Sequence
  Description of Artificial Sequence: Synthetic oligonucleotide
cuggagaggggacgagguc

SEQ ID NO: 2447170 - RNA, 19 nt, Artificial Sequence
  Description of Artificial Sequence: Synthetic oligonucleotide
gcuccggcaaacagaaggc

SEQ ID NO: 2447171 - RNA, 19 nt, Artificial Sequence
  Description of Artificial Sequence: Synthetic oligonucleotide
cagcgcguggaccgcaaug

SEQ ID NO: 2447172 - RNA, 19 nt, Artificial Sequence
  Description of Artificial Sequence: Synthetic oligonucleotide
gaguuuggucagaggccgc

SEQ ID NO: 2447173 - RNA, 19 nt, Artificial Sequence
  Description of Artificial Sequence: Synthetic oligonucleotide
cggguguagaguuugguca

SEQ ID NO: 2447174 - RNA, 19 nt, Artificial Sequence
  Description of Artificial Sequence: Synthetic oligonucleotide
ggaguuaggccgacgggac

SEQ ID NO: 2447175 - RNA, 19 nt, Artificial Sequence
  Description of Artificial Sequence: Synthetic oligonucleotide
cgagauacggcgcggcugc

SEQ ID NO: 2447176 - RNA, 19 nt, Artificial Sequence
  Description of Artificial Sequence: Synthetic oligonucleotide
caaaggguggugcuaacuu

SEQ ID NO: 2447177 - RNA, 19 nt, Artificial Sequence
  Description of Artificial Sequence: Synthetic oligonucleotide
ccaggucccauccgcacgc

SEQ ID NO: 2447178 - RNA, 19 nt, Artificial Sequence
  Description of Artificial Sequence: Synthetic oligonucleotide
gccgcgaggucaaagggug

SEQ ID NO: 2447179 - RNA, 19 nt, Artificial Sequence
  Description of Artificial Sequence: Synthetic oligonucleotide
uccgcacgccgcccgggug

SEQ ID NO: 2447180 - RNA, 19 nt, Artificial Sequence
  Description of Artificial Sequence: Synthetic oligonucleotide
aggguaggagggaccgggg

SEQ ID NO: 2447181 - RNA, 19 nt, Artificial Sequence
  Description of Artificial Sequence: Synthetic oligonucleotide
ggccgcgagauacggcgcg

SEQ ID NO: 2447182 - RNA, 19 nt, Artificial Sequence
  Description of Artificial Sequence: Synthetic oligonucleotide
gauacggcgcggcugcuuu

SEQ ID NO: 2447183 - RNA, 19 nt, Artificial Sequence
  Description of Artificial Sequence: Synthetic oligonucleotide
guuaggccgacgggacugc

SEQ ID NO: 2447184 - RNA, 19 nt, Artificial Sequence
  Description of Artificial Sequence: Synthetic oligonucleotide
aggggacgaggucguguug

SEQ ID NO: 2447185 - RNA, 19 nt, Artificial Sequence
  Description of Artificial Sequence: Synthetic oligonucleotide
gguuggauucuggacucac

SEQ ID NO: 2447186 - RNA, 19 nt, Artificial Sequence
  Description of Artificial Sequence: Synthetic oligonucleotide
gcucucuagagcgccuagg

SEQ ID NO: 2447187 - RNA, 19 nt, Artificial Sequence
  Description of Artificial Sequence: Synthetic oligonucleotide
cucgcgcuggggucuuccc

SEQ ID NO: 2447188 - RNA, 19 nt, Artificial Sequence
  Description of Artificial Sequence: Synthetic oligonucleotide
cguucuauuuauaucuuua

SEQ ID NO: 2447189 - RNA, 19 nt, Artificial Sequence
  Description of Artificial Sequence: Synthetic oligonucleotide
ugguguggggccuccucuu

SEQ ID NO: 2447190 - RNA, 19 nt, Artificial Sequence
  Description of Artificial Sequence: Synthetic oligonucleotide
cuagagcgccuaggguagg

SEQ ID NO: 2447191 - RNA, 19 nt, Artificial Sequence
  Description of Artificial Sequence: Synthetic oligonucleotide
gcaagaacuggccgcgaga

SEQ ID NO: 2447192 - RNA, 19 nt, Artificial Sequence
  Description of Artificial Sequence: Synthetic oligonucleotide
gggcaagagugccucggug

SEQ ID NO: 2447193 - RNA, 19 nt, Artificial Sequence
  Description of Artificial Sequence: Synthetic oligonucleotide
gggacugcgcccuagcggu

SEQ ID NO: 2447194 - RNA, 19 nt, Artificial Sequence
  Description of Artificial Sequence: Synthetic oligonucleotide
ccggguguagaguuugguc

SEQ ID NO: 2447195 - RNA, 19 nt, Artificial Sequence
  Description of Artificial Sequence: Synthetic oligonucleotide
ccaagaacgccugcuuagc

SEQ ID NO: 2447196 - RNA, 19 nt, Artificial Sequence
  Description of Artificial Sequence: Synthetic oligonucleotide
auacggcgcggcugcuuug

SEQ ID NO: 2447197 - RNA, 19 nt, Artificial Sequence
  Description of Artificial Sequence: Synthetic oligonucleotide
caugugcuucggccgacca

SEQ ID NO: 2447198 - RNA, 19 nt, Artificial Sequence
  Description of Artificial Sequence: Synthetic oligonucleotide
ggucaaaggguggugcuaa

SEQ ID NO: 2447199 - RNA, 19 nt, Artificial Sequence
  Description of Artificial Sequence: Synthetic oligonucleotide
cgcggcaugugcuucggcc

SEQ ID NO: 2447200 - RNA, 19 nt, Artificial Sequence
  Description of Artificial Sequence: Synthetic oligonucleotide
ggugcggguuggauucugg

SEQ ID NO: 2447201 - RNA, 19 nt, Artificial Sequence
  Description of Artificial Sequence: Synthetic oligonucleotide
cuggcggggcuuggcaugc

SEQ ID NO: 2447202 - RNA, 19 nt, Artificial Sequence
  Description of Artificial Sequence: Synthetic oligonucleotide
uggugcggguuggauucug

SEQ ID NO: 2447203 - RNA, 19 nt, Artificial Sequence
  Description of Artificial Sequence: Synthetic oligonucleotide
gccggugucugcaagaacu

SEQ ID NO: 2447204 - RNA, 19 nt, Artificial Sequence
  Description of Artificial Sequence: Synthetic oligonucleotide
ucagcgcguggaccgcaau

SEQ ID NO: 2447205 - RNA, 19 nt, Artificial Sequence
  Description of Artificial Sequence: Synthetic oligonucleotide
aggucaaaggguggugcua

SEQ ID NO: 2447206 - RNA, 19 nt, Artificial Sequence
  Description of Artificial Sequence: Synthetic oligonucleotide
aguaggcuuggugcggguu

SEQ ID NO: 2447207 - RNA, 19 nt, Artificial Sequence
  Description of Artificial Sequence: Synthetic oligonucleotide
gugucgcucggcuccggca

SEQ ID NO: 2447208 - RNA, 19 nt, Artificial Sequence
  Description of Artificial Sequence: Synthetic oligonucleotide
agauugcccuggagagggg

SEQ ID NO: 2447209 - RNA, 19 nt, Artificial Sequence
  Description of Artificial Sequence: Synthetic oligonucleotide
gaguuaggccgacgggacu

SEQ ID NO: 2447210 - RNA, 19 nt, Artificial Sequence
  Description of Artificial Sequence: Synthetic oligonucleotide
gaggggacgaggucguguu

SEQ ID NO: 2447211 - RNA, 19 nt, Artificial Sequence
  Description of Artificial Sequence: Synthetic oligonucleotide
gagccggugucugcaagaa

SEQ ID NO: 2447212 - RNA, 19 nt, Artificial Sequence
  Description of Artificial Sequence: Synthetic oligonucleotide
caagaacuggccgcgagau

SEQ ID NO: 2447213 - RNA, 19 nt, Artificial Sequence
  Description of Artificial Sequence: Synthetic oligonucleotide
guuuggucagaggccgcga

SEQ ID NO: 2447214 - RNA, 19 nt, Artificial Sequence
  Description of Artificial Sequence: Synthetic oligonucleotide
acgccgcccggguguagag

SEQ ID NO: 2447215 - RNA, 19 nt, Artificial Sequence
  Description of Artificial Sequence: Synthetic oligonucleotide
cuccggcaaacagaaggca

SEQ ID NO: 2447216 - RNA, 19 nt, Artificial Sequence
  Description of Artificial Sequence: Synthetic oligonucleotide
ccggugucugcaagaacug

SEQ ID NO: 2447217 - RNA, 19 nt, Artificial Sequence
  Description of Artificial Sequence: Synthetic oligonucleotide
ggaccggggcaagagugcc

SEQ ID NO: 2447218 - RNA, 19 nt, Artificial Sequence
  Description of Artificial Sequence: Synthetic oligonucleotide
ggaucuggggcgggcgggg

SEQ ID NO: 2447219 - RNA, 19 nt, Artificial Sequence
  Description of Artificial Sequence: Synthetic oligonucleotide
auccgcacgccgcccgggu

SEQ ID NO: 2447220 - RNA, 19 nt, Artificial Sequence
  Description of Artificial Sequence: Synthetic oligonucleotide
gcaguucaagagauaaaua

SEQ ID NO: 2447221 - RNA, 19 nt, Artificial Sequence
  Description of Artificial Sequence: Synthetic oligonucleotide
gaacgccugcuuagcccug

SEQ ID NO: 2447222 - RNA, 19 nt, Artificial Sequence
  Description of Artificial Sequence: Synthetic oligonucleotide
gcgagauacggcgcggcug

SEQ ID NO: 2447223 - RNA, 19 nt, Artificial Sequence
  Description of Artificial Sequence: Synthetic oligonucleotide
agagugccucgguggcaga

SEQ ID NO: 2447224 - RNA, 19 nt, Artificial Sequence
  Description of Artificial Sequence: Synthetic oligonucleotide
cgggacugcgcccuagcgg

SEQ ID NO: 2447225 - RNA, 19 nt, Artificial Sequence
  Description of Artificial Sequence: Synthetic oligonucleotide
cauccgcacgccgcccggg

SEQ ID NO: 2447226 - RNA, 19 nt, Artificial Sequence
  Description of Artificial Sequence: Synthetic oligonucleotide
cgcggacgaguccaggucc

SEQ ID NO: 2447227 - RNA, 19 nt, Artificial Sequence
  Description of Artificial Sequence: Synthetic oligonucleotide
ccuagcgguggccagcaca

SEQ ID NO: 2447228 - RNA, 19 nt, Artificial Sequence
  Description of Artificial Sequence: Synthetic oligonucleotide
gagggaccggggcaagagu

SEQ ID NO: 2447229 - RNA, 19 nt, Artificial Sequence
  Description of Artificial Sequence: Synthetic oligonucleotide
ccacccgccccaagaacgc

SEQ ID NO: 2447230 - RNA, 19 nt, Artificial Sequence
  Description of Artificial Sequence: Synthetic oligonucleotide
ggaccgcaauggcaguuca

SEQ ID NO: 2447231 - RNA, 19 nt, Artificial Sequence
  Description of Artificial Sequence: Synthetic oligonucleotide
agugccucgguggcagauu

SEQ ID NO: 2447232 - RNA, 19 nt, Artificial Sequence
  Description of Artificial Sequence: Synthetic oligonucleotide
gagcaacgcggcaugugcu

SEQ ID NO: 2447233 - RNA, 19 nt, Artificial Sequence
  Description of Artificial Sequence: Synthetic oligonucleotide
ucccauccgcacgccgccc

SEQ ID NO: 2447234 - RNA, 19 nt, Artificial Sequence
  Description of Artificial Sequence: Synthetic oligonucleotide
gggaccggggcaagagugc

SEQ ID NO: 2447235 - RNA, 19 nt, Artificial Sequence
  Description of Artificial Sequence: Synthetic oligonucleotide
caagagugccucgguggca

SEQ ID NO: 2447236 - RNA, 19 nt, Artificial Sequence
  Description of Artificial Sequence: Synthetic oligonucleotide
agccggcggggcgagccgg

SEQ ID NO: 2447237 - RNA, 19 nt, Artificial Sequence
  Description of Artificial Sequence: Synthetic oligonucleotide
ggggucuucccucccaccu

SEQ ID NO: 2447238 - RNA, 19 nt, Artificial Sequence
  Description of Artificial Sequence: Synthetic oligonucleotide
aucugucguucuauuuaua

SEQ ID NO: 2447239 - RNA, 19 nt, Artificial Sequence
  Description of Artificial Sequence: Synthetic oligonucleotide
ggcaugcugccucgcgcug

SEQ ID NO: 2447240 - RNA, 19 nt, Artificial Sequence
  Description of Artificial Sequence: Synthetic oligonucleotide
gcgagccggugucugcaag

SEQ ID NO: 2447241 - RNA, 19 nt, Artificial Sequence
  Description of Artificial Sequence: Synthetic oligonucleotide
acccgccccaagaacgccu

SEQ ID NO: 2447242 - RNA, 19 nt, Artificial Sequence
  Description of Artificial Sequence: Synthetic oligonucleotide
gguguagaguuuggucaga

SEQ ID NO: 2447243 - RNA, 19 nt, Artificial Sequence
  Description of Artificial Sequence: Synthetic oligonucleotide
cacccgccccaagaacgcc

SEQ ID NO: 2447244 - RNA, 19 nt, Artificial Sequence
  Description of Artificial Sequence: Synthetic oligonucleotide
gcagugucgcucggcuccg

SEQ ID NO: 2447245 - RNA, 19 nt, Artificial Sequence
  Description of Artificial Sequence: Synthetic oligonucleotide
gaccgcaauggcaguucaa

SEQ ID NO: 2447246 - RNA, 19 nt, Artificial Sequence
  Description of Artificial Sequence: Synthetic oligonucleotide
agauacggcgcggcugcuu

SEQ ID NO: 2447247 - RNA, 19 nt, Artificial Sequence
  Description of Artificial Sequence: Synthetic oligonucleotide
ccgcaauggcaguucaaga

SEQ ID NO: 2447248 - RNA, 19 nt, Artificial Sequence
  Description of Artificial Sequence: Synthetic oligonucleotide
cuuugcccgggaggaucug

SEQ ID NO: 2447249 - RNA, 19 nt, Artificial Sequence
  Description of Artificial Sequence: Synthetic oligonucleotide
cccauccgcacgccgcccg

SEQ ID NO: 2447250 - RNA, 19 nt, Artificial Sequence
  Description of Artificial Sequence: Synthetic oligonucleotide
cucuugcacaaagaccuau

SEQ ID NO: 2447251 - RNA, 19 nt, Artificial Sequence
  Description of Artificial Sequence: Synthetic oligonucleotide
gucguucuauuuauaucuu

SEQ ID NO: 2447252 - RNA, 19 nt, Artificial Sequence
  Description of Artificial Sequence: Synthetic oligonucleotide
gcgaggucaaaggguggug

SEQ ID NO: 2447253 - RNA, 19 nt, Artificial Sequence
  Description of Artificial Sequence: Synthetic oligonucleotide
uucggccgaccaggagggc

SEQ ID NO: 2447254 - RNA, 19 nt, Artificial Sequence
  Description of Artificial Sequence: Synthetic oligonucleotide
ccgcgaggucaaagggugg

SEQ ID NO: 2447255 - RNA, 19 nt, Artificial Sequence
  Description of Artificial Sequence: Synthetic oligonucleotide
ggggcgagccggugucugc

SEQ ID NO: 2447256 - RNA, 19 nt, Artificial Sequence
  Description of Artificial Sequence: Synthetic oligonucleotide
ggucagaggccgcgagguc

SEQ ID NO: 2447257 - RNA, 19 nt, Artificial Sequence
  Description of Artificial Sequence: Synthetic oligonucleotide
cggugucugcaagaacugg

SEQ ID NO: 2447258 - RNA, 19 nt, Artificial Sequence
  Description of Artificial Sequence: Synthetic oligonucleotide
gcuaacuugcucagcgcgu

SEQ ID NO: 2447259 - RNA, 19 nt, Artificial Sequence
  Description of Artificial Sequence: Synthetic oligonucleotide
gcggacgaguccagguccc

SEQ ID NO: 2447260 - RNA, 19 nt, Artificial Sequence
  Description of Artificial Sequence: Synthetic oligonucleotide
gcaacgcggcaugugcuuc

SEQ ID NO: 2447261 - RNA, 19 nt, Artificial Sequence
  Description of Artificial Sequence: Synthetic oligonucleotide
cucagcgcguggaccgcaa

SEQ ID NO: 2447262 - RNA, 19 nt, Artificial Sequence
  Description of Artificial Sequence: Synthetic oligonucleotide
gcuuugguguggggccucc

SEQ ID NO: 2447263 - RNA, 19 nt, Artificial Sequence
  Description of Artificial Sequence: Synthetic oligonucleotide
gucuggcggggcuuggcau

SEQ ID NO: 2447264 - RNA, 19 nt, Artificial Sequence
  Description of Artificial Sequence: Synthetic oligonucleotide
ggggacgaggucguguugu

SEQ ID NO: 2447265 - RNA, 19 nt, Artificial Sequence
  Description of Artificial Sequence: Synthetic oligonucleotide
gccgcgagauacggcgcgg

SEQ ID NO: 2447266 - RNA, 19 nt, Artificial Sequence
  Description of Artificial Sequence: Synthetic oligonucleotide
cccgccccaagaacgccug

SEQ ID NO: 2447267 - RNA, 19 nt, Artificial Sequence
  Description of Artificial Sequence: Synthetic oligonucleotide
cgcgcuggggucuucccuc

SEQ ID NO: 2447268 - RNA, 19 nt, Artificial Sequence
  Description of Artificial Sequence: Synthetic oligonucleotide
ccauccgcacgccgcccgg

SEQ ID NO: 2447269 - RNA, 19 nt, Artificial Sequence
  Description of Artificial Sequence: Synthetic oligonucleotide
cggccgaccaggagggcag

SEQ ID NO: 2447270 - RNA, 19 nt, Artificial Sequence
  Description of Artificial Sequence: Synthetic oligonucleotide
cugcgcccuagcgguggcc

SEQ ID NO: 2447271 - RNA, 19 nt, Artificial Sequence
  Description of Artificial Sequence: Synthetic oligonucleotide
gucgcucggcuccggcaaa

SEQ ID NO: 2447272 - RNA, 19 nt, Artificial Sequence
  Description of Artificial Sequence: Synthetic oligonucleotide
gggcagugucgcucggcuc

SEQ ID NO: 2447273 - RNA, 19 nt, Artificial Sequence
  Description of Artificial Sequence: Synthetic oligonucleotide
ggcggggcgggcgucuggc

SEQ ID NO: 2447274 - RNA, 19 nt, Artificial Sequence
  Description of Artificial Sequence: Synthetic oligonucleotide
cacgccgcccggguguaga

SEQ ID NO: 2447275 - RNA, 19 nt, Artificial Sequence
  Description of Artificial Sequence: Synthetic oligonucleotide
ggcaugugcuucggccgac

SEQ ID NO: 2447276 - RNA, 19 nt, Artificial Sequence
  Description of Artificial Sequence: Synthetic oligonucleotide
gagugccucgguggcagau

SEQ ID NO: 2447277 - RNA, 19 nt, Artificial Sequence
  Description of Artificial Sequence: Synthetic oligonucleotide
ggccgacgggacugcgccc

SEQ ID NO: 2447278 - RNA, 19 nt, Artificial Sequence
  Description of Artificial Sequence: Synthetic oligonucleotide
cgcguggaccgcaauggca

SEQ ID NO: 2447279 - RNA, 19 nt, Artificial Sequence
  Description of Artificial Sequence: Synthetic oligonucleotide
cugcaagaacuggccgcga

SEQ ID NO: 2447280 - RNA, 19 nt, Artificial Sequence
  Description of Artificial Sequence: Synthetic oligonucleotide
ggcuggccugcagccggcg

SEQ ID NO: 2447281 - RNA, 19 nt, Artificial Sequence
  Description of Artificial Sequence: Synthetic oligonucleotide
gcgcccuagcgguggccag

SEQ ID NO: 2447282 - RNA, 19 nt, Artificial Sequence
  Description of Artificial Sequence: Synthetic oligonucleotide
ccccacccgccccaagaac

SEQ ID NO: 2447283 - RNA, 19 nt, Artificial Sequence
  Description of Artificial Sequence: Synthetic oligonucleotide
ccucgcgcuggggucuucc

SEQ ID NO: 2447284 - RNA, 19 nt, Artificial Sequence
  Description of Artificial Sequence: Synthetic oligonucleotide
ggguuggauucuggacuca

SEQ ID NO: 2447285 - RNA, 19 nt, Artificial Sequence
  Description of Artificial Sequence: Synthetic oligonucleotide
ggcgucuggcggggcuugg

SEQ ID NO: 2447286 - RNA, 19 nt, Artificial Sequence
  Description of Artificial Sequence: Synthetic oligonucleotide
ggccgcgaggucaaagggu

SEQ ID NO: 2447287 - RNA, 19 nt, Artificial Sequence
  Description of Artificial Sequence: Synthetic oligonucleotide
ggccccaccccagaaggcu

SEQ ID NO: 2447288 - RNA, 19 nt, Artificial Sequence
  Description of Artificial Sequence: Synthetic oligonucleotide
ccgcgagauacggcgcggc

SEQ ID NO: 2447289 - RNA, 19 nt, Artificial Sequence
  Description of Artificial Sequence: Synthetic oligonucleotide
gggcggggcgggcgucugg

SEQ ID NO: 2447290 - RNA, 19 nt, Artificial Sequence
  Description of Artificial Sequence: Synthetic oligonucleotide
guggaccgcaauggcaguu

SEQ ID NO: 2447291 - RNA, 19 nt, Artificial Sequence
  Description of Artificial Sequence: Synthetic oligonucleotide
ggcuuugguguggggccuc

SEQ ID NO: 2447292 - RNA, 19 nt, Artificial Sequence
  Description of Artificial Sequence: Synthetic oligonucleotide
ggacugcgcccuagcggug

SEQ ID NO: 2447293 - RNA, 19 nt, Artificial Sequence
  Description of Artificial Sequence: Synthetic oligonucleotide
gcggcugcuuugcccggga

SEQ ID NO: 2447294 - RNA, 19 nt, Artificial Sequence
  Description of Artificial Sequence: Synthetic oligonucleotide
gcccuagcgguggccagca

SEQ ID NO: 2447295 - RNA, 19 nt, Artificial Sequence
  Description of Artificial Sequence: Synthetic oligonucleotide
gcgccuaggguaggaggga

SEQ ID NO: 2447296 - RNA, 19 nt, Artificial Sequence
  Description of Artificial Sequence: Synthetic oligonucleotide
gccgaccaggagggcagug

SEQ ID NO: 2447297 - RNA, 19 nt, Artificial Sequence
  Description of Artificial Sequence: Synthetic oligonucleotide
gagauacggcgcggcugcu

SEQ ID NO: 2447298 - RNA, 19 nt, Artificial Sequence
  Description of Artificial Sequence: Synthetic oligonucleotide
ggcgagccggugucugcaa

SEQ ID NO: 2447299 - RNA, 19 nt, Artificial Sequence
  Description of Artificial Sequence: Synthetic oligonucleotide
gggcgucuggcggggcuug

SEQ ID NO: 2447300 - RNA, 19 nt, Artificial Sequence
  Description of Artificial Sequence: Synthetic oligonucleotide
gccgcccggguguagaguu

SEQ ID NO: 2447301 - RNA, 19 nt, Artificial Sequence
  Description of Artificial Sequence: Synthetic oligonucleotide
cgccuaggguaggagggac

SEQ ID NO: 2447302 - RNA, 19 nt, Artificial Sequence
  Description of Artificial Sequence: Synthetic oligonucleotide
cgcccggguguagaguuug

SEQ ID NO: 2447303 - RNA, 19 nt, Artificial Sequence
  Description of Artificial Sequence: Synthetic oligonucleotide
cuuugguguggggccuccu

SEQ ID NO: 2447304 - RNA, 19 nt, Artificial Sequence
  Description of Artificial Sequence: Synthetic oligonucleotide
ugccucgcgcuggggucuu

SEQ ID NO: 2447305 - RNA, 19 nt, Artificial Sequence
  Description of Artificial Sequence: Synthetic oligonucleotide
gccgacgggacugcgcccu

SEQ ID NO: 2447306 - RNA, 19 nt, Artificial Sequence
  Description of Artificial Sequence: Synthetic oligonucleotide
cccaccccagaaggcuuug

SEQ ID NO: 2447307 - RNA, 19 nt, Artificial Sequence
  Description of Artificial Sequence: Synthetic oligonucleotide
cgcccuagcgguggccagc

SEQ ID NO: 2447308 - RNA, 19 nt, Artificial Sequence
  Description of Artificial Sequence: Synthetic oligonucleotide
cggcaugugcuucggccga

SEQ ID NO: 2447309 - RNA, 19 nt, Artificial Sequence
  Description of Artificial Sequence: Synthetic oligonucleotide
ggacgaguccaggucccau

SEQ ID NO: 2447310 - RNA, 19 nt, Artificial Sequence
  Description of Artificial Sequence: Synthetic oligonucleotide
gcccuggccccaccccaga

SEQ ID NO: 2447311 - RNA, 19 nt, Artificial Sequence
  Description of Artificial Sequence: Synthetic oligonucleotide
cggcugcuuugcccgggag

SEQ ID NO: 2447312 - RNA, 19 nt, Artificial Sequence
  Description of Artificial Sequence: Synthetic oligonucleotide
ggcuuggugcggguuggau

SEQ ID NO: 2447313 - RNA, 19 nt, Artificial Sequence
  Description of Artificial Sequence: Synthetic oligonucleotide
cgacgggacugcgcccuag

SEQ ID NO: 2447314 - RNA, 19 nt, Artificial Sequence
  Description of Artificial Sequence: Synthetic oligonucleotide
ccgaccaggagggcagugu

SEQ ID NO: 2447315 - RNA, 19 nt, Artificial Sequence
  Description of Artificial Sequence: Synthetic oligonucleotide
cgggaggaucuggggcggg

SEQ ID NO: 2447316 - RNA, 19 nt, Artificial Sequence
  Description of Artificial Sequence: Synthetic oligonucleotide
cccuagcgguggccagcac

SEQ ID NO: 2447317 - RNA, 19 nt, Artificial Sequence
  Description of Artificial Sequence: Synthetic oligonucleotide
cggggcgagccggugucug

SEQ ID NO: 2447318 - RNA, 19 nt, Artificial Sequence
  Description of Artificial Sequence: Synthetic oligonucleotide
cugcuuugcccgggaggau

SEQ ID NO: 2447319 - RNA, 19 nt, Artificial Sequence
  Description of Artificial Sequence: Synthetic oligonucleotide
cccggguguagaguuuggu

SEQ ID NO: 2447320 - RNA, 19 nt, Artificial Sequence
  Description of Artificial Sequence: Synthetic oligonucleotide
gcacgccgcccggguguag

SEQ ID NO: 2447321 - RNA, 19 nt, Artificial Sequence
  Description of Artificial Sequence: Synthetic oligonucleotide
ccugagcaacgcggcaugu

SEQ ID NO: 2447322 - RNA, 19 nt, Artificial Sequence
  Description of Artificial Sequence: Synthetic oligonucleotide
cccuggccccaccccagaa

SEQ ID NO: 2447323 - RNA, 19 nt, Artificial Sequence
  Description of Artificial Sequence: Synthetic oligonucleotide
ccgcacgccgcccgggugu

SEQ ID NO: 2447324 - RNA, 19 nt, Artificial Sequence
  Description of Artificial Sequence: Synthetic oligonucleotide
cguggaccgcaauggcagu

SEQ ID NO: 2447325 - RNA, 19 nt, Artificial Sequence
  Description of Artificial Sequence: Synthetic oligonucleotide
cgcgagauacggcgcggcu

SEQ ID NO: 2447326 - RNA, 19 nt, Artificial Sequence
  Description of Artificial Sequence: Synthetic oligonucleotide
ccggcggggcgagccggug

SEQ ID NO: 2447327 - RNA, 19 nt, Artificial Sequence
  Description of Artificial Sequence: Synthetic oligonucleotide
ggcgggcggggcgggcguc

SEQ ID NO: 2447328 - RNA, 19 nt, Artificial Sequence
  Description of Artificial Sequence: Synthetic oligonucleotide
cggacgaguccagguccca

SEQ ID NO: 2447329 - RNA, 19 nt, Artificial Sequence
  Description of Artificial Sequence: Synthetic oligonucleotide
cgcucggcuccggcaaaca

SEQ ID NO: 2447330 - RNA, 19 nt, Artificial Sequence
  Description of Artificial Sequence: Synthetic oligonucleotide
ggccgaccaggagggcagu

SEQ ID NO: 2447331 - RNA, 19 nt, Artificial Sequence
  Description of Artificial Sequence: Synthetic oligonucleotide
gccucgcgcuggggucuuc

SEQ ID NO: 2447332 - RNA, 19 nt, Artificial Sequence
  Description of Artificial Sequence: Synthetic oligonucleotide
ccgacgggacugcgcccua

SEQ ID NO: 2447333 - RNA, 19 nt, Artificial Sequence
  Description of Artificial Sequence: Synthetic oligonucleotide
gcggggcgagccggugucu

SEQ ID NO: 2447334 - RNA, 19 nt, Artificial Sequence
  Description of Artificial Sequence: Synthetic oligonucleotide
gcgggcggggcgggcgucu

SEQ ID NO: 2447335 - RNA, 19 nt, Artificial Sequence
  Description of Artificial Sequence: Synthetic oligonucleotide
gccggcggggcgagccggu

SEQ ID NO: 2447336 - RNA, 19 nt, Artificial Sequence
  Description of Artificial Sequence: Synthetic oligonucleotide
ccgcccggguguagaguuu

SEQ ID NO: 2447337 - RNA, 19 nt, Artificial Sequence
  Description of Artificial Sequence: Synthetic oligonucleotide
cgcacgccgcccgggugua

SEQ ID NO: 2447338 - RNA, 19 nt, Artificial Sequence
  Description of Artificial Sequence: Synthetic oligonucleotide
cgccgcccggguguagagu

SEQ ID NO: 2447339 - RNA, 19 nt, Artificial Sequence
  Description of Artificial Sequence: Synthetic oligonucleotide
cgggcgucuggcggggcuu

SEQ ID NO: 2447340 - RNA, 19 nt, Artificial Sequence
  Description of Artificial Sequence: Synthetic oligonucleotide
auaaauaggagucacuugc

SEQ ID NO: 2447341 - RNA, 19 nt, Artificial Sequence
  Description of Artificial Sequence: Synthetic oligonucleotide
uuggaaacaauuaugaccc

SEQ ID NO: 2447342 - RNA, 19 nt, Artificial Sequence
  Description of Artificial Sequence: Synthetic oligonucleotide
uuagcaaauauuaucauug

SEQ ID NO: 2447343 - RNA, 19 nt, Artificial Sequence
  Description of Artificial Sequence: Synthetic oligonucleotide
auuaucauuguuuugugac

SEQ ID NO: 2447344 - RNA, 19 nt, Artificial Sequence
  Description of Artificial Sequence: Synthetic oligonucleotide
uuuggaaacaauuaugacc

SEQ ID NO: 2447345 - RNA, 19 nt, Artificial Sequence
  Description of Artificial Sequence: Synthetic oligonucleotide
aauauuaucauuguuuugu

SEQ ID NO: 2447346 - RNA, 19 nt, Artificial Sequence
  Description of Artificial Sequence: Synthetic oligonucleotide
uguuuagcaaauauuauca

SEQ ID NO: 2447347 - RNA, 19 nt, Artificial Sequence
  Description of Artificial Sequence: Synthetic oligonucleotide
uguuuugugacaaaagaca

SEQ ID NO: 2447348 - RNA, 19 nt, Artificial Sequence
  Description of Artificial Sequence: Synthetic oligonucleotide
uauuuggaaacaauuauga

SEQ ID NO: 2447349 - RNA, 19 nt, Artificial Sequence
  Description of Artificial Sequence: Synthetic oligonucleotide
aacaauuaugacccucugc

SEQ ID NO: 2447350 - RNA, 19 nt, Artificial Sequence
  Description of Artificial Sequence: Synthetic oligonucleotide
aauuaugacccucugcaag

SEQ ID NO: 2447351 - RNA, 19 nt, Artificial Sequence
  Description of Artificial Sequence: Synthetic oligonucleotide
accaguaauauuuggaaac

SEQ ID NO: 2447352 - RNA, 19 nt, Artificial Sequence
  Description of Artificial Sequence: Synthetic oligonucleotide
aaaacuaaggguuucuuaa

SEQ ID NO: 2447353 - RNA, 19 nt, Artificial Sequence
  Description of Artificial Sequence: Synthetic oligonucleotide
ucucugaguacacagacag

SEQ ID NO: 2447354 - RNA, 19 nt, Artificial Sequence
  Description of Artificial Sequence: Synthetic oligonucleotide
agucauaacaacaaaacuc

SEQ ID NO: 2447355 - RNA, 19 nt, Artificial Sequence
  Description of Artificial Sequence: Synthetic oligonucleotide
acaauuaugacccucugca

SEQ ID NO: 2447356 - RNA, 19 nt, Artificial Sequence
  Description of Artificial Sequence: Synthetic oligonucleotide
aacuaaggguuucuuaagg

SEQ ID NO: 2447357 - RNA, 19 nt, Artificial Sequence
  Description of Artificial Sequence: Synthetic oligonucleotide
aguggaagagaccucagac

SEQ ID NO: 2447358 - RNA, 19 nt, Artificial Sequence
  Description of Artificial Sequence: Synthetic oligonucleotide
aauucugugaguggaagag

SEQ ID NO: 2447359 - RNA, 19 nt, Artificial Sequence
  Description of Artificial Sequence: Synthetic oligonucleotide
uggaagagaccucagacug

SEQ ID NO: 2447360 - RNA, 19 nt, Artificial Sequence
  Description of Artificial Sequence: Synthetic oligonucleotide
uaauauuuggaaacaauua

SEQ ID NO: 2447361 - RNA, 19 nt, Artificial Sequence
  Description of Artificial Sequence: Synthetic oligonucleotide
augguuuuguucuaccugg

SEQ ID NO: 2447362 - RNA, 19 nt, Artificial Sequence
  Description of Artificial Sequence: Synthetic oligonucleotide
uguguaugcagagagguag

SEQ ID NO: 2447363 - RNA, 19 nt, Artificial Sequence
  Description of Artificial Sequence: Synthetic oligonucleotide
uugaaaaccccuuucuuug

SEQ ID NO: 2447364 - RNA, 19 nt, Artificial Sequence
  Description of Artificial Sequence: Synthetic oligonucleotide
ugugaagucuuccuuaccu

SEQ ID NO: 2447365 - RNA, 19 nt, Artificial Sequence
  Description of Artificial Sequence: Synthetic oligonucleotide
aaagacacaagagucauaa

SEQ ID NO: 2447366 - RNA, 19 nt, Artificial Sequence
  Description of Artificial Sequence: Synthetic oligonucleotide
ucaaacucauaacaaugcc

SEQ ID NO: 2447367 - RNA, 19 nt, Artificial Sequence
  Description of Artificial Sequence: Synthetic oligonucleotide
cuacuuuugccucacaccc

SEQ ID NO: 2447368 - RNA, 19 nt, Artificial Sequence
  Description of Artificial Sequence: Synthetic oligonucleotide
gucauaacaacaaaacucc

SEQ ID NO: 2447369 - RNA, 19 nt, Artificial Sequence
  Description of Artificial Sequence: Synthetic oligonucleotide
uuuugccucacacccaccg

SEQ ID NO: 2447370 - RNA, 19 nt, Artificial Sequence
  Description of Artificial Sequence: Synthetic oligonucleotide
aaaucuuaaugcaaaauaa

SEQ ID NO: 2447371 - RNA, 19 nt, Artificial Sequence
  Description of Artificial Sequence: Synthetic oligonucleotide
auaggagucacuugcuacg

SEQ ID NO: 2447372 - RNA, 19 nt, Artificial Sequence
  Description of Artificial Sequence: Synthetic oligonucleotide
acuugggucucucaggaac

SEQ ID NO: 2447373 - RNA, 19 nt, Artificial Sequence
  Description of Artificial Sequence: Synthetic oligonucleotide
aaacuaaggguuucuuaag

SEQ ID NO: 2447374 - RNA, 19 nt, Artificial Sequence
  Description of Artificial Sequence: Synthetic oligonucleotide
uuugugacaaaagacacaa

SEQ ID NO: 2447375 - RNA, 19 nt, Artificial Sequence
  Description of Artificial Sequence: Synthetic oligonucleotide
uuguuuagcaaauauuauc

SEQ ID NO: 2447376 - RNA, 19 nt, Artificial Sequence
  Description of Artificial Sequence: Synthetic oligonucleotide
aagugugcgcaccugcuac

SEQ ID NO: 2447377 - RNA, 19 nt, Artificial Sequence
  Description of Artificial Sequence: Synthetic oligonucleotide
ucuaggaguaaauucugug

SEQ ID NO: 2447378 - RNA, 19 nt, Artificial Sequence
  Description of Artificial Sequence: Synthetic oligonucleotide
accuacggaaaacuaaggg

SEQ ID NO: 2447379 - RNA, 19 nt, Artificial Sequence
  Description of Artificial Sequence: Synthetic oligonucleotide
aacaaugccaaaauaaaua

SEQ ID NO: 2447380 - RNA, 19 nt, Artificial Sequence
  Description of Artificial Sequence: Synthetic oligonucleotide
acaaaacuccccgagaguc

SEQ ID NO: 2447381 - RNA, 19 nt, Artificial Sequence
  Description of Artificial Sequence: Synthetic oligonucleotide
uguaccuacggaaaacuaa

SEQ ID NO: 2447382 - RNA, 19 nt, Artificial Sequence
  Description of Artificial Sequence: Synthetic oligonucleotide
uuaggauucucugaguaca

SEQ ID NO: 2447383 - RNA, 19 nt, Artificial Sequence
  Description of Artificial Sequence: Synthetic oligonucleotide
acacaagagucauaacaac

SEQ ID NO: 2447384 - RNA, 19 nt, Artificial Sequence
  Description of Artificial Sequence: Synthetic oligonucleotide
uuuugugacaaaagacaca

SEQ ID NO: 2447385 - RNA, 19 nt, Artificial Sequence
  Description of Artificial Sequence: Synthetic oligonucleotide
gacagcagaguacuugggg

SEQ ID NO: 2447386 - RNA, 19 nt, Artificial Sequence
  Description of Artificial Sequence: Synthetic oligonucleotide
aguaaauucugugagugga

SEQ ID NO: 2447387 - RNA, 19 nt, Artificial Sequence
  Description of Artificial Sequence: Synthetic oligonucleotide
uuaucauuguuuugugaca

SEQ ID NO: 2447388 - RNA, 19 nt, Artificial Sequence
  Description of Artificial Sequence: Synthetic oligonucleotide
caacaaaacuccccgagag

SEQ ID NO: 2447389 - RNA, 19 nt, Artificial Sequence
  Description of Artificial Sequence: Synthetic oligonucleotide
uauuaucauuguuuuguga

SEQ ID NO: 2447390 - RNA, 19 nt, Artificial Sequence
  Description of Artificial Sequence: Synthetic oligonucleotide
auauuuggaaacaauuaug

SEQ ID NO: 2447391 - RNA, 19 nt, Artificial Sequence
  Description of Artificial Sequence: Synthetic oligonucleotide
auugaaaaccccuuucuuu

SEQ ID NO: 2447392 - RNA, 19 nt, Artificial Sequence
  Description of Artificial Sequence: Synthetic oligonucleotide
ucauaacaacaaaacuccc

SEQ ID NO: 2447393 - RNA, 19 nt, Artificial Sequence
  Description of Artificial Sequence: Synthetic oligonucleotide
aaucuuaaugcaaaauaaa

SEQ ID NO: 2447394 - RNA, 19 nt, Artificial Sequence
  Description of Artificial Sequence: Synthetic oligonucleotide
uacagaccaggccaguucc

SEQ ID NO: 2447395 - RNA, 19 nt, Artificial Sequence
  Description of Artificial Sequence: Synthetic oligonucleotide
auauuaucauuguuuugug

SEQ ID NO: 2447396 - RNA, 19 nt, Artificial Sequence
  Description of Artificial Sequence: Synthetic oligonucleotide
guagcuguggaagugugcg

SEQ ID NO: 2447397 - RNA, 19 nt, Artificial Sequence
  Description of Artificial Sequence: Synthetic oligonucleotide
ucccuugcgauugaaaacc

SEQ ID NO: 2447398 - RNA, 19 nt, Artificial Sequence
  Description of Artificial Sequence: Synthetic oligonucleotide
uugccuacccacuuggaug

SEQ ID NO: 2447399 - RNA, 19 nt, Artificial Sequence
  Description of Artificial Sequence: Synthetic oligonucleotide
uccucuagggacaugggaa

SEQ ID NO: 2447400 - RNA, 19 nt, Artificial Sequence
  Description of Artificial Sequence: Synthetic oligonucleotide
gugacaaaagacacaagag

SEQ ID NO: 2447401 - RNA, 19 nt, Artificial Sequence
  Description of Artificial Sequence: Synthetic oligonucleotide
aaaauaaauaggagucacu

SEQ ID NO: 2447402 - RNA, 19 nt, Artificial Sequence
  Description of Artificial Sequence: Synthetic oligonucleotide
cuuaccugggaagacauac

SEQ ID NO: 2447403 - RNA, 19 nt, Artificial Sequence
  Description of Artificial Sequence: Synthetic oligonucleotide
ucuuaaggacaugaggucu

SEQ ID NO: 2447404 - RNA, 19 nt, Artificial Sequence
  Description of Artificial Sequence: Synthetic oligonucleotide
aagagucauaacaacaaaa

SEQ ID NO: 2447405 - RNA, 19 nt, Artificial Sequence
  Description of Artificial Sequence: Synthetic oligonucleotide
aacaaaacuccccgagagu

SEQ ID NO: 2447406 - RNA, 19 nt, Artificial Sequence
  Description of Artificial Sequence: Synthetic oligonucleotide
auacagaccaggccaguuc

SEQ ID NO: 2447407 - RNA, 19 nt, Artificial Sequence
  Description of Artificial Sequence: Synthetic oligonucleotide
uaccuacggaaaacuaagg

SEQ ID NO: 2447408 - RNA, 19 nt, Artificial Sequence
  Description of Artificial Sequence: Synthetic oligonucleotide
uaaauuccauauauuguuu

SEQ ID NO: 2447409 - RNA, 19 nt, Artificial Sequence
  Description of Artificial Sequence: Synthetic oligonucleotide
aacuccccgagagucaaac

SEQ ID NO: 2447410 - RNA, 19 nt, Artificial Sequence
  Description of Artificial Sequence: Synthetic oligonucleotide
ucuaccugguacuuggguc

SEQ ID NO: 2447411 - RNA, 19 nt, Artificial Sequence
  Description of Artificial Sequence: Synthetic oligonucleotide
gaacgugcuguaccuacgg

SEQ ID NO: 2447412 - RNA, 19 nt, Artificial Sequence
  Description of Artificial Sequence: Synthetic oligonucleotide
gaagacauacagaccaggc

SEQ ID NO: 2447413 - RNA, 19 nt, Artificial Sequence
  Description of Artificial Sequence: Synthetic oligonucleotide
ugcuacuuuugccucacac

SEQ ID NO: 2447414 - RNA, 19 nt, Artificial Sequence
  Description of Artificial Sequence: Synthetic oligonucleotide
caaacucauaacaaugcca

SEQ ID NO: 2447415 - RNA, 19 nt, Artificial Sequence
  Description of Artificial Sequence: Synthetic oligonucleotide
caugguuuuguucuaccug

SEQ ID NO: 2447416 - RNA, 19 nt, Artificial Sequence
  Description of Artificial Sequence: Synthetic oligonucleotide
cuaggaguaaauucuguga

SEQ ID NO: 2447417 - RNA, 19 nt, Artificial Sequence
  Description of Artificial Sequence: Synthetic oligonucleotide
cuuaaggacaugaggucug

SEQ ID NO: 2447418 - RNA, 19 nt, Artificial Sequence
  Description of Artificial Sequence: Synthetic oligonucleotide
caugggaacgugcuguacc

SEQ ID NO: 2447419 - RNA, 19 nt, Artificial Sequence
  Description of Artificial Sequence: Synthetic oligonucleotide
acagcagaguacuuggggu

SEQ ID NO: 2447420 - RNA, 19 nt, Artificial Sequence
  Description of Artificial Sequence: Synthetic oligonucleotide
gaaaaccccuuucuuugcc

SEQ ID NO: 2447421 - RNA, 19 nt, Artificial Sequence
  Description of Artificial Sequence: Synthetic oligonucleotide
acuguguaugcagagaggu

SEQ ID NO: 2447422 - RNA, 19 nt, Artificial Sequence
  Description of Artificial Sequence: Synthetic oligonucleotide
aguuaggauucucugagua

SEQ ID NO: 2447423 - RNA, 19 nt, Artificial Sequence
  Description of Artificial Sequence: Synthetic oligonucleotide
ugccuacccacuuggaugc

SEQ ID NO: 2447424 - RNA, 19 nt, Artificial Sequence
  Description of Artificial Sequence: Synthetic oligonucleotide
uaucauuguuuugugacaa

SEQ ID NO: 2447425 - RNA, 19 nt, Artificial Sequence
  Description of Artificial Sequence: Synthetic oligonucleotide
aaauugcacugggaggagg

SEQ ID NO: 2447426 - RNA, 19 nt, Artificial Sequence
  Description of Artificial Sequence: Synthetic oligonucleotide
ugucuguugguggugacug

SEQ ID NO: 2447427 - RNA, 19 nt, Artificial Sequence
  Description of Artificial Sequence: Synthetic oligonucleotide
aggaaccagagguuggaag

SEQ ID NO: 2447428 - RNA, 19 nt, Artificial Sequence
  Description of Artificial Sequence: Synthetic oligonucleotide
uccaggguauggcucagcc

SEQ ID NO: 2447429 - RNA, 19 nt, Artificial Sequence
  Description of Artificial Sequence: Synthetic oligonucleotide
gaagucuuccuuaccuggg

SEQ ID NO: 2447430 - RNA, 19 nt, Artificial Sequence
  Description of Artificial Sequence: Synthetic oligonucleotide
ugaccagggguacaagaca

SEQ ID NO: 2447431 - RNA, 19 nt, Artificial Sequence
  Description of Artificial Sequence: Synthetic oligonucleotide
gacaggacuccacuggcug

SEQ ID NO: 2447432 - RNA, 19 nt, Artificial Sequence
  Description of Artificial Sequence: Synthetic oligonucleotide
acucauaacaaugccaaaa

SEQ ID NO: 2447433 - RNA, 19 nt, Artificial Sequence
  Description of Artificial Sequence: Synthetic oligonucleotide
uucuaggaguaaauucugu

SEQ ID NO: 2447434 - RNA, 19 nt, Artificial Sequence
  Description of Artificial Sequence: Synthetic oligonucleotide
ucugcaagaagugauucua

SEQ ID NO: 2447435 - RNA, 19 nt, Artificial Sequence
  Description of Artificial Sequence: Synthetic oligonucleotide
ggaguaaauucugugagug

SEQ ID NO: 2447436 - RNA, 19 nt, Artificial Sequence
  Description of Artificial Sequence: Synthetic oligonucleotide
ucuuccuuaccugggaaga

SEQ ID NO: 2447437 - RNA, 19 nt, Artificial Sequence
  Description of Artificial Sequence: Synthetic oligonucleotide
uuaaggacaugaggucugg

SEQ ID NO: 2447438 - RNA, 19 nt, Artificial Sequence
  Description of Artificial Sequence: Synthetic oligonucleotide
guuaggauucucugaguac

SEQ ID NO: 2447439 - RNA, 19 nt, Artificial Sequence
  Description of Artificial Sequence: Synthetic oligonucleotide
ucugugaguggaagagacc

SEQ ID NO: 2447440 - RNA, 19 nt, Artificial Sequence
  Description of Artificial Sequence: Synthetic oligonucleotide
cuugcuacggcaacuguga

SEQ ID NO: 2447441 - RNA, 19 nt, Artificial Sequence
  Description of Artificial Sequence: Synthetic oligonucleotide
aaaauugcacugggaggag

SEQ ID NO: 2447442 - RNA, 19 nt, Artificial Sequence
  Description of Artificial Sequence: Synthetic oligonucleotide
uccccgagagucaaacuca

SEQ ID NO: 2447443 - RNA, 19 nt, Artificial Sequence
  Description of Artificial Sequence: Synthetic oligonucleotide
gguacuugggucucucagg

SEQ ID NO: 2447444 - RNA, 19 nt, Artificial Sequence
  Description of Artificial Sequence: Synthetic oligonucleotide
aaccccuuucuuugccagg

SEQ ID NO: 2447445 - RNA, 19 nt, Artificial Sequence
  Description of Artificial Sequence: Synthetic oligonucleotide
aguuccaggguauggcuca

SEQ ID NO: 2447446 - RNA, 19 nt, Artificial Sequence
  Description of Artificial Sequence: Synthetic oligonucleotide
uucccuugcgauugaaaac

SEQ ID NO: 2447447 - RNA, 19 nt, Artificial Sequence
  Description of Artificial Sequence: Synthetic oligonucleotide
cugaccagggguacaagac

SEQ ID NO: 2447448 - RNA, 19 nt, Artificial Sequence
  Description of Artificial Sequence: Synthetic oligonucleotide
gaagagaccucagacugac

SEQ ID NO: 2447449 - RNA, 19 nt, Artificial Sequence
  Description of Artificial Sequence: Synthetic oligonucleotide
gagucauaacaacaaaacu

SEQ ID NO: 2447450 - RNA, 19 nt, Artificial Sequence
  Description of Artificial Sequence: Synthetic oligonucleotide
caggguauggcucagccca

SEQ ID NO: 2447451 - RNA, 19 nt, Artificial Sequence
  Description of Artificial Sequence: Synthetic oligonucleotide
uuaccugggaagacauaca

SEQ ID NO: 2447452 - RNA, 19 nt, Artificial Sequence
  Description of Artificial Sequence: Synthetic oligonucleotide
agcaaauauuaucauuguu

SEQ ID NO: 2447453 - RNA, 19 nt, Artificial Sequence
  Description of Artificial Sequence: Synthetic oligonucleotide
uaugacccucugcaagaag

SEQ ID NO: 2447454 - RNA, 19 nt, Artificial Sequence
  Description of Artificial Sequence: Synthetic oligonucleotide
agaccucagacugaccagg

SEQ ID NO: 2447455 - RNA, 19 nt, Artificial Sequence
  Description of Artificial Sequence: Synthetic oligonucleotide
uucuaccugguacuugggu

SEQ ID NO: 2447456 - RNA, 19 nt, Artificial Sequence
  Description of Artificial Sequence: Synthetic oligonucleotide
uacuuggggugacaggacu

SEQ ID NO: 2447457 - RNA, 19 nt, Artificial Sequence
  Description of Artificial Sequence: Synthetic oligonucleotide
uaggagucacuugcuacgg

SEQ ID NO: 2447458 - RNA, 19 nt, Artificial Sequence
  Description of Artificial Sequence: Synthetic oligonucleotide
gcuacuuuugccucacacc

SEQ ID NO: 2447459 - RNA, 19 nt, Artificial Sequence
  Description of Artificial Sequence: Synthetic oligonucleotide
uuugccucacacccaccgc

SEQ ID NO: 2447460 - RNA, 19 nt, Artificial Sequence
  Description of Artificial Sequence: Synthetic oligonucleotide
aggagucacuugcuacggc

SEQ ID NO: 2447461 - RNA, 19 nt, Artificial Sequence
  Description of Artificial Sequence: Synthetic oligonucleotide
ugaguggaagagaccucag

SEQ ID NO: 2447462 - RNA, 19 nt, Artificial Sequence
  Description of Artificial Sequence: Synthetic oligonucleotide
gaagucaggagaccaguaa

SEQ ID NO: 2447463 - RNA, 19 nt, Artificial Sequence
  Description of Artificial Sequence: Synthetic oligonucleotide
gacauacagaccaggccag

SEQ ID NO: 2447464 - RNA, 19 nt, Artificial Sequence
  Description of Artificial Sequence: Synthetic oligonucleotide
agaguacuuggggugacag

SEQ ID NO: 2447465 - RNA, 19 nt, Artificial Sequence
  Description of Artificial Sequence: Synthetic oligonucleotide
aaaacuccccgagagucaa

SEQ ID NO: 2447466 - RNA, 19 nt, Artificial Sequence
  Description of Artificial Sequence: Synthetic oligonucleotide
gcaacugugacuugccuac

SEQ ID NO: 2447467 - RNA, 19 nt, Artificial Sequence
  Description of Artificial Sequence: Synthetic oligonucleotide
auuguuuagcaaauauuau

SEQ ID NO: 2447468 - RNA, 19 nt, Artificial Sequence
  Description of Artificial Sequence: Synthetic oligonucleotide
ccauauauuguuuagcaaa

SEQ ID NO: 2447469 - RNA, 19 nt, Artificial Sequence
  Description of Artificial Sequence: Synthetic oligonucleotide
ugacuugccuacccacuug

SEQ ID NO: 2447470 - RNA, 19 nt, Artificial Sequence
  Description of Artificial Sequence: Synthetic oligonucleotide
ucagcccaggaaccagagg

SEQ ID NO: 2447471 - RNA, 19 nt, Artificial Sequence
  Description of Artificial Sequence: Synthetic oligonucleotide
cugggaagacauacagacc

SEQ ID NO: 2447472 - RNA, 19 nt, Artificial Sequence
  Description of Artificial Sequence: Synthetic oligonucleotide
uaggauucucugaguacac

SEQ ID NO: 2447473 - RNA, 19 nt, Artificial Sequence
  Description of Artificial Sequence: Synthetic oligonucleotide
cuccccgagagucaaacuc

SEQ ID NO: 2447474 - RNA, 19 nt, Artificial Sequence
  Description of Artificial Sequence: Synthetic oligonucleotide
uacuuuugccucacaccca

SEQ ID NO: 2447475 - RNA, 19 nt, Artificial Sequence
  Description of Artificial Sequence: Synthetic oligonucleotide
augggaacgugcuguaccu

SEQ ID NO: 2447476 - RNA, 19 nt, Artificial Sequence
  Description of Artificial Sequence: Synthetic oligonucleotide
uacggaaaacuaaggguuu

SEQ ID NO: 2447477 - RNA, 19 nt, Artificial Sequence
  Description of Artificial Sequence: Synthetic oligonucleotide
guacuugggucucucagga

SEQ ID NO: 2447478 - RNA, 19 nt, Artificial Sequence
  Description of Artificial Sequence: Synthetic oligonucleotide
ugcgauugaaaaccccuuu

SEQ ID NO: 2447479 - RNA, 19 nt, Artificial Sequence
  Description of Artificial Sequence: Synthetic oligonucleotide
aacgugcuguaccuacgga

SEQ ID NO: 2447480 - RNA, 19 nt, Artificial Sequence
  Description of Artificial Sequence: Synthetic oligonucleotide
auggcucagcccaggaacc

SEQ ID NO: 2447481 - RNA, 19 nt, Artificial Sequence
  Description of Artificial Sequence: Synthetic oligonucleotide
uguaugcagagagguagcu

SEQ ID NO: 2447482 - RNA, 19 nt, Artificial Sequence
  Description of Artificial Sequence: Synthetic oligonucleotide
acggaaaacuaaggguuuc

SEQ ID NO: 2447483 - RNA, 19 nt, Artificial Sequence
  Description of Artificial Sequence: Synthetic oligonucleotide
gagguuggaagaggaagug

SEQ ID NO: 2447484 - RNA, 19 nt, Artificial Sequence
  Description of Artificial Sequence: Synthetic oligonucleotide
ggcuucuaggaguaaauuc

SEQ ID NO: 2447485 - RNA, 19 nt, Artificial Sequence
  Description of Artificial Sequence: Synthetic oligonucleotide
ucacuugcuacggcaacug

SEQ ID NO: 2447486 - RNA, 19 nt, Artificial Sequence
  Description of Artificial Sequence: Synthetic oligonucleotide
augacccucugcaagaagu

SEQ ID NO: 2447487 - RNA, 19 nt, Artificial Sequence
  Description of Artificial Sequence: Synthetic oligonucleotide
gguacaagacaccuugguc

SEQ ID NO: 2447488 - RNA, 19 nt, Artificial Sequence
  Description of Artificial Sequence: Synthetic oligonucleotide
gaccagggguacaagacac

SEQ ID NO: 2447489 - RNA, 19 nt, Artificial Sequence
  Description of Artificial Sequence: Synthetic oligonucleotide
cagcagaguacuuggggug

SEQ ID NO: 2447490 - RNA, 19 nt, Artificial Sequence
  Description of Artificial Sequence: Synthetic oligonucleotide
ugcuacggcaacugugacu

SEQ ID NO: 2447491 - RNA, 19 nt, Artificial Sequence
  Description of Artificial Sequence: Synthetic oligonucleotide
acuugcuacggcaacugug

SEQ ID NO: 2447492 - RNA, 19 nt, Artificial Sequence
  Description of Artificial Sequence: Synthetic oligonucleotide
ucuagggacaugggaacgu

SEQ ID NO: 2447493 - RNA, 19 nt, Artificial Sequence
  Description of Artificial Sequence: Synthetic oligonucleotide
uugcacugggaggaggaag

SEQ ID NO: 2447494 - RNA, 19 nt, Artificial Sequence
  Description of Artificial Sequence: Synthetic oligonucleotide
uuccuuaccugggaagaca

SEQ ID NO: 2447495 - RNA, 19 nt, Artificial Sequence
  Description of Artificial Sequence: Synthetic oligonucleotide
gagucaaacucauaacaau

SEQ ID NO: 2447496 - RNA, 19 nt, Artificial Sequence
  Description of Artificial Sequence: Synthetic oligonucleotide
cuacggaaaacuaaggguu

SEQ ID NO: 2447497 - RNA, 19 nt, Artificial Sequence
  Description of Artificial Sequence: Synthetic oligonucleotide
acgugcuguaccuacggaa

SEQ ID NO: 2447498 - RNA, 19 nt, Artificial Sequence
  Description of Artificial Sequence: Synthetic oligonucleotide
cuugcgauugaaaaccccu

SEQ ID NO: 2447499 - RNA, 19 nt, Artificial Sequence
  Description of Artificial Sequence: Synthetic oligonucleotide
ugugaguggaagagaccuc

SEQ ID NO: 2447500 - RNA, 19 nt, Artificial Sequence
  Description of Artificial Sequence: Synthetic oligonucleotide
cauauauuguuuagcaaau

SEQ ID NO: 2447501 - RNA, 19 nt, Artificial Sequence
  Description of Artificial Sequence: Synthetic oligonucleotide
cuuggggugacaggacucc

SEQ ID NO: 2447502 - RNA, 19 nt, Artificial Sequence
  Description of Artificial Sequence: Synthetic oligonucleotide
guacacagacagcagagua

SEQ ID NO: 2447503 - RNA, 19 nt, Artificial Sequence
  Description of Artificial Sequence: Synthetic oligonucleotide
uugguccuaggaguuagga

SEQ ID NO: 2447504 - RNA, 19 nt, Artificial Sequence
  Description of Artificial Sequence: Synthetic oligonucleotide
agcggagcagcuccucuag

SEQ ID NO: 2447505 - RNA, 19 nt, Artificial Sequence
  Description of Artificial Sequence: Synthetic oligonucleotide
caagacaccuugguccuag

SEQ ID NO: 2447506 - RNA, 19 nt, Artificial Sequence
  Description of Artificial Sequence: Synthetic oligonucleotide
accugugaagucuuccuua

SEQ ID NO: 2447507 - RNA, 19 nt, Artificial Sequence
  Description of Artificial Sequence: Synthetic oligonucleotide
aagagaccucagacugacc

SEQ ID NO: 2447508 - RNA, 19 nt, Artificial Sequence
  Description of Artificial Sequence: Synthetic oligonucleotide
cucuagggacaugggaacg

SEQ ID NO: 2447509 - RNA, 19 nt, Artificial Sequence
  Description of Artificial Sequence: Synthetic oligonucleotide
cuacccacuuggaugccac

SEQ ID NO: 2447510 - RNA, 19 nt, Artificial Sequence
  Description of Artificial Sequence: Synthetic oligonucleotide
acuuggggugacaggacuc

SEQ ID NO: 2447511 - RNA, 19 nt, Artificial Sequence
  Description of Artificial Sequence: Synthetic oligonucleotide
gugaguggaagagaccuca

SEQ ID NO: 2447512 - RNA, 19 nt, Artificial Sequence
  Description of Artificial Sequence: Synthetic oligonucleotide
acggcaacugugacuugcc

SEQ ID NO: 2447513 - RNA, 19 nt, Artificial Sequence
  Description of Artificial Sequence: Synthetic oligonucleotide
cucagcccaggaaccagag

SEQ ID NO: 2447514 - RNA, 19 nt, Artificial Sequence
  Description of Artificial Sequence: Synthetic oligonucleotide
ggagucacuugcuacggca

SEQ ID NO: 2447515 - RNA, 19 nt, Artificial Sequence
  Description of Artificial Sequence: Synthetic oligonucleotide
cugugaagucuuccuuacc

SEQ ID NO: 2447516 - RNA, 19 nt, Artificial Sequence
  Description of Artificial Sequence: Synthetic oligonucleotide
uggggugacaggacuccac

SEQ ID NO: 2447517 - RNA, 19 nt, Artificial Sequence
  Description of Artificial Sequence: Synthetic oligonucleotide
ugcgcaccugcuacuuuug

SEQ ID NO: 2447518 - RNA, 19 nt, Artificial Sequence
  Description of Artificial Sequence: Synthetic oligonucleotide
cuaggaguuaggauucucu

SEQ ID NO: 2447519 - RNA, 19 nt, Artificial Sequence
  Description of Artificial Sequence: Synthetic oligonucleotide
uuuguucuaccugguacuu

SEQ ID NO: 2447520 - RNA, 19 nt, Artificial Sequence
  Description of Artificial Sequence: Synthetic oligonucleotide
caagagucauaacaacaaa

SEQ ID NO: 2447521 - RNA, 19 nt, Artificial Sequence
  Description of Artificial Sequence: Synthetic oligonucleotide
auauauuguuuagcaaaua

SEQ ID NO: 2447522 - RNA, 19 nt, Artificial Sequence
  Description of Artificial Sequence: Synthetic oligonucleotide
aucauuguuuugugacaaa

SEQ ID NO: 2447523 - RNA, 19 nt, Artificial Sequence
  Description of Artificial Sequence: Synthetic oligonucleotide
caaaacuccccgagaguca

SEQ ID NO: 2447524 - RNA, 19 nt, Artificial Sequence
  Description of Artificial Sequence: Synthetic oligonucleotide
uuaugacccucugcaagaa

SEQ ID NO: 2447525 - RNA, 19 nt, Artificial Sequence
  Description of Artificial Sequence: Synthetic oligonucleotide
caguuccaggguauggcuc

SEQ ID NO: 2447526 - RNA, 19 nt, Artificial Sequence
  Description of Artificial Sequence: Synthetic oligonucleotide
agugugcgcaccugcuacu

SEQ ID NO: 2447527 - RNA, 19 nt, Artificial Sequence
  Description of Artificial Sequence: Synthetic oligonucleotide
cuccacuggcugaggaaag

SEQ ID NO: 2447528 - RNA, 19 nt, Artificial Sequence
  Description of Artificial Sequence: Synthetic oligonucleotide
ggaaacaauuaugacccuc

SEQ ID NO: 2447529 - RNA, 19 nt, Artificial Sequence
  Description of Artificial Sequence: Synthetic oligonucleotide
guuuagcaaauauuaucau

SEQ ID NO: 2447530 - RNA, 19 nt, Artificial Sequence
  Description of Artificial Sequence: Synthetic oligonucleotide
agcagaguacuugggguga

SEQ ID NO: 2447531 - RNA, 19 nt, Artificial Sequence
  Description of Artificial Sequence: Synthetic oligonucleotide
uugcuacggcaacugugac

SEQ ID NO: 2447532 - RNA, 19 nt, Artificial Sequence
  Description of Artificial Sequence: Synthetic oligonucleotide
aaaagacacaagagucaua

SEQ ID NO: 2447533 - RNA, 19 nt, Artificial Sequence
  Description of Artificial Sequence: Synthetic oligonucleotide
guguaugcagagagguagc

SEQ ID NO: 2447534 - RNA, 19 nt, Artificial Sequence
  Description of Artificial Sequence: Synthetic oligonucleotide
caccgcaugguuuuguucu

SEQ ID NO: 2447535 - RNA, 19 nt, Artificial Sequence
  Description of Artificial Sequence: Synthetic oligonucleotide
gguuggaagaggaagugaa

SEQ ID NO: 2447536 - RNA, 19 nt, Artificial Sequence
  Description of Artificial Sequence: Synthetic oligonucleotide
gggaacgugcuguaccuac

SEQ ID NO: 2447537 - RNA, 19 nt, Artificial Sequence
  Description of Artificial Sequence: Synthetic oligonucleotide
cugugaguggaagagaccu

SEQ ID NO: 2447538 - RNA, 19 nt, Artificial Sequence
  Description of Artificial Sequence: Synthetic oligonucleotide
accugcuacuuuugccuca

SEQ ID NO: 2447539 - RNA, 19 nt, Artificial Sequence
  Description of Artificial Sequence: Synthetic oligonucleotide
cuagggacaugggaacgug

SEQ ID NO: 2447540 - RNA, 19 nt, Artificial Sequence
  Description of Artificial Sequence: Synthetic oligonucleotide
cuaccugguacuugggucu

SEQ ID NO: 2447541 - RNA, 19 nt, Artificial Sequence
  Description of Artificial Sequence: Synthetic oligonucleotide
cuuccuuaccugggaagac

SEQ ID NO: 2447542 - RNA, 19 nt, Artificial Sequence
  Description of Artificial Sequence: Synthetic oligonucleotide
agucaggagaccaguaaua

SEQ ID NO: 2447543 - RNA, 19 nt, Artificial Sequence
  Description of Artificial Sequence: Synthetic oligonucleotide
gcgauugaaaaccccuuuc

SEQ ID NO: 2447544 - RNA, 19 nt, Artificial Sequence
  Description of Artificial Sequence: Synthetic oligonucleotide
caggacuccacuggcugag

SEQ ID NO: 2447545 - RNA, 19 nt, Artificial Sequence
  Description of Artificial Sequence: Synthetic oligonucleotide
gaagugugcgcaccugcua

SEQ ID NO: 2447546 - RNA, 19 nt, Artificial Sequence
  Description of Artificial Sequence: Synthetic oligonucleotide
gacuccacuggcugaggaa

SEQ ID NO: 2447547 - RNA, 19 nt, Artificial Sequence
  Description of Artificial Sequence: Synthetic oligonucleotide
acccacuuggaugccaccu

SEQ ID NO: 2447548 - RNA, 19 nt, Artificial Sequence
  Description of Artificial Sequence: Synthetic oligonucleotide
ggaacgugcuguaccuacg

SEQ ID NO: 2447549 - RNA, 19 nt, Artificial Sequence
  Description of Artificial Sequence: Synthetic oligonucleotide
ggguuucuuaaggacauga

SEQ ID NO: 2447550 - RNA, 19 nt, Artificial Sequence
  Description of Artificial Sequence: Synthetic oligonucleotide
uacccacuuggaugccacc

SEQ ID NO: 2447551 - RNA, 19 nt, Artificial Sequence
  Description of Artificial Sequence: Synthetic oligonucleotide
caccugcuacuuuugccuc

SEQ ID NO: 2447552 - RNA, 19 nt, Artificial Sequence
  Description of Artificial Sequence: Synthetic oligonucleotide
ccuacggaaaacuaagggu

SEQ ID NO: 2447553 - RNA, 19 nt, Artificial Sequence
  Description of Artificial Sequence: Synthetic oligonucleotide
ccucuagggacaugggaac

SEQ ID NO: 2447554 - RNA, 19 nt, Artificial Sequence
  Description of Artificial Sequence: Synthetic oligonucleotide
ccuugcgauugaaaacccc

SEQ ID NO: 2447555 - RNA, 19 nt, Artificial Sequence
  Description of Artificial Sequence: Synthetic oligonucleotide
agacugaccagggguacaa

SEQ ID NO: 2447556 - RNA, 19 nt, Artificial Sequence
  Description of Artificial Sequence: Synthetic oligonucleotide
uacuugggucucucaggaa

SEQ ID NO: 2447557 - RNA, 19 nt, Artificial Sequence
  Description of Artificial Sequence: Synthetic oligonucleotide
acuccccgagagucaaacu

SEQ ID NO: 2447558 - RNA, 19 nt, Artificial Sequence
  Description of Artificial Sequence: Synthetic oligonucleotide
gacaugggaacgugcugua

SEQ ID NO: 2447559 - RNA, 19 nt, Artificial Sequence
  Description of Artificial Sequence: Synthetic oligonucleotide
gaacacagcggagcagcuc

SEQ ID NO: 2447560 - RNA, 19 nt, Artificial Sequence
  Description of Artificial Sequence: Synthetic oligonucleotide
ugugcgcaccugcuacuuu

SEQ ID NO: 2447561 - RNA, 19 nt, Artificial Sequence
  Description of Artificial Sequence: Synthetic oligonucleotide
uuggggugacaggacucca

SEQ ID NO: 2447562 - RNA, 19 nt, Artificial Sequence
  Description of Artificial Sequence: Synthetic oligonucleotide
ucacacccaccgcaugguu

SEQ ID NO: 2447563 - RNA, 19 nt, Artificial Sequence
  Description of Artificial Sequence: Synthetic oligonucleotide
gggaagacauacagaccag

SEQ ID NO: 2447564 - RNA, 19 nt, Artificial Sequence
  Description of Artificial Sequence: Synthetic oligonucleotide
cuguaccuacggaaaacua

SEQ ID NO: 2447565 - RNA, 19 nt, Artificial Sequence
  Description of Artificial Sequence: Synthetic oligonucleotide
gggacaugggaacgugcug

SEQ ID NO: 2447566 - RNA, 19 nt, Artificial Sequence
  Description of Artificial Sequence: Synthetic oligonucleotide
aggcuucuaggaguaaauu

SEQ ID NO: 2447567 - RNA, 19 nt, Artificial Sequence
  Description of Artificial Sequence: Synthetic oligonucleotide
acauacagaccaggccagu

SEQ ID NO: 2447568 - RNA, 19 nt, Artificial Sequence
  Description of Artificial Sequence: Synthetic oligonucleotide
guacuuggggugacaggac

SEQ ID NO: 2447569 - RNA, 19 nt, Artificial Sequence
  Description of Artificial Sequence: Synthetic oligonucleotide
ccaggguauggcucagccc

SEQ ID NO: 2447570 - RNA, 19 nt, Artificial Sequence
  Description of Artificial Sequence: Synthetic oligonucleotide
cuguguaugcagagaggua

SEQ ID NO: 2447571 - RNA, 19 nt, Artificial Sequence
  Description of Artificial Sequence: Synthetic oligonucleotide
cuugccuacccacuuggau

SEQ ID NO: 2447572 - RNA, 19 nt, Artificial Sequence
  Description of Artificial Sequence: Synthetic oligonucleotide
gcuacggcaacugugacuu

SEQ ID NO: 2447573 - RNA, 19 nt, Artificial Sequence
  Description of Artificial Sequence: Synthetic oligonucleotide
accgcaugguuuuguucua

SEQ ID NO: 2447574 - RNA, 19 nt, Artificial Sequence
  Description of Artificial Sequence: Synthetic oligonucleotide
gguuuuguucuaccuggua

SEQ ID NO: 2447575 - RNA, 19 nt, Artificial Sequence
  Description of Artificial Sequence: Synthetic oligonucleotide
gguauggcucagcccagga

SEQ ID NO: 2447576 - RNA, 19 nt, Artificial Sequence
  Description of Artificial Sequence: Synthetic oligonucleotide
ggacaugggaacgugcugu

SEQ ID NO: 2447577 - RNA, 19 nt, Artificial Sequence
  Description of Artificial Sequence: Synthetic oligonucleotide
ggguacaagacaccuuggu

SEQ ID NO: 2447578 - RNA, 19 nt, Artificial Sequence
  Description of Artificial Sequence: Synthetic oligonucleotide
aggguauggcucagcccag

SEQ ID NO: 2447579 - RNA, 19 nt, Artificial Sequence
  Description of Artificial Sequence: Synthetic oligonucleotide
gucacuugcuacggcaacu

SEQ ID NO: 2447580 - RNA, 19 nt, Artificial Sequence
  Description of Artificial Sequence: Synthetic oligonucleotide
gcaugguuuuguucuaccu

SEQ ID NO: 2447581 - RNA, 19 nt, Artificial Sequence
  Description of Artificial Sequence: Synthetic oligonucleotide
cgcaugguuuuguucuacc

SEQ ID NO: 2447582 - RNA, 19 nt, Artificial Sequence
  Description of Artificial Sequence: Synthetic oligonucleotide
caggcuucuaggaguaaau

SEQ ID NO: 2447583 - RNA, 19 nt, Artificial Sequence
  Description of Artificial Sequence: Synthetic oligonucleotide
ggacuccacuggcugagga

SEQ ID NO: 2447584 - RNA, 19 nt, Artificial Sequence
  Description of Artificial Sequence: Synthetic oligonucleotide
ggaagagaccucagacuga

SEQ ID NO: 2447585 - RNA, 19 nt, Artificial Sequence
  Description of Artificial Sequence: Synthetic oligonucleotide
gugacuugccuacccacuu

SEQ ID NO: 2447586 - RNA, 19 nt, Artificial Sequence
  Description of Artificial Sequence: Synthetic oligonucleotide
acagaccaggccaguucca

SEQ ID NO: 2447587 - RNA, 19 nt, Artificial Sequence
  Description of Artificial Sequence: Synthetic oligonucleotide
ggguauggcucagcccagg

SEQ ID NO: 2447588 - RNA, 19 nt, Artificial Sequence
  Description of Artificial Sequence: Synthetic oligonucleotide
ugggaacgugcuguaccua

SEQ ID NO: 2447589 - RNA, 19 nt, Artificial Sequence
  Description of Artificial Sequence: Synthetic oligonucleotide
aggccaguuccaggguaug

SEQ ID NO: 2447590 - RNA, 19 nt, Artificial Sequence
  Description of Artificial Sequence: Synthetic oligonucleotide
cuacggcaacugugacuug

SEQ ID NO: 2447591 - RNA, 19 nt, Artificial Sequence
  Description of Artificial Sequence: Synthetic oligonucleotide
ggcucagcccaggaaccag

SEQ ID NO: 2447592 - RNA, 19 nt, Artificial Sequence
  Description of Artificial Sequence: Synthetic oligonucleotide
gcuguaccuacggaaaacu

SEQ ID NO: 2447593 - RNA, 19 nt, Artificial Sequence
  Description of Artificial Sequence: Synthetic oligonucleotide
aaacuccccgagagucaaa

SEQ ID NO: 2447594 - RNA, 19 nt, Artificial Sequence
  Description of Artificial Sequence: Synthetic oligonucleotide
ccugcuacuuuugccucac

SEQ ID NO: 2447595 - RNA, 19 nt, Artificial Sequence
  Description of Artificial Sequence: Synthetic oligonucleotide
cagacugaccagggguaca

SEQ ID NO: 2447596 - RNA, 19 nt, Artificial Sequence
  Description of Artificial Sequence: Synthetic oligonucleotide
gugcgcaccugcuacuuuu

SEQ ID NO: 2447597 - RNA, 19 nt, Artificial Sequence
  Description of Artificial Sequence: Synthetic oligonucleotide
acccaccgcaugguuuugu

SEQ ID NO: 2447598 - RNA, 19 nt, Artificial Sequence
  Description of Artificial Sequence: Synthetic oligonucleotide
ccaccgcaugguuuuguuc

SEQ ID NO: 2447599 - RNA, 19 nt, Artificial Sequence
  Description of Artificial Sequence: Synthetic oligonucleotide
ggggugacaggacuccacu

SEQ ID NO: 2447600 - RNA, 19 nt, Artificial Sequence
  Description of Artificial Sequence: Synthetic oligonucleotide
gcgcaccugcuacuuuugc

SEQ ID NO: 2447601 - RNA, 19 nt, Artificial Sequence
  Description of Artificial Sequence: Synthetic oligonucleotide
cagaguacuuggggugaca

SEQ ID NO: 2447602 - RNA, 19 nt, Artificial Sequence
  Description of Artificial Sequence: Synthetic oligonucleotide
ccuaggaguuaggauucuc

SEQ ID NO: 2447603 - RNA, 19 nt, Artificial Sequence
  Description of Artificial Sequence: Synthetic oligonucleotide
accuugguccuaggaguua

SEQ ID NO: 2447604 - RNA, 19 nt, Artificial Sequence
  Description of Artificial Sequence: Synthetic oligonucleotide
cgauugaaaaccccuuucu

SEQ ID NO: 2447605 - RNA, 19 nt, Artificial Sequence
  Description of Artificial Sequence: Synthetic oligonucleotide
ccugucuguugguggugac

SEQ ID NO: 2447606 - RNA, 19 nt, Artificial Sequence
  Description of Artificial Sequence: Synthetic oligonucleotide
cacacccaccgcaugguuu

SEQ ID NO: 2447607 - RNA, 19 nt, Artificial Sequence
  Description of Artificial Sequence: Synthetic oligonucleotide
ggaaaacuaaggguuucuu

SEQ ID NO: 2447608 - RNA, 19 nt, Artificial Sequence
  Description of Artificial Sequence: Synthetic oligonucleotide
acaagacaccuugguccua

SEQ ID NO: 2447609 - RNA, 19 nt, Artificial Sequence
  Description of Artificial Sequence: Synthetic oligonucleotide
gccucacacccaccgcaug

SEQ ID NO: 2447610 - RNA, 19 nt, Artificial Sequence
  Description of Artificial Sequence: Synthetic oligonucleotide
ggaagugugcgcaccugcu

SEQ ID NO: 2447611 - RNA, 19 nt, Artificial Sequence
  Description of Artificial Sequence: Synthetic oligonucleotide
caggaaccagagguuggaa

SEQ ID NO: 2447612 - RNA, 19 nt, Artificial Sequence
  Description of Artificial Sequence: Synthetic oligonucleotide
cauacagaccaggccaguu

SEQ ID NO: 2447613 - RNA, 19 nt, Artificial Sequence
  Description of Artificial Sequence: Synthetic oligonucleotide
cugucuguugguggugacu

SEQ ID NO: 2447614 - RNA, 19 nt, Artificial Sequence
  Description of Artificial Sequence: Synthetic oligonucleotide
caugaggucuggugucuuu

SEQ ID NO: 2447615 - RNA, 19 nt, Artificial Sequence
  Description of Artificial Sequence: Synthetic oligonucleotide
cacuugcuacggcaacugu

SEQ ID NO: 2447616 - RNA, 19 nt, Artificial Sequence
  Description of Artificial Sequence: Synthetic oligonucleotide
gcucagcccaggaaccaga

SEQ ID NO: 2447617 - RNA, 19 nt, Artificial Sequence
  Description of Artificial Sequence: Synthetic oligonucleotide
gccugucuguuggugguga

SEQ ID NO: 2447618 - RNA, 19 nt, Artificial Sequence
  Description of Artificial Sequence: Synthetic oligonucleotide
ccaggcuucuaggaguaaa

SEQ ID NO: 2447619 - RNA, 19 nt, Artificial Sequence
  Description of Artificial Sequence: Synthetic oligonucleotide
cugcuacuuuugccucaca

SEQ ID NO: 2447620 - RNA, 19 nt, Artificial Sequence
  Description of Artificial Sequence: Synthetic oligonucleotide
ccgcaugguuuuguucuac

SEQ ID NO: 2447621 - RNA, 19 nt, Artificial Sequence
  Description of Artificial Sequence: Synthetic oligonucleotide
cacccaccgcaugguuuug

SEQ ID NO: 2447622 - RNA, 19 nt, Artificial Sequence
  Description of Artificial Sequence: Synthetic oligonucleotide
ccagggguacaagacaccu

SEQ ID NO: 2447623 - RNA, 19 nt, Artificial Sequence
  Description of Artificial Sequence: Synthetic oligonucleotide
ggaacacagcggagcagcu

SEQ ID NO: 2447624 - RNA, 19 nt, Artificial Sequence
  Description of Artificial Sequence: Synthetic oligonucleotide
ccuuaccugggaagacaua

SEQ ID NO: 2447625 - RNA, 19 nt, Artificial Sequence
  Description of Artificial Sequence: Synthetic oligonucleotide
gugugcgcaccugcuacuu

SEQ ID NO: 2447626 - RNA, 19 nt, Artificial Sequence
  Description of Artificial Sequence: Synthetic oligonucleotide
gccuacccacuuggaugcc

SEQ ID NO: 2447627 - RNA, 19 nt, Artificial Sequence
  Description of Artificial Sequence: Synthetic oligonucleotide
cccucugcaagaagugauu

SEQ ID NO: 2447628 - RNA, 19 nt, Artificial Sequence
  Description of Artificial Sequence: Synthetic oligonucleotide
cccuuucuuugccaggcuu

SEQ ID NO: 2447629 - RNA, 19 nt, Artificial Sequence
  Description of Artificial Sequence: Synthetic oligonucleotide
cccgagagucaaacucaua

SEQ ID NO: 2447630 - RNA, 19 nt, Artificial Sequence
  Description of Artificial Sequence: Synthetic oligonucleotide
ccccgagagucaaacucau

SEQ ID NO: 2447631 - RNA, 19 nt, Artificial Sequence
  Description of Artificial Sequence: Synthetic oligonucleotide
cccaccgcaugguuuuguu

SEQ ID NO: 2447632 - RNA, 19 nt, Artificial Sequence
  Description of Artificial Sequence: Synthetic oligonucleotide
cggcaacugugacuugccu

SEQ ID NO: 2447633 - RNA, 19 nt, Artificial Sequence
  Description of Artificial Sequence: Synthetic oligonucleotide
agaauuaaagcauuccggc

SEQ ID NO: 2447634 - RNA, 19 nt, Artificial Sequence
  Description of Artificial Sequence: Synthetic oligonucleotide
aguaguuugucccauaugg

SEQ ID NO: 2447635 - RNA, 19 nt, Artificial Sequence
  Description of Artificial Sequence: Synthetic oligonucleotide
aauuaaagcauuccggcag

SEQ ID NO: 2447636 - RNA, 19 nt, Artificial Sequence
  Description of Artificial Sequence: Synthetic oligonucleotide
aauguggagagauuaucac

SEQ ID NO: 2447637 - RNA, 19 nt, Artificial Sequence
  Description of Artificial Sequence: Synthetic oligonucleotide
uaaggaguaucaaaugugg

SEQ ID NO: 2447638 - RNA, 19 nt, Artificial Sequence
  Description of Artificial Sequence: Synthetic oligonucleotide
uuuaguuaggaccuguccc

SEQ ID NO: 2447639 - RNA, 19 nt, Artificial Sequence
  Description of Artificial Sequence: Synthetic oligonucleotide
uaaaauggggauuugcugc

SEQ ID NO: 2447640 - RNA, 19 nt, Artificial Sequence
  Description of Artificial Sequence: Synthetic oligonucleotide
ugauuuaauggaagaaacg

SEQ ID NO: 2447641 - RNA, 19 nt, Artificial Sequence
  Description of Artificial Sequence: Synthetic oligonucleotide
agggagacuacuuuggccc

SEQ ID NO: 2447642 - RNA, 19 nt, Artificial Sequence
  Description of Artificial Sequence: Synthetic oligonucleotide
uggaucaucuuccagagug

SEQ ID NO: 2447643 - RNA, 19 nt, Artificial Sequence
  Description of Artificial Sequence: Synthetic oligonucleotide
auguuaucugauuuaaugg

SEQ ID NO: 2447644 - RNA, 19 nt, Artificial Sequence
  Description of Artificial Sequence: Synthetic oligonucleotide
auagcagaugcccaggccc

SEQ ID NO: 2447645 - RNA, 19 nt, Artificial Sequence
  Description of Artificial Sequence: Synthetic oligonucleotide
aauuugugcaagcucugcg

SEQ ID NO: 2447646 - RNA, 19 nt, Artificial Sequence
  Description of Artificial Sequence: Synthetic oligonucleotide
ugauaugucagaaacuaac

SEQ ID NO: 2447647 - RNA, 19 nt, Artificial Sequence
  Description of Artificial Sequence: Synthetic oligonucleotide
gacucaauguuuuagacuc

SEQ ID NO: 2447648 - RNA, 19 nt, Artificial Sequence
  Description of Artificial Sequence: Synthetic oligonucleotide
uguggagagauuaucacca

SEQ ID NO: 2447649 - RNA, 19 nt, Artificial Sequence
  Description of Artificial Sequence: Synthetic oligonucleotide
cuugaaauguaauuuuccc

SEQ ID NO: 2447650 - RNA, 19 nt, Artificial Sequence
  Description of Artificial Sequence: Synthetic oligonucleotide
uuucccaggaacaucaaug

SEQ ID NO: 2447651 - RNA, 19 nt, Artificial Sequence
  Description of Artificial Sequence: Synthetic oligonucleotide
uguuaucugauuuaaugga

SEQ ID NO: 2447652 - RNA, 19 nt, Artificial Sequence
  Description of Artificial Sequence: Synthetic oligonucleotide
uuaucugauuuaauggaag

SEQ ID NO: 2447653 - RNA, 19 nt, Artificial Sequence
  Description of Artificial Sequence: Synthetic oligonucleotide
ucuugaaauguaauuuucc

SEQ ID NO: 2447654 - RNA, 19 nt, Artificial Sequence
  Description of Artificial Sequence: Synthetic oligonucleotide
aaacagauggaucuuucug

SEQ ID NO: 2447655 - RNA, 19 nt, Artificial Sequence
  Description of Artificial Sequence: Synthetic oligonucleotide
ucagauugaaagcuccggg

SEQ ID NO: 2447656 - RNA, 19 nt, Artificial Sequence
  Description of Artificial Sequence: Synthetic oligonucleotide
ugcuuuaccaauaaacuuc

SEQ ID NO: 2447657 - RNA, 19 nt, Artificial Sequence
  Description of Artificial Sequence: Synthetic oligonucleotide
gagaauuaaagcauuccgg

SEQ ID NO: 2447658 - RNA, 19 nt, Artificial Sequence
  Description of Artificial Sequence: Synthetic oligonucleotide
auacgaggccuuuucaucc

SEQ ID NO: 2447659 - RNA, 19 nt, Artificial Sequence
  Description of Artificial Sequence: Synthetic oligonucleotide
uuaaaauggggauuugcug

SEQ ID NO: 2447660 - RNA, 19 nt, Artificial Sequence
  Description of Artificial Sequence: Synthetic oligonucleotide
uuuaccaauaaacuucauc

SEQ ID NO: 2447661 - RNA, 19 nt, Artificial Sequence
  Description of Artificial Sequence: Synthetic oligonucleotide
caccugauuaucaacagcc

SEQ ID NO: 2447662 - RNA, 19 nt, Artificial Sequence
  Description of Artificial Sequence: Synthetic oligonucleotide
aguaaggaguaucaaaugu

SEQ ID NO: 2447663 - RNA, 19 nt, Artificial Sequence
  Description of Artificial Sequence: Synthetic oligonucleotide
augucaaacagauggaucu

SEQ ID NO: 2447664 - RNA, 19 nt, Artificial Sequence
  Description of Artificial Sequence: Synthetic oligonucleotide
uauuccggaaaguaguuug

SEQ ID NO: 2447665 - RNA, 19 nt, Artificial Sequence
  Description of Artificial Sequence: Synthetic oligonucleotide
cugauuaucaacagcccgg

SEQ ID NO: 2447666 - RNA, 19 nt, Artificial Sequence
  Description of Artificial Sequence: Synthetic oligonucleotide
agaaacgugaagcuggaug

SEQ ID NO: 2447667 - RNA, 19 nt, Artificial Sequence
  Description of Artificial Sequence: Synthetic oligonucleotide
uggagcaacucccaguggg

SEQ ID NO: 2447668 - RNA, 19 nt, Artificial Sequence
  Description of Artificial Sequence: Synthetic oligonucleotide
aaagcuccgggauacacca

SEQ ID NO: 2447669 - RNA, 19 nt, Artificial Sequence
  Description of Artificial Sequence: Synthetic oligonucleotide
auuaucaacagcccgggcu

SEQ ID NO: 2447670 - RNA, 19 nt, Artificial Sequence
  Description of Artificial Sequence: Synthetic oligonucleotide
uugaaauguaauuuuccca

SEQ ID NO: 2447671 - RNA, 19 nt, Artificial Sequence
  Description of Artificial Sequence: Synthetic oligonucleotide
gagauuaucaccaggacuc

SEQ ID NO: 2447672 - RNA, 19 nt, Artificial Sequence
  Description of Artificial Sequence: Synthetic oligonucleotide
aggaguaucaaauguggag

SEQ ID NO: 2447673 - RNA, 19 nt, Artificial Sequence
  Description of Artificial Sequence: Synthetic oligonucleotide
aaauuugugcaagcucugc

SEQ ID NO: 2447674 - RNA, 19 nt, Artificial Sequence
  Description of Artificial Sequence: Synthetic oligonucleotide
cauaucauagcagaugccc

SEQ ID NO: 2447675 - RNA, 19 nt, Artificial Sequence
  Description of Artificial Sequence: Synthetic oligonucleotide
ucuguuuuaaaauggggau

SEQ ID NO: 2447676 - RNA, 19 nt, Artificial Sequence
  Description of Artificial Sequence: Synthetic oligonucleotide
uuaguuaggaccugucccc

SEQ ID NO: 2447677 - RNA, 19 nt, Artificial Sequence
  Description of Artificial Sequence: Synthetic oligonucleotide
gaaauguaauuuucccagg

SEQ ID NO: 2447678 - RNA, 19 nt, Artificial Sequence
  Description of Artificial Sequence: Synthetic oligonucleotide
cugugcuuuaccaauaaac

SEQ ID NO: 2447679 - RNA, 19 nt, Artificial Sequence
  Description of Artificial Sequence: Synthetic oligonucleotide
ugcgaagcgcauaucauag

SEQ ID NO: 2447680 - RNA, 19 nt, Artificial Sequence
  Description of Artificial Sequence: Synthetic oligonucleotide
gaaacgugaagcuggauga

SEQ ID NO: 2447681 - RNA, 19 nt, Artificial Sequence
  Description of Artificial Sequence: Synthetic oligonucleotide
auugaaagcuccgggauac

SEQ ID NO: 2447682 - RNA, 19 nt, Artificial Sequence
  Description of Artificial Sequence: Synthetic oligonucleotide
aacuucauggcuucuuugu

SEQ ID NO: 2447683 - RNA, 19 nt, Artificial Sequence
  Description of Artificial Sequence: Synthetic oligonucleotide
aggacucaauguuuuagac

SEQ ID NO: 2447684 - RNA, 19 nt, Artificial Sequence
  Description of Artificial Sequence: Synthetic oligonucleotide
aaucggaaaguagccaugg

SEQ ID NO: 2447685 - RNA, 19 nt, Artificial Sequence
  Description of Artificial Sequence: Synthetic oligonucleotide
auuaaagcauuccggcagg

SEQ ID NO: 2447686 - RNA, 19 nt, Artificial Sequence
  Description of Artificial Sequence: Synthetic oligonucleotide
ugugauaugucagaaacua

SEQ ID NO: 2447687 - RNA, 19 nt, Artificial Sequence
  Description of Artificial Sequence: Synthetic oligonucleotide
agugcuguguccccagacc

SEQ ID NO: 2447688 - RNA, 19 nt, Artificial Sequence
  Description of Artificial Sequence: Synthetic oligonucleotide
uaugucugaguacaggauc

SEQ ID NO: 2447689 - RNA, 19 nt, Artificial Sequence
  Description of Artificial Sequence: Synthetic oligonucleotide
aagcgcauaucauagcaga

SEQ ID NO: 2447690 - RNA, 19 nt, Artificial Sequence
  Description of Artificial Sequence: Synthetic oligonucleotide
aaaguaguuugucccauau

SEQ ID NO: 2447691 - RNA, 19 nt, Artificial Sequence
  Description of Artificial Sequence: Synthetic oligonucleotide
gaguaucaaauguggagag

SEQ ID NO: 2447692 - RNA, 19 nt, Artificial Sequence
  Description of Artificial Sequence: Synthetic oligonucleotide
uaccaauaaacuucaucag

SEQ ID NO: 2447693 - RNA, 19 nt, Artificial Sequence
  Description of Artificial Sequence: Synthetic oligonucleotide
ucggaaaguagccauggcu

SEQ ID NO: 2447694 - RNA, 19 nt, Artificial Sequence
  Description of Artificial Sequence: Synthetic oligonucleotide
cagagugucauccugcuug

SEQ ID NO: 2447695 - RNA, 19 nt, Artificial Sequence
  Description of Artificial Sequence: Synthetic oligonucleotide
uggagagauuaucaccagg

SEQ ID NO: 2447696 - RNA, 19 nt, Artificial Sequence
  Description of Artificial Sequence: Synthetic oligonucleotide
caauaaacuucaucaggcc

SEQ ID NO: 2447697 - RNA, 19 nt, Artificial Sequence
  Description of Artificial Sequence: Synthetic oligonucleotide
ccaauaaacuucaucaggc

SEQ ID NO: 2447698 - RNA, 19 nt, Artificial Sequence
  Description of Artificial Sequence: Synthetic oligonucleotide
agauggaucuuucugugcu

SEQ ID NO: 2447699 - RNA, 19 nt, Artificial Sequence
  Description of Artificial Sequence: Synthetic oligonucleotide
gauuuaauggaagaaacgu

SEQ ID NO: 2447700 - RNA, 19 nt, Artificial Sequence
  Description of Artificial Sequence: Synthetic oligonucleotide
augagggccaaucggaaag

SEQ ID NO: 2447701 - RNA, 19 nt, Artificial Sequence
  Description of Artificial Sequence: Synthetic oligonucleotide
acugcauaaaggucugcuc

SEQ ID NO: 2447702 - RNA, 19 nt, Artificial Sequence
  Description of Artificial Sequence: Synthetic oligonucleotide
agaugcuacuuuccuuugc

SEQ ID NO: 2447703 - RNA, 19 nt, Artificial Sequence
  Description of Artificial Sequence: Synthetic oligonucleotide
ugauuaucaacagcccggg

SEQ ID NO: 2447704 - RNA, 19 nt, Artificial Sequence
  Description of Artificial Sequence: Synthetic oligonucleotide
uuaucaacagcccgggcuc

SEQ ID NO: 2447705 - RNA, 19 nt, Artificial Sequence
  Description of Artificial Sequence: Synthetic oligonucleotide
aggaucguuuccucagugc

SEQ ID NO: 2447706 - RNA, 19 nt, Artificial Sequence
  Description of Artificial Sequence: Synthetic oligonucleotide
uguuuuaaaauggggauuu

SEQ ID NO: 2447707 - RNA, 19 nt, Artificial Sequence
  Description of Artificial Sequence: Synthetic oligonucleotide
uuaauggaagaaacgugaa

SEQ ID NO: 2447708 - RNA, 19 nt, Artificial Sequence
  Description of Artificial Sequence: Synthetic oligonucleotide
cuuuccuuugcuacuucgg

SEQ ID NO: 2447709 - RNA, 19 nt, Artificial Sequence
  Description of Artificial Sequence: Synthetic oligonucleotide
ugucuccacugcauaaagg

SEQ ID NO: 2447710 - RNA, 19 nt, Artificial Sequence
  Description of Artificial Sequence: Synthetic oligonucleotide
gaauuaaagcauuccggca

SEQ ID NO: 2447711 - RNA, 19 nt, Artificial Sequence
  Description of Artificial Sequence: Synthetic oligonucleotide
uggaugagggccaaucgga

SEQ ID NO: 2447712 - RNA, 19 nt, Artificial Sequence
  Description of Artificial Sequence: Synthetic oligonucleotide
ugcuacuuuccuuugcuac

SEQ ID NO: 2447713 - RNA, 19 nt, Artificial Sequence
  Description of Artificial Sequence: Synthetic oligonucleotide
ugcauaaauuugugcaagc

SEQ ID NO: 2447714 - RNA, 19 nt, Artificial Sequence
  Description of Artificial Sequence: Synthetic oligonucleotide
uacaccugauuaucaacag

SEQ ID NO: 2447715 - RNA, 19 nt, Artificial Sequence
  Description of Artificial Sequence: Synthetic oligonucleotide
guaaggaguaucaaaugug

SEQ ID NO: 2447716 - RNA, 19 nt, Artificial Sequence
  Description of Artificial Sequence: Synthetic oligonucleotide
uuaggaccuguccccaagg

SEQ ID NO: 2447717 - RNA, 19 nt, Artificial Sequence
  Description of Artificial Sequence: Synthetic oligonucleotide
uccggaaaguaguuugucc

SEQ ID NO: 2447718 - RNA, 19 nt, Artificial Sequence
  Description of Artificial Sequence: Synthetic oligonucleotide
uauggagaauuaaagcauu

SEQ ID NO: 2447719 - RNA, 19 nt, Artificial Sequence
  Description of Artificial Sequence: Synthetic oligonucleotide
ccaguggucagauugaaag

SEQ ID NO: 2447720 - RNA, 19 nt, Artificial Sequence
  Description of Artificial Sequence: Synthetic oligonucleotide
ucccauauggagaauuaaa

SEQ ID NO: 2447721 - RNA, 19 nt, Artificial Sequence
  Description of Artificial Sequence: Synthetic oligonucleotide
uuugcugccucccggauua

SEQ ID NO: 2447722 - RNA, 19 nt, Artificial Sequence
  Description of Artificial Sequence: Synthetic oligonucleotide
ucggcaguaaggaguauca

SEQ ID NO: 2447723 - RNA, 19 nt, Artificial Sequence
  Description of Artificial Sequence: Synthetic oligonucleotide
aaguaguuugucccauaug

SEQ ID NO: 2447724 - RNA, 19 nt, Artificial Sequence
  Description of Artificial Sequence: Synthetic oligonucleotide
aacgugaagcuggaugagg

SEQ ID NO: 2447725 - RNA, 19 nt, Artificial Sequence
  Description of Artificial Sequence: Synthetic oligonucleotide
uugucuccacugcauaaag

SEQ ID NO: 2447726 - RNA, 19 nt, Artificial Sequence
  Description of Artificial Sequence: Synthetic oligonucleotide
gaucuuucugugcuuuacc

SEQ ID NO: 2447727 - RNA, 19 nt, Artificial Sequence
  Description of Artificial Sequence: Synthetic oligonucleotide
acagaugcuacuuuccuuu

SEQ ID NO: 2447728 - RNA, 19 nt, Artificial Sequence
  Description of Artificial Sequence: Synthetic oligonucleotide
ucaggucuaugucugagua

SEQ ID NO: 2447729 - RNA, 19 nt, Artificial Sequence
  Description of Artificial Sequence: Synthetic oligonucleotide
auaugucagaaacuaacuu

SEQ ID NO: 2447730 - RNA, 19 nt, Artificial Sequence
  Description of Artificial Sequence: Synthetic oligonucleotide
gccagcuuuaguuaggacc

SEQ ID NO: 2447731 - RNA, 19 nt, Artificial Sequence
  Description of Artificial Sequence: Synthetic oligonucleotide
agugucauccugcuuguga

SEQ ID NO: 2447732 - RNA, 19 nt, Artificial Sequence
  Description of Artificial Sequence: Synthetic oligonucleotide
uuucaucccgggcaggaga

SEQ ID NO: 2447733 - RNA, 19 nt, Artificial Sequence
  Description of Artificial Sequence: Synthetic oligonucleotide
ucaaauguggagagauuau

SEQ ID NO: 2447734 - RNA, 19 nt, Artificial Sequence
  Description of Artificial Sequence: Synthetic oligonucleotide
cuggaugagggccaaucgg

SEQ ID NO: 2447735 - RNA, 19 nt, Artificial Sequence
  Description of Artificial Sequence: Synthetic oligonucleotide
augucagaaacuaacuuca

SEQ ID NO: 2447736 - RNA, 19 nt, Artificial Sequence
  Description of Artificial Sequence: Synthetic oligonucleotide
acaccaagagcuggcagcc

SEQ ID NO: 2447737 - RNA, 19 nt, Artificial Sequence
  Description of Artificial Sequence: Synthetic oligonucleotide
augucugaguacaggaucg

SEQ ID NO: 2447738 - RNA, 19 nt, Artificial Sequence
  Description of Artificial Sequence: Synthetic oligonucleotide
uguagccacguacaccuga

SEQ ID NO: 2447739 - RNA, 19 nt, Artificial Sequence
  Description of Artificial Sequence: Synthetic oligonucleotide
uaggcuacaagcccgggua

SEQ ID NO: 2447740 - RNA, 19 nt, Artificial Sequence
  Description of Artificial Sequence: Synthetic oligonucleotide
agauugaaagcuccgggau

SEQ ID NO: 2447741 - RNA, 19 nt, Artificial Sequence
  Description of Artificial Sequence: Synthetic oligonucleotide
uuugugcaagcucugcgaa

SEQ ID NO: 2447742 - RNA, 19 nt, Artificial Sequence
  Description of Artificial Sequence: Synthetic oligonucleotide
cucugcauauuccggaaag

SEQ ID NO: 2447743 - RNA, 19 nt, Artificial Sequence
  Description of Artificial Sequence: Synthetic oligonucleotide
gaugcccaggcccacucgg

SEQ ID NO: 2447744 - RNA, 19 nt, Artificial Sequence
  Description of Artificial Sequence: Synthetic oligonucleotide
gucagaaacuaacuucaug

SEQ ID NO: 2447745 - RNA, 19 nt, Artificial Sequence
  Description of Artificial Sequence: Synthetic oligonucleotide
acucuugaaauguaauuuu

SEQ ID NO: 2447746 - RNA, 19 nt, Artificial Sequence
  Description of Artificial Sequence: Synthetic oligonucleotide
aggucuaugucugaguaca

SEQ ID NO: 2447747 - RNA, 19 nt, Artificial Sequence
  Description of Artificial Sequence: Synthetic oligonucleotide
aucggaaaguagccauggc

SEQ ID NO: 2447748 - RNA, 19 nt, Artificial Sequence
  Description of Artificial Sequence: Synthetic oligonucleotide
aacagugcuguguccccag

SEQ ID NO: 2447749 - RNA, 19 nt, Artificial Sequence
  Description of Artificial Sequence: Synthetic oligonucleotide
cauacgaggccuuuucauc

SEQ ID NO: 2447750 - RNA, 19 nt, Artificial Sequence
  Description of Artificial Sequence: Synthetic oligonucleotide
auauggagaauuaaagcau

SEQ ID NO: 2447751 - RNA, 19 nt, Artificial Sequence
  Description of Artificial Sequence: Synthetic oligonucleotide
aucaaauguggagagauua

SEQ ID NO: 2447752 - RNA, 19 nt, Artificial Sequence
  Description of Artificial Sequence: Synthetic oligonucleotide
gauuaggcuacaagcccgg

SEQ ID NO: 2447753 - RNA, 19 nt, Artificial Sequence
  Description of Artificial Sequence: Synthetic oligonucleotide
ccaaggauccacaacagug

SEQ ID NO: 2447754 - RNA, 19 nt, Artificial Sequence
  Description of Artificial Sequence: Synthetic oligonucleotide
ggaacaucaaugucaaaca

SEQ ID NO: 2447755 - RNA, 19 nt, Artificial Sequence
  Description of Artificial Sequence: Synthetic oligonucleotide
uguccccagaccacauacg

SEQ ID NO: 2447756 - RNA, 19 nt, Artificial Sequence
  Description of Artificial Sequence: Synthetic oligonucleotide
uuaggcuacaagcccgggu

SEQ ID NO: 2447757 - RNA, 19 nt, Artificial Sequence
  Description of Artificial Sequence: Synthetic oligonucleotide
gucagauugaaagcuccgg

SEQ ID NO: 2447758 - RNA, 19 nt, Artificial Sequence
  Description of Artificial Sequence: Synthetic oligonucleotide
ucggccagcuucugggugg

SEQ ID NO: 2447759 - RNA, 19 nt, Artificial Sequence
  Description of Artificial Sequence: Synthetic oligonucleotide
ugaguacaggaucguuucc

SEQ ID NO: 2447760 - RNA, 19 nt, Artificial Sequence
  Description of Artificial Sequence: Synthetic oligonucleotide
ucccggauuaggcuacaag

SEQ ID NO: 2447761 - RNA, 19 nt, Artificial Sequence
  Description of Artificial Sequence: Synthetic oligonucleotide
gaagcgcauaucauagcag

SEQ ID NO: 2447762 - RNA, 19 nt, Artificial Sequence
  Description of Artificial Sequence: Synthetic oligonucleotide
caguaaggaguaucaaaug

SEQ ID NO: 2447763 - RNA, 19 nt, Artificial Sequence
  Description of Artificial Sequence: Synthetic oligonucleotide
ggaucguuuccucagugcc

SEQ ID NO: 2447764 - RNA, 19 nt, Artificial Sequence
  Description of Artificial Sequence: Synthetic oligonucleotide
uuaaagcauuccggcaggg

SEQ ID NO: 2447765 - RNA, 19 nt, Artificial Sequence
  Description of Artificial Sequence: Synthetic oligonucleotide
cacaacagugcuguguccc

SEQ ID NO: 2447766 - RNA, 19 nt, Artificial Sequence
  Description of Artificial Sequence: Synthetic oligonucleotide
gugcauaaauuugugcaag

SEQ ID NO: 2447767 - RNA, 19 nt, Artificial Sequence
  Description of Artificial Sequence: Synthetic oligonucleotide
agcuccgggauacaccaag

SEQ ID NO: 2447768 - RNA, 19 nt, Artificial Sequence
  Description of Artificial Sequence: Synthetic oligonucleotide
gaaagcuccgggauacacc

SEQ ID NO: 2447769 - RNA, 19 nt, Artificial Sequence
  Description of Artificial Sequence: Synthetic oligonucleotide
accugauuaucaacagccc

SEQ ID NO: 2447770 - RNA, 19 nt, Artificial Sequence
  Description of Artificial Sequence: Synthetic oligonucleotide
ccugauuaucaacagcccg

SEQ ID NO: 2447771 - RNA, 19 nt, Artificial Sequence
  Description of Artificial Sequence: Synthetic oligonucleotide
cuugcuuugcugccucccg

SEQ ID NO: 2447772 - RNA, 19 nt, Artificial Sequence
  Description of Artificial Sequence: Synthetic oligonucleotide
acgugaagcuggaugaggg

SEQ ID NO: 2447773 - RNA, 19 nt, Artificial Sequence
  Description of Artificial Sequence: Synthetic oligonucleotide
gacuacuuuggccccuugc

SEQ ID NO: 2447774 - RNA, 19 nt, Artificial Sequence
  Description of Artificial Sequence: Synthetic oligonucleotide
aaauggggauuugcugccg

SEQ ID NO: 2447775 - RNA, 19 nt, Artificial Sequence
  Description of Artificial Sequence: Synthetic oligonucleotide
auacaccaagagcuggcag

SEQ ID NO: 2447776 - RNA, 19 nt, Artificial Sequence
  Description of Artificial Sequence: Synthetic oligonucleotide
ucugcgaagcgcauaucau

SEQ ID NO: 2447777 - RNA, 19 nt, Artificial Sequence
  Description of Artificial Sequence: Synthetic oligonucleotide
cccggauuaggcuacaagc

SEQ ID NO: 2447778 - RNA, 19 nt, Artificial Sequence
  Description of Artificial Sequence: Synthetic oligonucleotide
acauacgaggccuuuucau

SEQ ID NO: 2447779 - RNA, 19 nt, Artificial Sequence
  Description of Artificial Sequence: Synthetic oligonucleotide
uuugcuacuucggccagcu

SEQ ID NO: 2447780 - RNA, 19 nt, Artificial Sequence
  Description of Artificial Sequence: Synthetic oligonucleotide
gucuaugucugaguacagg

SEQ ID NO: 2447781 - RNA, 19 nt, Artificial Sequence
  Description of Artificial Sequence: Synthetic oligonucleotide
aucguuuccucagugccag

SEQ ID NO: 2447782 - RNA, 19 nt, Artificial Sequence
  Description of Artificial Sequence: Synthetic oligonucleotide
guuaggaccuguccccaag

SEQ ID NO: 2447783 - RNA, 19 nt, Artificial Sequence
  Description of Artificial Sequence: Synthetic oligonucleotide
auggagaauuaaagcauuc

SEQ ID NO: 2447784 - RNA, 19 nt, Artificial Sequence
  Description of Artificial Sequence: Synthetic oligonucleotide
ucgccaggaaucuucucug

SEQ ID NO: 2447785 - RNA, 19 nt, Artificial Sequence
  Description of Artificial Sequence: Synthetic oligonucleotide
ggauuaggcuacaagcccg

SEQ ID NO: 2447786 - RNA, 19 nt, Artificial Sequence
  Description of Artificial Sequence: Synthetic oligonucleotide
gaugcuacuuuccuuugcu

SEQ ID NO: 2447787 - RNA, 19 nt, Artificial Sequence
  Description of Artificial Sequence: Synthetic oligonucleotide
guacaccugauuaucaaca

SEQ ID NO: 2447788 - RNA, 19 nt, Artificial Sequence
  Description of Artificial Sequence: Synthetic oligonucleotide
cauagcagaugcccaggcc

SEQ ID NO: 2447789 - RNA, 19 nt, Artificial Sequence
  Description of Artificial Sequence: Synthetic oligonucleotide
uugugcaagcucugcgaag

SEQ ID NO: 2447790 - RNA, 19 nt, Artificial Sequence
  Description of Artificial Sequence: Synthetic oligonucleotide
ccggaaaguaguuuguccc

SEQ ID NO: 2447791 - RNA, 19 nt, Artificial Sequence
  Description of Artificial Sequence: Synthetic oligonucleotide
uccccagaccacauacgag

SEQ ID NO: 2447792 - RNA, 19 nt, Artificial Sequence
  Description of Artificial Sequence: Synthetic oligonucleotide
agcauuccggcagggagac

SEQ ID NO: 2447793 - RNA, 19 nt, Artificial Sequence
  Description of Artificial Sequence: Synthetic oligonucleotide
ugucccauauggagaauua

SEQ ID NO: 2447794 - RNA, 19 nt, Artificial Sequence
  Description of Artificial Sequence: Synthetic oligonucleotide
caaucggaaaguagccaug

SEQ ID NO: 2447795 - RNA, 19 nt, Artificial Sequence
  Description of Artificial Sequence: Synthetic oligonucleotide
ggaguaucaaauguggaga

SEQ ID NO: 2447796 - RNA, 19 nt, Artificial Sequence
  Description of Artificial Sequence: Synthetic oligonucleotide
gauuaucaacagcccgggc

SEQ ID NO: 2447797 - RNA, 19 nt, Artificial Sequence
  Description of Artificial Sequence: Synthetic oligonucleotide
cagauugaaagcuccggga

SEQ ID NO: 2447798 - RNA, 19 nt, Artificial Sequence
  Description of Artificial Sequence: Synthetic oligonucleotide
agccacguacaccugauua

SEQ ID NO: 2447799 - RNA, 19 nt, Artificial Sequence
  Description of Artificial Sequence: Synthetic oligonucleotide
ucaccaggacucaauguuu

SEQ ID NO: 2447800 - RNA, 19 nt, Artificial Sequence
  Description of Artificial Sequence: Synthetic oligonucleotide
uacgaggccuuuucauccc

SEQ ID NO: 2447801 - RNA, 19 nt, Artificial Sequence
  Description of Artificial Sequence: Synthetic oligonucleotide
ccugcuugugauaugucag

SEQ ID NO: 2447802 - RNA, 19 nt, Artificial Sequence
  Description of Artificial Sequence: Synthetic oligonucleotide
ggagagauuaucaccagga

SEQ ID NO: 2447803 - RNA, 19 nt, Artificial Sequence
  Description of Artificial Sequence: Synthetic oligonucleotide
agccucuuugugcauaaau

SEQ ID NO: 2447804 - RNA, 19 nt, Artificial Sequence
  Description of Artificial Sequence: Synthetic oligonucleotide
cagugccagcuuuaguuag

SEQ ID NO: 2447805 - RNA, 19 nt, Artificial Sequence
  Description of Artificial Sequence: Synthetic oligonucleotide
ucugcauauuccggaaagu

SEQ ID NO: 2447806 - RNA, 19 nt, Artificial Sequence
  Description of Artificial Sequence: Synthetic oligonucleotide
gauugaaagcuccgggaua

SEQ ID NO: 2447807 - RNA, 19 nt, Artificial Sequence
  Description of Artificial Sequence: Synthetic oligonucleotide
ccggauuaggcuacaagcc

SEQ ID NO: 2447808 - RNA, 19 nt, Artificial Sequence
  Description of Artificial Sequence: Synthetic oligonucleotide
ugucagaaacuaacuucau

SEQ ID NO: 2447809 - RNA, 19 nt, Artificial Sequence
  Description of Artificial Sequence: Synthetic oligonucleotide
cgcauaucauagcagaugc

SEQ ID NO: 2447810 - RNA, 19 nt, Artificial Sequence
  Description of Artificial Sequence: Synthetic oligonucleotide
gcuggagcaacucccagug

SEQ ID NO: 2447811 - RNA, 19 nt, Artificial Sequence
  Description of Artificial Sequence: Synthetic oligonucleotide
guguccccagaccacauac

SEQ ID NO: 2447812 - RNA, 19 nt, Artificial Sequence
  Description of Artificial Sequence: Synthetic oligonucleotide
ccgaacuucagccagcuuc

SEQ ID NO: 2447813 - RNA, 19 nt, Artificial Sequence
  Description of Artificial Sequence: Synthetic oligonucleotide
gaccuguccccaaggaucc

SEQ ID NO: 2447814 - RNA, 19 nt, Artificial Sequence
  Description of Artificial Sequence: Synthetic oligonucleotide
ucucugcauauuccggaaa

SEQ ID NO: 2447815 - RNA, 19 nt, Artificial Sequence
  Description of Artificial Sequence: Synthetic oligonucleotide
agcucugcgaagcgcauau

SEQ ID NO: 2447816 - RNA, 19 nt, Artificial Sequence
  Description of Artificial Sequence: Synthetic oligonucleotide
uaucaacagcccgggcucg

SEQ ID NO: 2447817 - RNA, 19 nt, Artificial Sequence
  Description of Artificial Sequence: Synthetic oligonucleotide
aguaucaaauguggagaga

SEQ ID NO: 2447818 - RNA, 19 nt, Artificial Sequence
  Description of Artificial Sequence: Synthetic oligonucleotide
gaggcuguagccacguaca

SEQ ID NO: 2447819 - RNA, 19 nt, Artificial Sequence
  Description of Artificial Sequence: Synthetic oligonucleotide
uaaagcauuccggcaggga

SEQ ID NO: 2447820 - RNA, 19 nt, Artificial Sequence
  Description of Artificial Sequence: Synthetic oligonucleotide
gcuggaugagggccaaucg

SEQ ID NO: 2447821 - RNA, 19 nt, Artificial Sequence
  Description of Artificial Sequence: Synthetic oligonucleotide
ugcuugugauaugucagaa

SEQ ID NO: 2447822 - RNA, 19 nt, Artificial Sequence
  Description of Artificial Sequence: Synthetic oligonucleotide
guggagagauuaucaccag

SEQ ID NO: 2447823 - RNA, 19 nt, Artificial Sequence
  Description of Artificial Sequence: Synthetic oligonucleotide
caggacucaauguuuuaga

SEQ ID NO: 2447824 - RNA, 19 nt, Artificial Sequence
  Description of Artificial Sequence: Synthetic oligonucleotide
agcaacucccagugggcug

SEQ ID NO: 2447825 - RNA, 19 nt, Artificial Sequence
  Description of Artificial Sequence: Synthetic oligonucleotide
acguacaccugauuaucaa

SEQ ID NO: 2447826 - RNA, 19 nt, Artificial Sequence
  Description of Artificial Sequence: Synthetic oligonucleotide
gggccaaucggaaaguagc

SEQ ID NO: 2447827 - RNA, 19 nt, Artificial Sequence
  Description of Artificial Sequence: Synthetic oligonucleotide
gauacaccaagagcuggca

SEQ ID NO: 2447828 - RNA, 19 nt, Artificial Sequence
  Description of Artificial Sequence: Synthetic oligonucleotide
ugcaagcucugcgaagcgc

SEQ ID NO: 2447829 - RNA, 19 nt, Artificial Sequence
  Description of Artificial Sequence: Synthetic oligonucleotide
acgaggccuuuucaucccg

SEQ ID NO: 2447830 - RNA, 19 nt, Artificial Sequence
  Description of Artificial Sequence: Synthetic oligonucleotide
cuccgggauacaccaagag

SEQ ID NO: 2447831 - RNA, 19 nt, Artificial Sequence
  Description of Artificial Sequence: Synthetic oligonucleotide
agcccgggcucgcuggagc

SEQ ID NO: 2447832 - RNA, 19 nt, Artificial Sequence
  Description of Artificial Sequence: Synthetic oligonucleotide
gaagaaacgugaagcugga

SEQ ID NO: 2447833 - RNA, 19 nt, Artificial Sequence
  Description of Artificial Sequence: Synthetic oligonucleotide
auccacaacagugcugugu

SEQ ID NO: 2447834 - RNA, 19 nt, Artificial Sequence
  Description of Artificial Sequence: Synthetic oligonucleotide
caggucuaugucugaguac

SEQ ID NO: 2447835 - RNA, 19 nt, Artificial Sequence
  Description of Artificial Sequence: Synthetic oligonucleotide
agaugcccaggcccacucg

SEQ ID NO: 2447836 - RNA, 19 nt, Artificial Sequence
  Description of Artificial Sequence: Synthetic oligonucleotide
cucagugccagcuuuaguu

SEQ ID NO: 2447837 - RNA, 19 nt, Artificial Sequence
  Description of Artificial Sequence: Synthetic oligonucleotide
uccaguggucagauugaaa

SEQ ID NO: 2447838 - RNA, 19 nt, Artificial Sequence
  Description of Artificial Sequence: Synthetic oligonucleotide
guuuuaaaauggggauuug

SEQ ID NO: 2447839 - RNA, 19 nt, Artificial Sequence
  Description of Artificial Sequence: Synthetic oligonucleotide
ucauggcuucuuugucucc

SEQ ID NO: 2447840 - RNA, 19 nt, Artificial Sequence
  Description of Artificial Sequence: Synthetic oligonucleotide
gauuugcugccgaacuuca

SEQ ID NO: 2447841 - RNA, 19 nt, Artificial Sequence
  Description of Artificial Sequence: Synthetic oligonucleotide
guccccagaccacauacga

SEQ ID NO: 2447842 - RNA, 19 nt, Artificial Sequence
  Description of Artificial Sequence: Synthetic oligonucleotide
cuuugucuccacugcauaa

SEQ ID NO: 2447843 - RNA, 19 nt, Artificial Sequence
  Description of Artificial Sequence: Synthetic oligonucleotide
gaaaguaguuugucccaua

SEQ ID NO: 2447844 - RNA, 19 nt, Artificial Sequence
  Description of Artificial Sequence: Synthetic oligonucleotide
gaucguuuccucagugcca

SEQ ID NO: 2447845 - RNA, 19 nt, Artificial Sequence
  Description of Artificial Sequence: Synthetic oligonucleotide
uuuggccccuugcuuugcu

SEQ ID NO: 2447846 - RNA, 19 nt, Artificial Sequence
  Description of Artificial Sequence: Synthetic oligonucleotide
ucgcuggagcaacucccag

SEQ ID NO: 2447847 - RNA, 19 nt, Artificial Sequence
  Description of Artificial Sequence: Synthetic oligonucleotide
agcccggguaauguuaucu

SEQ ID NO: 2447848 - RNA, 19 nt, Artificial Sequence
  Description of Artificial Sequence: Synthetic oligonucleotide
ggucagauugaaagcuccg

SEQ ID NO: 2447849 - RNA, 19 nt, Artificial Sequence
  Description of Artificial Sequence: Synthetic oligonucleotide
aucaacagcccgggcucgc

SEQ ID NO: 2447850 - RNA, 19 nt, Artificial Sequence
  Description of Artificial Sequence: Synthetic oligonucleotide
cagaugcuacuuuccuuug

SEQ ID NO: 2447851 - RNA, 19 nt, Artificial Sequence
  Description of Artificial Sequence: Synthetic oligonucleotide
ugcugccgaacuucagcca

SEQ ID NO: 2447852 - RNA, 19 nt, Artificial Sequence
  Description of Artificial Sequence: Synthetic oligonucleotide
auuaggcuacaagcccggg

SEQ ID NO: 2447853 - RNA, 19 nt, Artificial Sequence
  Description of Artificial Sequence: Synthetic oligonucleotide
gggauacaccaagagcugg

SEQ ID NO: 2447854 - RNA, 19 nt, Artificial Sequence
  Description of Artificial Sequence: Synthetic oligonucleotide
aggaccuguccccaaggau

SEQ ID NO: 2447855 - RNA, 19 nt, Artificial Sequence
  Description of Artificial Sequence: Synthetic oligonucleotide
agggccaaucggaaaguag

SEQ ID NO: 2447856 - RNA, 19 nt, Artificial Sequence
  Description of Artificial Sequence: Synthetic oligonucleotide
caucccgggcaggagaggc

SEQ ID NO: 2447857 - RNA, 19 nt, Artificial Sequence
  Description of Artificial Sequence: Synthetic oligonucleotide
cugcuugugauaugucaga

SEQ ID NO: 2447858 - RNA, 19 nt, Artificial Sequence
  Description of Artificial Sequence: Synthetic oligonucleotide
cacguacaccugauuauca

SEQ ID NO: 2447859 - RNA, 19 nt, Artificial Sequence
  Description of Artificial Sequence: Synthetic oligonucleotide
ugcccaggcccacucggca

SEQ ID NO: 2447860 - RNA, 19 nt, Artificial Sequence
  Description of Artificial Sequence: Synthetic oligonucleotide
agcuuuaguuaggaccugu

SEQ ID NO: 2447861 - RNA, 19 nt, Artificial Sequence
  Description of Artificial Sequence: Synthetic oligonucleotide
auuccggaaaguaguuugu

SEQ ID NO: 2447862 - RNA, 19 nt, Artificial Sequence
  Description of Artificial Sequence: Synthetic oligonucleotide
agauuaucaccaggacuca

SEQ ID NO: 2447863 - RNA, 19 nt, Artificial Sequence
  Description of Artificial Sequence: Synthetic oligonucleotide
aacuaacuucauggcuucu

SEQ ID NO: 2447864 - RNA, 19 nt, Artificial Sequence
  Description of Artificial Sequence: Synthetic oligonucleotide
uuccggaaaguaguuuguc

SEQ ID NO: 2447865 - RNA, 19 nt, Artificial Sequence
  Description of Artificial Sequence: Synthetic oligonucleotide
cggaaaguagccauggcuc

SEQ ID NO: 2447866 - RNA, 19 nt, Artificial Sequence
  Description of Artificial Sequence: Synthetic oligonucleotide
uguccccaaggauccacaa

SEQ ID NO: 2447867 - RNA, 19 nt, Artificial Sequence
  Description of Artificial Sequence: Synthetic oligonucleotide
uacaagcccggguaauguu

SEQ ID NO: 2447868 - RNA, 19 nt, Artificial Sequence
  Description of Artificial Sequence: Synthetic oligonucleotide
uggggauuugcugccgaac

SEQ ID NO: 2447869 - RNA, 19 nt, Artificial Sequence
  Description of Artificial Sequence: Synthetic oligonucleotide
ggauacaccaagagcuggc

SEQ ID NO: 2447870 - RNA, 19 nt, Artificial Sequence
  Description of Artificial Sequence: Synthetic oligonucleotide
ggaccuguccccaaggauc

SEQ ID NO: 2447871 - RNA, 19 nt, Artificial Sequence
  Description of Artificial Sequence: Synthetic oligonucleotide
ugagggccaaucggaaagu

SEQ ID NO: 2447872 - RNA, 19 nt, Artificial Sequence
  Description of Artificial Sequence: Synthetic oligonucleotide
gugcuuuaccaauaaacuu

SEQ ID NO: 2447873 - RNA, 19 nt, Artificial Sequence
  Description of Artificial Sequence: Synthetic oligonucleotide
uguguccccagaccacaua

SEQ ID NO: 2447874 - RNA, 19 nt, Artificial Sequence
  Description of Artificial Sequence: Synthetic oligonucleotide
cagugggcugguccagugg

SEQ ID NO: 2447875 - RNA, 19 nt, Artificial Sequence
  Description of Artificial Sequence: Synthetic oligonucleotide
ccgggauacaccaagagcu

SEQ ID NO: 2447876 - RNA, 19 nt, Artificial Sequence
  Description of Artificial Sequence: Synthetic oligonucleotide
cuggagcaacucccagugg

SEQ ID NO: 2447877 - RNA, 19 nt, Artificial Sequence
  Description of Artificial Sequence: Synthetic oligonucleotide
guaauuuucccaggaacau

SEQ ID NO: 2447878 - RNA, 19 nt, Artificial Sequence
  Description of Artificial Sequence: Synthetic oligonucleotide
auauuccggaaaguaguuu

SEQ ID NO: 2447879 - RNA, 19 nt, Artificial Sequence
  Description of Artificial Sequence: Synthetic oligonucleotide
caaacagauggaucuuucu

SEQ ID NO: 2447880 - RNA, 19 nt, Artificial Sequence
  Description of Artificial Sequence: Synthetic oligonucleotide
cugccgaacuucagccagc

SEQ ID NO: 2447881 - RNA, 19 nt, Artificial Sequence
  Description of Artificial Sequence: Synthetic oligonucleotide
cuuuucaucccgggcagga

SEQ ID NO: 2447882 - RNA, 19 nt, Artificial Sequence
  Description of Artificial Sequence: Synthetic oligonucleotide
cucgccaggaaucuucucu

SEQ ID NO: 2447883 - RNA, 19 nt, Artificial Sequence
  Description of Artificial Sequence: Synthetic oligonucleotide
cggauuaggcuacaagccc

SEQ ID NO: 2447884 - RNA, 19 nt, Artificial Sequence
  Description of Artificial Sequence: Synthetic oligonucleotide
cauuccggcagggagacua

SEQ ID NO: 2447885 - RNA, 19 nt, Artificial Sequence
  Description of Artificial Sequence: Synthetic oligonucleotide
cuuugcuacuucggccagc

SEQ ID NO: 2447886 - RNA, 19 nt, Artificial Sequence
  Description of Artificial Sequence: Synthetic oligonucleotide
cacauacgaggccuuuuca

SEQ ID NO: 2447887 - RNA, 19 nt, Artificial Sequence
  Description of Artificial Sequence: Synthetic oligonucleotide
ugccgaacuucagccagcu

SEQ ID NO: 2447888 - RNA, 19 nt, Artificial Sequence
  Description of Artificial Sequence: Synthetic oligonucleotide
ccaggacucaauguuuuag

SEQ ID NO: 2447889 - RNA, 19 nt, Artificial Sequence
  Description of Artificial Sequence: Synthetic oligonucleotide
ggacucaauguuuuagacu

SEQ ID NO: 2447890 - RNA, 19 nt, Artificial Sequence
  Description of Artificial Sequence: Synthetic oligonucleotide
gcgcauaucauagcagaug

SEQ ID NO: 2447891 - RNA, 19 nt, Artificial Sequence
  Description of Artificial Sequence: Synthetic oligonucleotide
aguuaggaccuguccccaa

SEQ ID NO: 2447892 - RNA, 19 nt, Artificial Sequence
  Description of Artificial Sequence: Synthetic oligonucleotide
cugcgaagcgcauaucaua

SEQ ID NO: 2447893 - RNA, 19 nt, Artificial Sequence
  Description of Artificial Sequence: Synthetic oligonucleotide
aagaaacgugaagcuggau

SEQ ID NO: 2447894 - RNA, 19 nt, Artificial Sequence
  Description of Artificial Sequence: Synthetic oligonucleotide
augcuacuuuccuuugcua

SEQ ID NO: 2447895 - RNA, 19 nt, Artificial Sequence
  Description of Artificial Sequence: Synthetic oligonucleotide
ggccaaucggaaaguagcc

SEQ ID NO: 2447896 - RNA, 19 nt, Artificial Sequence
  Description of Artificial Sequence: Synthetic oligonucleotide
auuccggcagggagacuac

SEQ ID NO: 2447897 - RNA, 19 nt, Artificial Sequence
  Description of Artificial Sequence: Synthetic oligonucleotide
ccagcuuuaguuaggaccu

SEQ ID NO: 2447898 - RNA, 19 nt, Artificial Sequence
  Description of Artificial Sequence: Synthetic oligonucleotide
ucaucccgggcaggagagg

SEQ ID NO: 2447899 - RNA, 19 nt, Artificial Sequence
  Description of Artificial Sequence: Synthetic oligonucleotide
agcagaugcccaggcccac

SEQ ID NO: 2447900 - RNA, 19 nt, Artificial Sequence
  Description of Artificial Sequence: Synthetic oligonucleotide
cccagaccacauacgaggc

SEQ ID NO: 2447901 - RNA, 19 nt, Artificial Sequence
  Description of Artificial Sequence: Synthetic oligonucleotide
gggcaggagaggcuguagc

SEQ ID NO: 2447902 - RNA, 19 nt, Artificial Sequence
  Description of Artificial Sequence: Synthetic oligonucleotide
auggggauuugcugccgaa

SEQ ID NO: 2447903 - RNA, 19 nt, Artificial Sequence
  Description of Artificial Sequence: Synthetic oligonucleotide
acucaauguuuuagacucu

SEQ ID NO: 2447904 - RNA, 19 nt, Artificial Sequence
  Description of Artificial Sequence: Synthetic oligonucleotide
uugaaagcuccgggauaca

SEQ ID NO: 2447905 - RNA, 19 nt, Artificial Sequence
  Description of Artificial Sequence: Synthetic oligonucleotide
acaagcccggguaauguua

SEQ ID NO: 2447906 - RNA, 19 nt, Artificial Sequence
  Description of Artificial Sequence: Synthetic oligonucleotide
gggagacuacuuuggcccc

SEQ ID NO: 2447907 - RNA, 19 nt, Artificial Sequence
  Description of Artificial Sequence: Synthetic oligonucleotide
gguggacucgccaggaauc

SEQ ID NO: 2447908 - RNA, 19 nt, Artificial Sequence
  Description of Artificial Sequence: Synthetic oligonucleotide
cacucggcaguaaggagua

SEQ ID NO: 2447909 - RNA, 19 nt, Artificial Sequence
  Description of Artificial Sequence: Synthetic oligonucleotide
cagaugcccaggcccacuc

SEQ ID NO: 2447910 - RNA, 19 nt, Artificial Sequence
  Description of Artificial Sequence: Synthetic oligonucleotide
ggagcaacucccagugggc

SEQ ID NO: 2447911 - RNA, 19 nt, Artificial Sequence
  Description of Artificial Sequence: Synthetic oligonucleotide
cauccugcuugugauaugu

SEQ ID NO: 2447912 - RNA, 19 nt, Artificial Sequence
  Description of Artificial Sequence: Synthetic oligonucleotide
agcgcauaucauagcagau

SEQ ID NO: 2447913 - RNA, 19 nt, Artificial Sequence
  Description of Artificial Sequence: Synthetic oligonucleotide
gcuacaagcccggguaaug

SEQ ID NO: 2447914 - RNA, 19 nt, Artificial Sequence
  Description of Artificial Sequence: Synthetic oligonucleotide
ggcucgcuggagcaacucc

SEQ ID NO: 2447915 - RNA, 19 nt, Artificial Sequence
  Description of Artificial Sequence: Synthetic oligonucleotide
cagaccacauacgaggccu

SEQ ID NO: 2447916 - RNA, 19 nt, Artificial Sequence
  Description of Artificial Sequence: Synthetic oligonucleotide
aggcuacaagcccggguaa

SEQ ID NO: 2447917 - RNA, 19 nt, Artificial Sequence
  Description of Artificial Sequence: Synthetic oligonucleotide
ggguaauguuaucugauuu

SEQ ID NO: 2447918 - RNA, 19 nt, Artificial Sequence
  Description of Artificial Sequence: Synthetic oligonucleotide
cuucuggguggacucgcca

SEQ ID NO: 2447919 - RNA, 19 nt, Artificial Sequence
  Description of Artificial Sequence: Synthetic oligonucleotide
ccacauacgaggccuuuuc

SEQ ID NO: 2447920 - RNA, 19 nt, Artificial Sequence
  Description of Artificial Sequence: Synthetic oligonucleotide
gcaagcucugcgaagcgca

SEQ ID NO: 2447921 - RNA, 19 nt, Artificial Sequence
  Description of Artificial Sequence: Synthetic oligonucleotide
cgaagcgcauaucauagca

SEQ ID NO: 2447922 - RNA, 19 nt, Artificial Sequence
  Description of Artificial Sequence: Synthetic oligonucleotide
aacucccagugggcugguc

SEQ ID NO: 2447923 - RNA, 19 nt, Artificial Sequence
  Description of Artificial Sequence: Synthetic oligonucleotide
gcccggguaauguuaucug

SEQ ID NO: 2447924 - RNA, 19 nt, Artificial Sequence
  Description of Artificial Sequence: Synthetic oligonucleotide
gucauccugcuugugauau

SEQ ID NO: 2447925 - RNA, 19 nt, Artificial Sequence
  Description of Artificial Sequence: Synthetic oligonucleotide
gucccauauggagaauuaa

SEQ ID NO: 2447926 - RNA, 19 nt, Artificial Sequence
  Description of Artificial Sequence: Synthetic oligonucleotide
cuuuggccccuugcuuugc

SEQ ID NO: 2447927 - RNA, 19 nt, Artificial Sequence
  Description of Artificial Sequence: Synthetic oligonucleotide
uuugucccauauggagaau

SEQ ID NO: 2447928 - RNA, 19 nt, Artificial Sequence
  Description of Artificial Sequence: Synthetic oligonucleotide
gcauaaauuugugcaagcu

SEQ ID NO: 2447929 - RNA, 19 nt, Artificial Sequence
  Description of Artificial Sequence: Synthetic oligonucleotide
gcgaagcgcauaucauagc

SEQ ID NO: 2447930 - RNA, 19 nt, Artificial Sequence
  Description of Artificial Sequence: Synthetic oligonucleotide
ggggauuugcugccgaacu

SEQ ID NO: 2447931 - RNA, 19 nt, Artificial Sequence
  Description of Artificial Sequence: Synthetic oligonucleotide
ggacucgccaggaaucuuc

SEQ ID NO: 2447932 - RNA, 19 nt, Artificial Sequence
  Description of Artificial Sequence: Synthetic oligonucleotide
gccaggaaucuucucugca

SEQ ID NO: 2447933 - RNA, 19 nt, Artificial Sequence
  Description of Artificial Sequence: Synthetic oligonucleotide
ggcccaaacacagaugcua

SEQ ID NO: 2447934 - RNA, 19 nt, Artificial Sequence
  Description of Artificial Sequence: Synthetic oligonucleotide
ggucuaugucugaguacag

SEQ ID NO: 2447935 - RNA, 19 nt, Artificial Sequence
  Description of Artificial Sequence: Synthetic oligonucleotide
aagcucugcgaagcgcaua

SEQ ID NO: 2447936 - RNA, 19 nt, Artificial Sequence
  Description of Artificial Sequence: Synthetic oligonucleotide
uagccacguacaccugauu

SEQ ID NO: 2447937 - RNA, 19 nt, Artificial Sequence
  Description of Artificial Sequence: Synthetic oligonucleotide
gcccaaacacagaugcuac

SEQ ID NO: 2447938 - RNA, 19 nt, Artificial Sequence
  Description of Artificial Sequence: Synthetic oligonucleotide
gaagcuggaugagggccaa

SEQ ID NO: 2447939 - RNA, 19 nt, Artificial Sequence
  Description of Artificial Sequence: Synthetic oligonucleotide
ggcccacucggcaguaagg

SEQ ID NO: 2447940 - RNA, 19 nt, Artificial Sequence
  Description of Artificial Sequence: Synthetic oligonucleotide
gagcuggcagccucuuugu

SEQ ID NO: 2447941 - RNA, 19 nt, Artificial Sequence
  Description of Artificial Sequence: Synthetic oligonucleotide
gcuuuaguuaggaccuguc

SEQ ID NO: 2447942 - RNA, 19 nt, Artificial Sequence
  Description of Artificial Sequence: Synthetic oligonucleotide
ccacguacaccugauuauc

SEQ ID NO: 2447943 - RNA, 19 nt, Artificial Sequence
  Description of Artificial Sequence: Synthetic oligonucleotide
cccacucggcaguaaggag

SEQ ID NO: 2447944 - RNA, 19 nt, Artificial Sequence
  Description of Artificial Sequence: Synthetic oligonucleotide
uuccggcagggagacuacu

SEQ ID NO: 2447945 - RNA, 19 nt, Artificial Sequence
  Description of Artificial Sequence: Synthetic oligonucleotide
gccaaucggaaaguagcca

SEQ ID NO: 2447946 - RNA, 19 nt, Artificial Sequence
  Description of Artificial Sequence: Synthetic oligonucleotide
gagcaacucccagugggcu

SEQ ID NO: 2447947 - RNA, 19 nt, Artificial Sequence
  Description of Artificial Sequence: Synthetic oligonucleotide
ccacaacagugcugugucc

SEQ ID NO: 2447948 - RNA, 19 nt, Artificial Sequence
  Description of Artificial Sequence: Synthetic oligonucleotide
cuacaagcccggguaaugu

SEQ ID NO: 2447949 - RNA, 19 nt, Artificial Sequence
  Description of Artificial Sequence: Synthetic oligonucleotide
ccaaucggaaaguagccau

SEQ ID NO: 2447950 - RNA, 19 nt, Artificial Sequence
  Description of Artificial Sequence: Synthetic oligonucleotide
ccuuugcuacuucggccag

SEQ ID NO: 2447951 - RNA, 19 nt, Artificial Sequence
  Description of Artificial Sequence: Synthetic oligonucleotide
gacucgccaggaaucuucu

SEQ ID NO: 2447952 - RNA, 19 nt, Artificial Sequence
  Description of Artificial Sequence: Synthetic oligonucleotide
gcuguguccccagaccaca

SEQ ID NO: 2447953 - RNA, 19 nt, Artificial Sequence
  Description of Artificial Sequence: Synthetic oligonucleotide
aggcccaaacacagaugcu

SEQ ID NO: 2447954 - RNA, 19 nt, Artificial Sequence
  Description of Artificial Sequence: Synthetic oligonucleotide
cgggauacaccaagagcug

SEQ ID NO: 2447955 - RNA, 19 nt, Artificial Sequence
  Description of Artificial Sequence: Synthetic oligonucleotide
ccacucggcaguaaggagu

SEQ ID NO: 2447956 - RNA, 19 nt, Artificial Sequence
  Description of Artificial Sequence: Synthetic oligonucleotide
uggacucgccaggaaucuu

SEQ ID NO: 2447957 - RNA, 19 nt, Artificial Sequence
  Description of Artificial Sequence: Synthetic oligonucleotide
caccaggacucaauguuuu

SEQ ID NO: 2447958 - RNA, 19 nt, Artificial Sequence
  Description of Artificial Sequence: Synthetic oligonucleotide
gcagccucuuugugcauaa

SEQ ID NO: 2447959 - RNA, 19 nt, Artificial Sequence
  Description of Artificial Sequence: Synthetic oligonucleotide
cggaaaguaguuuguccca

SEQ ID NO: 2447960 - RNA, 19 nt, Artificial Sequence
  Description of Artificial Sequence: Synthetic oligonucleotide
gccacguacaccugauuau

SEQ ID NO: 2447961 - RNA, 19 nt, Artificial Sequence
  Description of Artificial Sequence: Synthetic oligonucleotide
cuacuuuccuuugcuacuu

SEQ ID NO: 2447962 - RNA, 19 nt, Artificial Sequence
  Description of Artificial Sequence: Synthetic oligonucleotide
guggacucgccaggaaucu

SEQ ID NO: 2447963 - RNA, 19 nt, Artificial Sequence
  Description of Artificial Sequence: Synthetic oligonucleotide
ggaaaguaguuugucccau

SEQ ID NO: 2447964 - RNA, 19 nt, Artificial Sequence
  Description of Artificial Sequence: Synthetic oligonucleotide
cuacuucggccagcuucug

SEQ ID NO: 2447965 - RNA, 19 nt, Artificial Sequence
  Description of Artificial Sequence: Synthetic oligonucleotide
ccuuuucaucccgggcagg

SEQ ID NO: 2447966 - RNA, 19 nt, Artificial Sequence
  Description of Artificial Sequence: Synthetic oligonucleotide
guagccacguacaccugau

SEQ ID NO: 2447967 - RNA, 19 nt, Artificial Sequence
  Description of Artificial Sequence: Synthetic oligonucleotide
gccucuuugugcauaaauu

SEQ ID NO: 2447968 - RNA, 19 nt, Artificial Sequence
  Description of Artificial Sequence: Synthetic oligonucleotide
aagcuccgggauacaccaa

SEQ ID NO: 2447969 - RNA, 19 nt, Artificial Sequence
  Description of Artificial Sequence: Synthetic oligonucleotide
cuucggccagcuucugggu

SEQ ID NO: 2447970 - RNA, 19 nt, Artificial Sequence
  Description of Artificial Sequence: Synthetic oligonucleotide
cgaacuucagccagcuucu

SEQ ID NO: 2447971 - RNA, 19 nt, Artificial Sequence
  Description of Artificial Sequence: Synthetic oligonucleotide
ggguggacucgccaggaau

SEQ ID NO: 2447972 - RNA, 19 nt, Artificial Sequence
  Description of Artificial Sequence: Synthetic oligonucleotide
gugggcugguccagugguc

SEQ ID NO: 2447973 - RNA, 19 nt, Artificial Sequence
  Description of Artificial Sequence: Synthetic oligonucleotide
ccaggaaucuucucugcau

SEQ ID NO: 2447974 - RNA, 19 nt, Artificial Sequence
  Description of Artificial Sequence: Synthetic oligonucleotide
ccggguaauguuaucugau

SEQ ID NO: 2447975 - RNA, 19 nt, Artificial Sequence
  Description of Artificial Sequence: Synthetic oligonucleotide
caagcucugcgaagcgcau

SEQ ID NO: 2447976 - RNA, 19 nt, Artificial Sequence
  Description of Artificial Sequence: Synthetic oligonucleotide
gagacuacuuuggccccuu

SEQ ID NO: 2447977 - RNA, 19 nt, Artificial Sequence
  Description of Artificial Sequence: Synthetic oligonucleotide
gccucccggauuaggcuac

SEQ ID NO: 2447978 - RNA, 19 nt, Artificial Sequence
  Description of Artificial Sequence: Synthetic oligonucleotide
ggagaggcuguagccacgu

SEQ ID NO: 2447979 - RNA, 19 nt, Artificial Sequence
  Description of Artificial Sequence: Synthetic oligonucleotide
ccccuugcuuugcugccuc

SEQ ID NO: 2447980 - RNA, 19 nt, Artificial Sequence
  Description of Artificial Sequence: Synthetic oligonucleotide
cagcccgggcucgcuggag

SEQ ID NO: 2447981 - RNA, 19 nt, Artificial Sequence
  Description of Artificial Sequence: Synthetic oligonucleotide
gaccacauacgaggccuuu

SEQ ID NO: 2447982 - RNA, 19 nt, Artificial Sequence
  Description of Artificial Sequence: Synthetic oligonucleotide
cuguguccccagaccacau

SEQ ID NO: 2447983 - RNA, 19 nt, Artificial Sequence
  Description of Artificial Sequence: Synthetic oligonucleotide
ggagacuacuuuggccccu

SEQ ID NO: 2447984 - RNA, 19 nt, Artificial Sequence
  Description of Artificial Sequence: Synthetic oligonucleotide
cccaaggauccacaacagu

SEQ ID NO: 2447985 - RNA, 19 nt, Artificial Sequence
  Description of Artificial Sequence: Synthetic oligonucleotide
ccgggcucgcuggagcaac

SEQ ID NO: 2447986 - RNA, 19 nt, Artificial Sequence
  Description of Artificial Sequence: Synthetic oligonucleotide
cucccggauuaggcuacaa

SEQ ID NO: 2447987 - RNA, 19 nt, Artificial Sequence
  Description of Artificial Sequence: Synthetic oligonucleotide
gggcucgcuggagcaacuc

SEQ ID NO: 2447988 - RNA, 19 nt, Artificial Sequence
  Description of Artificial Sequence: Synthetic oligonucleotide
ggcuacaagcccggguaau

SEQ ID NO: 2447989 - RNA, 19 nt, Artificial Sequence
  Description of Artificial Sequence: Synthetic oligonucleotide
cagccucuuugugcauaaa

SEQ ID NO: 2447990 - RNA, 19 nt, Artificial Sequence
  Description of Artificial Sequence: Synthetic oligonucleotide
cggguaauguuaucugauu

SEQ ID NO: 2447991 - RNA, 19 nt, Artificial Sequence
  Description of Artificial Sequence: Synthetic oligonucleotide
cgcuggagcaacucccagu

SEQ ID NO: 2447992 - RNA, 19 nt, Artificial Sequence
  Description of Artificial Sequence: Synthetic oligonucleotide
caccaagagcuggcagccu

SEQ ID NO: 2447993 - RNA, 19 nt, Artificial Sequence
  Description of Artificial Sequence: Synthetic oligonucleotide
ccggcagggagacuacuuu

SEQ ID NO: 2447994 - RNA, 19 nt, Artificial Sequence
  Description of Artificial Sequence: Synthetic oligonucleotide
caggcccacucggcaguaa

SEQ ID NO: 2447995 - RNA, 19 nt, Artificial Sequence
  Description of Artificial Sequence: Synthetic oligonucleotide
ccagagugucauccugcuu

SEQ ID NO: 2447996 - RNA, 19 nt, Artificial Sequence
  Description of Artificial Sequence: Synthetic oligonucleotide
caacucccagugggcuggu

SEQ ID NO: 2447997 - RNA, 19 nt, Artificial Sequence
  Description of Artificial Sequence: Synthetic oligonucleotide
ccucccggauuaggcuaca

SEQ ID NO: 2447998 - RNA, 19 nt, Artificial Sequence
  Description of Artificial Sequence: Synthetic oligonucleotide
ccgggcaggagaggcugua

SEQ ID NO: 2447999 - RNA, 19 nt, Artificial Sequence
  Description of Artificial Sequence: Synthetic oligonucleotide
cccgggcucgcuggagcaa

SEQ ID NO: 2448000 - RNA, 19 nt, Artificial Sequence
  Description of Artificial Sequence: Synthetic oligonucleotide
cgggcucgcuggagcaacu

SEQ ID NO: 2448001 - RNA, 19 nt, Artificial Sequence
  Description of Artificial Sequence: Synthetic oligonucleotide
gaugacaagaccuagaccc

SEQ ID NO: 2448002 - RNA, 19 nt, Artificial Sequence
  Description of Artificial Sequence: Synthetic oligonucleotide
uucaugauuaccaaacugg

SEQ ID NO: 2448003 - RNA, 19 nt, Artificial Sequence
  Description of Artificial Sequence: Synthetic oligonucleotide
agaacagccacaaagaugg

SEQ ID NO: 2448004 - RNA, 19 nt, Artificial Sequence
  Description of Artificial Sequence: Synthetic oligonucleotide
aagccagagacauaagaac

SEQ ID NO: 2448005 - RNA, 19 nt, Artificial Sequence
  Description of Artificial Sequence: Synthetic oligonucleotide
uauaaguaggcauugcuca

SEQ ID NO: 2448006 - RNA, 19 nt, Artificial Sequence
  Description of Artificial Sequence: Synthetic oligonucleotide
aaccagagugagcacaugc

SEQ ID NO: 2448007 - RNA, 19 nt, Artificial Sequence
  Description of Artificial Sequence: Synthetic oligonucleotide
augauuaccaaacugguga

SEQ ID NO: 2448008 - RNA, 19 nt, Artificial Sequence
  Description of Artificial Sequence: Synthetic oligonucleotide
aaagcccaaggccacaagg

SEQ ID NO: 2448009 - RNA, 19 nt, Artificial Sequence
  Description of Artificial Sequence: Synthetic oligonucleotide
agaucuaccccugagugcc

SEQ ID NO: 2448010 - RNA, 19 nt, Artificial Sequence
  Description of Artificial Sequence: Synthetic oligonucleotide
gagacauaagaacagggug

SEQ ID NO: 2448011 - RNA, 19 nt, Artificial Sequence
  Description of Artificial Sequence: Synthetic oligonucleotide
agacauaagaacagggugc

SEQ ID NO: 2448012 - RNA, 19 nt, Artificial Sequence
  Description of Artificial Sequence: Synthetic oligonucleotide
agcuggagcacccaguggc

SEQ ID NO: 2448013 - RNA, 19 nt, Artificial Sequence
  Description of Artificial Sequence: Synthetic oligonucleotide
agcugauagcuguacagcc

SEQ ID NO: 2448014 - RNA, 19 nt, Artificial Sequence
  Description of Artificial Sequence: Synthetic oligonucleotide
aggaugacaagaccuagac

SEQ ID NO: 2448015 - RNA, 19 nt, Artificial Sequence
  Description of Artificial Sequence: Synthetic oligonucleotide
uuugugaaggaugacaaga

SEQ ID NO: 2448016 - RNA, 19 nt, Artificial Sequence
  Description of Artificial Sequence: Synthetic oligonucleotide
uccggagagaacaugagga

SEQ ID NO: 2448017 - RNA, 19 nt, Artificial Sequence
  Description of Artificial Sequence: Synthetic oligonucleotide
guaggcauugcucacuugg

SEQ ID NO: 2448018 - RNA, 19 nt, Artificial Sequence
  Description of Artificial Sequence: Synthetic oligonucleotide
auagacuggagccaggucu

SEQ ID NO: 2448019 - RNA, 19 nt, Artificial Sequence
  Description of Artificial Sequence: Synthetic oligonucleotide
uuugccaggggccaucggg

SEQ ID NO: 2448020 - RNA, 19 nt, Artificial Sequence
  Description of Artificial Sequence: Synthetic oligonucleotide
aauccaggcuccugguggc

SEQ ID NO: 2448021 - RNA, 19 nt, Artificial Sequence
  Description of Artificial Sequence: Synthetic oligonucleotide
uccgucuccacagaaaggg

SEQ ID NO: 2448022 - RNA, 19 nt, Artificial Sequence
  Description of Artificial Sequence: Synthetic oligonucleotide
auaaguaggcauugcucac

SEQ ID NO: 2448023 - RNA, 19 nt, Artificial Sequence
  Description of Artificial Sequence: Synthetic oligonucleotide
ugugaaggaugacaagacc

SEQ ID NO: 2448024 - RNA, 19 nt, Artificial Sequence
  Description of Artificial Sequence: Synthetic oligonucleotide
aguggcaugguagaguuuc

SEQ ID NO: 2448025 - RNA, 19 nt, Artificial Sequence
  Description of Artificial Sequence: Synthetic oligonucleotide
aauagacuggagccagguc

SEQ ID NO: 2448026 - RNA, 19 nt, Artificial Sequence
  Description of Artificial Sequence: Synthetic oligonucleotide
aagugcucaugguuggauc

SEQ ID NO: 2448027 - RNA, 19 nt, Artificial Sequence
  Description of Artificial Sequence: Synthetic oligonucleotide
auaagaacagggugccagg

SEQ ID NO: 2448028 - RNA, 19 nt, Artificial Sequence
  Description of Artificial Sequence: Synthetic oligonucleotide
uagagcagccccaagcccc

SEQ ID NO: 2448029 - RNA, 19 nt, Artificial Sequence
  Description of Artificial Sequence: Synthetic oligonucleotide
ugauuaccaaacuggugag

SEQ ID NO: 2448030 - RNA, 19 nt, Artificial Sequence
  Description of Artificial Sequence: Synthetic oligonucleotide
cauaagaacagggugccag

SEQ ID NO: 2448031 - RNA, 19 nt, Artificial Sequence
  Description of Artificial Sequence: Synthetic oligonucleotide
uugugaaggaugacaagac

SEQ ID NO: 2448032 - RNA, 19 nt, Artificial Sequence
  Description of Artificial Sequence: Synthetic oligonucleotide
ggcgagaacagccacaaag

SEQ ID NO: 2448033 - RNA, 19 nt, Artificial Sequence
  Description of Artificial Sequence: Synthetic oligonucleotide
aaacuggugaggacagggc

SEQ ID NO: 2448034 - RNA, 19 nt, Artificial Sequence
  Description of Artificial Sequence: Synthetic oligonucleotide
gaaagggccauggucagcc

SEQ ID NO: 2448035 - RNA, 19 nt, Artificial Sequence
  Description of Artificial Sequence: Synthetic oligonucleotide
auuaccaaacuggugagga

SEQ ID NO: 2448036 - RNA, 19 nt, Artificial Sequence
  Description of Artificial Sequence: Synthetic oligonucleotide
ucuugcgguauaaguaggc

SEQ ID NO: 2448037 - RNA, 19 nt, Artificial Sequence
  Description of Artificial Sequence: Synthetic oligonucleotide
ucaugguuggauccucuug

SEQ ID NO: 2448038 - RNA, 19 nt, Artificial Sequence
  Description of Artificial Sequence: Synthetic oligonucleotide
ugaggagugccucagucau

SEQ ID NO: 2448039 - RNA, 19 nt, Artificial Sequence
  Description of Artificial Sequence: Synthetic oligonucleotide
gagaauagacuggagccag

SEQ ID NO: 2448040 - RNA, 19 nt, Artificial Sequence
  Description of Artificial Sequence: Synthetic oligonucleotide
aguggcagcgugcucgaac

SEQ ID NO: 2448041 - RNA, 19 nt, Artificial Sequence
  Description of Artificial Sequence: Synthetic oligonucleotide
aggucuggcgagaacagcc

SEQ ID NO: 2448042 - RNA, 19 nt, Artificial Sequence
  Description of Artificial Sequence: Synthetic oligonucleotide
gcggcaguaaaccagagug

SEQ ID NO: 2448043 - RNA, 19 nt, Artificial Sequence
  Description of Artificial Sequence: Synthetic oligonucleotide
uggcgaguggccaagugug

SEQ ID NO: 2448044 - RNA, 19 nt, Artificial Sequence
  Description of Artificial Sequence: Synthetic oligonucleotide
agaacagggugccaggaga

SEQ ID NO: 2448045 - RNA, 19 nt, Artificial Sequence
  Description of Artificial Sequence: Synthetic oligonucleotide
aguaaaccagagugagcac

SEQ ID NO: 2448046 - RNA, 19 nt, Artificial Sequence
  Description of Artificial Sequence: Synthetic oligonucleotide
uaugcugagguggaaaauc

SEQ ID NO: 2448047 - RNA, 19 nt, Artificial Sequence
  Description of Artificial Sequence: Synthetic oligonucleotide
ugcgacuccgucuccacag

SEQ ID NO: 2448048 - RNA, 19 nt, Artificial Sequence
  Description of Artificial Sequence: Synthetic oligonucleotide
acuugguucaugauuacca

SEQ ID NO: 2448049 - RNA, 19 nt, Artificial Sequence
  Description of Artificial Sequence: Synthetic oligonucleotide
caugauuaccaaacuggug

SEQ ID NO: 2448050 - RNA, 19 nt, Artificial Sequence
  Description of Artificial Sequence: Synthetic oligonucleotide
agguccuaugcugaggugg

SEQ ID NO: 2448051 - RNA, 19 nt, Artificial Sequence
  Description of Artificial Sequence: Synthetic oligonucleotide
agugacagcggcaguaaac

SEQ ID NO: 2448052 - RNA, 19 nt, Artificial Sequence
  Description of Artificial Sequence: Synthetic oligonucleotide
ugcgguauaaguaggcauu

SEQ ID NO: 2448053 - RNA, 19 nt, Artificial Sequence
  Description of Artificial Sequence: Synthetic oligonucleotide
ggccccaucagcuaagcgg

SEQ ID NO: 2448054 - RNA, 19 nt, Artificial Sequence
  Description of Artificial Sequence: Synthetic oligonucleotide
uaaaccagagugagcacau

SEQ ID NO: 2448055 - RNA, 19 nt, Artificial Sequence
  Description of Artificial Sequence: Synthetic oligonucleotide
augcugagguggaaaaucc

SEQ ID NO: 2448056 - RNA, 19 nt, Artificial Sequence
  Description of Artificial Sequence: Synthetic oligonucleotide
uccgugagagggaacgcag

SEQ ID NO: 2448057 - RNA, 19 nt, Artificial Sequence
  Description of Artificial Sequence: Synthetic oligonucleotide
ugguuggauccucuugcgg

SEQ ID NO: 2448058 - RNA, 19 nt, Artificial Sequence
  Description of Artificial Sequence: Synthetic oligonucleotide
agugcgcagagcucgguag

SEQ ID NO: 2448059 - RNA, 19 nt, Artificial Sequence
  Description of Artificial Sequence: Synthetic oligonucleotide
gauuaccaaacuggugagg

SEQ ID NO: 2448060 - RNA, 19 nt, Artificial Sequence
  Description of Artificial Sequence: Synthetic oligonucleotide
ggcacuacccagcagguag

SEQ ID NO: 2448061 - RNA, 19 nt, Artificial Sequence
  Description of Artificial Sequence: Synthetic oligonucleotide
ugugcuuugccaagcugcu

SEQ ID NO: 2448062 - RNA, 19 nt, Artificial Sequence
  Description of Artificial Sequence: Synthetic oligonucleotide
ugcucgaaccuuccgugag

SEQ ID NO: 2448063 - RNA, 19 nt, Artificial Sequence
  Description of Artificial Sequence: Synthetic oligonucleotide
cugauagcuguacagccug

SEQ ID NO: 2448064 - RNA, 19 nt, Artificial Sequence
  Description of Artificial Sequence: Synthetic oligonucleotide
aacgcagcagugaacucuc

SEQ ID NO: 2448065 - RNA, 19 nt, Artificial Sequence
  Description of Artificial Sequence: Synthetic oligonucleotide
aaagggccauggucagccc

SEQ ID NO: 2448066 - RNA, 19 nt, Artificial Sequence
  Description of Artificial Sequence: Synthetic oligonucleotide
gaaggaugacaagaccuag

SEQ ID NO: 2448067 - RNA, 19 nt, Artificial Sequence
  Description of Artificial Sequence: Synthetic oligonucleotide
gacagcggcaguaaaccag

SEQ ID NO: 2448068 - RNA, 19 nt, Artificial Sequence
  Description of Artificial Sequence: Synthetic oligonucleotide
uaccugaaguguucccugg

SEQ ID NO: 2448069 - RNA, 19 nt, Artificial Sequence
  Description of Artificial Sequence: Synthetic oligonucleotide
ucuccggagagaacaugag

SEQ ID NO: 2448070 - RNA, 19 nt, Artificial Sequence
  Description of Artificial Sequence: Synthetic oligonucleotide
cucacuugguucaugauua

SEQ ID NO: 2448071 - RNA, 19 nt, Artificial Sequence
  Description of Artificial Sequence: Synthetic oligonucleotide
agcucgguagaugugcgac

SEQ ID NO: 2448072 - RNA, 19 nt, Artificial Sequence
  Description of Artificial Sequence: Synthetic oligonucleotide
uugcucacuugguucauga

SEQ ID NO: 2448073 - RNA, 19 nt, Artificial Sequence
  Description of Artificial Sequence: Synthetic oligonucleotide
gugacagcggcaguaaacc

SEQ ID NO: 2448074 - RNA, 19 nt, Artificial Sequence
  Description of Artificial Sequence: Synthetic oligonucleotide
auccucuugcgguauaagu

SEQ ID NO: 2448075 - RNA, 19 nt, Artificial Sequence
  Description of Artificial Sequence: Synthetic oligonucleotide
guagaguuucagcuuugcc

SEQ ID NO: 2448076 - RNA, 19 nt, Artificial Sequence
  Description of Artificial Sequence: Synthetic oligonucleotide
gugugcuuugccaagcugc

SEQ ID NO: 2448077 - RNA, 19 nt, Artificial Sequence
  Description of Artificial Sequence: Synthetic oligonucleotide
cuccggagagaacaugagg

SEQ ID NO: 2448078 - RNA, 19 nt, Artificial Sequence
  Description of Artificial Sequence: Synthetic oligonucleotide
agcagguagcccaccaacc

SEQ ID NO: 2448079 - RNA, 19 nt, Artificial Sequence
  Description of Artificial Sequence: Synthetic oligonucleotide
ugccaagcugcucuuugug

SEQ ID NO: 2448080 - RNA, 19 nt, Artificial Sequence
  Description of Artificial Sequence: Synthetic oligonucleotide
cucuugcgguauaaguagg

SEQ ID NO: 2448081 - RNA, 19 nt, Artificial Sequence
  Description of Artificial Sequence: Synthetic oligonucleotide
ucuggcgagaacagccaca

SEQ ID NO: 2448082 - RNA, 19 nt, Artificial Sequence
  Description of Artificial Sequence: Synthetic oligonucleotide
aagugugcuuugccaagcu

SEQ ID NO: 2448083 - RNA, 19 nt, Artificial Sequence
  Description of Artificial Sequence: Synthetic oligonucleotide
acaagaccuagacccagca

SEQ ID NO: 2448084 - RNA, 19 nt, Artificial Sequence
  Description of Artificial Sequence: Synthetic oligonucleotide
uugguucaugauuaccaaa

SEQ ID NO: 2448085 - RNA, 19 nt, Artificial Sequence
  Description of Artificial Sequence: Synthetic oligonucleotide
uugcgguauaaguaggcau

SEQ ID NO: 2448086 - RNA, 19 nt, Artificial Sequence
  Description of Artificial Sequence: Synthetic oligonucleotide
gcagcagugaacucuccgg

SEQ ID NO: 2448087 - RNA, 19 nt, Artificial Sequence
  Description of Artificial Sequence: Synthetic oligonucleotide
agccagagacauaagaaca

SEQ ID NO: 2448088 - RNA, 19 nt, Artificial Sequence
  Description of Artificial Sequence: Synthetic oligonucleotide
ggagagaacaugaggagug

SEQ ID NO: 2448089 - RNA, 19 nt, Artificial Sequence
  Description of Artificial Sequence: Synthetic oligonucleotide
augaggagugccucaguca

SEQ ID NO: 2448090 - RNA, 19 nt, Artificial Sequence
  Description of Artificial Sequence: Synthetic oligonucleotide
auggcgaguggccaagugu

SEQ ID NO: 2448091 - RNA, 19 nt, Artificial Sequence
  Description of Artificial Sequence: Synthetic oligonucleotide
guaaaccagagugagcaca

SEQ ID NO: 2448092 - RNA, 19 nt, Artificial Sequence
  Description of Artificial Sequence: Synthetic oligonucleotide
cuaguaccugaaguguucc

SEQ ID NO: 2448093 - RNA, 19 nt, Artificial Sequence
  Description of Artificial Sequence: Synthetic oligonucleotide
guggcagcgugcucgaacc

SEQ ID NO: 2448094 - RNA, 19 nt, Artificial Sequence
  Description of Artificial Sequence: Synthetic oligonucleotide
uaaguaggcauugcucacu

SEQ ID NO: 2448095 - RNA, 19 nt, Artificial Sequence
  Description of Artificial Sequence: Synthetic oligonucleotide
guaccugaaguguucccug

SEQ ID NO: 2448096 - RNA, 19 nt, Artificial Sequence
  Description of Artificial Sequence: Synthetic oligonucleotide
ugguaaagcccaaggccac

SEQ ID NO: 2448097 - RNA, 19 nt, Artificial Sequence
  Description of Artificial Sequence: Synthetic oligonucleotide
aaggaugacaagaccuaga

SEQ ID NO: 2448098 - RNA, 19 nt, Artificial Sequence
  Description of Artificial Sequence: Synthetic oligonucleotide
cuacccagcagguagccca

SEQ ID NO: 2448099 - RNA, 19 nt, Artificial Sequence
  Description of Artificial Sequence: Synthetic oligonucleotide
uuaccaaacuggugaggac

SEQ ID NO: 2448100 - RNA, 19 nt, Artificial Sequence
  Description of Artificial Sequence: Synthetic oligonucleotide
guagaugugcgacuccguc

SEQ ID NO: 2448101 - RNA, 19 nt, Artificial Sequence
  Description of Artificial Sequence: Synthetic oligonucleotide
cagagcucgguagaugugc

SEQ ID NO: 2448102 - RNA, 19 nt, Artificial Sequence
  Description of Artificial Sequence: Synthetic oligonucleotide
aagggccauggucagccca

SEQ ID NO: 2448103 - RNA, 19 nt, Artificial Sequence
  Description of Artificial Sequence: Synthetic oligonucleotide
ccucuugcgguauaaguag

SEQ ID NO: 2448104 - RNA, 19 nt, Artificial Sequence
  Description of Artificial Sequence: Synthetic oligonucleotide
aagcccaaggccacaaggu

SEQ ID NO: 2448105 - RNA, 19 nt, Artificial Sequence
  Description of Artificial Sequence: Synthetic oligonucleotide
agugcccuaguaccugaag

SEQ ID NO: 2448106 - RNA, 19 nt, Artificial Sequence
  Description of Artificial Sequence: Synthetic oligonucleotide
agcccaaggccacaaggug

SEQ ID NO: 2448107 - RNA, 19 nt, Artificial Sequence
  Description of Artificial Sequence: Synthetic oligonucleotide
guuucagcuuugccagggg

SEQ ID NO: 2448108 - RNA, 19 nt, Artificial Sequence
  Description of Artificial Sequence: Synthetic oligonucleotide
caucggggcaacagcuugg

SEQ ID NO: 2448109 - RNA, 19 nt, Artificial Sequence
  Description of Artificial Sequence: Synthetic oligonucleotide
uaguaccugaaguguuccc

SEQ ID NO: 2448110 - RNA, 19 nt, Artificial Sequence
  Description of Artificial Sequence: Synthetic oligonucleotide
aacaggaggcuggcacuac

SEQ ID NO: 2448111 - RNA, 19 nt, Artificial Sequence
  Description of Artificial Sequence: Synthetic oligonucleotide
agaccuagacccagcagag

SEQ ID NO: 2448112 - RNA, 19 nt, Artificial Sequence
  Description of Artificial Sequence: Synthetic oligonucleotide
gaacaugaggagugccuca

SEQ ID NO: 2448113 - RNA, 19 nt, Artificial Sequence
  Description of Artificial Sequence: Synthetic oligonucleotide
ugacagcggcaguaaacca

SEQ ID NO: 2448114 - RNA, 19 nt, Artificial Sequence
  Description of Artificial Sequence: Synthetic oligonucleotide
cagcugauagcuguacagc

SEQ ID NO: 2448115 - RNA, 19 nt, Artificial Sequence
  Description of Artificial Sequence: Synthetic oligonucleotide
ugagugcccuaguaccuga

SEQ ID NO: 2448116 - RNA, 19 nt, Artificial Sequence
  Description of Artificial Sequence: Synthetic oligonucleotide
cgaaccuuccgugagaggg

SEQ ID NO: 2448117 - RNA, 19 nt, Artificial Sequence
  Description of Artificial Sequence: Synthetic oligonucleotide
cucuccggagagaacauga

SEQ ID NO: 2448118 - RNA, 19 nt, Artificial Sequence
  Description of Artificial Sequence: Synthetic oligonucleotide
ugaacucuccggagagaac

SEQ ID NO: 2448119 - RNA, 19 nt, Artificial Sequence
  Description of Artificial Sequence: Synthetic oligonucleotide
agguuuccagccccagguc

SEQ ID NO: 2448120 - RNA, 19 nt, Artificial Sequence
  Description of Artificial Sequence: Synthetic oligonucleotide
cucgaaccuuccgugagag

SEQ ID NO: 2448121 - RNA, 19 nt, Artificial Sequence
  Description of Artificial Sequence: Synthetic oligonucleotide
ggcauugcucacuugguuc

SEQ ID NO: 2448122 - RNA, 19 nt, Artificial Sequence
  Description of Artificial Sequence: Synthetic oligonucleotide
cuugguucaugauuaccaa

SEQ ID NO: 2448123 - RNA, 19 nt, Artificial Sequence
  Description of Artificial Sequence: Synthetic oligonucleotide
caagugugcuuugccaagc

SEQ ID NO: 2448124 - RNA, 19 nt, Artificial Sequence
  Description of Artificial Sequence: Synthetic oligonucleotide
acuacccagcagguagccc

SEQ ID NO: 2448125 - RNA, 19 nt, Artificial Sequence
  Description of Artificial Sequence: Synthetic oligonucleotide
cagagugagcacaugccca

SEQ ID NO: 2448126 - RNA, 19 nt, Artificial Sequence
  Description of Artificial Sequence: Synthetic oligonucleotide
ggaugacaagaccuagacc

SEQ ID NO: 2448127 - RNA, 19 nt, Artificial Sequence
  Description of Artificial Sequence: Synthetic oligonucleotide
gagggaacgcagcagugaa

SEQ ID NO: 2448128 - RNA, 19 nt, Artificial Sequence
  Description of Artificial Sequence: Synthetic oligonucleotide
gacaagaccuagacccagc

SEQ ID NO: 2448129 - RNA, 19 nt, Artificial Sequence
  Description of Artificial Sequence: Synthetic oligonucleotide
agaccugcccacagcaccg

SEQ ID NO: 2448130 - RNA, 19 nt, Artificial Sequence
  Description of Artificial Sequence: Synthetic oligonucleotide
gguauaaguaggcauugcu

SEQ ID NO: 2448131 - RNA, 19 nt, Artificial Sequence
  Description of Artificial Sequence: Synthetic oligonucleotide
uuccgugagagggaacgca

SEQ ID NO: 2448132 - RNA, 19 nt, Artificial Sequence
  Description of Artificial Sequence: Synthetic oligonucleotide
gcuaagcggggccagcagg

SEQ ID NO: 2448133 - RNA, 19 nt, Artificial Sequence
  Description of Artificial Sequence: Synthetic oligonucleotide
uugccaagcugcucuuugu

SEQ ID NO: 2448134 - RNA, 19 nt, Artificial Sequence
  Description of Artificial Sequence: Synthetic oligonucleotide
agcccugccugcccauggc

SEQ ID NO: 2448135 - RNA, 19 nt, Artificial Sequence
  Description of Artificial Sequence: Synthetic oligonucleotide
agagcucgguagaugugcg

SEQ ID NO: 2448136 - RNA, 19 nt, Artificial Sequence
  Description of Artificial Sequence: Synthetic oligonucleotide
uggccccaucagcuaagcg

SEQ ID NO: 2448137 - RNA, 19 nt, Artificial Sequence
  Description of Artificial Sequence: Synthetic oligonucleotide
ucgaaccuuccgugagagg

SEQ ID NO: 2448138 - RNA, 19 nt, Artificial Sequence
  Description of Artificial Sequence: Synthetic oligonucleotide
augcccaacaggaggcugg

SEQ ID NO: 2448139 - RNA, 19 nt, Artificial Sequence
  Description of Artificial Sequence: Synthetic oligonucleotide
agcgugcucgaaccuuccg

SEQ ID NO: 2448140 - RNA, 19 nt, Artificial Sequence
  Description of Artificial Sequence: Synthetic oligonucleotide
agaauagacuggagccagg

SEQ ID NO: 2448141 - RNA, 19 nt, Artificial Sequence
  Description of Artificial Sequence: Synthetic oligonucleotide
cccugagugcccuaguacc

SEQ ID NO: 2448142 - RNA, 19 nt, Artificial Sequence
  Description of Artificial Sequence: Synthetic oligonucleotide
uccuaugcugagguggaaa

SEQ ID NO: 2448143 - RNA, 19 nt, Artificial Sequence
  Description of Artificial Sequence: Synthetic oligonucleotide
agcggcaguaaaccagagu

SEQ ID NO: 2448144 - RNA, 19 nt, Artificial Sequence
  Description of Artificial Sequence: Synthetic oligonucleotide
ccuuccgugagagggaacg

SEQ ID NO: 2448145 - RNA, 19 nt, Artificial Sequence
  Description of Artificial Sequence: Synthetic oligonucleotide
gaaaauccaggcuccuggu

SEQ ID NO: 2448146 - RNA, 19 nt, Artificial Sequence
  Description of Artificial Sequence: Synthetic oligonucleotide
cagccagguaccaggcacc

SEQ ID NO: 2448147 - RNA, 19 nt, Artificial Sequence
  Description of Artificial Sequence: Synthetic oligonucleotide
gcagguagcccaccaaccc

SEQ ID NO: 2448148 - RNA, 19 nt, Artificial Sequence
  Description of Artificial Sequence: Synthetic oligonucleotide
ccaccaacccagaaguggc

SEQ ID NO: 2448149 - RNA, 19 nt, Artificial Sequence
  Description of Artificial Sequence: Synthetic oligonucleotide
agcuaagcggggccagcag

SEQ ID NO: 2448150 - RNA, 19 nt, Artificial Sequence
  Description of Artificial Sequence: Synthetic oligonucleotide
agguagcccaccaacccag

SEQ ID NO: 2448151 - RNA, 19 nt, Artificial Sequence
  Description of Artificial Sequence: Synthetic oligonucleotide
aucggggcaacagcuuggg

SEQ ID NO: 2448152 - RNA, 19 nt, Artificial Sequence
  Description of Artificial Sequence: Synthetic oligonucleotide
uaccaggcaccaccaguga

SEQ ID NO: 2448153 - RNA, 19 nt, Artificial Sequence
  Description of Artificial Sequence: Synthetic oligonucleotide
cccaaggccacaagguggg

SEQ ID NO: 2448154 - RNA, 19 nt, Artificial Sequence
  Description of Artificial Sequence: Synthetic oligonucleotide
ugugcgacuccgucuccac

SEQ ID NO: 2448155 - RNA, 19 nt, Artificial Sequence
  Description of Artificial Sequence: Synthetic oligonucleotide
ucggggcaacagcuugggg

SEQ ID NO: 2448156 - RNA, 19 nt, Artificial Sequence
  Description of Artificial Sequence: Synthetic oligonucleotide
acagcggcaguaaaccaga

SEQ ID NO: 2448157 - RNA, 19 nt, Artificial Sequence
  Description of Artificial Sequence: Synthetic oligonucleotide
gagcacacaguagggccag

SEQ ID NO: 2448158 - RNA, 19 nt, Artificial Sequence
  Description of Artificial Sequence: Synthetic oligonucleotide
gagguggaaaauccaggcu

SEQ ID NO: 2448159 - RNA, 19 nt, Artificial Sequence
  Description of Artificial Sequence: Synthetic oligonucleotide
gugaacucuccggagagaa

SEQ ID NO: 2448160 - RNA, 19 nt, Artificial Sequence
  Description of Artificial Sequence: Synthetic oligonucleotide
gcauugcucacuugguuca

SEQ ID NO: 2448161 - RNA, 19 nt, Artificial Sequence
  Description of Artificial Sequence: Synthetic oligonucleotide
aaccuuccgugagagggaa

SEQ ID NO: 2448162 - RNA, 19 nt, Artificial Sequence
  Description of Artificial Sequence: Synthetic oligonucleotide
gaugugcgacuccgucucc

SEQ ID NO: 2448163 - RNA, 19 nt, Artificial Sequence
  Description of Artificial Sequence: Synthetic oligonucleotide
aguguucccuggccccauc

SEQ ID NO: 2448164 - RNA, 19 nt, Artificial Sequence
  Description of Artificial Sequence: Synthetic oligonucleotide
aggcauugcucacuugguu

SEQ ID NO: 2448165 - RNA, 19 nt, Artificial Sequence
  Description of Artificial Sequence: Synthetic oligonucleotide
gguuggauccucuugcggu

SEQ ID NO: 2448166 - RNA, 19 nt, Artificial Sequence
  Description of Artificial Sequence: Synthetic oligonucleotide
cacaguagggccagcagcu

SEQ ID NO: 2448167 - RNA, 19 nt, Artificial Sequence
  Description of Artificial Sequence: Synthetic oligonucleotide
auugcucacuugguucaug

SEQ ID NO: 2448168 - RNA, 19 nt, Artificial Sequence
  Description of Artificial Sequence: Synthetic oligonucleotide
ccuaguaccugaaguguuc

SEQ ID NO: 2448169 - RNA, 19 nt, Artificial Sequence
  Description of Artificial Sequence: Synthetic oligonucleotide
ggagcacccaguggcagcg

SEQ ID NO: 2448170 - RNA, 19 nt, Artificial Sequence
  Description of Artificial Sequence: Synthetic oligonucleotide
ccugaaguguucccuggcc

SEQ ID NO: 2448171 - RNA, 19 nt, Artificial Sequence
  Description of Artificial Sequence: Synthetic oligonucleotide
augacaagaccuagaccca

SEQ ID NO: 2448172 - RNA, 19 nt, Artificial Sequence
  Description of Artificial Sequence: Synthetic oligonucleotide
aagcggggccagcagguuu

SEQ ID NO: 2448173 - RNA, 19 nt, Artificial Sequence
  Description of Artificial Sequence: Synthetic oligonucleotide
cauggcgaguggccaagug

SEQ ID NO: 2448174 - RNA, 19 nt, Artificial Sequence
  Description of Artificial Sequence: Synthetic oligonucleotide
agggaacgcagcagugaac

SEQ ID NO: 2448175 - RNA, 19 nt, Artificial Sequence
  Description of Artificial Sequence: Synthetic oligonucleotide
cccaacaggaggcuggcac

SEQ ID NO: 2448176 - RNA, 19 nt, Artificial Sequence
  Description of Artificial Sequence: Synthetic oligonucleotide
ucagcuaagcggggccagc

SEQ ID NO: 2448177 - RNA, 19 nt, Artificial Sequence
  Description of Artificial Sequence: Synthetic oligonucleotide
ccaagugugcuuugccaag

SEQ ID NO: 2448178 - RNA, 19 nt, Artificial Sequence
  Description of Artificial Sequence: Synthetic oligonucleotide
guuggauccucuugcggua

SEQ ID NO: 2448179 - RNA, 19 nt, Artificial Sequence
  Description of Artificial Sequence: Synthetic oligonucleotide
gguagaguuucagcuuugc

SEQ ID NO: 2448180 - RNA, 19 nt, Artificial Sequence
  Description of Artificial Sequence: Synthetic oligonucleotide
cagcagugaacucuccgga

SEQ ID NO: 2448181 - RNA, 19 nt, Artificial Sequence
  Description of Artificial Sequence: Synthetic oligonucleotide
gaacagggugccaggagaa

SEQ ID NO: 2448182 - RNA, 19 nt, Artificial Sequence
  Description of Artificial Sequence: Synthetic oligonucleotide
cuagacccagcagagcaca

SEQ ID NO: 2448183 - RNA, 19 nt, Artificial Sequence
  Description of Artificial Sequence: Synthetic oligonucleotide
gaaccuuccgugagaggga

SEQ ID NO: 2448184 - RNA, 19 nt, Artificial Sequence
  Description of Artificial Sequence: Synthetic oligonucleotide
ugcucacuugguucaugau

SEQ ID NO: 2448185 - RNA, 19 nt, Artificial Sequence
  Description of Artificial Sequence: Synthetic oligonucleotide
agguaccaggcaccaccag

SEQ ID NO: 2448186 - RNA, 19 nt, Artificial Sequence
  Description of Artificial Sequence: Synthetic oligonucleotide
cuuccgugagagggaacgc

SEQ ID NO: 2448187 - RNA, 19 nt, Artificial Sequence
  Description of Artificial Sequence: Synthetic oligonucleotide
gucuggcgagaacagccac

SEQ ID NO: 2448188 - RNA, 19 nt, Artificial Sequence
  Description of Artificial Sequence: Synthetic oligonucleotide
aacucuccggagagaacau

SEQ ID NO: 2448189 - RNA, 19 nt, Artificial Sequence
  Description of Artificial Sequence: Synthetic oligonucleotide
acccagaaguggcauggua

SEQ ID NO: 2448190 - RNA, 19 nt, Artificial Sequence
  Description of Artificial Sequence: Synthetic oligonucleotide
ccagcagagcacacaguag

SEQ ID NO: 2448191 - RNA, 19 nt, Artificial Sequence
  Description of Artificial Sequence: Synthetic oligonucleotide
gaccuagacccagcagagc

SEQ ID NO: 2448192 - RNA, 19 nt, Artificial Sequence
  Description of Artificial Sequence: Synthetic oligonucleotide
gcgagaacagccacaaaga

SEQ ID NO: 2448193 - RNA, 19 nt, Artificial Sequence
  Description of Artificial Sequence: Synthetic oligonucleotide
cuuugccaggggccaucgg

SEQ ID NO: 2448194 - RNA, 19 nt, Artificial Sequence
  Description of Artificial Sequence: Synthetic oligonucleotide
acucuccggagagaacaug

SEQ ID NO: 2448195 - RNA, 19 nt, Artificial Sequence
  Description of Artificial Sequence: Synthetic oligonucleotide
caugcccaacaggaggcug

SEQ ID NO: 2448196 - RNA, 19 nt, Artificial Sequence
  Description of Artificial Sequence: Synthetic oligonucleotide
aacccagaaguggcauggu

SEQ ID NO: 2448197 - RNA, 19 nt, Artificial Sequence
  Description of Artificial Sequence: Synthetic oligonucleotide
ugcccaacaggaggcuggc

SEQ ID NO: 2448198 - RNA, 19 nt, Artificial Sequence
  Description of Artificial Sequence: Synthetic oligonucleotide
agcaccgccaacagcccug

SEQ ID NO: 2448199 - RNA, 19 nt, Artificial Sequence
  Description of Artificial Sequence: Synthetic oligonucleotide
ugcucaugguuggauccuc

SEQ ID NO: 2448200 - RNA, 19 nt, Artificial Sequence
  Description of Artificial Sequence: Synthetic oligonucleotide
cuggagcacccaguggcag

SEQ ID NO: 2448201 - RNA, 19 nt, Artificial Sequence
  Description of Artificial Sequence: Synthetic oligonucleotide
ugccugcccauggcgagug

SEQ ID NO: 2448202 - RNA, 19 nt, Artificial Sequence
  Description of Artificial Sequence: Synthetic oligonucleotide
caugguagaguuucagcuu

SEQ ID NO: 2448203 - RNA, 19 nt, Artificial Sequence
  Description of Artificial Sequence: Synthetic oligonucleotide
ccauggucagcccagcuga

SEQ ID NO: 2448204 - RNA, 19 nt, Artificial Sequence
  Description of Artificial Sequence: Synthetic oligonucleotide
cagguaccaggcaccacca

SEQ ID NO: 2448205 - RNA, 19 nt, Artificial Sequence
  Description of Artificial Sequence: Synthetic oligonucleotide
caacagcuugggguagagc

SEQ ID NO: 2448206 - RNA, 19 nt, Artificial Sequence
  Description of Artificial Sequence: Synthetic oligonucleotide
gcgguauaaguaggcauug

SEQ ID NO: 2448207 - RNA, 19 nt, Artificial Sequence
  Description of Artificial Sequence: Synthetic oligonucleotide
uuggauccucuugcgguau

SEQ ID NO: 2448208 - RNA, 19 nt, Artificial Sequence
  Description of Artificial Sequence: Synthetic oligonucleotide
gagcucgguagaugugcga

SEQ ID NO: 2448209 - RNA, 19 nt, Artificial Sequence
  Description of Artificial Sequence: Synthetic oligonucleotide
cuaagcggggccagcaggu

SEQ ID NO: 2448210 - RNA, 19 nt, Artificial Sequence
  Description of Artificial Sequence: Synthetic oligonucleotide
ucuccacagaaagggccau

SEQ ID NO: 2448211 - RNA, 19 nt, Artificial Sequence
  Description of Artificial Sequence: Synthetic oligonucleotide
ugggguagagcagccccaa

SEQ ID NO: 2448212 - RNA, 19 nt, Artificial Sequence
  Description of Artificial Sequence: Synthetic oligonucleotide
uaccccugagugcccuagu

SEQ ID NO: 2448213 - RNA, 19 nt, Artificial Sequence
  Description of Artificial Sequence: Synthetic oligonucleotide
uggcagcgugcucgaaccu

SEQ ID NO: 2448214 - RNA, 19 nt, Artificial Sequence
  Description of Artificial Sequence: Synthetic oligonucleotide
gugcucgaaccuuccguga

SEQ ID NO: 2448215 - RNA, 19 nt, Artificial Sequence
  Description of Artificial Sequence: Synthetic oligonucleotide
cuggcgagaacagccacaa

SEQ ID NO: 2448216 - RNA, 19 nt, Artificial Sequence
  Description of Artificial Sequence: Synthetic oligonucleotide
ugcgcagagcucgguagau

SEQ ID NO: 2448217 - RNA, 19 nt, Artificial Sequence
  Description of Artificial Sequence: Synthetic oligonucleotide
cagguccuaugcugaggug

SEQ ID NO: 2448218 - RNA, 19 nt, Artificial Sequence
  Description of Artificial Sequence: Synthetic oligonucleotide
augugcgacuccgucucca

SEQ ID NO: 2448219 - RNA, 19 nt, Artificial Sequence
  Description of Artificial Sequence: Synthetic oligonucleotide
cagcggcaguaaaccagag

SEQ ID NO: 2448220 - RNA, 19 nt, Artificial Sequence
  Description of Artificial Sequence: Synthetic oligonucleotide
accccugagugcccuagua

SEQ ID NO: 2448221 - RNA, 19 nt, Artificial Sequence
  Description of Artificial Sequence: Synthetic oligonucleotide
gaucuaccccugagugccc

SEQ ID NO: 2448222 - RNA, 19 nt, Artificial Sequence
  Description of Artificial Sequence: Synthetic oligonucleotide
agcagugcgcagagcucgg

SEQ ID NO: 2448223 - RNA, 19 nt, Artificial Sequence
  Description of Artificial Sequence: Synthetic oligonucleotide
uggauccucuugcgguaua

SEQ ID NO: 2448224 - RNA, 19 nt, Artificial Sequence
  Description of Artificial Sequence: Synthetic oligonucleotide
ccaucggggcaacagcuug

SEQ ID NO: 2448225 - RNA, 19 nt, Artificial Sequence
  Description of Artificial Sequence: Synthetic oligonucleotide
gccaggagaauagacugga

SEQ ID NO: 2448226 - RNA, 19 nt, Artificial Sequence
  Description of Artificial Sequence: Synthetic oligonucleotide
cgugcucgaaccuuccgug

SEQ ID NO: 2448227 - RNA, 19 nt, Artificial Sequence
  Description of Artificial Sequence: Synthetic oligonucleotide
gaagugcucaugguuggau

SEQ ID NO: 2448228 - RNA, 19 nt, Artificial Sequence
  Description of Artificial Sequence: Synthetic oligonucleotide
gggaacgcagcagugaacu

SEQ ID NO: 2448229 - RNA, 19 nt, Artificial Sequence
  Description of Artificial Sequence: Synthetic oligonucleotide
aucuaccccugagugcccu

SEQ ID NO: 2448230 - RNA, 19 nt, Artificial Sequence
  Description of Artificial Sequence: Synthetic oligonucleotide
gggccaucggggcaacagc

SEQ ID NO: 2448231 - RNA, 19 nt, Artificial Sequence
  Description of Artificial Sequence: Synthetic oligonucleotide
gugcgcagagcucgguaga

SEQ ID NO: 2448232 - RNA, 19 nt, Artificial Sequence
  Description of Artificial Sequence: Synthetic oligonucleotide
ccuaugcugagguggaaaa

SEQ ID NO: 2448233 - RNA, 19 nt, Artificial Sequence
  Description of Artificial Sequence: Synthetic oligonucleotide
ggggccaucggggcaacag

SEQ ID NO: 2448234 - RNA, 19 nt, Artificial Sequence
  Description of Artificial Sequence: Synthetic oligonucleotide
aaguguucccuggccccau

SEQ ID NO: 2448235 - RNA, 19 nt, Artificial Sequence
  Description of Artificial Sequence: Synthetic oligonucleotide
caccaacccagaaguggca

SEQ ID NO: 2448236 - RNA, 19 nt, Artificial Sequence
  Description of Artificial Sequence: Synthetic oligonucleotide
cuggccccaucagcuaagc

SEQ ID NO: 2448237 - RNA, 19 nt, Artificial Sequence
  Description of Artificial Sequence: Synthetic oligonucleotide
caucagcuaagcggggcca

SEQ ID NO: 2448238 - RNA, 19 nt, Artificial Sequence
  Description of Artificial Sequence: Synthetic oligonucleotide
ccaacccagaaguggcaug

SEQ ID NO: 2448239 - RNA, 19 nt, Artificial Sequence
  Description of Artificial Sequence: Synthetic oligonucleotide
cugggaagugcucaugguu

SEQ ID NO: 2448240 - RNA, 19 nt, Artificial Sequence
  Description of Artificial Sequence: Synthetic oligonucleotide
ccgugagagggaacgcagc

SEQ ID NO: 2448241 - RNA, 19 nt, Artificial Sequence
  Description of Artificial Sequence: Synthetic oligonucleotide
cgguagaugugcgacuccg

SEQ ID NO: 2448242 - RNA, 19 nt, Artificial Sequence
  Description of Artificial Sequence: Synthetic oligonucleotide
gguccuaugcugaggugga

SEQ ID NO: 2448243 - RNA, 19 nt, Artificial Sequence
  Description of Artificial Sequence: Synthetic oligonucleotide
gcaacagcuugggguagag

SEQ ID NO: 2448244 - RNA, 19 nt, Artificial Sequence
  Description of Artificial Sequence: Synthetic oligonucleotide
agggugccaggagaauaga

SEQ ID NO: 2448245 - RNA, 19 nt, Artificial Sequence
  Description of Artificial Sequence: Synthetic oligonucleotide
uggcgagaacagccacaaa

SEQ ID NO: 2448246 - RNA, 19 nt, Artificial Sequence
  Description of Artificial Sequence: Synthetic oligonucleotide
gggugccaggagaauagac

SEQ ID NO: 2448247 - RNA, 19 nt, Artificial Sequence
  Description of Artificial Sequence: Synthetic oligonucleotide
accuuccgugagagggaac

SEQ ID NO: 2448248 - RNA, 19 nt, Artificial Sequence
  Description of Artificial Sequence: Synthetic oligonucleotide
ccccugagugcccuaguac

SEQ ID NO: 2448249 - RNA, 19 nt, Artificial Sequence
  Description of Artificial Sequence: Synthetic oligonucleotide
gugcgacuccgucuccaca

SEQ ID NO: 2448250 - RNA, 19 nt, Artificial Sequence
  Description of Artificial Sequence: Synthetic oligonucleotide
gguaaagcccaaggccaca

SEQ ID NO: 2448251 - RNA, 19 nt, Artificial Sequence
  Description of Artificial Sequence: Synthetic oligonucleotide
gcucgaaccuuccgugaga

SEQ ID NO: 2448252 - RNA, 19 nt, Artificial Sequence
  Description of Artificial Sequence: Synthetic oligonucleotide
gcacuacccagcagguagc

SEQ ID NO: 2448253 - RNA, 19 nt, Artificial Sequence
  Description of Artificial Sequence: Synthetic oligonucleotide
aaguggcaugguagaguuu

SEQ ID NO: 2448254 - RNA, 19 nt, Artificial Sequence
  Description of Artificial Sequence: Synthetic oligonucleotide
uaagcggggccagcagguu

SEQ ID NO: 2448255 - RNA, 19 nt, Artificial Sequence
  Description of Artificial Sequence: Synthetic oligonucleotide
ccuggccccaucagcuaag

SEQ ID NO: 2448256 - RNA, 19 nt, Artificial Sequence
  Description of Artificial Sequence: Synthetic oligonucleotide
ggucuggcgagaacagcca

SEQ ID NO: 2448257 - RNA, 19 nt, Artificial Sequence
  Description of Artificial Sequence: Synthetic oligonucleotide
uggcacuacccagcaggua

SEQ ID NO: 2448258 - RNA, 19 nt, Artificial Sequence
  Description of Artificial Sequence: Synthetic oligonucleotide
ccaaacuggugaggacagg

SEQ ID NO: 2448259 - RNA, 19 nt, Artificial Sequence
  Description of Artificial Sequence: Synthetic oligonucleotide
ggcgaguggccaagugugc

SEQ ID NO: 2448260 - RNA, 19 nt, Artificial Sequence
  Description of Artificial Sequence: Synthetic oligonucleotide
gcugauagcuguacagccu

SEQ ID NO: 2448261 - RNA, 19 nt, Artificial Sequence
  Description of Artificial Sequence: Synthetic oligonucleotide
gcagcgugcucgaaccuuc

SEQ ID NO: 2448262 - RNA, 19 nt, Artificial Sequence
  Description of Artificial Sequence: Synthetic oligonucleotide
gcuugggguagagcagccc

SEQ ID NO: 2448263 - RNA, 19 nt, Artificial Sequence
  Description of Artificial Sequence: Synthetic oligonucleotide
cagugacagcggcaguaaa

SEQ ID NO: 2448264 - RNA, 19 nt, Artificial Sequence
  Description of Artificial Sequence: Synthetic oligonucleotide
gcacacaguagggccagca

SEQ ID NO: 2448265 - RNA, 19 nt, Artificial Sequence
  Description of Artificial Sequence: Synthetic oligonucleotide
gugcuuugccaagcugcuc

SEQ ID NO: 2448266 - RNA, 19 nt, Artificial Sequence
  Description of Artificial Sequence: Synthetic oligonucleotide
gagugcccuaguaccugaa

SEQ ID NO: 2448267 - RNA, 19 nt, Artificial Sequence
  Description of Artificial Sequence: Synthetic oligonucleotide
cuaugcugagguggaaaau

SEQ ID NO: 2448268 - RNA, 19 nt, Artificial Sequence
  Description of Artificial Sequence: Synthetic oligonucleotide
cagugcgcagagcucggua

SEQ ID NO: 2448269 - RNA, 19 nt, Artificial Sequence
  Description of Artificial Sequence: Synthetic oligonucleotide
cucaugguuggauccucuu

SEQ ID NO: 2448270 - RNA, 19 nt, Artificial Sequence
  Description of Artificial Sequence: Synthetic oligonucleotide
cgguauaaguaggcauugc

SEQ ID NO: 2448271 - RNA, 19 nt, Artificial Sequence
  Description of Artificial Sequence: Synthetic oligonucleotide
cccagagcacugcagaccu

SEQ ID NO: 2448272 - RNA, 19 nt, Artificial Sequence
  Description of Artificial Sequence: Synthetic oligonucleotide
gcaccaccagugacagcgg

SEQ ID NO: 2448273 - RNA, 19 nt, Artificial Sequence
  Description of Artificial Sequence: Synthetic oligonucleotide
guggcugggaagugcucau

SEQ ID NO: 2448274 - RNA, 19 nt, Artificial Sequence
  Description of Artificial Sequence: Synthetic oligonucleotide
gcucuuugugaaggaugac

SEQ ID NO: 2448275 - RNA, 19 nt, Artificial Sequence
  Description of Artificial Sequence: Synthetic oligonucleotide
gcgugcucgaaccuuccgu

SEQ ID NO: 2448276 - RNA, 19 nt, Artificial Sequence
  Description of Artificial Sequence: Synthetic oligonucleotide
cccagcugauagcuguaca

SEQ ID NO: 2448277 - RNA, 19 nt, Artificial Sequence
  Description of Artificial Sequence: Synthetic oligonucleotide
cccauggcgaguggccaag

SEQ ID NO: 2448278 - RNA, 19 nt, Artificial Sequence
  Description of Artificial Sequence: Synthetic oligonucleotide
ccugagugcccuaguaccu

SEQ ID NO: 2448279 - RNA, 19 nt, Artificial Sequence
  Description of Artificial Sequence: Synthetic oligonucleotide
gcccuaguaccugaagugu

SEQ ID NO: 2448280 - RNA, 19 nt, Artificial Sequence
  Description of Artificial Sequence: Synthetic oligonucleotide
cggcaguaaaccagaguga

SEQ ID NO: 2448281 - RNA, 19 nt, Artificial Sequence
  Description of Artificial Sequence: Synthetic oligonucleotide
gcagaccugcccacagcac

SEQ ID NO: 2448282 - RNA, 19 nt, Artificial Sequence
  Description of Artificial Sequence: Synthetic oligonucleotide
ccaacaggaggcuggcacu

SEQ ID NO: 2448283 - RNA, 19 nt, Artificial Sequence
  Description of Artificial Sequence: Synthetic oligonucleotide
gcucgguagaugugcgacu

SEQ ID NO: 2448284 - RNA, 19 nt, Artificial Sequence
  Description of Artificial Sequence: Synthetic oligonucleotide
ggccaucggggcaacagcu

SEQ ID NO: 2448285 - RNA, 19 nt, Artificial Sequence
  Description of Artificial Sequence: Synthetic oligonucleotide
gcgcagagcucgguagaug

SEQ ID NO: 2448286 - RNA, 19 nt, Artificial Sequence
  Description of Artificial Sequence: Synthetic oligonucleotide
gcccagcugauagcuguac

SEQ ID NO: 2448287 - RNA, 19 nt, Artificial Sequence
  Description of Artificial Sequence: Synthetic oligonucleotide
gcgacuccgucuccacaga

SEQ ID NO: 2448288 - RNA, 19 nt, Artificial Sequence
  Description of Artificial Sequence: Synthetic oligonucleotide
gccccagguccuaugcuga

SEQ ID NO: 2448289 - RNA, 19 nt, Artificial Sequence
  Description of Artificial Sequence: Synthetic oligonucleotide
gguagaugugcgacuccgu

SEQ ID NO: 2448290 - RNA, 19 nt, Artificial Sequence
  Description of Artificial Sequence: Synthetic oligonucleotide
cauggucagcccagcugau

SEQ ID NO: 2448291 - RNA, 19 nt, Artificial Sequence
  Description of Artificial Sequence: Synthetic oligonucleotide
guccuaugcugagguggaa

SEQ ID NO: 2448292 - RNA, 19 nt, Artificial Sequence
  Description of Artificial Sequence: Synthetic oligonucleotide
cccugccugcccauggcga

SEQ ID NO: 2448293 - RNA, 19 nt, Artificial Sequence
  Description of Artificial Sequence: Synthetic oligonucleotide
gguagcccaccaacccaga

SEQ ID NO: 2448294 - RNA, 19 nt, Artificial Sequence
  Description of Artificial Sequence: Synthetic oligonucleotide
gccugcccauggcgagugg

SEQ ID NO: 2448295 - RNA, 19 nt, Artificial Sequence
  Description of Artificial Sequence: Synthetic oligonucleotide
gcgaguggccaagugugcu

SEQ ID NO: 2448296 - RNA, 19 nt, Artificial Sequence
  Description of Artificial Sequence: Synthetic oligonucleotide
ccagugacagcggcaguaa

SEQ ID NO: 2448297 - RNA, 19 nt, Artificial Sequence
  Description of Artificial Sequence: Synthetic oligonucleotide
cagcaccgccaacagcccu

SEQ ID NO: 2448298 - RNA, 19 nt, Artificial Sequence
  Description of Artificial Sequence: Synthetic oligonucleotide
gcccauggcgaguggccaa

SEQ ID NO: 2448299 - RNA, 19 nt, Artificial Sequence
  Description of Artificial Sequence: Synthetic oligonucleotide
cauugcucacuugguucau

SEQ ID NO: 2448300 - RNA, 19 nt, Artificial Sequence
  Description of Artificial Sequence: Synthetic oligonucleotide
cccuaguaccugaaguguu

SEQ ID NO: 2448301 - RNA, 19 nt, Artificial Sequence
  Description of Artificial Sequence: Synthetic oligonucleotide
aggggccaucggggcaaca

SEQ ID NO: 2448302 - RNA, 19 nt, Artificial Sequence
  Description of Artificial Sequence: Synthetic oligonucleotide
cggagagaacaugaggagu

SEQ ID NO: 2448303 - RNA, 19 nt, Artificial Sequence
  Description of Artificial Sequence: Synthetic oligonucleotide
ggcagcgugcucgaaccuu

SEQ ID NO: 2448304 - RNA, 19 nt, Artificial Sequence
  Description of Artificial Sequence: Synthetic oligonucleotide
gcggggccagcagguuucc

SEQ ID NO: 2448305 - RNA, 19 nt, Artificial Sequence
  Description of Artificial Sequence: Synthetic oligonucleotide
gagcacccaguggcagcgu

SEQ ID NO: 2448306 - RNA, 19 nt, Artificial Sequence
  Description of Artificial Sequence: Synthetic oligonucleotide
cgacuccgucuccacagaa

SEQ ID NO: 2448307 - RNA, 19 nt, Artificial Sequence
  Description of Artificial Sequence: Synthetic oligonucleotide
gcccaacaggaggcuggca

SEQ ID NO: 2448308 - RNA, 19 nt, Artificial Sequence
  Description of Artificial Sequence: Synthetic oligonucleotide
gcagugcgcagagcucggu

SEQ ID NO: 2448309 - RNA, 19 nt, Artificial Sequence
  Description of Artificial Sequence: Synthetic oligonucleotide
cgaguggccaagugugcuu

SEQ ID NO: 2448310 - RNA, 19 nt, Artificial Sequence
  Description of Artificial Sequence: Synthetic oligonucleotide
ccauggcgaguggccaagu

SEQ ID NO: 2448311 - RNA, 19 nt, Artificial Sequence
  Description of Artificial Sequence: Synthetic oligonucleotide
cggggccagcagguuucca

SEQ ID NO: 2448312 - RNA, 19 nt, Artificial Sequence
  Description of Artificial Sequence: Synthetic oligonucleotide
aauaaguucaucuucauau

SEQ ID NO: 2448313 - RNA, 19 nt, Artificial Sequence
  Description of Artificial Sequence: Synthetic oligonucleotide
aaaagaauucaauaaguuc

SEQ ID NO: 2448314 - RNA, 19 nt, Artificial Sequence
  Description of Artificial Sequence: Synthetic oligonucleotide
uaauucauccaccagagcc

SEQ ID NO: 2448315 - RNA, 19 nt, Artificial Sequence
  Description of Artificial Sequence: Synthetic oligonucleotide
agaagggucaaucuguucc

SEQ ID NO: 2448316 - RNA, 19 nt, Artificial Sequence
  Description of Artificial Sequence: Synthetic oligonucleotide
uaauauaaaaggcaaugcc

SEQ ID NO: 2448317 - RNA, 19 nt, Artificial Sequence
  Description of Artificial Sequence: Synthetic oligonucleotide
uugucuuuaacauugucag

SEQ ID NO: 2448318 - RNA, 19 nt, Artificial Sequence
  Description of Artificial Sequence: Synthetic oligonucleotide
aaugcucucacacgcaaac

SEQ ID NO: 2448319 - RNA, 19 nt, Artificial Sequence
  Description of Artificial Sequence: Synthetic oligonucleotide
ucugaaucgauucggaugc

SEQ ID NO: 2448320 - RNA, 19 nt, Artificial Sequence
  Description of Artificial Sequence: Synthetic oligonucleotide
auaauauaaaaggcaaugc

SEQ ID NO: 2448321 - RNA, 19 nt, Artificial Sequence
  Description of Artificial Sequence: Synthetic oligonucleotide
uguuccaucaaguuggucu

SEQ ID NO: 2448322 - RNA, 19 nt, Artificial Sequence
  Description of Artificial Sequence: Synthetic oligonucleotide
ucaucuuuagcguaccggg

SEQ ID NO: 2448323 - RNA, 19 nt, Artificial Sequence
  Description of Artificial Sequence: Synthetic oligonucleotide
uuuacugcaaaguuugucu

SEQ ID NO: 2448324 - RNA, 19 nt, Artificial Sequence
  Description of Artificial Sequence: Synthetic oligonucleotide
aauucauccaccagagccc

SEQ ID NO: 2448325 - RNA, 19 nt, Artificial Sequence
  Description of Artificial Sequence: Synthetic oligonucleotide
uuuucugugacucccgacc

SEQ ID NO: 2448326 - RNA, 19 nt, Artificial Sequence
  Description of Artificial Sequence: Synthetic oligonucleotide
uguaagucuaguucacugg

SEQ ID NO: 2448327 - RNA, 19 nt, Artificial Sequence
  Description of Artificial Sequence: Synthetic oligonucleotide
ucauauuccuccacaaugc

SEQ ID NO: 2448328 - RNA, 19 nt, Artificial Sequence
  Description of Artificial Sequence: Synthetic oligonucleotide
ucguuuacugcaaaguuug

SEQ ID NO: 2448329 - RNA, 19 nt, Artificial Sequence
  Description of Artificial Sequence: Synthetic oligonucleotide
ugauaucugaaucgauucg

SEQ ID NO: 2448330 - RNA, 19 nt, Artificial Sequence
  Description of Artificial Sequence: Synthetic oligonucleotide
aguagggccagccaacccc

SEQ ID NO: 2448331 - RNA, 19 nt, Artificial Sequence
  Description of Artificial Sequence: Synthetic oligonucleotide
cauaauauaaaaggcaaug

SEQ ID NO: 2448332 - RNA, 19 nt, Artificial Sequence
  Description of Artificial Sequence: Synthetic oligonucleotide
uccauuccggcccacaacg

SEQ ID NO: 2448333 - RNA, 19 nt, Artificial Sequence
  Description of Artificial Sequence: Synthetic oligonucleotide
uguagaagggucaaucugu

SEQ ID NO: 2448334 - RNA, 19 nt, Artificial Sequence
  Description of Artificial Sequence: Synthetic oligonucleotide
gauaucugaaucgauucgg

SEQ ID NO: 2448335 - RNA, 19 nt, Artificial Sequence
  Description of Artificial Sequence: Synthetic oligonucleotide
ucauagcucaucaugagau

SEQ ID NO: 2448336 - RNA, 19 nt, Artificial Sequence
  Description of Artificial Sequence: Synthetic oligonucleotide
ucuugcgguguguagaagg

SEQ ID NO: 2448337 - RNA, 19 nt, Artificial Sequence
  Description of Artificial Sequence: Synthetic oligonucleotide
ucaucaugagaucugugca

SEQ ID NO: 2448338 - RNA, 19 nt, Artificial Sequence
  Description of Artificial Sequence: Synthetic oligonucleotide
ucacaaaccuccucgagca

SEQ ID NO: 2448339 - RNA, 19 nt, Artificial Sequence
  Description of Artificial Sequence: Synthetic oligonucleotide
aucugaaucgauucggaug

SEQ ID NO: 2448340 - RNA, 19 nt, Artificial Sequence
  Description of Artificial Sequence: Synthetic oligonucleotide
gucuuuaacauugucagac

SEQ ID NO: 2448341 - RNA, 19 nt, Artificial Sequence
  Description of Artificial Sequence: Synthetic oligonucleotide
gauugauccggaaggaucc

SEQ ID NO: 2448342 - RNA, 19 nt, Artificial Sequence
  Description of Artificial Sequence: Synthetic oligonucleotide
uucaucuuuagcguaccgg

SEQ ID NO: 2448343 - RNA, 19 nt, Artificial Sequence
  Description of Artificial Sequence: Synthetic oligonucleotide
gggaaaagaauucaauaag

SEQ ID NO: 2448344 - RNA, 19 nt, Artificial Sequence
  Description of Artificial Sequence: Synthetic oligonucleotide
gauucggaugcccuguaag

SEQ ID NO: 2448345 - RNA, 19 nt, Artificial Sequence
  Description of Artificial Sequence: Synthetic oligonucleotide
cuucaugcggucacaaacc

SEQ ID NO: 2448346 - RNA, 19 nt, Artificial Sequence
  Description of Artificial Sequence: Synthetic oligonucleotide
cugauaucugaaucgauuc

SEQ ID NO: 2448347 - RNA, 19 nt, Artificial Sequence
  Description of Artificial Sequence: Synthetic oligonucleotide
uucauagcucaucaugaga

SEQ ID NO: 2448348 - RNA, 19 nt, Artificial Sequence
  Description of Artificial Sequence: Synthetic oligonucleotide
uccccauacuccuucaugc

SEQ ID NO: 2448349 - RNA, 19 nt, Artificial Sequence
  Description of Artificial Sequence: Synthetic oligonucleotide
uugagggugccacugauau

SEQ ID NO: 2448350 - RNA, 19 nt, Artificial Sequence
  Description of Artificial Sequence: Synthetic oligonucleotide
aaguagggccagccaaccc

SEQ ID NO: 2448351 - RNA, 19 nt, Artificial Sequence
  Description of Artificial Sequence: Synthetic oligonucleotide
uguguagaagggucaaucu

SEQ ID NO: 2448352 - RNA, 19 nt, Artificial Sequence
  Description of Artificial Sequence: Synthetic oligonucleotide
uucgagcccaagcaguucc

SEQ ID NO: 2448353 - RNA, 19 nt, Artificial Sequence
  Description of Artificial Sequence: Synthetic oligonucleotide
uccacaacugacuggcugc

SEQ ID NO: 2448354 - RNA, 19 nt, Artificial Sequence
  Description of Artificial Sequence: Synthetic oligonucleotide
uuucaucuuuagcguaccg

SEQ ID NO: 2448355 - RNA, 19 nt, Artificial Sequence
  Description of Artificial Sequence: Synthetic oligonucleotide
ucgggaaaagaauucaaua

SEQ ID NO: 2448356 - RNA, 19 nt, Artificial Sequence
  Description of Artificial Sequence: Synthetic oligonucleotide
ggucacagagaucuguucg

SEQ ID NO: 2448357 - RNA, 19 nt, Artificial Sequence
  Description of Artificial Sequence: Synthetic oligonucleotide
aaucgauucggaugcccug

SEQ ID NO: 2448358 - RNA, 19 nt, Artificial Sequence
  Description of Artificial Sequence: Synthetic oligonucleotide
acaacgcguacauaguucu

SEQ ID NO: 2448359 - RNA, 19 nt, Artificial Sequence
  Description of Artificial Sequence: Synthetic oligonucleotide
gacccuagcagcugucugg

SEQ ID NO: 2448360 - RNA, 19 nt, Artificial Sequence
  Description of Artificial Sequence: Synthetic oligonucleotide
uguucguuuacugcaaagu

SEQ ID NO: 2448361 - RNA, 19 nt, Artificial Sequence
  Description of Artificial Sequence: Synthetic oligonucleotide
ugcccuguaagucuaguuc

SEQ ID NO: 2448362 - RNA, 19 nt, Artificial Sequence
  Description of Artificial Sequence: Synthetic oligonucleotide
uucguuuacugcaaaguuu

SEQ ID NO: 2448363 - RNA, 19 nt, Artificial Sequence
  Description of Artificial Sequence: Synthetic oligonucleotide
agcccaagcaguucccagc

SEQ ID NO: 2448364 - RNA, 19 nt, Artificial Sequence
  Description of Artificial Sequence: Synthetic oligonucleotide
cuugcgguguguagaaggg

SEQ ID NO: 2448365 - RNA, 19 nt, Artificial Sequence
  Description of Artificial Sequence: Synthetic oligonucleotide
aacgcguacauaguucuug

SEQ ID NO: 2448366 - RNA, 19 nt, Artificial Sequence
  Description of Artificial Sequence: Synthetic oligonucleotide
acgcguacauaguucuugc

SEQ ID NO: 2448367 - RNA, 19 nt, Artificial Sequence
  Description of Artificial Sequence: Synthetic oligonucleotide
acaaaccuccucgagcagc

SEQ ID NO: 2448368 - RNA, 19 nt, Artificial Sequence
  Description of Artificial Sequence: Synthetic oligonucleotide
aagucuaguucacuggauu

SEQ ID NO: 2448369 - RNA, 19 nt, Artificial Sequence
  Description of Artificial Sequence: Synthetic oligonucleotide
gucacaaaccuccucgagc

SEQ ID NO: 2448370 - RNA, 19 nt, Artificial Sequence
  Description of Artificial Sequence: Synthetic oligonucleotide
uucugagcgggcguaaggg

SEQ ID NO: 2448371 - RNA, 19 nt, Artificial Sequence
  Description of Artificial Sequence: Synthetic oligonucleotide
cugccgucuggauugaucc

SEQ ID NO: 2448372 - RNA, 19 nt, Artificial Sequence
  Description of Artificial Sequence: Synthetic oligonucleotide
ggguguuccaucaaguugg

SEQ ID NO: 2448373 - RNA, 19 nt, Artificial Sequence
  Description of Artificial Sequence: Synthetic oligonucleotide
gccacugauaucugaaucg

SEQ ID NO: 2448374 - RNA, 19 nt, Artificial Sequence
  Description of Artificial Sequence: Synthetic oligonucleotide
uaacauugucagacucucg

SEQ ID NO: 2448375 - RNA, 19 nt, Artificial Sequence
  Description of Artificial Sequence: Synthetic oligonucleotide
ucacuuuguuuucugugac

SEQ ID NO: 2448376 - RNA, 19 nt, Artificial Sequence
  Description of Artificial Sequence: Synthetic oligonucleotide
gagaucuguucguuuacug

SEQ ID NO: 2448377 - RNA, 19 nt, Artificial Sequence
  Description of Artificial Sequence: Synthetic oligonucleotide
gauccuggcuccuucgagc

SEQ ID NO: 2448378 - RNA, 19 nt, Artificial Sequence
  Description of Artificial Sequence: Synthetic oligonucleotide
cuagcagcugucugggagg

SEQ ID NO: 2448379 - RNA, 19 nt, Artificial Sequence
  Description of Artificial Sequence: Synthetic oligonucleotide
cuucuugggguccacucgg

SEQ ID NO: 2448380 - RNA, 19 nt, Artificial Sequence
  Description of Artificial Sequence: Synthetic oligonucleotide
uucacuggauucuccauuc

SEQ ID NO: 2448381 - RNA, 19 nt, Artificial Sequence
  Description of Artificial Sequence: Synthetic oligonucleotide
cugaauggucuucuugggg

SEQ ID NO: 2448382 - RNA, 19 nt, Artificial Sequence
  Description of Artificial Sequence: Synthetic oligonucleotide
ucaugagaucugugcaggg

SEQ ID NO: 2448383 - RNA, 19 nt, Artificial Sequence
  Description of Artificial Sequence: Synthetic oligonucleotide
acuggauucuccauuccgg

SEQ ID NO: 2448384 - RNA, 19 nt, Artificial Sequence
  Description of Artificial Sequence: Synthetic oligonucleotide
aagggucaaucuguucccc

SEQ ID NO: 2448385 - RNA, 19 nt, Artificial Sequence
  Description of Artificial Sequence: Synthetic oligonucleotide
auagcucaucaugagaucu

SEQ ID NO: 2448386 - RNA, 19 nt, Artificial Sequence
  Description of Artificial Sequence: Synthetic oligonucleotide
guguagaagggucaaucug

SEQ ID NO: 2448387 - RNA, 19 nt, Artificial Sequence
  Description of Artificial Sequence: Synthetic oligonucleotide
aucuuuagcguaccggggu

SEQ ID NO: 2448388 - RNA, 19 nt, Artificial Sequence
  Description of Artificial Sequence: Synthetic oligonucleotide
guaagucuaguucacugga

SEQ ID NO: 2448389 - RNA, 19 nt, Artificial Sequence
  Description of Artificial Sequence: Synthetic oligonucleotide
caucuuuagcguaccgggg

SEQ ID NO: 2448390 - RNA, 19 nt, Artificial Sequence
  Description of Artificial Sequence: Synthetic oligonucleotide
uuccccauacuccuucaug

SEQ ID NO: 2448391 - RNA, 19 nt, Artificial Sequence
  Description of Artificial Sequence: Synthetic oligonucleotide
uucaugcggucacaaaccu

SEQ ID NO: 2448392 - RNA, 19 nt, Artificial Sequence
  Description of Artificial Sequence: Synthetic oligonucleotide
cacuggauucuccauuccg

SEQ ID NO: 2448393 - RNA, 19 nt, Artificial Sequence
  Description of Artificial Sequence: Synthetic oligonucleotide
ugccacugauaucugaauc

SEQ ID NO: 2448394 - RNA, 19 nt, Artificial Sequence
  Description of Artificial Sequence: Synthetic oligonucleotide
auucggaugcccuguaagu

SEQ ID NO: 2448395 - RNA, 19 nt, Artificial Sequence
  Description of Artificial Sequence: Synthetic oligonucleotide
ugacucccgacccuagcag

SEQ ID NO: 2448396 - RNA, 19 nt, Artificial Sequence
  Description of Artificial Sequence: Synthetic oligonucleotide
cuggauucuccauuccggc

SEQ ID NO: 2448397 - RNA, 19 nt, Artificial Sequence
  Description of Artificial Sequence: Synthetic oligonucleotide
ugcgguguguagaaggguc

SEQ ID NO: 2448398 - RNA, 19 nt, Artificial Sequence
  Description of Artificial Sequence: Synthetic oligonucleotide
uguagauccuggcuccuuc

SEQ ID NO: 2448399 - RNA, 19 nt, Artificial Sequence
  Description of Artificial Sequence: Synthetic oligonucleotide
agggcauggucacagagau

SEQ ID NO: 2448400 - RNA, 19 nt, Artificial Sequence
  Description of Artificial Sequence: Synthetic oligonucleotide
uccacucgggaaauuuccc

SEQ ID NO: 2448401 - RNA, 19 nt, Artificial Sequence
  Description of Artificial Sequence: Synthetic oligonucleotide
ucggaugcccuguaagucu

SEQ ID NO: 2448402 - RNA, 19 nt, Artificial Sequence
  Description of Artificial Sequence: Synthetic oligonucleotide
acagagaucuguucguuua

SEQ ID NO: 2448403 - RNA, 19 nt, Artificial Sequence
  Description of Artificial Sequence: Synthetic oligonucleotide
agaaguagggccagccaac

SEQ ID NO: 2448404 - RNA, 19 nt, Artificial Sequence
  Description of Artificial Sequence: Synthetic oligonucleotide
caguguagauccuggcucc

SEQ ID NO: 2448405 - RNA, 19 nt, Artificial Sequence
  Description of Artificial Sequence: Synthetic oligonucleotide
ugcucucacacgcaaacuu

SEQ ID NO: 2448406 - RNA, 19 nt, Artificial Sequence
  Description of Artificial Sequence: Synthetic oligonucleotide
ugucuuuaacauugucaga

SEQ ID NO: 2448407 - RNA, 19 nt, Artificial Sequence
  Description of Artificial Sequence: Synthetic oligonucleotide
cucacuuuguuuucuguga

SEQ ID NO: 2448408 - RNA, 19 nt, Artificial Sequence
  Description of Artificial Sequence: Synthetic oligonucleotide
guagauccuggcuccuucg

SEQ ID NO: 2448409 - RNA, 19 nt, Artificial Sequence
  Description of Artificial Sequence: Synthetic oligonucleotide
uccggaaggaucccaucug

SEQ ID NO: 2448410 - RNA, 19 nt, Artificial Sequence
  Description of Artificial Sequence: Synthetic oligonucleotide
uggauucuccauuccggcc

SEQ ID NO: 2448411 - RNA, 19 nt, Artificial Sequence
  Description of Artificial Sequence: Synthetic oligonucleotide
ucuaagcugcugcagugau

SEQ ID NO: 2448412 - RNA, 19 nt, Artificial Sequence
  Description of Artificial Sequence: Synthetic oligonucleotide
uagcucaucaugagaucug

SEQ ID NO: 2448413 - RNA, 19 nt, Artificial Sequence
  Description of Artificial Sequence: Synthetic oligonucleotide
uccuucgagcccaagcagu

SEQ ID NO: 2448414 - RNA, 19 nt, Artificial Sequence
  Description of Artificial Sequence: Synthetic oligonucleotide
ggauucuccauuccggccc

SEQ ID NO: 2448415 - RNA, 19 nt, Artificial Sequence
  Description of Artificial Sequence: Synthetic oligonucleotide
acaacugacuggcugccgu

SEQ ID NO: 2448416 - RNA, 19 nt, Artificial Sequence
  Description of Artificial Sequence: Synthetic oligonucleotide
cacgcaaacuugagggugc

SEQ ID NO: 2448417 - RNA, 19 nt, Artificial Sequence
  Description of Artificial Sequence: Synthetic oligonucleotide
cauuccggcccacaacgcg

SEQ ID NO: 2448418 - RNA, 19 nt, Artificial Sequence
  Description of Artificial Sequence: Synthetic oligonucleotide
ugaaucgauucggaugccc

SEQ ID NO: 2448419 - RNA, 19 nt, Artificial Sequence
  Description of Artificial Sequence: Synthetic oligonucleotide
uaucugaaucgauucggau

SEQ ID NO: 2448420 - RNA, 19 nt, Artificial Sequence
  Description of Artificial Sequence: Synthetic oligonucleotide
aguucuugcgguguguaga

SEQ ID NO: 2448421 - RNA, 19 nt, Artificial Sequence
  Description of Artificial Sequence: Synthetic oligonucleotide
gcggucacaaaccuccucg

SEQ ID NO: 2448422 - RNA, 19 nt, Artificial Sequence
  Description of Artificial Sequence: Synthetic oligonucleotide
uaagucuaguucacuggau

SEQ ID NO: 2448423 - RNA, 19 nt, Artificial Sequence
  Description of Artificial Sequence: Synthetic oligonucleotide
gagggugccacugauaucu

SEQ ID NO: 2448424 - RNA, 19 nt, Artificial Sequence
  Description of Artificial Sequence: Synthetic oligonucleotide
auccggaaggaucccaucu

SEQ ID NO: 2448425 - RNA, 19 nt, Artificial Sequence
  Description of Artificial Sequence: Synthetic oligonucleotide
ucuuuagcguaccgggguc

SEQ ID NO: 2448426 - RNA, 19 nt, Artificial Sequence
  Description of Artificial Sequence: Synthetic oligonucleotide
guacauaguucuugcggug

SEQ ID NO: 2448427 - RNA, 19 nt, Artificial Sequence
  Description of Artificial Sequence: Synthetic oligonucleotide
gcccacaacgcguacauag

SEQ ID NO: 2448428 - RNA, 19 nt, Artificial Sequence
  Description of Artificial Sequence: Synthetic oligonucleotide
cacaacgcguacauaguuc

SEQ ID NO: 2448429 - RNA, 19 nt, Artificial Sequence
  Description of Artificial Sequence: Synthetic oligonucleotide
accagagcccugcaagcuc

SEQ ID NO: 2448430 - RNA, 19 nt, Artificial Sequence
  Description of Artificial Sequence: Synthetic oligonucleotide
cuguucguuuacugcaaag

SEQ ID NO: 2448431 - RNA, 19 nt, Artificial Sequence
  Description of Artificial Sequence: Synthetic oligonucleotide
uacauaguucuugcggugu

SEQ ID NO: 2448432 - RNA, 19 nt, Artificial Sequence
  Description of Artificial Sequence: Synthetic oligonucleotide
aacuugagggugccacuga

SEQ ID NO: 2448433 - RNA, 19 nt, Artificial Sequence
  Description of Artificial Sequence: Synthetic oligonucleotide
aagcuccacaguguagauc

SEQ ID NO: 2448434 - RNA, 19 nt, Artificial Sequence
  Description of Artificial Sequence: Synthetic oligonucleotide
acugauaucugaaucgauu

SEQ ID NO: 2448435 - RNA, 19 nt, Artificial Sequence
  Description of Artificial Sequence: Synthetic oligonucleotide
caugagaucugugcagggc

SEQ ID NO: 2448436 - RNA, 19 nt, Artificial Sequence
  Description of Artificial Sequence: Synthetic oligonucleotide
cuucugagcgggcguaagg

SEQ ID NO: 2448437 - RNA, 19 nt, Artificial Sequence
  Description of Artificial Sequence: Synthetic oligonucleotide
uaguucuugcgguguguag

SEQ ID NO: 2448438 - RNA, 19 nt, Artificial Sequence
  Description of Artificial Sequence: Synthetic oligonucleotide
ugugacucccgacccuagc

SEQ ID NO: 2448439 - RNA, 19 nt, Artificial Sequence
  Description of Artificial Sequence: Synthetic oligonucleotide
uccaucaaguuggucuaag

SEQ ID NO: 2448440 - RNA, 19 nt, Artificial Sequence
  Description of Artificial Sequence: Synthetic oligonucleotide
uugucagacucucgggaaa

SEQ ID NO: 2448441 - RNA, 19 nt, Artificial Sequence
  Description of Artificial Sequence: Synthetic oligonucleotide
acacgcaaacuugagggug

SEQ ID NO: 2448442 - RNA, 19 nt, Artificial Sequence
  Description of Artificial Sequence: Synthetic oligonucleotide
cauugucagacucucggga

SEQ ID NO: 2448443 - RNA, 19 nt, Artificial Sequence
  Description of Artificial Sequence: Synthetic oligonucleotide
ucuaguucacuggauucuc

SEQ ID NO: 2448444 - RNA, 19 nt, Artificial Sequence
  Description of Artificial Sequence: Synthetic oligonucleotide
cuuucaucuuuagcguacc

SEQ ID NO: 2448445 - RNA, 19 nt, Artificial Sequence
  Description of Artificial Sequence: Synthetic oligonucleotide
agcguaccggggucgcucc

SEQ ID NO: 2448446 - RNA, 19 nt, Artificial Sequence
  Description of Artificial Sequence: Synthetic oligonucleotide
ucugagcgggcguaaggga

SEQ ID NO: 2448447 - RNA, 19 nt, Artificial Sequence
  Description of Artificial Sequence: Synthetic oligonucleotide
gaaguagggccagccaacc

SEQ ID NO: 2448448 - RNA, 19 nt, Artificial Sequence
  Description of Artificial Sequence: Synthetic oligonucleotide
ccuucaugcggucacaaac

SEQ ID NO: 2448449 - RNA, 19 nt, Artificial Sequence
  Description of Artificial Sequence: Synthetic oligonucleotide
uuggucuaagcugcugcag

SEQ ID NO: 2448450 - RNA, 19 nt, Artificial Sequence
  Description of Artificial Sequence: Synthetic oligonucleotide
cugagcgggcguaagggac

SEQ ID NO: 2448451 - RNA, 19 nt, Artificial Sequence
  Description of Artificial Sequence: Synthetic oligonucleotide
cucgggaaauuucccauuc

SEQ ID NO: 2448452 - RNA, 19 nt, Artificial Sequence
  Description of Artificial Sequence: Synthetic oligonucleotide
ucgggaaauuucccauucu

SEQ ID NO: 2448453 - RNA, 19 nt, Artificial Sequence
  Description of Artificial Sequence: Synthetic oligonucleotide
aagggaccuccacaacuga

SEQ ID NO: 2448454 - RNA, 19 nt, Artificial Sequence
  Description of Artificial Sequence: Synthetic oligonucleotide
gaagccgccggacucucac

SEQ ID NO: 2448455 - RNA, 19 nt, Artificial Sequence
  Description of Artificial Sequence: Synthetic oligonucleotide
cuuuagcguaccggggucg

SEQ ID NO: 2448456 - RNA, 19 nt, Artificial Sequence
  Description of Artificial Sequence: Synthetic oligonucleotide
ucuccauuccggcccacaa

SEQ ID NO: 2448457 - RNA, 19 nt, Artificial Sequence
  Description of Artificial Sequence: Synthetic oligonucleotide
gacucccgacccuagcagc

SEQ ID NO: 2448458 - RNA, 19 nt, Artificial Sequence
  Description of Artificial Sequence: Synthetic oligonucleotide
ugauccggaaggaucccau

SEQ ID NO: 2448459 - RNA, 19 nt, Artificial Sequence
  Description of Artificial Sequence: Synthetic oligonucleotide
guaagggaccuccacaacu

SEQ ID NO: 2448460 - RNA, 19 nt, Artificial Sequence
  Description of Artificial Sequence: Synthetic oligonucleotide
uucggaugcccuguaaguc

SEQ ID NO: 2448461 - RNA, 19 nt, Artificial Sequence
  Description of Artificial Sequence: Synthetic oligonucleotide
ccacaaugcucucacacgc

SEQ ID NO: 2448462 - RNA, 19 nt, Artificial Sequence
  Description of Artificial Sequence: Synthetic oligonucleotide
ugccgucuggauugauccg

SEQ ID NO: 2448463 - RNA, 19 nt, Artificial Sequence
  Description of Artificial Sequence: Synthetic oligonucleotide
cugucugggaggagcgagg

SEQ ID NO: 2448464 - RNA, 19 nt, Artificial Sequence
  Description of Artificial Sequence: Synthetic oligonucleotide
auaucugaaucgauucgga

SEQ ID NO: 2448465 - RNA, 19 nt, Artificial Sequence
  Description of Artificial Sequence: Synthetic oligonucleotide
guuggucuaagcugcugca

SEQ ID NO: 2448466 - RNA, 19 nt, Artificial Sequence
  Description of Artificial Sequence: Synthetic oligonucleotide
ccaagcaguucccagcagg

SEQ ID NO: 2448467 - RNA, 19 nt, Artificial Sequence
  Description of Artificial Sequence: Synthetic oligonucleotide
ggaaaagaauucaauaagu

SEQ ID NO: 2448468 - RNA, 19 nt, Artificial Sequence
  Description of Artificial Sequence: Synthetic oligonucleotide
aaguuggucuaagcugcug

SEQ ID NO: 2448469 - RNA, 19 nt, Artificial Sequence
  Description of Artificial Sequence: Synthetic oligonucleotide
uccagcgcccgccaggcuc

SEQ ID NO: 2448470 - RNA, 19 nt, Artificial Sequence
  Description of Artificial Sequence: Synthetic oligonucleotide
uuuagcguaccggggucgc

SEQ ID NO: 2448471 - RNA, 19 nt, Artificial Sequence
  Description of Artificial Sequence: Synthetic oligonucleotide
uggucacagagaucuguuc

SEQ ID NO: 2448472 - RNA, 19 nt, Artificial Sequence
  Description of Artificial Sequence: Synthetic oligonucleotide
cccauucuaauucauccac

SEQ ID NO: 2448473 - RNA, 19 nt, Artificial Sequence
  Description of Artificial Sequence: Synthetic oligonucleotide
guuccaucaaguuggucua

SEQ ID NO: 2448474 - RNA, 19 nt, Artificial Sequence
  Description of Artificial Sequence: Synthetic oligonucleotide
uguuccccauacuccuuca

SEQ ID NO: 2448475 - RNA, 19 nt, Artificial Sequence
  Description of Artificial Sequence: Synthetic oligonucleotide
cucucacacgcaaacuuga

SEQ ID NO: 2448476 - RNA, 19 nt, Artificial Sequence
  Description of Artificial Sequence: Synthetic oligonucleotide
aacugacuggcugccgucu

SEQ ID NO: 2448477 - RNA, 19 nt, Artificial Sequence
  Description of Artificial Sequence: Synthetic oligonucleotide
agagaucuguucguuuacu

SEQ ID NO: 2448478 - RNA, 19 nt, Artificial Sequence
  Description of Artificial Sequence: Synthetic oligonucleotide
ccuagcagcugucugggag

SEQ ID NO: 2448479 - RNA, 19 nt, Artificial Sequence
  Description of Artificial Sequence: Synthetic oligonucleotide
ggaggagcgaggcugcccc

SEQ ID NO: 2448480 - RNA, 19 nt, Artificial Sequence
  Description of Artificial Sequence: Synthetic oligonucleotide
auucauccaccagagcccu

SEQ ID NO: 2448481 - RNA, 19 nt, Artificial Sequence
  Description of Artificial Sequence: Synthetic oligonucleotide
cuccuucgagcccaagcag

SEQ ID NO: 2448482 - RNA, 19 nt, Artificial Sequence
  Description of Artificial Sequence: Synthetic oligonucleotide
acccuagcagcugucuggg

SEQ ID NO: 2448483 - RNA, 19 nt, Artificial Sequence
  Description of Artificial Sequence: Synthetic oligonucleotide
ugucagacucucgggaaaa

SEQ ID NO: 2448484 - RNA, 19 nt, Artificial Sequence
  Description of Artificial Sequence: Synthetic oligonucleotide
cagaaguagggccagccaa

SEQ ID NO: 2448485 - RNA, 19 nt, Artificial Sequence
  Description of Artificial Sequence: Synthetic oligonucleotide
uagaagggucaaucuguuc

SEQ ID NO: 2448486 - RNA, 19 nt, Artificial Sequence
  Description of Artificial Sequence: Synthetic oligonucleotide
ugggguguuccaucaaguu

SEQ ID NO: 2448487 - RNA, 19 nt, Artificial Sequence
  Description of Artificial Sequence: Synthetic oligonucleotide
acgcaaacuugagggugcc

SEQ ID NO: 2448488 - RNA, 19 nt, Artificial Sequence
  Description of Artificial Sequence: Synthetic oligonucleotide
agcucaucaugagaucugu

SEQ ID NO: 2448489 - RNA, 19 nt, Artificial Sequence
  Description of Artificial Sequence: Synthetic oligonucleotide
agggaccuccacaacugac

SEQ ID NO: 2448490 - RNA, 19 nt, Artificial Sequence
  Description of Artificial Sequence: Synthetic oligonucleotide
agggucaaucuguucccca

SEQ ID NO: 2448491 - RNA, 19 nt, Artificial Sequence
  Description of Artificial Sequence: Synthetic oligonucleotide
ggaccuccacaacugacug

SEQ ID NO: 2448492 - RNA, 19 nt, Artificial Sequence
  Description of Artificial Sequence: Synthetic oligonucleotide
aucgauucggaugcccugu

SEQ ID NO: 2448493 - RNA, 19 nt, Artificial Sequence
  Description of Artificial Sequence: Synthetic oligonucleotide
ugggcuucugagcgggcgu

SEQ ID NO: 2448494 - RNA, 19 nt, Artificial Sequence
  Description of Artificial Sequence: Synthetic oligonucleotide
gugacucccgacccuagca

SEQ ID NO: 2448495 - RNA, 19 nt, Artificial Sequence
  Description of Artificial Sequence: Synthetic oligonucleotide
ggucacaaaccuccucgag

SEQ ID NO: 2448496 - RNA, 19 nt, Artificial Sequence
  Description of Artificial Sequence: Synthetic oligonucleotide
guucuugcgguguguagaa

SEQ ID NO: 2448497 - RNA, 19 nt, Artificial Sequence
  Description of Artificial Sequence: Synthetic oligonucleotide
cugcagugauucauagcuc

SEQ ID NO: 2448498 - RNA, 19 nt, Artificial Sequence
  Description of Artificial Sequence: Synthetic oligonucleotide
gauccggaaggaucccauc

SEQ ID NO: 2448499 - RNA, 19 nt, Artificial Sequence
  Description of Artificial Sequence: Synthetic oligonucleotide
guucguuuacugcaaaguu

SEQ ID NO: 2448500 - RNA, 19 nt, Artificial Sequence
  Description of Artificial Sequence: Synthetic oligonucleotide
cccauacuccuucaugcgg

SEQ ID NO: 2448501 - RNA, 19 nt, Artificial Sequence
  Description of Artificial Sequence: Synthetic oligonucleotide
uggauugauccggaaggau

SEQ ID NO: 2448502 - RNA, 19 nt, Artificial Sequence
  Description of Artificial Sequence: Synthetic oligonucleotide
cagugauucauagcucauc

SEQ ID NO: 2448503 - RNA, 19 nt, Artificial Sequence
  Description of Artificial Sequence: Synthetic oligonucleotide
ugcggucacaaaccuccuc

SEQ ID NO: 2448504 - RNA, 19 nt, Artificial Sequence
  Description of Artificial Sequence: Synthetic oligonucleotide
gcuccuucgagcccaagca

SEQ ID NO: 2448505 - RNA, 19 nt, Artificial Sequence
  Description of Artificial Sequence: Synthetic oligonucleotide
accucugcucccacggccg

SEQ ID NO: 2448506 - RNA, 19 nt, Artificial Sequence
  Description of Artificial Sequence: Synthetic oligonucleotide
ccaucaaguuggucuaagc

SEQ ID NO: 2448507 - RNA, 19 nt, Artificial Sequence
  Description of Artificial Sequence: Synthetic oligonucleotide
gcccuguaagucuaguuca

SEQ ID NO: 2448508 - RNA, 19 nt, Artificial Sequence
  Description of Artificial Sequence: Synthetic oligonucleotide
gaaucgauucggaugcccu

SEQ ID NO: 2448509 - RNA, 19 nt, Artificial Sequence
  Description of Artificial Sequence: Synthetic oligonucleotide
acucgggaaauuucccauu

SEQ ID NO: 2448510 - RNA, 19 nt, Artificial Sequence
  Description of Artificial Sequence: Synthetic oligonucleotide
cucucgggaaaagaauuca

SEQ ID NO: 2448511 - RNA, 19 nt, Artificial Sequence
  Description of Artificial Sequence: Synthetic oligonucleotide
cugggaagccgccggacuc

SEQ ID NO: 2448512 - RNA, 19 nt, Artificial Sequence
  Description of Artificial Sequence: Synthetic oligonucleotide
aaccccagccuuucaucuu

SEQ ID NO: 2448513 - RNA, 19 nt, Artificial Sequence
  Description of Artificial Sequence: Synthetic oligonucleotide
cagggcauggucacagaga

SEQ ID NO: 2448514 - RNA, 19 nt, Artificial Sequence
  Description of Artificial Sequence: Synthetic oligonucleotide
ggcuccuucgagcccaagc

SEQ ID NO: 2448515 - RNA, 19 nt, Artificial Sequence
  Description of Artificial Sequence: Synthetic oligonucleotide
uucuugcgguguguagaag

SEQ ID NO: 2448516 - RNA, 19 nt, Artificial Sequence
  Description of Artificial Sequence: Synthetic oligonucleotide
auaguucuugcggugugua

SEQ ID NO: 2448517 - RNA, 19 nt, Artificial Sequence
  Description of Artificial Sequence: Synthetic oligonucleotide
ccagccuuucaucuuuagc

SEQ ID NO: 2448518 - RNA, 19 nt, Artificial Sequence
  Description of Artificial Sequence: Synthetic oligonucleotide
gccgucuggauugauccgg

SEQ ID NO: 2448519 - RNA, 19 nt, Artificial Sequence
  Description of Artificial Sequence: Synthetic oligonucleotide
cacaaugcucucacacgca

SEQ ID NO: 2448520 - RNA, 19 nt, Artificial Sequence
  Description of Artificial Sequence: Synthetic oligonucleotide
gaggagcgaggcugccccg

SEQ ID NO: 2448521 - RNA, 19 nt, Artificial Sequence
  Description of Artificial Sequence: Synthetic oligonucleotide
ucccgacccuagcagcugu

SEQ ID NO: 2448522 - RNA, 19 nt, Artificial Sequence
  Description of Artificial Sequence: Synthetic oligonucleotide
auuccggcccacaacgcgu

SEQ ID NO: 2448523 - RNA, 19 nt, Artificial Sequence
  Description of Artificial Sequence: Synthetic oligonucleotide
cuccacaguguagauccug

SEQ ID NO: 2448524 - RNA, 19 nt, Artificial Sequence
  Description of Artificial Sequence: Synthetic oligonucleotide
caacugacuggcugccguc

SEQ ID NO: 2448525 - RNA, 19 nt, Artificial Sequence
  Description of Artificial Sequence: Synthetic oligonucleotide
cacaaaccuccucgagcag

SEQ ID NO: 2448526 - RNA, 19 nt, Artificial Sequence
  Description of Artificial Sequence: Synthetic oligonucleotide
ggcguaagggaccuccaca

SEQ ID NO: 2448527 - RNA, 19 nt, Artificial Sequence
  Description of Artificial Sequence: Synthetic oligonucleotide
aagccgccggacucucacu

SEQ ID NO: 2448528 - RNA, 19 nt, Artificial Sequence
  Description of Artificial Sequence: Synthetic oligonucleotide
gacucucgggaaaagaauu

SEQ ID NO: 2448529 - RNA, 19 nt, Artificial Sequence
  Description of Artificial Sequence: Synthetic oligonucleotide
uugcgguguguagaagggu

SEQ ID NO: 2448530 - RNA, 19 nt, Artificial Sequence
  Description of Artificial Sequence: Synthetic oligonucleotide
ucgauucggaugcccugua

SEQ ID NO: 2448531 - RNA, 19 nt, Artificial Sequence
  Description of Artificial Sequence: Synthetic oligonucleotide
ccccauacuccuucaugcg

SEQ ID NO: 2448532 - RNA, 19 nt, Artificial Sequence
  Description of Artificial Sequence: Synthetic oligonucleotide
cacaacugacuggcugccg

SEQ ID NO: 2448533 - RNA, 19 nt, Artificial Sequence
  Description of Artificial Sequence: Synthetic oligonucleotide
gggaaauuucccauucuaa

SEQ ID NO: 2448534 - RNA, 19 nt, Artificial Sequence
  Description of Artificial Sequence: Synthetic oligonucleotide
cacaguguagauccuggcu

SEQ ID NO: 2448535 - RNA, 19 nt, Artificial Sequence
  Description of Artificial Sequence: Synthetic oligonucleotide
aggagcgaggcugccccgg

SEQ ID NO: 2448536 - RNA, 19 nt, Artificial Sequence
  Description of Artificial Sequence: Synthetic oligonucleotide
ugggaagccgccggacucu

SEQ ID NO: 2448537 - RNA, 19 nt, Artificial Sequence
  Description of Artificial Sequence: Synthetic oligonucleotide
cugugacucccgacccuag

SEQ ID NO: 2448538 - RNA, 19 nt, Artificial Sequence
  Description of Artificial Sequence: Synthetic oligonucleotide
gccgccguggcccaggcac

SEQ ID NO: 2448539 - RNA, 19 nt, Artificial Sequence
  Description of Artificial Sequence: Synthetic oligonucleotide
gucuaguucacuggauucu

SEQ ID NO: 2448540 - RNA, 19 nt, Artificial Sequence
  Description of Artificial Sequence: Synthetic oligonucleotide
ggucgcuccaccucugcuc

SEQ ID NO: 2448541 - RNA, 19 nt, Artificial Sequence
  Description of Artificial Sequence: Synthetic oligonucleotide
uagcguaccggggucgcuc

SEQ ID NO: 2448542 - RNA, 19 nt, Artificial Sequence
  Description of Artificial Sequence: Synthetic oligonucleotide
aucuguucguuuacugcaa

SEQ ID NO: 2448543 - RNA, 19 nt, Artificial Sequence
  Description of Artificial Sequence: Synthetic oligonucleotide
guaccggggucgcuccacc

SEQ ID NO: 2448544 - RNA, 19 nt, Artificial Sequence
  Description of Artificial Sequence: Synthetic oligonucleotide
aguguagauccuggcuccu

SEQ ID NO: 2448545 - RNA, 19 nt, Artificial Sequence
  Description of Artificial Sequence: Synthetic oligonucleotide
augcucucacacgcaaacu

SEQ ID NO: 2448546 - RNA, 19 nt, Artificial Sequence
  Description of Artificial Sequence: Synthetic oligonucleotide
uuccggcccacaacgcgua

SEQ ID NO: 2448547 - RNA, 19 nt, Artificial Sequence
  Description of Artificial Sequence: Synthetic oligonucleotide
cugaaucgauucggaugcc

SEQ ID NO: 2448548 - RNA, 19 nt, Artificial Sequence
  Description of Artificial Sequence: Synthetic oligonucleotide
gcguaagggaccuccacaa

SEQ ID NO: 2448549 - RNA, 19 nt, Artificial Sequence
  Description of Artificial Sequence: Synthetic oligonucleotide
acucccgacccuagcagcu

SEQ ID NO: 2448550 - RNA, 19 nt, Artificial Sequence
  Description of Artificial Sequence: Synthetic oligonucleotide
caaccccagccuuucaucu

SEQ ID NO: 2448551 - RNA, 19 nt, Artificial Sequence
  Description of Artificial Sequence: Synthetic oligonucleotide
cuugagggugccacugaua

SEQ ID NO: 2448552 - RNA, 19 nt, Artificial Sequence
  Description of Artificial Sequence: Synthetic oligonucleotide
agccgccggacucucacuu

SEQ ID NO: 2448553 - RNA, 19 nt, Artificial Sequence
  Description of Artificial Sequence: Synthetic oligonucleotide
uccugggguguuccaucaa

SEQ ID NO: 2448554 - RNA, 19 nt, Artificial Sequence
  Description of Artificial Sequence: Synthetic oligonucleotide
ccacaguguagauccuggc

SEQ ID NO: 2448555 - RNA, 19 nt, Artificial Sequence
  Description of Artificial Sequence: Synthetic oligonucleotide
guagggccagccaacccca

SEQ ID NO: 2448556 - RNA, 19 nt, Artificial Sequence
  Description of Artificial Sequence: Synthetic oligonucleotide
uuagcguaccggggucgcu

SEQ ID NO: 2448557 - RNA, 19 nt, Artificial Sequence
  Description of Artificial Sequence: Synthetic oligonucleotide
cuucgagcccaagcaguuc

SEQ ID NO: 2448558 - RNA, 19 nt, Artificial Sequence
  Description of Artificial Sequence: Synthetic oligonucleotide
ccaaccccagccuuucauc

SEQ ID NO: 2448559 - RNA, 19 nt, Artificial Sequence
  Description of Artificial Sequence: Synthetic oligonucleotide
cugggguguuccaucaagu

SEQ ID NO: 2448560 - RNA, 19 nt, Artificial Sequence
  Description of Artificial Sequence: Synthetic oligonucleotide
gugauucauagcucaucau

SEQ ID NO: 2448561 - RNA, 19 nt, Artificial Sequence
  Description of Artificial Sequence: Synthetic oligonucleotide
cacucgggaaauuucccau

SEQ ID NO: 2448562 - RNA, 19 nt, Artificial Sequence
  Description of Artificial Sequence: Synthetic oligonucleotide
cacacgcaaacuugagggu

SEQ ID NO: 2448563 - RNA, 19 nt, Artificial Sequence
  Description of Artificial Sequence: Synthetic oligonucleotide
cugcaaaguuugucuuuaa

SEQ ID NO: 2448564 - RNA, 19 nt, Artificial Sequence
  Description of Artificial Sequence: Synthetic oligonucleotide
cgcguacauaguucuugcg

SEQ ID NO: 2448565 - RNA, 19 nt, Artificial Sequence
  Description of Artificial Sequence: Synthetic oligonucleotide
ugggguccacucgggaaau

SEQ ID NO: 2448566 - RNA, 19 nt, Artificial Sequence
  Description of Artificial Sequence: Synthetic oligonucleotide
caucuuccccuccuggggu

SEQ ID NO: 2448567 - RNA, 19 nt, Artificial Sequence
  Description of Artificial Sequence: Synthetic oligonucleotide
gcgggcguaagggaccucc

SEQ ID NO: 2448568 - RNA, 19 nt, Artificial Sequence
  Description of Artificial Sequence: Synthetic oligonucleotide
uccggcccacaacgcguac

SEQ ID NO: 2448569 - RNA, 19 nt, Artificial Sequence
  Description of Artificial Sequence: Synthetic oligonucleotide
cguacauaguucuugcggu

SEQ ID NO: 2448570 - RNA, 19 nt, Artificial Sequence
  Description of Artificial Sequence: Synthetic oligonucleotide
ccacucgggaaauuuccca

SEQ ID NO: 2448571 - RNA, 19 nt, Artificial Sequence
  Description of Artificial Sequence: Synthetic oligonucleotide
ccauuccggcccacaacgc

SEQ ID NO: 2448572 - RNA, 19 nt, Artificial Sequence
  Description of Artificial Sequence: Synthetic oligonucleotide
gggcguaagggaccuccac

SEQ ID NO: 2448573 - RNA, 19 nt, Artificial Sequence
  Description of Artificial Sequence: Synthetic oligonucleotide
guagaagggucaaucuguu

SEQ ID NO: 2448574 - RNA, 19 nt, Artificial Sequence
  Description of Artificial Sequence: Synthetic oligonucleotide
agccaaccccagccuuuca

SEQ ID NO: 2448575 - RNA, 19 nt, Artificial Sequence
  Description of Artificial Sequence: Synthetic oligonucleotide
cagccaaccccagccuuuc

SEQ ID NO: 2448576 - RNA, 19 nt, Artificial Sequence
  Description of Artificial Sequence: Synthetic oligonucleotide
gcucaucaugagaucugug

SEQ ID NO: 2448577 - RNA, 19 nt, Artificial Sequence
  Description of Artificial Sequence: Synthetic oligonucleotide
gccuuucaucuuuagcgua

SEQ ID NO: 2448578 - RNA, 19 nt, Artificial Sequence
  Description of Artificial Sequence: Synthetic oligonucleotide
ggucaaucuguuccccaua

SEQ ID NO: 2448579 - RNA, 19 nt, Artificial Sequence
  Description of Artificial Sequence: Synthetic oligonucleotide
gcuucugagcgggcguaag

SEQ ID NO: 2448580 - RNA, 19 nt, Artificial Sequence
  Description of Artificial Sequence: Synthetic oligonucleotide
cacugauaucugaaucgau

SEQ ID NO: 2448581 - RNA, 19 nt, Artificial Sequence
  Description of Artificial Sequence: Synthetic oligonucleotide
cucccgacccuagcagcug

SEQ ID NO: 2448582 - RNA, 19 nt, Artificial Sequence
  Description of Artificial Sequence: Synthetic oligonucleotide
gggugccacugauaucuga

SEQ ID NO: 2448583 - RNA, 19 nt, Artificial Sequence
  Description of Artificial Sequence: Synthetic oligonucleotide
uggucuucuugggguccac

SEQ ID NO: 2448584 - RNA, 19 nt, Artificial Sequence
  Description of Artificial Sequence: Synthetic oligonucleotide
caaguuggucuaagcugcu

SEQ ID NO: 2448585 - RNA, 19 nt, Artificial Sequence
  Description of Artificial Sequence: Synthetic oligonucleotide
gcugccgucuggauugauc

SEQ ID NO: 2448586 - RNA, 19 nt, Artificial Sequence
  Description of Artificial Sequence: Synthetic oligonucleotide
cacagagaucuguucguuu

SEQ ID NO: 2448587 - RNA, 19 nt, Artificial Sequence
  Description of Artificial Sequence: Synthetic oligonucleotide
gggaccuccacaacugacu

SEQ ID NO: 2448588 - RNA, 19 nt, Artificial Sequence
  Description of Artificial Sequence: Synthetic oligonucleotide
caguucccagcaggacccc

SEQ ID NO: 2448589 - RNA, 19 nt, Artificial Sequence
  Description of Artificial Sequence: Synthetic oligonucleotide
guguuccaucaaguugguc

SEQ ID NO: 2448590 - RNA, 19 nt, Artificial Sequence
  Description of Artificial Sequence: Synthetic oligonucleotide
ccgccggacucucacuuug

SEQ ID NO: 2448591 - RNA, 19 nt, Artificial Sequence
  Description of Artificial Sequence: Synthetic oligonucleotide
gggucaaucuguuccccau

SEQ ID NO: 2448592 - RNA, 19 nt, Artificial Sequence
  Description of Artificial Sequence: Synthetic oligonucleotide
ggggucgcuccaccucugc

SEQ ID NO: 2448593 - RNA, 19 nt, Artificial Sequence
  Description of Artificial Sequence: Synthetic oligonucleotide
caagcuccacaguguagau

SEQ ID NO: 2448594 - RNA, 19 nt, Artificial Sequence
  Description of Artificial Sequence: Synthetic oligonucleotide
cguaagggaccuccacaac

SEQ ID NO: 2448595 - RNA, 19 nt, Artificial Sequence
  Description of Artificial Sequence: Synthetic oligonucleotide
gcgguguguagaaggguca

SEQ ID NO: 2448596 - RNA, 19 nt, Artificial Sequence
  Description of Artificial Sequence: Synthetic oligonucleotide
cuaagcugcugcagugauu

SEQ ID NO: 2448597 - RNA, 19 nt, Artificial Sequence
  Description of Artificial Sequence: Synthetic oligonucleotide
cucccacggccgccguggc

SEQ ID NO: 2448598 - RNA, 19 nt, Artificial Sequence
  Description of Artificial Sequence: Synthetic oligonucleotide
guuccccauacuccuucau

SEQ ID NO: 2448599 - RNA, 19 nt, Artificial Sequence
  Description of Artificial Sequence: Synthetic oligonucleotide
cggacucucacuuuguuuu

SEQ ID NO: 2448600 - RNA, 19 nt, Artificial Sequence
  Description of Artificial Sequence: Synthetic oligonucleotide
cgggaaauuucccauucua

SEQ ID NO: 2448601 - RNA, 19 nt, Artificial Sequence
  Description of Artificial Sequence: Synthetic oligonucleotide
cgacccuagcagcugucug

SEQ ID NO: 2448602 - RNA, 19 nt, Artificial Sequence
  Description of Artificial Sequence: Synthetic oligonucleotide
gcauggucacagagaucug

SEQ ID NO: 2448603 - RNA, 19 nt, Artificial Sequence
  Description of Artificial Sequence: Synthetic oligonucleotide
gagcgaggcugccccggcu

SEQ ID NO: 2448604 - RNA, 19 nt, Artificial Sequence
  Description of Artificial Sequence: Synthetic oligonucleotide
gcacugggaagccgccgga

SEQ ID NO: 2448605 - RNA, 19 nt, Artificial Sequence
  Description of Artificial Sequence: Synthetic oligonucleotide
agcgggcguaagggaccuc

SEQ ID NO: 2448606 - RNA, 19 nt, Artificial Sequence
  Description of Artificial Sequence: Synthetic oligonucleotide
ccgucuggauugauccgga

SEQ ID NO: 2448607 - RNA, 19 nt, Artificial Sequence
  Description of Artificial Sequence: Synthetic oligonucleotide
cccaggcacugggaagccg

SEQ ID NO: 2448608 - RNA, 19 nt, Artificial Sequence
  Description of Artificial Sequence: Synthetic oligonucleotide
gccaaccccagccuuucau

SEQ ID NO: 2448609 - RNA, 19 nt, Artificial Sequence
  Description of Artificial Sequence: Synthetic oligonucleotide
cccacaacgcguacauagu

SEQ ID NO: 2448610 - RNA, 19 nt, Artificial Sequence
  Description of Artificial Sequence: Synthetic oligonucleotide
caacgcguacauaguucuu

SEQ ID NO: 2448611 - RNA, 19 nt, Artificial Sequence
  Description of Artificial Sequence: Synthetic oligonucleotide
ggugggcuucugagcgggc

SEQ ID NO: 2448612 - RNA, 19 nt, Artificial Sequence
  Description of Artificial Sequence: Synthetic oligonucleotide
gguguuccaucaaguuggu

SEQ ID NO: 2448613 - RNA, 19 nt, Artificial Sequence
  Description of Artificial Sequence: Synthetic oligonucleotide
gccguggcccaggcacugg

SEQ ID NO: 2448614 - RNA, 19 nt, Artificial Sequence
  Description of Artificial Sequence: Synthetic oligonucleotide
gguguguagaagggucaau

SEQ ID NO: 2448615 - RNA, 19 nt, Artificial Sequence
  Description of Artificial Sequence: Synthetic oligonucleotide
ccuccacaaugcucucaca

SEQ ID NO: 2448616 - RNA, 19 nt, Artificial Sequence
  Description of Artificial Sequence: Synthetic oligonucleotide
gggucgcuccaccucugcu

SEQ ID NO: 2448617 - RNA, 19 nt, Artificial Sequence
  Description of Artificial Sequence: Synthetic oligonucleotide
ccacaacgcguacauaguu

SEQ ID NO: 2448618 - RNA, 19 nt, Artificial Sequence
  Description of Artificial Sequence: Synthetic oligonucleotide
gcagugauucauagcucau

SEQ ID NO: 2448619 - RNA, 19 nt, Artificial Sequence
  Description of Artificial Sequence: Synthetic oligonucleotide
cccgacccuagcagcuguc

SEQ ID NO: 2448620 - RNA, 19 nt, Artificial Sequence
  Description of Artificial Sequence: Synthetic oligonucleotide
guguagauccuggcuccuu

SEQ ID NO: 2448621 - RNA, 19 nt, Artificial Sequence
  Description of Artificial Sequence: Synthetic oligonucleotide
ccuucgagcccaagcaguu

SEQ ID NO: 2448622 - RNA, 19 nt, Artificial Sequence
  Description of Artificial Sequence: Synthetic oligonucleotide
gggaagccgccggacucuc

SEQ ID NO: 2448623 - RNA, 19 nt, Artificial Sequence
  Description of Artificial Sequence: Synthetic oligonucleotide
cguaccggggucgcuccac

SEQ ID NO: 2448624 - RNA, 19 nt, Artificial Sequence
  Description of Artificial Sequence: Synthetic oligonucleotide
ggcuucugagcgggcguaa

SEQ ID NO: 2448625 - RNA, 19 nt, Artificial Sequence
  Description of Artificial Sequence: Synthetic oligonucleotide
cggaugcccuguaagucua

SEQ ID NO: 2448626 - RNA, 19 nt, Artificial Sequence
  Description of Artificial Sequence: Synthetic oligonucleotide
ccggacucucacuuuguuu

SEQ ID NO: 2448627 - RNA, 19 nt, Artificial Sequence
  Description of Artificial Sequence: Synthetic oligonucleotide
ggaagccgccggacucuca

SEQ ID NO: 2448628 - RNA, 19 nt, Artificial Sequence
  Description of Artificial Sequence: Synthetic oligonucleotide
cguuuacugcaaaguuugu

SEQ ID NO: 2448629 - RNA, 19 nt, Artificial Sequence
  Description of Artificial Sequence: Synthetic oligonucleotide
gccggacucucacuuuguu

SEQ ID NO: 2448630 - RNA, 19 nt, Artificial Sequence
  Description of Artificial Sequence: Synthetic oligonucleotide
cacggccgccguggcccag

SEQ ID NO: 2448631 - RNA, 19 nt, Artificial Sequence
  Description of Artificial Sequence: Synthetic oligonucleotide
ccagccaaccccagccuuu

SEQ ID NO: 2448632 - RNA, 19 nt, Artificial Sequence
  Description of Artificial Sequence: Synthetic oligonucleotide
gcguaccggggucgcucca

SEQ ID NO: 2448633 - RNA, 19 nt, Artificial Sequence
  Description of Artificial Sequence: Synthetic oligonucleotide
cccuagcagcugucuggga

SEQ ID NO: 2448634 - RNA, 19 nt, Artificial Sequence
  Description of Artificial Sequence: Synthetic oligonucleotide
ccaucugaauggucuucuu

SEQ ID NO: 2448635 - RNA, 19 nt, Artificial Sequence
  Description of Artificial Sequence: Synthetic oligonucleotide
cgucuggauugauccggaa

SEQ ID NO: 2448636 - RNA, 19 nt, Artificial Sequence
  Description of Artificial Sequence: Synthetic oligonucleotide
cgggcguaagggaccucca

SEQ ID NO: 2448637 - RNA, 19 nt, Artificial Sequence
  Description of Artificial Sequence: Synthetic oligonucleotide
cgguguguagaagggucaa

SEQ ID NO: 2448638 - RNA, 19 nt, Artificial Sequence
  Description of Artificial Sequence: Synthetic oligonucleotide
cggggucgcuccaccucug

SEQ ID NO: 2448639 - RNA, 19 nt, Artificial Sequence
  Description of Artificial Sequence: Synthetic oligonucleotide
ggcccacaacgcguacaua

SEQ ID NO: 2448640 - RNA, 19 nt, Artificial Sequence
  Description of Artificial Sequence: Synthetic oligonucleotide
ccgacccuagcagcugucu

SEQ ID NO: 2448641 - RNA, 19 nt, Artificial Sequence
  Description of Artificial Sequence: Synthetic oligonucleotide
gccgccggacucucacuuu

SEQ ID NO: 2448642 - RNA, 19 nt, Artificial Sequence
  Description of Artificial Sequence: Synthetic oligonucleotide
cgccguggcccaggcacug

SEQ ID NO: 2448643 - RNA, 19 nt, Artificial Sequence
  Description of Artificial Sequence: Synthetic oligonucleotide
cuccagcgcccgccaggcu

SEQ ID NO: 2448644 - RNA, 19 nt, Artificial Sequence
  Description of Artificial Sequence: Synthetic oligonucleotide
cggcccacaacgcguacau

SEQ ID NO: 2448645 - RNA, 19 nt, Artificial Sequence
  Description of Artificial Sequence: Synthetic oligonucleotide
cuuccccuccugggguguu

SEQ ID NO: 2448646 - RNA, 19 nt, Artificial Sequence
  Description of Artificial Sequence: Synthetic oligonucleotide
ccuccucgagcagcucugu

SEQ ID NO: 2448647 - RNA, 19 nt, Artificial Sequence
  Description of Artificial Sequence: Synthetic oligonucleotide
cgccggacucucacuuugu

SEQ ID NO: 2448648 - RNA, 19 nt, Artificial Sequence
  Description of Artificial Sequence: Synthetic oligonucleotide
ccgccguggcccaggcacu

SEQ ID NO: 2448649 - RNA, 19 nt, Artificial Sequence
  Description of Artificial Sequence: Synthetic oligonucleotide
gggguccacucgggaaauu

SEQ ID NO: 2448650 - RNA, 19 nt, Artificial Sequence
  Description of Artificial Sequence: Synthetic oligonucleotide
aucaguauuauuuggauuc

SEQ ID NO: 2448651 - RNA, 19 nt, Artificial Sequence
  Description of Artificial Sequence: Synthetic oligonucleotide
aacgaggguauucacaagg

SEQ ID NO: 2448652 - RNA, 19 nt, Artificial Sequence
  Description of Artificial Sequence: Synthetic oligonucleotide
aaaggcggcgugcagacgc

SEQ ID NO: 2448653 - RNA, 19 nt, Artificial Sequence
  Description of Artificial Sequence: Synthetic oligonucleotide
ugaaaucaguauuauuugg

SEQ ID NO: 2448654 - RNA, 19 nt, Artificial Sequence
  Description of Artificial Sequence: Synthetic oligonucleotide
uuauuuggauuccagaaac

SEQ ID NO: 2448655 - RNA, 19 nt, Artificial Sequence
  Description of Artificial Sequence: Synthetic oligonucleotide
aauuucaucgcguucgcga

SEQ ID NO: 2448656 - RNA, 19 nt, Artificial Sequence
  Description of Artificial Sequence: Synthetic oligonucleotide
uauuauuuggauuccagaa

SEQ ID NO: 2448657 - RNA, 19 nt, Artificial Sequence
  Description of Artificial Sequence: Synthetic oligonucleotide
uugaaaucaguauuauuug

SEQ ID NO: 2448658 - RNA, 19 nt, Artificial Sequence
  Description of Artificial Sequence: Synthetic oligonucleotide
agggcaacgagacagcacg

SEQ ID NO: 2448659 - RNA, 19 nt, Artificial Sequence
  Description of Artificial Sequence: Synthetic oligonucleotide
cacaaggucacacaguacc

SEQ ID NO: 2448660 - RNA, 19 nt, Artificial Sequence
  Description of Artificial Sequence: Synthetic oligonucleotide
aaaucaguauuauuuggau

SEQ ID NO: 2448661 - RNA, 19 nt, Artificial Sequence
  Description of Artificial Sequence: Synthetic oligonucleotide
auacaaggugccuuagccc

SEQ ID NO: 2448662 - RNA, 19 nt, Artificial Sequence
  Description of Artificial Sequence: Synthetic oligonucleotide
augcggaucacauccaaac

SEQ ID NO: 2448663 - RNA, 19 nt, Artificial Sequence
  Description of Artificial Sequence: Synthetic oligonucleotide
uguguuuugaaaucaguau

SEQ ID NO: 2448664 - RNA, 19 nt, Artificial Sequence
  Description of Artificial Sequence: Synthetic oligonucleotide
aacuguuugccugagguug

SEQ ID NO: 2448665 - RNA, 19 nt, Artificial Sequence
  Description of Artificial Sequence: Synthetic oligonucleotide
accaauuucaucgcguucg

SEQ ID NO: 2448666 - RNA, 19 nt, Artificial Sequence
  Description of Artificial Sequence: Synthetic oligonucleotide
aaggacccuguacagcacc

SEQ ID NO: 2448667 - RNA, 19 nt, Artificial Sequence
  Description of Artificial Sequence: Synthetic oligonucleotide
aaguggaucggaacgaggg

SEQ ID NO: 2448668 - RNA, 19 nt, Artificial Sequence
  Description of Artificial Sequence: Synthetic oligonucleotide
aacgagacagcacgaguuc

SEQ ID NO: 2448669 - RNA, 19 nt, Artificial Sequence
  Description of Artificial Sequence: Synthetic oligonucleotide
aacgucaggaagcggcucg

SEQ ID NO: 2448670 - RNA, 19 nt, Artificial Sequence
  Description of Artificial Sequence: Synthetic oligonucleotide
gagguuggcaucccaaagg

SEQ ID NO: 2448671 - RNA, 19 nt, Artificial Sequence
  Description of Artificial Sequence: Synthetic oligonucleotide
auuucaucgcguucgcgac

SEQ ID NO: 2448672 - RNA, 19 nt, Artificial Sequence
  Description of Artificial Sequence: Synthetic oligonucleotide
uucacaaggucacacagua

SEQ ID NO: 2448673 - RNA, 19 nt, Artificial Sequence
  Description of Artificial Sequence: Synthetic oligonucleotide
aacaaggacccuguacagc

SEQ ID NO: 2448674 - RNA, 19 nt, Artificial Sequence
  Description of Artificial Sequence: Synthetic oligonucleotide
cacgaguucuucaaaggcg

SEQ ID NO: 2448675 - RNA, 19 nt, Artificial Sequence
  Description of Artificial Sequence: Synthetic oligonucleotide
aagucggucaccucgcgcu

SEQ ID NO: 2448676 - RNA, 19 nt, Artificial Sequence
  Description of Artificial Sequence: Synthetic oligonucleotide
agcaagggcaacgagacag

SEQ ID NO: 2448677 - RNA, 19 nt, Artificial Sequence
  Description of Artificial Sequence: Synthetic oligonucleotide
cacacaguaccuagcagcg

SEQ ID NO: 2448678 - RNA, 19 nt, Artificial Sequence
  Description of Artificial Sequence: Synthetic oligonucleotide
gacgcuaacgucaggaagc

SEQ ID NO: 2448679 - RNA, 19 nt, Artificial Sequence
  Description of Artificial Sequence: Synthetic oligonucleotide
ucacauccaaaccggacug

SEQ ID NO: 2448680 - RNA, 19 nt, Artificial Sequence
  Description of Artificial Sequence: Synthetic oligonucleotide
ugagguuggcaucccaaag

SEQ ID NO: 2448681 - RNA, 19 nt, Artificial Sequence
  Description of Artificial Sequence: Synthetic oligonucleotide
guugacauuuuccucgcgc

SEQ ID NO: 2448682 - RNA, 19 nt, Artificial Sequence
  Description of Artificial Sequence: Synthetic oligonucleotide
uguaccaaagcuggagcgg

SEQ ID NO: 2448683 - RNA, 19 nt, Artificial Sequence
  Description of Artificial Sequence: Synthetic oligonucleotide
uacuccgccaccacucugg

SEQ ID NO: 2448684 - RNA, 19 nt, Artificial Sequence
  Description of Artificial Sequence: Synthetic oligonucleotide
auccaaaccggacuggucu

SEQ ID NO: 2448685 - RNA, 19 nt, Artificial Sequence
  Description of Artificial Sequence: Synthetic oligonucleotide
uucacuguguuuugaaauc

SEQ ID NO: 2448686 - RNA, 19 nt, Artificial Sequence
  Description of Artificial Sequence: Synthetic oligonucleotide
uuguggaggacgcuaacgu

SEQ ID NO: 2448687 - RNA, 19 nt, Artificial Sequence
  Description of Artificial Sequence: Synthetic oligonucleotide
cuguaccaaagcuggagcg

SEQ ID NO: 2448688 - RNA, 19 nt, Artificial Sequence
  Description of Artificial Sequence: Synthetic oligonucleotide
ugccuuagcccaaugccag

SEQ ID NO: 2448689 - RNA, 19 nt, Artificial Sequence
  Description of Artificial Sequence: Synthetic oligonucleotide
aguauuauuuggauuccag

SEQ ID NO: 2448690 - RNA, 19 nt, Artificial Sequence
  Description of Artificial Sequence: Synthetic oligonucleotide
aaccggacuggucugccag

SEQ ID NO: 2448691 - RNA, 19 nt, Artificial Sequence
  Description of Artificial Sequence: Synthetic oligonucleotide
aaggcugguucuuuacugu

SEQ ID NO: 2448692 - RNA, 19 nt, Artificial Sequence
  Description of Artificial Sequence: Synthetic oligonucleotide
gucccguuaagguacuccg

SEQ ID NO: 2448693 - RNA, 19 nt, Artificial Sequence
  Description of Artificial Sequence: Synthetic oligonucleotide
agcaccuggaggcuucucg

SEQ ID NO: 2448694 - RNA, 19 nt, Artificial Sequence
  Description of Artificial Sequence: Synthetic oligonucleotide
uagacgacgaccccugggu

SEQ ID NO: 2448695 - RNA, 19 nt, Artificial Sequence
  Description of Artificial Sequence: Synthetic oligonucleotide
guauuauuuggauuccaga

SEQ ID NO: 2448696 - RNA, 19 nt, Artificial Sequence
  Description of Artificial Sequence: Synthetic oligonucleotide
aacucccuggcuccgcggg

SEQ ID NO: 2448697 - RNA, 19 nt, Artificial Sequence
  Description of Artificial Sequence: Synthetic oligonucleotide
ugcggaucacauccaaacc

SEQ ID NO: 2448698 - RNA, 19 nt, Artificial Sequence
  Description of Artificial Sequence: Synthetic oligonucleotide
acgaguucuucaaaggcgg

SEQ ID NO: 2448699 - RNA, 19 nt, Artificial Sequence
  Description of Artificial Sequence: Synthetic oligonucleotide
caaaggagggaccaauuuc

SEQ ID NO: 2448700 - RNA, 19 nt, Artificial Sequence
  Description of Artificial Sequence: Synthetic oligonucleotide
ucuucuuuaucccgggcua

SEQ ID NO: 2448701 - RNA, 19 nt, Artificial Sequence
  Description of Artificial Sequence: Synthetic oligonucleotide
uccgccaccgacuugcugu

SEQ ID NO: 2448702 - RNA, 19 nt, Artificial Sequence
  Description of Artificial Sequence: Synthetic oligonucleotide
gacccuguacagcaccugg

SEQ ID NO: 2448703 - RNA, 19 nt, Artificial Sequence
  Description of Artificial Sequence: Synthetic oligonucleotide
gcggaucacauccaaaccg

SEQ ID NO: 2448704 - RNA, 19 nt, Artificial Sequence
  Description of Artificial Sequence: Synthetic oligonucleotide
uggaugcucgggcuguccg

SEQ ID NO: 2448705 - RNA, 19 nt, Artificial Sequence
  Description of Artificial Sequence: Synthetic oligonucleotide
ucaguauuauuuggauucc

SEQ ID NO: 2448706 - RNA, 19 nt, Artificial Sequence
  Description of Artificial Sequence: Synthetic oligonucleotide
ggcgaagucggucaccucg

SEQ ID NO: 2448707 - RNA, 19 nt, Artificial Sequence
  Description of Artificial Sequence: Synthetic oligonucleotide
uucucggggccgcaggccg

SEQ ID NO: 2448708 - RNA, 19 nt, Artificial Sequence
  Description of Artificial Sequence: Synthetic oligonucleotide
gugccuguaccaaagcugg

SEQ ID NO: 2448709 - RNA, 19 nt, Artificial Sequence
  Description of Artificial Sequence: Synthetic oligonucleotide
ggugccuuagcccaaugcc

SEQ ID NO: 2448710 - RNA, 19 nt, Artificial Sequence
  Description of Artificial Sequence: Synthetic oligonucleotide
ucaaaggcggcgugcagac

SEQ ID NO: 2448711 - RNA, 19 nt, Artificial Sequence
  Description of Artificial Sequence: Synthetic oligonucleotide
gacgcgaucuccgccaccg

SEQ ID NO: 2448712 - RNA, 19 nt, Artificial Sequence
  Description of Artificial Sequence: Synthetic oligonucleotide
uuaagguacuccgccacca

SEQ ID NO: 2448713 - RNA, 19 nt, Artificial Sequence
  Description of Artificial Sequence: Synthetic oligonucleotide
ucacuguguuuugaaauca

SEQ ID NO: 2448714 - RNA, 19 nt, Artificial Sequence
  Description of Artificial Sequence: Synthetic oligonucleotide
guuguggaggacgcuaacg

SEQ ID NO: 2448715 - RNA, 19 nt, Artificial Sequence
  Description of Artificial Sequence: Synthetic oligonucleotide
agguuggcaucccaaagga

SEQ ID NO: 2448716 - RNA, 19 nt, Artificial Sequence
  Description of Artificial Sequence: Synthetic oligonucleotide
uucuuuaucccgggcuacg

SEQ ID NO: 2448717 - RNA, 19 nt, Artificial Sequence
  Description of Artificial Sequence: Synthetic oligonucleotide
gcggaugcggaucacaucc

SEQ ID NO: 2448718 - RNA, 19 nt, Artificial Sequence
  Description of Artificial Sequence: Synthetic oligonucleotide
aggccaaguggaucggaac

SEQ ID NO: 2448719 - RNA, 19 nt, Artificial Sequence
  Description of Artificial Sequence: Synthetic oligonucleotide
ugcaccagcgacgcgaucu

SEQ ID NO: 2448720 - RNA, 19 nt, Artificial Sequence
  Description of Artificial Sequence: Synthetic oligonucleotide
guaccaaagcuggagcggg

SEQ ID NO: 2448721 - RNA, 19 nt, Artificial Sequence
  Description of Artificial Sequence: Synthetic oligonucleotide
caaguggaucggaacgagg

SEQ ID NO: 2448722 - RNA, 19 nt, Artificial Sequence
  Description of Artificial Sequence: Synthetic oligonucleotide
uucaaaggcggcgugcaga

SEQ ID NO: 2448723 - RNA, 19 nt, Artificial Sequence
  Description of Artificial Sequence: Synthetic oligonucleotide
guagacgacgaccccuggg

SEQ ID NO: 2448724 - RNA, 19 nt, Artificial Sequence
  Description of Artificial Sequence: Synthetic oligonucleotide
agggaccaauuucaucgcg

SEQ ID NO: 2448725 - RNA, 19 nt, Artificial Sequence
  Description of Artificial Sequence: Synthetic oligonucleotide
cagcacgaguucuucaaag

SEQ ID NO: 2448726 - RNA, 19 nt, Artificial Sequence
  Description of Artificial Sequence: Synthetic oligonucleotide
ggccaaguggaucggaacg

SEQ ID NO: 2448727 - RNA, 19 nt, Artificial Sequence
  Description of Artificial Sequence: Synthetic oligonucleotide
uuccgucgggcgaagucgg

SEQ ID NO: 2448728 - RNA, 19 nt, Artificial Sequence
  Description of Artificial Sequence: Synthetic oligonucleotide
guuccgucgggcgaagucg

SEQ ID NO: 2448729 - RNA, 19 nt, Artificial Sequence
  Description of Artificial Sequence: Synthetic oligonucleotide
aagggcaacgagacagcac

SEQ ID NO: 2448730 - RNA, 19 nt, Artificial Sequence
  Description of Artificial Sequence: Synthetic oligonucleotide
gcuaacgucaggaagcggc

SEQ ID NO: 2448731 - RNA, 19 nt, Artificial Sequence
  Description of Artificial Sequence: Synthetic oligonucleotide
guuaagguacuccgccacc

SEQ ID NO: 2448732 - RNA, 19 nt, Artificial Sequence
  Description of Artificial Sequence: Synthetic oligonucleotide
uucaucgcguucgcgaccc

SEQ ID NO: 2448733 - RNA, 19 nt, Artificial Sequence
  Description of Artificial Sequence: Synthetic oligonucleotide
uuucaucgcguucgcgacc

SEQ ID NO: 2448734 - RNA, 19 nt, Artificial Sequence
  Description of Artificial Sequence: Synthetic oligonucleotide
cuucucgcaucucagccug

SEQ ID NO: 2448735 - RNA, 19 nt, Artificial Sequence
  Description of Artificial Sequence: Synthetic oligonucleotide
cuuuaucccgggcuacgcc

SEQ ID NO: 2448736 - RNA, 19 nt, Artificial Sequence
  Description of Artificial Sequence: Synthetic oligonucleotide
cuguugacauuuuccucgc

SEQ ID NO: 2448737 - RNA, 19 nt, Artificial Sequence
  Description of Artificial Sequence: Synthetic oligonucleotide
uccaacuguuugccugagg

SEQ ID NO: 2448738 - RNA, 19 nt, Artificial Sequence
  Description of Artificial Sequence: Synthetic oligonucleotide
guauucacaaggucacaca

SEQ ID NO: 2448739 - RNA, 19 nt, Artificial Sequence
  Description of Artificial Sequence: Synthetic oligonucleotide
uguggaagggcuugcggau

SEQ ID NO: 2448740 - RNA, 19 nt, Artificial Sequence
  Description of Artificial Sequence: Synthetic oligonucleotide
ucgcguucgcgacccaagg

SEQ ID NO: 2448741 - RNA, 19 nt, Artificial Sequence
  Description of Artificial Sequence: Synthetic oligonucleotide
uuaucccgggcuacgcccc

SEQ ID NO: 2448742 - RNA, 19 nt, Artificial Sequence
  Description of Artificial Sequence: Synthetic oligonucleotide
acgacgaccccuggguucc

SEQ ID NO: 2448743 - RNA, 19 nt, Artificial Sequence
  Description of Artificial Sequence: Synthetic oligonucleotide
ucuguuggugaaggggugc

SEQ ID NO: 2448744 - RNA, 19 nt, Artificial Sequence
  Description of Artificial Sequence: Synthetic oligonucleotide
caaagcuggagcggggucc

SEQ ID NO: 2448745 - RNA, 19 nt, Artificial Sequence
  Description of Artificial Sequence: Synthetic oligonucleotide
gaucacauccaaaccggac

SEQ ID NO: 2448746 - RNA, 19 nt, Artificial Sequence
  Description of Artificial Sequence: Synthetic oligonucleotide
cuagcagcggggcaaccgc

SEQ ID NO: 2448747 - RNA, 19 nt, Artificial Sequence
  Description of Artificial Sequence: Synthetic oligonucleotide
uuuccucgcgcaccguccc

SEQ ID NO: 2448748 - RNA, 19 nt, Artificial Sequence
  Description of Artificial Sequence: Synthetic oligonucleotide
gacagcacgaguucuucaa

SEQ ID NO: 2448749 - RNA, 19 nt, Artificial Sequence
  Description of Artificial Sequence: Synthetic oligonucleotide
caccgucccguuaagguac

SEQ ID NO: 2448750 - RNA, 19 nt, Artificial Sequence
  Description of Artificial Sequence: Synthetic oligonucleotide
uguggaggacgcuaacguc

SEQ ID NO: 2448751 - RNA, 19 nt, Artificial Sequence
  Description of Artificial Sequence: Synthetic oligonucleotide
ggaacgaggguauucacaa

SEQ ID NO: 2448752 - RNA, 19 nt, Artificial Sequence
  Description of Artificial Sequence: Synthetic oligonucleotide
gagggaccaauuucaucgc

SEQ ID NO: 2448753 - RNA, 19 nt, Artificial Sequence
  Description of Artificial Sequence: Synthetic oligonucleotide
gaagucggucaccucgcgc

SEQ ID NO: 2448754 - RNA, 19 nt, Artificial Sequence
  Description of Artificial Sequence: Synthetic oligonucleotide
ucuuuaucccgggcuacgc

SEQ ID NO: 2448755 - RNA, 19 nt, Artificial Sequence
  Description of Artificial Sequence: Synthetic oligonucleotide
uucuucaaaggcggcgugc

SEQ ID NO: 2448756 - RNA, 19 nt, Artificial Sequence
  Description of Artificial Sequence: Synthetic oligonucleotide
ucccguuaagguacuccgc

SEQ ID NO: 2448757 - RNA, 19 nt, Artificial Sequence
  Description of Artificial Sequence: Synthetic oligonucleotide
uggaucggaacgaggguau

SEQ ID NO: 2448758 - RNA, 19 nt, Artificial Sequence
  Description of Artificial Sequence: Synthetic oligonucleotide
aguggaucggaacgagggu

SEQ ID NO: 2448759 - RNA, 19 nt, Artificial Sequence
  Description of Artificial Sequence: Synthetic oligonucleotide
gaggacgcuaacgucagga

SEQ ID NO: 2448760 - RNA, 19 nt, Artificial Sequence
  Description of Artificial Sequence: Synthetic oligonucleotide
agacgcuucacuguguuuu

SEQ ID NO: 2448761 - RNA, 19 nt, Artificial Sequence
  Description of Artificial Sequence: Synthetic oligonucleotide
aguaccuagcagcggggca

SEQ ID NO: 2448762 - RNA, 19 nt, Artificial Sequence
  Description of Artificial Sequence: Synthetic oligonucleotide
gguauucacaaggucacac

SEQ ID NO: 2448763 - RNA, 19 nt, Artificial Sequence
  Description of Artificial Sequence: Synthetic oligonucleotide
gcacgaguucuucaaaggc

SEQ ID NO: 2448764 - RNA, 19 nt, Artificial Sequence
  Description of Artificial Sequence: Synthetic oligonucleotide
aucggaacgaggguauuca

SEQ ID NO: 2448765 - RNA, 19 nt, Artificial Sequence
  Description of Artificial Sequence: Synthetic oligonucleotide
gacgcuucacuguguuuug

SEQ ID NO: 2448766 - RNA, 19 nt, Artificial Sequence
  Description of Artificial Sequence: Synthetic oligonucleotide
acuguuugccugagguugg

SEQ ID NO: 2448767 - RNA, 19 nt, Artificial Sequence
  Description of Artificial Sequence: Synthetic oligonucleotide
ucacaaggucacacaguac

SEQ ID NO: 2448768 - RNA, 19 nt, Artificial Sequence
  Description of Artificial Sequence: Synthetic oligonucleotide
caggaagcggcucggaguc

SEQ ID NO: 2448769 - RNA, 19 nt, Artificial Sequence
  Description of Artificial Sequence: Synthetic oligonucleotide
cugggcacggcgcacggcc

SEQ ID NO: 2448770 - RNA, 19 nt, Artificial Sequence
  Description of Artificial Sequence: Synthetic oligonucleotide
gaagggcuugcggaugcgg

SEQ ID NO: 2448771 - RNA, 19 nt, Artificial Sequence
  Description of Artificial Sequence: Synthetic oligonucleotide
ugcacgugcggcccagccc

SEQ ID NO: 2448772 - RNA, 19 nt, Artificial Sequence
  Description of Artificial Sequence: Synthetic oligonucleotide
ggauuccagaaacaaggac

SEQ ID NO: 2448773 - RNA, 19 nt, Artificial Sequence
  Description of Artificial Sequence: Synthetic oligonucleotide
accggacuggucugccagc

SEQ ID NO: 2448774 - RNA, 19 nt, Artificial Sequence
  Description of Artificial Sequence: Synthetic oligonucleotide
aggcugguucuuuacugug

SEQ ID NO: 2448775 - RNA, 19 nt, Artificial Sequence
  Description of Artificial Sequence: Synthetic oligonucleotide
gaccccuggguuccgucgg

SEQ ID NO: 2448776 - RNA, 19 nt, Artificial Sequence
  Description of Artificial Sequence: Synthetic oligonucleotide
aaccgcagccagcucuucu

SEQ ID NO: 2448777 - RNA, 19 nt, Artificial Sequence
  Description of Artificial Sequence: Synthetic oligonucleotide
aggucacacaguaccuagc

SEQ ID NO: 2448778 - RNA, 19 nt, Artificial Sequence
  Description of Artificial Sequence: Synthetic oligonucleotide
aaaccggacuggucugcca

SEQ ID NO: 2448779 - RNA, 19 nt, Artificial Sequence
  Description of Artificial Sequence: Synthetic oligonucleotide
gugcagacgcuucacugug

SEQ ID NO: 2448780 - RNA, 19 nt, Artificial Sequence
  Description of Artificial Sequence: Synthetic oligonucleotide
agcgacgcgaucuccgcca

SEQ ID NO: 2448781 - RNA, 19 nt, Artificial Sequence
  Description of Artificial Sequence: Synthetic oligonucleotide
ggcuccaacuguuugccug

SEQ ID NO: 2448782 - RNA, 19 nt, Artificial Sequence
  Description of Artificial Sequence: Synthetic oligonucleotide
acgcuaacgucaggaagcg

SEQ ID NO: 2448783 - RNA, 19 nt, Artificial Sequence
  Description of Artificial Sequence: Synthetic oligonucleotide
gcacgugcggcccagcccg

SEQ ID NO: 2448784 - RNA, 19 nt, Artificial Sequence
  Description of Artificial Sequence: Synthetic oligonucleotide
gacgacgaccccuggguuc

SEQ ID NO: 2448785 - RNA, 19 nt, Artificial Sequence
  Description of Artificial Sequence: Synthetic oligonucleotide
gaccaauuucaucgcguuc

SEQ ID NO: 2448786 - RNA, 19 nt, Artificial Sequence
  Description of Artificial Sequence: Synthetic oligonucleotide
gggacgagggcgcaucccg

SEQ ID NO: 2448787 - RNA, 19 nt, Artificial Sequence
  Description of Artificial Sequence: Synthetic oligonucleotide
caccacucugggcacggcg

SEQ ID NO: 2448788 - RNA, 19 nt, Artificial Sequence
  Description of Artificial Sequence: Synthetic oligonucleotide
agacagcacgaguucuuca

SEQ ID NO: 2448789 - RNA, 19 nt, Artificial Sequence
  Description of Artificial Sequence: Synthetic oligonucleotide
uggagcgggguccucgcgu

SEQ ID NO: 2448790 - RNA, 19 nt, Artificial Sequence
  Description of Artificial Sequence: Synthetic oligonucleotide
caauuucaucgcguucgcg

SEQ ID NO: 2448791 - RNA, 19 nt, Artificial Sequence
  Description of Artificial Sequence: Synthetic oligonucleotide
gaugcucgggcuguccgug

SEQ ID NO: 2448792 - RNA, 19 nt, Artificial Sequence
  Description of Artificial Sequence: Synthetic oligonucleotide
gauggugggcuccaacugu

SEQ ID NO: 2448793 - RNA, 19 nt, Artificial Sequence
  Description of Artificial Sequence: Synthetic oligonucleotide
gacgagggcgcaucccggc

SEQ ID NO: 2448794 - RNA, 19 nt, Artificial Sequence
  Description of Artificial Sequence: Synthetic oligonucleotide
gaacucccuggcuccgcgg

SEQ ID NO: 2448795 - RNA, 19 nt, Artificial Sequence
  Description of Artificial Sequence: Synthetic oligonucleotide
agucggucaccucgcgcuc

SEQ ID NO: 2448796 - RNA, 19 nt, Artificial Sequence
  Description of Artificial Sequence: Synthetic oligonucleotide
gaucggaacgaggguauuc

SEQ ID NO: 2448797 - RNA, 19 nt, Artificial Sequence
  Description of Artificial Sequence: Synthetic oligonucleotide
aaggugccuuagcccaaug

SEQ ID NO: 2448798 - RNA, 19 nt, Artificial Sequence
  Description of Artificial Sequence: Synthetic oligonucleotide
cccguuaagguacuccgcc

SEQ ID NO: 2448799 - RNA, 19 nt, Artificial Sequence
  Description of Artificial Sequence: Synthetic oligonucleotide
aagggcuugcggaugcgga

SEQ ID NO: 2448800 - RNA, 19 nt, Artificial Sequence
  Description of Artificial Sequence: Synthetic oligonucleotide
ucggaacgaggguauucac

SEQ ID NO: 2448801 - RNA, 19 nt, Artificial Sequence
  Description of Artificial Sequence: Synthetic oligonucleotide
agcccaaugccaggcacag

SEQ ID NO: 2448802 - RNA, 19 nt, Artificial Sequence
  Description of Artificial Sequence: Synthetic oligonucleotide
accagcgacgcgaucuccg

SEQ ID NO: 2448803 - RNA, 19 nt, Artificial Sequence
  Description of Artificial Sequence: Synthetic oligonucleotide
acagcacgaguucuucaaa

SEQ ID NO: 2448804 - RNA, 19 nt, Artificial Sequence
  Description of Artificial Sequence: Synthetic oligonucleotide
agcggcucggagucccgcg

SEQ ID NO: 2448805 - RNA, 19 nt, Artificial Sequence
  Description of Artificial Sequence: Synthetic oligonucleotide
cuucuuuaucccgggcuac

SEQ ID NO: 2448806 - RNA, 19 nt, Artificial Sequence
  Description of Artificial Sequence: Synthetic oligonucleotide
cacauccaaaccggacugg

SEQ ID NO: 2448807 - RNA, 19 nt, Artificial Sequence
  Description of Artificial Sequence: Synthetic oligonucleotide
cggaucacauccaaaccgg

SEQ ID NO: 2448808 - RNA, 19 nt, Artificial Sequence
  Description of Artificial Sequence: Synthetic oligonucleotide
gguccucgcguucucgggg

SEQ ID NO: 2448809 - RNA, 19 nt, Artificial Sequence
  Description of Artificial Sequence: Synthetic oligonucleotide
ucgcgcaccgucccguuaa

SEQ ID NO: 2448810 - RNA, 19 nt, Artificial Sequence
  Description of Artificial Sequence: Synthetic oligonucleotide
gagacagcacgaguucuuc

SEQ ID NO: 2448811 - RNA, 19 nt, Artificial Sequence
  Description of Artificial Sequence: Synthetic oligonucleotide
aggacgcuaacgucaggaa

SEQ ID NO: 2448812 - RNA, 19 nt, Artificial Sequence
  Description of Artificial Sequence: Synthetic oligonucleotide
gggcuguccguguggaagg

SEQ ID NO: 2448813 - RNA, 19 nt, Artificial Sequence
  Description of Artificial Sequence: Synthetic oligonucleotide
ucccaaaggagggaccaau

SEQ ID NO: 2448814 - RNA, 19 nt, Artificial Sequence
  Description of Artificial Sequence: Synthetic oligonucleotide
ccuguacagcaccuggagg

SEQ ID NO: 2448815 - RNA, 19 nt, Artificial Sequence
  Description of Artificial Sequence: Synthetic oligonucleotide
guucgcgacccaaggcugg

SEQ ID NO: 2448816 - RNA, 19 nt, Artificial Sequence
  Description of Artificial Sequence: Synthetic oligonucleotide
acucugggcacggcgcacg

SEQ ID NO: 2448817 - RNA, 19 nt, Artificial Sequence
  Description of Artificial Sequence: Synthetic oligonucleotide
ggacuggucugccagcuuc

SEQ ID NO: 2448818 - RNA, 19 nt, Artificial Sequence
  Description of Artificial Sequence: Synthetic oligonucleotide
acgaggguauucacaaggu

SEQ ID NO: 2448819 - RNA, 19 nt, Artificial Sequence
  Description of Artificial Sequence: Synthetic oligonucleotide
acgagacagcacgaguucu

SEQ ID NO: 2448820 - RNA, 19 nt, Artificial Sequence
  Description of Artificial Sequence: Synthetic oligonucleotide
gugccuuagcccaaugcca

SEQ ID NO: 2448821 - RNA, 19 nt, Artificial Sequence
  Description of Artificial Sequence: Synthetic oligonucleotide
caaaccggacuggucugcc

SEQ ID NO: 2448822 - RNA, 19 nt, Artificial Sequence
  Description of Artificial Sequence: Synthetic oligonucleotide
caucccaaaggagggacca

SEQ ID NO: 2448823 - RNA, 19 nt, Artificial Sequence
  Description of Artificial Sequence: Synthetic oligonucleotide
acgaacucccuggcuccgc

SEQ ID NO: 2448824 - RNA, 19 nt, Artificial Sequence
  Description of Artificial Sequence: Synthetic oligonucleotide
ugccuguaccaaagcugga

SEQ ID NO: 2448825 - RNA, 19 nt, Artificial Sequence
  Description of Artificial Sequence: Synthetic oligonucleotide
guccucgcguucucggggc

SEQ ID NO: 2448826 - RNA, 19 nt, Artificial Sequence
  Description of Artificial Sequence: Synthetic oligonucleotide
acgaccccuggguuccguc

SEQ ID NO: 2448827 - RNA, 19 nt, Artificial Sequence
  Description of Artificial Sequence: Synthetic oligonucleotide
accaaagcuggagcggggu

SEQ ID NO: 2448828 - RNA, 19 nt, Artificial Sequence
  Description of Artificial Sequence: Synthetic oligonucleotide
uucucgcaucucagccugc

SEQ ID NO: 2448829 - RNA, 19 nt, Artificial Sequence
  Description of Artificial Sequence: Synthetic oligonucleotide
ucccuggcuccgcgggacg

SEQ ID NO: 2448830 - RNA, 19 nt, Artificial Sequence
  Description of Artificial Sequence: Synthetic oligonucleotide
caguaccuagcagcggggc

SEQ ID NO: 2448831 - RNA, 19 nt, Artificial Sequence
  Description of Artificial Sequence: Synthetic oligonucleotide
ucggucaccucgcgcucca

SEQ ID NO: 2448832 - RNA, 19 nt, Artificial Sequence
  Description of Artificial Sequence: Synthetic oligonucleotide
gcgugcagacgcuucacug

SEQ ID NO: 2448833 - RNA, 19 nt, Artificial Sequence
  Description of Artificial Sequence: Synthetic oligonucleotide
gaugcggaucacauccaaa

SEQ ID NO: 2448834 - RNA, 19 nt, Artificial Sequence
  Description of Artificial Sequence: Synthetic oligonucleotide
accgcagccagcucuucuu

SEQ ID NO: 2448835 - RNA, 19 nt, Artificial Sequence
  Description of Artificial Sequence: Synthetic oligonucleotide
guuugccugagguuggcau

SEQ ID NO: 2448836 - RNA, 19 nt, Artificial Sequence
  Description of Artificial Sequence: Synthetic oligonucleotide
aucgcguucgcgacccaag

SEQ ID NO: 2448837 - RNA, 19 nt, Artificial Sequence
  Description of Artificial Sequence: Synthetic oligonucleotide
cugagguuggcaucccaaa

SEQ ID NO: 2448838 - RNA, 19 nt, Artificial Sequence
  Description of Artificial Sequence: Synthetic oligonucleotide
acguagacgacgaccccug

SEQ ID NO: 2448839 - RNA, 19 nt, Artificial Sequence
  Description of Artificial Sequence: Synthetic oligonucleotide
agggcuugcggaugcggau

SEQ ID NO: 2448840 - RNA, 19 nt, Artificial Sequence
  Description of Artificial Sequence: Synthetic oligonucleotide
acgucaggaagcggcucgg

SEQ ID NO: 2448841 - RNA, 19 nt, Artificial Sequence
  Description of Artificial Sequence: Synthetic oligonucleotide
gucuguuggugaaggggug

SEQ ID NO: 2448842 - RNA, 19 nt, Artificial Sequence
  Description of Artificial Sequence: Synthetic oligonucleotide
cuuagcccaaugccaggca

SEQ ID NO: 2448843 - RNA, 19 nt, Artificial Sequence
  Description of Artificial Sequence: Synthetic oligonucleotide
guaccuagcagcggggcaa

SEQ ID NO: 2448844 - RNA, 19 nt, Artificial Sequence
  Description of Artificial Sequence: Synthetic oligonucleotide
cugcacgugcggcccagcc

SEQ ID NO: 2448845 - RNA, 19 nt, Artificial Sequence
  Description of Artificial Sequence: Synthetic oligonucleotide
caacgagacagcacgaguu

SEQ ID NO: 2448846 - RNA, 19 nt, Artificial Sequence
  Description of Artificial Sequence: Synthetic oligonucleotide
cgcggguucacguagacga

SEQ ID NO: 2448847 - RNA, 19 nt, Artificial Sequence
  Description of Artificial Sequence: Synthetic oligonucleotide
caguauuauuuggauucca

SEQ ID NO: 2448848 - RNA, 19 nt, Artificial Sequence
  Description of Artificial Sequence: Synthetic oligonucleotide
ggcaacgagacagcacgag

SEQ ID NO: 2448849 - RNA, 19 nt, Artificial Sequence
  Description of Artificial Sequence: Synthetic oligonucleotide
cuaacgucaggaagcggcu

SEQ ID NO: 2448850 - RNA, 19 nt, Artificial Sequence
  Description of Artificial Sequence: Synthetic oligonucleotide
aggaagcggcucggagucc

SEQ ID NO: 2448851 - RNA, 19 nt, Artificial Sequence
  Description of Artificial Sequence: Synthetic oligonucleotide
uaacgucaggaagcggcuc

SEQ ID NO: 2448852 - RNA, 19 nt, Artificial Sequence
  Description of Artificial Sequence: Synthetic oligonucleotide
guggaucggaacgagggua

SEQ ID NO: 2448853 - RNA, 19 nt, Artificial Sequence
  Description of Artificial Sequence: Synthetic oligonucleotide
accccuggguuccgucggg

SEQ ID NO: 2448854 - RNA, 19 nt, Artificial Sequence
  Description of Artificial Sequence: Synthetic oligonucleotide
cccuguacagcaccuggag

SEQ ID NO: 2448855 - RNA, 19 nt, Artificial Sequence
  Description of Artificial Sequence: Synthetic oligonucleotide
cuccgcgggacgagggcgc

SEQ ID NO: 2448856 - RNA, 19 nt, Artificial Sequence
  Description of Artificial Sequence: Synthetic oligonucleotide
ccacgaacucccuggcucc

SEQ ID NO: 2448857 - RNA, 19 nt, Artificial Sequence
  Description of Artificial Sequence: Synthetic oligonucleotide
ccaacuguuugccugaggu

SEQ ID NO: 2448858 - RNA, 19 nt, Artificial Sequence
  Description of Artificial Sequence: Synthetic oligonucleotide
gccggucuguuggugaagg

SEQ ID NO: 2448859 - RNA, 19 nt, Artificial Sequence
  Description of Artificial Sequence: Synthetic oligonucleotide
cucugggcacggcgcacgg

SEQ ID NO: 2448860 - RNA, 19 nt, Artificial Sequence
  Description of Artificial Sequence: Synthetic oligonucleotide
cuguuugccugagguuggc

SEQ ID NO: 2448861 - RNA, 19 nt, Artificial Sequence
  Description of Artificial Sequence: Synthetic oligonucleotide
ggcaucccaaaggagggac

SEQ ID NO: 2448862 - RNA, 19 nt, Artificial Sequence
  Description of Artificial Sequence: Synthetic oligonucleotide
cuugcggaugcggaucaca

SEQ ID NO: 2448863 - RNA, 19 nt, Artificial Sequence
  Description of Artificial Sequence: Synthetic oligonucleotide
ccuuagcccaaugccaggc

SEQ ID NO: 2448864 - RNA, 19 nt, Artificial Sequence
  Description of Artificial Sequence: Synthetic oligonucleotide
gguuccgucgggcgaaguc

SEQ ID NO: 2448865 - RNA, 19 nt, Artificial Sequence
  Description of Artificial Sequence: Synthetic oligonucleotide
acgagggcgcaucccggcu

SEQ ID NO: 2448866 - RNA, 19 nt, Artificial Sequence
  Description of Artificial Sequence: Synthetic oligonucleotide
cguuaagguacuccgccac

SEQ ID NO: 2448867 - RNA, 19 nt, Artificial Sequence
  Description of Artificial Sequence: Synthetic oligonucleotide
agacgacgaccccuggguu

SEQ ID NO: 2448868 - RNA, 19 nt, Artificial Sequence
  Description of Artificial Sequence: Synthetic oligonucleotide
cacgaacucccuggcuccg

SEQ ID NO: 2448869 - RNA, 19 nt, Artificial Sequence
  Description of Artificial Sequence: Synthetic oligonucleotide
gagggcgcaucccggcuga

SEQ ID NO: 2448870 - RNA, 19 nt, Artificial Sequence
  Description of Artificial Sequence: Synthetic oligonucleotide
gaucuccgccaccgacuug

SEQ ID NO: 2448871 - RNA, 19 nt, Artificial Sequence
  Description of Artificial Sequence: Synthetic oligonucleotide
ccuagcagcggggcaaccg

SEQ ID NO: 2448872 - RNA, 19 nt, Artificial Sequence
  Description of Artificial Sequence: Synthetic oligonucleotide
cuggagcgggguccucgcg

SEQ ID NO: 2448873 - RNA, 19 nt, Artificial Sequence
  Description of Artificial Sequence: Synthetic oligonucleotide
uucgcgacccaaggcuggu

SEQ ID NO: 2448874 - RNA, 19 nt, Artificial Sequence
  Description of Artificial Sequence: Synthetic oligonucleotide
agcagcggggcaaccgcag

SEQ ID NO: 2448875 - RNA, 19 nt, Artificial Sequence
  Description of Artificial Sequence: Synthetic oligonucleotide
guucucggggccgcaggcc

SEQ ID NO: 2448876 - RNA, 19 nt, Artificial Sequence
  Description of Artificial Sequence: Synthetic oligonucleotide
ugcggcccagcccguugug

SEQ ID NO: 2448877 - RNA, 19 nt, Artificial Sequence
  Description of Artificial Sequence: Synthetic oligonucleotide
uaccuagcagcggggcaac

SEQ ID NO: 2448878 - RNA, 19 nt, Artificial Sequence
  Description of Artificial Sequence: Synthetic oligonucleotide
agaggccaaguggaucgga

SEQ ID NO: 2448879 - RNA, 19 nt, Artificial Sequence
  Description of Artificial Sequence: Synthetic oligonucleotide
aggacccuguacagcaccu

SEQ ID NO: 2448880 - RNA, 19 nt, Artificial Sequence
  Description of Artificial Sequence: Synthetic oligonucleotide
uggugggcuccaacuguuu

SEQ ID NO: 2448881 - RNA, 19 nt, Artificial Sequence
  Description of Artificial Sequence: Synthetic oligonucleotide
ucgggcgaagucggucacc

SEQ ID NO: 2448882 - RNA, 19 nt, Artificial Sequence
  Description of Artificial Sequence: Synthetic oligonucleotide
cuggcuccgcgggacgagg

SEQ ID NO: 2448883 - RNA, 19 nt, Artificial Sequence
  Description of Artificial Sequence: Synthetic oligonucleotide
acccuguacagcaccugga

SEQ ID NO: 2448884 - RNA, 19 nt, Artificial Sequence
  Description of Artificial Sequence: Synthetic oligonucleotide
ggucuguuggugaaggggu

SEQ ID NO: 2448885 - RNA, 19 nt, Artificial Sequence
  Description of Artificial Sequence: Synthetic oligonucleotide
agcggggcaaccgcagcca

SEQ ID NO: 2448886 - RNA, 19 nt, Artificial Sequence
  Description of Artificial Sequence: Synthetic oligonucleotide
cucgcguucucggggccgc

SEQ ID NO: 2448887 - RNA, 19 nt, Artificial Sequence
  Description of Artificial Sequence: Synthetic oligonucleotide
ggcaaccgcagccagcucu

SEQ ID NO: 2448888 - RNA, 19 nt, Artificial Sequence
  Description of Artificial Sequence: Synthetic oligonucleotide
acucccuggcuccgcggga

SEQ ID NO: 2448889 - RNA, 19 nt, Artificial Sequence
  Description of Artificial Sequence: Synthetic oligonucleotide
caaggucacacaguaccua

SEQ ID NO: 2448890 - RNA, 19 nt, Artificial Sequence
  Description of Artificial Sequence: Synthetic oligonucleotide
gguucuuuacugugccugu

SEQ ID NO: 2448891 - RNA, 19 nt, Artificial Sequence
  Description of Artificial Sequence: Synthetic oligonucleotide
cccaaggcugguucuuuac

SEQ ID NO: 2448892 - RNA, 19 nt, Artificial Sequence
  Description of Artificial Sequence: Synthetic oligonucleotide
cuccaacuguuugccugag

SEQ ID NO: 2448893 - RNA, 19 nt, Artificial Sequence
  Description of Artificial Sequence: Synthetic oligonucleotide
ucuccgccaccgacuugcu

SEQ ID NO: 2448894 - RNA, 19 nt, Artificial Sequence
  Description of Artificial Sequence: Synthetic oligonucleotide
agcgggguccucgcguucu

SEQ ID NO: 2448895 - RNA, 19 nt, Artificial Sequence
  Description of Artificial Sequence: Synthetic oligonucleotide
aaggcggcgugcagacgcu

SEQ ID NO: 2448896 - RNA, 19 nt, Artificial Sequence
  Description of Artificial Sequence: Synthetic oligonucleotide
uccgucgggcgaagucggu

SEQ ID NO: 2448897 - RNA, 19 nt, Artificial Sequence
  Description of Artificial Sequence: Synthetic oligonucleotide
gcuccacgaacucccuggc

SEQ ID NO: 2448898 - RNA, 19 nt, Artificial Sequence
  Description of Artificial Sequence: Synthetic oligonucleotide
gcaagggcaacgagacagc

SEQ ID NO: 2448899 - RNA, 19 nt, Artificial Sequence
  Description of Artificial Sequence: Synthetic oligonucleotide
ggcacagcaagggcaacga

SEQ ID NO: 2448900 - RNA, 19 nt, Artificial Sequence
  Description of Artificial Sequence: Synthetic oligonucleotide
gucgggcgaagucggucac

SEQ ID NO: 2448901 - RNA, 19 nt, Artificial Sequence
  Description of Artificial Sequence: Synthetic oligonucleotide
ggguucacguagacgacga

SEQ ID NO: 2448902 - RNA, 19 nt, Artificial Sequence
  Description of Artificial Sequence: Synthetic oligonucleotide
ggaugcggaucacauccaa

SEQ ID NO: 2448903 - RNA, 19 nt, Artificial Sequence
  Description of Artificial Sequence: Synthetic oligonucleotide
auggugggcuccaacuguu

SEQ ID NO: 2448904 - RNA, 19 nt, Artificial Sequence
  Description of Artificial Sequence: Synthetic oligonucleotide
gccaaguggaucggaacga

SEQ ID NO: 2448905 - RNA, 19 nt, Artificial Sequence
  Description of Artificial Sequence: Synthetic oligonucleotide
guucuuuacugugccugua

SEQ ID NO: 2448906 - RNA, 19 nt, Artificial Sequence
  Description of Artificial Sequence: Synthetic oligonucleotide
ggcuugcggaugcggauca

SEQ ID NO: 2448907 - RNA, 19 nt, Artificial Sequence
  Description of Artificial Sequence: Synthetic oligonucleotide
cacggcgcacggccgcggg

SEQ ID NO: 2448908 - RNA, 19 nt, Artificial Sequence
  Description of Artificial Sequence: Synthetic oligonucleotide
gcaacgagacagcacgagu

SEQ ID NO: 2448909 - RNA, 19 nt, Artificial Sequence
  Description of Artificial Sequence: Synthetic oligonucleotide
ggacgagggcgcaucccgg

SEQ ID NO: 2448910 - RNA, 19 nt, Artificial Sequence
  Description of Artificial Sequence: Synthetic oligonucleotide
cucccuggcuccgcgggac

SEQ ID NO: 2448911 - RNA, 19 nt, Artificial Sequence
  Description of Artificial Sequence: Synthetic oligonucleotide
ucaucgcguucgcgaccca

SEQ ID NO: 2448912 - RNA, 19 nt, Artificial Sequence
  Description of Artificial Sequence: Synthetic oligonucleotide
gcguucgcgacccaaggcu

SEQ ID NO: 2448913 - RNA, 19 nt, Artificial Sequence
  Description of Artificial Sequence: Synthetic oligonucleotide
ugccugagguuggcauccc

SEQ ID NO: 2448914 - RNA, 19 nt, Artificial Sequence
  Description of Artificial Sequence: Synthetic oligonucleotide
ggaucacauccaaaccgga

SEQ ID NO: 2448915 - RNA, 19 nt, Artificial Sequence
  Description of Artificial Sequence: Synthetic oligonucleotide
gcgaagucggucaccucgc

SEQ ID NO: 2448916 - RNA, 19 nt, Artificial Sequence
  Description of Artificial Sequence: Synthetic oligonucleotide
gcaucccaaaggagggacc

SEQ ID NO: 2448917 - RNA, 19 nt, Artificial Sequence
  Description of Artificial Sequence: Synthetic oligonucleotide
cgggccgccggucuguugg

SEQ ID NO: 2448918 - RNA, 19 nt, Artificial Sequence
  Description of Artificial Sequence: Synthetic oligonucleotide
ggaagggcuugcggaugcg

SEQ ID NO: 2448919 - RNA, 19 nt, Artificial Sequence
  Description of Artificial Sequence: Synthetic oligonucleotide
cucggggccgcaggccgcg

SEQ ID NO: 2448920 - RNA, 19 nt, Artificial Sequence
  Description of Artificial Sequence: Synthetic oligonucleotide
uggguuccgucgggcgaag

SEQ ID NO: 2448921 - RNA, 19 nt, Artificial Sequence
  Description of Artificial Sequence: Synthetic oligonucleotide
caccagcgacgcgaucucc

SEQ ID NO: 2448922 - RNA, 19 nt, Artificial Sequence
  Description of Artificial Sequence: Synthetic oligonucleotide
acaaggugccuuagcccaa

SEQ ID NO: 2448923 - RNA, 19 nt, Artificial Sequence
  Description of Artificial Sequence: Synthetic oligonucleotide
cccuggguuccgucgggcg

SEQ ID NO: 2448924 - RNA, 19 nt, Artificial Sequence
  Description of Artificial Sequence: Synthetic oligonucleotide
ccagaaacaaggacccugu

SEQ ID NO: 2448925 - RNA, 19 nt, Artificial Sequence
  Description of Artificial Sequence: Synthetic oligonucleotide
acggccgcggguucacgua

SEQ ID NO: 2448926 - RNA, 19 nt, Artificial Sequence
  Description of Artificial Sequence: Synthetic oligonucleotide
gcaccgucccguuaaggua

SEQ ID NO: 2448927 - RNA, 19 nt, Artificial Sequence
  Description of Artificial Sequence: Synthetic oligonucleotide
ggaccaauuucaucgcguu

SEQ ID NO: 2448928 - RNA, 19 nt, Artificial Sequence
  Description of Artificial Sequence: Synthetic oligonucleotide
gccaccacucugggcacgg

SEQ ID NO: 2448929 - RNA, 19 nt, Artificial Sequence
  Description of Artificial Sequence: Synthetic oligonucleotide
gcuucucgcaucucagccu

SEQ ID NO: 2448930 - RNA, 19 nt, Artificial Sequence
  Description of Artificial Sequence: Synthetic oligonucleotide
cuccgccaccgacuugcug

SEQ ID NO: 2448931 - RNA, 19 nt, Artificial Sequence
  Description of Artificial Sequence: Synthetic oligonucleotide
ccggucuguuggugaaggg

SEQ ID NO: 2448932 - RNA, 19 nt, Artificial Sequence
  Description of Artificial Sequence: Synthetic oligonucleotide
caccgacuugcuguugaca

SEQ ID NO: 2448933 - RNA, 19 nt, Artificial Sequence
  Description of Artificial Sequence: Synthetic oligonucleotide
ucgggcuguccguguggaa

SEQ ID NO: 2448934 - RNA, 19 nt, Artificial Sequence
  Description of Artificial Sequence: Synthetic oligonucleotide
cagaaacaaggacccugua

SEQ ID NO: 2448935 - RNA, 19 nt, Artificial Sequence
  Description of Artificial Sequence: Synthetic oligonucleotide
agccugcaaagaggccaag

SEQ ID NO: 2448936 - RNA, 19 nt, Artificial Sequence
  Description of Artificial Sequence: Synthetic oligonucleotide
cgucccguuaagguacucc

SEQ ID NO: 2448937 - RNA, 19 nt, Artificial Sequence
  Description of Artificial Sequence: Synthetic oligonucleotide
cggguucacguagacgacg

SEQ ID NO: 2448938 - RNA, 19 nt, Artificial Sequence
  Description of Artificial Sequence: Synthetic oligonucleotide
ccaaagcuggagcgggguc

SEQ ID NO: 2448939 - RNA, 19 nt, Artificial Sequence
  Description of Artificial Sequence: Synthetic oligonucleotide
cgaccccuggguuccgucg

SEQ ID NO: 2448940 - RNA, 19 nt, Artificial Sequence
  Description of Artificial Sequence: Synthetic oligonucleotide
cacucugggcacggcgcac

SEQ ID NO: 2448941 - RNA, 19 nt, Artificial Sequence
  Description of Artificial Sequence: Synthetic oligonucleotide
cugguucuuuacugugccu

SEQ ID NO: 2448942 - RNA, 19 nt, Artificial Sequence
  Description of Artificial Sequence: Synthetic oligonucleotide
ggcuccgcgggacgagggc

SEQ ID NO: 2448943 - RNA, 19 nt, Artificial Sequence
  Description of Artificial Sequence: Synthetic oligonucleotide
gggaccaauuucaucgcgu

SEQ ID NO: 2448944 - RNA, 19 nt, Artificial Sequence
  Description of Artificial Sequence: Synthetic oligonucleotide
ccguuaagguacuccgcca

SEQ ID NO: 2448945 - RNA, 19 nt, Artificial Sequence
  Description of Artificial Sequence: Synthetic oligonucleotide
cggaacgaggguauucaca

SEQ ID NO: 2448946 - RNA, 19 nt, Artificial Sequence
  Description of Artificial Sequence: Synthetic oligonucleotide
cucgggcuguccgugugga

SEQ ID NO: 2448947 - RNA, 19 nt, Artificial Sequence
  Description of Artificial Sequence: Synthetic oligonucleotide
uccgcgggacgagggcgca

SEQ ID NO: 2448948 - RNA, 19 nt, Artificial Sequence
  Description of Artificial Sequence: Synthetic oligonucleotide
gagcgggguccucgcguuc

SEQ ID NO: 2448949 - RNA, 19 nt, Artificial Sequence
  Description of Artificial Sequence: Synthetic oligonucleotide
cucgcaucucagccugcaa

SEQ ID NO: 2448950 - RNA, 19 nt, Artificial Sequence
  Description of Artificial Sequence: Synthetic oligonucleotide
acgcgaucuccgccaccga

SEQ ID NO: 2448951 - RNA, 19 nt, Artificial Sequence
  Description of Artificial Sequence: Synthetic oligonucleotide
caucccggcugaggcugag

SEQ ID NO: 2448952 - RNA, 19 nt, Artificial Sequence
  Description of Artificial Sequence: Synthetic oligonucleotide
gguacuccgccaccacucu

SEQ ID NO: 2448953 - RNA, 19 nt, Artificial Sequence
  Description of Artificial Sequence: Synthetic oligonucleotide
ggguauucacaaggucaca

SEQ ID NO: 2448954 - RNA, 19 nt, Artificial Sequence
  Description of Artificial Sequence: Synthetic oligonucleotide
cgaagucggucaccucgcg

SEQ ID NO: 2448955 - RNA, 19 nt, Artificial Sequence
  Description of Artificial Sequence: Synthetic oligonucleotide
gcaccagcgacgcgaucuc

SEQ ID NO: 2448956 - RNA, 19 nt, Artificial Sequence
  Description of Artificial Sequence: Synthetic oligonucleotide
gggcgcaucccggcugagg

SEQ ID NO: 2448957 - RNA, 19 nt, Artificial Sequence
  Description of Artificial Sequence: Synthetic oligonucleotide
gggcuugcggaugcggauc

SEQ ID NO: 2448958 - RNA, 19 nt, Artificial Sequence
  Description of Artificial Sequence: Synthetic oligonucleotide
cgcguucgcgacccaaggc

SEQ ID NO: 2448959 - RNA, 19 nt, Artificial Sequence
  Description of Artificial Sequence: Synthetic oligonucleotide
gccgccggucuguugguga

SEQ ID NO: 2448960 - RNA, 19 nt, Artificial Sequence
  Description of Artificial Sequence: Synthetic oligonucleotide
gcggggcaaccgcagccag

SEQ ID NO: 2448961 - RNA, 19 nt, Artificial Sequence
  Description of Artificial Sequence: Synthetic oligonucleotide
uggaggcuucucgcaucuc

SEQ ID NO: 2448962 - RNA, 19 nt, Artificial Sequence
  Description of Artificial Sequence: Synthetic oligonucleotide
cccgauggugggcuccaac

SEQ ID NO: 2448963 - RNA, 19 nt, Artificial Sequence
  Description of Artificial Sequence: Synthetic oligonucleotide
caucgcguucgcgacccaa

SEQ ID NO: 2448964 - RNA, 19 nt, Artificial Sequence
  Description of Artificial Sequence: Synthetic oligonucleotide
accgucccguuaagguacu

SEQ ID NO: 2448965 - RNA, 19 nt, Artificial Sequence
  Description of Artificial Sequence: Synthetic oligonucleotide
ccgauggugggcuccaacu

SEQ ID NO: 2448966 - RNA, 19 nt, Artificial Sequence
  Description of Artificial Sequence: Synthetic oligonucleotide
gcggcgugcagacgcuuca

SEQ ID NO: 2448967 - RNA, 19 nt, Artificial Sequence
  Description of Artificial Sequence: Synthetic oligonucleotide
cguagacgacgaccccugg

SEQ ID NO: 2448968 - RNA, 19 nt, Artificial Sequence
  Description of Artificial Sequence: Synthetic oligonucleotide
ccuggguuccgucgggcga

SEQ ID NO: 2448969 - RNA, 19 nt, Artificial Sequence
  Description of Artificial Sequence: Synthetic oligonucleotide
ggcacggcgcacggccgcg

SEQ ID NO: 2448970 - RNA, 19 nt, Artificial Sequence
  Description of Artificial Sequence: Synthetic oligonucleotide
cguuguggaggacgcuaac

SEQ ID NO: 2448971 - RNA, 19 nt, Artificial Sequence
  Description of Artificial Sequence: Synthetic oligonucleotide
gcgcaccgucccguuaagg

SEQ ID NO: 2448972 - RNA, 19 nt, Artificial Sequence
  Description of Artificial Sequence: Synthetic oligonucleotide
gccgcggguucacguagac

SEQ ID NO: 2448973 - RNA, 19 nt, Artificial Sequence
  Description of Artificial Sequence: Synthetic oligonucleotide
cgcgacccaaggcugguuc

SEQ ID NO: 2448974 - RNA, 19 nt, Artificial Sequence
  Description of Artificial Sequence: Synthetic oligonucleotide
ggaugcucgggcuguccgu

SEQ ID NO: 2448975 - RNA, 19 nt, Artificial Sequence
  Description of Artificial Sequence: Synthetic oligonucleotide
gcgggacgagggcgcaucc

SEQ ID NO: 2448976 - RNA, 19 nt, Artificial Sequence
  Description of Artificial Sequence: Synthetic oligonucleotide
cgucgggcgaagucgguca

SEQ ID NO: 2448977 - RNA, 19 nt, Artificial Sequence
  Description of Artificial Sequence: Synthetic oligonucleotide
ccgcggguucacguagacg

SEQ ID NO: 2448978 - RNA, 19 nt, Artificial Sequence
  Description of Artificial Sequence: Synthetic oligonucleotide
ggcgugcagacgcuucacu

SEQ ID NO: 2448979 - RNA, 19 nt, Artificial Sequence
  Description of Artificial Sequence: Synthetic oligonucleotide
gacccaaggcugguucuuu

SEQ ID NO: 2448980 - RNA, 19 nt, Artificial Sequence
  Description of Artificial Sequence: Synthetic oligonucleotide
ucgcguucucggggccgca

SEQ ID NO: 2448981 - RNA, 19 nt, Artificial Sequence
  Description of Artificial Sequence: Synthetic oligonucleotide
ccguuguggaggacgcuaa

SEQ ID NO: 2448982 - RNA, 19 nt, Artificial Sequence
  Description of Artificial Sequence: Synthetic oligonucleotide
cacggccgcggguucacgu

SEQ ID NO: 2448983 - RNA, 19 nt, Artificial Sequence
  Description of Artificial Sequence: Synthetic oligonucleotide
gcggguucacguagacgac

SEQ ID NO: 2448984 - RNA, 19 nt, Artificial Sequence
  Description of Artificial Sequence: Synthetic oligonucleotide
ucgcgacccaaggcugguu

SEQ ID NO: 2448985 - RNA, 19 nt, Artificial Sequence
  Description of Artificial Sequence: Synthetic oligonucleotide
gcgacgcgaucuccgccac

SEQ ID NO: 2448986 - RNA, 19 nt, Artificial Sequence
  Description of Artificial Sequence: Synthetic oligonucleotide
agggcgcaucccggcugag

SEQ ID NO: 2448987 - RNA, 19 nt, Artificial Sequence
  Description of Artificial Sequence: Synthetic oligonucleotide
gcggcucggagucccgcga

SEQ ID NO: 2448988 - RNA, 19 nt, Artificial Sequence
  Description of Artificial Sequence: Synthetic oligonucleotide
gggcaacgagacagcacga

SEQ ID NO: 2448989 - RNA, 19 nt, Artificial Sequence
  Description of Artificial Sequence: Synthetic oligonucleotide
cgagggcgcaucccggcug

SEQ ID NO: 2448990 - RNA, 19 nt, Artificial Sequence
  Description of Artificial Sequence: Synthetic oligonucleotide
cgcaccgucccguuaaggu

SEQ ID NO: 2448991 - RNA, 19 nt, Artificial Sequence
  Description of Artificial Sequence: Synthetic oligonucleotide
ggcggcgugcagacgcuuc

SEQ ID NO: 2448992 - RNA, 19 nt, Artificial Sequence
  Description of Artificial Sequence: Synthetic oligonucleotide
gcgaucuccgccaccgacu

SEQ ID NO: 2448993 - RNA, 19 nt, Artificial Sequence
  Description of Artificial Sequence: Synthetic oligonucleotide
gcgacccaaggcugguucu

SEQ ID NO: 2448994 - RNA, 19 nt, Artificial Sequence
  Description of Artificial Sequence: Synthetic oligonucleotide
ccacucugggcacggcgca

SEQ ID NO: 2448995 - RNA, 19 nt, Artificial Sequence
  Description of Artificial Sequence: Synthetic oligonucleotide
gggccgcaggccgcggcgg

SEQ ID NO: 2448996 - RNA, 19 nt, Artificial Sequence
  Description of Artificial Sequence: Synthetic oligonucleotide
cggggcaaccgcagccagc

SEQ ID NO: 2448997 - RNA, 19 nt, Artificial Sequence
  Description of Artificial Sequence: Synthetic oligonucleotide
cagacgcuucacuguguuu

SEQ ID NO: 2448998 - RNA, 19 nt, Artificial Sequence
  Description of Artificial Sequence: Synthetic oligonucleotide
ccuggcuccgcgggacgag

SEQ ID NO: 2448999 - RNA, 19 nt, Artificial Sequence
  Description of Artificial Sequence: Synthetic oligonucleotide
caaggugccuuagcccaau

SEQ ID NO: 2449000 - RNA, 19 nt, Artificial Sequence
  Description of Artificial Sequence: Synthetic oligonucleotide
cccguuguggaggacgcua

SEQ ID NO: 2449001 - RNA, 19 nt, Artificial Sequence
  Description of Artificial Sequence: Synthetic oligonucleotide
cggccgcggguucacguag

SEQ ID NO: 2449002 - RNA, 19 nt, Artificial Sequence
  Description of Artificial Sequence: Synthetic oligonucleotide
ccgucgggcgaagucgguc

SEQ ID NO: 2449003 - RNA, 19 nt, Artificial Sequence
  Description of Artificial Sequence: Synthetic oligonucleotide
cgcuaacgucaggaagcgg

SEQ ID NO: 2449004 - RNA, 19 nt, Artificial Sequence
  Description of Artificial Sequence: Synthetic oligonucleotide
gacgaccccuggguuccgu

SEQ ID NO: 2449005 - RNA, 19 nt, Artificial Sequence
  Description of Artificial Sequence: Synthetic oligonucleotide
ggagcgggguccucgcguu

SEQ ID NO: 2449006 - RNA, 19 nt, Artificial Sequence
  Description of Artificial Sequence: Synthetic oligonucleotide
gcccaaugccaggcacagc

SEQ ID NO: 2449007 - RNA, 19 nt, Artificial Sequence
  Description of Artificial Sequence: Synthetic oligonucleotide
gcuugcggaugcggaucac

SEQ ID NO: 2449008 - RNA, 19 nt, Artificial Sequence
  Description of Artificial Sequence: Synthetic oligonucleotide
gcacggcgcacggccgcgg

SEQ ID NO: 2449009 - RNA, 19 nt, Artificial Sequence
  Description of Artificial Sequence: Synthetic oligonucleotide
aggcggcgugcagacgcuu

SEQ ID NO: 2449010 - RNA, 19 nt, Artificial Sequence
  Description of Artificial Sequence: Synthetic oligonucleotide
ccccuggguuccgucgggc

SEQ ID NO: 2449011 - RNA, 19 nt, Artificial Sequence
  Description of Artificial Sequence: Synthetic oligonucleotide
gcugcacgugcggcccagc

SEQ ID NO: 2449012 - RNA, 19 nt, Artificial Sequence
  Description of Artificial Sequence: Synthetic oligonucleotide
ggccgccggucuguuggug

SEQ ID NO: 2449013 - RNA, 19 nt, Artificial Sequence
  Description of Artificial Sequence: Synthetic oligonucleotide
gcacggccgcggguucacg

SEQ ID NO: 2449014 - RNA, 19 nt, Artificial Sequence
  Description of Artificial Sequence: Synthetic oligonucleotide
ccgcaggccgcggcgggcc

SEQ ID NO: 2449015 - RNA, 19 nt, Artificial Sequence
  Description of Artificial Sequence: Synthetic oligonucleotide
gggcaaccgcagccagcuc

SEQ ID NO: 2449016 - RNA, 19 nt, Artificial Sequence
  Description of Artificial Sequence: Synthetic oligonucleotide
cgggacgagggcgcauccc

SEQ ID NO: 2449017 - RNA, 19 nt, Artificial Sequence
  Description of Artificial Sequence: Synthetic oligonucleotide
ggccgcggguucacguaga

SEQ ID NO: 2449018 - RNA, 19 nt, Artificial Sequence
  Description of Artificial Sequence: Synthetic oligonucleotide
cgacgcgaucuccgccacc

SEQ ID NO: 2449019 - RNA, 19 nt, Artificial Sequence
  Description of Artificial Sequence: Synthetic oligonucleotide
ccaccacucugggcacggc

SEQ ID NO: 2449020 - RNA, 19 nt, Artificial Sequence
  Description of Artificial Sequence: Synthetic oligonucleotide
ccgccggucuguuggugaa

SEQ ID NO: 2449021 - RNA, 19 nt, Artificial Sequence
  Description of Artificial Sequence: Synthetic oligonucleotide
gcgggguccucgcguucuc

SEQ ID NO: 2449022 - RNA, 19 nt, Artificial Sequence
  Description of Artificial Sequence: Synthetic oligonucleotide
cgcgcaccgucccguuaag

SEQ ID NO: 2449023 - RNA, 19 nt, Artificial Sequence
  Description of Artificial Sequence: Synthetic oligonucleotide
gcgggccgccggucuguug

SEQ ID NO: 2449024 - RNA, 19 nt, Artificial Sequence
  Description of Artificial Sequence: Synthetic oligonucleotide
cgcgggacgagggcgcauc

SEQ ID NO: 2449025 - RNA, 19 nt, Artificial Sequence
  Description of Artificial Sequence: Synthetic oligonucleotide
cgagacagcacgaguucuu

SEQ ID NO: 2449026 - RNA, 19 nt, Artificial Sequence
  Description of Artificial Sequence: Synthetic oligonucleotide
gcaucccggcugaggcuga

SEQ ID NO: 2449027 - RNA, 19 nt, Artificial Sequence
  Description of Artificial Sequence: Synthetic oligonucleotide
ccgacuugcuguugacauu

SEQ ID NO: 2449028 - RNA, 19 nt, Artificial Sequence
  Description of Artificial Sequence: Synthetic oligonucleotide
ggaucggaacgaggguauu

SEQ ID NO: 2449029 - RNA, 19 nt, Artificial Sequence
  Description of Artificial Sequence: Synthetic oligonucleotide
cgccggucuguuggugaag

SEQ ID NO: 2449030 - RNA, 19 nt, Artificial Sequence
  Description of Artificial Sequence: Synthetic oligonucleotide
cggcgugcagacgcuucac

SEQ ID NO: 2449031 - RNA, 19 nt, Artificial Sequence
  Description of Artificial Sequence: Synthetic oligonucleotide
cacgugcggcccagcccgu

SEQ ID NO: 2449032 - RNA, 19 nt, Artificial Sequence
  Description of Artificial Sequence: Synthetic oligonucleotide
ccggacuggucugccagcu

SEQ ID NO: 2449033 - RNA, 19 nt, Artificial Sequence
  Description of Artificial Sequence: Synthetic oligonucleotide
cgggcgaagucggucaccu

SEQ ID NO: 2449034 - RNA, 19 nt, Artificial Sequence
  Description of Artificial Sequence: Synthetic oligonucleotide
gcgcacggccgcggguuca

SEQ ID NO: 2449035 - RNA, 19 nt, Artificial Sequence
  Description of Artificial Sequence: Synthetic oligonucleotide
cgcacggccgcggguucac

SEQ ID NO: 2449036 - RNA, 19 nt, Artificial Sequence
  Description of Artificial Sequence: Synthetic oligonucleotide
ccgucccguuaagguacuc

SEQ ID NO: 2449037 - RNA, 19 nt, Artificial Sequence
  Description of Artificial Sequence: Synthetic oligonucleotide
cgacgaccccuggguuccg

SEQ ID NO: 2449038 - RNA, 19 nt, Artificial Sequence
  Description of Artificial Sequence: Synthetic oligonucleotide
ggguuccgucgggcgaagu

SEQ ID NO: 2449039 - RNA, 19 nt, Artificial Sequence
  Description of Artificial Sequence: Synthetic oligonucleotide
cgccaccgacuugcuguug

SEQ ID NO: 2449040 - RNA, 19 nt, Artificial Sequence
  Description of Artificial Sequence: Synthetic oligonucleotide
ccgcagccagcucuucuuu

SEQ ID NO: 2449041 - RNA, 19 nt, Artificial Sequence
  Description of Artificial Sequence: Synthetic oligonucleotide
gcccguuguggaggacgcu

SEQ ID NO: 2449042 - RNA, 19 nt, Artificial Sequence
  Description of Artificial Sequence: Synthetic oligonucleotide
cgacccaaggcugguucuu

SEQ ID NO: 2449043 - RNA, 19 nt, Artificial Sequence
  Description of Artificial Sequence: Synthetic oligonucleotide
ccccgauggugggcuccaa

SEQ ID NO: 2449044 - RNA, 19 nt, Artificial Sequence
  Description of Artificial Sequence: Synthetic oligonucleotide
ggcgggccgccggucuguu

SEQ ID NO: 2449045 - RNA, 19 nt, Artificial Sequence
  Description of Artificial Sequence: Synthetic oligonucleotide
cggcgcacggccgcggguu

SEQ ID NO: 2449046 - RNA, 19 nt, Artificial Sequence
  Description of Artificial Sequence: Synthetic oligonucleotide
cggcgggccgccggucugu

SEQ ID NO: 2449047 - RNA, 19 nt, Artificial Sequence
  Description of Artificial Sequence: Synthetic oligonucleotide
ccgcgggacgagggcgcau

SEQ ID NO: 2449048 - RNA, 19 nt, Artificial Sequence
  Description of Artificial Sequence: Synthetic oligonucleotide
auuaaugagacccagaauc

SEQ ID NO: 2449049 - RNA, 19 nt, Artificial Sequence
  Description of Artificial Sequence: Synthetic oligonucleotide
aaaaguuaauuaaugagac

SEQ ID NO: 2449050 - RNA, 19 nt, Artificial Sequence
  Description of Artificial Sequence: Synthetic oligonucleotide
uguccaauacccaucaugg

SEQ ID NO: 2449051 - RNA, 19 nt, Artificial Sequence
  Description of Artificial Sequence: Synthetic oligonucleotide
  modified_base (10)..(10): a, c, u, g, unknown or other
aacacuggcncuugacacc

SEQ ID NO: 2449052 - RNA, 19 nt, Artificial Sequence
  Description of Artificial Sequence: Synthetic oligonucleotide
uccaauacccaucaugggg

SEQ ID NO: 2449053 - RNA, 19 nt, Artificial Sequence
  Description of Artificial Sequence: Synthetic oligonucleotide
uaauuaaugagacccagaa

SEQ ID NO: 2449054 - RNA, 19 nt, Artificial Sequence
  Description of Artificial Sequence: Synthetic oligonucleotide
aauuccauggaagaagaag

SEQ ID NO: 2449055 - RNA, 19 nt, Artificial Sequence
  Description of Artificial Sequence: Synthetic oligonucleotide
uggugagugaggcugaggg

SEQ ID NO: 2449056 - RNA, 19 nt, Artificial Sequence
  Description of Artificial Sequence: Synthetic oligonucleotide
gaaggagcggaccauaucc

SEQ ID NO: 2449057 - RNA, 19 nt, Artificial Sequence
  Description of Artificial Sequence: Synthetic oligonucleotide
uuugaggaggcuuuggugu

SEQ ID NO: 2449058 - RNA, 19 nt, Artificial Sequence
  Description of Artificial Sequence: Synthetic oligonucleotide
aaucuuugucgggaaagcc

SEQ ID NO: 2449059 - RNA, 19 nt, Artificial Sequence
  Description of Artificial Sequence: Synthetic oligonucleotide
gauccuauagugaugggag

SEQ ID NO: 2449060 - RNA, 19 nt, Artificial Sequence
  Description of Artificial Sequence: Synthetic oligonucleotide
uuaucuucgugcccaaaag

SEQ ID NO: 2449061 - RNA, 19 nt, Artificial Sequence
  Description of Artificial Sequence: Synthetic oligonucleotide
aagccacacaauuggaauc

SEQ ID NO: 2449062 - RNA, 19 nt, Artificial Sequence
  Description of Artificial Sequence: Synthetic oligonucleotide
aagaagaagccacacaauu

SEQ ID NO: 2449063 - RNA, 19 nt, Artificial Sequence
  Description of Artificial Sequence: Synthetic oligonucleotide
  modified_base (12)..(12): a, c, u, g, unknown or other
uuaacacuggcncuugaca

SEQ ID NO: 2449064 - RNA, 19 nt, Artificial Sequence
  Description of Artificial Sequence: Synthetic oligonucleotide
uguacuuccagagagcaac

SEQ ID NO: 2449065 - RNA, 19 nt, Artificial Sequence
  Description of Artificial Sequence: Synthetic oligonucleotide
aaagauuagcggcagccga

SEQ ID NO: 2449066 - RNA, 19 nt, Artificial Sequence
  Description of Artificial Sequence: Synthetic oligonucleotide
uuaaugagacccagaaucu

SEQ ID NO: 2449067 - RNA, 19 nt, Artificial Sequence
  Description of Artificial Sequence: Synthetic oligonucleotide
ugcccaaaagagacgagcg

SEQ ID NO: 2449068 - RNA, 19 nt, Artificial Sequence
  Description of Artificial Sequence: Synthetic oligonucleotide
aaaagauuagcggcagccg

SEQ ID NO: 2449069 - RNA, 19 nt, Artificial Sequence
  Description of Artificial Sequence: Synthetic oligonucleotide
uuucuuuacaauccugggu

SEQ ID NO: 2449070 - RNA, 19 nt, Artificial Sequence
  Description of Artificial Sequence: Synthetic oligonucleotide
auacccaucauggggaacc

SEQ ID NO: 2449071 - RNA, 19 nt, Artificial Sequence
  Description of Artificial Sequence: Synthetic oligonucleotide
aaugagacccagaaucuuc

SEQ ID NO: 2449072 - RNA, 19 nt, Artificial Sequence
  Description of Artificial Sequence: Synthetic oligonucleotide
aguucuaugugguccucgc

SEQ ID NO: 2449073 - RNA, 19 nt, Artificial Sequence
  Description of Artificial Sequence: Synthetic oligonucleotide
aggggauggaauuccaugg

SEQ ID NO: 2449074 - RNA, 19 nt, Artificial Sequence
  Description of Artificial Sequence: Synthetic oligonucleotide
acuagaguuccugcgagcc

SEQ ID NO: 2449075 - RNA, 19 nt, Artificial Sequence
  Description of Artificial Sequence: Synthetic oligonucleotide
uggaauuccauggaagaag

SEQ ID NO: 2449076 - RNA, 19 nt, Artificial Sequence
  Description of Artificial Sequence: Synthetic oligonucleotide
acacaauuggaaucggaag

SEQ ID NO: 2449077 - RNA, 19 nt, Artificial Sequence
  Description of Artificial Sequence: Synthetic oligonucleotide
guuucuuuacaauccuggg

SEQ ID NO: 2449078 - RNA, 19 nt, Artificial Sequence
  Description of Artificial Sequence: Synthetic oligonucleotide
ucucacuagaguuccugcg

SEQ ID NO: 2449079 - RNA, 19 nt, Artificial Sequence
  Description of Artificial Sequence: Synthetic oligonucleotide
uucuaugugguccucgcga

SEQ ID NO: 2449080 - RNA, 19 nt, Artificial Sequence
  Description of Artificial Sequence: Synthetic oligonucleotide
aaagagacgagcguggaau

SEQ ID NO: 2449081 - RNA, 19 nt, Artificial Sequence
  Description of Artificial Sequence: Synthetic oligonucleotide
uguguggugagugaggcug

SEQ ID NO: 2449082 - RNA, 19 nt, Artificial Sequence
  Description of Artificial Sequence: Synthetic oligonucleotide
ugagcucaggauccuauag

SEQ ID NO: 2449083 - RNA, 19 nt, Artificial Sequence
  Description of Artificial Sequence: Synthetic oligonucleotide
cuucgugcccaaaagagac

SEQ ID NO: 2449084 - RNA, 19 nt, Artificial Sequence
  Description of Artificial Sequence: Synthetic oligonucleotide
aauuaaugagacccagaau

SEQ ID NO: 2449085 - RNA, 19 nt, Artificial Sequence
  Description of Artificial Sequence: Synthetic oligonucleotide
  modified_base (11)..(11): a, c, u, g, unknown or other
uaacacuggcncuugacac

SEQ ID NO: 2449086 - RNA, 19 nt, Artificial Sequence
  Description of Artificial Sequence: Synthetic oligonucleotide
uggaaucggaaguuuugcg

SEQ ID NO: 2449087 - RNA, 19 nt, Artificial Sequence
  Description of Artificial Sequence: Synthetic oligonucleotide
uccuauagugaugggaggg

SEQ ID NO: 2449088 - RNA, 19 nt, Artificial Sequence
  Description of Artificial Sequence: Synthetic oligonucleotide
uuccauggaagaagaagcc

SEQ ID NO: 2449089 - RNA, 19 nt, Artificial Sequence
  Description of Artificial Sequence: Synthetic oligonucleotide
ugcgugaggccauugcugg

SEQ ID NO: 2449090 - RNA, 19 nt, Artificial Sequence
  Description of Artificial Sequence: Synthetic oligonucleotide
uaucuucgugcccaaaaga

SEQ ID NO: 2449091 - RNA, 19 nt, Artificial Sequence
  Description of Artificial Sequence: Synthetic oligonucleotide
ucacuagaguuccugcgag

SEQ ID NO: 2449092 - RNA, 19 nt, Artificial Sequence
  Description of Artificial Sequence: Synthetic oligonucleotide
agagcaaccccggagagag

SEQ ID NO: 2449093 - RNA, 19 nt, Artificial Sequence
  Description of Artificial Sequence: Synthetic oligonucleotide
agcucaggauccuauagug

SEQ ID NO: 2449094 - RNA, 19 nt, Artificial Sequence
  Description of Artificial Sequence: Synthetic oligonucleotide
aucauggggaaccuuccuc

SEQ ID NO: 2449095 - RNA, 19 nt, Artificial Sequence
  Description of Artificial Sequence: Synthetic oligonucleotide
gacaccgucagccaugguc

SEQ ID NO: 2449096 - RNA, 19 nt, Artificial Sequence
  Description of Artificial Sequence: Synthetic oligonucleotide
acaggugagcucaggaucc

SEQ ID NO: 2449097 - RNA, 19 nt, Artificial Sequence
  Description of Artificial Sequence: Synthetic oligonucleotide
uuuacaauccugggugucc

SEQ ID NO: 2449098 - RNA, 19 nt, Artificial Sequence
  Description of Artificial Sequence: Synthetic oligonucleotide
cuugcggucuuugaggagg

SEQ ID NO: 2449099 - RNA, 19 nt, Artificial Sequence
  Description of Artificial Sequence: Synthetic oligonucleotide
  modified_base (5)..(5): a, c, u, g, unknown or other
uggcncuugacaccgucag

SEQ ID NO: 2449100 - RNA, 19 nt, Artificial Sequence
  Description of Artificial Sequence: Synthetic oligonucleotide
ucuucgugcccaaaagaga

SEQ ID NO: 2449101 - RNA, 19 nt, Artificial Sequence
  Description of Artificial Sequence: Synthetic oligonucleotide
ucuuugaggaggcuuuggu

SEQ ID NO: 2449102 - RNA, 19 nt, Artificial Sequence
  Description of Artificial Sequence: Synthetic oligonucleotide
agccgaaggaaucuuuguc

SEQ ID NO: 2449103 - RNA, 19 nt, Artificial Sequence
  Description of Artificial Sequence: Synthetic oligonucleotide
ucaaaggagaggcguggag

SEQ ID NO: 2449104 - RNA, 19 nt, Artificial Sequence
  Description of Artificial Sequence: Synthetic oligonucleotide
uggggagcuguucuuaucu

SEQ ID NO: 2449105 - RNA, 19 nt, Artificial Sequence
  Description of Artificial Sequence: Synthetic oligonucleotide
acugguguggcucugguuu

SEQ ID NO: 2449106 - RNA, 19 nt, Artificial Sequence
  Description of Artificial Sequence: Synthetic oligonucleotide
aaucuuccaccccagguua

SEQ ID NO: 2449107 - RNA, 19 nt, Artificial Sequence
  Description of Artificial Sequence: Synthetic oligonucleotide
ucauggggaaccuuccucu

SEQ ID NO: 2449108 - RNA, 19 nt, Artificial Sequence
  Description of Artificial Sequence: Synthetic oligonucleotide
accauauccagcagcaggg

SEQ ID NO: 2449109 - RNA, 19 nt, Artificial Sequence
  Description of Artificial Sequence: Synthetic oligonucleotide
cuguucuuaucuucgugcc

SEQ ID NO: 2449110 - RNA, 19 nt, Artificial Sequence
  Description of Artificial Sequence: Synthetic oligonucleotide
uggaaugcaguggaguuug

SEQ ID NO: 2449111 - RNA, 19 nt, Artificial Sequence
  Description of Artificial Sequence: Synthetic oligonucleotide
agccacacaauuggaaucg

SEQ ID NO: 2449112 - RNA, 19 nt, Artificial Sequence
  Description of Artificial Sequence: Synthetic oligonucleotide
uggaagaagaagccacaca

SEQ ID NO: 2449113 - RNA, 19 nt, Artificial Sequence
  Description of Artificial Sequence: Synthetic oligonucleotide
cuguccaauacccaucaug

SEQ ID NO: 2449114 - RNA, 19 nt, Artificial Sequence
  Description of Artificial Sequence: Synthetic oligonucleotide
gaaucggaaguuuugcgaa

SEQ ID NO: 2449115 - RNA, 19 nt, Artificial Sequence
  Description of Artificial Sequence: Synthetic oligonucleotide
aagagacgagcguggaaug

SEQ ID NO: 2449116 - RNA, 19 nt, Artificial Sequence
  Description of Artificial Sequence: Synthetic oligonucleotide
aucuucgugcccaaaagag

SEQ ID NO: 2449117 - RNA, 19 nt, Artificial Sequence
  Description of Artificial Sequence: Synthetic oligonucleotide
ucuggugccgcuuccucag

SEQ ID NO: 2449118 - RNA, 19 nt, Artificial Sequence
  Description of Artificial Sequence: Synthetic oligonucleotide
uccaaggaaggcugcaggc

SEQ ID NO: 2449119 - RNA, 19 nt, Artificial Sequence
  Description of Artificial Sequence: Synthetic oligonucleotide
uuggaaucggaaguuuugc

SEQ ID NO: 2449120 - RNA, 19 nt, Artificial Sequence
  Description of Artificial Sequence: Synthetic oligonucleotide
uucuggaucugugugguga

SEQ ID NO: 2449121 - RNA, 19 nt, Artificial Sequence
  Description of Artificial Sequence: Synthetic oligonucleotide
  modified_base (7)..(7): a, c, u, g, unknown or other
acuggcncuugacaccguc

SEQ ID NO: 2449122 - RNA, 19 nt, Artificial Sequence
  Description of Artificial Sequence: Synthetic oligonucleotide
auggggaaccuuccucugc

SEQ ID NO: 2449123 - RNA, 19 nt, Artificial Sequence
  Description of Artificial Sequence: Synthetic oligonucleotide
aaagccugccuuggaggcc

SEQ ID NO: 2449124 - RNA, 19 nt, Artificial Sequence
  Description of Artificial Sequence: Synthetic oligonucleotide
auuagcggcagccgaagga

SEQ ID NO: 2449125 - RNA, 19 nt, Artificial Sequence
  Description of Artificial Sequence: Synthetic oligonucleotide
agcaaccccggagagagcg

SEQ ID NO: 2449126 - RNA, 19 nt, Artificial Sequence
  Description of Artificial Sequence: Synthetic oligonucleotide
uucgugcccaaaagagacg

SEQ ID NO: 2449127 - RNA, 19 nt, Artificial Sequence
  Description of Artificial Sequence: Synthetic oligonucleotide
gaaucuuugucgggaaagc

SEQ ID NO: 2449128 - RNA, 19 nt, Artificial Sequence
  Description of Artificial Sequence: Synthetic oligonucleotide
agaagaagccacacaauug

SEQ ID NO: 2449129 - RNA, 19 nt, Artificial Sequence
  Description of Artificial Sequence: Synthetic oligonucleotide
auccuauagugaugggagg

SEQ ID NO: 2449130 - RNA, 19 nt, Artificial Sequence
  Description of Artificial Sequence: Synthetic oligonucleotide
gaaggaaucuuugucggga

SEQ ID NO: 2449131 - RNA, 19 nt, Artificial Sequence
  Description of Artificial Sequence: Synthetic oligonucleotide
aaaagagacgagcguggaa

SEQ ID NO: 2449132 - RNA, 19 nt, Artificial Sequence
  Description of Artificial Sequence: Synthetic oligonucleotide
aggcgauguacuuccagag

SEQ ID NO: 2449133 - RNA, 19 nt, Artificial Sequence
  Description of Artificial Sequence: Synthetic oligonucleotide
gacccagaaucuuccaccc

SEQ ID NO: 2449134 - RNA, 19 nt, Artificial Sequence
  Description of Artificial Sequence: Synthetic oligonucleotide
uuccagagagcaaccccgg

SEQ ID NO: 2449135 - RNA, 19 nt, Artificial Sequence
  Description of Artificial Sequence: Synthetic oligonucleotide
gaggggaacacacacccuc

SEQ ID NO: 2449136 - RNA, 19 nt, Artificial Sequence
  Description of Artificial Sequence: Synthetic oligonucleotide
ugguuucuuuacaauccug

SEQ ID NO: 2449137 - RNA, 19 nt, Artificial Sequence
  Description of Artificial Sequence: Synthetic oligonucleotide
aauacccaucauggggaac

SEQ ID NO: 2449138 - RNA, 19 nt, Artificial Sequence
  Description of Artificial Sequence: Synthetic oligonucleotide
gcuguucuuaucuucgugc

SEQ ID NO: 2449139 - RNA, 19 nt, Artificial Sequence
  Description of Artificial Sequence: Synthetic oligonucleotide
ggaaagccugccuuggagg

SEQ ID NO: 2449140 - RNA, 19 nt, Artificial Sequence
  Description of Artificial Sequence: Synthetic oligonucleotide
gaggccauugcugggagcc

SEQ ID NO: 2449141 - RNA, 19 nt, Artificial Sequence
  Description of Artificial Sequence: Synthetic oligonucleotide
gauccacugacucgaagga

SEQ ID NO: 2449142 - RNA, 19 nt, Artificial Sequence
  Description of Artificial Sequence: Synthetic oligonucleotide
agagacgagcguggaaugc

SEQ ID NO: 2449143 - RNA, 19 nt, Artificial Sequence
  Description of Artificial Sequence: Synthetic oligonucleotide
gagccaagcucacagguga

SEQ ID NO: 2449144 - RNA, 19 nt, Artificial Sequence
  Description of Artificial Sequence: Synthetic oligonucleotide
  modified_base (9)..(9): a, c, u, g, unknown or other
acacuggcncuugacaccg

SEQ ID NO: 2449145 - RNA, 19 nt, Artificial Sequence
  Description of Artificial Sequence: Synthetic oligonucleotide
ucuuuacaauccugggugu

SEQ ID NO: 2449146 - RNA, 19 nt, Artificial Sequence
  Description of Artificial Sequence: Synthetic oligonucleotide
acagcaguucuaugugguc

SEQ ID NO: 2449147 - RNA, 19 nt, Artificial Sequence
  Description of Artificial Sequence: Synthetic oligonucleotide
gauuagcggcagccgaagg

SEQ ID NO: 2449148 - RNA, 19 nt, Artificial Sequence
  Description of Artificial Sequence: Synthetic oligonucleotide
aaucggaaguuuugcgaaa

SEQ ID NO: 2449149 - RNA, 19 nt, Artificial Sequence
  Description of Artificial Sequence: Synthetic oligonucleotide
cucgcgauccacugacucg

SEQ ID NO: 2449150 - RNA, 19 nt, Artificial Sequence
  Description of Artificial Sequence: Synthetic oligonucleotide
gaucuguguggugagugag

SEQ ID NO: 2449151 - RNA, 19 nt, Artificial Sequence
  Description of Artificial Sequence: Synthetic oligonucleotide
uggucaaaggagaggcgug

SEQ ID NO: 2449152 - RNA, 19 nt, Artificial Sequence
  Description of Artificial Sequence: Synthetic oligonucleotide
agagcguccucucacuaga

SEQ ID NO: 2449153 - RNA, 19 nt, Artificial Sequence
  Description of Artificial Sequence: Synthetic oligonucleotide
aaggaaucuuugucgggaa

SEQ ID NO: 2449154 - RNA, 19 nt, Artificial Sequence
  Description of Artificial Sequence: Synthetic oligonucleotide
guuccugcgagccaagcuc

SEQ ID NO: 2449155 - RNA, 19 nt, Artificial Sequence
  Description of Artificial Sequence: Synthetic oligonucleotide
cuugacaccgucagccaug

SEQ ID NO: 2449156 - RNA, 19 nt, Artificial Sequence
  Description of Artificial Sequence: Synthetic oligonucleotide
gagcggaccauauccagca

SEQ ID NO: 2449157 - RNA, 19 nt, Artificial Sequence
  Description of Artificial Sequence: Synthetic oligonucleotide
gagagcguccucucacuag

SEQ ID NO: 2449158 - RNA, 19 nt, Artificial Sequence
  Description of Artificial Sequence: Synthetic oligonucleotide
cauggucaaaggagaggcg

SEQ ID NO: 2449159 - RNA, 19 nt, Artificial Sequence
  Description of Artificial Sequence: Synthetic oligonucleotide
cuccaaggaaggcugcagg

SEQ ID NO: 2449160 - RNA, 19 nt, Artificial Sequence
  Description of Artificial Sequence: Synthetic oligonucleotide
uccauggaagaagaagcca

SEQ ID NO: 2449161 - RNA, 19 nt, Artificial Sequence
  Description of Artificial Sequence: Synthetic oligonucleotide
cucucacuagaguuccugc

SEQ ID NO: 2449162 - RNA, 19 nt, Artificial Sequence
  Description of Artificial Sequence: Synthetic oligonucleotide
agcaguucuaugugguccu

SEQ ID NO: 2449163 - RNA, 19 nt, Artificial Sequence
  Description of Artificial Sequence: Synthetic oligonucleotide
uggaucuguguggugagug

SEQ ID NO: 2449164 - RNA, 19 nt, Artificial Sequence
  Description of Artificial Sequence: Synthetic oligonucleotide
gaggcgauguacuuccaga

SEQ ID NO: 2449165 - RNA, 19 nt, Artificial Sequence
  Description of Artificial Sequence: Synthetic oligonucleotide
aguuaauuaaugagaccca

SEQ ID NO: 2449166 - RNA, 19 nt, Artificial Sequence
  Description of Artificial Sequence: Synthetic oligonucleotide
agagagcaaccccggagag

SEQ ID NO: 2449167 - RNA, 19 nt, Artificial Sequence
  Description of Artificial Sequence: Synthetic oligonucleotide
aauuggaaucggaaguuuu

SEQ ID NO: 2449168 - RNA, 19 nt, Artificial Sequence
  Description of Artificial Sequence: Synthetic oligonucleotide
cacacaauuggaaucggaa

SEQ ID NO: 2449169 - RNA, 19 nt, Artificial Sequence
  Description of Artificial Sequence: Synthetic oligonucleotide
acgagcguggaaugcagug

SEQ ID NO: 2449170 - RNA, 19 nt, Artificial Sequence
  Description of Artificial Sequence: Synthetic oligonucleotide
agaggcgauguacuuccag

SEQ ID NO: 2449171 - RNA, 19 nt, Artificial Sequence
  Description of Artificial Sequence: Synthetic oligonucleotide
uugacaccgucagccaugg

SEQ ID NO: 2449172 - RNA, 19 nt, Artificial Sequence
  Description of Artificial Sequence: Synthetic oligonucleotide
guucuaugugguccucgcg

SEQ ID NO: 2449173 - RNA, 19 nt, Artificial Sequence
  Description of Artificial Sequence: Synthetic oligonucleotide
guccaauacccaucauggg

SEQ ID NO: 2449174 - RNA, 19 nt, Artificial Sequence
  Description of Artificial Sequence: Synthetic oligonucleotide
auggucaaaggagaggcgu

SEQ ID NO: 2449175 - RNA, 19 nt, Artificial Sequence
  Description of Artificial Sequence: Synthetic oligonucleotide
ccaaaagagacgagcgugg

SEQ ID NO: 2449176 - RNA, 19 nt, Artificial Sequence
  Description of Artificial Sequence: Synthetic oligonucleotide
cagcaguucuauguggucc

SEQ ID NO: 2449177 - RNA, 19 nt, Artificial Sequence
  Description of Artificial Sequence: Synthetic oligonucleotide
ggaaucuuugucgggaaag

SEQ ID NO: 2449178 - RNA, 19 nt, Artificial Sequence
  Description of Artificial Sequence: Synthetic oligonucleotide
ucuaugugguccucgcgau

SEQ ID NO: 2449179 - RNA, 19 nt, Artificial Sequence
  Description of Artificial Sequence: Synthetic oligonucleotide
uuccugcgagccaagcuca

SEQ ID NO: 2449180 - RNA, 19 nt, Artificial Sequence
  Description of Artificial Sequence: Synthetic oligonucleotide
ucgugcccaaaagagacga

SEQ ID NO: 2449181 - RNA, 19 nt, Artificial Sequence
  Description of Artificial Sequence: Synthetic oligonucleotide
guuugcagaggcgauguac

SEQ ID NO: 2449182 - RNA, 19 nt, Artificial Sequence
  Description of Artificial Sequence: Synthetic oligonucleotide
accccagguuaacacuggc

SEQ ID NO: 2449183 - RNA, 19 nt, Artificial Sequence
  Description of Artificial Sequence: Synthetic oligonucleotide
ugggagguggggacagggg

SEQ ID NO: 2449184 - RNA, 19 nt, Artificial Sequence
  Description of Artificial Sequence: Synthetic oligonucleotide
cugcgagccaagcucacag

SEQ ID NO: 2449185 - RNA, 19 nt, Artificial Sequence
  Description of Artificial Sequence: Synthetic oligonucleotide
gcagaggcgauguacuucc

SEQ ID NO: 2449186 - RNA, 19 nt, Artificial Sequence
  Description of Artificial Sequence: Synthetic oligonucleotide
gacucgaaggagcggacca

SEQ ID NO: 2449187 - RNA, 19 nt, Artificial Sequence
  Description of Artificial Sequence: Synthetic oligonucleotide
acccagaaucuuccacccc

SEQ ID NO: 2449188 - RNA, 19 nt, Artificial Sequence
  Description of Artificial Sequence: Synthetic oligonucleotide
auauccagcagcaggggcu

SEQ ID NO: 2449189 - RNA, 19 nt, Artificial Sequence
  Description of Artificial Sequence: Synthetic oligonucleotide
aggagcggaccauauccag

SEQ ID NO: 2449190 - RNA, 19 nt, Artificial Sequence
  Description of Artificial Sequence: Synthetic oligonucleotide
aguuccugcgagccaagcu

SEQ ID NO: 2449191 - RNA, 19 nt, Artificial Sequence
  Description of Artificial Sequence: Synthetic oligonucleotide
ggaaucggaaguuuugcga

SEQ ID NO: 2449192 - RNA, 19 nt, Artificial Sequence
  Description of Artificial Sequence: Synthetic oligonucleotide
  modified_base (13)..(13): a, c, u, g, unknown or other
guuaacacuggcncuugac

SEQ ID NO: 2449193 - RNA, 19 nt, Artificial Sequence
  Description of Artificial Sequence: Synthetic oligonucleotide
  modified_base (3)..(3): a, c, u, g, unknown or other
gcncuugacaccgucagcc

SEQ ID NO: 2449194 - RNA, 19 nt, Artificial Sequence
  Description of Artificial Sequence: Synthetic oligonucleotide
uuugucgggaaagccugcc

SEQ ID NO: 2449195 - RNA, 19 nt, Artificial Sequence
  Description of Artificial Sequence: Synthetic oligonucleotide
ugcgagccaagcucacagg

SEQ ID NO: 2449196 - RNA, 19 nt, Artificial Sequence
  Description of Artificial Sequence: Synthetic oligonucleotide
aucuuugucgggaaagccu

SEQ ID NO: 2449197 - RNA, 19 nt, Artificial Sequence
  Description of Artificial Sequence: Synthetic oligonucleotide
aggccuugcggucuuugag

SEQ ID NO: 2449198 - RNA, 19 nt, Artificial Sequence
  Description of Artificial Sequence: Synthetic oligonucleotide
cuuaucuucgugcccaaaa

SEQ ID NO: 2449199 - RNA, 19 nt, Artificial Sequence
  Description of Artificial Sequence: Synthetic oligonucleotide
ucuccaaggaaggcugcag

SEQ ID NO: 2449200 - RNA, 19 nt, Artificial Sequence
  Description of Artificial Sequence: Synthetic oligonucleotide
caucuguccaauacccauc

SEQ ID NO: 2449201 - RNA, 19 nt, Artificial Sequence
  Description of Artificial Sequence: Synthetic oligonucleotide
cacaauuggaaucggaagu

SEQ ID NO: 2449202 - RNA, 19 nt, Artificial Sequence
  Description of Artificial Sequence: Synthetic oligonucleotide
agcaggggcucuuccuugg

SEQ ID NO: 2449203 - RNA, 19 nt, Artificial Sequence
  Description of Artificial Sequence: Synthetic oligonucleotide
ugucgggaaagccugccuu

SEQ ID NO: 2449204 - RNA, 19 nt, Artificial Sequence
  Description of Artificial Sequence: Synthetic oligonucleotide
cauugcugggagccggagg

SEQ ID NO: 2449205 - RNA, 19 nt, Artificial Sequence
  Description of Artificial Sequence: Synthetic oligonucleotide
gagcguggaaugcagugga

SEQ ID NO: 2449206 - RNA, 19 nt, Artificial Sequence
  Description of Artificial Sequence: Synthetic oligonucleotide
uuacaauccuggguguccu

SEQ ID NO: 2449207 - RNA, 19 nt, Artificial Sequence
  Description of Artificial Sequence: Synthetic oligonucleotide
  modified_base (18)..(18): a, c, u, g, unknown or other
cccagguuaacacuggcnc

SEQ ID NO: 2449208 - RNA, 19 nt, Artificial Sequence
  Description of Artificial Sequence: Synthetic oligonucleotide
gugcccaaaagagacgagc

SEQ ID NO: 2449209 - RNA, 19 nt, Artificial Sequence
  Description of Artificial Sequence: Synthetic oligonucleotide
ucgggaaagccugccuugg

SEQ ID NO: 2449210 - RNA, 19 nt, Artificial Sequence
  Description of Artificial Sequence: Synthetic oligonucleotide
acaauuggaaucggaaguu

SEQ ID NO: 2449211 - RNA, 19 nt, Artificial Sequence
  Description of Artificial Sequence: Synthetic oligonucleotide
cauggaagaagaagccaca

SEQ ID NO: 2449212 - RNA, 19 nt, Artificial Sequence
  Description of Artificial Sequence: Synthetic oligonucleotide
ggccuugcggucuuugagg

SEQ ID NO: 2449213 - RNA, 19 nt, Artificial Sequence
  Description of Artificial Sequence: Synthetic oligonucleotide
ucgcgauccacugacucga

SEQ ID NO: 2449214 - RNA, 19 nt, Artificial Sequence
  Description of Artificial Sequence: Synthetic oligonucleotide
ggaggaggggaacacacac

SEQ ID NO: 2449215 - RNA, 19 nt, Artificial Sequence
  Description of Artificial Sequence: Synthetic oligonucleotide
acaccgucagccaugguca

SEQ ID NO: 2449216 - RNA, 19 nt, Artificial Sequence
  Description of Artificial Sequence: Synthetic oligonucleotide
aagaagccacacaauugga

SEQ ID NO: 2449217 - RNA, 19 nt, Artificial Sequence
  Description of Artificial Sequence: Synthetic oligonucleotide
cugcgugaggccauugcug

SEQ ID NO: 2449218 - RNA, 19 nt, Artificial Sequence
  Description of Artificial Sequence: Synthetic oligonucleotide
cgauccacugacucgaagg

SEQ ID NO: 2449219 - RNA, 19 nt, Artificial Sequence
  Description of Artificial Sequence: Synthetic oligonucleotide
ugccgcuuccucagcaucu

SEQ ID NO: 2449220 - RNA, 19 nt, Artificial Sequence
  Description of Artificial Sequence: Synthetic oligonucleotide
uacuuccagagagcaaccc

SEQ ID NO: 2449221 - RNA, 19 nt, Artificial Sequence
  Description of Artificial Sequence: Synthetic oligonucleotide
cucacuagaguuccugcga

SEQ ID NO: 2449222 - RNA, 19 nt, Artificial Sequence
  Description of Artificial Sequence: Synthetic oligonucleotide
aagauuagcggcagccgaa

SEQ ID NO: 2449223 - RNA, 19 nt, Artificial Sequence
  Description of Artificial Sequence: Synthetic oligonucleotide
agauuagcggcagccgaag

SEQ ID NO: 2449224 - RNA, 19 nt, Artificial Sequence
  Description of Artificial Sequence: Synthetic oligonucleotide
agggaccucuccaaggaag

SEQ ID NO: 2449225 - RNA, 19 nt, Artificial Sequence
  Description of Artificial Sequence: Synthetic oligonucleotide
aguggaguuugcagaggcg

SEQ ID NO: 2449226 - RNA, 19 nt, Artificial Sequence
  Description of Artificial Sequence: Synthetic oligonucleotide
uggaguuugcagaggcgau

SEQ ID NO: 2449227 - RNA, 19 nt, Artificial Sequence
  Description of Artificial Sequence: Synthetic oligonucleotide
gaaucuuccaccccagguu

SEQ ID NO: 2449228 - RNA, 19 nt, Artificial Sequence
  Description of Artificial Sequence: Synthetic oligonucleotide
cacuagaguuccugcgagc

SEQ ID NO: 2449229 - RNA, 19 nt, Artificial Sequence
  Description of Artificial Sequence: Synthetic oligonucleotide
gucgggaaagccugccuug

SEQ ID NO: 2449230 - RNA, 19 nt, Artificial Sequence
  Description of Artificial Sequence: Synthetic oligonucleotide
gggaaagccugccuuggag

SEQ ID NO: 2449231 - RNA, 19 nt, Artificial Sequence
  Description of Artificial Sequence: Synthetic oligonucleotide
uugcggucuuugaggaggc

SEQ ID NO: 2449232 - RNA, 19 nt, Artificial Sequence
  Description of Artificial Sequence: Synthetic oligonucleotide
gggacagcaguucuaugug

SEQ ID NO: 2449233 - RNA, 19 nt, Artificial Sequence
  Description of Artificial Sequence: Synthetic oligonucleotide
aaggagcggaccauaucca

SEQ ID NO: 2449234 - RNA, 19 nt, Artificial Sequence
  Description of Artificial Sequence: Synthetic oligonucleotide
aucuguguggugagugagg

SEQ ID NO: 2449235 - RNA, 19 nt, Artificial Sequence
  Description of Artificial Sequence: Synthetic oligonucleotide
uugucgggaaagccugccu

SEQ ID NO: 2449236 - RNA, 19 nt, Artificial Sequence
  Description of Artificial Sequence: Synthetic oligonucleotide
guggaguuugcagaggcga

SEQ ID NO: 2449237 - RNA, 19 nt, Artificial Sequence
  Description of Artificial Sequence: Synthetic oligonucleotide
guccucgcgauccacugac

SEQ ID NO: 2449238 - RNA, 19 nt, Artificial Sequence
  Description of Artificial Sequence: Synthetic oligonucleotide
cagaaucuuccaccccagg

SEQ ID NO: 2449239 - RNA, 19 nt, Artificial Sequence
  Description of Artificial Sequence: Synthetic oligonucleotide
ggaggcuuugguguucugg

SEQ ID NO: 2449240 - RNA, 19 nt, Artificial Sequence
  Description of Artificial Sequence: Synthetic oligonucleotide
aggauccuauagugauggg

SEQ ID NO: 2449241 - RNA, 19 nt, Artificial Sequence
  Description of Artificial Sequence: Synthetic oligonucleotide
ucgaaggagcggaccauau

SEQ ID NO: 2449242 - RNA, 19 nt, Artificial Sequence
  Description of Artificial Sequence: Synthetic oligonucleotide
uaaugagacccagaaucuu

SEQ ID NO: 2449243 - RNA, 19 nt, Artificial Sequence
  Description of Artificial Sequence: Synthetic oligonucleotide
aaccccggagagagcgucc

SEQ ID NO: 2449244 - RNA, 19 nt, Artificial Sequence
  Description of Artificial Sequence: Synthetic oligonucleotide
gaggaggggaacacacacc

SEQ ID NO: 2449245 - RNA, 19 nt, Artificial Sequence
  Description of Artificial Sequence: Synthetic oligonucleotide
ugacucgaaggagcggacc

SEQ ID NO: 2449246 - RNA, 19 nt, Artificial Sequence
  Description of Artificial Sequence: Synthetic oligonucleotide
cucaggauccuauagugau

SEQ ID NO: 2449247 - RNA, 19 nt, Artificial Sequence
  Description of Artificial Sequence: Synthetic oligonucleotide
ugacugguguggcucuggu

SEQ ID NO: 2449248 - RNA, 19 nt, Artificial Sequence
  Description of Artificial Sequence: Synthetic oligonucleotide
cuuuacaauccuggguguc

SEQ ID NO: 2449249 - RNA, 19 nt, Artificial Sequence
  Description of Artificial Sequence: Synthetic oligonucleotide
guccucucacuagaguucc

SEQ ID NO: 2449250 - RNA, 19 nt, Artificial Sequence
  Description of Artificial Sequence: Synthetic oligonucleotide
uccagagagcaaccccgga

SEQ ID NO: 2449251 - RNA, 19 nt, Artificial Sequence
  Description of Artificial Sequence: Synthetic oligonucleotide
ugcagaggcgauguacuuc

SEQ ID NO: 2449252 - RNA, 19 nt, Artificial Sequence
  Description of Artificial Sequence: Synthetic oligonucleotide
gucuuugaggaggcuuugg

SEQ ID NO: 2449253 - RNA, 19 nt, Artificial Sequence
  Description of Artificial Sequence: Synthetic oligonucleotide
ggaauuccauggaagaaga

SEQ ID NO: 2449254 - RNA, 19 nt, Artificial Sequence
  Description of Artificial Sequence: Synthetic oligonucleotide
ggagagagcguccucucac

SEQ ID NO: 2449255 - RNA, 19 nt, Artificial Sequence
  Description of Artificial Sequence: Synthetic oligonucleotide
uuccuuggggaggaugcug

SEQ ID NO: 2449256 - RNA, 19 nt, Artificial Sequence
  Description of Artificial Sequence: Synthetic oligonucleotide
cucacaggugagcucagga

SEQ ID NO: 2449257 - RNA, 19 nt, Artificial Sequence
  Description of Artificial Sequence: Synthetic oligonucleotide
gagacgagcguggaaugca

SEQ ID NO: 2449258 - RNA, 19 nt, Artificial Sequence
  Description of Artificial Sequence: Synthetic oligonucleotide
ccaauacccaucaugggga

SEQ ID NO: 2449259 - RNA, 19 nt, Artificial Sequence
  Description of Artificial Sequence: Synthetic oligonucleotide
cauggggaaccuuccucug

SEQ ID NO: 2449260 - RNA, 19 nt, Artificial Sequence
  Description of Artificial Sequence: Synthetic oligonucleotide
cugccuuggaggccuugcg

SEQ ID NO: 2449261 - RNA, 19 nt, Artificial Sequence
  Description of Artificial Sequence: Synthetic oligonucleotide
uugaggaggcuuugguguu

SEQ ID NO: 2449262 - RNA, 19 nt, Artificial Sequence
  Description of Artificial Sequence: Synthetic oligonucleotide
ggaggaugcuggcacuucc

SEQ ID NO: 2449263 - RNA, 19 nt, Artificial Sequence
  Description of Artificial Sequence: Synthetic oligonucleotide
uguggugagugaggcugag

SEQ ID NO: 2449264 - RNA, 19 nt, Artificial Sequence
  Description of Artificial Sequence: Synthetic oligonucleotide
aggaaucuuugucgggaaa

SEQ ID NO: 2449265 - RNA, 19 nt, Artificial Sequence
  Description of Artificial Sequence: Synthetic oligonucleotide
ggauccuauagugauggga

SEQ ID NO: 2449266 - RNA, 19 nt, Artificial Sequence
  Description of Artificial Sequence: Synthetic oligonucleotide
agcguccucucacuagagu

SEQ ID NO: 2449267 - RNA, 19 nt, Artificial Sequence
  Description of Artificial Sequence: Synthetic oligonucleotide
aucggaaguuuugcgaaaa

SEQ ID NO: 2449268 - RNA, 19 nt, Artificial Sequence
  Description of Artificial Sequence: Synthetic oligonucleotide
cccaaaagagacgagcgug

SEQ ID NO: 2449269 - RNA, 19 nt, Artificial Sequence
  Description of Artificial Sequence: Synthetic oligonucleotide
augcuggccuccagggacc

SEQ ID NO: 2449270 - RNA, 19 nt, Artificial Sequence
  Description of Artificial Sequence: Synthetic oligonucleotide
gagcucaggauccuauagu

SEQ ID NO: 2449271 - RNA, 19 nt, Artificial Sequence
  Description of Artificial Sequence: Synthetic oligonucleotide
gugagugaggcugagggcu

SEQ ID NO: 2449272 - RNA, 19 nt, Artificial Sequence
  Description of Artificial Sequence: Synthetic oligonucleotide
ccuauagugaugggagggg

SEQ ID NO: 2449273 - RNA, 19 nt, Artificial Sequence
  Description of Artificial Sequence: Synthetic oligonucleotide
ugaggccauugcugggagc

SEQ ID NO: 2449274 - RNA, 19 nt, Artificial Sequence
  Description of Artificial Sequence: Synthetic oligonucleotide
gugaggccauugcugggag

SEQ ID NO: 2449275 - RNA, 19 nt, Artificial Sequence
  Description of Artificial Sequence: Synthetic oligonucleotide
agcggcagccgaaggaauc

SEQ ID NO: 2449276 - RNA, 19 nt, Artificial Sequence
  Description of Artificial Sequence: Synthetic oligonucleotide
ccacugacucgaaggagcg

SEQ ID NO: 2449277 - RNA, 19 nt, Artificial Sequence
  Description of Artificial Sequence: Synthetic oligonucleotide
uuggggagcuguucuuauc

SEQ ID NO: 2449278 - RNA, 19 nt, Artificial Sequence
  Description of Artificial Sequence: Synthetic oligonucleotide
uauccagcagcaggggcuc

SEQ ID NO: 2449279 - RNA, 19 nt, Artificial Sequence
  Description of Artificial Sequence: Synthetic oligonucleotide
gggaccucuccaaggaagg

SEQ ID NO: 2449280 - RNA, 19 nt, Artificial Sequence
  Description of Artificial Sequence: Synthetic oligonucleotide
guacuuccagagagcaacc

SEQ ID NO: 2449281 - RNA, 19 nt, Artificial Sequence
  Description of Artificial Sequence: Synthetic oligonucleotide
uccugggagguggggacag

SEQ ID NO: 2449282 - RNA, 19 nt, Artificial Sequence
  Description of Artificial Sequence: Synthetic oligonucleotide
ugcuggcacuucccggccc

SEQ ID NO: 2449283 - RNA, 19 nt, Artificial Sequence
  Description of Artificial Sequence: Synthetic oligonucleotide
cugacucgaaggagcggac

SEQ ID NO: 2449284 - RNA, 19 nt, Artificial Sequence
  Description of Artificial Sequence: Synthetic oligonucleotide
agacgagcguggaaugcag

SEQ ID NO: 2449285 - RNA, 19 nt, Artificial Sequence
  Description of Artificial Sequence: Synthetic oligonucleotide
agagagcguccucucacua

SEQ ID NO: 2449286 - RNA, 19 nt, Artificial Sequence
  Description of Artificial Sequence: Synthetic oligonucleotide
ccaucauggggaaccuucc

SEQ ID NO: 2449287 - RNA, 19 nt, Artificial Sequence
  Description of Artificial Sequence: Synthetic oligonucleotide
gaguuugcagaggcgaugu

SEQ ID NO: 2449288 - RNA, 19 nt, Artificial Sequence
  Description of Artificial Sequence: Synthetic oligonucleotide
gccauggucaaaggagagg

SEQ ID NO: 2449289 - RNA, 19 nt, Artificial Sequence
  Description of Artificial Sequence: Synthetic oligonucleotide
agcggaccauauccagcag

SEQ ID NO: 2449290 - RNA, 19 nt, Artificial Sequence
  Description of Artificial Sequence: Synthetic oligonucleotide
cugguguggcucugguuuc

SEQ ID NO: 2449291 - RNA, 19 nt, Artificial Sequence
  Description of Artificial Sequence: Synthetic oligonucleotide
ucuguccaauacccaucau

SEQ ID NO: 2449292 - RNA, 19 nt, Artificial Sequence
  Description of Artificial Sequence: Synthetic oligonucleotide
gcggaccauauccagcagc

SEQ ID NO: 2449293 - RNA, 19 nt, Artificial Sequence
  Description of Artificial Sequence: Synthetic oligonucleotide
uugcagaggcgauguacuu

SEQ ID NO: 2449294 - RNA, 19 nt, Artificial Sequence
  Description of Artificial Sequence: Synthetic oligonucleotide
  modified_base (15)..(15): a, c, u, g, unknown or other
agguuaacacuggcncuug

SEQ ID NO: 2449295 - RNA, 19 nt, Artificial Sequence
  Description of Artificial Sequence: Synthetic oligonucleotide
agccggaggaggggaacac

SEQ ID NO: 2449296 - RNA, 19 nt, Artificial Sequence
  Description of Artificial Sequence: Synthetic oligonucleotide
gaggccuugcggucuuuga

SEQ ID NO: 2449297 - RNA, 19 nt, Artificial Sequence
  Description of Artificial Sequence: Synthetic oligonucleotide
  modified_base (14)..(14): a, c, u, g, unknown or other
gguuaacacuggcncuuga

SEQ ID NO: 2449298 - RNA, 19 nt, Artificial Sequence
  Description of Artificial Sequence: Synthetic oligonucleotide
ggacaggggauggaauucc

SEQ ID NO: 2449299 - RNA, 19 nt, Artificial Sequence
  Description of Artificial Sequence: Synthetic oligonucleotide
ggaguuugcagaggcgaug

SEQ ID NO: 2449300 - RNA, 19 nt, Artificial Sequence
  Description of Artificial Sequence: Synthetic oligonucleotide
caaaagagacgagcgugga

SEQ ID NO: 2449301 - RNA, 19 nt, Artificial Sequence
  Description of Artificial Sequence: Synthetic oligonucleotide
gaagaagaagccacacaau

SEQ ID NO: 2449302 - RNA, 19 nt, Artificial Sequence
  Description of Artificial Sequence: Synthetic oligonucleotide
  modified_base (6)..(6): a, c, u, g, unknown or other
cuggcncuugacaccguca

SEQ ID NO: 2449303 - RNA, 19 nt, Artificial Sequence
  Description of Artificial Sequence: Synthetic oligonucleotide
  modified_base (2)..(2): a, c, u, g, unknown or other
cncuugacaccgucagcca

SEQ ID NO: 2449304 - RNA, 19 nt, Artificial Sequence
  Description of Artificial Sequence: Synthetic oligonucleotide
ucuuaucuucgugcccaaa

SEQ ID NO: 2449305 - RNA, 19 nt, Artificial Sequence
  Description of Artificial Sequence: Synthetic oligonucleotide
  modified_base (4)..(4): a, c, u, g, unknown or other
ggcncuugacaccgucagc

SEQ ID NO: 2449306 - RNA, 19 nt, Artificial Sequence
  Description of Artificial Sequence: Synthetic oligonucleotide
ugugguccucgcgauccac

SEQ ID NO: 2449307 - RNA, 19 nt, Artificial Sequence
  Description of Artificial Sequence: Synthetic oligonucleotide
gaguuccugcgagccaagc

SEQ ID NO: 2449308 - RNA, 19 nt, Artificial Sequence
  Description of Artificial Sequence: Synthetic oligonucleotide
ugaggaggcuuugguguuc

SEQ ID NO: 2449309 - RNA, 19 nt, Artificial Sequence
  Description of Artificial Sequence: Synthetic oligonucleotide
ugggagccggaggagggga

SEQ ID NO: 2449310 - RNA, 19 nt, Artificial Sequence
  Description of Artificial Sequence: Synthetic oligonucleotide
ggggauggaauuccaugga

SEQ ID NO: 2449311 - RNA, 19 nt, Artificial Sequence
  Description of Artificial Sequence: Synthetic oligonucleotide
gagagagcguccucucacu

SEQ ID NO: 2449312 - RNA, 19 nt, Artificial Sequence
  Description of Artificial Sequence: Synthetic oligonucleotide
guggugagugaggcugagg

SEQ ID NO: 2449313 - RNA, 19 nt, Artificial Sequence
  Description of Artificial Sequence: Synthetic oligonucleotide
gacaggggauggaauucca

SEQ ID NO: 2449314 - RNA, 19 nt, Artificial Sequence
  Description of Artificial Sequence: Synthetic oligonucleotide
gggauggaauuccauggaa

SEQ ID NO: 2449315 - RNA, 19 nt, Artificial Sequence
  Description of Artificial Sequence: Synthetic oligonucleotide
uccucucacuagaguuccu

SEQ ID NO: 2449316 - RNA, 19 nt, Artificial Sequence
  Description of Artificial Sequence: Synthetic oligonucleotide
ggagcggaccauauccagc

SEQ ID NO: 2449317 - RNA, 19 nt, Artificial Sequence
  Description of Artificial Sequence: Synthetic oligonucleotide
cugguuucuuuacaauccu

SEQ ID NO: 2449318 - RNA, 19 nt, Artificial Sequence
  Description of Artificial Sequence: Synthetic oligonucleotide
ucccggcccugacuggugu

SEQ ID NO: 2449319 - RNA, 19 nt, Artificial Sequence
  Description of Artificial Sequence: Synthetic oligonucleotide
ggggcguguggguuggcag

SEQ ID NO: 2449320 - RNA, 19 nt, Artificial Sequence
  Description of Artificial Sequence: Synthetic oligonucleotide
cacugacucgaaggagcgg

SEQ ID NO: 2449321 - RNA, 19 nt, Artificial Sequence
  Description of Artificial Sequence: Synthetic oligonucleotide
cccagaaucuuccacccca

SEQ ID NO: 2449322 - RNA, 19 nt, Artificial Sequence
  Description of Artificial Sequence: Synthetic oligonucleotide
gcagccgaaggaaucuuug

SEQ ID NO: 2449323 - RNA, 19 nt, Artificial Sequence
  Description of Artificial Sequence: Synthetic oligonucleotide
cgauguacuuccagagagc

SEQ ID NO: 2449324 - RNA, 19 nt, Artificial Sequence
  Description of Artificial Sequence: Synthetic oligonucleotide
uagcggcagccgaaggaau

SEQ ID NO: 2449325 - RNA, 19 nt, Artificial Sequence
  Description of Artificial Sequence: Synthetic oligonucleotide
uccucgcgauccacugacu

SEQ ID NO: 2449326 - RNA, 19 nt, Artificial Sequence
  Description of Artificial Sequence: Synthetic oligonucleotide
ccggaggaggggaacacac

SEQ ID NO: 2449327 - RNA, 19 nt, Artificial Sequence
  Description of Artificial Sequence: Synthetic oligonucleotide
ccgucagccauggucaaag

SEQ ID NO: 2449328 - RNA, 19 nt, Artificial Sequence
  Description of Artificial Sequence: Synthetic oligonucleotide
gucaaaggagaggcgugga

SEQ ID NO: 2449329 - RNA, 19 nt, Artificial Sequence
  Description of Artificial Sequence: Synthetic oligonucleotide
ggccauugcugggagccgg

SEQ ID NO: 2449330 - RNA, 19 nt, Artificial Sequence
  Description of Artificial Sequence: Synthetic oligonucleotide
gcugggagccggaggaggg

SEQ ID NO: 2449331 - RNA, 19 nt, Artificial Sequence
  Description of Artificial Sequence: Synthetic oligonucleotide
gagcuguucuuaucuucgu

SEQ ID NO: 2449332 - RNA, 19 nt, Artificial Sequence
  Description of Artificial Sequence: Synthetic oligonucleotide
agcguggaaugcaguggag

SEQ ID NO: 2449333 - RNA, 19 nt, Artificial Sequence
  Description of Artificial Sequence: Synthetic oligonucleotide
aggccauugcugggagccg

SEQ ID NO: 2449334 - RNA, 19 nt, Artificial Sequence
  Description of Artificial Sequence: Synthetic oligonucleotide
agccaagcucacaggugag

SEQ ID NO: 2449335 - RNA, 19 nt, Artificial Sequence
  Description of Artificial Sequence: Synthetic oligonucleotide
caaccccggagagagcguc

SEQ ID NO: 2449336 - RNA, 19 nt, Artificial Sequence
  Description of Artificial Sequence: Synthetic oligonucleotide
uggugacaugcuggccucc

SEQ ID NO: 2449337 - RNA, 19 nt, Artificial Sequence
  Description of Artificial Sequence: Synthetic oligonucleotide
  modified_base (16)..(16): a, c, u, g, unknown or other
cagguuaacacuggcncuu

SEQ ID NO: 2449338 - RNA, 19 nt, Artificial Sequence
  Description of Artificial Sequence: Synthetic oligonucleotide
gaacacacacccuccucuu

SEQ ID NO: 2449339 - RNA, 19 nt, Artificial Sequence
  Description of Artificial Sequence: Synthetic oligonucleotide
gccuugcggucuuugagga

SEQ ID NO: 2449340 - RNA, 19 nt, Artificial Sequence
  Description of Artificial Sequence: Synthetic oligonucleotide
gugagcucaggauccuaua

SEQ ID NO: 2449341 - RNA, 19 nt, Artificial Sequence
  Description of Artificial Sequence: Synthetic oligonucleotide
gcaguggaguuugcagagg

SEQ ID NO: 2449342 - RNA, 19 nt, Artificial Sequence
  Description of Artificial Sequence: Synthetic oligonucleotide
agaguuccugcgagccaag

SEQ ID NO: 2449343 - RNA, 19 nt, Artificial Sequence
  Description of Artificial Sequence: Synthetic oligonucleotide
acaggggauggaauuccau

SEQ ID NO: 2449344 - RNA, 19 nt, Artificial Sequence
  Description of Artificial Sequence: Synthetic oligonucleotide
acucgaaggagcggaccau

SEQ ID NO: 2449345 - RNA, 19 nt, Artificial Sequence
  Description of Artificial Sequence: Synthetic oligonucleotide
guguggguuggcaguggug

SEQ ID NO: 2449346 - RNA, 19 nt, Artificial Sequence
  Description of Artificial Sequence: Synthetic oligonucleotide
gggaacacacacccuccuc

SEQ ID NO: 2449347 - RNA, 19 nt, Artificial Sequence
  Description of Artificial Sequence: Synthetic oligonucleotide
gcgauccacugacucgaag

SEQ ID NO: 2449348 - RNA, 19 nt, Artificial Sequence
  Description of Artificial Sequence: Synthetic oligonucleotide
ccauauccagcagcagggg

SEQ ID NO: 2449349 - RNA, 19 nt, Artificial Sequence
  Description of Artificial Sequence: Synthetic oligonucleotide
cuuccaccccagguuaaca

SEQ ID NO: 2449350 - RNA, 19 nt, Artificial Sequence
  Description of Artificial Sequence: Synthetic oligonucleotide
gccacacaauuggaaucgg

SEQ ID NO: 2449351 - RNA, 19 nt, Artificial Sequence
  Description of Artificial Sequence: Synthetic oligonucleotide
gggacaggggauggaauuc

SEQ ID NO: 2449352 - RNA, 19 nt, Artificial Sequence
  Description of Artificial Sequence: Synthetic oligonucleotide
auguacuuccagagagcaa

SEQ ID NO: 2449353 - RNA, 19 nt, Artificial Sequence
  Description of Artificial Sequence: Synthetic oligonucleotide
ccucucacuagaguuccug

SEQ ID NO: 2449354 - RNA, 19 nt, Artificial Sequence
  Description of Artificial Sequence: Synthetic oligonucleotide
ccucgcgauccacugacuc

SEQ ID NO: 2449355 - RNA, 19 nt, Artificial Sequence
  Description of Artificial Sequence: Synthetic oligonucleotide
cgagcguggaaugcagugg

SEQ ID NO: 2449356 - RNA, 19 nt, Artificial Sequence
  Description of Artificial Sequence: Synthetic oligonucleotide
gagccggaggaggggaaca

SEQ ID NO: 2449357 - RNA, 19 nt, Artificial Sequence
  Description of Artificial Sequence: Synthetic oligonucleotide
ggaccauauccagcagcag

SEQ ID NO: 2449358 - RNA, 19 nt, Artificial Sequence
  Description of Artificial Sequence: Synthetic oligonucleotide
gcgugaggccauugcuggg

SEQ ID NO: 2449359 - RNA, 19 nt, Artificial Sequence
  Description of Artificial Sequence: Synthetic oligonucleotide
uggcacuucccggcccuga

SEQ ID NO: 2449360 - RNA, 19 nt, Artificial Sequence
  Description of Artificial Sequence: Synthetic oligonucleotide
ggaccucuccaaggaaggc

SEQ ID NO: 2449361 - RNA, 19 nt, Artificial Sequence
  Description of Artificial Sequence: Synthetic oligonucleotide
cggaccauauccagcagca

SEQ ID NO: 2449362 - RNA, 19 nt, Artificial Sequence
  Description of Artificial Sequence: Synthetic oligonucleotide
accccggagagagcguccu

SEQ ID NO: 2449363 - RNA, 19 nt, Artificial Sequence
  Description of Artificial Sequence: Synthetic oligonucleotide
caucauggggaaccuuccu

SEQ ID NO: 2449364 - RNA, 19 nt, Artificial Sequence
  Description of Artificial Sequence: Synthetic oligonucleotide
cagccgaaggaaucuuugu

SEQ ID NO: 2449365 - RNA, 19 nt, Artificial Sequence
  Description of Artificial Sequence: Synthetic oligonucleotide
cgagccaagcucacaggug

SEQ ID NO: 2449366 - RNA, 19 nt, Artificial Sequence
  Description of Artificial Sequence: Synthetic oligonucleotide
ccucuccaaggaaggcugc

SEQ ID NO: 2449367 - RNA, 19 nt, Artificial Sequence
  Description of Artificial Sequence: Synthetic oligonucleotide
ggcguguggguuggcagug

SEQ ID NO: 2449368 - RNA, 19 nt, Artificial Sequence
  Description of Artificial Sequence: Synthetic oligonucleotide
ggcacuucccggcccugac

SEQ ID NO: 2449369 - RNA, 19 nt, Artificial Sequence
  Description of Artificial Sequence: Synthetic oligonucleotide
ccacacaauuggaaucgga

SEQ ID NO: 2449370 - RNA, 19 nt, Artificial Sequence
  Description of Artificial Sequence: Synthetic oligonucleotide
ugcggucuuugaggaggcu

SEQ ID NO: 2449371 - RNA, 19 nt, Artificial Sequence
  Description of Artificial Sequence: Synthetic oligonucleotide
gcgagccaagcucacaggu

SEQ ID NO: 2449372 - RNA, 19 nt, Artificial Sequence
  Description of Artificial Sequence: Synthetic oligonucleotide
ugcuggccuccagggaccu

SEQ ID NO: 2449373 - RNA, 19 nt, Artificial Sequence
  Description of Artificial Sequence: Synthetic oligonucleotide
guguggugagugaggcuga

SEQ ID NO: 2449374 - RNA, 19 nt, Artificial Sequence
  Description of Artificial Sequence: Synthetic oligonucleotide
ugacaccgucagccauggu

SEQ ID NO: 2449375 - RNA, 19 nt, Artificial Sequence
  Description of Artificial Sequence: Synthetic oligonucleotide
ccuugcggucuuugaggag

SEQ ID NO: 2449376 - RNA, 19 nt, Artificial Sequence
  Description of Artificial Sequence: Synthetic oligonucleotide
ccugccuuggaggccuugc

SEQ ID NO: 2449377 - RNA, 19 nt, Artificial Sequence
  Description of Artificial Sequence: Synthetic oligonucleotide
gcguccucucacuagaguu

SEQ ID NO: 2449378 - RNA, 19 nt, Artificial Sequence
  Description of Artificial Sequence: Synthetic oligonucleotide
ggugacaugcuggccucca

SEQ ID NO: 2449379 - RNA, 19 nt, Artificial Sequence
  Description of Artificial Sequence: Synthetic oligonucleotide
  modified_base (19)..(19): a, c, u, g, unknown or other
ccccagguuaacacuggcn

SEQ ID NO: 2449380 - RNA, 19 nt, Artificial Sequence
  Description of Artificial Sequence: Synthetic oligonucleotide
cucgaaggagcggaccaua

SEQ ID NO: 2449381 - RNA, 19 nt, Artificial Sequence
  Description of Artificial Sequence: Synthetic oligonucleotide
gguccucgcgauccacuga

SEQ ID NO: 2449382 - RNA, 19 nt, Artificial Sequence
  Description of Artificial Sequence: Synthetic oligonucleotide
ggaaugcaguggaguuugc

SEQ ID NO: 2449383 - RNA, 19 nt, Artificial Sequence
  Description of Artificial Sequence: Synthetic oligonucleotide
ggaggccuugcggucuuug

SEQ ID NO: 2449384 - RNA, 19 nt, Artificial Sequence
  Description of Artificial Sequence: Synthetic oligonucleotide
gacgagcguggaaugcagu

SEQ ID NO: 2449385 - RNA, 19 nt, Artificial Sequence
  Description of Artificial Sequence: Synthetic oligonucleotide
cagggaccucuccaaggaa

SEQ ID NO: 2449386 - RNA, 19 nt, Artificial Sequence
  Description of Artificial Sequence: Synthetic oligonucleotide
gagcaaccccggagagagc

SEQ ID NO: 2449387 - RNA, 19 nt, Artificial Sequence
  Description of Artificial Sequence: Synthetic oligonucleotide
caauuggaaucggaaguuu

SEQ ID NO: 2449388 - RNA, 19 nt, Artificial Sequence
  Description of Artificial Sequence: Synthetic oligonucleotide
ggggacaggggauggaauu

SEQ ID NO: 2449389 - RNA, 19 nt, Artificial Sequence
  Description of Artificial Sequence: Synthetic oligonucleotide
gcccaaaagagacgagcgu

SEQ ID NO: 2449390 - RNA, 19 nt, Artificial Sequence
  Description of Artificial Sequence: Synthetic oligonucleotide
accgucagccauggucaaa

SEQ ID NO: 2449391 - RNA, 19 nt, Artificial Sequence
  Description of Artificial Sequence: Synthetic oligonucleotide
cagaggcgauguacuucca

SEQ ID NO: 2449392 - RNA, 19 nt, Artificial Sequence
  Description of Artificial Sequence: Synthetic oligonucleotide
  modified_base (17)..(17): a, c, u, g, unknown or other
ccagguuaacacuggcncu

SEQ ID NO: 2449393 - RNA, 19 nt, Artificial Sequence
  Description of Artificial Sequence: Synthetic oligonucleotide
gcccugacugguguggcuc

SEQ ID NO: 2449394 - RNA, 19 nt, Artificial Sequence
  Description of Artificial Sequence: Synthetic oligonucleotide
cgaaggagcggaccauauc

SEQ ID NO: 2449395 - RNA, 19 nt, Artificial Sequence
  Description of Artificial Sequence: Synthetic oligonucleotide
ccggcccugacuggugugg

SEQ ID NO: 2449396 - RNA, 19 nt, Artificial Sequence
  Description of Artificial Sequence: Synthetic oligonucleotide
cgugcccaaaagagacgag

SEQ ID NO: 2449397 - RNA, 19 nt, Artificial Sequence
  Description of Artificial Sequence: Synthetic oligonucleotide
guccugggagguggggaca

SEQ ID NO: 2449398 - RNA, 19 nt, Artificial Sequence
  Description of Artificial Sequence: Synthetic oligonucleotide
ggugagcucaggauccuau

SEQ ID NO: 2449399 - RNA, 19 nt, Artificial Sequence
  Description of Artificial Sequence: Synthetic oligonucleotide
ccggagagagcguccucuc

SEQ ID NO: 2449400 - RNA, 19 nt, Artificial Sequence
  Description of Artificial Sequence: Synthetic oligonucleotide
gcguguggguuggcagugg

SEQ ID NO: 2449401 - RNA, 19 nt, Artificial Sequence
  Description of Artificial Sequence: Synthetic oligonucleotide
ggggaacacacacccuccu

SEQ ID NO: 2449402 - RNA, 19 nt, Artificial Sequence
  Description of Artificial Sequence: Synthetic oligonucleotide
gggaggaugcuggcacuuc

SEQ ID NO: 2449403 - RNA, 19 nt, Artificial Sequence
  Description of Artificial Sequence: Synthetic oligonucleotide
ccuccagggaccucuccaa

SEQ ID NO: 2449404 - RNA, 19 nt, Artificial Sequence
  Description of Artificial Sequence: Synthetic oligonucleotide
gcguggaaugcaguggagu

SEQ ID NO: 2449405 - RNA, 19 nt, Artificial Sequence
  Description of Artificial Sequence: Synthetic oligonucleotide
caccgucagccauggucaa

SEQ ID NO: 2449406 - RNA, 19 nt, Artificial Sequence
  Description of Artificial Sequence: Synthetic oligonucleotide
gugguccucgcgauccacu

SEQ ID NO: 2449407 - RNA, 19 nt, Artificial Sequence
  Description of Artificial Sequence: Synthetic oligonucleotide
gggcguguggguuggcagu

SEQ ID NO: 2449408 - RNA, 19 nt, Artificial Sequence
  Description of Artificial Sequence: Synthetic oligonucleotide
cuggcacuucccggcccug

SEQ ID NO: 2449409 - RNA, 19 nt, Artificial Sequence
  Description of Artificial Sequence: Synthetic oligonucleotide
cuucccggcccugacuggu

SEQ ID NO: 2449410 - RNA, 19 nt, Artificial Sequence
  Description of Artificial Sequence: Synthetic oligonucleotide
ggugccgcuuccucagcau

SEQ ID NO: 2449411 - RNA, 19 nt, Artificial Sequence
  Description of Artificial Sequence: Synthetic oligonucleotide
cguggaaugcaguggaguu

SEQ ID NO: 2449412 - RNA, 19 nt, Artificial Sequence
  Description of Artificial Sequence: Synthetic oligonucleotide
ccaaggaaggcugcaggcu

SEQ ID NO: 2449413 - RNA, 19 nt, Artificial Sequence
  Description of Artificial Sequence: Synthetic oligonucleotide
cuggaucuguguggugagu

SEQ ID NO: 2449414 - RNA, 19 nt, Artificial Sequence
  Description of Artificial Sequence: Synthetic oligonucleotide
gccggaggaggggaacaca

SEQ ID NO: 2449415 - RNA, 19 nt, Artificial Sequence
  Description of Artificial Sequence: Synthetic oligonucleotide
gcggcagccgaaggaaucu

SEQ ID NO: 2449416 - RNA, 19 nt, Artificial Sequence
  Description of Artificial Sequence: Synthetic oligonucleotide
cccggcccugacuggugug

SEQ ID NO: 2449417 - RNA, 19 nt, Artificial Sequence
  Description of Artificial Sequence: Synthetic oligonucleotide
gcacuucccggcccugacu

SEQ ID NO: 2449418 - RNA, 19 nt, Artificial Sequence
  Description of Artificial Sequence: Synthetic oligonucleotide
gcggucuuugaggaggcuu

SEQ ID NO: 2449419 - RNA, 19 nt, Artificial Sequence
  Description of Artificial Sequence: Synthetic oligonucleotide
ggcccugacugguguggcu

SEQ ID NO: 2449420 - RNA, 19 nt, Artificial Sequence
  Description of Artificial Sequence: Synthetic oligonucleotide
gggcuccccaggggcugcg

SEQ ID NO: 2449421 - RNA, 19 nt, Artificial Sequence
  Description of Artificial Sequence: Synthetic oligonucleotide
cggagagagcguccucuca

SEQ ID NO: 2449422 - RNA, 19 nt, Artificial Sequence
  Description of Artificial Sequence: Synthetic oligonucleotide
cccggagagagcguccucu

SEQ ID NO: 2449423 - RNA, 19 nt, Artificial Sequence
  Description of Artificial Sequence: Synthetic oligonucleotide
  modified_base (8)..(8): a, c, u, g, unknown or other
cacuggcncuugacaccgu

SEQ ID NO: 2449424 - RNA, 19 nt, Artificial Sequence
  Description of Artificial Sequence: Synthetic oligonucleotide
ggcagccgaaggaaucuuu

SEQ ID NO: 2449425 - RNA, 19 nt, Artificial Sequence
  Description of Artificial Sequence: Synthetic oligonucleotide
ggcucuggugccgcuuccu

SEQ ID NO: 2449426 - RNA, 19 nt, Artificial Sequence
  Description of Artificial Sequence: Synthetic oligonucleotide
ccucagcaucuguccaaua

SEQ ID NO: 2449427 - RNA, 19 nt, Artificial Sequence
  Description of Artificial Sequence: Synthetic oligonucleotide
cccugacugguguggcucu

SEQ ID NO: 2449428 - RNA, 19 nt, Artificial Sequence
  Description of Artificial Sequence: Synthetic oligonucleotide
ggggaaccuuccucugcuu

SEQ ID NO: 2449429 - RNA, 19 nt, Artificial Sequence
  Description of Artificial Sequence: Synthetic oligonucleotide
cggcccugacugguguggc

SEQ ID NO: 2449430 - RNA, 19 nt, Artificial Sequence
  Description of Artificial Sequence: Synthetic oligonucleotide
ccccggagagagcguccuc

SEQ ID NO: 2449431 - RNA, 19 nt, Artificial Sequence
  Description of Artificial Sequence: Synthetic oligonucleotide
cguguggguuggcaguggu

SEQ ID NO: 2449432 - RNA, 19 nt, Artificial Sequence
  Description of Artificial Sequence: Synthetic oligonucleotide
gcaaccccggagagagcgu

SEQ ID NO: 2449433 - RNA, 19 nt, Artificial Sequence
  Description of Artificial Sequence: Synthetic oligonucleotide
cgcgauccacugacucgaa

SEQ ID NO: 2449434 - RNA, 19 nt, Artificial Sequence
  Description of Artificial Sequence: Synthetic oligonucleotide
ggggcugcgugaggccauu

SEQ ID NO: 2449435 - RNA, 19 nt, Artificial Sequence
  Description of Artificial Sequence: Synthetic oligonucleotide
ggcuccccaggggcugcgu

SEQ ID NO: 2449436 - RNA, 19 nt, Artificial Sequence
  Description of Artificial Sequence: Synthetic oligonucleotide
cggcagccgaaggaaucuu

SEQ ID NO: 2449437 - RNA, 19 nt, Artificial Sequence
  Description of Artificial Sequence: Synthetic oligonucleotide
  modified_base (1)..(1): a, c, u, g, unknown or other
ncuugacaccgucagccau

SEQ ID NO: 2449438 - RNA, 19 nt, Artificial Sequence
  Description of Artificial Sequence: Synthetic oligonucleotide
uuuggcuacaaacucaugg

SEQ ID NO: 2449439 - RNA, 19 nt, Artificial Sequence
  Description of Artificial Sequence: Synthetic oligonucleotide
aauuccacaagauaggaga

SEQ ID NO: 2449440 - RNA, 19 nt, Artificial Sequence
  Description of Artificial Sequence: Synthetic oligonucleotide
aaucuuguacaccacaauc

SEQ ID NO: 2449441 - RNA, 19 nt, Artificial Sequence
  Description of Artificial Sequence: Synthetic oligonucleotide
uguuacuuuaaaauuagca

SEQ ID NO: 2449442 - RNA, 19 nt, Artificial Sequence
  Description of Artificial Sequence: Synthetic oligonucleotide
aaacucaugguccaugcgg

SEQ ID NO: 2449443 - RNA, 19 nt, Artificial Sequence
  Description of Artificial Sequence: Synthetic oligonucleotide
ugcaacaacacucaauucc

SEQ ID NO: 2449444 - RNA, 19 nt, Artificial Sequence
  Description of Artificial Sequence: Synthetic oligonucleotide
uuaagaaggaauaccaucu

SEQ ID NO: 2449445 - RNA, 19 nt, Artificial Sequence
  Description of Artificial Sequence: Synthetic oligonucleotide
uucuuaaucacauaagccu

SEQ ID NO: 2449446 - RNA, 19 nt, Artificial Sequence
  Description of Artificial Sequence: Synthetic oligonucleotide
uacaccacaaucuucauga

SEQ ID NO: 2449447 - RNA, 19 nt, Artificial Sequence
  Description of Artificial Sequence: Synthetic oligonucleotide
aaauggacuggccugcugg

SEQ ID NO: 2449448 - RNA, 19 nt, Artificial Sequence
  Description of Artificial Sequence: Synthetic oligonucleotide
uaaaacacuccccugcagg

SEQ ID NO: 2449449 - RNA, 19 nt, Artificial Sequence
  Description of Artificial Sequence: Synthetic oligonucleotide
aagaaggaauaccaucucg

SEQ ID NO: 2449450 - RNA, 19 nt, Artificial Sequence
  Description of Artificial Sequence: Synthetic oligonucleotide
ugaaccagagguuugagcu

SEQ ID NO: 2449451 - RNA, 19 nt, Artificial Sequence
  Description of Artificial Sequence: Synthetic oligonucleotide
ucacauaagccuuuugggg

SEQ ID NO: 2449452 - RNA, 19 nt, Artificial Sequence
  Description of Artificial Sequence: Synthetic oligonucleotide
acaguugcgaaccaaggcg

SEQ ID NO: 2449453 - RNA, 19 nt, Artificial Sequence
  Description of Artificial Sequence: Synthetic oligonucleotide
uguugucacacaaaccacg

SEQ ID NO: 2449454 - RNA, 19 nt, Artificial Sequence
  Description of Artificial Sequence: Synthetic oligonucleotide
uccaucauguuaauggugc

SEQ ID NO: 2449455 - RNA, 19 nt, Artificial Sequence
  Description of Artificial Sequence: Synthetic oligonucleotide
caagauaggagagagacag

SEQ ID NO: 2449456 - RNA, 19 nt, Artificial Sequence
  Description of Artificial Sequence: Synthetic oligonucleotide
cuucuuaaucacauaagcc

SEQ ID NO: 2449457 - RNA, 19 nt, Artificial Sequence
  Description of Artificial Sequence: Synthetic oligonucleotide
uuccaggugaaccagaggu

SEQ ID NO: 2449458 - RNA, 19 nt, Artificial Sequence
  Description of Artificial Sequence: Synthetic oligonucleotide
uacuuuaaaauuagcaaaa

SEQ ID NO: 2449459 - RNA, 19 nt, Artificial Sequence
  Description of Artificial Sequence: Synthetic oligonucleotide
caaacuguggucuaaaaca

SEQ ID NO: 2449460 - RNA, 19 nt, Artificial Sequence
  Description of Artificial Sequence: Synthetic oligonucleotide
aagggagucggccugacug

SEQ ID NO: 2449461 - RNA, 19 nt, Artificial Sequence
  Description of Artificial Sequence: Synthetic oligonucleotide
aacaaauggacuggccugc

SEQ ID NO: 2449462 - RNA, 19 nt, Artificial Sequence
  Description of Artificial Sequence: Synthetic oligonucleotide
acaaacucaugguccaugc

SEQ ID NO: 2449463 - RNA, 19 nt, Artificial Sequence
  Description of Artificial Sequence: Synthetic oligonucleotide
acucaauuccacaagauag

SEQ ID NO: 2449464 - RNA, 19 nt, Artificial Sequence
  Description of Artificial Sequence: Synthetic oligonucleotide
aaacuguggucuaaaacac

SEQ ID NO: 2449465 - RNA, 19 nt, Artificial Sequence
  Description of Artificial Sequence: Synthetic oligonucleotide
uguggucuaaaacacuccc

SEQ ID NO: 2449466 - RNA, 19 nt, Artificial Sequence
  Description of Artificial Sequence: Synthetic oligonucleotide
aaagucucaggcuccaugu

SEQ ID NO: 2449467 - RNA, 19 nt, Artificial Sequence
  Description of Artificial Sequence: Synthetic oligonucleotide
gauucggaaaaucuuguac

SEQ ID NO: 2449468 - RNA, 19 nt, Artificial Sequence
  Description of Artificial Sequence: Synthetic oligonucleotide
cuuaagaaggaauaccauc

SEQ ID NO: 2449469 - RNA, 19 nt, Artificial Sequence
  Description of Artificial Sequence: Synthetic oligonucleotide
aucauguuaauggugcccc

SEQ ID NO: 2449470 - RNA, 19 nt, Artificial Sequence
  Description of Artificial Sequence: Synthetic oligonucleotide
agagacagggccucugugc

SEQ ID NO: 2449471 - RNA, 19 nt, Artificial Sequence
  Description of Artificial Sequence: Synthetic oligonucleotide
auucggaaaaucuuguaca

SEQ ID NO: 2449472 - RNA, 19 nt, Artificial Sequence
  Description of Artificial Sequence: Synthetic oligonucleotide
aacacucaauuccacaaga

SEQ ID NO: 2449473 - RNA, 19 nt, Artificial Sequence
  Description of Artificial Sequence: Synthetic oligonucleotide
aauggacuggccugcuggc

SEQ ID NO: 2449474 - RNA, 19 nt, Artificial Sequence
  Description of Artificial Sequence: Synthetic oligonucleotide
acaaguguccuuuggcuac

SEQ ID NO: 2449475 - RNA, 19 nt, Artificial Sequence
  Description of Artificial Sequence: Synthetic oligonucleotide
uccauguugucacacaaac

SEQ ID NO: 2449476 - RNA, 19 nt, Artificial Sequence
  Description of Artificial Sequence: Synthetic oligonucleotide
agauaggagagagacaggg

SEQ ID NO: 2449477 - RNA, 19 nt, Artificial Sequence
  Description of Artificial Sequence: Synthetic oligonucleotide
cucaauuccacaagauagg

SEQ ID NO: 2449478 - RNA, 19 nt, Artificial Sequence
  Description of Artificial Sequence: Synthetic oligonucleotide
aaccagagguuugagcugc

SEQ ID NO: 2449479 - RNA, 19 nt, Artificial Sequence
  Description of Artificial Sequence: Synthetic oligonucleotide
auuuccaucaagaagucug

SEQ ID NO: 2449480 - RNA, 19 nt, Artificial Sequence
  Description of Artificial Sequence: Synthetic oligonucleotide
aaggaauaccaucucguga

SEQ ID NO: 2449481 - RNA, 19 nt, Artificial Sequence
  Description of Artificial Sequence: Synthetic oligonucleotide
aaaauuccggaagggaguc

SEQ ID NO: 2449482 - RNA, 19 nt, Artificial Sequence
  Description of Artificial Sequence: Synthetic oligonucleotide
agagguuugagcugcuccg

SEQ ID NO: 2449483 - RNA, 19 nt, Artificial Sequence
  Description of Artificial Sequence: Synthetic oligonucleotide
uccgcaaaauuccucaugu

SEQ ID NO: 2449484 - RNA, 19 nt, Artificial Sequence
  Description of Artificial Sequence: Synthetic oligonucleotide
aauuccggaagggagucgg

SEQ ID NO: 2449485 - RNA, 19 nt, Artificial Sequence
  Description of Artificial Sequence: Synthetic oligonucleotide
uaccaucucgugaucaagg

SEQ ID NO: 2449486 - RNA, 19 nt, Artificial Sequence
  Description of Artificial Sequence: Synthetic oligonucleotide
aacaacacucaauuccaca

SEQ ID NO: 2449487 - RNA, 19 nt, Artificial Sequence
  Description of Artificial Sequence: Synthetic oligonucleotide
caaaccacgaaggcgaugg

SEQ ID NO: 2449488 - RNA, 19 nt, Artificial Sequence
  Description of Artificial Sequence: Synthetic oligonucleotide
gaacaaauggacuggccug

SEQ ID NO: 2449489 - RNA, 19 nt, Artificial Sequence
  Description of Artificial Sequence: Synthetic oligonucleotide
cuuagaacaaauggacugg

SEQ ID NO: 2449490 - RNA, 19 nt, Artificial Sequence
  Description of Artificial Sequence: Synthetic oligonucleotide
ugagacuuuccaaacugug

SEQ ID NO: 2449491 - RNA, 19 nt, Artificial Sequence
  Description of Artificial Sequence: Synthetic oligonucleotide
aaaacacuccccugcagga

SEQ ID NO: 2449492 - RNA, 19 nt, Artificial Sequence
  Description of Artificial Sequence: Synthetic oligonucleotide
agacuuuccaaacuguggu

SEQ ID NO: 2449493 - RNA, 19 nt, Artificial Sequence
  Description of Artificial Sequence: Synthetic oligonucleotide
ucuuaaucacauaagccuu

SEQ ID NO: 2449494 - RNA, 19 nt, Artificial Sequence
  Description of Artificial Sequence: Synthetic oligonucleotide
aaauuccucaugucaucag

SEQ ID NO: 2449495 - RNA, 19 nt, Artificial Sequence
  Description of Artificial Sequence: Synthetic oligonucleotide
ucuaaaacacuccccugca

SEQ ID NO: 2449496 - RNA, 19 nt, Artificial Sequence
  Description of Artificial Sequence: Synthetic oligonucleotide
ugaucaaggaaagucucag

SEQ ID NO: 2449497 - RNA, 19 nt, Artificial Sequence
  Description of Artificial Sequence: Synthetic oligonucleotide
uccucaugucaucagagac

SEQ ID NO: 2449498 - RNA, 19 nt, Artificial Sequence
  Description of Artificial Sequence: Synthetic oligonucleotide
aggaauaccaucucgugau

SEQ ID NO: 2449499 - RNA, 19 nt, Artificial Sequence
  Description of Artificial Sequence: Synthetic oligonucleotide
aaaauuccucaugucauca

SEQ ID NO: 2449500 - RNA, 19 nt, Artificial Sequence
  Description of Artificial Sequence: Synthetic oligonucleotide
uucaugaugcccuuccgga

SEQ ID NO: 2449501 - RNA, 19 nt, Artificial Sequence
  Description of Artificial Sequence: Synthetic oligonucleotide
ucaugguccaugcggaagc

SEQ ID NO: 2449502 - RNA, 19 nt, Artificial Sequence
  Description of Artificial Sequence: Synthetic oligonucleotide
gucuaaaacacuccccugc

SEQ ID NO: 2449503 - RNA, 19 nt, Artificial Sequence
  Description of Artificial Sequence: Synthetic oligonucleotide
cucagauguggcaaugucc

SEQ ID NO: 2449504 - RNA, 19 nt, Artificial Sequence
  Description of Artificial Sequence: Synthetic oligonucleotide
ucgugaucaaggaaagucu

SEQ ID NO: 2449505 - RNA, 19 nt, Artificial Sequence
  Description of Artificial Sequence: Synthetic oligonucleotide
aucaggugaggacagaccu

SEQ ID NO: 2449506 - RNA, 19 nt, Artificial Sequence
  Description of Artificial Sequence: Synthetic oligonucleotide
gagacuuuccaaacugugg

SEQ ID NO: 2449507 - RNA, 19 nt, Artificial Sequence
  Description of Artificial Sequence: Synthetic oligonucleotide
aaggcgauggaugagacuu

SEQ ID NO: 2449508 - RNA, 19 nt, Artificial Sequence
  Description of Artificial Sequence: Synthetic oligonucleotide
gaaggaauaccaucucgug

SEQ ID NO: 2449509 - RNA, 19 nt, Artificial Sequence
  Description of Artificial Sequence: Synthetic oligonucleotide
gcaauguccacacaguugc

SEQ ID NO: 2449510 - RNA, 19 nt, Artificial Sequence
  Description of Artificial Sequence: Synthetic oligonucleotide
gaucaaggaaagucucagg

SEQ ID NO: 2449511 - RNA, 19 nt, Artificial Sequence
  Description of Artificial Sequence: Synthetic oligonucleotide
ggacagaccucaaagaugg

SEQ ID NO: 2449512 - RNA, 19 nt, Artificial Sequence
  Description of Artificial Sequence: Synthetic oligonucleotide
acauaagccuuuugggguc

SEQ ID NO: 2449513 - RNA, 19 nt, Artificial Sequence
  Description of Artificial Sequence: Synthetic oligonucleotide
aaaucuuguacaccacaau

SEQ ID NO: 2449514 - RNA, 19 nt, Artificial Sequence
  Description of Artificial Sequence: Synthetic oligonucleotide
gucacacaaaccacgaagg

SEQ ID NO: 2449515 - RNA, 19 nt, Artificial Sequence
  Description of Artificial Sequence: Synthetic oligonucleotide
acaacacucaauuccacaa

SEQ ID NO: 2449516 - RNA, 19 nt, Artificial Sequence
  Description of Artificial Sequence: Synthetic oligonucleotide
ucagagaccauguccugcc

SEQ ID NO: 2449517 - RNA, 19 nt, Artificial Sequence
  Description of Artificial Sequence: Synthetic oligonucleotide
uucggaaaaucuuguacac

SEQ ID NO: 2449518 - RNA, 19 nt, Artificial Sequence
  Description of Artificial Sequence: Synthetic oligonucleotide
caggauucggaaaaucuug

SEQ ID NO: 2449519 - RNA, 19 nt, Artificial Sequence
  Description of Artificial Sequence: Synthetic oligonucleotide
gaaagucucaggcuccaug

SEQ ID NO: 2449520 - RNA, 19 nt, Artificial Sequence
  Description of Artificial Sequence: Synthetic oligonucleotide
acagaccucaaagauggac

SEQ ID NO: 2449521 - RNA, 19 nt, Artificial Sequence
  Description of Artificial Sequence: Synthetic oligonucleotide
uggacagaccuucuuaauc

SEQ ID NO: 2449522 - RNA, 19 nt, Artificial Sequence
  Description of Artificial Sequence: Synthetic oligonucleotide
ucacacaaaccacgaaggc

SEQ ID NO: 2449523 - RNA, 19 nt, Artificial Sequence
  Description of Artificial Sequence: Synthetic oligonucleotide
ugagguucucagauguggc

SEQ ID NO: 2449524 - RNA, 19 nt, Artificial Sequence
  Description of Artificial Sequence: Synthetic oligonucleotide
cacacaaaccacgaaggcg

SEQ ID NO: 2449525 - RNA, 19 nt, Artificial Sequence
  Description of Artificial Sequence: Synthetic oligonucleotide
aacaaguguccuuuggcua

SEQ ID NO: 2449526 - RNA, 19 nt, Artificial Sequence
  Description of Artificial Sequence: Synthetic oligonucleotide
uaucaggugaggacagacc

SEQ ID NO: 2449527 - RNA, 19 nt, Artificial Sequence
  Description of Artificial Sequence: Synthetic oligonucleotide
ugaggacagaccucaaaga

SEQ ID NO: 2449528 - RNA, 19 nt, Artificial Sequence
  Description of Artificial Sequence: Synthetic oligonucleotide
gaaccagggcacuugggag

SEQ ID NO: 2449529 - RNA, 19 nt, Artificial Sequence
  Description of Artificial Sequence: Synthetic oligonucleotide
uccuuuggcuacaaacuca

SEQ ID NO: 2449530 - RNA, 19 nt, Artificial Sequence
  Description of Artificial Sequence: Synthetic oligonucleotide
ucaauuccacaagauagga

SEQ ID NO: 2449531 - RNA, 19 nt, Artificial Sequence
  Description of Artificial Sequence: Synthetic oligonucleotide
cuuucugccuaucagguga

SEQ ID NO: 2449532 - RNA, 19 nt, Artificial Sequence
  Description of Artificial Sequence: Synthetic oligonucleotide
ucuuguacaccacaaucuu

SEQ ID NO: 2449533 - RNA, 19 nt, Artificial Sequence
  Description of Artificial Sequence: Synthetic oligonucleotide
gaccuucuuaaucacauaa

SEQ ID NO: 2449534 - RNA, 19 nt, Artificial Sequence
  Description of Artificial Sequence: Synthetic oligonucleotide
uuagaacaaauggacuggc

SEQ ID NO: 2449535 - RNA, 19 nt, Artificial Sequence
  Description of Artificial Sequence: Synthetic oligonucleotide
uagaacaaauggacuggcc

SEQ ID NO: 2449536 - RNA, 19 nt, Artificial Sequence
  Description of Artificial Sequence: Synthetic oligonucleotide
ugcuccgcaaaauuccuca

SEQ ID NO: 2449537 - RNA, 19 nt, Artificial Sequence
  Description of Artificial Sequence: Synthetic oligonucleotide
ccuucuuaaucacauaagc

SEQ ID NO: 2449538 - RNA, 19 nt, Artificial Sequence
  Description of Artificial Sequence: Synthetic oligonucleotide
acacaaaccacgaaggcga

SEQ ID NO: 2449539 - RNA, 19 nt, Artificial Sequence
  Description of Artificial Sequence: Synthetic oligonucleotide
agcugcuccgcaaaauucc

SEQ ID NO: 2449540 - RNA, 19 nt, Artificial Sequence
  Description of Artificial Sequence: Synthetic oligonucleotide
cucgugaucaaggaaaguc

SEQ ID NO: 2449541 - RNA, 19 nt, Artificial Sequence
  Description of Artificial Sequence: Synthetic oligonucleotide
ugacuggcagcagugaacc

SEQ ID NO: 2449542 - RNA, 19 nt, Artificial Sequence
  Description of Artificial Sequence: Synthetic oligonucleotide
agcuggugcaacaacacuc

SEQ ID NO: 2449543 - RNA, 19 nt, Artificial Sequence
  Description of Artificial Sequence: Synthetic oligonucleotide
uaagaaggaauaccaucuc

SEQ ID NO: 2449544 - RNA, 19 nt, Artificial Sequence
  Description of Artificial Sequence: Synthetic oligonucleotide
uguccugcccagcuggugc

SEQ ID NO: 2449545 - RNA, 19 nt, Artificial Sequence
  Description of Artificial Sequence: Synthetic oligonucleotide
ccuuagaacaaauggacug

SEQ ID NO: 2449546 - RNA, 19 nt, Artificial Sequence
  Description of Artificial Sequence: Synthetic oligonucleotide
gggcccuuagaacaaaugg

SEQ ID NO: 2449547 - RNA, 19 nt, Artificial Sequence
  Description of Artificial Sequence: Synthetic oligonucleotide
cacacaguugcgaaccaag

SEQ ID NO: 2449548 - RNA, 19 nt, Artificial Sequence
  Description of Artificial Sequence: Synthetic oligonucleotide
caagaagucugugagguuc

SEQ ID NO: 2449549 - RNA, 19 nt, Artificial Sequence
  Description of Artificial Sequence: Synthetic oligonucleotide
caauuccacaagauaggag

SEQ ID NO: 2449550 - RNA, 19 nt, Artificial Sequence
  Description of Artificial Sequence: Synthetic oligonucleotide
aaccagggcacuugggaga

SEQ ID NO: 2449551 - RNA, 19 nt, Artificial Sequence
  Description of Artificial Sequence: Synthetic oligonucleotide
ugcaggagguacuccauca

SEQ ID NO: 2449552 - RNA, 19 nt, Artificial Sequence
  Description of Artificial Sequence: Synthetic oligonucleotide
agucucaggcuccauguug

SEQ ID NO: 2449553 - RNA, 19 nt, Artificial Sequence
  Description of Artificial Sequence: Synthetic oligonucleotide
cacaguugcgaaccaaggc

SEQ ID NO: 2449554 - RNA, 19 nt, Artificial Sequence
  Description of Artificial Sequence: Synthetic oligonucleotide
ucaaagauggacagaccuu

SEQ ID NO: 2449555 - RNA, 19 nt, Artificial Sequence
  Description of Artificial Sequence: Synthetic oligonucleotide
caucucgugaucaaggaaa

SEQ ID NO: 2449556 - RNA, 19 nt, Artificial Sequence
  Description of Artificial Sequence: Synthetic oligonucleotide
caaagauggacagaccuuc

SEQ ID NO: 2449557 - RNA, 19 nt, Artificial Sequence
  Description of Artificial Sequence: Synthetic oligonucleotide
gauggacagaccuucuuaa

SEQ ID NO: 2449558 - RNA, 19 nt, Artificial Sequence
  Description of Artificial Sequence: Synthetic oligonucleotide
gagaccauguccugcccag

SEQ ID NO: 2449559 - RNA, 19 nt, Artificial Sequence
  Description of Artificial Sequence: Synthetic oligonucleotide
ugggagaucuuucugccua

SEQ ID NO: 2449560 - RNA, 19 nt, Artificial Sequence
  Description of Artificial Sequence: Synthetic oligonucleotide
ugguccaugcggaagccca

SEQ ID NO: 2449561 - RNA, 19 nt, Artificial Sequence
  Description of Artificial Sequence: Synthetic oligonucleotide
agaaggaauaccaucucgu

SEQ ID NO: 2449562 - RNA, 19 nt, Artificial Sequence
  Description of Artificial Sequence: Synthetic oligonucleotide
caaaauuccucaugucauc

SEQ ID NO: 2449563 - RNA, 19 nt, Artificial Sequence
  Description of Artificial Sequence: Synthetic oligonucleotide
ucuguguucccugggacca

SEQ ID NO: 2449564 - RNA, 19 nt, Artificial Sequence
  Description of Artificial Sequence: Synthetic oligonucleotide
ugcccuuccggaacaagug

SEQ ID NO: 2449565 - RNA, 19 nt, Artificial Sequence
  Description of Artificial Sequence: Synthetic oligonucleotide
ucucagauguggcaauguc

SEQ ID NO: 2449566 - RNA, 19 nt, Artificial Sequence
  Description of Artificial Sequence: Synthetic oligonucleotide
acuuuccaaacuguggucu

SEQ ID NO: 2449567 - RNA, 19 nt, Artificial Sequence
  Description of Artificial Sequence: Synthetic oligonucleotide
cuggcagcagugaaccagg

SEQ ID NO: 2449568 - RNA, 19 nt, Artificial Sequence
  Description of Artificial Sequence: Synthetic oligonucleotide
cagaccucaaagauggaca

SEQ ID NO: 2449569 - RNA, 19 nt, Artificial Sequence
  Description of Artificial Sequence: Synthetic oligonucleotide
gaaccagagguuugagcug

SEQ ID NO: 2449570 - RNA, 19 nt, Artificial Sequence
  Description of Artificial Sequence: Synthetic oligonucleotide
ugucuguguucccugggac

SEQ ID NO: 2449571 - RNA, 19 nt, Artificial Sequence
  Description of Artificial Sequence: Synthetic oligonucleotide
caacacucaauuccacaag

SEQ ID NO: 2449572 - RNA, 19 nt, Artificial Sequence
  Description of Artificial Sequence: Synthetic oligonucleotide
caucauguuaauggugccc

SEQ ID NO: 2449573 - RNA, 19 nt, Artificial Sequence
  Description of Artificial Sequence: Synthetic oligonucleotide
ugagcugcuccgcaaaauu

SEQ ID NO: 2449574 - RNA, 19 nt, Artificial Sequence
  Description of Artificial Sequence: Synthetic oligonucleotide
ugccuaucaggugaggaca

SEQ ID NO: 2449575 - RNA, 19 nt, Artificial Sequence
  Description of Artificial Sequence: Synthetic oligonucleotide
gauaggagagagacagggc

SEQ ID NO: 2449576 - RNA, 19 nt, Artificial Sequence
  Description of Artificial Sequence: Synthetic oligonucleotide
uggcccuuaagaaggaaua

SEQ ID NO: 2449577 - RNA, 19 nt, Artificial Sequence
  Description of Artificial Sequence: Synthetic oligonucleotide
ucuuucugccuaucaggug

SEQ ID NO: 2449578 - RNA, 19 nt, Artificial Sequence
  Description of Artificial Sequence: Synthetic oligonucleotide
ucggaaaaucuuguacacc

SEQ ID NO: 2449579 - RNA, 19 nt, Artificial Sequence
  Description of Artificial Sequence: Synthetic oligonucleotide
cuguggucuaaaacacucc

SEQ ID NO: 2449580 - RNA, 19 nt, Artificial Sequence
  Description of Artificial Sequence: Synthetic oligonucleotide
gaacaaguguccuuuggcu

SEQ ID NO: 2449581 - RNA, 19 nt, Artificial Sequence
  Description of Artificial Sequence: Synthetic oligonucleotide
ggacagaccuucuuaauca

SEQ ID NO: 2449582 - RNA, 19 nt, Artificial Sequence
  Description of Artificial Sequence: Synthetic oligonucleotide
aaauuccggaagggagucg

SEQ ID NO: 2449583 - RNA, 19 nt, Artificial Sequence
  Description of Artificial Sequence: Synthetic oligonucleotide
caaacucaugguccaugcg

SEQ ID NO: 2449584 - RNA, 19 nt, Artificial Sequence
  Description of Artificial Sequence: Synthetic oligonucleotide
ucugccuaucaggugagga

SEQ ID NO: 2449585 - RNA, 19 nt, Artificial Sequence
  Description of Artificial Sequence: Synthetic oligonucleotide
agcgucgggcccuuagaac

SEQ ID NO: 2449586 - RNA, 19 nt, Artificial Sequence
  Description of Artificial Sequence: Synthetic oligonucleotide
ugucucccauuucuggcug

SEQ ID NO: 2449587 - RNA, 19 nt, Artificial Sequence
  Description of Artificial Sequence: Synthetic oligonucleotide
ugugagguucucagaugug

SEQ ID NO: 2449588 - RNA, 19 nt, Artificial Sequence
  Description of Artificial Sequence: Synthetic oligonucleotide
cuaaaacacuccccugcag

SEQ ID NO: 2449589 - RNA, 19 nt, Artificial Sequence
  Description of Artificial Sequence: Synthetic oligonucleotide
aagauaggagagagacagg

SEQ ID NO: 2449590 - RNA, 19 nt, Artificial Sequence
  Description of Artificial Sequence: Synthetic oligonucleotide
gacagaccuucuuaaucac

SEQ ID NO: 2449591 - RNA, 19 nt, Artificial Sequence
  Description of Artificial Sequence: Synthetic oligonucleotide
agggagucggccugacugg

SEQ ID NO: 2449592 - RNA, 19 nt, Artificial Sequence
  Description of Artificial Sequence: Synthetic oligonucleotide
cugccuaucaggugaggac

SEQ ID NO: 2449593 - RNA, 19 nt, Artificial Sequence
  Description of Artificial Sequence: Synthetic oligonucleotide
gagucggccugacuggcag

SEQ ID NO: 2449594 - RNA, 19 nt, Artificial Sequence
  Description of Artificial Sequence: Synthetic oligonucleotide
cacaaucuucaugaugccc

SEQ ID NO: 2449595 - RNA, 19 nt, Artificial Sequence
  Description of Artificial Sequence: Synthetic oligonucleotide
ugcgaaccaaggcgugacg

SEQ ID NO: 2449596 - RNA, 19 nt, Artificial Sequence
  Description of Artificial Sequence: Synthetic oligonucleotide
cugacuggcagcagugaac

SEQ ID NO: 2449597 - RNA, 19 nt, Artificial Sequence
  Description of Artificial Sequence: Synthetic oligonucleotide
gaauaccaucucgugauca

SEQ ID NO: 2449598 - RNA, 19 nt, Artificial Sequence
  Description of Artificial Sequence: Synthetic oligonucleotide
uggugcaacaacacucaau

SEQ ID NO: 2449599 - RNA, 19 nt, Artificial Sequence
  Description of Artificial Sequence: Synthetic oligonucleotide
accaucucgugaucaagga

SEQ ID NO: 2449600 - RNA, 19 nt, Artificial Sequence
  Description of Artificial Sequence: Synthetic oligonucleotide
gcaucauggugacuggagg

SEQ ID NO: 2449601 - RNA, 19 nt, Artificial Sequence
  Description of Artificial Sequence: Synthetic oligonucleotide
aaccaaggcgugacgguuc

SEQ ID NO: 2449602 - RNA, 19 nt, Artificial Sequence
  Description of Artificial Sequence: Synthetic oligonucleotide
cuaucaggugaggacagac

SEQ ID NO: 2449603 - RNA, 19 nt, Artificial Sequence
  Description of Artificial Sequence: Synthetic oligonucleotide
accuucuuaaucacauaag

SEQ ID NO: 2449604 - RNA, 19 nt, Artificial Sequence
  Description of Artificial Sequence: Synthetic oligonucleotide
agguacuccaucauguuaa

SEQ ID NO: 2449605 - RNA, 19 nt, Artificial Sequence
  Description of Artificial Sequence: Synthetic oligonucleotide
guccacacaguugcgaacc

SEQ ID NO: 2449606 - RNA, 19 nt, Artificial Sequence
  Description of Artificial Sequence: Synthetic oligonucleotide
acacaguugcgaaccaagg

SEQ ID NO: 2449607 - RNA, 19 nt, Artificial Sequence
  Description of Artificial Sequence: Synthetic oligonucleotide
gucuguguucccugggacc

SEQ ID NO: 2449608 - RNA, 19 nt, Artificial Sequence
  Description of Artificial Sequence: Synthetic oligonucleotide
aaggcgugacgguucuugu

SEQ ID NO: 2449609 - RNA, 19 nt, Artificial Sequence
  Description of Artificial Sequence: Synthetic oligonucleotide
gagguucucagauguggca

SEQ ID NO: 2449610 - RNA, 19 nt, Artificial Sequence
  Description of Artificial Sequence: Synthetic oligonucleotide
aucuuucugccuaucaggu

SEQ ID NO: 2449611 - RNA, 19 nt, Artificial Sequence
  Description of Artificial Sequence: Synthetic oligonucleotide
caccacaaucuucaugaug

SEQ ID NO: 2449612 - RNA, 19 nt, Artificial Sequence
  Description of Artificial Sequence: Synthetic oligonucleotide
aggacagaccucaaagaug

SEQ ID NO: 2449613 - RNA, 19 nt, Artificial Sequence
  Description of Artificial Sequence: Synthetic oligonucleotide
ccucaugucaucagagacc

SEQ ID NO: 2449614 - RNA, 19 nt, Artificial Sequence
  Description of Artificial Sequence: Synthetic oligonucleotide
gcccauuuccaucaagaag

SEQ ID NO: 2449615 - RNA, 19 nt, Artificial Sequence
  Description of Artificial Sequence: Synthetic oligonucleotide
ucaugaugcccuuccggaa

SEQ ID NO: 2449616 - RNA, 19 nt, Artificial Sequence
  Description of Artificial Sequence: Synthetic oligonucleotide
uccauggagcgucgggccc

SEQ ID NO: 2449617 - RNA, 19 nt, Artificial Sequence
  Description of Artificial Sequence: Synthetic oligonucleotide
guccuuuggcuacaaacuc

SEQ ID NO: 2449618 - RNA, 19 nt, Artificial Sequence
  Description of Artificial Sequence: Synthetic oligonucleotide
gacuggaggggccuccaug

SEQ ID NO: 2449619 - RNA, 19 nt, Artificial Sequence
  Description of Artificial Sequence: Synthetic oligonucleotide
auaccaucucgugaucaag

SEQ ID NO: 2449620 - RNA, 19 nt, Artificial Sequence
  Description of Artificial Sequence: Synthetic oligonucleotide
gaggacagaccucaaagau

SEQ ID NO: 2449621 - RNA, 19 nt, Artificial Sequence
  Description of Artificial Sequence: Synthetic oligonucleotide
cacauaagccuuuuggggu

SEQ ID NO: 2449622 - RNA, 19 nt, Artificial Sequence
  Description of Artificial Sequence: Synthetic oligonucleotide
aacuguggucuaaaacacu

SEQ ID NO: 2449623 - RNA, 19 nt, Artificial Sequence
  Description of Artificial Sequence: Synthetic oligonucleotide
uguguucccugggaccagg

SEQ ID NO: 2449624 - RNA, 19 nt, Artificial Sequence
  Description of Artificial Sequence: Synthetic oligonucleotide
aggagagagacagggccuc

SEQ ID NO: 2449625 - RNA, 19 nt, Artificial Sequence
  Description of Artificial Sequence: Synthetic oligonucleotide
cuggcugucccagguagcg

SEQ ID NO: 2449626 - RNA, 19 nt, Artificial Sequence
  Description of Artificial Sequence: Synthetic oligonucleotide
caauguccacacaguugcg

SEQ ID NO: 2449627 - RNA, 19 nt, Artificial Sequence
  Description of Artificial Sequence: Synthetic oligonucleotide
uggagcgucgggcccuuag

SEQ ID NO: 2449628 - RNA, 19 nt, Artificial Sequence
  Description of Artificial Sequence: Synthetic oligonucleotide
ccaaacuguggucuaaaac

SEQ ID NO: 2449629 - RNA, 19 nt, Artificial Sequence
  Description of Artificial Sequence: Synthetic oligonucleotide
uuaaucacauaagccuuuu

SEQ ID NO: 2449630 - RNA, 19 nt, Artificial Sequence
  Description of Artificial Sequence: Synthetic oligonucleotide
uccggaagggagucggccu

SEQ ID NO: 2449631 - RNA, 19 nt, Artificial Sequence
  Description of Artificial Sequence: Synthetic oligonucleotide
uccggaacaaguguccuuu

SEQ ID NO: 2449632 - RNA, 19 nt, Artificial Sequence
  Description of Artificial Sequence: Synthetic oligonucleotide
ggugcaacaacacucaauu

SEQ ID NO: 2449633 - RNA, 19 nt, Artificial Sequence
  Description of Artificial Sequence: Synthetic oligonucleotide
cugcccuguccauggagcg

SEQ ID NO: 2449634 - RNA, 19 nt, Artificial Sequence
  Description of Artificial Sequence: Synthetic oligonucleotide
aggcgugacgguucuuguc

SEQ ID NO: 2449635 - RNA, 19 nt, Artificial Sequence
  Description of Artificial Sequence: Synthetic oligonucleotide
guggucuaaaacacucccc

SEQ ID NO: 2449636 - RNA, 19 nt, Artificial Sequence
  Description of Artificial Sequence: Synthetic oligonucleotide
caaggcgugacgguucuug

SEQ ID NO: 2449637 - RNA, 19 nt, Artificial Sequence
  Description of Artificial Sequence: Synthetic oligonucleotide
agcgcaggugccagggugc

SEQ ID NO: 2449638 - RNA, 19 nt, Artificial Sequence
  Description of Artificial Sequence: Synthetic oligonucleotide
ugcggaagcccauuuccau

SEQ ID NO: 2449639 - RNA, 19 nt, Artificial Sequence
  Description of Artificial Sequence: Synthetic oligonucleotide
cuccgcaaaauuccucaug

SEQ ID NO: 2449640 - RNA, 19 nt, Artificial Sequence
  Description of Artificial Sequence: Synthetic oligonucleotide
cuguccauggagcgucggg

SEQ ID NO: 2449641 - RNA, 19 nt, Artificial Sequence
  Description of Artificial Sequence: Synthetic oligonucleotide
cagcagugaaccagggcac

SEQ ID NO: 2449642 - RNA, 19 nt, Artificial Sequence
  Description of Artificial Sequence: Synthetic oligonucleotide
agucggccugacuggcagc

SEQ ID NO: 2449643 - RNA, 19 nt, Artificial Sequence
  Description of Artificial Sequence: Synthetic oligonucleotide
agcccauuuccaucaagaa

SEQ ID NO: 2449644 - RNA, 19 nt, Artificial Sequence
  Description of Artificial Sequence: Synthetic oligonucleotide
cucaugguccaugcggaag

SEQ ID NO: 2449645 - RNA, 19 nt, Artificial Sequence
  Description of Artificial Sequence: Synthetic oligonucleotide
uucucagauguggcaaugu

SEQ ID NO: 2449646 - RNA, 19 nt, Artificial Sequence
  Description of Artificial Sequence: Synthetic oligonucleotide
uuccggaagggagucggcc

SEQ ID NO: 2449647 - RNA, 19 nt, Artificial Sequence
  Description of Artificial Sequence: Synthetic oligonucleotide
aaccacgaaggcgauggau

SEQ ID NO: 2449648 - RNA, 19 nt, Artificial Sequence
  Description of Artificial Sequence: Synthetic oligonucleotide
uccaggugaaccagagguu

SEQ ID NO: 2449649 - RNA, 19 nt, Artificial Sequence
  Description of Artificial Sequence: Synthetic oligonucleotide
cccuuaagaaggaauacca

SEQ ID NO: 2449650 - RNA, 19 nt, Artificial Sequence
  Description of Artificial Sequence: Synthetic oligonucleotide
ugacuggcaucauggugac

SEQ ID NO: 2449651 - RNA, 19 nt, Artificial Sequence
  Description of Artificial Sequence: Synthetic oligonucleotide
uuccaucaagaagucugug

SEQ ID NO: 2449652 - RNA, 19 nt, Artificial Sequence
  Description of Artificial Sequence: Synthetic oligonucleotide
acgaaggcgauggaugaga

SEQ ID NO: 2449653 - RNA, 19 nt, Artificial Sequence
  Description of Artificial Sequence: Synthetic oligonucleotide
uuuccaaacuguggucuaa

SEQ ID NO: 2449654 - RNA, 19 nt, Artificial Sequence
  Description of Artificial Sequence: Synthetic oligonucleotide
uccacacaguugcgaacca

SEQ ID NO: 2449655 - RNA, 19 nt, Artificial Sequence
  Description of Artificial Sequence: Synthetic oligonucleotide
ugucccagguagcgcaggu

SEQ ID NO: 2449656 - RNA, 19 nt, Artificial Sequence
  Description of Artificial Sequence: Synthetic oligonucleotide
gagguuugagcugcuccgc

SEQ ID NO: 2449657 - RNA, 19 nt, Artificial Sequence
  Description of Artificial Sequence: Synthetic oligonucleotide
aagucucaggcuccauguu

SEQ ID NO: 2449658 - RNA, 19 nt, Artificial Sequence
  Description of Artificial Sequence: Synthetic oligonucleotide
aaaccacgaaggcgaugga

SEQ ID NO: 2449659 - RNA, 19 nt, Artificial Sequence
  Description of Artificial Sequence: Synthetic oligonucleotide
gcaacaacacucaauucca

SEQ ID NO: 2449660 - RNA, 19 nt, Artificial Sequence
  Description of Artificial Sequence: Synthetic oligonucleotide
cacucaauuccacaagaua

SEQ ID NO: 2449661 - RNA, 19 nt, Artificial Sequence
  Description of Artificial Sequence: Synthetic oligonucleotide
gcccuuagaacaaauggac

SEQ ID NO: 2449662 - RNA, 19 nt, Artificial Sequence
  Description of Artificial Sequence: Synthetic oligonucleotide
uugcgaaccaaggcgugac

SEQ ID NO: 2449663 - RNA, 19 nt, Artificial Sequence
  Description of Artificial Sequence: Synthetic oligonucleotide
ggucuaaaacacuccccug

SEQ ID NO: 2449664 - RNA, 19 nt, Artificial Sequence
  Description of Artificial Sequence: Synthetic oligonucleotide
augagacuuuccaaacugu

SEQ ID NO: 2449665 - RNA, 19 nt, Artificial Sequence
  Description of Artificial Sequence: Synthetic oligonucleotide
caucagagaccauguccug

SEQ ID NO: 2449666 - RNA, 19 nt, Artificial Sequence
  Description of Artificial Sequence: Synthetic oligonucleotide
caggugaaccagagguuug

SEQ ID NO: 2449667 - RNA, 19 nt, Artificial Sequence
  Description of Artificial Sequence: Synthetic oligonucleotide
accauguccugcccagcug

SEQ ID NO: 2449668 - RNA, 19 nt, Artificial Sequence
  Description of Artificial Sequence: Synthetic oligonucleotide
ccauguugucacacaaacc

SEQ ID NO: 2449669 - RNA, 19 nt, Artificial Sequence
  Description of Artificial Sequence: Synthetic oligonucleotide
gguagcgcaggugccaggg

SEQ ID NO: 2449670 - RNA, 19 nt, Artificial Sequence
  Description of Artificial Sequence: Synthetic oligonucleotide
ugacgguucuugucuccca

SEQ ID NO: 2449671 - RNA, 19 nt, Artificial Sequence
  Description of Artificial Sequence: Synthetic oligonucleotide
gggaccaggauucggaaaa

SEQ ID NO: 2449672 - RNA, 19 nt, Artificial Sequence
  Description of Artificial Sequence: Synthetic oligonucleotide
ccauguccugcccagcugg

SEQ ID NO: 2449673 - RNA, 19 nt, Artificial Sequence
  Description of Artificial Sequence: Synthetic oligonucleotide
uuucuggcugucccaggua

SEQ ID NO: 2449674 - RNA, 19 nt, Artificial Sequence
  Description of Artificial Sequence: Synthetic oligonucleotide
cuuuggcuacaaacucaug

SEQ ID NO: 2449675 - RNA, 19 nt, Artificial Sequence
  Description of Artificial Sequence: Synthetic oligonucleotide
ggcaauguccacacaguug

SEQ ID NO: 2449676 - RNA, 19 nt, Artificial Sequence
  Description of Artificial Sequence: Synthetic oligonucleotide
agaccauguccugcccagc

SEQ ID NO: 2449677 - RNA, 19 nt, Artificial Sequence
  Description of Artificial Sequence: Synthetic oligonucleotide
gucugugagguucucagau

SEQ ID NO: 2449678 - RNA, 19 nt, Artificial Sequence
  Description of Artificial Sequence: Synthetic oligonucleotide
gugaucaaggaaagucuca

SEQ ID NO: 2449679 - RNA, 19 nt, Artificial Sequence
  Description of Artificial Sequence: Synthetic oligonucleotide
accaaggcgugacgguucu

SEQ ID NO: 2449680 - RNA, 19 nt, Artificial Sequence
  Description of Artificial Sequence: Synthetic oligonucleotide
gaugcccuuccggaacaag

SEQ ID NO: 2449681 - RNA, 19 nt, Artificial Sequence
  Description of Artificial Sequence: Synthetic oligonucleotide
uuccaaacuguggucuaaa

SEQ ID NO: 2449682 - RNA, 19 nt, Artificial Sequence
  Description of Artificial Sequence: Synthetic oligonucleotide
uguucccugggaccaggau

SEQ ID NO: 2449683 - RNA, 19 nt, Artificial Sequence
  Description of Artificial Sequence: Synthetic oligonucleotide
cugugagguucucagaugu

SEQ ID NO: 2449684 - RNA, 19 nt, Artificial Sequence
  Description of Artificial Sequence: Synthetic oligonucleotide
gagcugcuccgcaaaauuc

SEQ ID NO: 2449685 - RNA, 19 nt, Artificial Sequence
  Description of Artificial Sequence: Synthetic oligonucleotide
aggcuccauguugucacac

SEQ ID NO: 2449686 - RNA, 19 nt, Artificial Sequence
  Description of Artificial Sequence: Synthetic oligonucleotide
gcccuuaagaaggaauacc

SEQ ID NO: 2449687 - RNA, 19 nt, Artificial Sequence
  Description of Artificial Sequence: Synthetic oligonucleotide
auuccggaagggagucggc

SEQ ID NO: 2449688 - RNA, 19 nt, Artificial Sequence
  Description of Artificial Sequence: Synthetic oligonucleotide
gugacgguucuugucuccc

SEQ ID NO: 2449689 - RNA, 19 nt, Artificial Sequence
  Description of Artificial Sequence: Synthetic oligonucleotide
gugcaacaacacucaauuc

SEQ ID NO: 2449690 - RNA, 19 nt, Artificial Sequence
  Description of Artificial Sequence: Synthetic oligonucleotide
gcgaaccaaggcgugacgg

SEQ ID NO: 2449691 - RNA, 19 nt, Artificial Sequence
  Description of Artificial Sequence: Synthetic oligonucleotide
ucucgugaucaaggaaagu

SEQ ID NO: 2449692 - RNA, 19 nt, Artificial Sequence
  Description of Artificial Sequence: Synthetic oligonucleotide
augcccuuccggaacaagu

SEQ ID NO: 2449693 - RNA, 19 nt, Artificial Sequence
  Description of Artificial Sequence: Synthetic oligonucleotide
ugcuggcccuuaagaagga

SEQ ID NO: 2449694 - RNA, 19 nt, Artificial Sequence
  Description of Artificial Sequence: Synthetic oligonucleotide
ggcccuuagaacaaaugga

SEQ ID NO: 2449695 - RNA, 19 nt, Artificial Sequence
  Description of Artificial Sequence: Synthetic oligonucleotide
cgcaaaauuccucauguca

SEQ ID NO: 2449696 - RNA, 19 nt, Artificial Sequence
  Description of Artificial Sequence: Synthetic oligonucleotide
caugguccaugcggaagcc

SEQ ID NO: 2449697 - RNA, 19 nt, Artificial Sequence
  Description of Artificial Sequence: Synthetic oligonucleotide
guacuccaucauguuaaug

SEQ ID NO: 2449698 - RNA, 19 nt, Artificial Sequence
  Description of Artificial Sequence: Synthetic oligonucleotide
ccugcccuguccauggagc

SEQ ID NO: 2449699 - RNA, 19 nt, Artificial Sequence
  Description of Artificial Sequence: Synthetic oligonucleotide
acacucaauuccacaagau

SEQ ID NO: 2449700 - RNA, 19 nt, Artificial Sequence
  Description of Artificial Sequence: Synthetic oligonucleotide
gaccaggauucggaaaauc

SEQ ID NO: 2449701 - RNA, 19 nt, Artificial Sequence
  Description of Artificial Sequence: Synthetic oligonucleotide
gcugucuguguucccuggg

SEQ ID NO: 2449702 - RNA, 19 nt, Artificial Sequence
  Description of Artificial Sequence: Synthetic oligonucleotide
gcgucgggcccuuagaaca

SEQ ID NO: 2449703 - RNA, 19 nt, Artificial Sequence
  Description of Artificial Sequence: Synthetic oligonucleotide
cagugaaccagggcacuug

SEQ ID NO: 2449704 - RNA, 19 nt, Artificial Sequence
  Description of Artificial Sequence: Synthetic oligonucleotide
cuuaaucacauaagccuuu

SEQ ID NO: 2449705 - RNA, 19 nt, Artificial Sequence
  Description of Artificial Sequence: Synthetic oligonucleotide
agguagcgcaggugccagg

SEQ ID NO: 2449706 - RNA, 19 nt, Artificial Sequence
  Description of Artificial Sequence: Synthetic oligonucleotide
cagagaccauguccugccc

SEQ ID NO: 2449707 - RNA, 19 nt, Artificial Sequence
  Description of Artificial Sequence: Synthetic oligonucleotide
ggaaaaucuuguacaccac

SEQ ID NO: 2449708 - RNA, 19 nt, Artificial Sequence
  Description of Artificial Sequence: Synthetic oligonucleotide
ccagcuggugcaacaacac

SEQ ID NO: 2449709 - RNA, 19 nt, Artificial Sequence
  Description of Artificial Sequence: Synthetic oligonucleotide
aguugcgaaccaaggcgug

SEQ ID NO: 2449710 - RNA, 19 nt, Artificial Sequence
  Description of Artificial Sequence: Synthetic oligonucleotide
acaaaccacgaaggcgaug

SEQ ID NO: 2449711 - RNA, 19 nt, Artificial Sequence
  Description of Artificial Sequence: Synthetic oligonucleotide
gagcgucgggcccuuagaa

SEQ ID NO: 2449712 - RNA, 19 nt, Artificial Sequence
  Description of Artificial Sequence: Synthetic oligonucleotide
ucgggcccuuagaacaaau

SEQ ID NO: 2449713 - RNA, 19 nt, Artificial Sequence
  Description of Artificial Sequence: Synthetic oligonucleotide
cgugaucaaggaaagucuc

SEQ ID NO: 2449714 - RNA, 19 nt, Artificial Sequence
  Description of Artificial Sequence: Synthetic oligonucleotide
cuuuccaaacuguggucua

SEQ ID NO: 2449715 - RNA, 19 nt, Artificial Sequence
  Description of Artificial Sequence: Synthetic oligonucleotide
cugcuccgcaaaauuccuc

SEQ ID NO: 2449716 - RNA, 19 nt, Artificial Sequence
  Description of Artificial Sequence: Synthetic oligonucleotide
acaaauggacuggccugcu

SEQ ID NO: 2449717 - RNA, 19 nt, Artificial Sequence
  Description of Artificial Sequence: Synthetic oligonucleotide
ggcugucccagguagcgca

SEQ ID NO: 2449718 - RNA, 19 nt, Artificial Sequence
  Description of Artificial Sequence: Synthetic oligonucleotide
acaccacaaucuucaugau

SEQ ID NO: 2449719 - RNA, 19 nt, Artificial Sequence
  Description of Artificial Sequence: Synthetic oligonucleotide
agcagugaaccagggcacu

SEQ ID NO: 2449720 - RNA, 19 nt, Artificial Sequence
  Description of Artificial Sequence: Synthetic oligonucleotide
guugcgaaccaaggcguga

SEQ ID NO: 2449721 - RNA, 19 nt, Artificial Sequence
  Description of Artificial Sequence: Synthetic oligonucleotide
caguugcgaaccaaggcgu

SEQ ID NO: 2449722 - RNA, 19 nt, Artificial Sequence
  Description of Artificial Sequence: Synthetic oligonucleotide
cacgaaggcgauggaugag

SEQ ID NO: 2449723 - RNA, 19 nt, Artificial Sequence
  Description of Artificial Sequence: Synthetic oligonucleotide
cuccauguugucacacaaa

SEQ ID NO: 2449724 - RNA, 19 nt, Artificial Sequence
  Description of Artificial Sequence: Synthetic oligonucleotide
aguguccuuuggcuacaaa

SEQ ID NO: 2449725 - RNA, 19 nt, Artificial Sequence
  Description of Artificial Sequence: Synthetic oligonucleotide
gaaggcgauggaugagacu

SEQ ID NO: 2449726 - RNA, 19 nt, Artificial Sequence
  Description of Artificial Sequence: Synthetic oligonucleotide
ggugaaccagagguuugag

SEQ ID NO: 2449727 - RNA, 19 nt, Artificial Sequence
  Description of Artificial Sequence: Synthetic oligonucleotide
cagguagcgcaggugccag

SEQ ID NO: 2449728 - RNA, 19 nt, Artificial Sequence
  Description of Artificial Sequence: Synthetic oligonucleotide
gcaaaauuccucaugucau

SEQ ID NO: 2449729 - RNA, 19 nt, Artificial Sequence
  Description of Artificial Sequence: Synthetic oligonucleotide
gcuggugcaacaacacuca

SEQ ID NO: 2449730 - RNA, 19 nt, Artificial Sequence
  Description of Artificial Sequence: Synthetic oligonucleotide
gaccucaaagauggacaga

SEQ ID NO: 2449731 - RNA, 19 nt, Artificial Sequence
  Description of Artificial Sequence: Synthetic oligonucleotide
ggaugagacuuuccaaacu

SEQ ID NO: 2449732 - RNA, 19 nt, Artificial Sequence
  Description of Artificial Sequence: Synthetic oligonucleotide
ggcgugacgguucuugucu

SEQ ID NO: 2449733 - RNA, 19 nt, Artificial Sequence
  Description of Artificial Sequence: Synthetic oligonucleotide
ggcacuugggagaucuuuc

SEQ ID NO: 2449734 - RNA, 19 nt, Artificial Sequence
  Description of Artificial Sequence: Synthetic oligonucleotide
ggaauaccaucucgugauc

SEQ ID NO: 2449735 - RNA, 19 nt, Artificial Sequence
  Description of Artificial Sequence: Synthetic oligonucleotide
cggaacaaguguccuuugg

SEQ ID NO: 2449736 - RNA, 19 nt, Artificial Sequence
  Description of Artificial Sequence: Synthetic oligonucleotide
cgauggaugagacuuucca

SEQ ID NO: 2449737 - RNA, 19 nt, Artificial Sequence
  Description of Artificial Sequence: Synthetic oligonucleotide
uaagccuuuuggggucuau

SEQ ID NO: 2449738 - RNA, 19 nt, Artificial Sequence
  Description of Artificial Sequence: Synthetic oligonucleotide
ugacuggaggggccuccau

SEQ ID NO: 2449739 - RNA, 19 nt, Artificial Sequence
  Description of Artificial Sequence: Synthetic oligonucleotide
acgguucuugucucccauu

SEQ ID NO: 2449740 - RNA, 19 nt, Artificial Sequence
  Description of Artificial Sequence: Synthetic oligonucleotide
cucaggcuccauguuguca

SEQ ID NO: 2449741 - RNA, 19 nt, Artificial Sequence
  Description of Artificial Sequence: Synthetic oligonucleotide
accagggcacuugggagau

SEQ ID NO: 2449742 - RNA, 19 nt, Artificial Sequence
  Description of Artificial Sequence: Synthetic oligonucleotide
ugcccuguccauggagcgu

SEQ ID NO: 2449743 - RNA, 19 nt, Artificial Sequence
  Description of Artificial Sequence: Synthetic oligonucleotide
gacgguucuugucucccau

SEQ ID NO: 2449744 - RNA, 19 nt, Artificial Sequence
  Description of Artificial Sequence: Synthetic oligonucleotide
gccuaucaggugaggacag

SEQ ID NO: 2449745 - RNA, 19 nt, Artificial Sequence
  Description of Artificial Sequence: Synthetic oligonucleotide
aaguguccuuuggcuacaa

SEQ ID NO: 2449746 - RNA, 19 nt, Artificial Sequence
  Description of Artificial Sequence: Synthetic oligonucleotide
gcggaagcccauuuccauc

SEQ ID NO: 2449747 - RNA, 19 nt, Artificial Sequence
  Description of Artificial Sequence: Synthetic oligonucleotide
cuggcccuuaagaaggaau

SEQ ID NO: 2449748 - RNA, 19 nt, Artificial Sequence
  Description of Artificial Sequence: Synthetic oligonucleotide
gucggccugacuggcagca

SEQ ID NO: 2449749 - RNA, 19 nt, Artificial Sequence
  Description of Artificial Sequence: Synthetic oligonucleotide
auguccugcccagcuggug

SEQ ID NO: 2449750 - RNA, 19 nt, Artificial Sequence
  Description of Artificial Sequence: Synthetic oligonucleotide
ggugccccugcccugucca

SEQ ID NO: 2449751 - RNA, 19 nt, Artificial Sequence
  Description of Artificial Sequence: Synthetic oligonucleotide
guggcaauguccacacagu

SEQ ID NO: 2449752 - RNA, 19 nt, Artificial Sequence
  Description of Artificial Sequence: Synthetic oligonucleotide
ugaugcccuuccggaacaa

SEQ ID NO: 2449753 - RNA, 19 nt, Artificial Sequence
  Description of Artificial Sequence: Synthetic oligonucleotide
ggcgauggaugagacuuuc

SEQ ID NO: 2449754 - RNA, 19 nt, Artificial Sequence
  Description of Artificial Sequence: Synthetic oligonucleotide
gucccagguagcgcaggug

SEQ ID NO: 2449755 - RNA, 19 nt, Artificial Sequence
  Description of Artificial Sequence: Synthetic oligonucleotide
caaguguccuuuggcuaca

SEQ ID NO: 2449756 - RNA, 19 nt, Artificial Sequence
  Description of Artificial Sequence: Synthetic oligonucleotide
ucggccugacuggcagcag

SEQ ID NO: 2449757 - RNA, 19 nt, Artificial Sequence
  Description of Artificial Sequence: Synthetic oligonucleotide
cccagguagcgcaggugcc

SEQ ID NO: 2449758 - RNA, 19 nt, Artificial Sequence
  Description of Artificial Sequence: Synthetic oligonucleotide
cagggcacuugggagaucu

SEQ ID NO: 2449759 - RNA, 19 nt, Artificial Sequence
  Description of Artificial Sequence: Synthetic oligonucleotide
acacuccccugcaggaggu

SEQ ID NO: 2449760 - RNA, 19 nt, Artificial Sequence
  Description of Artificial Sequence: Synthetic oligonucleotide
cuguguucccugggaccag

SEQ ID NO: 2449761 - RNA, 19 nt, Artificial Sequence
  Description of Artificial Sequence: Synthetic oligonucleotide
cgaaggcgauggaugagac

SEQ ID NO: 2449762 - RNA, 19 nt, Artificial Sequence
  Description of Artificial Sequence: Synthetic oligonucleotide
ggagcgucgggcccuuaga

SEQ ID NO: 2449763 - RNA, 19 nt, Artificial Sequence
  Description of Artificial Sequence: Synthetic oligonucleotide
gaagggagucggccugacu

SEQ ID NO: 2449764 - RNA, 19 nt, Artificial Sequence
  Description of Artificial Sequence: Synthetic oligonucleotide
gacagaccucaaagaugga

SEQ ID NO: 2449765 - RNA, 19 nt, Artificial Sequence
  Description of Artificial Sequence: Synthetic oligonucleotide
cgugacgguucuugucucc

SEQ ID NO: 2449766 - RNA, 19 nt, Artificial Sequence
  Description of Artificial Sequence: Synthetic oligonucleotide
ccgcaaaauuccucauguc

SEQ ID NO: 2449767 - RNA, 19 nt, Artificial Sequence
  Description of Artificial Sequence: Synthetic oligonucleotide
agggugccccugcccuguc

SEQ ID NO: 2449768 - RNA, 19 nt, Artificial Sequence
  Description of Artificial Sequence: Synthetic oligonucleotide
cuggugcaacaacacucaa

SEQ ID NO: 2449769 - RNA, 19 nt, Artificial Sequence
  Description of Artificial Sequence: Synthetic oligonucleotide
gcgauggaugagacuuucc

SEQ ID NO: 2449770 - RNA, 19 nt, Artificial Sequence
  Description of Artificial Sequence: Synthetic oligonucleotide
ccggaagggagucggccug

SEQ ID NO: 2449771 - RNA, 19 nt, Artificial Sequence
  Description of Artificial Sequence: Synthetic oligonucleotide
gggagucggccugacuggc

SEQ ID NO: 2449772 - RNA, 19 nt, Artificial Sequence
  Description of Artificial Sequence: Synthetic oligonucleotide
cccuuagaacaaauggacu

SEQ ID NO: 2449773 - RNA, 19 nt, Artificial Sequence
  Description of Artificial Sequence: Synthetic oligonucleotide
caaucuucaugaugcccuu

SEQ ID NO: 2449774 - RNA, 19 nt, Artificial Sequence
  Description of Artificial Sequence: Synthetic oligonucleotide
gguucucagauguggcaau

SEQ ID NO: 2449775 - RNA, 19 nt, Artificial Sequence
  Description of Artificial Sequence: Synthetic oligonucleotide
ccuuaagaaggaauaccau

SEQ ID NO: 2449776 - RNA, 19 nt, Artificial Sequence
  Description of Artificial Sequence: Synthetic oligonucleotide
ccuuuggcuacaaacucau

SEQ ID NO: 2449777 - RNA, 19 nt, Artificial Sequence
  Description of Artificial Sequence: Synthetic oligonucleotide
ggagaucuuucugccuauc

SEQ ID NO: 2449778 - RNA, 19 nt, Artificial Sequence
  Description of Artificial Sequence: Synthetic oligonucleotide
cagcuggugcaacaacacu

SEQ ID NO: 2449779 - RNA, 19 nt, Artificial Sequence
  Description of Artificial Sequence: Synthetic oligonucleotide
ccaucucgugaucaaggaa

SEQ ID NO: 2449780 - RNA, 19 nt, Artificial Sequence
  Description of Artificial Sequence: Synthetic oligonucleotide
gcccuguccauggagcguc

SEQ ID NO: 2449781 - RNA, 19 nt, Artificial Sequence
  Description of Artificial Sequence: Synthetic oligonucleotide
cauaagccuuuuggggucu

SEQ ID NO: 2449782 - RNA, 19 nt, Artificial Sequence
  Description of Artificial Sequence: Synthetic oligonucleotide
cgggcccuuagaacaaaug

SEQ ID NO: 2449783 - RNA, 19 nt, Artificial Sequence
  Description of Artificial Sequence: Synthetic oligonucleotide
cccugcccuguccauggag

SEQ ID NO: 2449784 - RNA, 19 nt, Artificial Sequence
  Description of Artificial Sequence: Synthetic oligonucleotide
gcgugacgguucuugucuc

SEQ ID NO: 2449785 - RNA, 19 nt, Artificial Sequence
  Description of Artificial Sequence: Synthetic oligonucleotide
ccggaacaaguguccuuug

SEQ ID NO: 2449786 - RNA, 19 nt, Artificial Sequence
  Description of Artificial Sequence: Synthetic oligonucleotide
auaagccuuuuggggucua

SEQ ID NO: 2449787 - RNA, 19 nt, Artificial Sequence
  Description of Artificial Sequence: Synthetic oligonucleotide
gguacuccaucauguuaau

SEQ ID NO: 2449788 - RNA, 19 nt, Artificial Sequence
  Description of Artificial Sequence: Synthetic oligonucleotide
uccugcccagcuggugcaa

SEQ ID NO: 2449789 - RNA, 19 nt, Artificial Sequence
  Description of Artificial Sequence: Synthetic oligonucleotide
accagagguuugagcugcu

SEQ ID NO: 2449790 - RNA, 19 nt, Artificial Sequence
  Description of Artificial Sequence: Synthetic oligonucleotide
gucucccauuucuggcugu

SEQ ID NO: 2449791 - RNA, 19 nt, Artificial Sequence
  Description of Artificial Sequence: Synthetic oligonucleotide
cauguccugcccagcuggu

SEQ ID NO: 2449792 - RNA, 19 nt, Artificial Sequence
  Description of Artificial Sequence: Synthetic oligonucleotide
cuccccugcaggagguacu

SEQ ID NO: 2449793 - RNA, 19 nt, Artificial Sequence
  Description of Artificial Sequence: Synthetic oligonucleotide
cccuguccauggagcgucg

SEQ ID NO: 2449794 - RNA, 19 nt, Artificial Sequence
  Description of Artificial Sequence: Synthetic oligonucleotide
aggcgauggaugagacuuu

SEQ ID NO: 2449795 - RNA, 19 nt, Artificial Sequence
  Description of Artificial Sequence: Synthetic oligonucleotide
cacaaaccacgaaggcgau

SEQ ID NO: 2449796 - RNA, 19 nt, Artificial Sequence
  Description of Artificial Sequence: Synthetic oligonucleotide
ccuguccauggagcgucgg

SEQ ID NO: 2449797 - RNA, 19 nt, Artificial Sequence
  Description of Artificial Sequence: Synthetic oligonucleotide
ggaagggagucggccugac

SEQ ID NO: 2449798 - RNA, 19 nt, Artificial Sequence
  Description of Artificial Sequence: Synthetic oligonucleotide
gcccuuccggaacaagugu

SEQ ID NO: 2449799 - RNA, 19 nt, Artificial Sequence
  Description of Artificial Sequence: Synthetic oligonucleotide
gccucugugcugucugugu

SEQ ID NO: 2449800 - RNA, 19 nt, Artificial Sequence
  Description of Artificial Sequence: Synthetic oligonucleotide
ccagggugccccugcccug

SEQ ID NO: 2449801 - RNA, 19 nt, Artificial Sequence
  Description of Artificial Sequence: Synthetic oligonucleotide
gcugcuccgcaaaauuccu

SEQ ID NO: 2449802 - RNA, 19 nt, Artificial Sequence
  Description of Artificial Sequence: Synthetic oligonucleotide
gggagaucuuucugccuau

SEQ ID NO: 2449803 - RNA, 19 nt, Artificial Sequence
  Description of Artificial Sequence: Synthetic oligonucleotide
gucgggcccuuagaacaaa

SEQ ID NO: 2449804 - RNA, 19 nt, Artificial Sequence
  Description of Artificial Sequence: Synthetic oligonucleotide
ccagguagcgcaggugcca

SEQ ID NO: 2449805 - RNA, 19 nt, Artificial Sequence
  Description of Artificial Sequence: Synthetic oligonucleotide
ggagucggccugacuggca

SEQ ID NO: 2449806 - RNA, 19 nt, Artificial Sequence
  Description of Artificial Sequence: Synthetic oligonucleotide
ccagagguuugagcugcuc

SEQ ID NO: 2449807 - RNA, 19 nt, Artificial Sequence
  Description of Artificial Sequence: Synthetic oligonucleotide
gccugacuggcagcaguga

SEQ ID NO: 2449808 - RNA, 19 nt, Artificial Sequence
  Description of Artificial Sequence: Synthetic oligonucleotide
ccaggugaaccagagguuu

SEQ ID NO: 2449809 - RNA, 19 nt, Artificial Sequence
  Description of Artificial Sequence: Synthetic oligonucleotide
ccuaucaggugaggacaga

SEQ ID NO: 2449810 - RNA, 19 nt, Artificial Sequence
  Description of Artificial Sequence: Synthetic oligonucleotide
gcuccgcaaaauuccucau

SEQ ID NO: 2449811 - RNA, 19 nt, Artificial Sequence
  Description of Artificial Sequence: Synthetic oligonucleotide
gcuggcccuuaagaaggaa

SEQ ID NO: 2449812 - RNA, 19 nt, Artificial Sequence
  Description of Artificial Sequence: Synthetic oligonucleotide
gacuggcaucauggugacu

SEQ ID NO: 2449813 - RNA, 19 nt, Artificial Sequence
  Description of Artificial Sequence: Synthetic oligonucleotide
agggcacuugggagaucuu

SEQ ID NO: 2449814 - RNA, 19 nt, Artificial Sequence
  Description of Artificial Sequence: Synthetic oligonucleotide
ccacacaguugcgaaccaa

SEQ ID NO: 2449815 - RNA, 19 nt, Artificial Sequence
  Description of Artificial Sequence: Synthetic oligonucleotide
ggagagagacagggccucu

SEQ ID NO: 2449816 - RNA, 19 nt, Artificial Sequence
  Description of Artificial Sequence: Synthetic oligonucleotide
ggaccaggauucggaaaau

SEQ ID NO: 2449817 - RNA, 19 nt, Artificial Sequence
  Description of Artificial Sequence: Synthetic oligonucleotide
cgucgggcccuuagaacaa

SEQ ID NO: 2449818 - RNA, 19 nt, Artificial Sequence
  Description of Artificial Sequence: Synthetic oligonucleotide
ggaaagucucaggcuccau

SEQ ID NO: 2449819 - RNA, 19 nt, Artificial Sequence
  Description of Artificial Sequence: Synthetic oligonucleotide
gcagugaaccagggcacuu

SEQ ID NO: 2449820 - RNA, 19 nt, Artificial Sequence
  Description of Artificial Sequence: Synthetic oligonucleotide
gugccccugcccuguccau

SEQ ID NO: 2449821 - RNA, 19 nt, Artificial Sequence
  Description of Artificial Sequence: Synthetic oligonucleotide
cacuccccugcaggaggua

SEQ ID NO: 2449822 - RNA, 19 nt, Artificial Sequence
  Description of Artificial Sequence: Synthetic oligonucleotide
ccauggagcgucgggcccu

SEQ ID NO: 2449823 - RNA, 19 nt, Artificial Sequence
  Description of Artificial Sequence: Synthetic oligonucleotide
auggagcgucgggcccuua

SEQ ID NO: 2449824 - RNA, 19 nt, Artificial Sequence
  Description of Artificial Sequence: Synthetic oligonucleotide
cgcaggugccagggugccc

SEQ ID NO: 2449825 - RNA, 19 nt, Artificial Sequence
  Description of Artificial Sequence: Synthetic oligonucleotide
cauggagcgucgggcccuu

SEQ ID NO: 2449826 - RNA, 19 nt, Artificial Sequence
  Description of Artificial Sequence: Synthetic oligonucleotide
cggaagggagucggccuga

SEQ ID NO: 2449827 - RNA, 19 nt, Artificial Sequence
  Description of Artificial Sequence: Synthetic oligonucleotide
ccccugcccuguccaugga

SEQ ID NO: 2449828 - RNA, 19 nt, Artificial Sequence
  Description of Artificial Sequence: Synthetic oligonucleotide
ccaaggcgugacgguucuu

SEQ ID NO: 2449829 - RNA, 19 nt, Artificial Sequence
  Description of Artificial Sequence: Synthetic oligonucleotide
aauguaaagaaccuaaggg

SEQ ID NO: 2449830 - RNA, 19 nt, Artificial Sequence
  Description of Artificial Sequence: Synthetic oligonucleotide
uuagauaauaaauagagaa

SEQ ID NO: 2449831 - RNA, 19 nt, Artificial Sequence
  Description of Artificial Sequence: Synthetic oligonucleotide
uauuacaauguaaagaacc

SEQ ID NO: 2449832 - RNA, 19 nt, Artificial Sequence
  Description of Artificial Sequence: Synthetic oligonucleotide
cauuagauaauaaauagag

SEQ ID NO: 2449833 - RNA, 19 nt, Artificial Sequence
  Description of Artificial Sequence: Synthetic oligonucleotide
aaugagacggauuaaguug

SEQ ID NO: 2449834 - RNA, 19 nt, Artificial Sequence
  Description of Artificial Sequence: Synthetic oligonucleotide
uuuggauucacauugagaa

SEQ ID NO: 2449835 - RNA, 19 nt, Artificial Sequence
  Description of Artificial Sequence: Synthetic oligonucleotide
uaauaaauagagaaugggc

SEQ ID NO: 2449836 - RNA, 19 nt, Artificial Sequence
  Description of Artificial Sequence: Synthetic oligonucleotide
auguaaagaaccuaagggg

SEQ ID NO: 2449837 - RNA, 19 nt, Artificial Sequence
  Description of Artificial Sequence: Synthetic oligonucleotide
aaagcuacccagcucauuc

SEQ ID NO: 2449838 - RNA, 19 nt, Artificial Sequence
  Description of Artificial Sequence: Synthetic oligonucleotide
uguaaagaaccuaaggggc

SEQ ID NO: 2449839 - RNA, 19 nt, Artificial Sequence
  Description of Artificial Sequence: Synthetic oligonucleotide
aauaaauagagaaugggca

SEQ ID NO: 2449840 - RNA, 19 nt, Artificial Sequence
  Description of Artificial Sequence: Synthetic oligonucleotide
aguucugcacuccacagcc

SEQ ID NO: 2449841 - RNA, 19 nt, Artificial Sequence
  Description of Artificial Sequence: Synthetic oligonucleotide
gauuaaguuguagaaaagg

SEQ ID NO: 2449842 - RNA, 19 nt, Artificial Sequence
  Description of Artificial Sequence: Synthetic oligonucleotide
uauuucuuuaauauuacau

SEQ ID NO: 2449843 - RNA, 19 nt, Artificial Sequence
  Description of Artificial Sequence: Synthetic oligonucleotide
acuaacaacccuuuccuac

SEQ ID NO: 2449844 - RNA, 19 nt, Artificial Sequence
  Description of Artificial Sequence: Synthetic oligonucleotide
aauucuguccaacucaggu

SEQ ID NO: 2449845 - RNA, 19 nt, Artificial Sequence
  Description of Artificial Sequence: Synthetic oligonucleotide
ucuuaggucacacugccag

SEQ ID NO: 2449846 - RNA, 19 nt, Artificial Sequence
  Description of Artificial Sequence: Synthetic oligonucleotide
auagagaaugggcagugcc

SEQ ID NO: 2449847 - RNA, 19 nt, Artificial Sequence
  Description of Artificial Sequence: Synthetic oligonucleotide
caauaguuugucaagagug

SEQ ID NO: 2449848 - RNA, 19 nt, Artificial Sequence
  Description of Artificial Sequence: Synthetic oligonucleotide
auaaauagagaaugggcag

SEQ ID NO: 2449849 - RNA, 19 nt, Artificial Sequence
  Description of Artificial Sequence: Synthetic oligonucleotide
ggaacuauaaauucugucc

SEQ ID NO: 2449850 - RNA, 19 nt, Artificial Sequence
  Description of Artificial Sequence: Synthetic oligonucleotide
uucaccuaggccuugacug

SEQ ID NO: 2449851 - RNA, 19 nt, Artificial Sequence
  Description of Artificial Sequence: Synthetic oligonucleotide
ucuuuaauauuacauuuaa

SEQ ID NO: 2449852 - RNA, 19 nt, Artificial Sequence
  Description of Artificial Sequence: Synthetic oligonucleotide
uacaauguaaagaaccuaa

SEQ ID NO: 2449853 - RNA, 19 nt, Artificial Sequence
  Description of Artificial Sequence: Synthetic oligonucleotide
auaaauucuguccaacuca

SEQ ID NO: 2449854 - RNA, 19 nt, Artificial Sequence
  Description of Artificial Sequence: Synthetic oligonucleotide
aauaguuugucaagagugg

SEQ ID NO: 2449855 - RNA, 19 nt, Artificial Sequence
  Description of Artificial Sequence: Synthetic oligonucleotide
uaaauucuguccaacucag

SEQ ID NO: 2449856 - RNA, 19 nt, Artificial Sequence
  Description of Artificial Sequence: Synthetic oligonucleotide
ucauuguccguucggaagg

SEQ ID NO: 2449857 - RNA, 19 nt, Artificial Sequence
  Description of Artificial Sequence: Synthetic oligonucleotide
aaauacagcauuauuacaa

SEQ ID NO: 2449858 - RNA, 19 nt, Artificial Sequence
  Description of Artificial Sequence: Synthetic oligonucleotide
ugagaauacgaccugugca

SEQ ID NO: 2449859 - RNA, 19 nt, Artificial Sequence
  Description of Artificial Sequence: Synthetic oligonucleotide
ucagguagcaccagaaaug

SEQ ID NO: 2449860 - RNA, 19 nt, Artificial Sequence
  Description of Artificial Sequence: Synthetic oligonucleotide
caauguaaagaaccuaagg

SEQ ID NO: 2449861 - RNA, 19 nt, Artificial Sequence
  Description of Artificial Sequence: Synthetic oligonucleotide
ucaguaauggaaacugagc

SEQ ID NO: 2449862 - RNA, 19 nt, Artificial Sequence
  Description of Artificial Sequence: Synthetic oligonucleotide
agcaacaggaacuauaaau

SEQ ID NO: 2449863 - RNA, 19 nt, Artificial Sequence
  Description of Artificial Sequence: Synthetic oligonucleotide
aggguuacagucaucaggc

SEQ ID NO: 2449864 - RNA, 19 nt, Artificial Sequence
  Description of Artificial Sequence: Synthetic oligonucleotide
ucacauugagaauacgacc

SEQ ID NO: 2449865 - RNA, 19 nt, Artificial Sequence
  Description of Artificial Sequence: Synthetic oligonucleotide
aaaugagacggauuaaguu

SEQ ID NO: 2449866 - RNA, 19 nt, Artificial Sequence
  Description of Artificial Sequence: Synthetic oligonucleotide
uagauaauaaauagagaau

SEQ ID NO: 2449867 - RNA, 19 nt, Artificial Sequence
  Description of Artificial Sequence: Synthetic oligonucleotide
agucugaggggcuacgagc

SEQ ID NO: 2449868 - RNA, 19 nt, Artificial Sequence
  Description of Artificial Sequence: Synthetic oligonucleotide
aggaacuauaaauucuguc

SEQ ID NO: 2449869 - RNA, 19 nt, Artificial Sequence
  Description of Artificial Sequence: Synthetic oligonucleotide
gaacuauaaauucugucca

SEQ ID NO: 2449870 - RNA, 19 nt, Artificial Sequence
  Description of Artificial Sequence: Synthetic oligonucleotide
uuuugaaguggcauuagau

SEQ ID NO: 2449871 - RNA, 19 nt, Artificial Sequence
  Description of Artificial Sequence: Synthetic oligonucleotide
ugacauucgucaaagcuac

SEQ ID NO: 2449872 - RNA, 19 nt, Artificial Sequence
  Description of Artificial Sequence: Synthetic oligonucleotide
aauacagcauuauuacaau

SEQ ID NO: 2449873 - RNA, 19 nt, Artificial Sequence
  Description of Artificial Sequence: Synthetic oligonucleotide
guuguuuucaaggagccag

SEQ ID NO: 2449874 - RNA, 19 nt, Artificial Sequence
  Description of Artificial Sequence: Synthetic oligonucleotide
ucaauaaaauaaccuggga

SEQ ID NO: 2449875 - RNA, 19 nt, Artificial Sequence
  Description of Artificial Sequence: Synthetic oligonucleotide
uucugugcaauugacaucu

SEQ ID NO: 2449876 - RNA, 19 nt, Artificial Sequence
  Description of Artificial Sequence: Synthetic oligonucleotide
acauucgucaaagcuaccc

SEQ ID NO: 2449877 - RNA, 19 nt, Artificial Sequence
  Description of Artificial Sequence: Synthetic oligonucleotide
gagaauacgaccugugcac

SEQ ID NO: 2449878 - RNA, 19 nt, Artificial Sequence
  Description of Artificial Sequence: Synthetic oligonucleotide
uugacauucgucaaagcua

SEQ ID NO: 2449879 - RNA, 19 nt, Artificial Sequence
  Description of Artificial Sequence: Synthetic oligonucleotide
aguaauggaaacugagcug

SEQ ID NO: 2449880 - RNA, 19 nt, Artificial Sequence
  Description of Artificial Sequence: Synthetic oligonucleotide
ugucuuaggucacacugcc

SEQ ID NO: 2449881 - RNA, 19 nt, Artificial Sequence
  Description of Artificial Sequence: Synthetic oligonucleotide
cucaguaauggaaacugag

SEQ ID NO: 2449882 - RNA, 19 nt, Artificial Sequence
  Description of Artificial Sequence: Synthetic oligonucleotide
agaaaugagacggauuaag

SEQ ID NO: 2449883 - RNA, 19 nt, Artificial Sequence
  Description of Artificial Sequence: Synthetic oligonucleotide
acuauaaauucuguccaac

SEQ ID NO: 2449884 - RNA, 19 nt, Artificial Sequence
  Description of Artificial Sequence: Synthetic oligonucleotide
aauagagaaugggcagugc

SEQ ID NO: 2449885 - RNA, 19 nt, Artificial Sequence
  Description of Artificial Sequence: Synthetic oligonucleotide
gguacuaacaacccuuucc

SEQ ID NO: 2449886 - RNA, 19 nt, Artificial Sequence
  Description of Artificial Sequence: Synthetic oligonucleotide
uugagaauacgaccugugc

SEQ ID NO: 2449887 - RNA, 19 nt, Artificial Sequence
  Description of Artificial Sequence: Synthetic oligonucleotide
cuaacaacccuuuccuacc

SEQ ID NO: 2449888 - RNA, 19 nt, Artificial Sequence
  Description of Artificial Sequence: Synthetic oligonucleotide
auuaaguuguagaaaaggu

SEQ ID NO: 2449889 - RNA, 19 nt, Artificial Sequence
  Description of Artificial Sequence: Synthetic oligonucleotide
uuauuacaauguaaagaac

SEQ ID NO: 2449890 - RNA, 19 nt, Artificial Sequence
  Description of Artificial Sequence: Synthetic oligonucleotide
cuuugcuugacauucguca

SEQ ID NO: 2449891 - RNA, 19 nt, Artificial Sequence
  Description of Artificial Sequence: Synthetic oligonucleotide
ucaggcaauaguuugucaa

SEQ ID NO: 2449892 - RNA, 19 nt, Artificial Sequence
  Description of Artificial Sequence: Synthetic oligonucleotide
uuuacagagggcagcugag

SEQ ID NO: 2449893 - RNA, 19 nt, Artificial Sequence
  Description of Artificial Sequence: Synthetic oligonucleotide
aguggcauuagauaauaaa

SEQ ID NO: 2449894 - RNA, 19 nt, Artificial Sequence
  Description of Artificial Sequence: Synthetic oligonucleotide
aaauagagaaugggcagug

SEQ ID NO: 2449895 - RNA, 19 nt, Artificial Sequence
  Description of Artificial Sequence: Synthetic oligonucleotide
aacaggaacuauaaauucu

SEQ ID NO: 2449896 - RNA, 19 nt, Artificial Sequence
  Description of Artificial Sequence: Synthetic oligonucleotide
agagcucaguaauggaaac

SEQ ID NO: 2449897 - RNA, 19 nt, Artificial Sequence
  Description of Artificial Sequence: Synthetic oligonucleotide
aaggguaggcuugagggag

SEQ ID NO: 2449898 - RNA, 19 nt, Artificial Sequence
  Description of Artificial Sequence: Synthetic oligonucleotide
ugugaucagaggccuagcc

SEQ ID NO: 2449899 - RNA, 19 nt, Artificial Sequence
  Description of Artificial Sequence: Synthetic oligonucleotide
ucgaggaggcagcuuaacg

SEQ ID NO: 2449900 - RNA, 19 nt, Artificial Sequence
  Description of Artificial Sequence: Synthetic oligonucleotide
gucaaagcuacccagcuca

SEQ ID NO: 2449901 - RNA, 19 nt, Artificial Sequence
  Description of Artificial Sequence: Synthetic oligonucleotide
cuugagggagaccaagagg

SEQ ID NO: 2449902 - RNA, 19 nt, Artificial Sequence
  Description of Artificial Sequence: Synthetic oligonucleotide
auaaaauaaccugggagca

SEQ ID NO: 2449903 - RNA, 19 nt, Artificial Sequence
  Description of Artificial Sequence: Synthetic oligonucleotide
auauuacauuuaaauauuc

SEQ ID NO: 2449904 - RNA, 19 nt, Artificial Sequence
  Description of Artificial Sequence: Synthetic oligonucleotide
auucgucaaagcuacccag

SEQ ID NO: 2449905 - RNA, 19 nt, Artificial Sequence
  Description of Artificial Sequence: Synthetic oligonucleotide
guaaagaaccuaaggggcg

SEQ ID NO: 2449906 - RNA, 19 nt, Artificial Sequence
  Description of Artificial Sequence: Synthetic oligonucleotide
ucugguuuacagagggcag

SEQ ID NO: 2449907 - RNA, 19 nt, Artificial Sequence
  Description of Artificial Sequence: Synthetic oligonucleotide
auaguuugucaagaguggg

SEQ ID NO: 2449908 - RNA, 19 nt, Artificial Sequence
  Description of Artificial Sequence: Synthetic oligonucleotide
acaguauucgaggaggcag

SEQ ID NO: 2449909 - RNA, 19 nt, Artificial Sequence
  Description of Artificial Sequence: Synthetic oligonucleotide
aaugagccacaguucaccu

SEQ ID NO: 2449910 - RNA, 19 nt, Artificial Sequence
  Description of Artificial Sequence: Synthetic oligonucleotide
uguccguucggaaggguag

SEQ ID NO: 2449911 - RNA, 19 nt, Artificial Sequence
  Description of Artificial Sequence: Synthetic oligonucleotide
uaaugagccacaguucacc

SEQ ID NO: 2449912 - RNA, 19 nt, Artificial Sequence
  Description of Artificial Sequence: Synthetic oligonucleotide
acaagcuuuggauucacau

SEQ ID NO: 2449913 - RNA, 19 nt, Artificial Sequence
  Description of Artificial Sequence: Synthetic oligonucleotide
aaaagguccuuugcuugac

SEQ ID NO: 2449914 - RNA, 19 nt, Artificial Sequence
  Description of Artificial Sequence: Synthetic oligonucleotide
agacggauuaaguuguaga

SEQ ID NO: 2449915 - RNA, 19 nt, Artificial Sequence
  Description of Artificial Sequence: Synthetic oligonucleotide
uuaggucacacugccagag

SEQ ID NO: 2449916 - RNA, 19 nt, Artificial Sequence
  Description of Artificial Sequence: Synthetic oligonucleotide
caacaggaacuauaaauuc

SEQ ID NO: 2449917 - RNA, 19 nt, Artificial Sequence
  Description of Artificial Sequence: Synthetic oligonucleotide
uucgucaaagcuacccagc

SEQ ID NO: 2449918 - RNA, 19 nt, Artificial Sequence
  Description of Artificial Sequence: Synthetic oligonucleotide
aagucuucacucucaggcu

SEQ ID NO: 2449919 - RNA, 19 nt, Artificial Sequence
  Description of Artificial Sequence: Synthetic oligonucleotide
auacagguacuaacaaccc

SEQ ID NO: 2449920 - RNA, 19 nt, Artificial Sequence
  Description of Artificial Sequence: Synthetic oligonucleotide
ucaucaggcaauaguuugu

SEQ ID NO: 2449921 - RNA, 19 nt, Artificial Sequence
  Description of Artificial Sequence: Synthetic oligonucleotide
auacagcauuauuacaaug

SEQ ID NO: 2449922 - RNA, 19 nt, Artificial Sequence
  Description of Artificial Sequence: Synthetic oligonucleotide
auucacauugagaauacga

SEQ ID NO: 2449923 - RNA, 19 nt, Artificial Sequence
  Description of Artificial Sequence: Synthetic oligonucleotide
ugugcacaguauucgagga

SEQ ID NO: 2449924 - RNA, 19 nt, Artificial Sequence
  Description of Artificial Sequence: Synthetic oligonucleotide
auaaccugggagcagcagu

SEQ ID NO: 2449925 - RNA, 19 nt, Artificial Sequence
  Description of Artificial Sequence: Synthetic oligonucleotide
uagccuuccuagcaacagg

SEQ ID NO: 2449926 - RNA, 19 nt, Artificial Sequence
  Description of Artificial Sequence: Synthetic oligonucleotide
auuuugaaguggcauuaga

SEQ ID NO: 2449927 - RNA, 19 nt, Artificial Sequence
  Description of Artificial Sequence: Synthetic oligonucleotide
auuagauaauaaauagaga

SEQ ID NO: 2449928 - RNA, 19 nt, Artificial Sequence
  Description of Artificial Sequence: Synthetic oligonucleotide
uaguuugucaagagugggu

SEQ ID NO: 2449929 - RNA, 19 nt, Artificial Sequence
  Description of Artificial Sequence: Synthetic oligonucleotide
cuuaggguuacagucauca

SEQ ID NO: 2449930 - RNA, 19 nt, Artificial Sequence
  Description of Artificial Sequence: Synthetic oligonucleotide
gaauacgaccugugcacag

SEQ ID NO: 2449931 - RNA, 19 nt, Artificial Sequence
  Description of Artificial Sequence: Synthetic oligonucleotide
gguaaugagccacaguuca

SEQ ID NO: 2449932 - RNA, 19 nt, Artificial Sequence
  Description of Artificial Sequence: Synthetic oligonucleotide
uaacaacccuuuccuaccc

SEQ ID NO: 2449933 - RNA, 19 nt, Artificial Sequence
  Description of Artificial Sequence: Synthetic oligonucleotide
caggcaauaguuugucaag

SEQ ID NO: 2449934 - RNA, 19 nt, Artificial Sequence
  Description of Artificial Sequence: Synthetic oligonucleotide
guuuacagagggcagcuga

SEQ ID NO: 2449935 - RNA, 19 nt, Artificial Sequence
  Description of Artificial Sequence: Synthetic oligonucleotide
ucgucaaagcuacccagcu

SEQ ID NO: 2449936 - RNA, 19 nt, Artificial Sequence
  Description of Artificial Sequence: Synthetic oligonucleotide
ucucauuuugaaguggcau

SEQ ID NO: 2449937 - RNA, 19 nt, Artificial Sequence
  Description of Artificial Sequence: Synthetic oligonucleotide
agaggccuagccuuccuag

SEQ ID NO: 2449938 - RNA, 19 nt, Artificial Sequence
  Description of Artificial Sequence: Synthetic oligonucleotide
aauaaccugggagcagcag

SEQ ID NO: 2449939 - RNA, 19 nt, Artificial Sequence
  Description of Artificial Sequence: Synthetic oligonucleotide
cucauucugugcaauugac

SEQ ID NO: 2449940 - RNA, 19 nt, Artificial Sequence
  Description of Artificial Sequence: Synthetic oligonucleotide
cuagcaacaggaacuauaa

SEQ ID NO: 2449941 - RNA, 19 nt, Artificial Sequence
  Description of Artificial Sequence: Synthetic oligonucleotide
gcauuauuacaauguaaag

SEQ ID NO: 2449942 - RNA, 19 nt, Artificial Sequence
  Description of Artificial Sequence: Synthetic oligonucleotide
aacccuuuccuacccauuu

SEQ ID NO: 2449943 - RNA, 19 nt, Artificial Sequence
  Description of Artificial Sequence: Synthetic oligonucleotide
guaggcuugagggagacca

SEQ ID NO: 2449944 - RNA, 19 nt, Artificial Sequence
  Description of Artificial Sequence: Synthetic oligonucleotide
gaccugugcacaguauucg

SEQ ID NO: 2449945 - RNA, 19 nt, Artificial Sequence
  Description of Artificial Sequence: Synthetic oligonucleotide
aaagaaccuaaggggcggg

SEQ ID NO: 2449946 - RNA, 19 nt, Artificial Sequence
  Description of Artificial Sequence: Synthetic oligonucleotide
acgagcugcgguaaugagc

SEQ ID NO: 2449947 - RNA, 19 nt, Artificial Sequence
  Description of Artificial Sequence: Synthetic oligonucleotide
uuguuuucaaggagccaga

SEQ ID NO: 2449948 - RNA, 19 nt, Artificial Sequence
  Description of Artificial Sequence: Synthetic oligonucleotide
uacagagggcagcugaguc

SEQ ID NO: 2449949 - RNA, 19 nt, Artificial Sequence
  Description of Artificial Sequence: Synthetic oligonucleotide
acaauguaaagaaccuaag

SEQ ID NO: 2449950 - RNA, 19 nt, Artificial Sequence
  Description of Artificial Sequence: Synthetic oligonucleotide
acauugagaauacgaccug

SEQ ID NO: 2449951 - RNA, 19 nt, Artificial Sequence
  Description of Artificial Sequence: Synthetic oligonucleotide
cacauugagaauacgaccu

SEQ ID NO: 2449952 - RNA, 19 nt, Artificial Sequence
  Description of Artificial Sequence: Synthetic oligonucleotide
aggcagcuuaacgagcugc

SEQ ID NO: 2449953 - RNA, 19 nt, Artificial Sequence
  Description of Artificial Sequence: Synthetic oligonucleotide
guagcaccagaaaugagac

SEQ ID NO: 2449954 - RNA, 19 nt, Artificial Sequence
  Description of Artificial Sequence: Synthetic oligonucleotide
caguauucgaggaggcagc

SEQ ID NO: 2449955 - RNA, 19 nt, Artificial Sequence
  Description of Artificial Sequence: Synthetic oligonucleotide
uuaacgagcugcgguaaug

SEQ ID NO: 2449956 - RNA, 19 nt, Artificial Sequence
  Description of Artificial Sequence: Synthetic oligonucleotide
ugcaauugacaucuuuguu

SEQ ID NO: 2449957 - RNA, 19 nt, Artificial Sequence
  Description of Artificial Sequence: Synthetic oligonucleotide
agccagacaagcuuuggau

SEQ ID NO: 2449958 - RNA, 19 nt, Artificial Sequence
  Description of Artificial Sequence: Synthetic oligonucleotide
ggcgggguuguuuucaagg

SEQ ID NO: 2449959 - RNA, 19 nt, Artificial Sequence
  Description of Artificial Sequence: Synthetic oligonucleotide
ugccagagggagcucuagg

SEQ ID NO: 2449960 - RNA, 19 nt, Artificial Sequence
  Description of Artificial Sequence: Synthetic oligonucleotide
uaggucacacugccagagg

SEQ ID NO: 2449961 - RNA, 19 nt, Artificial Sequence
  Description of Artificial Sequence: Synthetic oligonucleotide
aauacgaccugugcacagu

SEQ ID NO: 2449962 - RNA, 19 nt, Artificial Sequence
  Description of Artificial Sequence: Synthetic oligonucleotide
caguaauggaaacugagcu

SEQ ID NO: 2449963 - RNA, 19 nt, Artificial Sequence
  Description of Artificial Sequence: Synthetic oligonucleotide
uuacaauguaaagaaccua

SEQ ID NO: 2449964 - RNA, 19 nt, Artificial Sequence
  Description of Artificial Sequence: Synthetic oligonucleotide
aagcuacccagcucauucu

SEQ ID NO: 2449965 - RNA, 19 nt, Artificial Sequence
  Description of Artificial Sequence: Synthetic oligonucleotide
cugggguuggucucuuucc

SEQ ID NO: 2449966 - RNA, 19 nt, Artificial Sequence
  Description of Artificial Sequence: Synthetic oligonucleotide
guacuaacaacccuuuccu

SEQ ID NO: 2449967 - RNA, 19 nt, Artificial Sequence
  Description of Artificial Sequence: Synthetic oligonucleotide
ggcaauaguuugucaagag

SEQ ID NO: 2449968 - RNA, 19 nt, Artificial Sequence
  Description of Artificial Sequence: Synthetic oligonucleotide
agagucuucagggguccgc

SEQ ID NO: 2449969 - RNA, 19 nt, Artificial Sequence
  Description of Artificial Sequence: Synthetic oligonucleotide
gcuccuuaggguuacaguc

SEQ ID NO: 2449970 - RNA, 19 nt, Artificial Sequence
  Description of Artificial Sequence: Synthetic oligonucleotide
uccuuugcuugacauucgu

SEQ ID NO: 2449971 - RNA, 19 nt, Artificial Sequence
  Description of Artificial Sequence: Synthetic oligonucleotide
augagacggauuaaguugu

SEQ ID NO: 2449972 - RNA, 19 nt, Artificial Sequence
  Description of Artificial Sequence: Synthetic oligonucleotide
agcugcgguaaugagccac

SEQ ID NO: 2449973 - RNA, 19 nt, Artificial Sequence
  Description of Artificial Sequence: Synthetic oligonucleotide
aagaaccuaaggggcgggg

SEQ ID NO: 2449974 - RNA, 19 nt, Artificial Sequence
  Description of Artificial Sequence: Synthetic oligonucleotide
aacaacccuuuccuaccca

SEQ ID NO: 2449975 - RNA, 19 nt, Artificial Sequence
  Description of Artificial Sequence: Synthetic oligonucleotide
agguacuaacaacccuuuc

SEQ ID NO: 2449976 - RNA, 19 nt, Artificial Sequence
  Description of Artificial Sequence: Synthetic oligonucleotide
gcuacgagccaccagcgag

SEQ ID NO: 2449977 - RNA, 19 nt, Artificial Sequence
  Description of Artificial Sequence: Synthetic oligonucleotide
cuacccagcucauucugug

SEQ ID NO: 2449978 - RNA, 19 nt, Artificial Sequence
  Description of Artificial Sequence: Synthetic oligonucleotide
ucaccuaggccuugacuga

SEQ ID NO: 2449979 - RNA, 19 nt, Artificial Sequence
  Description of Artificial Sequence: Synthetic oligonucleotide
uaacgagcugcgguaauga

SEQ ID NO: 2449980 - RNA, 19 nt, Artificial Sequence
  Description of Artificial Sequence: Synthetic oligonucleotide
agggguggaagucuucacu

SEQ ID NO: 2449981 - RNA, 19 nt, Artificial Sequence
  Description of Artificial Sequence: Synthetic oligonucleotide
uuggauucacauugagaau

SEQ ID NO: 2449982 - RNA, 19 nt, Artificial Sequence
  Description of Artificial Sequence: Synthetic oligonucleotide
cgagcugcgguaaugagcc

SEQ ID NO: 2449983 - RNA, 19 nt, Artificial Sequence
  Description of Artificial Sequence: Synthetic oligonucleotide
ggggcuacgagccaccagc

SEQ ID NO: 2449984 - RNA, 19 nt, Artificial Sequence
  Description of Artificial Sequence: Synthetic oligonucleotide
gagacggauuaaguuguag

SEQ ID NO: 2449985 - RNA, 19 nt, Artificial Sequence
  Description of Artificial Sequence: Synthetic oligonucleotide
ugggcagugccugucuuag

SEQ ID NO: 2449986 - RNA, 19 nt, Artificial Sequence
  Description of Artificial Sequence: Synthetic oligonucleotide
accaagagggguggaaguc

SEQ ID NO: 2449987 - RNA, 19 nt, Artificial Sequence
  Description of Artificial Sequence: Synthetic oligonucleotide
agaccaagagggguggaag

SEQ ID NO: 2449988 - RNA, 19 nt, Artificial Sequence
  Description of Artificial Sequence: Synthetic oligonucleotide
aaccuaaggggcgggguug

SEQ ID NO: 2449989 - RNA, 19 nt, Artificial Sequence
  Description of Artificial Sequence: Synthetic oligonucleotide
uguuuucaaggagccagac

SEQ ID NO: 2449990 - RNA, 19 nt, Artificial Sequence
  Description of Artificial Sequence: Synthetic oligonucleotide
cugguuuacagagggcagc

SEQ ID NO: 2449991 - RNA, 19 nt, Artificial Sequence
  Description of Artificial Sequence: Synthetic oligonucleotide
uucugcacuccacagccuu

SEQ ID NO: 2449992 - RNA, 19 nt, Artificial Sequence
  Description of Artificial Sequence: Synthetic oligonucleotide
cuauaaauucuguccaacu

SEQ ID NO: 2449993 - RNA, 19 nt, Artificial Sequence
  Description of Artificial Sequence: Synthetic oligonucleotide
aacucagguagcaccagaa

SEQ ID NO: 2449994 - RNA, 19 nt, Artificial Sequence
  Description of Artificial Sequence: Synthetic oligonucleotide
ucuguccaacucagguagc

SEQ ID NO: 2449995 - RNA, 19 nt, Artificial Sequence
  Description of Artificial Sequence: Synthetic oligonucleotide
agcuuaacgagcugcggua

SEQ ID NO: 2449996 - RNA, 19 nt, Artificial Sequence
  Description of Artificial Sequence: Synthetic oligonucleotide
guuuucaaggagccagaca

SEQ ID NO: 2449997 - RNA, 19 nt, Artificial Sequence
  Description of Artificial Sequence: Synthetic oligonucleotide
cauucgucaaagcuaccca

SEQ ID NO: 2449998 - RNA, 19 nt, Artificial Sequence
  Description of Artificial Sequence: Synthetic oligonucleotide
gaaaugagacggauuaagu

SEQ ID NO: 2449999 - RNA, 19 nt, Artificial Sequence
  Description of Artificial Sequence: Synthetic oligonucleotide
acagagcucaguaauggaa

SEQ ID NO: 2450000 - RNA, 19 nt, Artificial Sequence
  Description of Artificial Sequence: Synthetic oligonucleotide
cuaggccuugacugagggg

SEQ ID NO: 2450001 - RNA, 19 nt, Artificial Sequence
  Description of Artificial Sequence: Synthetic oligonucleotide
uuguccguucggaagggua

SEQ ID NO: 2450002 - RNA, 19 nt, Artificial Sequence
  Description of Artificial Sequence: Synthetic oligonucleotide
gugcacaguauucgaggag

SEQ ID NO: 2450003 - RNA, 19 nt, Artificial Sequence
  Description of Artificial Sequence: Synthetic oligonucleotide
aggccuagccuuccuagca

SEQ ID NO: 2450004 - RNA, 19 nt, Artificial Sequence
  Description of Artificial Sequence: Synthetic oligonucleotide
aggcaauaguuugucaaga

SEQ ID NO: 2450005 - RNA, 19 nt, Artificial Sequence
  Description of Artificial Sequence: Synthetic oligonucleotide
aucaggcaauaguuuguca

SEQ ID NO: 2450006 - RNA, 19 nt, Artificial Sequence
  Description of Artificial Sequence: Synthetic oligonucleotide
uaaggggcgggguuguuuu

SEQ ID NO: 2450007 - RNA, 19 nt, Artificial Sequence
  Description of Artificial Sequence: Synthetic oligonucleotide
acaacccuuuccuacccau

SEQ ID NO: 2450008 - RNA, 19 nt, Artificial Sequence
  Description of Artificial Sequence: Synthetic oligonucleotide
uucugguggcccacagagc

SEQ ID NO: 2450009 - RNA, 19 nt, Artificial Sequence
  Description of Artificial Sequence: Synthetic oligonucleotide
ggauuaaguuguagaaaag

SEQ ID NO: 2450010 - RNA, 19 nt, Artificial Sequence
  Description of Artificial Sequence: Synthetic oligonucleotide
ugaggggcuacgagccacc

SEQ ID NO: 2450011 - RNA, 19 nt, Artificial Sequence
  Description of Artificial Sequence: Synthetic oligonucleotide
ccagacaagcuuuggauuc

SEQ ID NO: 2450012 - RNA, 19 nt, Artificial Sequence
  Description of Artificial Sequence: Synthetic oligonucleotide
gaaguggcauuagauaaua

SEQ ID NO: 2450013 - RNA, 19 nt, Artificial Sequence
  Description of Artificial Sequence: Synthetic oligonucleotide
aaugggcagugccugucuu

SEQ ID NO: 2450014 - RNA, 19 nt, Artificial Sequence
  Description of Artificial Sequence: Synthetic oligonucleotide
gagccagacaagcuuugga

SEQ ID NO: 2450015 - RNA, 19 nt, Artificial Sequence
  Description of Artificial Sequence: Synthetic oligonucleotide
ugcgguaaugagccacagu

SEQ ID NO: 2450016 - RNA, 19 nt, Artificial Sequence
  Description of Artificial Sequence: Synthetic oligonucleotide
gcuucugugaucagaggcc

SEQ ID NO: 2450017 - RNA, 19 nt, Artificial Sequence
  Description of Artificial Sequence: Synthetic oligonucleotide
accugugcacaguauucga

SEQ ID NO: 2450018 - RNA, 19 nt, Artificial Sequence
  Description of Artificial Sequence: Synthetic oligonucleotide
gcauuagauaauaaauaga

SEQ ID NO: 2450019 - RNA, 19 nt, Artificial Sequence
  Description of Artificial Sequence: Synthetic oligonucleotide
uacuaacaacccuuuccua

SEQ ID NO: 2450020 - RNA, 19 nt, Artificial Sequence
  Description of Artificial Sequence: Synthetic oligonucleotide
ggaagucuucacucucagg

SEQ ID NO: 2450021 - RNA, 19 nt, Artificial Sequence
  Description of Artificial Sequence: Synthetic oligonucleotide
agaauacgaccugugcaca

SEQ ID NO: 2450022 - RNA, 19 nt, Artificial Sequence
  Description of Artificial Sequence: Synthetic oligonucleotide
acgaccugugcacaguauu

SEQ ID NO: 2450023 - RNA, 19 nt, Artificial Sequence
  Description of Artificial Sequence: Synthetic oligonucleotide
cacucucaggcuccuuagg

SEQ ID NO: 2450024 - RNA, 19 nt, Artificial Sequence
  Description of Artificial Sequence: Synthetic oligonucleotide
gcagucucauuuugaagug

SEQ ID NO: 2450025 - RNA, 19 nt, Artificial Sequence
  Description of Artificial Sequence: Synthetic oligonucleotide
acucagguagcaccagaaa

SEQ ID NO: 2450026 - RNA, 19 nt, Artificial Sequence
  Description of Artificial Sequence: Synthetic oligonucleotide
uacagucaucaggcaauag

SEQ ID NO: 2450027 - RNA, 19 nt, Artificial Sequence
  Description of Artificial Sequence: Synthetic oligonucleotide
ccagaaaugagacggauua

SEQ ID NO: 2450028 - RNA, 19 nt, Artificial Sequence
  Description of Artificial Sequence: Synthetic oligonucleotide
guucggaaggguaggcuug

SEQ ID NO: 2450029 - RNA, 19 nt, Artificial Sequence
  Description of Artificial Sequence: Synthetic oligonucleotide
agagggagcucuagggcag

SEQ ID NO: 2450030 - RNA, 19 nt, Artificial Sequence
  Description of Artificial Sequence: Synthetic oligonucleotide
uucagggguccgcuccuca

SEQ ID NO: 2450031 - RNA, 19 nt, Artificial Sequence
  Description of Artificial Sequence: Synthetic oligonucleotide
cauuguccguucggaaggg

SEQ ID NO: 2450032 - RNA, 19 nt, Artificial Sequence
  Description of Artificial Sequence: Synthetic oligonucleotide
agugccugucuuaggucac

SEQ ID NO: 2450033 - RNA, 19 nt, Artificial Sequence
  Description of Artificial Sequence: Synthetic oligonucleotide
ggaaacugagcugggguug

SEQ ID NO: 2450034 - RNA, 19 nt, Artificial Sequence
  Description of Artificial Sequence: Synthetic oligonucleotide
uuuucccaccucugguuua

SEQ ID NO: 2450035 - RNA, 19 nt, Artificial Sequence
  Description of Artificial Sequence: Synthetic oligonucleotide
uuuguucugguggcccaca

SEQ ID NO: 2450036 - RNA, 19 nt, Artificial Sequence
  Description of Artificial Sequence: Synthetic oligonucleotide
cagguagcaccagaaauga

SEQ ID NO: 2450037 - RNA, 19 nt, Artificial Sequence
  Description of Artificial Sequence: Synthetic oligonucleotide
uuccuagcaacaggaacua

SEQ ID NO: 2450038 - RNA, 19 nt, Artificial Sequence
  Description of Artificial Sequence: Synthetic oligonucleotide
gccacaguucaccuaggcc

SEQ ID NO: 2450039 - RNA, 19 nt, Artificial Sequence
  Description of Artificial Sequence: Synthetic oligonucleotide
gagggguggaagucuucac

SEQ ID NO: 2450040 - RNA, 19 nt, Artificial Sequence
  Description of Artificial Sequence: Synthetic oligonucleotide
aggcuugagggagaccaag

SEQ ID NO: 2450041 - RNA, 19 nt, Artificial Sequence
  Description of Artificial Sequence: Synthetic oligonucleotide
gggguggaagucuucacuc

SEQ ID NO: 2450042 - RNA, 19 nt, Artificial Sequence
  Description of Artificial Sequence: Synthetic oligonucleotide
guaaugagccacaguucac

SEQ ID NO: 2450043 - RNA, 19 nt, Artificial Sequence
  Description of Artificial Sequence: Synthetic oligonucleotide
agaaccuaaggggcggggu

SEQ ID NO: 2450044 - RNA, 19 nt, Artificial Sequence
  Description of Artificial Sequence: Synthetic oligonucleotide
uucggaaggguaggcuuga

SEQ ID NO: 2450045 - RNA, 19 nt, Artificial Sequence
  Description of Artificial Sequence: Synthetic oligonucleotide
ucagggguccgcuccucac

SEQ ID NO: 2450046 - RNA, 19 nt, Artificial Sequence
  Description of Artificial Sequence: Synthetic oligonucleotide
auacgaccugugcacagua

SEQ ID NO: 2450047 - RNA, 19 nt, Artificial Sequence
  Description of Artificial Sequence: Synthetic oligonucleotide
ggcagcuuaacgagcugcg

SEQ ID NO: 2450048 - RNA, 19 nt, Artificial Sequence
  Description of Artificial Sequence: Synthetic oligonucleotide
caucuuuguucugguggcc

SEQ ID NO: 2450049 - RNA, 19 nt, Artificial Sequence
  Description of Artificial Sequence: Synthetic oligonucleotide
cucagguagcaccagaaau

SEQ ID NO: 2450050 - RNA, 19 nt, Artificial Sequence
  Description of Artificial Sequence: Synthetic oligonucleotide
ggguuguuuucaaggagcc

SEQ ID NO: 2450051 - RNA, 19 nt, Artificial Sequence
  Description of Artificial Sequence: Synthetic oligonucleotide
cuuaggucacacugccaga

SEQ ID NO: 2450052 - RNA, 19 nt, Artificial Sequence
  Description of Artificial Sequence: Synthetic oligonucleotide
cuucauuguccguucggaa

SEQ ID NO: 2450053 - RNA, 19 nt, Artificial Sequence
  Description of Artificial Sequence: Synthetic oligonucleotide
ugagacggauuaaguugua

SEQ ID NO: 2450054 - RNA, 19 nt, Artificial Sequence
  Description of Artificial Sequence: Synthetic oligonucleotide
ccuaggccuugacugaggg

SEQ ID NO: 2450055 - RNA, 19 nt, Artificial Sequence
  Description of Artificial Sequence: Synthetic oligonucleotide
uacgaccugugcacaguau

SEQ ID NO: 2450056 - RNA, 19 nt, Artificial Sequence
  Description of Artificial Sequence: Synthetic oligonucleotide
cucauuuugaaguggcauu

SEQ ID NO: 2450057 - RNA, 19 nt, Artificial Sequence
  Description of Artificial Sequence: Synthetic oligonucleotide
cacagagcucaguaaugga

SEQ ID NO: 2450058 - RNA, 19 nt, Artificial Sequence
  Description of Artificial Sequence: Synthetic oligonucleotide
uccguucggaaggguaggc

SEQ ID NO: 2450059 - RNA, 19 nt, Artificial Sequence
  Description of Artificial Sequence: Synthetic oligonucleotide
ugucaagaguggguguuuu

SEQ ID NO: 2450060 - RNA, 19 nt, Artificial Sequence
  Description of Artificial Sequence: Synthetic oligonucleotide
gcucauucugugcaauuga

SEQ ID NO: 2450061 - RNA, 19 nt, Artificial Sequence
  Description of Artificial Sequence: Synthetic oligonucleotide
ccacaguucaccuaggccu

SEQ ID NO: 2450062 - RNA, 19 nt, Artificial Sequence
  Description of Artificial Sequence: Synthetic oligonucleotide
gcgguaaugagccacaguu

SEQ ID NO: 2450063 - RNA, 19 nt, Artificial Sequence
  Description of Artificial Sequence: Synthetic oligonucleotide
guccguucggaaggguagg

SEQ ID NO: 2450064 - RNA, 19 nt, Artificial Sequence
  Description of Artificial Sequence: Synthetic oligonucleotide
gaucagaggccuagccuuc

SEQ ID NO: 2450065 - RNA, 19 nt, Artificial Sequence
  Description of Artificial Sequence: Synthetic oligonucleotide
gcaauaguuugucaagagu

SEQ ID NO: 2450066 - RNA, 19 nt, Artificial Sequence
  Description of Artificial Sequence: Synthetic oligonucleotide
uucgaggaggcagcuuaac

SEQ ID NO: 2450067 - RNA, 19 nt, Artificial Sequence
  Description of Artificial Sequence: Synthetic oligonucleotide
aaccugggagcagcagucu

SEQ ID NO: 2450068 - RNA, 19 nt, Artificial Sequence
  Description of Artificial Sequence: Synthetic oligonucleotide
aggcuccuuaggguuacag

SEQ ID NO: 2450069 - RNA, 19 nt, Artificial Sequence
  Description of Artificial Sequence: Synthetic oligonucleotide
agguccuuugcuugacauu

SEQ ID NO: 2450070 - RNA, 19 nt, Artificial Sequence
  Description of Artificial Sequence: Synthetic oligonucleotide
aggggcuacgagccaccag

SEQ ID NO: 2450071 - RNA, 19 nt, Artificial Sequence
  Description of Artificial Sequence: Synthetic oligonucleotide
guuugucaagagugggugu

SEQ ID NO: 2450072 - RNA, 19 nt, Artificial Sequence
  Description of Artificial Sequence: Synthetic oligonucleotide
caagcuuuggauucacauu

SEQ ID NO: 2450073 - RNA, 19 nt, Artificial Sequence
  Description of Artificial Sequence: Synthetic oligonucleotide
gacauucgucaaagcuacc

SEQ ID NO: 2450074 - RNA, 19 nt, Artificial Sequence
  Description of Artificial Sequence: Synthetic oligonucleotide
caccuaggccuugacugag

SEQ ID NO: 2450075 - RNA, 19 nt, Artificial Sequence
  Description of Artificial Sequence: Synthetic oligonucleotide
ugccugucuuaggucacac

SEQ ID NO: 2450076 - RNA, 19 nt, Artificial Sequence
  Description of Artificial Sequence: Synthetic oligonucleotide
gcaacaggaacuauaaauu

SEQ ID NO: 2450077 - RNA, 19 nt, Artificial Sequence
  Description of Artificial Sequence: Synthetic oligonucleotide
ccuagcaacaggaacuaua

SEQ ID NO: 2450078 - RNA, 19 nt, Artificial Sequence
  Description of Artificial Sequence: Synthetic oligonucleotide
accagaaaugagacggauu

SEQ ID NO: 2450079 - RNA, 19 nt, Artificial Sequence
  Description of Artificial Sequence: Synthetic oligonucleotide
gagaccaagagggguggaa

SEQ ID NO: 2450080 - RNA, 19 nt, Artificial Sequence
  Description of Artificial Sequence: Synthetic oligonucleotide
gaaugggcagugccugucu

SEQ ID NO: 2450081 - RNA, 19 nt, Artificial Sequence
  Description of Artificial Sequence: Synthetic oligonucleotide
cugugaucagaggccuagc

SEQ ID NO: 2450082 - RNA, 19 nt, Artificial Sequence
  Description of Artificial Sequence: Synthetic oligonucleotide
guucaccuaggccuugacu

SEQ ID NO: 2450083 - RNA, 19 nt, Artificial Sequence
  Description of Artificial Sequence: Synthetic oligonucleotide
gucucauuuugaaguggca

SEQ ID NO: 2450084 - RNA, 19 nt, Artificial Sequence
  Description of Artificial Sequence: Synthetic oligonucleotide
accuaggccuugacugagg

SEQ ID NO: 2450085 - RNA, 19 nt, Artificial Sequence
  Description of Artificial Sequence: Synthetic oligonucleotide
gcagcuuaacgagcugcgg

SEQ ID NO: 2450086 - RNA, 19 nt, Artificial Sequence
  Description of Artificial Sequence: Synthetic oligonucleotide
cuguccaacucagguagca

SEQ ID NO: 2450087 - RNA, 19 nt, Artificial Sequence
  Description of Artificial Sequence: Synthetic oligonucleotide
agguagcaccagaaaugag

SEQ ID NO: 2450088 - RNA, 19 nt, Artificial Sequence
  Description of Artificial Sequence: Synthetic oligonucleotide
gcugggguuggucucuuuc

SEQ ID NO: 2450089 - RNA, 19 nt, Artificial Sequence
  Description of Artificial Sequence: Synthetic oligonucleotide
cgaggaggcagcuuaacga

SEQ ID NO: 2450090 - RNA, 19 nt, Artificial Sequence
  Description of Artificial Sequence: Synthetic oligonucleotide
caggaacuauaaauucugu

SEQ ID NO: 2450091 - RNA, 19 nt, Artificial Sequence
  Description of Artificial Sequence: Synthetic oligonucleotide
guuguagaaaagguccuuu

SEQ ID NO: 2450092 - RNA, 19 nt, Artificial Sequence
  Description of Artificial Sequence: Synthetic oligonucleotide
cagcuuaacgagcugcggu

SEQ ID NO: 2450093 - RNA, 19 nt, Artificial Sequence
  Description of Artificial Sequence: Synthetic oligonucleotide
cauugagaauacgaccugu

SEQ ID NO: 2450094 - RNA, 19 nt, Artificial Sequence
  Description of Artificial Sequence: Synthetic oligonucleotide
cagacaagcuuuggauuca

SEQ ID NO: 2450095 - RNA, 19 nt, Artificial Sequence
  Description of Artificial Sequence: Synthetic oligonucleotide
gaaccuaaggggcgggguu

SEQ ID NO: 2450096 - RNA, 19 nt, Artificial Sequence
  Description of Artificial Sequence: Synthetic oligonucleotide
uggcucugcuucugugauc

SEQ ID NO: 2450097 - RNA, 19 nt, Artificial Sequence
  Description of Artificial Sequence: Synthetic oligonucleotide
gcgggguuguuuucaagga

SEQ ID NO: 2450098 - RNA, 19 nt, Artificial Sequence
  Description of Artificial Sequence: Synthetic oligonucleotide
ccuuugcuugacauucguc

SEQ ID NO: 2450099 - RNA, 19 nt, Artificial Sequence
  Description of Artificial Sequence: Synthetic oligonucleotide
auuguccguucggaagggu

SEQ ID NO: 2450100 - RNA, 19 nt, Artificial Sequence
  Description of Artificial Sequence: Synthetic oligonucleotide
aggggcgggguuguuuuca

SEQ ID NO: 2450101 - RNA, 19 nt, Artificial Sequence
  Description of Artificial Sequence: Synthetic oligonucleotide
cugcgguaaugagccacag

SEQ ID NO: 2450102 - RNA, 19 nt, Artificial Sequence
  Description of Artificial Sequence: Synthetic oligonucleotide
ucugugcaauugacaucuu

SEQ ID NO: 2450103 - RNA, 19 nt, Artificial Sequence
  Description of Artificial Sequence: Synthetic oligonucleotide
acaguucaccuaggccuug

SEQ ID NO: 2450104 - RNA, 19 nt, Artificial Sequence
  Description of Artificial Sequence: Synthetic oligonucleotide
cagagucuucagggguccg

SEQ ID NO: 2450105 - RNA, 19 nt, Artificial Sequence
  Description of Artificial Sequence: Synthetic oligonucleotide
cuucugugaucagaggccu

SEQ ID NO: 2450106 - RNA, 19 nt, Artificial Sequence
  Description of Artificial Sequence: Synthetic oligonucleotide
cugccagagggagcucuag

SEQ ID NO: 2450107 - RNA, 19 nt, Artificial Sequence
  Description of Artificial Sequence: Synthetic oligonucleotide
gccuagccuuccuagcaac

SEQ ID NO: 2450108 - RNA, 19 nt, Artificial Sequence
  Description of Artificial Sequence: Synthetic oligonucleotide
uccuagcaacaggaacuau

SEQ ID NO: 2450109 - RNA, 19 nt, Artificial Sequence
  Description of Artificial Sequence: Synthetic oligonucleotide
ggcagagucuucagggguc

SEQ ID NO: 2450110 - RNA, 19 nt, Artificial Sequence
  Description of Artificial Sequence: Synthetic oligonucleotide
accuaaggggcgggguugu

SEQ ID NO: 2450111 - RNA, 19 nt, Artificial Sequence
  Description of Artificial Sequence: Synthetic oligonucleotide
cgaccugugcacaguauuc

SEQ ID NO: 2450112 - RNA, 19 nt, Artificial Sequence
  Description of Artificial Sequence: Synthetic oligonucleotide
cggaaggguaggcuugagg

SEQ ID NO: 2450113 - RNA, 19 nt, Artificial Sequence
  Description of Artificial Sequence: Synthetic oligonucleotide
gguuuacagagggcagcug

SEQ ID NO: 2450114 - RNA, 19 nt, Artificial Sequence
  Description of Artificial Sequence: Synthetic oligonucleotide
cgggguuguuuucaaggag

SEQ ID NO: 2450115 - RNA, 19 nt, Artificial Sequence
  Description of Artificial Sequence: Synthetic oligonucleotide
gucuuaggucacacugcca

SEQ ID NO: 2450116 - RNA, 19 nt, Artificial Sequence
  Description of Artificial Sequence: Synthetic oligonucleotide
cgguaaugagccacaguuc

SEQ ID NO: 2450117 - RNA, 19 nt, Artificial Sequence
  Description of Artificial Sequence: Synthetic oligonucleotide
ggguuacagucaucaggca

SEQ ID NO: 2450118 - RNA, 19 nt, Artificial Sequence
  Description of Artificial Sequence: Synthetic oligonucleotide
ggcuccuuaggguuacagu

SEQ ID NO: 2450119 - RNA, 19 nt, Artificial Sequence
  Description of Artificial Sequence: Synthetic oligonucleotide
cacaguucaccuaggccuu

SEQ ID NO: 2450120 - RNA, 19 nt, Artificial Sequence
  Description of Artificial Sequence: Synthetic oligonucleotide
cagguacuaacaacccuuu

SEQ ID NO: 2450121 - RNA, 19 nt, Artificial Sequence
  Description of Artificial Sequence: Synthetic oligonucleotide
agcugagucugaggggcua

SEQ ID NO: 2450122 - RNA, 19 nt, Artificial Sequence
  Description of Artificial Sequence: Synthetic oligonucleotide
gggcgggguuguuuucaag

SEQ ID NO: 2450123 - RNA, 19 nt, Artificial Sequence
  Description of Artificial Sequence: Synthetic oligonucleotide
cuuaacgagcugcgguaau

SEQ ID NO: 2450124 - RNA, 19 nt, Artificial Sequence
  Description of Artificial Sequence: Synthetic oligonucleotide
gggcagagucuucaggggu

SEQ ID NO: 2450125 - RNA, 19 nt, Artificial Sequence
  Description of Artificial Sequence: Synthetic oligonucleotide
caagagggguggaagucuu

SEQ ID NO: 2450126 - RNA, 19 nt, Artificial Sequence
  Description of Artificial Sequence: Synthetic oligonucleotide
ccuagccuuccuagcaaca

SEQ ID NO: 2450127 - RNA, 19 nt, Artificial Sequence
  Description of Artificial Sequence: Synthetic oligonucleotide
gaggggcuacgagccacca

SEQ ID NO: 2450128 - RNA, 19 nt, Artificial Sequence
  Description of Artificial Sequence: Synthetic oligonucleotide
ccaacucagguagcaccag

SEQ ID NO: 2450129 - RNA, 19 nt, Artificial Sequence
  Description of Artificial Sequence: Synthetic oligonucleotide
gccagacaagcuuuggauu

SEQ ID NO: 2450130 - RNA, 19 nt, Artificial Sequence
  Description of Artificial Sequence: Synthetic oligonucleotide
gagcugcgguaaugagcca

SEQ ID NO: 2450131 - RNA, 19 nt, Artificial Sequence
  Description of Artificial Sequence: Synthetic oligonucleotide
ggagcagcagucucauuuu

SEQ ID NO: 2450132 - RNA, 19 nt, Artificial Sequence
  Description of Artificial Sequence: Synthetic oligonucleotide
gcuuaacgagcugcgguaa

SEQ ID NO: 2450133 - RNA, 19 nt, Artificial Sequence
  Description of Artificial Sequence: Synthetic oligonucleotide
gguaggcuugagggagacc

SEQ ID NO: 2450134 - RNA, 19 nt, Artificial Sequence
  Description of Artificial Sequence: Synthetic oligonucleotide
gcugagucugaggggcuac

SEQ ID NO: 2450135 - RNA, 19 nt, Artificial Sequence
  Description of Artificial Sequence: Synthetic oligonucleotide
ggcuacgagccaccagcga

SEQ ID NO: 2450136 - RNA, 19 nt, Artificial Sequence
  Description of Artificial Sequence: Synthetic oligonucleotide
ggguaggcuugagggagac

SEQ ID NO: 2450137 - RNA, 19 nt, Artificial Sequence
  Description of Artificial Sequence: Synthetic oligonucleotide
ugggagcagcagucucauu

SEQ ID NO: 2450138 - RNA, 19 nt, Artificial Sequence
  Description of Artificial Sequence: Synthetic oligonucleotide
gggguuggucucuuucccu

SEQ ID NO: 2450139 - RNA, 19 nt, Artificial Sequence
  Description of Artificial Sequence: Synthetic oligonucleotide
caccagaaaugagacggau

SEQ ID NO: 2450140 - RNA, 19 nt, Artificial Sequence
  Description of Artificial Sequence: Synthetic oligonucleotide
ggguuggucucuuucccuu

SEQ ID NO: 2450141 - RNA, 19 nt, Artificial Sequence
  Description of Artificial Sequence: Synthetic oligonucleotide
caacccuuuccuacccauu

SEQ ID NO: 2450142 - RNA, 19 nt, Artificial Sequence
  Description of Artificial Sequence: Synthetic oligonucleotide
cuaaggggcgggguuguuu

SEQ ID NO: 2450143 - RNA, 19 nt, Artificial Sequence
  Description of Artificial Sequence: Synthetic oligonucleotide
gguuggucucuuucccuuu

SEQ ID NO: 2450144 - RNA, 19 nt, Artificial Sequence
  Description of Artificial Sequence: Synthetic oligonucleotide
gcuacccagcucauucugu

SEQ ID NO: 2450145 - RNA, 19 nt, Artificial Sequence
  Description of Artificial Sequence: Synthetic oligonucleotide
ggggcgggguuguuuucaa

SEQ ID NO: 2450146 - RNA, 19 nt, Artificial Sequence
  Description of Artificial Sequence: Synthetic oligonucleotide
ggagaccaagaggggugga

SEQ ID NO: 2450147 - RNA, 19 nt, Artificial Sequence
  Description of Artificial Sequence: Synthetic oligonucleotide
guauucgaggaggcagcuu

SEQ ID NO: 2450148 - RNA, 19 nt, Artificial Sequence
  Description of Artificial Sequence: Synthetic oligonucleotide
cagcugagucugaggggcu

SEQ ID NO: 2450149 - RNA, 19 nt, Artificial Sequence
  Description of Artificial Sequence: Synthetic oligonucleotide
caaagcuacccagcucauu

SEQ ID NO: 2450150 - RNA, 19 nt, Artificial Sequence
  Description of Artificial Sequence: Synthetic oligonucleotide
gccugucuuaggucacacu

SEQ ID NO: 2450151 - RNA, 19 nt, Artificial Sequence
  Description of Artificial Sequence: Synthetic oligonucleotide
gguggcccacagagcucag

SEQ ID NO: 2450152 - RNA, 19 nt, Artificial Sequence
  Description of Artificial Sequence: Synthetic oligonucleotide
cguucggaaggguaggcuu

SEQ ID NO: 2450153 - RNA, 19 nt, Artificial Sequence
  Description of Artificial Sequence: Synthetic oligonucleotide
cucacucugcugggaaguu

SEQ ID NO: 2450154 - RNA, 19 nt, Artificial Sequence
  Description of Artificial Sequence: Synthetic oligonucleotide
guggcccacagagcucagu

SEQ ID NO: 2450155 - RNA, 19 nt, Artificial Sequence
  Description of Artificial Sequence: Synthetic oligonucleotide
gagcugggguuggucucuu

SEQ ID NO: 2450156 - RNA, 19 nt, Artificial Sequence
  Description of Artificial Sequence: Synthetic oligonucleotide
ccguucggaaggguaggcu

SEQ ID NO: 2450157 - RNA, 19 nt, Artificial Sequence
  Description of Artificial Sequence: Synthetic oligonucleotide
ucuucaucaaaccugaggg

SEQ ID NO: 2450158 - RNA, 19 nt, Artificial Sequence
  Description of Artificial Sequence: Synthetic oligonucleotide
aauguugcaauucuucccg

SEQ ID NO: 2450159 - RNA, 19 nt, Artificial Sequence
  Description of Artificial Sequence: Synthetic oligonucleotide
uuuucaaagaggaagucag

SEQ ID NO: 2450160 - RNA, 19 nt, Artificial Sequence
  Description of Artificial Sequence: Synthetic oligonucleotide
ugauaguuccaaauuaugg

SEQ ID NO: 2450161 - RNA, 19 nt, Artificial Sequence
  Description of Artificial Sequence: Synthetic oligonucleotide
gaaaucacuugguagaagg

SEQ ID NO: 2450162 - RNA, 19 nt, Artificial Sequence
  Description of Artificial Sequence: Synthetic oligonucleotide
gaagguauaguucaaagca

SEQ ID NO: 2450163 - RNA, 19 nt, Artificial Sequence
  Description of Artificial Sequence: Synthetic oligonucleotide
uagaauaguagccagguac

SEQ ID NO: 2450164 - RNA, 19 nt, Artificial Sequence
  Description of Artificial Sequence: Synthetic oligonucleotide
aagacaacgguucugcaag

SEQ ID NO: 2450165 - RNA, 19 nt, Artificial Sequence
  Description of Artificial Sequence: Synthetic oligonucleotide
agauggguagaauaguagc

SEQ ID NO: 2450166 - RNA, 19 nt, Artificial Sequence
  Description of Artificial Sequence: Synthetic oligonucleotide
aagucgagacuccaugucc

SEQ ID NO: 2450167 - RNA, 19 nt, Artificial Sequence
  Description of Artificial Sequence: Synthetic oligonucleotide
aaauccguaaggaaaaguc

SEQ ID NO: 2450168 - RNA, 19 nt, Artificial Sequence
  Description of Artificial Sequence: Synthetic oligonucleotide
agucuuaccaccuucaagu

SEQ ID NO: 2450169 - RNA, 19 nt, Artificial Sequence
  Description of Artificial Sequence: Synthetic oligonucleotide
aaagcuggggcaucagccc

SEQ ID NO: 2450170 - RNA, 19 nt, Artificial Sequence
  Description of Artificial Sequence: Synthetic oligonucleotide
uccuuuaucuucaucaaac

SEQ ID NO: 2450171 - RNA, 19 nt, Artificial Sequence
  Description of Artificial Sequence: Synthetic oligonucleotide
aaagcugcuugucacagcu

SEQ ID NO: 2450172 - RNA, 19 nt, Artificial Sequence
  Description of Artificial Sequence: Synthetic oligonucleotide
uagacagcgagucuuacca

SEQ ID NO: 2450173 - RNA, 19 nt, Artificial Sequence
  Description of Artificial Sequence: Synthetic oligonucleotide
gauaguaagucagccagcg

SEQ ID NO: 2450174 - RNA, 19 nt, Artificial Sequence
  Description of Artificial Sequence: Synthetic oligonucleotide
uguguaguucagaaagggg

SEQ ID NO: 2450175 - RNA, 19 nt, Artificial Sequence
  Description of Artificial Sequence: Synthetic oligonucleotide
aauccguaaggaaaagucg

SEQ ID NO: 2450176 - RNA, 19 nt, Artificial Sequence
  Description of Artificial Sequence: Synthetic oligonucleotide
auaguagccagguacaaga

SEQ ID NO: 2450177 - RNA, 19 nt, Artificial Sequence
  Description of Artificial Sequence: Synthetic oligonucleotide
ucuucccgaagccacaagg

SEQ ID NO: 2450178 - RNA, 19 nt, Artificial Sequence
  Description of Artificial Sequence: Synthetic oligonucleotide
aucuucaucaaaccugagg

SEQ ID NO: 2450179 - RNA, 19 nt, Artificial Sequence
  Description of Artificial Sequence: Synthetic oligonucleotide
uuugauaguuccaaauuau

SEQ ID NO: 2450180 - RNA, 19 nt, Artificial Sequence
  Description of Artificial Sequence: Synthetic oligonucleotide
guugauacgaagcuccugc

SEQ ID NO: 2450181 - RNA, 19 nt, Artificial Sequence
  Description of Artificial Sequence: Synthetic oligonucleotide
uaaggaaaagucgagacuc

SEQ ID NO: 2450182 - RNA, 19 nt, Artificial Sequence
  Description of Artificial Sequence: Synthetic oligonucleotide
auuagggccacugaagaac

SEQ ID NO: 2450183 - RNA, 19 nt, Artificial Sequence
  Description of Artificial Sequence: Synthetic oligonucleotide
caggaagaagugaauagcg

SEQ ID NO: 2450184 - RNA, 19 nt, Artificial Sequence
  Description of Artificial Sequence: Synthetic oligonucleotide
gaaaagucgagacuccaug

SEQ ID NO: 2450185 - RNA, 19 nt, Artificial Sequence
  Description of Artificial Sequence: Synthetic oligonucleotide
cauguaccagucaauaccc

SEQ ID NO: 2450186 - RNA, 19 nt, Artificial Sequence
  Description of Artificial Sequence: Synthetic oligonucleotide
aaaagucgagacuccaugu

SEQ ID NO: 2450187 - RNA, 19 nt, Artificial Sequence
  Description of Artificial Sequence: Synthetic oligonucleotide
uugauaguuccaaauuaug

SEQ ID NO: 2450188 - RNA, 19 nt, Artificial Sequence
  Description of Artificial Sequence: Synthetic oligonucleotide
uuguguaguucagaaaggg

SEQ ID NO: 2450189 - RNA, 19 nt, Artificial Sequence
  Description of Artificial Sequence: Synthetic oligonucleotide
aaauuaugguuccggaaaa

SEQ ID NO: 2450190 - RNA, 19 nt, Artificial Sequence
  Description of Artificial Sequence: Synthetic oligonucleotide
aaguccauguaccagucaa

SEQ ID NO: 2450191 - RNA, 19 nt, Artificial Sequence
  Description of Artificial Sequence: Synthetic oligonucleotide
gauaguuccaaauuauggu

SEQ ID NO: 2450192 - RNA, 19 nt, Artificial Sequence
  Description of Artificial Sequence: Synthetic oligonucleotide
aacgguucugcaaggagcg

SEQ ID NO: 2450193 - RNA, 19 nt, Artificial Sequence
  Description of Artificial Sequence: Synthetic oligonucleotide
aagugaauagcguguggug

SEQ ID NO: 2450194 - RNA, 19 nt, Artificial Sequence
  Description of Artificial Sequence: Synthetic oligonucleotide
uacccuugugguaauuagg

SEQ ID NO: 2450195 - RNA, 19 nt, Artificial Sequence
  Description of Artificial Sequence: Synthetic oligonucleotide
ucaucaaaccugagggucc

SEQ ID NO: 2450196 - RNA, 19 nt, Artificial Sequence
  Description of Artificial Sequence: Synthetic oligonucleotide
ugcaauucuucccgaagcc

SEQ ID NO: 2450197 - RNA, 19 nt, Artificial Sequence
  Description of Artificial Sequence: Synthetic oligonucleotide
cuuguguaguucagaaagg

SEQ ID NO: 2450198 - RNA, 19 nt, Artificial Sequence
  Description of Artificial Sequence: Synthetic oligonucleotide
ucugcaaggagcgaaguac

SEQ ID NO: 2450199 - RNA, 19 nt, Artificial Sequence
  Description of Artificial Sequence: Synthetic oligonucleotide
ugcaggcucaggaagaagu

SEQ ID NO: 2450200 - RNA, 19 nt, Artificial Sequence
  Description of Artificial Sequence: Synthetic oligonucleotide
uuccaaauuaugguuccgg

SEQ ID NO: 2450201 - RNA, 19 nt, Artificial Sequence
  Description of Artificial Sequence: Synthetic oligonucleotide
uacaagacaacgguucugc

SEQ ID NO: 2450202 - RNA, 19 nt, Artificial Sequence
  Description of Artificial Sequence: Synthetic oligonucleotide
ugucacagcuggaugcagg

SEQ ID NO: 2450203 - RNA, 19 nt, Artificial Sequence
  Description of Artificial Sequence: Synthetic oligonucleotide
auaguuccaaauuaugguu

SEQ ID NO: 2450204 - RNA, 19 nt, Artificial Sequence
  Description of Artificial Sequence: Synthetic oligonucleotide
gaaagcuggggcaucagcc

SEQ ID NO: 2450205 - RNA, 19 nt, Artificial Sequence
  Description of Artificial Sequence: Synthetic oligonucleotide
aaggaaaagucgagacucc

SEQ ID NO: 2450206 - RNA, 19 nt, Artificial Sequence
  Description of Artificial Sequence: Synthetic oligonucleotide
ugggucuccguguugcucg

SEQ ID NO: 2450207 - RNA, 19 nt, Artificial Sequence
  Description of Artificial Sequence: Synthetic oligonucleotide
aggagcgaaguacuggagg

SEQ ID NO: 2450208 - RNA, 19 nt, Artificial Sequence
  Description of Artificial Sequence: Synthetic oligonucleotide
gauacgaagcuccugccca

SEQ ID NO: 2450209 - RNA, 19 nt, Artificial Sequence
  Description of Artificial Sequence: Synthetic oligonucleotide
ugaugaucuuggcucuugg

SEQ ID NO: 2450210 - RNA, 19 nt, Artificial Sequence
  Description of Artificial Sequence: Synthetic oligonucleotide
uaguuccaaauuaugguuc

SEQ ID NO: 2450211 - RNA, 19 nt, Artificial Sequence
  Description of Artificial Sequence: Synthetic oligonucleotide
cagagggauaguaagucag

SEQ ID NO: 2450212 - RNA, 19 nt, Artificial Sequence
  Description of Artificial Sequence: Synthetic oligonucleotide
uugguagaagguauaguuc

SEQ ID NO: 2450213 - RNA, 19 nt, Artificial Sequence
  Description of Artificial Sequence: Synthetic oligonucleotide
agguauaguucaaagcaac

SEQ ID NO: 2450214 - RNA, 19 nt, Artificial Sequence
  Description of Artificial Sequence: Synthetic oligonucleotide
ugauacgaagcuccugccc

SEQ ID NO: 2450215 - RNA, 19 nt, Artificial Sequence
  Description of Artificial Sequence: Synthetic oligonucleotide
uccguaaggaaaagucgag

SEQ ID NO: 2450216 - RNA, 19 nt, Artificial Sequence
  Description of Artificial Sequence: Synthetic oligonucleotide
ggaagaagugaauagcgug

SEQ ID NO: 2450217 - RNA, 19 nt, Artificial Sequence
  Description of Artificial Sequence: Synthetic oligonucleotide
auaguaagucagccagcgc

SEQ ID NO: 2450218 - RNA, 19 nt, Artificial Sequence
  Description of Artificial Sequence: Synthetic oligonucleotide
agucccuggcaccaaaauc

SEQ ID NO: 2450219 - RNA, 19 nt, Artificial Sequence
  Description of Artificial Sequence: Synthetic oligonucleotide
guaauuagggccacugaag

SEQ ID NO: 2450220 - RNA, 19 nt, Artificial Sequence
  Description of Artificial Sequence: Synthetic oligonucleotide
caacgguucugcaaggagc

SEQ ID NO: 2450221 - RNA, 19 nt, Artificial Sequence
  Description of Artificial Sequence: Synthetic oligonucleotide
aaaauccguaaggaaaagu

SEQ ID NO: 2450222 - RNA, 19 nt, Artificial Sequence
  Description of Artificial Sequence: Synthetic oligonucleotide
auacccuugugguaauuag

SEQ ID NO: 2450223 - RNA, 19 nt, Artificial Sequence
  Description of Artificial Sequence: Synthetic oligonucleotide
uggguagaauaguagccag

SEQ ID NO: 2450224 - RNA, 19 nt, Artificial Sequence
  Description of Artificial Sequence: Synthetic oligonucleotide
agguacaagacaacgguuc

SEQ ID NO: 2450225 - RNA, 19 nt, Artificial Sequence
  Description of Artificial Sequence: Synthetic oligonucleotide
uccaaauuaugguuccgga

SEQ ID NO: 2450226 - RNA, 19 nt, Artificial Sequence
  Description of Artificial Sequence: Synthetic oligonucleotide
gacagcgagucuuaccacc

SEQ ID NO: 2450227 - RNA, 19 nt, Artificial Sequence
  Description of Artificial Sequence: Synthetic oligonucleotide
gagucuuaccaccuucaag

SEQ ID NO: 2450228 - RNA, 19 nt, Artificial Sequence
  Description of Artificial Sequence: Synthetic oligonucleotide
caaauuaugguuccggaaa

SEQ ID NO: 2450229 - RNA, 19 nt, Artificial Sequence
  Description of Artificial Sequence: Synthetic oligonucleotide
aagaagugaauagcgugug

SEQ ID NO: 2450230 - RNA, 19 nt, Artificial Sequence
  Description of Artificial Sequence: Synthetic oligonucleotide
agaagugaauagcgugugg

SEQ ID NO: 2450231 - RNA, 19 nt, Artificial Sequence
  Description of Artificial Sequence: Synthetic oligonucleotide
cuucccgaagccacaaggg

SEQ ID NO: 2450232 - RNA, 19 nt, Artificial Sequence
  Description of Artificial Sequence: Synthetic oligonucleotide
agcgaaguacuggaggggc

SEQ ID NO: 2450233 - RNA, 19 nt, Artificial Sequence
  Description of Artificial Sequence: Synthetic oligonucleotide
aauuagggccacugaagaa

SEQ ID NO: 2450234 - RNA, 19 nt, Artificial Sequence
  Description of Artificial Sequence: Synthetic oligonucleotide
cugcagauggguagaauag

SEQ ID NO: 2450235 - RNA, 19 nt, Artificial Sequence
  Description of Artificial Sequence: Synthetic oligonucleotide
ccuugugguaauuagggcc

SEQ ID NO: 2450236 - RNA, 19 nt, Artificial Sequence
  Description of Artificial Sequence: Synthetic oligonucleotide
ggaauguugcaauucuucc

SEQ ID NO: 2450237 - RNA, 19 nt, Artificial Sequence
  Description of Artificial Sequence: Synthetic oligonucleotide
acccuugugguaauuaggg

SEQ ID NO: 2450238 - RNA, 19 nt, Artificial Sequence
  Description of Artificial Sequence: Synthetic oligonucleotide
aaagcaacugggucuccgu

SEQ ID NO: 2450239 - RNA, 19 nt, Artificial Sequence
  Description of Artificial Sequence: Synthetic oligonucleotide
aggaguaggcccugucagc

SEQ ID NO: 2450240 - RNA, 19 nt, Artificial Sequence
  Description of Artificial Sequence: Synthetic oligonucleotide
cagauggguagaauaguag

SEQ ID NO: 2450241 - RNA, 19 nt, Artificial Sequence
  Description of Artificial Sequence: Synthetic oligonucleotide
uuagggccacugaagaacu

SEQ ID NO: 2450242 - RNA, 19 nt, Artificial Sequence
  Description of Artificial Sequence: Synthetic oligonucleotide
ggagcgaaguacuggaggg

SEQ ID NO: 2450243 - RNA, 19 nt, Artificial Sequence
  Description of Artificial Sequence: Synthetic oligonucleotide
gaugaucuuggcucuuggc

SEQ ID NO: 2450244 - RNA, 19 nt, Artificial Sequence
  Description of Artificial Sequence: Synthetic oligonucleotide
aaucagcaacuguccagag

SEQ ID NO: 2450245 - RNA, 19 nt, Artificial Sequence
  Description of Artificial Sequence: Synthetic oligonucleotide
acaacgguucugcaaggag

SEQ ID NO: 2450246 - RNA, 19 nt, Artificial Sequence
  Description of Artificial Sequence: Synthetic oligonucleotide
cuuuucccuagacagcgag

SEQ ID NO: 2450247 - RNA, 19 nt, Artificial Sequence
  Description of Artificial Sequence: Synthetic oligonucleotide
uguccaagccggcucagca

SEQ ID NO: 2450248 - RNA, 19 nt, Artificial Sequence
  Description of Artificial Sequence: Synthetic oligonucleotide
ccauguaccagucaauacc

SEQ ID NO: 2450249 - RNA, 19 nt, Artificial Sequence
  Description of Artificial Sequence: Synthetic oligonucleotide
cuugugguaauuagggcca

SEQ ID NO: 2450250 - RNA, 19 nt, Artificial Sequence
  Description of Artificial Sequence: Synthetic oligonucleotide
gugaauagcguguggugcc

SEQ ID NO: 2450251 - RNA, 19 nt, Artificial Sequence
  Description of Artificial Sequence: Synthetic oligonucleotide
gcugaaaucacuugguaga

SEQ ID NO: 2450252 - RNA, 19 nt, Artificial Sequence
  Description of Artificial Sequence: Synthetic oligonucleotide
agagggauaguaagucagc

SEQ ID NO: 2450253 - RNA, 19 nt, Artificial Sequence
  Description of Artificial Sequence: Synthetic oligonucleotide
agcgagucuuaccaccuuc

SEQ ID NO: 2450254 - RNA, 19 nt, Artificial Sequence
  Description of Artificial Sequence: Synthetic oligonucleotide
cuagacagcgagucuuacc

SEQ ID NO: 2450255 - RNA, 19 nt, Artificial Sequence
  Description of Artificial Sequence: Synthetic oligonucleotide
gagggauaguaagucagcc

SEQ ID NO: 2450256 - RNA, 19 nt, Artificial Sequence
  Description of Artificial Sequence: Synthetic oligonucleotide
uacaaccucugagucaaag

SEQ ID NO: 2450257 - RNA, 19 nt, Artificial Sequence
  Description of Artificial Sequence: Synthetic oligonucleotide
uccauguaccagucaauac

SEQ ID NO: 2450258 - RNA, 19 nt, Artificial Sequence
  Description of Artificial Sequence: Synthetic oligonucleotide
aagcaacugggucuccgug

SEQ ID NO: 2450259 - RNA, 19 nt, Artificial Sequence
  Description of Artificial Sequence: Synthetic oligonucleotide
ugaaaucacuugguagaag

SEQ ID NO: 2450260 - RNA, 19 nt, Artificial Sequence
  Description of Artificial Sequence: Synthetic oligonucleotide
cugcccauccacaaucagc

SEQ ID NO: 2450261 - RNA, 19 nt, Artificial Sequence
  Description of Artificial Sequence: Synthetic oligonucleotide
acaaccucugagucaaagu

SEQ ID NO: 2450262 - RNA, 19 nt, Artificial Sequence
  Description of Artificial Sequence: Synthetic oligonucleotide
ggauggucuccauugaggc

SEQ ID NO: 2450263 - RNA, 19 nt, Artificial Sequence
  Description of Artificial Sequence: Synthetic oligonucleotide
aagguauaguucaaagcaa

SEQ ID NO: 2450264 - RNA, 19 nt, Artificial Sequence
  Description of Artificial Sequence: Synthetic oligonucleotide
gaagucagugcuggcauug

SEQ ID NO: 2450265 - RNA, 19 nt, Artificial Sequence
  Description of Artificial Sequence: Synthetic oligonucleotide
aggaagcugaaaucacuug

SEQ ID NO: 2450266 - RNA, 19 nt, Artificial Sequence
  Description of Artificial Sequence: Synthetic oligonucleotide
aaaucacuugguagaaggu

SEQ ID NO: 2450267 - RNA, 19 nt, Artificial Sequence
  Description of Artificial Sequence: Synthetic oligonucleotide
agaauaguagccagguaca

SEQ ID NO: 2450268 - RNA, 19 nt, Artificial Sequence
  Description of Artificial Sequence: Synthetic oligonucleotide
aggguuggugagcacagug

SEQ ID NO: 2450269 - RNA, 19 nt, Artificial Sequence
  Description of Artificial Sequence: Synthetic oligonucleotide
cagccagcgcugcagaugg

SEQ ID NO: 2450270 - RNA, 19 nt, Artificial Sequence
  Description of Artificial Sequence: Synthetic oligonucleotide
agucaaaguagguggcacu

SEQ ID NO: 2450271 - RNA, 19 nt, Artificial Sequence
  Description of Artificial Sequence: Synthetic oligonucleotide
caggaguaggcccugucag

SEQ ID NO: 2450272 - RNA, 19 nt, Artificial Sequence
  Description of Artificial Sequence: Synthetic oligonucleotide
ugcaaggagcgaaguacug

SEQ ID NO: 2450273 - RNA, 19 nt, Artificial Sequence
  Description of Artificial Sequence: Synthetic oligonucleotide
uguugcucgcuggugcugg

SEQ ID NO: 2450274 - RNA, 19 nt, Artificial Sequence
  Description of Artificial Sequence: Synthetic oligonucleotide
aauacccuugugguaauua

SEQ ID NO: 2450275 - RNA, 19 nt, Artificial Sequence
  Description of Artificial Sequence: Synthetic oligonucleotide
uccauguccaugucugggu

SEQ ID NO: 2450276 - RNA, 19 nt, Artificial Sequence
  Description of Artificial Sequence: Synthetic oligonucleotide
caacuguccagagggauag

SEQ ID NO: 2450277 - RNA, 19 nt, Artificial Sequence
  Description of Artificial Sequence: Synthetic oligonucleotide
ucaaaccugaggguccuug

SEQ ID NO: 2450278 - RNA, 19 nt, Artificial Sequence
  Description of Artificial Sequence: Synthetic oligonucleotide
cuggggcuaggaaagcugc

SEQ ID NO: 2450279 - RNA, 19 nt, Artificial Sequence
  Description of Artificial Sequence: Synthetic oligonucleotide
gucaauacccuugugguaa

SEQ ID NO: 2450280 - RNA, 19 nt, Artificial Sequence
  Description of Artificial Sequence: Synthetic oligonucleotide
ucagcagcuuugauaguuc

SEQ ID NO: 2450281 - RNA, 19 nt, Artificial Sequence
  Description of Artificial Sequence: Synthetic oligonucleotide
gcuugucacagcuggaugc

SEQ ID NO: 2450282 - RNA, 19 nt, Artificial Sequence
  Description of Artificial Sequence: Synthetic oligonucleotide
agacagcgagucuuaccac

SEQ ID NO: 2450283 - RNA, 19 nt, Artificial Sequence
  Description of Artificial Sequence: Synthetic oligonucleotide
guaccagucaauacccuug

SEQ ID NO: 2450284 - RNA, 19 nt, Artificial Sequence
  Description of Artificial Sequence: Synthetic oligonucleotide
uuuucccuagacagcgagu

SEQ ID NO: 2450285 - RNA, 19 nt, Artificial Sequence
  Description of Artificial Sequence: Synthetic oligonucleotide
ucuccguguugcucgcugg

SEQ ID NO: 2450286 - RNA, 19 nt, Artificial Sequence
  Description of Artificial Sequence: Synthetic oligonucleotide
auccguaaggaaaagucga

SEQ ID NO: 2450287 - RNA, 19 nt, Artificial Sequence
  Description of Artificial Sequence: Synthetic oligonucleotide
agacaacgguucugcaagg

SEQ ID NO: 2450288 - RNA, 19 nt, Artificial Sequence
  Description of Artificial Sequence: Synthetic oligonucleotide
gaagaagugaauagcgugu

SEQ ID NO: 2450289 - RNA, 19 nt, Artificial Sequence
  Description of Artificial Sequence: Synthetic oligonucleotide
caaggagcgaaguacugga

SEQ ID NO: 2450290 - RNA, 19 nt, Artificial Sequence
  Description of Artificial Sequence: Synthetic oligonucleotide
agaacugaauuuccucaaa

SEQ ID NO: 2450291 - RNA, 19 nt, Artificial Sequence
  Description of Artificial Sequence: Synthetic oligonucleotide
ggggcaucagcccacacug

SEQ ID NO: 2450292 - RNA, 19 nt, Artificial Sequence
  Description of Artificial Sequence: Synthetic oligonucleotide
agcaacugggucuccgugu

SEQ ID NO: 2450293 - RNA, 19 nt, Artificial Sequence
  Description of Artificial Sequence: Synthetic oligonucleotide
caaagcaacugggucuccg

SEQ ID NO: 2450294 - RNA, 19 nt, Artificial Sequence
  Description of Artificial Sequence: Synthetic oligonucleotide
aggaacuucuggauggucu

SEQ ID NO: 2450295 - RNA, 19 nt, Artificial Sequence
  Description of Artificial Sequence: Synthetic oligonucleotide
cuaggaaagcugcuuguca

SEQ ID NO: 2450296 - RNA, 19 nt, Artificial Sequence
  Description of Artificial Sequence: Synthetic oligonucleotide
cauugaggcugcuggguug

SEQ ID NO: 2450297 - RNA, 19 nt, Artificial Sequence
  Description of Artificial Sequence: Synthetic oligonucleotide
gugguacaaccucugaguc

SEQ ID NO: 2450298 - RNA, 19 nt, Artificial Sequence
  Description of Artificial Sequence: Synthetic oligonucleotide
gugguaauuagggccacug

SEQ ID NO: 2450299 - RNA, 19 nt, Artificial Sequence
  Description of Artificial Sequence: Synthetic oligonucleotide
ugcagauggguagaauagu

SEQ ID NO: 2450300 - RNA, 19 nt, Artificial Sequence
  Description of Artificial Sequence: Synthetic oligonucleotide
caaccucugagucaaagua

SEQ ID NO: 2450301 - RNA, 19 nt, Artificial Sequence
  Description of Artificial Sequence: Synthetic oligonucleotide
ugucagcaggguuggugag

SEQ ID NO: 2450302 - RNA, 19 nt, Artificial Sequence
  Description of Artificial Sequence: Synthetic oligonucleotide
aguaagucagccagcgcug

SEQ ID NO: 2450303 - RNA, 19 nt, Artificial Sequence
  Description of Artificial Sequence: Synthetic oligonucleotide
guaaggaaaagucgagacu

SEQ ID NO: 2450304 - RNA, 19 nt, Artificial Sequence
  Description of Artificial Sequence: Synthetic oligonucleotide
aucagcccacacuggaaug

SEQ ID NO: 2450305 - RNA, 19 nt, Artificial Sequence
  Description of Artificial Sequence: Synthetic oligonucleotide
uucugcaaggagcgaagua

SEQ ID NO: 2450306 - RNA, 19 nt, Artificial Sequence
  Description of Artificial Sequence: Synthetic oligonucleotide
gagcgaaguacuggagggg

SEQ ID NO: 2450307 - RNA, 19 nt, Artificial Sequence
  Description of Artificial Sequence: Synthetic oligonucleotide
cacuugguagaagguauag

SEQ ID NO: 2450308 - RNA, 19 nt, Artificial Sequence
  Description of Artificial Sequence: Synthetic oligonucleotide
auccacaaucagcaacugu

SEQ ID NO: 2450309 - RNA, 19 nt, Artificial Sequence
  Description of Artificial Sequence: Synthetic oligonucleotide
guuccaaauuaugguuccg

SEQ ID NO: 2450310 - RNA, 19 nt, Artificial Sequence
  Description of Artificial Sequence: Synthetic oligonucleotide
ucacuugguagaagguaua

SEQ ID NO: 2450311 - RNA, 19 nt, Artificial Sequence
  Description of Artificial Sequence: Synthetic oligonucleotide
ucagcccacacuggaaugu

SEQ ID NO: 2450312 - RNA, 19 nt, Artificial Sequence
  Description of Artificial Sequence: Synthetic oligonucleotide
aaggagcgaaguacuggag

SEQ ID NO: 2450313 - RNA, 19 nt, Artificial Sequence
  Description of Artificial Sequence: Synthetic oligonucleotide
aggaagaagugaauagcgu

SEQ ID NO: 2450314 - RNA, 19 nt, Artificial Sequence
  Description of Artificial Sequence: Synthetic oligonucleotide
uucuucccgaagccacaag

SEQ ID NO: 2450315 - RNA, 19 nt, Artificial Sequence
  Description of Artificial Sequence: Synthetic oligonucleotide
ucaagucccuggcaccaaa

SEQ ID NO: 2450316 - RNA, 19 nt, Artificial Sequence
  Description of Artificial Sequence: Synthetic oligonucleotide
cagucaauacccuuguggu

SEQ ID NO: 2450317 - RNA, 19 nt, Artificial Sequence
  Description of Artificial Sequence: Synthetic oligonucleotide
caaucagcaacuguccaga

SEQ ID NO: 2450318 - RNA, 19 nt, Artificial Sequence
  Description of Artificial Sequence: Synthetic oligonucleotide
gguacaaccucugagucaa

SEQ ID NO: 2450319 - RNA, 19 nt, Artificial Sequence
  Description of Artificial Sequence: Synthetic oligonucleotide
acaagacaacgguucugca

SEQ ID NO: 2450320 - RNA, 19 nt, Artificial Sequence
  Description of Artificial Sequence: Synthetic oligonucleotide
gaagcugaaaucacuuggu

SEQ ID NO: 2450321 - RNA, 19 nt, Artificial Sequence
  Description of Artificial Sequence: Synthetic oligonucleotide
ccacaaucagcaacugucc

SEQ ID NO: 2450322 - RNA, 19 nt, Artificial Sequence
  Description of Artificial Sequence: Synthetic oligonucleotide
gcaccaaaauccuuuaucu

SEQ ID NO: 2450323 - RNA, 19 nt, Artificial Sequence
  Description of Artificial Sequence: Synthetic oligonucleotide
uucccuagacagcgagucu

SEQ ID NO: 2450324 - RNA, 19 nt, Artificial Sequence
  Description of Artificial Sequence: Synthetic oligonucleotide
aggaaaagucgagacucca

SEQ ID NO: 2450325 - RNA, 19 nt, Artificial Sequence
  Description of Artificial Sequence: Synthetic oligonucleotide
ugaauagcguguggugccu

SEQ ID NO: 2450326 - RNA, 19 nt, Artificial Sequence
  Description of Artificial Sequence: Synthetic oligonucleotide
gaguaggcccugucagcag

SEQ ID NO: 2450327 - RNA, 19 nt, Artificial Sequence
  Description of Artificial Sequence: Synthetic oligonucleotide
ccaugucuggguaucuccg

SEQ ID NO: 2450328 - RNA, 19 nt, Artificial Sequence
  Description of Artificial Sequence: Synthetic oligonucleotide
agucgagacuccaugucca

SEQ ID NO: 2450329 - RNA, 19 nt, Artificial Sequence
  Description of Artificial Sequence: Synthetic oligonucleotide
gaaguccauguaccaguca

SEQ ID NO: 2450330 - RNA, 19 nt, Artificial Sequence
  Description of Artificial Sequence: Synthetic oligonucleotide
auugaggcugcuggguuga

SEQ ID NO: 2450331 - RNA, 19 nt, Artificial Sequence
  Description of Artificial Sequence: Synthetic oligonucleotide
ucccuagacagcgagucuu

SEQ ID NO: 2450332 - RNA, 19 nt, Artificial Sequence
  Description of Artificial Sequence: Synthetic oligonucleotide
cacuggaauguugcaauuc

SEQ ID NO: 2450333 - RNA, 19 nt, Artificial Sequence
  Description of Artificial Sequence: Synthetic oligonucleotide
gucuuaccaccuucaaguc

SEQ ID NO: 2450334 - RNA, 19 nt, Artificial Sequence
  Description of Artificial Sequence: Synthetic oligonucleotide
cacaaucagcaacugucca

SEQ ID NO: 2450335 - RNA, 19 nt, Artificial Sequence
  Description of Artificial Sequence: Synthetic oligonucleotide
ucaauacccuugugguaau

SEQ ID NO: 2450336 - RNA, 19 nt, Artificial Sequence
  Description of Artificial Sequence: Synthetic oligonucleotide
uggucuccauugaggcugc

SEQ ID NO: 2450337 - RNA, 19 nt, Artificial Sequence
  Description of Artificial Sequence: Synthetic oligonucleotide
gaauaguagccagguacaa

SEQ ID NO: 2450338 - RNA, 19 nt, Artificial Sequence
  Description of Artificial Sequence: Synthetic oligonucleotide
auguugcaauucuucccga

SEQ ID NO: 2450339 - RNA, 19 nt, Artificial Sequence
  Description of Artificial Sequence: Synthetic oligonucleotide
guagaagguauaguucaaa

SEQ ID NO: 2450340 - RNA, 19 nt, Artificial Sequence
  Description of Artificial Sequence: Synthetic oligonucleotide
uggcuguccaagccggcuc

SEQ ID NO: 2450341 - RNA, 19 nt, Artificial Sequence
  Description of Artificial Sequence: Synthetic oligonucleotide
aguacuggaggggccugag

SEQ ID NO: 2450342 - RNA, 19 nt, Artificial Sequence
  Description of Artificial Sequence: Synthetic oligonucleotide
gcugcagauggguagaaua

SEQ ID NO: 2450343 - RNA, 19 nt, Artificial Sequence
  Description of Artificial Sequence: Synthetic oligonucleotide
uaucuccggccuuugcuuu

SEQ ID NO: 2450344 - RNA, 19 nt, Artificial Sequence
  Description of Artificial Sequence: Synthetic oligonucleotide
uccggccuuugcuuuuccc

SEQ ID NO: 2450345 - RNA, 19 nt, Artificial Sequence
  Description of Artificial Sequence: Synthetic oligonucleotide
gucuccguguugcucgcug

SEQ ID NO: 2450346 - RNA, 19 nt, Artificial Sequence
  Description of Artificial Sequence: Synthetic oligonucleotide
auacgaagcuccugcccau

SEQ ID NO: 2450347 - RNA, 19 nt, Artificial Sequence
  Description of Artificial Sequence: Synthetic oligonucleotide
accugaggguccuugugua

SEQ ID NO: 2450348 - RNA, 19 nt, Artificial Sequence
  Description of Artificial Sequence: Synthetic oligonucleotide
gguagaauaguagccaggu

SEQ ID NO: 2450349 - RNA, 19 nt, Artificial Sequence
  Description of Artificial Sequence: Synthetic oligonucleotide
cuggguugauacgaagcuc

SEQ ID NO: 2450350 - RNA, 19 nt, Artificial Sequence
  Description of Artificial Sequence: Synthetic oligonucleotide
acagcgagucuuaccaccu

SEQ ID NO: 2450351 - RNA, 19 nt, Artificial Sequence
  Description of Artificial Sequence: Synthetic oligonucleotide
gauggucuccauugaggcu

SEQ ID NO: 2450352 - RNA, 19 nt, Artificial Sequence
  Description of Artificial Sequence: Synthetic oligonucleotide
ccuucaagucccuggcacc

SEQ ID NO: 2450353 - RNA, 19 nt, Artificial Sequence
  Description of Artificial Sequence: Synthetic oligonucleotide
acacuggaauguugcaauu

SEQ ID NO: 2450354 - RNA, 19 nt, Artificial Sequence
  Description of Artificial Sequence: Synthetic oligonucleotide
gacaacgguucugcaagga

SEQ ID NO: 2450355 - RNA, 19 nt, Artificial Sequence
  Description of Artificial Sequence: Synthetic oligonucleotide
cuucaagucccuggcacca

SEQ ID NO: 2450356 - RNA, 19 nt, Artificial Sequence
  Description of Artificial Sequence: Synthetic oligonucleotide
cuguccagagggauaguaa

SEQ ID NO: 2450357 - RNA, 19 nt, Artificial Sequence
  Description of Artificial Sequence: Synthetic oligonucleotide
gaauagcguguggugccug

SEQ ID NO: 2450358 - RNA, 19 nt, Artificial Sequence
  Description of Artificial Sequence: Synthetic oligonucleotide
uccguguugcucgcuggug

SEQ ID NO: 2450359 - RNA, 19 nt, Artificial Sequence
  Description of Artificial Sequence: Synthetic oligonucleotide
cuugucacagcuggaugca

SEQ ID NO: 2450360 - RNA, 19 nt, Artificial Sequence
  Description of Artificial Sequence: Synthetic oligonucleotide
gaugcaggcucaggaagaa

SEQ ID NO: 2450361 - RNA, 19 nt, Artificial Sequence
  Description of Artificial Sequence: Synthetic oligonucleotide
guagaauaguagccaggua

SEQ ID NO: 2450362 - RNA, 19 nt, Artificial Sequence
  Description of Artificial Sequence: Synthetic oligonucleotide
gucagcaggguuggugagc

SEQ ID NO: 2450363 - RNA, 19 nt, Artificial Sequence
  Description of Artificial Sequence: Synthetic oligonucleotide
ggccuuugcuuuucccuag

SEQ ID NO: 2450364 - RNA, 19 nt, Artificial Sequence
  Description of Artificial Sequence: Synthetic oligonucleotide
ccaccuucaagucccuggc

SEQ ID NO: 2450365 - RNA, 19 nt, Artificial Sequence
  Description of Artificial Sequence: Synthetic oligonucleotide
cugaaaucacuugguagaa

SEQ ID NO: 2450366 - RNA, 19 nt, Artificial Sequence
  Description of Artificial Sequence: Synthetic oligonucleotide
ucuggguaucuccggccuu

SEQ ID NO: 2450367 - RNA, 19 nt, Artificial Sequence
  Description of Artificial Sequence: Synthetic oligonucleotide
acuucuggauggucuccau

SEQ ID NO: 2450368 - RNA, 19 nt, Artificial Sequence
  Description of Artificial Sequence: Synthetic oligonucleotide
gguacaagacaacgguucu

SEQ ID NO: 2450369 - RNA, 19 nt, Artificial Sequence
  Description of Artificial Sequence: Synthetic oligonucleotide
ccgugguacaaccucugag

SEQ ID NO: 2450370 - RNA, 19 nt, Artificial Sequence
  Description of Artificial Sequence: Synthetic oligonucleotide
gguaucuccggccuuugcu

SEQ ID NO: 2450371 - RNA, 19 nt, Artificial Sequence
  Description of Artificial Sequence: Synthetic oligonucleotide
ggaguaggcccugucagca

SEQ ID NO: 2450372 - RNA, 19 nt, Artificial Sequence
  Description of Artificial Sequence: Synthetic oligonucleotide
agcgcugcagauggguaga

SEQ ID NO: 2450373 - RNA, 19 nt, Artificial Sequence
  Description of Artificial Sequence: Synthetic oligonucleotide
ccaaauuaugguuccggaa

SEQ ID NO: 2450374 - RNA, 19 nt, Artificial Sequence
  Description of Artificial Sequence: Synthetic oligonucleotide
gccacugaagaacugaauu

SEQ ID NO: 2450375 - RNA, 19 nt, Artificial Sequence
  Description of Artificial Sequence: Synthetic oligonucleotide
gcuggguugauacgaagcu

SEQ ID NO: 2450376 - RNA, 19 nt, Artificial Sequence
  Description of Artificial Sequence: Synthetic oligonucleotide
ccguguugcucgcuggugc

SEQ ID NO: 2450377 - RNA, 19 nt, Artificial Sequence
  Description of Artificial Sequence: Synthetic oligonucleotide
aguccauguaccagucaau

SEQ ID NO: 2450378 - RNA, 19 nt, Artificial Sequence
  Description of Artificial Sequence: Synthetic oligonucleotide
cugcaaggagcgaaguacu

SEQ ID NO: 2450379 - RNA, 19 nt, Artificial Sequence
  Description of Artificial Sequence: Synthetic oligonucleotide
guaucuccggccuuugcuu

SEQ ID NO: 2450380 - RNA, 19 nt, Artificial Sequence
  Description of Artificial Sequence: Synthetic oligonucleotide
caaaguagguggcacuuuu

SEQ ID NO: 2450381 - RNA, 19 nt, Artificial Sequence
  Description of Artificial Sequence: Synthetic oligonucleotide
gguauaguucaaagcaacu

SEQ ID NO: 2450382 - RNA, 19 nt, Artificial Sequence
  Description of Artificial Sequence: Synthetic oligonucleotide
auguaccagucaauacccu

SEQ ID NO: 2450383 - RNA, 19 nt, Artificial Sequence
  Description of Artificial Sequence: Synthetic oligonucleotide
caaaggugcuggggcuagg

SEQ ID NO: 2450384 - RNA, 19 nt, Artificial Sequence
  Description of Artificial Sequence: Synthetic oligonucleotide
gaggggccugagaggaagc

SEQ ID NO: 2450385 - RNA, 19 nt, Artificial Sequence
  Description of Artificial Sequence: Synthetic oligonucleotide
uucaagucccuggcaccaa

SEQ ID NO: 2450386 - RNA, 19 nt, Artificial Sequence
  Description of Artificial Sequence: Synthetic oligonucleotide
ggaugcaggcucaggaaga

SEQ ID NO: 2450387 - RNA, 19 nt, Artificial Sequence
  Description of Artificial Sequence: Synthetic oligonucleotide
gguuggugagcacagugau

SEQ ID NO: 2450388 - RNA, 19 nt, Artificial Sequence
  Description of Artificial Sequence: Synthetic oligonucleotide
ugagcacagugaugaucuu

SEQ ID NO: 2450389 - RNA, 19 nt, Artificial Sequence
  Description of Artificial Sequence: Synthetic oligonucleotide
gaggguccuuguguaguuc

SEQ ID NO: 2450390 - RNA, 19 nt, Artificial Sequence
  Description of Artificial Sequence: Synthetic oligonucleotide
ccugagaggaagcugaaau

SEQ ID NO: 2450391 - RNA, 19 nt, Artificial Sequence
  Description of Artificial Sequence: Synthetic oligonucleotide
caagucccuggcaccaaaa

SEQ ID NO: 2450392 - RNA, 19 nt, Artificial Sequence
  Description of Artificial Sequence: Synthetic oligonucleotide
caacugggucuccguguug

SEQ ID NO: 2450393 - RNA, 19 nt, Artificial Sequence
  Description of Artificial Sequence: Synthetic oligonucleotide
ccagagggauaguaaguca

SEQ ID NO: 2450394 - RNA, 19 nt, Artificial Sequence
  Description of Artificial Sequence: Synthetic oligonucleotide
ucuccggccuuugcuuuuc

SEQ ID NO: 2450395 - RNA, 19 nt, Artificial Sequence
  Description of Artificial Sequence: Synthetic oligonucleotide
gcagauggguagaauagua

SEQ ID NO: 2450396 - RNA, 19 nt, Artificial Sequence
  Description of Artificial Sequence: Synthetic oligonucleotide
cagugaugaucuuggcucu

SEQ ID NO: 2450397 - RNA, 19 nt, Artificial Sequence
  Description of Artificial Sequence: Synthetic oligonucleotide
gguaccaggaguaggcccu

SEQ ID NO: 2450398 - RNA, 19 nt, Artificial Sequence
  Description of Artificial Sequence: Synthetic oligonucleotide
gcucaggaagaagugaaua

SEQ ID NO: 2450399 - RNA, 19 nt, Artificial Sequence
  Description of Artificial Sequence: Synthetic oligonucleotide
ggguuggugagcacaguga

SEQ ID NO: 2450400 - RNA, 19 nt, Artificial Sequence
  Description of Artificial Sequence: Synthetic oligonucleotide
guacuggaggggccugaga

SEQ ID NO: 2450401 - RNA, 19 nt, Artificial Sequence
  Description of Artificial Sequence: Synthetic oligonucleotide
gguagaagguauaguucaa

SEQ ID NO: 2450402 - RNA, 19 nt, Artificial Sequence
  Description of Artificial Sequence: Synthetic oligonucleotide
aucuuggcucuuggcagaa

SEQ ID NO: 2450403 - RNA, 19 nt, Artificial Sequence
  Description of Artificial Sequence: Synthetic oligonucleotide
guguugcucgcuggugcug

SEQ ID NO: 2450404 - RNA, 19 nt, Artificial Sequence
  Description of Artificial Sequence: Synthetic oligonucleotide
guccagagggauaguaagu

SEQ ID NO: 2450405 - RNA, 19 nt, Artificial Sequence
  Description of Artificial Sequence: Synthetic oligonucleotide
guaccaggaguaggcccug

SEQ ID NO: 2450406 - RNA, 19 nt, Artificial Sequence
  Description of Artificial Sequence: Synthetic oligonucleotide
caccuucaagucccuggca

SEQ ID NO: 2450407 - RNA, 19 nt, Artificial Sequence
  Description of Artificial Sequence: Synthetic oligonucleotide
cuccggccuuugcuuuucc

SEQ ID NO: 2450408 - RNA, 19 nt, Artificial Sequence
  Description of Artificial Sequence: Synthetic oligonucleotide
uaggcccugucagcagggu

SEQ ID NO: 2450409 - RNA, 19 nt, Artificial Sequence
  Description of Artificial Sequence: Synthetic oligonucleotide
cagcaacuguccagaggga

SEQ ID NO: 2450410 - RNA, 19 nt, Artificial Sequence
  Description of Artificial Sequence: Synthetic oligonucleotide
gcgaaguacuggaggggcc

SEQ ID NO: 2450411 - RNA, 19 nt, Artificial Sequence
  Description of Artificial Sequence: Synthetic oligonucleotide
cugaggguccuuguguagu

SEQ ID NO: 2450412 - RNA, 19 nt, Artificial Sequence
  Description of Artificial Sequence: Synthetic oligonucleotide
cauguccaugucuggguau

SEQ ID NO: 2450413 - RNA, 19 nt, Artificial Sequence
  Description of Artificial Sequence: Synthetic oligonucleotide
gcgagucuuaccaccuuca

SEQ ID NO: 2450414 - RNA, 19 nt, Artificial Sequence
  Description of Artificial Sequence: Synthetic oligonucleotide
cccgccgugguacaaccuc

SEQ ID NO: 2450415 - RNA, 19 nt, Artificial Sequence
  Description of Artificial Sequence: Synthetic oligonucleotide
caucaaaccugaggguccu

SEQ ID NO: 2450416 - RNA, 19 nt, Artificial Sequence
  Description of Artificial Sequence: Synthetic oligonucleotide
guucugcaaggagcgaagu

SEQ ID NO: 2450417 - RNA, 19 nt, Artificial Sequence
  Description of Artificial Sequence: Synthetic oligonucleotide
ccguaaggaaaagucgaga

SEQ ID NO: 2450418 - RNA, 19 nt, Artificial Sequence
  Description of Artificial Sequence: Synthetic oligonucleotide
acgguucugcaaggagcga

SEQ ID NO: 2450419 - RNA, 19 nt, Artificial Sequence
  Description of Artificial Sequence: Synthetic oligonucleotide
ccuagacagcgagucuuac

SEQ ID NO: 2450420 - RNA, 19 nt, Artificial Sequence
  Description of Artificial Sequence: Synthetic oligonucleotide
cuggggcaucagcccacac

SEQ ID NO: 2450421 - RNA, 19 nt, Artificial Sequence
  Description of Artificial Sequence: Synthetic oligonucleotide
ggaaaagucgagacuccau

SEQ ID NO: 2450422 - RNA, 19 nt, Artificial Sequence
  Description of Artificial Sequence: Synthetic oligonucleotide
cagcaggguuggugagcac

SEQ ID NO: 2450423 - RNA, 19 nt, Artificial Sequence
  Description of Artificial Sequence: Synthetic oligonucleotide
cuucuggauggucuccauu

SEQ ID NO: 2450424 - RNA, 19 nt, Artificial Sequence
  Description of Artificial Sequence: Synthetic oligonucleotide
gggccacugaagaacugaa

SEQ ID NO: 2450425 - RNA, 19 nt, Artificial Sequence
  Description of Artificial Sequence: Synthetic oligonucleotide
cuccguguugcucgcuggu

SEQ ID NO: 2450426 - RNA, 19 nt, Artificial Sequence
  Description of Artificial Sequence: Synthetic oligonucleotide
agccagcgcugcagauggg

SEQ ID NO: 2450427 - RNA, 19 nt, Artificial Sequence
  Description of Artificial Sequence: Synthetic oligonucleotide
uugaggcugcuggguugau

SEQ ID NO: 2450428 - RNA, 19 nt, Artificial Sequence
  Description of Artificial Sequence: Synthetic oligonucleotide
ccauguccaugucugggua

SEQ ID NO: 2450429 - RNA, 19 nt, Artificial Sequence
  Description of Artificial Sequence: Synthetic oligonucleotide
aucaaaccugaggguccuu

SEQ ID NO: 2450430 - RNA, 19 nt, Artificial Sequence
  Description of Artificial Sequence: Synthetic oligonucleotide
guugcucgcuggugcuggu

SEQ ID NO: 2450431 - RNA, 19 nt, Artificial Sequence
  Description of Artificial Sequence: Synthetic oligonucleotide
gcuuuucccuagacagcga

SEQ ID NO: 2450432 - RNA, 19 nt, Artificial Sequence
  Description of Artificial Sequence: Synthetic oligonucleotide
cuggguaucuccggccuuu

SEQ ID NO: 2450433 - RNA, 19 nt, Artificial Sequence
  Description of Artificial Sequence: Synthetic oligonucleotide
cggcucagcagcuuugaua

SEQ ID NO: 2450434 - RNA, 19 nt, Artificial Sequence
  Description of Artificial Sequence: Synthetic oligonucleotide
cgccgugguacaaccucug

SEQ ID NO: 2450435 - RNA, 19 nt, Artificial Sequence
  Description of Artificial Sequence: Synthetic oligonucleotide
cccuagacagcgagucuua

SEQ ID NO: 2450436 - RNA, 19 nt, Artificial Sequence
  Description of Artificial Sequence: Synthetic oligonucleotide
ccagcgcugcagaugggua

SEQ ID NO: 2450437 - RNA, 19 nt, Artificial Sequence
  Description of Artificial Sequence: Synthetic oligonucleotide
ggggcuaggaaagcugcuu

SEQ ID NO: 2450438 - RNA, 19 nt, Artificial Sequence
  Description of Artificial Sequence: Synthetic oligonucleotide
gccugagaggaagcugaaa

SEQ ID NO: 2450439 - RNA, 19 nt, Artificial Sequence
  Description of Artificial Sequence: Synthetic oligonucleotide
cgagucuuaccaccuucaa

SEQ ID NO: 2450440 - RNA, 19 nt, Artificial Sequence
  Description of Artificial Sequence: Synthetic oligonucleotide
ggccacugaagaacugaau

SEQ ID NO: 2450441 - RNA, 19 nt, Artificial Sequence
  Description of Artificial Sequence: Synthetic oligonucleotide
caauacccuugugguaauu

SEQ ID NO: 2450442 - RNA, 19 nt, Artificial Sequence
  Description of Artificial Sequence: Synthetic oligonucleotide
cgaaguacuggaggggccu

SEQ ID NO: 2450443 - RNA, 19 nt, Artificial Sequence
  Description of Artificial Sequence: Synthetic oligonucleotide
cagcgagucuuaccaccuu

SEQ ID NO: 2450444 - RNA, 19 nt, Artificial Sequence
  Description of Artificial Sequence: Synthetic oligonucleotide
ccgccgugguacaaccucu

SEQ ID NO: 2450445 - RNA, 19 nt, Artificial Sequence
  Description of Artificial Sequence: Synthetic oligonucleotide
cagcccacacuggaauguu

SEQ ID NO: 2450446 - RNA, 19 nt, Artificial Sequence
  Description of Artificial Sequence: Synthetic oligonucleotide
ggucuccguguugcucgcu

SEQ ID NO: 2450447 - RNA, 19 nt, Artificial Sequence
  Description of Artificial Sequence: Synthetic oligonucleotide
ccggcucagcagcuuugau

SEQ ID NO: 2450448 - RNA, 19 nt, Artificial Sequence
  Description of Artificial Sequence: Synthetic oligonucleotide
uggaauacauagcagaucg

SEQ ID NO: 2450449 - RNA, 19 nt, Artificial Sequence
  Description of Artificial Sequence: Synthetic oligonucleotide
aagcuguuuaauuaggucg

SEQ ID NO: 2450450 - RNA, 19 nt, Artificial Sequence
  Description of Artificial Sequence: Synthetic oligonucleotide
uguuuaauuaggucgauag

SEQ ID NO: 2450451 - RNA, 19 nt, Artificial Sequence
  Description of Artificial Sequence: Synthetic oligonucleotide
uuuagugacaguagcaagg

SEQ ID NO: 2450452 - RNA, 19 nt, Artificial Sequence
  Description of Artificial Sequence: Synthetic oligonucleotide
aguuugugaggauacaucc

SEQ ID NO: 2450453 - RNA, 19 nt, Artificial Sequence
  Description of Artificial Sequence: Synthetic oligonucleotide
uuuaacuucgcugauauca

SEQ ID NO: 2450454 - RNA, 19 nt, Artificial Sequence
  Description of Artificial Sequence: Synthetic oligonucleotide
uuugugaggauacaucccg

SEQ ID NO: 2450455 - RNA, 19 nt, Artificial Sequence
  Description of Artificial Sequence: Synthetic oligonucleotide
ugaggaacagcuuugaucu

SEQ ID NO: 2450456 - RNA, 19 nt, Artificial Sequence
  Description of Artificial Sequence: Synthetic oligonucleotide
cuuaaaguaagcaucaguc

SEQ ID NO: 2450457 - RNA, 19 nt, Artificial Sequence
  Description of Artificial Sequence: Synthetic oligonucleotide
ucaacuuuuguagaggugg

SEQ ID NO: 2450458 - RNA, 19 nt, Artificial Sequence
  Description of Artificial Sequence: Synthetic oligonucleotide
uuuaauuaggucgauagca

SEQ ID NO: 2450459 - RNA, 19 nt, Artificial Sequence
  Description of Artificial Sequence: Synthetic oligonucleotide
aagaccacccucuugcccc

SEQ ID NO: 2450460 - RNA, 19 nt, Artificial Sequence
  Description of Artificial Sequence: Synthetic oligonucleotide
aguagcaaggaccuuuucc

SEQ ID NO: 2450461 - RNA, 19 nt, Artificial Sequence
  Description of Artificial Sequence: Synthetic oligonucleotide
uauuuucucuuguauaggg

SEQ ID NO: 2450462 - RNA, 19 nt, Artificial Sequence
  Description of Artificial Sequence: Synthetic oligonucleotide
aggaagaccacccucuugc

SEQ ID NO: 2450463 - RNA, 19 nt, Artificial Sequence
  Description of Artificial Sequence: Synthetic oligonucleotide
gauaucaacuuuuguagag

SEQ ID NO: 2450464 - RNA, 19 nt, Artificial Sequence
  Description of Artificial Sequence: Synthetic oligonucleotide
gauacaucccguuugucag

SEQ ID NO: 2450465 - RNA, 19 nt, Artificial Sequence
  Description of Artificial Sequence: Synthetic oligonucleotide
uguaaucucguauuucucc

SEQ ID NO: 2450466 - RNA, 19 nt, Artificial Sequence
  Description of Artificial Sequence: Synthetic oligonucleotide
gaauacauagcagaucggg

SEQ ID NO: 2450467 - RNA, 19 nt, Artificial Sequence
  Description of Artificial Sequence: Synthetic oligonucleotide
aguaggguaauaccugggc

SEQ ID NO: 2450468 - RNA, 19 nt, Artificial Sequence
  Description of Artificial Sequence: Synthetic oligonucleotide
uuuucgaagcuuaaccacc

SEQ ID NO: 2450469 - RNA, 19 nt, Artificial Sequence
  Description of Artificial Sequence: Synthetic oligonucleotide
agaggaacucuguugaggg

SEQ ID NO: 2450470 - RNA, 19 nt, Artificial Sequence
  Description of Artificial Sequence: Synthetic oligonucleotide
auacauagcagaucgggag

SEQ ID NO: 2450471 - RNA, 19 nt, Artificial Sequence
  Description of Artificial Sequence: Synthetic oligonucleotide
ugugucgaagaucucaccc

SEQ ID NO: 2450472 - RNA, 19 nt, Artificial Sequence
  Description of Artificial Sequence: Synthetic oligonucleotide
aaucucguauuucuccuuc

SEQ ID NO: 2450473 - RNA, 19 nt, Artificial Sequence
  Description of Artificial Sequence: Synthetic oligonucleotide
uuaaaguaagcaucaguca

SEQ ID NO: 2450474 - RNA, 19 nt, Artificial Sequence
  Description of Artificial Sequence: Synthetic oligonucleotide
uucuggaauacauagcaga

SEQ ID NO: 2450475 - RNA, 19 nt, Artificial Sequence
  Description of Artificial Sequence: Synthetic oligonucleotide
ugcuucuucuuaaaguaag

SEQ ID NO: 2450476 - RNA, 19 nt, Artificial Sequence
  Description of Artificial Sequence: Synthetic oligonucleotide
uuugaucuuuggcaaaagc

SEQ ID NO: 2450477 - RNA, 19 nt, Artificial Sequence
  Description of Artificial Sequence: Synthetic oligonucleotide
aaaguaagcaucagucagg

SEQ ID NO: 2450478 - RNA, 19 nt, Artificial Sequence
  Description of Artificial Sequence: Synthetic oligonucleotide
uuacaugcugacugaaggg

SEQ ID NO: 2450479 - RNA, 19 nt, Artificial Sequence
  Description of Artificial Sequence: Synthetic oligonucleotide
gaacugagaccucagguag

SEQ ID NO: 2450480 - RNA, 19 nt, Artificial Sequence
  Description of Artificial Sequence: Synthetic oligonucleotide
auuuuaacuucgcugauau

SEQ ID NO: 2450481 - RNA, 19 nt, Artificial Sequence
  Description of Artificial Sequence: Synthetic oligonucleotide
ucuucgaagaggaacucug

SEQ ID NO: 2450482 - RNA, 19 nt, Artificial Sequence
  Description of Artificial Sequence: Synthetic oligonucleotide
ugucacaaguagcaagccg

SEQ ID NO: 2450483 - RNA, 19 nt, Artificial Sequence
  Description of Artificial Sequence: Synthetic oligonucleotide
agcuuaaccacccgaguac

SEQ ID NO: 2450484 - RNA, 19 nt, Artificial Sequence
  Description of Artificial Sequence: Synthetic oligonucleotide
ucuucaguaggguaauacc

SEQ ID NO: 2450485 - RNA, 19 nt, Artificial Sequence
  Description of Artificial Sequence: Synthetic oligonucleotide
aagagguccugucacaagu

SEQ ID NO: 2450486 - RNA, 19 nt, Artificial Sequence
  Description of Artificial Sequence: Synthetic oligonucleotide
uuaauuaggucgauagcaa

SEQ ID NO: 2450487 - RNA, 19 nt, Artificial Sequence
  Description of Artificial Sequence: Synthetic oligonucleotide
uucaguaggguaauaccug

SEQ ID NO: 2450488 - RNA, 19 nt, Artificial Sequence
  Description of Artificial Sequence: Synthetic oligonucleotide
gaucucacccuccuggugc

SEQ ID NO: 2450489 - RNA, 19 nt, Artificial Sequence
  Description of Artificial Sequence: Synthetic oligonucleotide
auaugaagcuguuuaauua

SEQ ID NO: 2450490 - RNA, 19 nt, Artificial Sequence
  Description of Artificial Sequence: Synthetic oligonucleotide
uuucgaagcuuaaccaccc

SEQ ID NO: 2450491 - RNA, 19 nt, Artificial Sequence
  Description of Artificial Sequence: Synthetic oligonucleotide
ucgaagaggaacucuguug

SEQ ID NO: 2450492 - RNA, 19 nt, Artificial Sequence
  Description of Artificial Sequence: Synthetic oligonucleotide
auaucaacuuuuguagagg

SEQ ID NO: 2450493 - RNA, 19 nt, Artificial Sequence
  Description of Artificial Sequence: Synthetic oligonucleotide
uuuaaccuuagggucaccc

SEQ ID NO: 2450494 - RNA, 19 nt, Artificial Sequence
  Description of Artificial Sequence: Synthetic oligonucleotide
ugcucuucgaagaggaacu

SEQ ID NO: 2450495 - RNA, 19 nt, Artificial Sequence
  Description of Artificial Sequence: Synthetic oligonucleotide
ugauaucaacuuuuguaga

SEQ ID NO: 2450496 - RNA, 19 nt, Artificial Sequence
  Description of Artificial Sequence: Synthetic oligonucleotide
ucuggaauacauagcagau

SEQ ID NO: 2450497 - RNA, 19 nt, Artificial Sequence
  Description of Artificial Sequence: Synthetic oligonucleotide
aggaugaucaggacagucc

SEQ ID NO: 2450498 - RNA, 19 nt, Artificial Sequence
  Description of Artificial Sequence: Synthetic oligonucleotide
uguuuggggauuuuaacuu

SEQ ID NO: 2450499 - RNA, 19 nt, Artificial Sequence
  Description of Artificial Sequence: Synthetic oligonucleotide
uguauagggccuuucugga

SEQ ID NO: 2450500 - RNA, 19 nt, Artificial Sequence
  Description of Artificial Sequence: Synthetic oligonucleotide
aaccaguuugugaggauac

SEQ ID NO: 2450501 - RNA, 19 nt, Artificial Sequence
  Description of Artificial Sequence: Synthetic oligonucleotide
guuuagugacaguagcaag

SEQ ID NO: 2450502 - RNA, 19 nt, Artificial Sequence
  Description of Artificial Sequence: Synthetic oligonucleotide
guuuaauuaggucgauagc

SEQ ID NO: 2450503 - RNA, 19 nt, Artificial Sequence
  Description of Artificial Sequence: Synthetic oligonucleotide
ugguuuagugacaguagca

SEQ ID NO: 2450504 - RNA, 19 nt, Artificial Sequence
  Description of Artificial Sequence: Synthetic oligonucleotide
cugaggaacagcuuugauc

SEQ ID NO: 2450505 - RNA, 19 nt, Artificial Sequence
  Description of Artificial Sequence: Synthetic oligonucleotide
ugcuucaggaagaccaccc

SEQ ID NO: 2450506 - RNA, 19 nt, Artificial Sequence
  Description of Artificial Sequence: Synthetic oligonucleotide
gucacaaguagcaagccgc

SEQ ID NO: 2450507 - RNA, 19 nt, Artificial Sequence
  Description of Artificial Sequence: Synthetic oligonucleotide
aauacauagcagaucggga

SEQ ID NO: 2450508 - RNA, 19 nt, Artificial Sequence
  Description of Artificial Sequence: Synthetic oligonucleotide
uuaacuucgcugauaucaa

SEQ ID NO: 2450509 - RNA, 19 nt, Artificial Sequence
  Description of Artificial Sequence: Synthetic oligonucleotide
caucccguuugucagagag

SEQ ID NO: 2450510 - RNA, 19 nt, Artificial Sequence
  Description of Artificial Sequence: Synthetic oligonucleotide
uucgcugauaucaacuuuu

SEQ ID NO: 2450511 - RNA, 19 nt, Artificial Sequence
  Description of Artificial Sequence: Synthetic oligonucleotide
ucugugucgaagaucucac

SEQ ID NO: 2450512 - RNA, 19 nt, Artificial Sequence
  Description of Artificial Sequence: Synthetic oligonucleotide
uauagggccuuucuggaau

SEQ ID NO: 2450513 - RNA, 19 nt, Artificial Sequence
  Description of Artificial Sequence: Synthetic oligonucleotide
accaggacaggguuccggc

SEQ ID NO: 2450514 - RNA, 19 nt, Artificial Sequence
  Description of Artificial Sequence: Synthetic oligonucleotide
ugugaguccacaguuuucu

SEQ ID NO: 2450515 - RNA, 19 nt, Artificial Sequence
  Description of Artificial Sequence: Synthetic oligonucleotide
cugguuuagugacaguagc

SEQ ID NO: 2450516 - RNA, 19 nt, Artificial Sequence
  Description of Artificial Sequence: Synthetic oligonucleotide
ugagaccucagguagcccu

SEQ ID NO: 2450517 - RNA, 19 nt, Artificial Sequence
  Description of Artificial Sequence: Synthetic oligonucleotide
ugaguccacaguuuucuga

SEQ ID NO: 2450518 - RNA, 19 nt, Artificial Sequence
  Description of Artificial Sequence: Synthetic oligonucleotide
aggaacaucuucaguaggg

SEQ ID NO: 2450519 - RNA, 19 nt, Artificial Sequence
  Description of Artificial Sequence: Synthetic oligonucleotide
uacauagcagaucgggagu

SEQ ID NO: 2450520 - RNA, 19 nt, Artificial Sequence
  Description of Artificial Sequence: Synthetic oligonucleotide
aagcuuaaccacccgagua

SEQ ID NO: 2450521 - RNA, 19 nt, Artificial Sequence
  Description of Artificial Sequence: Synthetic oligonucleotide
aaguaagcaucagucaggu

SEQ ID NO: 2450522 - RNA, 19 nt, Artificial Sequence
  Description of Artificial Sequence: Synthetic oligonucleotide
uuagugacaguagcaagga

SEQ ID NO: 2450523 - RNA, 19 nt, Artificial Sequence
  Description of Artificial Sequence: Synthetic oligonucleotide
uaggucgauagcaauuuaa

SEQ ID NO: 2450524 - RNA, 19 nt, Artificial Sequence
  Description of Artificial Sequence: Synthetic oligonucleotide
uuuucugaucggccuugcg

SEQ ID NO: 2450525 - RNA, 19 nt, Artificial Sequence
  Description of Artificial Sequence: Synthetic oligonucleotide
acccucuugccccuguggc

SEQ ID NO: 2450526 - RNA, 19 nt, Artificial Sequence
  Description of Artificial Sequence: Synthetic oligonucleotide
agaacugagaccucaggua

SEQ ID NO: 2450527 - RNA, 19 nt, Artificial Sequence
  Description of Artificial Sequence: Synthetic oligonucleotide
gggauuuuaacuucgcuga

SEQ ID NO: 2450528 - RNA, 19 nt, Artificial Sequence
  Description of Artificial Sequence: Synthetic oligonucleotide
auagcagaucgggaguacc

SEQ ID NO: 2450529 - RNA, 19 nt, Artificial Sequence
  Description of Artificial Sequence: Synthetic oligonucleotide
aacuucgcugauaucaacu

SEQ ID NO: 2450530 - RNA, 19 nt, Artificial Sequence
  Description of Artificial Sequence: Synthetic oligonucleotide
ucgaagcuuaaccacccga

SEQ ID NO: 2450531 - RNA, 19 nt, Artificial Sequence
  Description of Artificial Sequence: Synthetic oligonucleotide
uaggguaauaccugggcau

SEQ ID NO: 2450532 - RNA, 19 nt, Artificial Sequence
  Description of Artificial Sequence: Synthetic oligonucleotide
aguaccugccaauuccucu

SEQ ID NO: 2450533 - RNA, 19 nt, Artificial Sequence
  Description of Artificial Sequence: Synthetic oligonucleotide
uuaaccuuagggucacccu

SEQ ID NO: 2450534 - RNA, 19 nt, Artificial Sequence
  Description of Artificial Sequence: Synthetic oligonucleotide
uccacaguuuucugaucgg

SEQ ID NO: 2450535 - RNA, 19 nt, Artificial Sequence
  Description of Artificial Sequence: Synthetic oligonucleotide
aauuaggucgauagcaauu

SEQ ID NO: 2450536 - RNA, 19 nt, Artificial Sequence
  Description of Artificial Sequence: Synthetic oligonucleotide
uaauuaggucgauagcaau

SEQ ID NO: 2450537 - RNA, 19 nt, Artificial Sequence
  Description of Artificial Sequence: Synthetic oligonucleotide
aagcugugaguccacaguu

SEQ ID NO: 2450538 - RNA, 19 nt, Artificial Sequence
  Description of Artificial Sequence: Synthetic oligonucleotide
uucgaagcuuaaccacccg

SEQ ID NO: 2450539 - RNA, 19 nt, Artificial Sequence
  Description of Artificial Sequence: Synthetic oligonucleotide
aguagcaagccgcugccca

SEQ ID NO: 2450540 - RNA, 19 nt, Artificial Sequence
  Description of Artificial Sequence: Synthetic oligonucleotide
gcugauaucaacuuuugua

SEQ ID NO: 2450541 - RNA, 19 nt, Artificial Sequence
  Description of Artificial Sequence: Synthetic oligonucleotide
ugucgaagaucucacccuc

SEQ ID NO: 2450542 - RNA, 19 nt, Artificial Sequence
  Description of Artificial Sequence: Synthetic oligonucleotide
ggaugaucaggacaguccc

SEQ ID NO: 2450543 - RNA, 19 nt, Artificial Sequence
  Description of Artificial Sequence: Synthetic oligonucleotide
caaugacaaauuucuggug

SEQ ID NO: 2450544 - RNA, 19 nt, Artificial Sequence
  Description of Artificial Sequence: Synthetic oligonucleotide
uaaccuuagggucacccuu

SEQ ID NO: 2450545 - RNA, 19 nt, Artificial Sequence
  Description of Artificial Sequence: Synthetic oligonucleotide
gaagaggaacucuguugag

SEQ ID NO: 2450546 - RNA, 19 nt, Artificial Sequence
  Description of Artificial Sequence: Synthetic oligonucleotide
ugacaaauuucuggugugc

SEQ ID NO: 2450547 - RNA, 19 nt, Artificial Sequence
  Description of Artificial Sequence: Synthetic oligonucleotide
gccaauuccucucaccagg

SEQ ID NO: 2450548 - RNA, 19 nt, Artificial Sequence
  Description of Artificial Sequence: Synthetic oligonucleotide
aggacaggguuccggcugc

SEQ ID NO: 2450549 - RNA, 19 nt, Artificial Sequence
  Description of Artificial Sequence: Synthetic oligonucleotide
accgccaacugguuuagug

SEQ ID NO: 2450550 - RNA, 19 nt, Artificial Sequence
  Description of Artificial Sequence: Synthetic oligonucleotide
guagagguggcaaugacaa

SEQ ID NO: 2450551 - RNA, 19 nt, Artificial Sequence
  Description of Artificial Sequence: Synthetic oligonucleotide
aucucacccuccuggugcc

SEQ ID NO: 2450552 - RNA, 19 nt, Artificial Sequence
  Description of Artificial Sequence: Synthetic oligonucleotide
cuuccgaggaacaucuuca

SEQ ID NO: 2450553 - RNA, 19 nt, Artificial Sequence
  Description of Artificial Sequence: Synthetic oligonucleotide
caacuuuuguagagguggc

SEQ ID NO: 2450554 - RNA, 19 nt, Artificial Sequence
  Description of Artificial Sequence: Synthetic oligonucleotide
ucccguuugucagagagaa

SEQ ID NO: 2450555 - RNA, 19 nt, Artificial Sequence
  Description of Artificial Sequence: Synthetic oligonucleotide
ucacaaguagcaagccgcu

SEQ ID NO: 2450556 - RNA, 19 nt, Artificial Sequence
  Description of Artificial Sequence: Synthetic oligonucleotide
caguuugugaggauacauc

SEQ ID NO: 2450557 - RNA, 19 nt, Artificial Sequence
  Description of Artificial Sequence: Synthetic oligonucleotide
ugaucaggacagucccugg

SEQ ID NO: 2450558 - RNA, 19 nt, Artificial Sequence
  Description of Artificial Sequence: Synthetic oligonucleotide
uggggauuuuaacuucgcu

SEQ ID NO: 2450559 - RNA, 19 nt, Artificial Sequence
  Description of Artificial Sequence: Synthetic oligonucleotide
caaguagcaagccgcugcc

SEQ ID NO: 2450560 - RNA, 19 nt, Artificial Sequence
  Description of Artificial Sequence: Synthetic oligonucleotide
ucgcugauaucaacuuuug

SEQ ID NO: 2450561 - RNA, 19 nt, Artificial Sequence
  Description of Artificial Sequence: Synthetic oligonucleotide
uuggggauuuuaacuucgc

SEQ ID NO: 2450562 - RNA, 19 nt, Artificial Sequence
  Description of Artificial Sequence: Synthetic oligonucleotide
acugguuuagugacaguag

SEQ ID NO: 2450563 - RNA, 19 nt, Artificial Sequence
  Description of Artificial Sequence: Synthetic oligonucleotide
uagcagaucgggaguaccu

SEQ ID NO: 2450564 - RNA, 19 nt, Artificial Sequence
  Description of Artificial Sequence: Synthetic oligonucleotide
uuccgaggaacaucuucag

SEQ ID NO: 2450565 - RNA, 19 nt, Artificial Sequence
  Description of Artificial Sequence: Synthetic oligonucleotide
uggugugcucuucgaagag

SEQ ID NO: 2450566 - RNA, 19 nt, Artificial Sequence
  Description of Artificial Sequence: Synthetic oligonucleotide
gggaguaccugccaauucc

SEQ ID NO: 2450567 - RNA, 19 nt, Artificial Sequence
  Description of Artificial Sequence: Synthetic oligonucleotide
guaggguaauaccugggca

SEQ ID NO: 2450568 - RNA, 19 nt, Artificial Sequence
  Description of Artificial Sequence: Synthetic oligonucleotide
aggaacucuguugagggca

SEQ ID NO: 2450569 - RNA, 19 nt, Artificial Sequence
  Description of Artificial Sequence: Synthetic oligonucleotide
uaaccacccgaguaccacc

SEQ ID NO: 2450570 - RNA, 19 nt, Artificial Sequence
  Description of Artificial Sequence: Synthetic oligonucleotide
ugccaauuccucucaccag

SEQ ID NO: 2450571 - RNA, 19 nt, Artificial Sequence
  Description of Artificial Sequence: Synthetic oligonucleotide
augaucaggacagucccug

SEQ ID NO: 2450572 - RNA, 19 nt, Artificial Sequence
  Description of Artificial Sequence: Synthetic oligonucleotide
agcugaguauuuucucuug

SEQ ID NO: 2450573 - RNA, 19 nt, Artificial Sequence
  Description of Artificial Sequence: Synthetic oligonucleotide
auuaggucgauagcaauuu

SEQ ID NO: 2450574 - RNA, 19 nt, Artificial Sequence
  Description of Artificial Sequence: Synthetic oligonucleotide
uucgaagaggaacucuguu

SEQ ID NO: 2450575 - RNA, 19 nt, Artificial Sequence
  Description of Artificial Sequence: Synthetic oligonucleotide
uuaaccacccgaguaccac

SEQ ID NO: 2450576 - RNA, 19 nt, Artificial Sequence
  Description of Artificial Sequence: Synthetic oligonucleotide
cuucaguaggguaauaccu

SEQ ID NO: 2450577 - RNA, 19 nt, Artificial Sequence
  Description of Artificial Sequence: Synthetic oligonucleotide
ccgaguaccaccauucuug

SEQ ID NO: 2450578 - RNA, 19 nt, Artificial Sequence
  Description of Artificial Sequence: Synthetic oligonucleotide
uuccuuacaugcugacuga

SEQ ID NO: 2450579 - RNA, 19 nt, Artificial Sequence
  Description of Artificial Sequence: Synthetic oligonucleotide
ggauacaucccguuuguca

SEQ ID NO: 2450580 - RNA, 19 nt, Artificial Sequence
  Description of Artificial Sequence: Synthetic oligonucleotide
agguccugucacaaguagc

SEQ ID NO: 2450581 - RNA, 19 nt, Artificial Sequence
  Description of Artificial Sequence: Synthetic oligonucleotide
aacuuuuguagagguggca

SEQ ID NO: 2450582 - RNA, 19 nt, Artificial Sequence
  Description of Artificial Sequence: Synthetic oligonucleotide
caguaggguaauaccuggg

SEQ ID NO: 2450583 - RNA, 19 nt, Artificial Sequence
  Description of Artificial Sequence: Synthetic oligonucleotide
cugacugaagggcuucuug

SEQ ID NO: 2450584 - RNA, 19 nt, Artificial Sequence
  Description of Artificial Sequence: Synthetic oligonucleotide
guuugugaggauacauccc

SEQ ID NO: 2450585 - RNA, 19 nt, Artificial Sequence
  Description of Artificial Sequence: Synthetic oligonucleotide
agcuguuuaauuaggucga

SEQ ID NO: 2450586 - RNA, 19 nt, Artificial Sequence
  Description of Artificial Sequence: Synthetic oligonucleotide
gagugaugcuggcacgcag

SEQ ID NO: 2450587 - RNA, 19 nt, Artificial Sequence
  Description of Artificial Sequence: Synthetic oligonucleotide
caccauucuugucaccgcc

SEQ ID NO: 2450588 - RNA, 19 nt, Artificial Sequence
  Description of Artificial Sequence: Synthetic oligonucleotide
gcaucagucagguguuugg

SEQ ID NO: 2450589 - RNA, 19 nt, Artificial Sequence
  Description of Artificial Sequence: Synthetic oligonucleotide
acauaugaagcuguuuaau

SEQ ID NO: 2450590 - RNA, 19 nt, Artificial Sequence
  Description of Artificial Sequence: Synthetic oligonucleotide
acucuguugagggcaagag

SEQ ID NO: 2450591 - RNA, 19 nt, Artificial Sequence
  Description of Artificial Sequence: Synthetic oligonucleotide
acuucgcugauaucaacuu

SEQ ID NO: 2450592 - RNA, 19 nt, Artificial Sequence
  Description of Artificial Sequence: Synthetic oligonucleotide
uaacuucgcugauaucaac

SEQ ID NO: 2450593 - RNA, 19 nt, Artificial Sequence
  Description of Artificial Sequence: Synthetic oligonucleotide
gguguuuggggauuuuaac

SEQ ID NO: 2450594 - RNA, 19 nt, Artificial Sequence
  Description of Artificial Sequence: Synthetic oligonucleotide
cagaucgggaguaccugcc

SEQ ID NO: 2450595 - RNA, 19 nt, Artificial Sequence
  Description of Artificial Sequence: Synthetic oligonucleotide
guguuuggggauuuuaacu

SEQ ID NO: 2450596 - RNA, 19 nt, Artificial Sequence
  Description of Artificial Sequence: Synthetic oligonucleotide
uugugaggauacaucccgu

SEQ ID NO: 2450597 - RNA, 19 nt, Artificial Sequence
  Description of Artificial Sequence: Synthetic oligonucleotide
aacucuguugagggcaaga

SEQ ID NO: 2450598 - RNA, 19 nt, Artificial Sequence
  Description of Artificial Sequence: Synthetic oligonucleotide
guaccugccaauuccucuc

SEQ ID NO: 2450599 - RNA, 19 nt, Artificial Sequence
  Description of Artificial Sequence: Synthetic oligonucleotide
ugugaggauacaucccguu

SEQ ID NO: 2450600 - RNA, 19 nt, Artificial Sequence
  Description of Artificial Sequence: Synthetic oligonucleotide
gaggaacucuguugagggc

SEQ ID NO: 2450601 - RNA, 19 nt, Artificial Sequence
  Description of Artificial Sequence: Synthetic oligonucleotide
gaucaggacagucccugga

SEQ ID NO: 2450602 - RNA, 19 nt, Artificial Sequence
  Description of Artificial Sequence: Synthetic oligonucleotide
uggagugaugcuggcacgc

SEQ ID NO: 2450603 - RNA, 19 nt, Artificial Sequence
  Description of Artificial Sequence: Synthetic oligonucleotide
cacccgaguaccaccauuc

SEQ ID NO: 2450604 - RNA, 19 nt, Artificial Sequence
  Description of Artificial Sequence: Synthetic oligonucleotide
cuggagugaugcuggcacg

SEQ ID NO: 2450605 - RNA, 19 nt, Artificial Sequence
  Description of Artificial Sequence: Synthetic oligonucleotide
cuugucaccgccaacuggu

SEQ ID NO: 2450606 - RNA, 19 nt, Artificial Sequence
  Description of Artificial Sequence: Synthetic oligonucleotide
gcaaugacaaauuucuggu

SEQ ID NO: 2450607 - RNA, 19 nt, Artificial Sequence
  Description of Artificial Sequence: Synthetic oligonucleotide
ugaagggcuucuugccaug

SEQ ID NO: 2450608 - RNA, 19 nt, Artificial Sequence
  Description of Artificial Sequence: Synthetic oligonucleotide
caagagguccugucacaag

SEQ ID NO: 2450609 - RNA, 19 nt, Artificial Sequence
  Description of Artificial Sequence: Synthetic oligonucleotide
uuaggucgauagcaauuua

SEQ ID NO: 2450610 - RNA, 19 nt, Artificial Sequence
  Description of Artificial Sequence: Synthetic oligonucleotide
gcugcaauggggcuucccc

SEQ ID NO: 2450611 - RNA, 19 nt, Artificial Sequence
  Description of Artificial Sequence: Synthetic oligonucleotide
uagugacaguagcaaggac

SEQ ID NO: 2450612 - RNA, 19 nt, Artificial Sequence
  Description of Artificial Sequence: Synthetic oligonucleotide
gauuuuaacuucgcugaua

SEQ ID NO: 2450613 - RNA, 19 nt, Artificial Sequence
  Description of Artificial Sequence: Synthetic oligonucleotide
guaccaccauucuugucac

SEQ ID NO: 2450614 - RNA, 19 nt, Artificial Sequence
  Description of Artificial Sequence: Synthetic oligonucleotide
cuggaauacauagcagauc

SEQ ID NO: 2450615 - RNA, 19 nt, Artificial Sequence
  Description of Artificial Sequence: Synthetic oligonucleotide
uaaucucguauuucuccuu

SEQ ID NO: 2450616 - RNA, 19 nt, Artificial Sequence
  Description of Artificial Sequence: Synthetic oligonucleotide
cacgcagcuuccuuacaug

SEQ ID NO: 2450617 - RNA, 19 nt, Artificial Sequence
  Description of Artificial Sequence: Synthetic oligonucleotide
uugcgcugcucuguaaucu

SEQ ID NO: 2450618 - RNA, 19 nt, Artificial Sequence
  Description of Artificial Sequence: Synthetic oligonucleotide
cuggugugcucuucgaaga

SEQ ID NO: 2450619 - RNA, 19 nt, Artificial Sequence
  Description of Artificial Sequence: Synthetic oligonucleotide
uaccugccaauuccucuca

SEQ ID NO: 2450620 - RNA, 19 nt, Artificial Sequence
  Description of Artificial Sequence: Synthetic oligonucleotide
caggacaggguuccggcug

SEQ ID NO: 2450621 - RNA, 19 nt, Artificial Sequence
  Description of Artificial Sequence: Synthetic oligonucleotide
ccuuucuggaauacauagc

SEQ ID NO: 2450622 - RNA, 19 nt, Artificial Sequence
  Description of Artificial Sequence: Synthetic oligonucleotide
aguaagcaucagucaggug

SEQ ID NO: 2450623 - RNA, 19 nt, Artificial Sequence
  Description of Artificial Sequence: Synthetic oligonucleotide
ccuggagugaugcuggcac

SEQ ID NO: 2450624 - RNA, 19 nt, Artificial Sequence
  Description of Artificial Sequence: Synthetic oligonucleotide
cuugcgcugcucuguaauc

SEQ ID NO: 2450625 - RNA, 19 nt, Artificial Sequence
  Description of Artificial Sequence: Synthetic oligonucleotide
aggucgauagcaauuuaaa

SEQ ID NO: 2450626 - RNA, 19 nt, Artificial Sequence
  Description of Artificial Sequence: Synthetic oligonucleotide
caaauuucuggugugcucu

SEQ ID NO: 2450627 - RNA, 19 nt, Artificial Sequence
  Description of Artificial Sequence: Synthetic oligonucleotide
ugcaauggggcuuccccuu

SEQ ID NO: 2450628 - RNA, 19 nt, Artificial Sequence
  Description of Artificial Sequence: Synthetic oligonucleotide
gaagcuuaaccacccgagu

SEQ ID NO: 2450629 - RNA, 19 nt, Artificial Sequence
  Description of Artificial Sequence: Synthetic oligonucleotide
ggucgauagcaauuuaaaa

SEQ ID NO: 2450630 - RNA, 19 nt, Artificial Sequence
  Description of Artificial Sequence: Synthetic oligonucleotide
gagcugaggaacagcuuug

SEQ ID NO: 2450631 - RNA, 19 nt, Artificial Sequence
  Description of Artificial Sequence: Synthetic oligonucleotide
agaucgggaguaccugcca

SEQ ID NO: 2450632 - RNA, 19 nt, Artificial Sequence
  Description of Artificial Sequence: Synthetic oligonucleotide
gguuuagugacaguagcaa

SEQ ID NO: 2450633 - RNA, 19 nt, Artificial Sequence
  Description of Artificial Sequence: Synthetic oligonucleotide
agcaucagucagguguuug

SEQ ID NO: 2450634 - RNA, 19 nt, Artificial Sequence
  Description of Artificial Sequence: Synthetic oligonucleotide
agcagaucgggaguaccug

SEQ ID NO: 2450635 - RNA, 19 nt, Artificial Sequence
  Description of Artificial Sequence: Synthetic oligonucleotide
aaccacccgaguaccacca

SEQ ID NO: 2450636 - RNA, 19 nt, Artificial Sequence
  Description of Artificial Sequence: Synthetic oligonucleotide
ugugcucuucgaagaggaa

SEQ ID NO: 2450637 - RNA, 19 nt, Artificial Sequence
  Description of Artificial Sequence: Synthetic oligonucleotide
cuguugagggcaagagguc

SEQ ID NO: 2450638 - RNA, 19 nt, Artificial Sequence
  Description of Artificial Sequence: Synthetic oligonucleotide
ugcgcugcucuguaaucuc

SEQ ID NO: 2450639 - RNA, 19 nt, Artificial Sequence
  Description of Artificial Sequence: Synthetic oligonucleotide
uggcacgcagcuuccuuac

SEQ ID NO: 2450640 - RNA, 19 nt, Artificial Sequence
  Description of Artificial Sequence: Synthetic oligonucleotide
ggaauacauagcagaucgg

SEQ ID NO: 2450641 - RNA, 19 nt, Artificial Sequence
  Description of Artificial Sequence: Synthetic oligonucleotide
ccaacugguuuagugacag

SEQ ID NO: 2450642 - RNA, 19 nt, Artificial Sequence
  Description of Artificial Sequence: Synthetic oligonucleotide
gugacaguagcaaggaccu

SEQ ID NO: 2450643 - RNA, 19 nt, Artificial Sequence
  Description of Artificial Sequence: Synthetic oligonucleotide
gucaccgccaacugguuua

SEQ ID NO: 2450644 - RNA, 19 nt, Artificial Sequence
  Description of Artificial Sequence: Synthetic oligonucleotide
cugaguauuuucucuugua

SEQ ID NO: 2450645 - RNA, 19 nt, Artificial Sequence
  Description of Artificial Sequence: Synthetic oligonucleotide
gugugcucuucgaagagga

SEQ ID NO: 2450646 - RNA, 19 nt, Artificial Sequence
  Description of Artificial Sequence: Synthetic oligonucleotide
caauuccucucaccaggac

SEQ ID NO: 2450647 - RNA, 19 nt, Artificial Sequence
  Description of Artificial Sequence: Synthetic oligonucleotide
gaucgggaguaccugccaa

SEQ ID NO: 2450648 - RNA, 19 nt, Artificial Sequence
  Description of Artificial Sequence: Synthetic oligonucleotide
cacccucuugccccugugg

SEQ ID NO: 2450649 - RNA, 19 nt, Artificial Sequence
  Description of Artificial Sequence: Synthetic oligonucleotide
aauggggcuuccccuucuu

SEQ ID NO: 2450650 - RNA, 19 nt, Artificial Sequence
  Description of Artificial Sequence: Synthetic oligonucleotide
aggauacaucccguuuguc

SEQ ID NO: 2450651 - RNA, 19 nt, Artificial Sequence
  Description of Artificial Sequence: Synthetic oligonucleotide
ccuuacaugcugacugaag

SEQ ID NO: 2450652 - RNA, 19 nt, Artificial Sequence
  Description of Artificial Sequence: Synthetic oligonucleotide
aucggccuugcgcugcucu

SEQ ID NO: 2450653 - RNA, 19 nt, Artificial Sequence
  Description of Artificial Sequence: Synthetic oligonucleotide
ugucaccgccaacugguuu

SEQ ID NO: 2450654 - RNA, 19 nt, Artificial Sequence
  Description of Artificial Sequence: Synthetic oligonucleotide
aucgggaguaccugccaau

SEQ ID NO: 2450655 - RNA, 19 nt, Artificial Sequence
  Description of Artificial Sequence: Synthetic oligonucleotide
gagaccucagguagcccug

SEQ ID NO: 2450656 - RNA, 19 nt, Artificial Sequence
  Description of Artificial Sequence: Synthetic oligonucleotide
aaccuuagggucacccuuu

SEQ ID NO: 2450657 - RNA, 19 nt, Artificial Sequence
  Description of Artificial Sequence: Synthetic oligonucleotide
gcagaucgggaguaccugc

SEQ ID NO: 2450658 - RNA, 19 nt, Artificial Sequence
  Description of Artificial Sequence: Synthetic oligonucleotide
ucaccgccaacugguuuag

SEQ ID NO: 2450659 - RNA, 19 nt, Artificial Sequence
  Description of Artificial Sequence: Synthetic oligonucleotide
gcuuccgaggaacaucuuc

SEQ ID NO: 2450660 - RNA, 19 nt, Artificial Sequence
  Description of Artificial Sequence: Synthetic oligonucleotide
agguguuuggggauuuuaa

SEQ ID NO: 2450661 - RNA, 19 nt, Artificial Sequence
  Description of Artificial Sequence: Synthetic oligonucleotide
gacaguagcaaggaccuuu

SEQ ID NO: 2450662 - RNA, 19 nt, Artificial Sequence
  Description of Artificial Sequence: Synthetic oligonucleotide
acauagcagaucgggagua

SEQ ID NO: 2450663 - RNA, 19 nt, Artificial Sequence
  Description of Artificial Sequence: Synthetic oligonucleotide
uucucuuguauagggccuu

SEQ ID NO: 2450664 - RNA, 19 nt, Artificial Sequence
  Description of Artificial Sequence: Synthetic oligonucleotide
cugcuucaggaagaccacc

SEQ ID NO: 2450665 - RNA, 19 nt, Artificial Sequence
  Description of Artificial Sequence: Synthetic oligonucleotide
cauagcagaucgggaguac

SEQ ID NO: 2450666 - RNA, 19 nt, Artificial Sequence
  Description of Artificial Sequence: Synthetic oligonucleotide
ucggccuugcgcugcucug

SEQ ID NO: 2450667 - RNA, 19 nt, Artificial Sequence
  Description of Artificial Sequence: Synthetic oligonucleotide
gucgaagaucucacccucc

SEQ ID NO: 2450668 - RNA, 19 nt, Artificial Sequence
  Description of Artificial Sequence: Synthetic oligonucleotide
uagcaagccgcugcccagc

SEQ ID NO: 2450669 - RNA, 19 nt, Artificial Sequence
  Description of Artificial Sequence: Synthetic oligonucleotide
agaccucagguagcccugg

SEQ ID NO: 2450670 - RNA, 19 nt, Artificial Sequence
  Description of Artificial Sequence: Synthetic oligonucleotide
uuuuaaccuuagggucacc

SEQ ID NO: 2450671 - RNA, 19 nt, Artificial Sequence
  Description of Artificial Sequence: Synthetic oligonucleotide
auagggccuuucuggaaua

SEQ ID NO: 2450672 - RNA, 19 nt, Artificial Sequence
  Description of Artificial Sequence: Synthetic oligonucleotide
caccaggacaggguuccgg

SEQ ID NO: 2450673 - RNA, 19 nt, Artificial Sequence
  Description of Artificial Sequence: Synthetic oligonucleotide
ccugccaauuccucucacc

SEQ ID NO: 2450674 - RNA, 19 nt, Artificial Sequence
  Description of Artificial Sequence: Synthetic oligonucleotide
uagagguggcaaugacaaa

SEQ ID NO: 2450675 - RNA, 19 nt, Artificial Sequence
  Description of Artificial Sequence: Synthetic oligonucleotide
ugaucggccuugcgcugcu

SEQ ID NO: 2450676 - RNA, 19 nt, Artificial Sequence
  Description of Artificial Sequence: Synthetic oligonucleotide
acccgaguaccaccauucu

SEQ ID NO: 2450677 - RNA, 19 nt, Artificial Sequence
  Description of Artificial Sequence: Synthetic oligonucleotide
gggcaagagguccugucac

SEQ ID NO: 2450678 - RNA, 19 nt, Artificial Sequence
  Description of Artificial Sequence: Synthetic oligonucleotide
ggaagaccacccucuugcc

SEQ ID NO: 2450679 - RNA, 19 nt, Artificial Sequence
  Description of Artificial Sequence: Synthetic oligonucleotide
guuuucugaucggccuugc

SEQ ID NO: 2450680 - RNA, 19 nt, Artificial Sequence
  Description of Artificial Sequence: Synthetic oligonucleotide
cugaucggccuugcgcugc

SEQ ID NO: 2450681 - RNA, 19 nt, Artificial Sequence
  Description of Artificial Sequence: Synthetic oligonucleotide
ugggcuugcgcaguugcuu

SEQ ID NO: 2450682 - RNA, 19 nt, Artificial Sequence
  Description of Artificial Sequence: Synthetic oligonucleotide
uaccaccauucuugucacc

SEQ ID NO: 2450683 - RNA, 19 nt, Artificial Sequence
  Description of Artificial Sequence: Synthetic oligonucleotide
cucguauuucuccuucucu

SEQ ID NO: 2450684 - RNA, 19 nt, Artificial Sequence
  Description of Artificial Sequence: Synthetic oligonucleotide
cagcuuccgaggaacaucu

SEQ ID NO: 2450685 - RNA, 19 nt, Artificial Sequence
  Description of Artificial Sequence: Synthetic oligonucleotide
cacaaguagcaagccgcug

SEQ ID NO: 2450686 - RNA, 19 nt, Artificial Sequence
  Description of Artificial Sequence: Synthetic oligonucleotide
aggguaauaccugggcauu

SEQ ID NO: 2450687 - RNA, 19 nt, Artificial Sequence
  Description of Artificial Sequence: Synthetic oligonucleotide
auggcucagcagcuuccga

SEQ ID NO: 2450688 - RNA, 19 nt, Artificial Sequence
  Description of Artificial Sequence: Synthetic oligonucleotide
ucgggaguaccugccaauu

SEQ ID NO: 2450689 - RNA, 19 nt, Artificial Sequence
  Description of Artificial Sequence: Synthetic oligonucleotide
uggcgcccggugaggauga

SEQ ID NO: 2450690 - RNA, 19 nt, Artificial Sequence
  Description of Artificial Sequence: Synthetic oligonucleotide
ccggugaggaugaucagga

SEQ ID NO: 2450691 - RNA, 19 nt, Artificial Sequence
  Description of Artificial Sequence: Synthetic oligonucleotide
guggcgcccggugaggaug

SEQ ID NO: 2450692 - RNA, 19 nt, Artificial Sequence
  Description of Artificial Sequence: Synthetic oligonucleotide
ccauggcucagcagcuucc

SEQ ID NO: 2450693 - RNA, 19 nt, Artificial Sequence
  Description of Artificial Sequence: Synthetic oligonucleotide
cccggugaggaugaucagg

SEQ ID NO: 2450694 - RNA, 19 nt, Artificial Sequence
  Description of Artificial Sequence: Synthetic oligonucleotide
cucuuguauagggccuuuc

SEQ ID NO: 2450695 - RNA, 19 nt, Artificial Sequence
  Description of Artificial Sequence: Synthetic oligonucleotide
ccguuugucagagagaacu

SEQ ID NO: 2450696 - RNA, 19 nt, Artificial Sequence
  Description of Artificial Sequence: Synthetic oligonucleotide
ccucuugccccuguggcgc

SEQ ID NO: 2450697 - RNA, 19 nt, Artificial Sequence
  Description of Artificial Sequence: Synthetic oligonucleotide
ggcaagagguccugucaca

SEQ ID NO: 2450698 - RNA, 19 nt, Artificial Sequence
  Description of Artificial Sequence: Synthetic oligonucleotide
cguuugucagagagaacug

SEQ ID NO: 2450699 - RNA, 19 nt, Artificial Sequence
  Description of Artificial Sequence: Synthetic oligonucleotide
ccaccauucuugucaccgc

SEQ ID NO: 2450700 - RNA, 19 nt, Artificial Sequence
  Description of Artificial Sequence: Synthetic oligonucleotide
accuuagggucacccuuuu

SEQ ID NO: 2450701 - RNA, 19 nt, Artificial Sequence
  Description of Artificial Sequence: Synthetic oligonucleotide
ucucuuguauagggccuuu

SEQ ID NO: 2450702 - RNA, 19 nt, Artificial Sequence
  Description of Artificial Sequence: Synthetic oligonucleotide
gugaggauacaucccguuu

SEQ ID NO: 2450703 - RNA, 19 nt, Artificial Sequence
  Description of Artificial Sequence: Synthetic oligonucleotide
cugaagggcuucuugccau

SEQ ID NO: 2450704 - RNA, 19 nt, Artificial Sequence
  Description of Artificial Sequence: Synthetic oligonucleotide
cuguuuaauuaggucgaua

SEQ ID NO: 2450705 - RNA, 19 nt, Artificial Sequence
  Description of Artificial Sequence: Synthetic oligonucleotide
gcugaguauuuucucuugu

SEQ ID NO: 2450706 - RNA, 19 nt, Artificial Sequence
  Description of Artificial Sequence: Synthetic oligonucleotide
cagguagcccuggagcuga

SEQ ID NO: 2450707 - RNA, 19 nt, Artificial Sequence
  Description of Artificial Sequence: Synthetic oligonucleotide
cuugccccuguggcgcccg

SEQ ID NO: 2450708 - RNA, 19 nt, Artificial Sequence
  Description of Artificial Sequence: Synthetic oligonucleotide
gggcuugcgcaguugcuuc

SEQ ID NO: 2450709 - RNA, 19 nt, Artificial Sequence
  Description of Artificial Sequence: Synthetic oligonucleotide
cugcaauggggcuuccccu

SEQ ID NO: 2450710 - RNA, 19 nt, Artificial Sequence
  Description of Artificial Sequence: Synthetic oligonucleotide
agcugugaguccacaguuu

SEQ ID NO: 2450711 - RNA, 19 nt, Artificial Sequence
  Description of Artificial Sequence: Synthetic oligonucleotide
gaccucagguagcccugga

SEQ ID NO: 2450712 - RNA, 19 nt, Artificial Sequence
  Description of Artificial Sequence: Synthetic oligonucleotide
ccgccaacugguuuaguga

SEQ ID NO: 2450713 - RNA, 19 nt, Artificial Sequence
  Description of Artificial Sequence: Synthetic oligonucleotide
gccauggcucagcagcuuc

SEQ ID NO: 2450714 - RNA, 19 nt, Artificial Sequence
  Description of Artificial Sequence: Synthetic oligonucleotide
ccaauuccucucaccagga

SEQ ID NO: 2450715 - RNA, 19 nt, Artificial Sequence
  Description of Artificial Sequence: Synthetic oligonucleotide
gcaagagguccugucacaa

SEQ ID NO: 2450716 - RNA, 19 nt, Artificial Sequence
  Description of Artificial Sequence: Synthetic oligonucleotide
cagcugaguauuuucucuu

SEQ ID NO: 2450717 - RNA, 19 nt, Artificial Sequence
  Description of Artificial Sequence: Synthetic oligonucleotide
ggauuuuaacuucgcugau

SEQ ID NO: 2450718 - RNA, 19 nt, Artificial Sequence
  Description of Artificial Sequence: Synthetic oligonucleotide
accacccgaguaccaccau

SEQ ID NO: 2450719 - RNA, 19 nt, Artificial Sequence
  Description of Artificial Sequence: Synthetic oligonucleotide
gcaauggggcuuccccuuc

SEQ ID NO: 2450720 - RNA, 19 nt, Artificial Sequence
  Description of Artificial Sequence: Synthetic oligonucleotide
cucucaccaggacaggguu

SEQ ID NO: 2450721 - RNA, 19 nt, Artificial Sequence
  Description of Artificial Sequence: Synthetic oligonucleotide
ugccugggcuugcgcaguu

SEQ ID NO: 2450722 - RNA, 19 nt, Artificial Sequence
  Description of Artificial Sequence: Synthetic oligonucleotide
aagccgcugcccagcugcu

SEQ ID NO: 2450723 - RNA, 19 nt, Artificial Sequence
  Description of Artificial Sequence: Synthetic oligonucleotide
ggaguaccugccaauuccu

SEQ ID NO: 2450724 - RNA, 19 nt, Artificial Sequence
  Description of Artificial Sequence: Synthetic oligonucleotide
ggagugaugcuggcacgca

SEQ ID NO: 2450725 - RNA, 19 nt, Artificial Sequence
  Description of Artificial Sequence: Synthetic oligonucleotide
gacaggguuccggcugcaa

SEQ ID NO: 2450726 - RNA, 19 nt, Artificial Sequence
  Description of Artificial Sequence: Synthetic oligonucleotide
gggccuuucuggaauacau

SEQ ID NO: 2450727 - RNA, 19 nt, Artificial Sequence
  Description of Artificial Sequence: Synthetic oligonucleotide
gcugcucuguaaucucgua

SEQ ID NO: 2450728 - RNA, 19 nt, Artificial Sequence
  Description of Artificial Sequence: Synthetic oligonucleotide
gcacgcagcuuccuuacau

SEQ ID NO: 2450729 - RNA, 19 nt, Artificial Sequence
  Description of Artificial Sequence: Synthetic oligonucleotide
gccccuguggcgcccggug

SEQ ID NO: 2450730 - RNA, 19 nt, Artificial Sequence
  Description of Artificial Sequence: Synthetic oligonucleotide
gccaacugguuuagugaca

SEQ ID NO: 2450731 - RNA, 19 nt, Artificial Sequence
  Description of Artificial Sequence: Synthetic oligonucleotide
cguauuucuccuucucugu

SEQ ID NO: 2450732 - RNA, 19 nt, Artificial Sequence
  Description of Artificial Sequence: Synthetic oligonucleotide
gcucuguaaucucguauuu

SEQ ID NO: 2450733 - RNA, 19 nt, Artificial Sequence
  Description of Artificial Sequence: Synthetic oligonucleotide
cccguuugucagagagaac

SEQ ID NO: 2450734 - RNA, 19 nt, Artificial Sequence
  Description of Artificial Sequence: Synthetic oligonucleotide
gguaauaccugggcauuuu

SEQ ID NO: 2450735 - RNA, 19 nt, Artificial Sequence
  Description of Artificial Sequence: Synthetic oligonucleotide
cugggcuugcgcaguugcu

SEQ ID NO: 2450736 - RNA, 19 nt, Artificial Sequence
  Description of Artificial Sequence: Synthetic oligonucleotide
ggcugcaauggggcuuccc

SEQ ID NO: 2450737 - RNA, 19 nt, Artificial Sequence
  Description of Artificial Sequence: Synthetic oligonucleotide
cuguggcgcccggugagga

SEQ ID NO: 2450738 - RNA, 19 nt, Artificial Sequence
  Description of Artificial Sequence: Synthetic oligonucleotide
caacugguuuagugacagu

SEQ ID NO: 2450739 - RNA, 19 nt, Artificial Sequence
  Description of Artificial Sequence: Synthetic oligonucleotide
ggcacgcagcuuccuuaca

SEQ ID NO: 2450740 - RNA, 19 nt, Artificial Sequence
  Description of Artificial Sequence: Synthetic oligonucleotide
ugccccuguggcgcccggu

SEQ ID NO: 2450741 - RNA, 19 nt, Artificial Sequence
  Description of Artificial Sequence: Synthetic oligonucleotide
cgggaguaccugccaauuc

SEQ ID NO: 2450742 - RNA, 19 nt, Artificial Sequence
  Description of Artificial Sequence: Synthetic oligonucleotide
ccaguuugugaggauacau

SEQ ID NO: 2450743 - RNA, 19 nt, Artificial Sequence
  Description of Artificial Sequence: Synthetic oligonucleotide
gaucggccuugcgcugcuc

SEQ ID NO: 2450744 - RNA, 19 nt, Artificial Sequence
  Description of Artificial Sequence: Synthetic oligonucleotide
ccggcugcaauggggcuuc

SEQ ID NO: 2450745 - RNA, 19 nt, Artificial Sequence
  Description of Artificial Sequence: Synthetic oligonucleotide
ccucucaccaggacagggu

SEQ ID NO: 2450746 - RNA, 19 nt, Artificial Sequence
  Description of Artificial Sequence: Synthetic oligonucleotide
ggcuuccccuucuuggguu

SEQ ID NO: 2450747 - RNA, 19 nt, Artificial Sequence
  Description of Artificial Sequence: Synthetic oligonucleotide
gucagguguuuggggauuu

SEQ ID NO: 2450748 - RNA, 19 nt, Artificial Sequence
  Description of Artificial Sequence: Synthetic oligonucleotide
ccuugcgcugcucuguaau

SEQ ID NO: 2450749 - RNA, 19 nt, Artificial Sequence
  Description of Artificial Sequence: Synthetic oligonucleotide
cagucccuggagugaugcu

SEQ ID NO: 2450750 - RNA, 19 nt, Artificial Sequence
  Description of Artificial Sequence: Synthetic oligonucleotide
ggacagucccuggagugau

SEQ ID NO: 2450751 - RNA, 19 nt, Artificial Sequence
  Description of Artificial Sequence: Synthetic oligonucleotide
gggcuuccccuucuugggu

SEQ ID NO: 2450752 - RNA, 19 nt, Artificial Sequence
  Description of Artificial Sequence: Synthetic oligonucleotide
ggccuugcgcugcucugua

SEQ ID NO: 2450753 - RNA, 19 nt, Artificial Sequence
  Description of Artificial Sequence: Synthetic oligonucleotide
gcuguuuaauuaggucgau

SEQ ID NO: 2450754 - RNA, 19 nt, Artificial Sequence
  Description of Artificial Sequence: Synthetic oligonucleotide
cgaguaccaccauucuugu

SEQ ID NO: 2450755 - RNA, 19 nt, Artificial Sequence
  Description of Artificial Sequence: Synthetic oligonucleotide
gccugggcuugcgcaguug

SEQ ID NO: 2450756 - RNA, 19 nt, Artificial Sequence
  Description of Artificial Sequence: Synthetic oligonucleotide
ggguaauaccugggcauuu

SEQ ID NO: 2450757 - RNA, 19 nt, Artificial Sequence
  Description of Artificial Sequence: Synthetic oligonucleotide
gccuugcgcugcucuguaa

SEQ ID NO: 2450758 - RNA, 19 nt, Artificial Sequence
  Description of Artificial Sequence: Synthetic oligonucleotide
cgcugauaucaacuuuugu

SEQ ID NO: 2450759 - RNA, 19 nt, Artificial Sequence
  Description of Artificial Sequence: Synthetic oligonucleotide
cccgaguaccaccauucuu

SEQ ID NO: 2450760 - RNA, 19 nt, Artificial Sequence
  Description of Artificial Sequence: Synthetic oligonucleotide
gcgcccggugaggaugauc

SEQ ID NO: 2450761 - RNA, 19 nt, Artificial Sequence
  Description of Artificial Sequence: Synthetic oligonucleotide
gcugacugaagggcuucuu

SEQ ID NO: 2450762 - RNA, 19 nt, Artificial Sequence
  Description of Artificial Sequence: Synthetic oligonucleotide
ccacccgaguaccaccauu

SEQ ID NO: 2450763 - RNA, 19 nt, Artificial Sequence
  Description of Artificial Sequence: Synthetic oligonucleotide
caccgccaacugguuuagu

SEQ ID NO: 2450764 - RNA, 19 nt, Artificial Sequence
  Description of Artificial Sequence: Synthetic oligonucleotide
ggcgcccggugaggaugau

SEQ ID NO: 2450765 - RNA, 19 nt, Artificial Sequence
  Description of Artificial Sequence: Synthetic oligonucleotide
ugaaugauguuucuuaucc

SEQ ID NO: 2450766 - RNA, 19 nt, Artificial Sequence
  Description of Artificial Sequence: Synthetic oligonucleotide
aaagaguaaccuccaauac

SEQ ID NO: 2450767 - RNA, 19 nt, Artificial Sequence
  Description of Artificial Sequence: Synthetic oligonucleotide
aagaguaaccuccaauacg

SEQ ID NO: 2450768 - RNA, 19 nt, Artificial Sequence
  Description of Artificial Sequence: Synthetic oligonucleotide
aacgccgauaaccagcacc

SEQ ID NO: 2450769 - RNA, 19 nt, Artificial Sequence
  Description of Artificial Sequence: Synthetic oligonucleotide
uguauguauuuucaaaagc

SEQ ID NO: 2450770 - RNA, 19 nt, Artificial Sequence
  Description of Artificial Sequence: Synthetic oligonucleotide
agacuccauaaucugaucc

SEQ ID NO: 2450771 - RNA, 19 nt, Artificial Sequence
  Description of Artificial Sequence: Synthetic oligonucleotide
agaguaaccuccaauacgc

SEQ ID NO: 2450772 - RNA, 19 nt, Artificial Sequence
  Description of Artificial Sequence: Synthetic oligonucleotide
uuuguauguauuuucaaaa

SEQ ID NO: 2450773 - RNA, 19 nt, Artificial Sequence
  Description of Artificial Sequence: Synthetic oligonucleotide
uuuguuuggacucuuugac

SEQ ID NO: 2450774 - RNA, 19 nt, Artificial Sequence
  Description of Artificial Sequence: Synthetic oligonucleotide
aaucugauccaugucgccc

SEQ ID NO: 2450775 - RNA, 19 nt, Artificial Sequence
  Description of Artificial Sequence: Synthetic oligonucleotide
uuugacgaaggcauuguag

SEQ ID NO: 2450776 - RNA, 19 nt, Artificial Sequence
  Description of Artificial Sequence: Synthetic oligonucleotide
cucagaaccgcauagacuc

SEQ ID NO: 2450777 - RNA, 19 nt, Artificial Sequence
  Description of Artificial Sequence: Synthetic oligonucleotide
cagaaaauuguccauuucc

SEQ ID NO: 2450778 - RNA, 19 nt, Artificial Sequence
  Description of Artificial Sequence: Synthetic oligonucleotide
uagacucuccccaagaucu

SEQ ID NO: 2450779 - RNA, 19 nt, Artificial Sequence
  Description of Artificial Sequence: Synthetic oligonucleotide
uguuuggacucuuugacga

SEQ ID NO: 2450780 - RNA, 19 nt, Artificial Sequence
  Description of Artificial Sequence: Synthetic oligonucleotide
cuuaacaucagcuagcucu

SEQ ID NO: 2450781 - RNA, 19 nt, Artificial Sequence
  Description of Artificial Sequence: Synthetic oligonucleotide
agugcuuucagguuauuca

SEQ ID NO: 2450782 - RNA, 19 nt, Artificial Sequence
  Description of Artificial Sequence: Synthetic oligonucleotide
aaccgcauagacucucccc

SEQ ID NO: 2450783 - RNA, 19 nt, Artificial Sequence
  Description of Artificial Sequence: Synthetic oligonucleotide
uuuuguuuggacucuuuga

SEQ ID NO: 2450784 - RNA, 19 nt, Artificial Sequence
  Description of Artificial Sequence: Synthetic oligonucleotide
uuaaagaguaaccuccaau

SEQ ID NO: 2450785 - RNA, 19 nt, Artificial Sequence
  Description of Artificial Sequence: Synthetic oligonucleotide
ucaucuuuuguuuggacuc

SEQ ID NO: 2450786 - RNA, 19 nt, Artificial Sequence
  Description of Artificial Sequence: Synthetic oligonucleotide
uguugaaugauguuucuua

SEQ ID NO: 2450787 - RNA, 19 nt, Artificial Sequence
  Description of Artificial Sequence: Synthetic oligonucleotide
auaaucugauccaugucgc

SEQ ID NO: 2450788 - RNA, 19 nt, Artificial Sequence
  Description of Artificial Sequence: Synthetic oligonucleotide
ucuuuagccucuuucugag

SEQ ID NO: 2450789 - RNA, 19 nt, Artificial Sequence
  Description of Artificial Sequence: Synthetic oligonucleotide
uucgucuguguauugcacg

SEQ ID NO: 2450790 - RNA, 19 nt, Artificial Sequence
  Description of Artificial Sequence: Synthetic oligonucleotide
uuugcaguauuuugcuucc

SEQ ID NO: 2450791 - RNA, 19 nt, Artificial Sequence
  Description of Artificial Sequence: Synthetic oligonucleotide
uauugcacgcaaagcacag

SEQ ID NO: 2450792 - RNA, 19 nt, Artificial Sequence
  Description of Artificial Sequence: Synthetic oligonucleotide
uccgagaacgccgauaacc

SEQ ID NO: 2450793 - RNA, 19 nt, Artificial Sequence
  Description of Artificial Sequence: Synthetic oligonucleotide
uuuugucugcucuggauga

SEQ ID NO: 2450794 - RNA, 19 nt, Artificial Sequence
  Description of Artificial Sequence: Synthetic oligonucleotide
cacuguucccuguucaucg

SEQ ID NO: 2450795 - RNA, 19 nt, Artificial Sequence
  Description of Artificial Sequence: Synthetic oligonucleotide
uuggacucuuugacgaagg

SEQ ID NO: 2450796 - RNA, 19 nt, Artificial Sequence
  Description of Artificial Sequence: Synthetic oligonucleotide
guuauucacuccuuccugc

SEQ ID NO: 2450797 - RNA, 19 nt, Artificial Sequence
  Description of Artificial Sequence: Synthetic oligonucleotide
auucaucuuuuguuuggac

SEQ ID NO: 2450798 - RNA, 19 nt, Artificial Sequence
  Description of Artificial Sequence: Synthetic oligonucleotide
cuuuugucugcucuggaug

SEQ ID NO: 2450799 - RNA, 19 nt, Artificial Sequence
  Description of Artificial Sequence: Synthetic oligonucleotide
gacaccuugugguagccgc

SEQ ID NO: 2450800 - RNA, 19 nt, Artificial Sequence
  Description of Artificial Sequence: Synthetic oligonucleotide
cugguccucgucuacacgg

SEQ ID NO: 2450801 - RNA, 19 nt, Artificial Sequence
  Description of Artificial Sequence: Synthetic oligonucleotide
uugggagccguucuuuucc

SEQ ID NO: 2450802 - RNA, 19 nt, Artificial Sequence
  Description of Artificial Sequence: Synthetic oligonucleotide
uugcacgcaaagcacagac

SEQ ID NO: 2450803 - RNA, 19 nt, Artificial Sequence
  Description of Artificial Sequence: Synthetic oligonucleotide
auuccucguccacuguucc

SEQ ID NO: 2450804 - RNA, 19 nt, Artificial Sequence
  Description of Artificial Sequence: Synthetic oligonucleotide
uuugccgauccuuuugucu

SEQ ID NO: 2450805 - RNA, 19 nt, Artificial Sequence
  Description of Artificial Sequence: Synthetic oligonucleotide
uccuugucacucagaaccg

SEQ ID NO: 2450806 - RNA, 19 nt, Artificial Sequence
  Description of Artificial Sequence: Synthetic oligonucleotide
uugccgauccuuuugucug

SEQ ID NO: 2450807 - RNA, 19 nt, Artificial Sequence
  Description of Artificial Sequence: Synthetic oligonucleotide
uguguauugcacgcaaagc

SEQ ID NO: 2450808 - RNA, 19 nt, Artificial Sequence
  Description of Artificial Sequence: Synthetic oligonucleotide
uccaauacgcgucccaguc

SEQ ID NO: 2450809 - RNA, 19 nt, Artificial Sequence
  Description of Artificial Sequence: Synthetic oligonucleotide
aacucggccucuuuagccu

SEQ ID NO: 2450810 - RNA, 19 nt, Artificial Sequence
  Description of Artificial Sequence: Synthetic oligonucleotide
agaaaauuguccauuuccu

SEQ ID NO: 2450811 - RNA, 19 nt, Artificial Sequence
  Description of Artificial Sequence: Synthetic oligonucleotide
caauacgcgucccaguccc

SEQ ID NO: 2450812 - RNA, 19 nt, Artificial Sequence
  Description of Artificial Sequence: Synthetic oligonucleotide
uuuaaagaguaaccuccaa

SEQ ID NO: 2450813 - RNA, 19 nt, Artificial Sequence
  Description of Artificial Sequence: Synthetic oligonucleotide
cuguguauugcacgcaaag

SEQ ID NO: 2450814 - RNA, 19 nt, Artificial Sequence
  Description of Artificial Sequence: Synthetic oligonucleotide
aggaugggaccucuuuggc

SEQ ID NO: 2450815 - RNA, 19 nt, Artificial Sequence
  Description of Artificial Sequence: Synthetic oligonucleotide
aguaaccuccaauacgcgu

SEQ ID NO: 2450816 - RNA, 19 nt, Artificial Sequence
  Description of Artificial Sequence: Synthetic oligonucleotide
uauucacuccuuccugcag

SEQ ID NO: 2450817 - RNA, 19 nt, Artificial Sequence
  Description of Artificial Sequence: Synthetic oligonucleotide
uaaccagcacccacagccg

SEQ ID NO: 2450818 - RNA, 19 nt, Artificial Sequence
  Description of Artificial Sequence: Synthetic oligonucleotide
agguuauucacuccuuccu

SEQ ID NO: 2450819 - RNA, 19 nt, Artificial Sequence
  Description of Artificial Sequence: Synthetic oligonucleotide
ucgucuguguauugcacgc

SEQ ID NO: 2450820 - RNA, 19 nt, Artificial Sequence
  Description of Artificial Sequence: Synthetic oligonucleotide
ugcuccuugucacucagaa

SEQ ID NO: 2450821 - RNA, 19 nt, Artificial Sequence
  Description of Artificial Sequence: Synthetic oligonucleotide
uccucgucuacacggucgg

SEQ ID NO: 2450822 - RNA, 19 nt, Artificial Sequence
  Description of Artificial Sequence: Synthetic oligonucleotide
gaugagugcuuucagguua

SEQ ID NO: 2450823 - RNA, 19 nt, Artificial Sequence
  Description of Artificial Sequence: Synthetic oligonucleotide
cagguuauucacuccuucc

SEQ ID NO: 2450824 - RNA, 19 nt, Artificial Sequence
  Description of Artificial Sequence: Synthetic oligonucleotide
cugcuuaacaucagcuagc

SEQ ID NO: 2450825 - RNA, 19 nt, Artificial Sequence
  Description of Artificial Sequence: Synthetic oligonucleotide
acgccgauaaccagcaccc

SEQ ID NO: 2450826 - RNA, 19 nt, Artificial Sequence
  Description of Artificial Sequence: Synthetic oligonucleotide
gacuccauaaucugaucca

SEQ ID NO: 2450827 - RNA, 19 nt, Artificial Sequence
  Description of Artificial Sequence: Synthetic oligonucleotide
cuuucugcucaacucggcc

SEQ ID NO: 2450828 - RNA, 19 nt, Artificial Sequence
  Description of Artificial Sequence: Synthetic oligonucleotide
uuucugcucaacucggccu

SEQ ID NO: 2450829 - RNA, 19 nt, Artificial Sequence
  Description of Artificial Sequence: Synthetic oligonucleotide
aagcuugaauguccucuag

SEQ ID NO: 2450830 - RNA, 19 nt, Artificial Sequence
  Description of Artificial Sequence: Synthetic oligonucleotide
ucagguuauucacuccuuc

SEQ ID NO: 2450831 - RNA, 19 nt, Artificial Sequence
  Description of Artificial Sequence: Synthetic oligonucleotide
ucggggugcacuugcagag

SEQ ID NO: 2450832 - RNA, 19 nt, Artificial Sequence
  Description of Artificial Sequence: Synthetic oligonucleotide
ucgcauagcuccagcagcc

SEQ ID NO: 2450833 - RNA, 19 nt, Artificial Sequence
  Description of Artificial Sequence: Synthetic oligonucleotide
ucaacucggccucuuuagc

SEQ ID NO: 2450834 - RNA, 19 nt, Artificial Sequence
  Description of Artificial Sequence: Synthetic oligonucleotide
cucaacucggccucuuuag

SEQ ID NO: 2450835 - RNA, 19 nt, Artificial Sequence
  Description of Artificial Sequence: Synthetic oligonucleotide
uuaacaucagcuagcucuu

SEQ ID NO: 2450836 - RNA, 19 nt, Artificial Sequence
  Description of Artificial Sequence: Synthetic oligonucleotide
gagaacgccgauaaccagc

SEQ ID NO: 2450837 - RNA, 19 nt, Artificial Sequence
  Description of Artificial Sequence: Synthetic oligonucleotide
ucguacacugcucucugcu

SEQ ID NO: 2450838 - RNA, 19 nt, Artificial Sequence
  Description of Artificial Sequence: Synthetic oligonucleotide
acgaaggcauuguaggaug

SEQ ID NO: 2450839 - RNA, 19 nt, Artificial Sequence
  Description of Artificial Sequence: Synthetic oligonucleotide
uaaccuccaauacgcgucc

SEQ ID NO: 2450840 - RNA, 19 nt, Artificial Sequence
  Description of Artificial Sequence: Synthetic oligonucleotide
cucgcauagcuccagcagc

SEQ ID NO: 2450841 - RNA, 19 nt, Artificial Sequence
  Description of Artificial Sequence: Synthetic oligonucleotide
agguuugcaguauuuugcu

SEQ ID NO: 2450842 - RNA, 19 nt, Artificial Sequence
  Description of Artificial Sequence: Synthetic oligonucleotide
guacacugcucucugcucc

SEQ ID NO: 2450843 - RNA, 19 nt, Artificial Sequence
  Description of Artificial Sequence: Synthetic oligonucleotide
accgcauagacucucccca

SEQ ID NO: 2450844 - RNA, 19 nt, Artificial Sequence
  Description of Artificial Sequence: Synthetic oligonucleotide
guuucuuauccuggguucg

SEQ ID NO: 2450845 - RNA, 19 nt, Artificial Sequence
  Description of Artificial Sequence: Synthetic oligonucleotide
auguccucuagcgauaucu

SEQ ID NO: 2450846 - RNA, 19 nt, Artificial Sequence
  Description of Artificial Sequence: Synthetic oligonucleotide
caacucggccucuuuagcc

SEQ ID NO: 2450847 - RNA, 19 nt, Artificial Sequence
  Description of Artificial Sequence: Synthetic oligonucleotide
uguucccuguucaucguac

SEQ ID NO: 2450848 - RNA, 19 nt, Artificial Sequence
  Description of Artificial Sequence: Synthetic oligonucleotide
uaaucugauccaugucgcc

SEQ ID NO: 2450849 - RNA, 19 nt, Artificial Sequence
  Description of Artificial Sequence: Synthetic oligonucleotide
guaggaugggaccucuuug

SEQ ID NO: 2450850 - RNA, 19 nt, Artificial Sequence
  Description of Artificial Sequence: Synthetic oligonucleotide
aucagcuagcucuucuuca

SEQ ID NO: 2450851 - RNA, 19 nt, Artificial Sequence
  Description of Artificial Sequence: Synthetic oligonucleotide
ucuuauccuggguucgucu

SEQ ID NO: 2450852 - RNA, 19 nt, Artificial Sequence
  Description of Artificial Sequence: Synthetic oligonucleotide
cuuauccuggguucgucug

SEQ ID NO: 2450853 - RNA, 19 nt, Artificial Sequence
  Description of Artificial Sequence: Synthetic oligonucleotide
aucguacacugcucucugc

SEQ ID NO: 2450854 - RNA, 19 nt, Artificial Sequence
  Description of Artificial Sequence: Synthetic oligonucleotide
uguaggaugggaccucuuu

SEQ ID NO: 2450855 - RNA, 19 nt, Artificial Sequence
  Description of Artificial Sequence: Synthetic oligonucleotide
aauguccucuagcgauauc

SEQ ID NO: 2450856 - RNA, 19 nt, Artificial Sequence
  Description of Artificial Sequence: Synthetic oligonucleotide
uguucaucguacacugcuc

SEQ ID NO: 2450857 - RNA, 19 nt, Artificial Sequence
  Description of Artificial Sequence: Synthetic oligonucleotide
accugguagaggucggcgg

SEQ ID NO: 2450858 - RNA, 19 nt, Artificial Sequence
  Description of Artificial Sequence: Synthetic oligonucleotide
gaccucuuuggcaucaaug

SEQ ID NO: 2450859 - RNA, 19 nt, Artificial Sequence
  Description of Artificial Sequence: Synthetic oligonucleotide
gaaggcauuguaggauggg

SEQ ID NO: 2450860 - RNA, 19 nt, Artificial Sequence
  Description of Artificial Sequence: Synthetic oligonucleotide
ccugcuuaacaucagcuag

SEQ ID NO: 2450861 - RNA, 19 nt, Artificial Sequence
  Description of Artificial Sequence: Synthetic oligonucleotide
cacucagaaccgcauagac

SEQ ID NO: 2450862 - RNA, 19 nt, Artificial Sequence
  Description of Artificial Sequence: Synthetic oligonucleotide
aggcauuguaggaugggac

SEQ ID NO: 2450863 - RNA, 19 nt, Artificial Sequence
  Description of Artificial Sequence: Synthetic oligonucleotide
cauuuccuuuugccgaucc

SEQ ID NO: 2450864 - RNA, 19 nt, Artificial Sequence
  Description of Artificial Sequence: Synthetic oligonucleotide
ucaucguacacugcucucu

SEQ ID NO: 2450865 - RNA, 19 nt, Artificial Sequence
  Description of Artificial Sequence: Synthetic oligonucleotide
uuauccuggguucgucugu

SEQ ID NO: 2450866 - RNA, 19 nt, Artificial Sequence
  Description of Artificial Sequence: Synthetic oligonucleotide
uccaucugagccagaaaau

SEQ ID NO: 2450867 - RNA, 19 nt, Artificial Sequence
  Description of Artificial Sequence: Synthetic oligonucleotide
ugcuuaacaucagcuagcu

SEQ ID NO: 2450868 - RNA, 19 nt, Artificial Sequence
  Description of Artificial Sequence: Synthetic oligonucleotide
ggcauuguaggaugggacc

SEQ ID NO: 2450869 - RNA, 19 nt, Artificial Sequence
  Description of Artificial Sequence: Synthetic oligonucleotide
guaaccuccaauacgcguc

SEQ ID NO: 2450870 - RNA, 19 nt, Artificial Sequence
  Description of Artificial Sequence: Synthetic oligonucleotide
ggugccgaacaccugcucg

SEQ ID NO: 2450871 - RNA, 19 nt, Artificial Sequence
  Description of Artificial Sequence: Synthetic oligonucleotide
uggacucuuugacgaaggc

SEQ ID NO: 2450872 - RNA, 19 nt, Artificial Sequence
  Description of Artificial Sequence: Synthetic oligonucleotide
gguggcguccucuuucugg

SEQ ID NO: 2450873 - RNA, 19 nt, Artificial Sequence
  Description of Artificial Sequence: Synthetic oligonucleotide
ucggcggugccgaacaccu

SEQ ID NO: 2450874 - RNA, 19 nt, Artificial Sequence
  Description of Artificial Sequence: Synthetic oligonucleotide
gguuauucacuccuuccug

SEQ ID NO: 2450875 - RNA, 19 nt, Artificial Sequence
  Description of Artificial Sequence: Synthetic oligonucleotide
ugaauguccucuagcgaua

SEQ ID NO: 2450876 - RNA, 19 nt, Artificial Sequence
  Description of Artificial Sequence: Synthetic oligonucleotide
uucccuguucaucguacac

SEQ ID NO: 2450877 - RNA, 19 nt, Artificial Sequence
  Description of Artificial Sequence: Synthetic oligonucleotide
cacgcaaagcacagacucc

SEQ ID NO: 2450878 - RNA, 19 nt, Artificial Sequence
  Description of Artificial Sequence: Synthetic oligonucleotide
caagaucuggaagcggcgg

SEQ ID NO: 2450879 - RNA, 19 nt, Artificial Sequence
  Description of Artificial Sequence: Synthetic oligonucleotide
gaugggaccucuuuggcau

SEQ ID NO: 2450880 - RNA, 19 nt, Artificial Sequence
  Description of Artificial Sequence: Synthetic oligonucleotide
cucgucuacacggucgggg

SEQ ID NO: 2450881 - RNA, 19 nt, Artificial Sequence
  Description of Artificial Sequence: Synthetic oligonucleotide
ucuuugacgaaggcauugu

SEQ ID NO: 2450882 - RNA, 19 nt, Artificial Sequence
  Description of Artificial Sequence: Synthetic oligonucleotide
ucggaccucacccucggaa

SEQ ID NO: 2450883 - RNA, 19 nt, Artificial Sequence
  Description of Artificial Sequence: Synthetic oligonucleotide
gacucuccccaagaucugg

SEQ ID NO: 2450884 - RNA, 19 nt, Artificial Sequence
  Description of Artificial Sequence: Synthetic oligonucleotide
ggcaucaauggcuuguuga

SEQ ID NO: 2450885 - RNA, 19 nt, Artificial Sequence
  Description of Artificial Sequence: Synthetic oligonucleotide
gaaccgcauagacucuccc

SEQ ID NO: 2450886 - RNA, 19 nt, Artificial Sequence
  Description of Artificial Sequence: Synthetic oligonucleotide
ucugagcccuccuuuuccu

SEQ ID NO: 2450887 - RNA, 19 nt, Artificial Sequence
  Description of Artificial Sequence: Synthetic oligonucleotide
ugcacgcaaagcacagacu

SEQ ID NO: 2450888 - RNA, 19 nt, Artificial Sequence
  Description of Artificial Sequence: Synthetic oligonucleotide
uggaagguuugcaguauuu

SEQ ID NO: 2450889 - RNA, 19 nt, Artificial Sequence
  Description of Artificial Sequence: Synthetic oligonucleotide
cuccauaaucugauccaug

SEQ ID NO: 2450890 - RNA, 19 nt, Artificial Sequence
  Description of Artificial Sequence: Synthetic oligonucleotide
cuugaauguccucuagcga

SEQ ID NO: 2450891 - RNA, 19 nt, Artificial Sequence
  Description of Artificial Sequence: Synthetic oligonucleotide
agguaggccugcuuaacau

SEQ ID NO: 2450892 - RNA, 19 nt, Artificial Sequence
  Description of Artificial Sequence: Synthetic oligonucleotide
gaguaaccuccaauacgcg

SEQ ID NO: 2450893 - RNA, 19 nt, Artificial Sequence
  Description of Artificial Sequence: Synthetic oligonucleotide
ucgucuacacggucggggu

SEQ ID NO: 2450894 - RNA, 19 nt, Artificial Sequence
  Description of Artificial Sequence: Synthetic oligonucleotide
uuggucgaggccagcagau

SEQ ID NO: 2450895 - RNA, 19 nt, Artificial Sequence
  Description of Artificial Sequence: Synthetic oligonucleotide
ugugguagccgcgucggac

SEQ ID NO: 2450896 - RNA, 19 nt, Artificial Sequence
  Description of Artificial Sequence: Synthetic oligonucleotide
ugcucgcauagcuccagca

SEQ ID NO: 2450897 - RNA, 19 nt, Artificial Sequence
  Description of Artificial Sequence: Synthetic oligonucleotide
ucccuguucaucguacacu

SEQ ID NO: 2450898 - RNA, 19 nt, Artificial Sequence
  Description of Artificial Sequence: Synthetic oligonucleotide
uuugucugcucuggaugag

SEQ ID NO: 2450899 - RNA, 19 nt, Artificial Sequence
  Description of Artificial Sequence: Synthetic oligonucleotide
cucuuugacgaaggcauug

SEQ ID NO: 2450900 - RNA, 19 nt, Artificial Sequence
  Description of Artificial Sequence: Synthetic oligonucleotide
uccuuuugucugcucugga

SEQ ID NO: 2450901 - RNA, 19 nt, Artificial Sequence
  Description of Artificial Sequence: Synthetic oligonucleotide
cuuuagccucuuucugagc

SEQ ID NO: 2450902 - RNA, 19 nt, Artificial Sequence
  Description of Artificial Sequence: Synthetic oligonucleotide
cuugucacucagaaccgca

SEQ ID NO: 2450903 - RNA, 19 nt, Artificial Sequence
  Description of Artificial Sequence: Synthetic oligonucleotide
uuuggaagguuugcaguau

SEQ ID NO: 2450904 - RNA, 19 nt, Artificial Sequence
  Description of Artificial Sequence: Synthetic oligonucleotide
acgcaaagcacagacucca

SEQ ID NO: 2450905 - RNA, 19 nt, Artificial Sequence
  Description of Artificial Sequence: Synthetic oligonucleotide
gugguagccgcgucggacc

SEQ ID NO: 2450906 - RNA, 19 nt, Artificial Sequence
  Description of Artificial Sequence: Synthetic oligonucleotide
caucagcuagcucuucuuc

SEQ ID NO: 2450907 - RNA, 19 nt, Artificial Sequence
  Description of Artificial Sequence: Synthetic oligonucleotide
gaagucuagguaggccugc

SEQ ID NO: 2450908 - RNA, 19 nt, Artificial Sequence
  Description of Artificial Sequence: Synthetic oligonucleotide
uuuccuucuugggagccgu

SEQ ID NO: 2450909 - RNA, 19 nt, Artificial Sequence
  Description of Artificial Sequence: Synthetic oligonucleotide
ucagaaccgcauagacucu

SEQ ID NO: 2450910 - RNA, 19 nt, Artificial Sequence
  Description of Artificial Sequence: Synthetic oligonucleotide
ucacucagaaccgcauaga

SEQ ID NO: 2450911 - RNA, 19 nt, Artificial Sequence
  Description of Artificial Sequence: Synthetic oligonucleotide
aaccuccaauacgcguccc

SEQ ID NO: 2450912 - RNA, 19 nt, Artificial Sequence
  Description of Artificial Sequence: Synthetic oligonucleotide
uucaucguacacugcucuc

SEQ ID NO: 2450913 - RNA, 19 nt, Artificial Sequence
  Description of Artificial Sequence: Synthetic oligonucleotide
cacuugcagagacaccuug

SEQ ID NO: 2450914 - RNA, 19 nt, Artificial Sequence
  Description of Artificial Sequence: Synthetic oligonucleotide
caucguacacugcucucug

SEQ ID NO: 2450915 - RNA, 19 nt, Artificial Sequence
  Description of Artificial Sequence: Synthetic oligonucleotide
uucagguuauucacuccuu

SEQ ID NO: 2450916 - RNA, 19 nt, Artificial Sequence
  Description of Artificial Sequence: Synthetic oligonucleotide
uuuugccgauccuuuuguc

SEQ ID NO: 2450917 - RNA, 19 nt, Artificial Sequence
  Description of Artificial Sequence: Synthetic oligonucleotide
guccucgucuacacggucg

SEQ ID NO: 2450918 - RNA, 19 nt, Artificial Sequence
  Description of Artificial Sequence: Synthetic oligonucleotide
cucacccucggaagccucg

SEQ ID NO: 2450919 - RNA, 19 nt, Artificial Sequence
  Description of Artificial Sequence: Synthetic oligonucleotide
agccucgcgccgcacgccc

SEQ ID NO: 2450920 - RNA, 19 nt, Artificial Sequence
  Description of Artificial Sequence: Synthetic oligonucleotide
agauuccucguccacuguu

SEQ ID NO: 2450921 - RNA, 19 nt, Artificial Sequence
  Description of Artificial Sequence: Synthetic oligonucleotide
gauuccucguccacuguuc

SEQ ID NO: 2450922 - RNA, 19 nt, Artificial Sequence
  Description of Artificial Sequence: Synthetic oligonucleotide
cuugggagccguucuuuuc

SEQ ID NO: 2450923 - RNA, 19 nt, Artificial Sequence
  Description of Artificial Sequence: Synthetic oligonucleotide
guauugcacgcaaagcaca

SEQ ID NO: 2450924 - RNA, 19 nt, Artificial Sequence
  Description of Artificial Sequence: Synthetic oligonucleotide
ggugcacuugcagagacac

SEQ ID NO: 2450925 - RNA, 19 nt, Artificial Sequence
  Description of Artificial Sequence: Synthetic oligonucleotide
agaacgccgauaaccagca

SEQ ID NO: 2450926 - RNA, 19 nt, Artificial Sequence
  Description of Artificial Sequence: Synthetic oligonucleotide
uauccuggguucgucugug

SEQ ID NO: 2450927 - RNA, 19 nt, Artificial Sequence
  Description of Artificial Sequence: Synthetic oligonucleotide
uacacggucggggugcacu

SEQ ID NO: 2450928 - RNA, 19 nt, Artificial Sequence
  Description of Artificial Sequence: Synthetic oligonucleotide
guagaggucggcggugccg

SEQ ID NO: 2450929 - RNA, 19 nt, Artificial Sequence
  Description of Artificial Sequence: Synthetic oligonucleotide
gugccgaacaccugcucgc

SEQ ID NO: 2450930 - RNA, 19 nt, Artificial Sequence
  Description of Artificial Sequence: Synthetic oligonucleotide
guugaaugauguuucuuau

SEQ ID NO: 2450931 - RNA, 19 nt, Artificial Sequence
  Description of Artificial Sequence: Synthetic oligonucleotide
ugccgauccuuuugucugc

SEQ ID NO: 2450932 - RNA, 19 nt, Artificial Sequence
  Description of Artificial Sequence: Synthetic oligonucleotide
gcagauuccucguccacug

SEQ ID NO: 2450933 - RNA, 19 nt, Artificial Sequence
  Description of Artificial Sequence: Synthetic oligonucleotide
acucagaaccgcauagacu

SEQ ID NO: 2450934 - RNA, 19 nt, Artificial Sequence
  Description of Artificial Sequence: Synthetic oligonucleotide
agccgcgucggaccucacc

SEQ ID NO: 2450935 - RNA, 19 nt, Artificial Sequence
  Description of Artificial Sequence: Synthetic oligonucleotide
uguccucuagcgauaucuu

SEQ ID NO: 2450936 - RNA, 19 nt, Artificial Sequence
  Description of Artificial Sequence: Synthetic oligonucleotide
gucuacacggucggggugc

SEQ ID NO: 2450937 - RNA, 19 nt, Artificial Sequence
  Description of Artificial Sequence: Synthetic oligonucleotide
uuucuuauccuggguucgu

SEQ ID NO: 2450938 - RNA, 19 nt, Artificial Sequence
  Description of Artificial Sequence: Synthetic oligonucleotide
ucagagccuuuguauguau

SEQ ID NO: 2450939 - RNA, 19 nt, Artificial Sequence
  Description of Artificial Sequence: Synthetic oligonucleotide
cauagcuccagcagcccca

SEQ ID NO: 2450940 - RNA, 19 nt, Artificial Sequence
  Description of Artificial Sequence: Synthetic oligonucleotide
agcagauuccucguccacu

SEQ ID NO: 2450941 - RNA, 19 nt, Artificial Sequence
  Description of Artificial Sequence: Synthetic oligonucleotide
ccagucccggucuuggucg

SEQ ID NO: 2450942 - RNA, 19 nt, Artificial Sequence
  Description of Artificial Sequence: Synthetic oligonucleotide
ugggagccguucuuuuccc

SEQ ID NO: 2450943 - RNA, 19 nt, Artificial Sequence
  Description of Artificial Sequence: Synthetic oligonucleotide
cuuucugguccucgucuac

SEQ ID NO: 2450944 - RNA, 19 nt, Artificial Sequence
  Description of Artificial Sequence: Synthetic oligonucleotide
uuccucguccacuguuccc

SEQ ID NO: 2450945 - RNA, 19 nt, Artificial Sequence
  Description of Artificial Sequence: Synthetic oligonucleotide
gucuagguaggccugcuua

SEQ ID NO: 2450946 - RNA, 19 nt, Artificial Sequence
  Description of Artificial Sequence: Synthetic oligonucleotide
gcuuguugaaugauguuuc

SEQ ID NO: 2450947 - RNA, 19 nt, Artificial Sequence
  Description of Artificial Sequence: Synthetic oligonucleotide
uuguugaaugauguuucuu

SEQ ID NO: 2450948 - RNA, 19 nt, Artificial Sequence
  Description of Artificial Sequence: Synthetic oligonucleotide
aauacgcgucccagucccg

SEQ ID NO: 2450949 - RNA, 19 nt, Artificial Sequence
  Description of Artificial Sequence: Synthetic oligonucleotide
auacgcgucccagucccgg

SEQ ID NO: 2450950 - RNA, 19 nt, Artificial Sequence
  Description of Artificial Sequence: Synthetic oligonucleotide
guucaucguacacugcucu

SEQ ID NO: 2450951 - RNA, 19 nt, Artificial Sequence
  Description of Artificial Sequence: Synthetic oligonucleotide
cuguucaucguacacugcu

SEQ ID NO: 2450952 - RNA, 19 nt, Artificial Sequence
  Description of Artificial Sequence: Synthetic oligonucleotide
acuccauaaucugauccau

SEQ ID NO: 2450953 - RNA, 19 nt, Artificial Sequence
  Description of Artificial Sequence: Synthetic oligonucleotide
ugguccucgucuacacggu

SEQ ID NO: 2450954 - RNA, 19 nt, Artificial Sequence
  Description of Artificial Sequence: Synthetic oligonucleotide
acuguucccuguucaucgu

SEQ ID NO: 2450955 - RNA, 19 nt, Artificial Sequence
  Description of Artificial Sequence: Synthetic oligonucleotide
uccuggguucgucugugua

SEQ ID NO: 2450956 - RNA, 19 nt, Artificial Sequence
  Description of Artificial Sequence: Synthetic oligonucleotide
gucugcucuggaugagugc

SEQ ID NO: 2450957 - RNA, 19 nt, Artificial Sequence
  Description of Artificial Sequence: Synthetic oligonucleotide
cuuggucgaggccagcaga

SEQ ID NO: 2450958 - RNA, 19 nt, Artificial Sequence
  Description of Artificial Sequence: Synthetic oligonucleotide
ucuugggagccguucuuuu

SEQ ID NO: 2450959 - RNA, 19 nt, Artificial Sequence
  Description of Artificial Sequence: Synthetic oligonucleotide
cccuguucaucguacacug

SEQ ID NO: 2450960 - RNA, 19 nt, Artificial Sequence
  Description of Artificial Sequence: Synthetic oligonucleotide
aagccucgcgccgcacgcc

SEQ ID NO: 2450961 - RNA, 19 nt, Artificial Sequence
  Description of Artificial Sequence: Synthetic oligonucleotide
gcucgcauagcuccagcag

SEQ ID NO: 2450962 - RNA, 19 nt, Artificial Sequence
  Description of Artificial Sequence: Synthetic oligonucleotide
aagucuagguaggccugcu

SEQ ID NO: 2450963 - RNA, 19 nt, Artificial Sequence
  Description of Artificial Sequence: Synthetic oligonucleotide
cuagguaggccugcuuaac

SEQ ID NO: 2450964 - RNA, 19 nt, Artificial Sequence
  Description of Artificial Sequence: Synthetic oligonucleotide
gucggggugcacuugcaga

SEQ ID NO: 2450965 - RNA, 19 nt, Artificial Sequence
  Description of Artificial Sequence: Synthetic oligonucleotide
gucuguguauugcacgcaa

SEQ ID NO: 2450966 - RNA, 19 nt, Artificial Sequence
  Description of Artificial Sequence: Synthetic oligonucleotide
gaccucacccucggaagcc

SEQ ID NO: 2450967 - RNA, 19 nt, Artificial Sequence
  Description of Artificial Sequence: Synthetic oligonucleotide
gccagcagauuccucgucc

SEQ ID NO: 2450968 - RNA, 19 nt, Artificial Sequence
  Description of Artificial Sequence: Synthetic oligonucleotide
agacaccuugugguagccg

SEQ ID NO: 2450969 - RNA, 19 nt, Artificial Sequence
  Description of Artificial Sequence: Synthetic oligonucleotide
gucgaggccagcagauucc

SEQ ID NO: 2450970 - RNA, 19 nt, Artificial Sequence
  Description of Artificial Sequence: Synthetic oligonucleotide
accuccaauacgcguccca

SEQ ID NO: 2450971 - RNA, 19 nt, Artificial Sequence
  Description of Artificial Sequence: Synthetic oligonucleotide
ucccggucuuggucgaggc

SEQ ID NO: 2450972 - RNA, 19 nt, Artificial Sequence
  Description of Artificial Sequence: Synthetic oligonucleotide
accuugugguagccgcguc

SEQ ID NO: 2450973 - RNA, 19 nt, Artificial Sequence
  Description of Artificial Sequence: Synthetic oligonucleotide
ggucgaggccagcagauuc

SEQ ID NO: 2450974 - RNA, 19 nt, Artificial Sequence
  Description of Artificial Sequence: Synthetic oligonucleotide
gcaucaauggcuuguugaa

SEQ ID NO: 2450975 - RNA, 19 nt, Artificial Sequence
  Description of Artificial Sequence: Synthetic oligonucleotide
gaagcggcggguggcgucc

SEQ ID NO: 2450976 - RNA, 19 nt, Artificial Sequence
  Description of Artificial Sequence: Synthetic oligonucleotide
agccagaaaauuguccauu

SEQ ID NO: 2450977 - RNA, 19 nt, Artificial Sequence
  Description of Artificial Sequence: Synthetic oligonucleotide
cagacuccauaaucugauc

SEQ ID NO: 2450978 - RNA, 19 nt, Artificial Sequence
  Description of Artificial Sequence: Synthetic oligonucleotide
guucgucuguguauugcac

SEQ ID NO: 2450979 - RNA, 19 nt, Artificial Sequence
  Description of Artificial Sequence: Synthetic oligonucleotide
ugguagccgcgucggaccu

SEQ ID NO: 2450980 - RNA, 19 nt, Artificial Sequence
  Description of Artificial Sequence: Synthetic oligonucleotide
uggguucgucuguguauug

SEQ ID NO: 2450981 - RNA, 19 nt, Artificial Sequence
  Description of Artificial Sequence: Synthetic oligonucleotide
caccugguagaggucggcg

SEQ ID NO: 2450982 - RNA, 19 nt, Artificial Sequence
  Description of Artificial Sequence: Synthetic oligonucleotide
uucuuauccuggguucguc

SEQ ID NO: 2450983 - RNA, 19 nt, Artificial Sequence
  Description of Artificial Sequence: Synthetic oligonucleotide
cauuguaggaugggaccuc

SEQ ID NO: 2450984 - RNA, 19 nt, Artificial Sequence
  Description of Artificial Sequence: Synthetic oligonucleotide
acaccuugugguagccgcg

SEQ ID NO: 2450985 - RNA, 19 nt, Artificial Sequence
  Description of Artificial Sequence: Synthetic oligonucleotide
uccuuuugccgauccuuuu

SEQ ID NO: 2450986 - RNA, 19 nt, Artificial Sequence
  Description of Artificial Sequence: Synthetic oligonucleotide
ggaagccucgcgccgcacg

SEQ ID NO: 2450987 - RNA, 19 nt, Artificial Sequence
  Description of Artificial Sequence: Synthetic oligonucleotide
ugggaccucuuuggcauca

SEQ ID NO: 2450988 - RNA, 19 nt, Artificial Sequence
  Description of Artificial Sequence: Synthetic oligonucleotide
gguaggccugcuuaacauc

SEQ ID NO: 2450989 - RNA, 19 nt, Artificial Sequence
  Description of Artificial Sequence: Synthetic oligonucleotide
acgcgucccagucccgguc

SEQ ID NO: 2450990 - RNA, 19 nt, Artificial Sequence
  Description of Artificial Sequence: Synthetic oligonucleotide
cuuguugaaugauguuucu

SEQ ID NO: 2450991 - RNA, 19 nt, Artificial Sequence
  Description of Artificial Sequence: Synthetic oligonucleotide
uccuucuugggagccguuc

SEQ ID NO: 2450992 - RNA, 19 nt, Artificial Sequence
  Description of Artificial Sequence: Synthetic oligonucleotide
gaggcugcuccgagaacgc

SEQ ID NO: 2450993 - RNA, 19 nt, Artificial Sequence
  Description of Artificial Sequence: Synthetic oligonucleotide
ucguccacuguucccuguu

SEQ ID NO: 2450994 - RNA, 19 nt, Artificial Sequence
  Description of Artificial Sequence: Synthetic oligonucleotide
ggaugggaccucuuuggca

SEQ ID NO: 2450995 - RNA, 19 nt, Artificial Sequence
  Description of Artificial Sequence: Synthetic oligonucleotide
ggaccucacccucggaagc

SEQ ID NO: 2450996 - RNA, 19 nt, Artificial Sequence
  Description of Artificial Sequence: Synthetic oligonucleotide
gacgaaggcauuguaggau

SEQ ID NO: 2450997 - RNA, 19 nt, Artificial Sequence
  Description of Artificial Sequence: Synthetic oligonucleotide
auugcacgcaaagcacaga

SEQ ID NO: 2450998 - RNA, 19 nt, Artificial Sequence
  Description of Artificial Sequence: Synthetic oligonucleotide
guuuggacucuuugacgaa

SEQ ID NO: 2450999 - RNA, 19 nt, Artificial Sequence
  Description of Artificial Sequence: Synthetic oligonucleotide
cuuuugccgauccuuuugu

SEQ ID NO: 2451000 - RNA, 19 nt, Artificial Sequence
  Description of Artificial Sequence: Synthetic oligonucleotide
gccgauaaccagcacccac

SEQ ID NO: 2451001 - RNA, 19 nt, Artificial Sequence
  Description of Artificial Sequence: Synthetic oligonucleotide
gucgcccuugaagucuagg

SEQ ID NO: 2451002 - RNA, 19 nt, Artificial Sequence
  Description of Artificial Sequence: Synthetic oligonucleotide
gcauagcuccagcagcccc

SEQ ID NO: 2451003 - RNA, 19 nt, Artificial Sequence
  Description of Artificial Sequence: Synthetic oligonucleotide
gcucucugcuccuugucac

SEQ ID NO: 2451004 - RNA, 19 nt, Artificial Sequence
  Description of Artificial Sequence: Synthetic oligonucleotide
gggaagaggcugcuccgag

SEQ ID NO: 2451005 - RNA, 19 nt, Artificial Sequence
  Description of Artificial Sequence: Synthetic oligonucleotide
ccucuuuagccucuuucug

SEQ ID NO: 2451006 - RNA, 19 nt, Artificial Sequence
  Description of Artificial Sequence: Synthetic oligonucleotide
cagaaccgcauagacucuc

SEQ ID NO: 2451007 - RNA, 19 nt, Artificial Sequence
  Description of Artificial Sequence: Synthetic oligonucleotide
ucggaagccucgcgccgca

SEQ ID NO: 2451008 - RNA, 19 nt, Artificial Sequence
  Description of Artificial Sequence: Synthetic oligonucleotide
uugugguagccgcgucgga

SEQ ID NO: 2451009 - RNA, 19 nt, Artificial Sequence
  Description of Artificial Sequence: Synthetic oligonucleotide
gcauagacucuccccaaga

SEQ ID NO: 2451010 - RNA, 19 nt, Artificial Sequence
  Description of Artificial Sequence: Synthetic oligonucleotide
ucacccucggaagccucgc

SEQ ID NO: 2451011 - RNA, 19 nt, Artificial Sequence
  Description of Artificial Sequence: Synthetic oligonucleotide
ugucgcccuugaagucuag

SEQ ID NO: 2451012 - RNA, 19 nt, Artificial Sequence
  Description of Artificial Sequence: Synthetic oligonucleotide
cagcagauuccucguccac

SEQ ID NO: 2451013 - RNA, 19 nt, Artificial Sequence
  Description of Artificial Sequence: Synthetic oligonucleotide
ccagaaaauuguccauuuc

SEQ ID NO: 2451014 - RNA, 19 nt, Artificial Sequence
  Description of Artificial Sequence: Synthetic oligonucleotide
cucggaagccucgcgccgc

SEQ ID NO: 2451015 - RNA, 19 nt, Artificial Sequence
  Description of Artificial Sequence: Synthetic oligonucleotide
cuuugacgaaggcauugua

SEQ ID NO: 2451016 - RNA, 19 nt, Artificial Sequence
  Description of Artificial Sequence: Synthetic oligonucleotide
cugcucgcauagcuccagc

SEQ ID NO: 2451017 - RNA, 19 nt, Artificial Sequence
  Description of Artificial Sequence: Synthetic oligonucleotide
uacgcgucccagucccggu

SEQ ID NO: 2451018 - RNA, 19 nt, Artificial Sequence
  Description of Artificial Sequence: Synthetic oligonucleotide
ccaauacgcgucccagucc

SEQ ID NO: 2451019 - RNA, 19 nt, Artificial Sequence
  Description of Artificial Sequence: Synthetic oligonucleotide
ugccgaacaccugcucgca

SEQ ID NO: 2451020 - RNA, 19 nt, Artificial Sequence
  Description of Artificial Sequence: Synthetic oligonucleotide
ggggugcacuugcagagac

SEQ ID NO: 2451021 - RNA, 19 nt, Artificial Sequence
  Description of Artificial Sequence: Synthetic oligonucleotide
ugcucaacucggccucuuu

SEQ ID NO: 2451022 - RNA, 19 nt, Artificial Sequence
  Description of Artificial Sequence: Synthetic oligonucleotide
cgaaggcauuguaggaugg

SEQ ID NO: 2451023 - RNA, 19 nt, Artificial Sequence
  Description of Artificial Sequence: Synthetic oligonucleotide
agucuagguaggccugcuu

SEQ ID NO: 2451024 - RNA, 19 nt, Artificial Sequence
  Description of Artificial Sequence: Synthetic oligonucleotide
ccauaaucugauccauguc

SEQ ID NO: 2451025 - RNA, 19 nt, Artificial Sequence
  Description of Artificial Sequence: Synthetic oligonucleotide
ccgagaacgccgauaacca

SEQ ID NO: 2451026 - RNA, 19 nt, Artificial Sequence
  Description of Artificial Sequence: Synthetic oligonucleotide
ccgauaaccagcacccaca

SEQ ID NO: 2451027 - RNA, 19 nt, Artificial Sequence
  Description of Artificial Sequence: Synthetic oligonucleotide
ucuacacggucggggugca

SEQ ID NO: 2451028 - RNA, 19 nt, Artificial Sequence
  Description of Artificial Sequence: Synthetic oligonucleotide
uaacaucagcuagcucuuc

SEQ ID NO: 2451029 - RNA, 19 nt, Artificial Sequence
  Description of Artificial Sequence: Synthetic oligonucleotide
gaacaccugcucgcauagc

SEQ ID NO: 2451030 - RNA, 19 nt, Artificial Sequence
  Description of Artificial Sequence: Synthetic oligonucleotide
gagccagaaaauuguccau

SEQ ID NO: 2451031 - RNA, 19 nt, Artificial Sequence
  Description of Artificial Sequence: Synthetic oligonucleotide
ggguucgucuguguauugc

SEQ ID NO: 2451032 - RNA, 19 nt, Artificial Sequence
  Description of Artificial Sequence: Synthetic oligonucleotide
uuguaggaugggaccucuu

SEQ ID NO: 2451033 - RNA, 19 nt, Artificial Sequence
  Description of Artificial Sequence: Synthetic oligonucleotide
gauccaugucgcccuugaa

SEQ ID NO: 2451034 - RNA, 19 nt, Artificial Sequence
  Description of Artificial Sequence: Synthetic oligonucleotide
gccguucuuuucccuuugg

SEQ ID NO: 2451035 - RNA, 19 nt, Artificial Sequence
  Description of Artificial Sequence: Synthetic oligonucleotide
guggcguccucuuucuggu

SEQ ID NO: 2451036 - RNA, 19 nt, Artificial Sequence
  Description of Artificial Sequence: Synthetic oligonucleotide
gucggcggugccgaacacc

SEQ ID NO: 2451037 - RNA, 19 nt, Artificial Sequence
  Description of Artificial Sequence: Synthetic oligonucleotide
cugguagaggucggcggug

SEQ ID NO: 2451038 - RNA, 19 nt, Artificial Sequence
  Description of Artificial Sequence: Synthetic oligonucleotide
acucuccccaagaucugga

SEQ ID NO: 2451039 - RNA, 19 nt, Artificial Sequence
  Description of Artificial Sequence: Synthetic oligonucleotide
guagccgcgucggaccuca

SEQ ID NO: 2451040 - RNA, 19 nt, Artificial Sequence
  Description of Artificial Sequence: Synthetic oligonucleotide
cccucggaagccucgcgcc

SEQ ID NO: 2451041 - RNA, 19 nt, Artificial Sequence
  Description of Artificial Sequence: Synthetic oligonucleotide
auccuggguucgucugugu

SEQ ID NO: 2451042 - RNA, 19 nt, Artificial Sequence
  Description of Artificial Sequence: Synthetic oligonucleotide
cgauaaccagcacccacag

SEQ ID NO: 2451043 - RNA, 19 nt, Artificial Sequence
  Description of Artificial Sequence: Synthetic oligonucleotide
ccuccaauacgcgucccag

SEQ ID NO: 2451044 - RNA, 19 nt, Artificial Sequence
  Description of Artificial Sequence: Synthetic oligonucleotide
ccuguucaucguacacugc

SEQ ID NO: 2451045 - RNA, 19 nt, Artificial Sequence
  Description of Artificial Sequence: Synthetic oligonucleotide
agacucuccccaagaucug

SEQ ID NO: 2451046 - RNA, 19 nt, Artificial Sequence
  Description of Artificial Sequence: Synthetic oligonucleotide
acacggucggggugcacuu

SEQ ID NO: 2451047 - RNA, 19 nt, Artificial Sequence
  Description of Artificial Sequence: Synthetic oligonucleotide
ucccagucccggucuuggu

SEQ ID NO: 2451048 - RNA, 19 nt, Artificial Sequence
  Description of Artificial Sequence: Synthetic oligonucleotide
ggcuuguugaaugauguuu

SEQ ID NO: 2451049 - RNA, 19 nt, Artificial Sequence
  Description of Artificial Sequence: Synthetic oligonucleotide
gcaaagcacagacuccaua

SEQ ID NO: 2451050 - RNA, 19 nt, Artificial Sequence
  Description of Artificial Sequence: Synthetic oligonucleotide
gagccuuuguauguauuuu

SEQ ID NO: 2451051 - RNA, 19 nt, Artificial Sequence
  Description of Artificial Sequence: Synthetic oligonucleotide
gccugcuuaacaucagcua

SEQ ID NO: 2451052 - RNA, 19 nt, Artificial Sequence
  Description of Artificial Sequence: Synthetic oligonucleotide
auagcuccagcagccccau

SEQ ID NO: 2451053 - RNA, 19 nt, Artificial Sequence
  Description of Artificial Sequence: Synthetic oligonucleotide
gaggucggcggugccgaac

SEQ ID NO: 2451054 - RNA, 19 nt, Artificial Sequence
  Description of Artificial Sequence: Synthetic oligonucleotide
cuccgagaacgccgauaac

SEQ ID NO: 2451055 - RNA, 19 nt, Artificial Sequence
  Description of Artificial Sequence: Synthetic oligonucleotide
gugcacuugcagagacacc

SEQ ID NO: 2451056 - RNA, 19 nt, Artificial Sequence
  Description of Artificial Sequence: Synthetic oligonucleotide
gcagagacaccuuguggua

SEQ ID NO: 2451057 - RNA, 19 nt, Artificial Sequence
  Description of Artificial Sequence: Synthetic oligonucleotide
agcccuccuuuuccuugca

SEQ ID NO: 2451058 - RNA, 19 nt, Artificial Sequence
  Description of Artificial Sequence: Synthetic oligonucleotide
caucuuuuguuuggacucu

SEQ ID NO: 2451059 - RNA, 19 nt, Artificial Sequence
  Description of Artificial Sequence: Synthetic oligonucleotide
gcuuaacaucagcuagcuc

SEQ ID NO: 2451060 - RNA, 19 nt, Artificial Sequence
  Description of Artificial Sequence: Synthetic oligonucleotide
cggaccucacccucggaag

SEQ ID NO: 2451061 - RNA, 19 nt, Artificial Sequence
  Description of Artificial Sequence: Synthetic oligonucleotide
cgagaacgccgauaaccag

SEQ ID NO: 2451062 - RNA, 19 nt, Artificial Sequence
  Description of Artificial Sequence: Synthetic oligonucleotide
uggcguccucuuucugguc

SEQ ID NO: 2451063 - RNA, 19 nt, Artificial Sequence
  Description of Artificial Sequence: Synthetic oligonucleotide
gagccguucuuuucccuuu

SEQ ID NO: 2451064 - RNA, 19 nt, Artificial Sequence
  Description of Artificial Sequence: Synthetic oligonucleotide
guccucuagcgauaucuuu

SEQ ID NO: 2451065 - RNA, 19 nt, Artificial Sequence
  Description of Artificial Sequence: Synthetic oligonucleotide
gcggguggcguccucuuuc

SEQ ID NO: 2451066 - RNA, 19 nt, Artificial Sequence
  Description of Artificial Sequence: Synthetic oligonucleotide
gguccucgucuacacgguc

SEQ ID NO: 2451067 - RNA, 19 nt, Artificial Sequence
  Description of Artificial Sequence: Synthetic oligonucleotide
cuguucccuguucaucgua

SEQ ID NO: 2451068 - RNA, 19 nt, Artificial Sequence
  Description of Artificial Sequence: Synthetic oligonucleotide
cuccaauacgcgucccagu

SEQ ID NO: 2451069 - RNA, 19 nt, Artificial Sequence
  Description of Artificial Sequence: Synthetic oligonucleotide
ccccaugacugggaagagg

SEQ ID NO: 2451070 - RNA, 19 nt, Artificial Sequence
  Description of Artificial Sequence: Synthetic oligonucleotide
gccagaaaauuguccauuu

SEQ ID NO: 2451071 - RNA, 19 nt, Artificial Sequence
  Description of Artificial Sequence: Synthetic oligonucleotide
cgcauagacucuccccaag

SEQ ID NO: 2451072 - RNA, 19 nt, Artificial Sequence
  Description of Artificial Sequence: Synthetic oligonucleotide
ccuugcauucaucuuuugu

SEQ ID NO: 2451073 - RNA, 19 nt, Artificial Sequence
  Description of Artificial Sequence: Synthetic oligonucleotide
uggucgaggccagcagauu

SEQ ID NO: 2451074 - RNA, 19 nt, Artificial Sequence
  Description of Artificial Sequence: Synthetic oligonucleotide
agucccggucuuggucgag

SEQ ID NO: 2451075 - RNA, 19 nt, Artificial Sequence
  Description of Artificial Sequence: Synthetic oligonucleotide
cagccccagcuccuuucug

SEQ ID NO: 2451076 - RNA, 19 nt, Artificial Sequence
  Description of Artificial Sequence: Synthetic oligonucleotide
cguacacugcucucugcuc

SEQ ID NO: 2451077 - RNA, 19 nt, Artificial Sequence
  Description of Artificial Sequence: Synthetic oligonucleotide
caucaauggcuuguugaau

SEQ ID NO: 2451078 - RNA, 19 nt, Artificial Sequence
  Description of Artificial Sequence: Synthetic oligonucleotide
gcugcuccgagaacgccga

SEQ ID NO: 2451079 - RNA, 19 nt, Artificial Sequence
  Description of Artificial Sequence: Synthetic oligonucleotide
agcggcggguggcguccuc

SEQ ID NO: 2451080 - RNA, 19 nt, Artificial Sequence
  Description of Artificial Sequence: Synthetic oligonucleotide
gcgucggaccucacccucg

SEQ ID NO: 2451081 - RNA, 19 nt, Artificial Sequence
  Description of Artificial Sequence: Synthetic oligonucleotide
ugagugcuuucagguuauu

SEQ ID NO: 2451082 - RNA, 19 nt, Artificial Sequence
  Description of Artificial Sequence: Synthetic oligonucleotide
ccguucuuuucccuuugga

SEQ ID NO: 2451083 - RNA, 19 nt, Artificial Sequence
  Description of Artificial Sequence: Synthetic oligonucleotide
gguuugcaguauuuugcuu

SEQ ID NO: 2451084 - RNA, 19 nt, Artificial Sequence
  Description of Artificial Sequence: Synthetic oligonucleotide
cagucccggucuuggucga

SEQ ID NO: 2451085 - RNA, 19 nt, Artificial Sequence
  Description of Artificial Sequence: Synthetic oligonucleotide
cuggguucgucuguguauu

SEQ ID NO: 2451086 - RNA, 19 nt, Artificial Sequence
  Description of Artificial Sequence: Synthetic oligonucleotide
cagagccuuuguauguauu

SEQ ID NO: 2451087 - RNA, 19 nt, Artificial Sequence
  Description of Artificial Sequence: Synthetic oligonucleotide
cgucggaccucacccucgg

SEQ ID NO: 2451088 - RNA, 19 nt, Artificial Sequence
  Description of Artificial Sequence: Synthetic oligonucleotide
cccggucuuggucgaggcc

SEQ ID NO: 2451089 - RNA, 19 nt, Artificial Sequence
  Description of Artificial Sequence: Synthetic oligonucleotide
ccgaacaccugcucgcaua

SEQ ID NO: 2451090 - RNA, 19 nt, Artificial Sequence
  Description of Artificial Sequence: Synthetic oligonucleotide
gucggaccucacccucgga

SEQ ID NO: 2451091 - RNA, 19 nt, Artificial Sequence
  Description of Artificial Sequence: Synthetic oligonucleotide
cgauccuuuugucugcucu

SEQ ID NO: 2451092 - RNA, 19 nt, Artificial Sequence
  Description of Artificial Sequence: Synthetic oligonucleotide
ucggccucuuuagccucuu

SEQ ID NO: 2451093 - RNA, 19 nt, Artificial Sequence
  Description of Artificial Sequence: Synthetic oligonucleotide
aagcggcggguggcguccu

SEQ ID NO: 2451094 - RNA, 19 nt, Artificial Sequence
  Description of Artificial Sequence: Synthetic oligonucleotide
ggguggcguccucuuucug

SEQ ID NO: 2451095 - RNA, 19 nt, Artificial Sequence
  Description of Artificial Sequence: Synthetic oligonucleotide
cagauuccucguccacugu

SEQ ID NO: 2451096 - RNA, 19 nt, Artificial Sequence
  Description of Artificial Sequence: Synthetic oligonucleotide
cucguccacuguucccugu

SEQ ID NO: 2451097 - RNA, 19 nt, Artificial Sequence
  Description of Artificial Sequence: Synthetic oligonucleotide
cuacacggucggggugcac

SEQ ID NO: 2451098 - RNA, 19 nt, Artificial Sequence
  Description of Artificial Sequence: Synthetic oligonucleotide
gggugcacuugcagagaca

SEQ ID NO: 2451099 - RNA, 19 nt, Artificial Sequence
  Description of Artificial Sequence: Synthetic oligonucleotide
caccuugugguagccgcgu

SEQ ID NO: 2451100 - RNA, 19 nt, Artificial Sequence
  Description of Artificial Sequence: Synthetic oligonucleotide
cucgcgccgcacgcccagc

SEQ ID NO: 2451101 - RNA, 19 nt, Artificial Sequence
  Description of Artificial Sequence: Synthetic oligonucleotide
ccucgucuacacggucggg

SEQ ID NO: 2451102 - RNA, 19 nt, Artificial Sequence
  Description of Artificial Sequence: Synthetic oligonucleotide
ggucggcggugccgaacac

SEQ ID NO: 2451103 - RNA, 19 nt, Artificial Sequence
  Description of Artificial Sequence: Synthetic oligonucleotide
uagccgcgucggaccucac

SEQ ID NO: 2451104 - RNA, 19 nt, Artificial Sequence
  Description of Artificial Sequence: Synthetic oligonucleotide
ccucgcgccgcacgcccag

SEQ ID NO: 2451105 - RNA, 19 nt, Artificial Sequence
  Description of Artificial Sequence: Synthetic oligonucleotide
cugagcccuccuuuuccuu

SEQ ID NO: 2451106 - RNA, 19 nt, Artificial Sequence
  Description of Artificial Sequence: Synthetic oligonucleotide
gggagccguucuuuucccu

SEQ ID NO: 2451107 - RNA, 19 nt, Artificial Sequence
  Description of Artificial Sequence: Synthetic oligonucleotide
ccgcauagacucuccccaa

SEQ ID NO: 2451108 - RNA, 19 nt, Artificial Sequence
  Description of Artificial Sequence: Synthetic oligonucleotide
ccaugacugggaagaggcu

SEQ ID NO: 2451109 - RNA, 19 nt, Artificial Sequence
  Description of Artificial Sequence: Synthetic oligonucleotide
gguagccgcgucggaccuc

SEQ ID NO: 2451110 - RNA, 19 nt, Artificial Sequence
  Description of Artificial Sequence: Synthetic oligonucleotide
cgucuguguauugcacgca

SEQ ID NO: 2451111 - RNA, 19 nt, Artificial Sequence
  Description of Artificial Sequence: Synthetic oligonucleotide
gccgaacaccugcucgcau

SEQ ID NO: 2451112 - RNA, 19 nt, Artificial Sequence
  Description of Artificial Sequence: Synthetic oligonucleotide
cggugccgaacaccugcuc

SEQ ID NO: 2451113 - RNA, 19 nt, Artificial Sequence
  Description of Artificial Sequence: Synthetic oligonucleotide
cgcgccgcacgcccagcac

SEQ ID NO: 2451114 - RNA, 19 nt, Artificial Sequence
  Description of Artificial Sequence: Synthetic oligonucleotide
gcggugccgaacaccugcu

SEQ ID NO: 2451115 - RNA, 19 nt, Artificial Sequence
  Description of Artificial Sequence: Synthetic oligonucleotide
cugcucaacucggccucuu

SEQ ID NO: 2451116 - RNA, 19 nt, Artificial Sequence
  Description of Artificial Sequence: Synthetic oligonucleotide
cggucggggugcacuugca

SEQ ID NO: 2451117 - RNA, 19 nt, Artificial Sequence
  Description of Artificial Sequence: Synthetic oligonucleotide
ggcggguggcguccucuuu

SEQ ID NO: 2451118 - RNA, 19 nt, Artificial Sequence
  Description of Artificial Sequence: Synthetic oligonucleotide
cggcggugccgaacaccug

SEQ ID NO: 2451119 - RNA, 19 nt, Artificial Sequence
  Description of Artificial Sequence: Synthetic oligonucleotide
gcggcggguggcguccucu

SEQ ID NO: 2451120 - RNA, 19 nt, Artificial Sequence
  Description of Artificial Sequence: Synthetic oligonucleotide
cggguggcguccucuuucu

SEQ ID NO: 2451121 - RNA, 19 nt, Artificial Sequence
  Description of Artificial Sequence: Synthetic oligonucleotide
cugcuccgagaacgccgau

SEQ ID NO: 2451122 - RNA, 19 nt, Artificial Sequence
  Description of Artificial Sequence: Synthetic oligonucleotide
gccucgcgccgcacgccca

SEQ ID NO: 2451123 - RNA, 19 nt, Artificial Sequence
  Description of Artificial Sequence: Synthetic oligonucleotide
ccgcgucggaccucacccu

SEQ ID NO: 2451124 - RNA, 19 nt, Artificial Sequence
  Description of Artificial Sequence: Synthetic oligonucleotide
cgcgucccagucccggucu

SEQ ID NO: 2451125 - RNA, 19 nt, Artificial Sequence
  Description of Artificial Sequence: Synthetic oligonucleotide
cgccgauaaccagcaccca

SEQ ID NO: 2451126 - RNA, 19 nt, Artificial Sequence
  Description of Artificial Sequence: Synthetic oligonucleotide
gcgucccagucccggucuu

SEQ ID NO: 2451127 - RNA, 19 nt, Artificial Sequence
  Description of Artificial Sequence: Synthetic oligonucleotide
aaaauugggccacaaaggc

SEQ ID NO: 2451128 - RNA, 19 nt, Artificial Sequence
  Description of Artificial Sequence: Synthetic oligonucleotide
aaagcugugauuugucucc

SEQ ID NO: 2451129 - RNA, 19 nt, Artificial Sequence
  Description of Artificial Sequence: Synthetic oligonucleotide
uaaaugauggggaaaauug

SEQ ID NO: 2451130 - RNA, 19 nt, Artificial Sequence
  Description of Artificial Sequence: Synthetic oligonucleotide
auaaauauucagaagagac

SEQ ID NO: 2451131 - RNA, 19 nt, Artificial Sequence
  Description of Artificial Sequence: Synthetic oligonucleotide
ucuaauuuaaaccgaaagu

SEQ ID NO: 2451132 - RNA, 19 nt, Artificial Sequence
  Description of Artificial Sequence: Synthetic oligonucleotide
aaucaaaagaaggccagcc

SEQ ID NO: 2451133 - RNA, 19 nt, Artificial Sequence
  Description of Artificial Sequence: Synthetic oligonucleotide
agcuuugacaagcugaugg

SEQ ID NO: 2451134 - RNA, 19 nt, Artificial Sequence
  Description of Artificial Sequence: Synthetic oligonucleotide
caucaugagagguaaaacg

SEQ ID NO: 2451135 - RNA, 19 nt, Artificial Sequence
  Description of Artificial Sequence: Synthetic oligonucleotide
aguuuauuuaaguagcuca

SEQ ID NO: 2451136 - RNA, 19 nt, Artificial Sequence
  Description of Artificial Sequence: Synthetic oligonucleotide
ucugaauccucucuaaagc

SEQ ID NO: 2451137 - RNA, 19 nt, Artificial Sequence
  Description of Artificial Sequence: Synthetic oligonucleotide
acuugguuagguuacuccc

SEQ ID NO: 2451138 - RNA, 19 nt, Artificial Sequence
  Description of Artificial Sequence: Synthetic oligonucleotide
ucuaguaaaguucugguua

SEQ ID NO: 2451139 - RNA, 19 nt, Artificial Sequence
  Description of Artificial Sequence: Synthetic oligonucleotide
uccaguuuauuuaaguagc

SEQ ID NO: 2451140 - RNA, 19 nt, Artificial Sequence
  Description of Artificial Sequence: Synthetic oligonucleotide
ucuaagucgagcaaccuca

SEQ ID NO: 2451141 - RNA, 19 nt, Artificial Sequence
  Description of Artificial Sequence: Synthetic oligonucleotide
auuuaaguagcucauuaug

SEQ ID NO: 2451142 - RNA, 19 nt, Artificial Sequence
  Description of Artificial Sequence: Synthetic oligonucleotide
uccgaauucagaaaagcug

SEQ ID NO: 2451143 - RNA, 19 nt, Artificial Sequence
  Description of Artificial Sequence: Synthetic oligonucleotide
gaaaauugggccacaaagg

SEQ ID NO: 2451144 - RNA, 19 nt, Artificial Sequence
  Description of Artificial Sequence: Synthetic oligonucleotide
uuguaaggagcucugaaug

SEQ ID NO: 2451145 - RNA, 19 nt, Artificial Sequence
  Description of Artificial Sequence: Synthetic oligonucleotide
aaauauucagaagagacuu

SEQ ID NO: 2451146 - RNA, 19 nt, Artificial Sequence
  Description of Artificial Sequence: Synthetic oligonucleotide
ucagaagagacuugguuag

SEQ ID NO: 2451147 - RNA, 19 nt, Artificial Sequence
  Description of Artificial Sequence: Synthetic oligonucleotide
ucuaucauuucucaaugac

SEQ ID NO: 2451148 - RNA, 19 nt, Artificial Sequence
  Description of Artificial Sequence: Synthetic oligonucleotide
agugucacuauguggaggg

SEQ ID NO: 2451149 - RNA, 19 nt, Artificial Sequence
  Description of Artificial Sequence: Synthetic oligonucleotide
ucugaaugcgcaaagcugu

SEQ ID NO: 2451150 - RNA, 19 nt, Artificial Sequence
  Description of Artificial Sequence: Synthetic oligonucleotide
agauuugcaaacucuauca

SEQ ID NO: 2451151 - RNA, 19 nt, Artificial Sequence
  Description of Artificial Sequence: Synthetic oligonucleotide
cagucugacaucaaguccg

SEQ ID NO: 2451152 - RNA, 19 nt, Artificial Sequence
  Description of Artificial Sequence: Synthetic oligonucleotide
ggaaaauugggccacaaag

SEQ ID NO: 2451153 - RNA, 19 nt, Artificial Sequence
  Description of Artificial Sequence: Synthetic oligonucleotide
aaaaucaaaagaaggccag

SEQ ID NO: 2451154 - RNA, 19 nt, Artificial Sequence
  Description of Artificial Sequence: Synthetic oligonucleotide
aacucuaucauuucucaau

SEQ ID NO: 2451155 - RNA, 19 nt, Artificial Sequence
  Description of Artificial Sequence: Synthetic oligonucleotide
uguuauucccaauaucuga

SEQ ID NO: 2451156 - RNA, 19 nt, Artificial Sequence
  Description of Artificial Sequence: Synthetic oligonucleotide
uuugacaagcugauggccc

SEQ ID NO: 2451157 - RNA, 19 nt, Artificial Sequence
  Description of Artificial Sequence: Synthetic oligonucleotide
aaaucaaaagaaggccagc

SEQ ID NO: 2451158 - RNA, 19 nt, Artificial Sequence
  Description of Artificial Sequence: Synthetic oligonucleotide
uuaaguagcucauuaugga

SEQ ID NO: 2451159 - RNA, 19 nt, Artificial Sequence
  Description of Artificial Sequence: Synthetic oligonucleotide
ugguuaguucucuaagucg

SEQ ID NO: 2451160 - RNA, 19 nt, Artificial Sequence
  Description of Artificial Sequence: Synthetic oligonucleotide
cuccaguuuauuuaaguag

SEQ ID NO: 2451161 - RNA, 19 nt, Artificial Sequence
  Description of Artificial Sequence: Synthetic oligonucleotide
ugaauccucucuaaagcag

SEQ ID NO: 2451162 - RNA, 19 nt, Artificial Sequence
  Description of Artificial Sequence: Synthetic oligonucleotide
auauucagaagagacuugg

SEQ ID NO: 2451163 - RNA, 19 nt, Artificial Sequence
  Description of Artificial Sequence: Synthetic oligonucleotide
ucugagagcagcuuugcca

SEQ ID NO: 2451164 - RNA, 19 nt, Artificial Sequence
  Description of Artificial Sequence: Synthetic oligonucleotide
acugagaucugagagcagc

SEQ ID NO: 2451165 - RNA, 19 nt, Artificial Sequence
  Description of Artificial Sequence: Synthetic oligonucleotide
aagcugauggcccaugaug

SEQ ID NO: 2451166 - RNA, 19 nt, Artificial Sequence
  Description of Artificial Sequence: Synthetic oligonucleotide
auccaaauaauucuuacua

SEQ ID NO: 2451167 - RNA, 19 nt, Artificial Sequence
  Description of Artificial Sequence: Synthetic oligonucleotide
cauacugagaucugagagc

SEQ ID NO: 2451168 - RNA, 19 nt, Artificial Sequence
  Description of Artificial Sequence: Synthetic oligonucleotide
uacucuaguaaaguucugg

SEQ ID NO: 2451169 - RNA, 19 nt, Artificial Sequence
  Description of Artificial Sequence: Synthetic oligonucleotide
ucuacauucuguaucugaa

SEQ ID NO: 2451170 - RNA, 19 nt, Artificial Sequence
  Description of Artificial Sequence: Synthetic oligonucleotide
aucugaauccucucuaaag

SEQ ID NO: 2451171 - RNA, 19 nt, Artificial Sequence
  Description of Artificial Sequence: Synthetic oligonucleotide
guucucagcuaaaugaugg

SEQ ID NO: 2451172 - RNA, 19 nt, Artificial Sequence
  Description of Artificial Sequence: Synthetic oligonucleotide
uacuacucuaguaaaguuc

SEQ ID NO: 2451173 - RNA, 19 nt, Artificial Sequence
  Description of Artificial Sequence: Synthetic oligonucleotide
ugaagucuuguucaucaug

SEQ ID NO: 2451174 - RNA, 19 nt, Artificial Sequence
  Description of Artificial Sequence: Synthetic oligonucleotide
uucugguuaguucucuaag

SEQ ID NO: 2451175 - RNA, 19 nt, Artificial Sequence
  Description of Artificial Sequence: Synthetic oligonucleotide
cuaguaaaguucugguuag

SEQ ID NO: 2451176 - RNA, 19 nt, Artificial Sequence
  Description of Artificial Sequence: Synthetic oligonucleotide
ugccauacuacucuaguaa

SEQ ID NO: 2451177 - RNA, 19 nt, Artificial Sequence
  Description of Artificial Sequence: Synthetic oligonucleotide
uggagucgagcaauguugg

SEQ ID NO: 2451178 - RNA, 19 nt, Artificial Sequence
  Description of Artificial Sequence: Synthetic oligonucleotide
uuugccauacuacucuagu

SEQ ID NO: 2451179 - RNA, 19 nt, Artificial Sequence
  Description of Artificial Sequence: Synthetic oligonucleotide
auuucucaaugacaguaag

SEQ ID NO: 2451180 - RNA, 19 nt, Artificial Sequence
  Description of Artificial Sequence: Synthetic oligonucleotide
ucuaaagcagcagaagcca

SEQ ID NO: 2451181 - RNA, 19 nt, Artificial Sequence
  Description of Artificial Sequence: Synthetic oligonucleotide
acucuaucauuucucaaug

SEQ ID NO: 2451182 - RNA, 19 nt, Artificial Sequence
  Description of Artificial Sequence: Synthetic oligonucleotide
aagagacuugguuagguua

SEQ ID NO: 2451183 - RNA, 19 nt, Artificial Sequence
  Description of Artificial Sequence: Synthetic oligonucleotide
caccuuuucacacagucug

SEQ ID NO: 2451184 - RNA, 19 nt, Artificial Sequence
  Description of Artificial Sequence: Synthetic oligonucleotide
uucucuaagucgagcaacc

SEQ ID NO: 2451185 - RNA, 19 nt, Artificial Sequence
  Description of Artificial Sequence: Synthetic oligonucleotide
gaggguagcaccuuuucac

SEQ ID NO: 2451186 - RNA, 19 nt, Artificial Sequence
  Description of Artificial Sequence: Synthetic oligonucleotide
auuauggaugugugaagag

SEQ ID NO: 2451187 - RNA, 19 nt, Artificial Sequence
  Description of Artificial Sequence: Synthetic oligonucleotide
uuuguaaggagcucugaau

SEQ ID NO: 2451188 - RNA, 19 nt, Artificial Sequence
  Description of Artificial Sequence: Synthetic oligonucleotide
uauuuaaguagcucauuau

SEQ ID NO: 2451189 - RNA, 19 nt, Artificial Sequence
  Description of Artificial Sequence: Synthetic oligonucleotide
aagaaggagaugcuccagu

SEQ ID NO: 2451190 - RNA, 19 nt, Artificial Sequence
  Description of Artificial Sequence: Synthetic oligonucleotide
gagauuugcaaacucuauc

SEQ ID NO: 2451191 - RNA, 19 nt, Artificial Sequence
  Description of Artificial Sequence: Synthetic oligonucleotide
ucauuauggaugugugaag

SEQ ID NO: 2451192 - RNA, 19 nt, Artificial Sequence
  Description of Artificial Sequence: Synthetic oligonucleotide
uucuacauucuguaucuga

SEQ ID NO: 2451193 - RNA, 19 nt, Artificial Sequence
  Description of Artificial Sequence: Synthetic oligonucleotide
ucugccgucucuaauuuaa

SEQ ID NO: 2451194 - RNA, 19 nt, Artificial Sequence
  Description of Artificial Sequence: Synthetic oligonucleotide
uucucagcuaaaugauggg

SEQ ID NO: 2451195 - RNA, 19 nt, Artificial Sequence
  Description of Artificial Sequence: Synthetic oligonucleotide
uguaucugaauccucucua

SEQ ID NO: 2451196 - RNA, 19 nt, Artificial Sequence
  Description of Artificial Sequence: Synthetic oligonucleotide
ucugguuaguucucuaagu

SEQ ID NO: 2451197 - RNA, 19 nt, Artificial Sequence
  Description of Artificial Sequence: Synthetic oligonucleotide
cuggagucgagcaauguug

SEQ ID NO: 2451198 - RNA, 19 nt, Artificial Sequence
  Description of Artificial Sequence: Synthetic oligonucleotide
aaggcagaaucaucacuag

SEQ ID NO: 2451199 - RNA, 19 nt, Artificial Sequence
  Description of Artificial Sequence: Synthetic oligonucleotide
cuuaaggacuucuggaguc

SEQ ID NO: 2451200 - RNA, 19 nt, Artificial Sequence
  Description of Artificial Sequence: Synthetic oligonucleotide
uuaaaccgaaaguucuucu

SEQ ID NO: 2451201 - RNA, 19 nt, Artificial Sequence
  Description of Artificial Sequence: Synthetic oligonucleotide
aucacuagugcugagauuu

SEQ ID NO: 2451202 - RNA, 19 nt, Artificial Sequence
  Description of Artificial Sequence: Synthetic oligonucleotide
auaucugauuuuccuuuuc

SEQ ID NO: 2451203 - RNA, 19 nt, Artificial Sequence
  Description of Artificial Sequence: Synthetic oligonucleotide
cuugguuagguuacucccc

SEQ ID NO: 2451204 - RNA, 19 nt, Artificial Sequence
  Description of Artificial Sequence: Synthetic oligonucleotide
uuacuccccagcuugcugc

SEQ ID NO: 2451205 - RNA, 19 nt, Artificial Sequence
  Description of Artificial Sequence: Synthetic oligonucleotide
acuacucuaguaaaguucu

SEQ ID NO: 2451206 - RNA, 19 nt, Artificial Sequence
  Description of Artificial Sequence: Synthetic oligonucleotide
ucaugagagguaaaacguc

SEQ ID NO: 2451207 - RNA, 19 nt, Artificial Sequence
  Description of Artificial Sequence: Synthetic oligonucleotide
uuaaggacuucuggagucg

SEQ ID NO: 2451208 - RNA, 19 nt, Artificial Sequence
  Description of Artificial Sequence: Synthetic oligonucleotide
acucuaguaaaguucuggu

SEQ ID NO: 2451209 - RNA, 19 nt, Artificial Sequence
  Description of Artificial Sequence: Synthetic oligonucleotide
aagucuuguucaucaugag

SEQ ID NO: 2451210 - RNA, 19 nt, Artificial Sequence
  Description of Artificial Sequence: Synthetic oligonucleotide
ugugauuugucuccaguuu

SEQ ID NO: 2451211 - RNA, 19 nt, Artificial Sequence
  Description of Artificial Sequence: Synthetic oligonucleotide
ccgucucuaauuuaaaccg

SEQ ID NO: 2451212 - RNA, 19 nt, Artificial Sequence
  Description of Artificial Sequence: Synthetic oligonucleotide
uuuucugccgucucuaauu

SEQ ID NO: 2451213 - RNA, 19 nt, Artificial Sequence
  Description of Artificial Sequence: Synthetic oligonucleotide
guaaggagcucugaaugcg

SEQ ID NO: 2451214 - RNA, 19 nt, Artificial Sequence
  Description of Artificial Sequence: Synthetic oligonucleotide
uaaguagcucauuauggau

SEQ ID NO: 2451215 - RNA, 19 nt, Artificial Sequence
  Description of Artificial Sequence: Synthetic oligonucleotide
gaaaagcugacaucacuga

SEQ ID NO: 2451216 - RNA, 19 nt, Artificial Sequence
  Description of Artificial Sequence: Synthetic oligonucleotide
aucaugagagguaaaacgu

SEQ ID NO: 2451217 - RNA, 19 nt, Artificial Sequence
  Description of Artificial Sequence: Synthetic oligonucleotide
ucuccaguuuauuuaagua

SEQ ID NO: 2451218 - RNA, 19 nt, Artificial Sequence
  Description of Artificial Sequence: Synthetic oligonucleotide
uuuaaaccgaaaguucuuc

SEQ ID NO: 2451219 - RNA, 19 nt, Artificial Sequence
  Description of Artificial Sequence: Synthetic oligonucleotide
aauauucagaagagacuug

SEQ ID NO: 2451220 - RNA, 19 nt, Artificial Sequence
  Description of Artificial Sequence: Synthetic oligonucleotide
auuuguaaggagcucugaa

SEQ ID NO: 2451221 - RNA, 19 nt, Artificial Sequence
  Description of Artificial Sequence: Synthetic oligonucleotide
uugguuagguuacucccca

SEQ ID NO: 2451222 - RNA, 19 nt, Artificial Sequence
  Description of Artificial Sequence: Synthetic oligonucleotide
gaagcguccauacugagau

SEQ ID NO: 2451223 - RNA, 19 nt, Artificial Sequence
  Description of Artificial Sequence: Synthetic oligonucleotide
aucugagagcagcuuugcc

SEQ ID NO: 2451224 - RNA, 19 nt, Artificial Sequence
  Description of Artificial Sequence: Synthetic oligonucleotide
uaaggagcucugaaugcgc

SEQ ID NO: 2451225 - RNA, 19 nt, Artificial Sequence
  Description of Artificial Sequence: Synthetic oligonucleotide
aucaaaagaaggccagccu

SEQ ID NO: 2451226 - RNA, 19 nt, Artificial Sequence
  Description of Artificial Sequence: Synthetic oligonucleotide
ucgagcaaccucagcauca

SEQ ID NO: 2451227 - RNA, 19 nt, Artificial Sequence
  Description of Artificial Sequence: Synthetic oligonucleotide
gaauccucucuaaagcagc

SEQ ID NO: 2451228 - RNA, 19 nt, Artificial Sequence
  Description of Artificial Sequence: Synthetic oligonucleotide
guagcaccuuuucacacag

SEQ ID NO: 2451229 - RNA, 19 nt, Artificial Sequence
  Description of Artificial Sequence: Synthetic oligonucleotide
ugaggguagcaccuuuuca

SEQ ID NO: 2451230 - RNA, 19 nt, Artificial Sequence
  Description of Artificial Sequence: Synthetic oligonucleotide
aaagaaggagaugcuccag

SEQ ID NO: 2451231 - RNA, 19 nt, Artificial Sequence
  Description of Artificial Sequence: Synthetic oligonucleotide
cugguuaguucucuaaguc

SEQ ID NO: 2451232 - RNA, 19 nt, Artificial Sequence
  Description of Artificial Sequence: Synthetic oligonucleotide
agccuuaaggacuucugga

SEQ ID NO: 2451233 - RNA, 19 nt, Artificial Sequence
  Description of Artificial Sequence: Synthetic oligonucleotide
aaggccagccuuaaggacu

SEQ ID NO: 2451234 - RNA, 19 nt, Artificial Sequence
  Description of Artificial Sequence: Synthetic oligonucleotide
ucaaguccgaauucagaaa

SEQ ID NO: 2451235 - RNA, 19 nt, Artificial Sequence
  Description of Artificial Sequence: Synthetic oligonucleotide
ggcagaaucaucacuagug

SEQ ID NO: 2451236 - RNA, 19 nt, Artificial Sequence
  Description of Artificial Sequence: Synthetic oligonucleotide
ugagagguaaaacgucgaa

SEQ ID NO: 2451237 - RNA, 19 nt, Artificial Sequence
  Description of Artificial Sequence: Synthetic oligonucleotide
gauguugcccgucacugga

SEQ ID NO: 2451238 - RNA, 19 nt, Artificial Sequence
  Description of Artificial Sequence: Synthetic oligonucleotide
aaauugggccacaaaggca

SEQ ID NO: 2451239 - RNA, 19 nt, Artificial Sequence
  Description of Artificial Sequence: Synthetic oligonucleotide
ugcccuagugucacuaugu

SEQ ID NO: 2451240 - RNA, 19 nt, Artificial Sequence
  Description of Artificial Sequence: Synthetic oligonucleotide
gcugaucauaaauauucag

SEQ ID NO: 2451241 - RNA, 19 nt, Artificial Sequence
  Description of Artificial Sequence: Synthetic oligonucleotide
cuugcugcgggaagcgucc

SEQ ID NO: 2451242 - RNA, 19 nt, Artificial Sequence
  Description of Artificial Sequence: Synthetic oligonucleotide
caaacucuaucauuucuca

SEQ ID NO: 2451243 - RNA, 19 nt, Artificial Sequence
  Description of Artificial Sequence: Synthetic oligonucleotide
guuucuacauucuguaucu

SEQ ID NO: 2451244 - RNA, 19 nt, Artificial Sequence
  Description of Artificial Sequence: Synthetic oligonucleotide
ugucacuauguggagggcc

SEQ ID NO: 2451245 - RNA, 19 nt, Artificial Sequence
  Description of Artificial Sequence: Synthetic oligonucleotide
cuuugacaagcugauggcc

SEQ ID NO: 2451246 - RNA, 19 nt, Artificial Sequence
  Description of Artificial Sequence: Synthetic oligonucleotide
cucagcuaaaugaugggga

SEQ ID NO: 2451247 - RNA, 19 nt, Artificial Sequence
  Description of Artificial Sequence: Synthetic oligonucleotide
gccgucucuaauuuaaacc

SEQ ID NO: 2451248 - RNA, 19 nt, Artificial Sequence
  Description of Artificial Sequence: Synthetic oligonucleotide
agcugcugaucauaaauau

SEQ ID NO: 2451249 - RNA, 19 nt, Artificial Sequence
  Description of Artificial Sequence: Synthetic oligonucleotide
gucacuggaacaccagagc

SEQ ID NO: 2451250 - RNA, 19 nt, Artificial Sequence
  Description of Artificial Sequence: Synthetic oligonucleotide
uucccaauaucugauuuuc

SEQ ID NO: 2451251 - RNA, 19 nt, Artificial Sequence
  Description of Artificial Sequence: Synthetic oligonucleotide
cuggcguaguguuauuccc

SEQ ID NO: 2451252 - RNA, 19 nt, Artificial Sequence
  Description of Artificial Sequence: Synthetic oligonucleotide
cuaauuuaaaccgaaaguu

SEQ ID NO: 2451253 - RNA, 19 nt, Artificial Sequence
  Description of Artificial Sequence: Synthetic oligonucleotide
agucgagcaauguuggcau

SEQ ID NO: 2451254 - RNA, 19 nt, Artificial Sequence
  Description of Artificial Sequence: Synthetic oligonucleotide
cagagcuuugacaagcuga

SEQ ID NO: 2451255 - RNA, 19 nt, Artificial Sequence
  Description of Artificial Sequence: Synthetic oligonucleotide
ccauacugagaucugagag

SEQ ID NO: 2451256 - RNA, 19 nt, Artificial Sequence
  Description of Artificial Sequence: Synthetic oligonucleotide
agcucugaaugcgcaaagc

SEQ ID NO: 2451257 - RNA, 19 nt, Artificial Sequence
  Description of Artificial Sequence: Synthetic oligonucleotide
ccuagugucacuaugugga

SEQ ID NO: 2451258 - RNA, 19 nt, Artificial Sequence
  Description of Artificial Sequence: Synthetic oligonucleotide
uagcucauuauggaugugu

SEQ ID NO: 2451259 - RNA, 19 nt, Artificial Sequence
  Description of Artificial Sequence: Synthetic oligonucleotide
ucuggagucgagcaauguu

SEQ ID NO: 2451260 - RNA, 19 nt, Artificial Sequence
  Description of Artificial Sequence: Synthetic oligonucleotide
agcuaaaugauggggaaaa

SEQ ID NO: 2451261 - RNA, 19 nt, Artificial Sequence
  Description of Artificial Sequence: Synthetic oligonucleotide
cucauuauggaugugugaa

SEQ ID NO: 2451262 - RNA, 19 nt, Artificial Sequence
  Description of Artificial Sequence: Synthetic oligonucleotide
auggggaaaauugggccac

SEQ ID NO: 2451263 - RNA, 19 nt, Artificial Sequence
  Description of Artificial Sequence: Synthetic oligonucleotide
ugacaucaaguccgaauuc

SEQ ID NO: 2451264 - RNA, 19 nt, Artificial Sequence
  Description of Artificial Sequence: Synthetic oligonucleotide
agcguccauacugagaucu

SEQ ID NO: 2451265 - RNA, 19 nt, Artificial Sequence
  Description of Artificial Sequence: Synthetic oligonucleotide
ucgagcaauguuggcaucc

SEQ ID NO: 2451266 - RNA, 19 nt, Artificial Sequence
  Description of Artificial Sequence: Synthetic oligonucleotide
auccaaugcugccaggcca

SEQ ID NO: 2451267 - RNA, 19 nt, Artificial Sequence
  Description of Artificial Sequence: Synthetic oligonucleotide
uguggagggcccugugagg

SEQ ID NO: 2451268 - RNA, 19 nt, Artificial Sequence
  Description of Artificial Sequence: Synthetic oligonucleotide
uggcguaguguuauuccca

SEQ ID NO: 2451269 - RNA, 19 nt, Artificial Sequence
  Description of Artificial Sequence: Synthetic oligonucleotide
cagcagaagccauuccagg

SEQ ID NO: 2451270 - RNA, 19 nt, Artificial Sequence
  Description of Artificial Sequence: Synthetic oligonucleotide
auacuacucuaguaaaguu

SEQ ID NO: 2451271 - RNA, 19 nt, Artificial Sequence
  Description of Artificial Sequence: Synthetic oligonucleotide
gaauucagaaaagcugaca

SEQ ID NO: 2451272 - RNA, 19 nt, Artificial Sequence
  Description of Artificial Sequence: Synthetic oligonucleotide
aaguccgaauucagaaaag

SEQ ID NO: 2451273 - RNA, 19 nt, Artificial Sequence
  Description of Artificial Sequence: Synthetic oligonucleotide
ugccgucucuaauuuaaac

SEQ ID NO: 2451274 - RNA, 19 nt, Artificial Sequence
  Description of Artificial Sequence: Synthetic oligonucleotide
cauuauggaugugugaaga

SEQ ID NO: 2451275 - RNA, 19 nt, Artificial Sequence
  Description of Artificial Sequence: Synthetic oligonucleotide
caaguccgaauucagaaaa

SEQ ID NO: 2451276 - RNA, 19 nt, Artificial Sequence
  Description of Artificial Sequence: Synthetic oligonucleotide
ugcugagauuugcaaacuc

SEQ ID NO: 2451277 - RNA, 19 nt, Artificial Sequence
  Description of Artificial Sequence: Synthetic oligonucleotide
gaaggccagccuuaaggac

SEQ ID NO: 2451278 - RNA, 19 nt, Artificial Sequence
  Description of Artificial Sequence: Synthetic oligonucleotide
cucuaagucgagcaaccuc

SEQ ID NO: 2451279 - RNA, 19 nt, Artificial Sequence
  Description of Artificial Sequence: Synthetic oligonucleotide
agaagagacuugguuaggu

SEQ ID NO: 2451280 - RNA, 19 nt, Artificial Sequence
  Description of Artificial Sequence: Synthetic oligonucleotide
aaugcgcaaagcugugauu

SEQ ID NO: 2451281 - RNA, 19 nt, Artificial Sequence
  Description of Artificial Sequence: Synthetic oligonucleotide
gagucgagcaauguuggca

SEQ ID NO: 2451282 - RNA, 19 nt, Artificial Sequence
  Description of Artificial Sequence: Synthetic oligonucleotide
uuucugccgucucuaauuu

SEQ ID NO: 2451283 - RNA, 19 nt, Artificial Sequence
  Description of Artificial Sequence: Synthetic oligonucleotide
gccuuaaggacuucuggag

SEQ ID NO: 2451284 - RNA, 19 nt, Artificial Sequence
  Description of Artificial Sequence: Synthetic oligonucleotide
aguucucuaagucgagcaa

SEQ ID NO: 2451285 - RNA, 19 nt, Artificial Sequence
  Description of Artificial Sequence: Synthetic oligonucleotide
guguuauucccaauaucug

SEQ ID NO: 2451286 - RNA, 19 nt, Artificial Sequence
  Description of Artificial Sequence: Synthetic oligonucleotide
aggguagcaccuuuucaca

SEQ ID NO: 2451287 - RNA, 19 nt, Artificial Sequence
  Description of Artificial Sequence: Synthetic oligonucleotide
ugauggcccaugaugguuu

SEQ ID NO: 2451288 - RNA, 19 nt, Artificial Sequence
  Description of Artificial Sequence: Synthetic oligonucleotide
uguugcccgucacuggaac

SEQ ID NO: 2451289 - RNA, 19 nt, Artificial Sequence
  Description of Artificial Sequence: Synthetic oligonucleotide
agccauuccaggugcggag

SEQ ID NO: 2451290 - RNA, 19 nt, Artificial Sequence
  Description of Artificial Sequence: Synthetic oligonucleotide
guucucuaagucgagcaac

SEQ ID NO: 2451291 - RNA, 19 nt, Artificial Sequence
  Description of Artificial Sequence: Synthetic oligonucleotide
cauccaaugcugccaggcc

SEQ ID NO: 2451292 - RNA, 19 nt, Artificial Sequence
  Description of Artificial Sequence: Synthetic oligonucleotide
aucauuucucaaugacagu

SEQ ID NO: 2451293 - RNA, 19 nt, Artificial Sequence
  Description of Artificial Sequence: Synthetic oligonucleotide
aguaaaguucugguuaguu

SEQ ID NO: 2451294 - RNA, 19 nt, Artificial Sequence
  Description of Artificial Sequence: Synthetic oligonucleotide
uggcuuccucauuuguaag

SEQ ID NO: 2451295 - RNA, 19 nt, Artificial Sequence
  Description of Artificial Sequence: Synthetic oligonucleotide
uccaaugcugccaggccau

SEQ ID NO: 2451296 - RNA, 19 nt, Artificial Sequence
  Description of Artificial Sequence: Synthetic oligonucleotide
gucacuauguggagggccc

SEQ ID NO: 2451297 - RNA, 19 nt, Artificial Sequence
  Description of Artificial Sequence: Synthetic oligonucleotide
aagcguccauacugagauc

SEQ ID NO: 2451298 - RNA, 19 nt, Artificial Sequence
  Description of Artificial Sequence: Synthetic oligonucleotide
agaucugagagcagcuuug

SEQ ID NO: 2451299 - RNA, 19 nt, Artificial Sequence
  Description of Artificial Sequence: Synthetic oligonucleotide
uugccauacuacucuagua

SEQ ID NO: 2451300 - RNA, 19 nt, Artificial Sequence
  Description of Artificial Sequence: Synthetic oligonucleotide
ucacuagugcugagauuug

SEQ ID NO: 2451301 - RNA, 19 nt, Artificial Sequence
  Description of Artificial Sequence: Synthetic oligonucleotide
uuauucccaauaucugauu

SEQ ID NO: 2451302 - RNA, 19 nt, Artificial Sequence
  Description of Artificial Sequence: Synthetic oligonucleotide
agucgagcaaccucagcau

SEQ ID NO: 2451303 - RNA, 19 nt, Artificial Sequence
  Description of Artificial Sequence: Synthetic oligonucleotide
gaucugagagcagcuuugc

SEQ ID NO: 2451304 - RNA, 19 nt, Artificial Sequence
  Description of Artificial Sequence: Synthetic oligonucleotide
gcuuugacaagcugauggc

SEQ ID NO: 2451305 - RNA, 19 nt, Artificial Sequence
  Description of Artificial Sequence: Synthetic oligonucleotide
ugcgcaaagcugugauuug

SEQ ID NO: 2451306 - RNA, 19 nt, Artificial Sequence
  Description of Artificial Sequence: Synthetic oligonucleotide
guuacuccccagcuugcug

SEQ ID NO: 2451307 - RNA, 19 nt, Artificial Sequence
  Description of Artificial Sequence: Synthetic oligonucleotide
uacuccccagcuugcugcg

SEQ ID NO: 2451308 - RNA, 19 nt, Artificial Sequence
  Description of Artificial Sequence: Synthetic oligonucleotide
gagggguuggguccugaug

SEQ ID NO: 2451309 - RNA, 19 nt, Artificial Sequence
  Description of Artificial Sequence: Synthetic oligonucleotide
aagcugcugaucauaaaua

SEQ ID NO: 2451310 - RNA, 19 nt, Artificial Sequence
  Description of Artificial Sequence: Synthetic oligonucleotide
gagagcagcuuugccauac

SEQ ID NO: 2451311 - RNA, 19 nt, Artificial Sequence
  Description of Artificial Sequence: Synthetic oligonucleotide
augcgcaaagcugugauuu

SEQ ID NO: 2451312 - RNA, 19 nt, Artificial Sequence
  Description of Artificial Sequence: Synthetic oligonucleotide
aggcagaaucaucacuagu

SEQ ID NO: 2451313 - RNA, 19 nt, Artificial Sequence
  Description of Artificial Sequence: Synthetic oligonucleotide
gugauuugucuccaguuua

SEQ ID NO: 2451314 - RNA, 19 nt, Artificial Sequence
  Description of Artificial Sequence: Synthetic oligonucleotide
ccgaauucagaaaagcuga

SEQ ID NO: 2451315 - RNA, 19 nt, Artificial Sequence
  Description of Artificial Sequence: Synthetic oligonucleotide
agcucauuauggaugugug

SEQ ID NO: 2451316 - RNA, 19 nt, Artificial Sequence
  Description of Artificial Sequence: Synthetic oligonucleotide
acaagcugauggcccauga

SEQ ID NO: 2451317 - RNA, 19 nt, Artificial Sequence
  Description of Artificial Sequence: Synthetic oligonucleotide
ccauacuacucuaguaaag

SEQ ID NO: 2451318 - RNA, 19 nt, Artificial Sequence
  Description of Artificial Sequence: Synthetic oligonucleotide
caucaaguccgaauucaga

SEQ ID NO: 2451319 - RNA, 19 nt, Artificial Sequence
  Description of Artificial Sequence: Synthetic oligonucleotide
gcgggaagcguccauacug

SEQ ID NO: 2451320 - RNA, 19 nt, Artificial Sequence
  Description of Artificial Sequence: Synthetic oligonucleotide
aagccauuccaggugcgga

SEQ ID NO: 2451321 - RNA, 19 nt, Artificial Sequence
  Description of Artificial Sequence: Synthetic oligonucleotide
ugugaggguagcaccuuuu

SEQ ID NO: 2451322 - RNA, 19 nt, Artificial Sequence
  Description of Artificial Sequence: Synthetic oligonucleotide
ugaaugcgcaaagcuguga

SEQ ID NO: 2451323 - RNA, 19 nt, Artificial Sequence
  Description of Artificial Sequence: Synthetic oligonucleotide
acaccagagcuuugacaag

SEQ ID NO: 2451324 - RNA, 19 nt, Artificial Sequence
  Description of Artificial Sequence: Synthetic oligonucleotide
aucacgcuggcguaguguu

SEQ ID NO: 2451325 - RNA, 19 nt, Artificial Sequence
  Description of Artificial Sequence: Synthetic oligonucleotide
cugaaugcgcaaagcugug

SEQ ID NO: 2451326 - RNA, 19 nt, Artificial Sequence
  Description of Artificial Sequence: Synthetic oligonucleotide
ugguuucuacauucuguau

SEQ ID NO: 2451327 - RNA, 19 nt, Artificial Sequence
  Description of Artificial Sequence: Synthetic oligonucleotide
acuagugcugagauuugca

SEQ ID NO: 2451328 - RNA, 19 nt, Artificial Sequence
  Description of Artificial Sequence: Synthetic oligonucleotide
aaggagcucugaaugcgca

SEQ ID NO: 2451329 - RNA, 19 nt, Artificial Sequence
  Description of Artificial Sequence: Synthetic oligonucleotide
cucagcaucacgcuggcgu

SEQ ID NO: 2451330 - RNA, 19 nt, Artificial Sequence
  Description of Artificial Sequence: Synthetic oligonucleotide
uugcccgucacuggaacac

SEQ ID NO: 2451331 - RNA, 19 nt, Artificial Sequence
  Description of Artificial Sequence: Synthetic oligonucleotide
gcuggcguaguguuauucc

SEQ ID NO: 2451332 - RNA, 19 nt, Artificial Sequence
  Description of Artificial Sequence: Synthetic oligonucleotide
gaugcuccagucugacauc

SEQ ID NO: 2451333 - RNA, 19 nt, Artificial Sequence
  Description of Artificial Sequence: Synthetic oligonucleotide
uuucuacauucuguaucug

SEQ ID NO: 2451334 - RNA, 19 nt, Artificial Sequence
  Description of Artificial Sequence: Synthetic oligonucleotide
cauacuacucuaguaaagu

SEQ ID NO: 2451335 - RNA, 19 nt, Artificial Sequence
  Description of Artificial Sequence: Synthetic oligonucleotide
guucugguuaguucucuaa

SEQ ID NO: 2451336 - RNA, 19 nt, Artificial Sequence
  Description of Artificial Sequence: Synthetic oligonucleotide
gagcaaccucagcaucacg

SEQ ID NO: 2451337 - RNA, 19 nt, Artificial Sequence
  Description of Artificial Sequence: Synthetic oligonucleotide
cacuagugcugagauuugc

SEQ ID NO: 2451338 - RNA, 19 nt, Artificial Sequence
  Description of Artificial Sequence: Synthetic oligonucleotide
ugguuagguuacuccccag

SEQ ID NO: 2451339 - RNA, 19 nt, Artificial Sequence
  Description of Artificial Sequence: Synthetic oligonucleotide
cucuaucauuucucaauga

SEQ ID NO: 2451340 - RNA, 19 nt, Artificial Sequence
  Description of Artificial Sequence: Synthetic oligonucleotide
ccagucugacaucaagucc

SEQ ID NO: 2451341 - RNA, 19 nt, Artificial Sequence
  Description of Artificial Sequence: Synthetic oligonucleotide
uuggguccugaugaagcug

SEQ ID NO: 2451342 - RNA, 19 nt, Artificial Sequence
  Description of Artificial Sequence: Synthetic oligonucleotide
uaaggacuucuggagucga

SEQ ID NO: 2451343 - RNA, 19 nt, Artificial Sequence
  Description of Artificial Sequence: Synthetic oligonucleotide
gaaggagaugcuccagucu

SEQ ID NO: 2451344 - RNA, 19 nt, Artificial Sequence
  Description of Artificial Sequence: Synthetic oligonucleotide
cuucuggagucgagcaaug

SEQ ID NO: 2451345 - RNA, 19 nt, Artificial Sequence
  Description of Artificial Sequence: Synthetic oligonucleotide
gaaugcgcaaagcugugau

SEQ ID NO: 2451346 - RNA, 19 nt, Artificial Sequence
  Description of Artificial Sequence: Synthetic oligonucleotide
ugcggagcgccccacccac

SEQ ID NO: 2451347 - RNA, 19 nt, Artificial Sequence
  Description of Artificial Sequence: Synthetic oligonucleotide
guaguguuauucccaauau

SEQ ID NO: 2451348 - RNA, 19 nt, Artificial Sequence
  Description of Artificial Sequence: Synthetic oligonucleotide
cuacucuaguaaaguucug

SEQ ID NO: 2451349 - RNA, 19 nt, Artificial Sequence
  Description of Artificial Sequence: Synthetic oligonucleotide
cccuagugucacuaugugg

SEQ ID NO: 2451350 - RNA, 19 nt, Artificial Sequence
  Description of Artificial Sequence: Synthetic oligonucleotide
acugacgauguugcccguc

SEQ ID NO: 2451351 - RNA, 19 nt, Artificial Sequence
  Description of Artificial Sequence: Synthetic oligonucleotide
cagaagagacuugguuagg

SEQ ID NO: 2451352 - RNA, 19 nt, Artificial Sequence
  Description of Artificial Sequence: Synthetic oligonucleotide
agguuacuccccagcuugc

SEQ ID NO: 2451353 - RNA, 19 nt, Artificial Sequence
  Description of Artificial Sequence: Synthetic oligonucleotide
agcugugauuugucuccag

SEQ ID NO: 2451354 - RNA, 19 nt, Artificial Sequence
  Description of Artificial Sequence: Synthetic oligonucleotide
ugcgggaagcguccauacu

SEQ ID NO: 2451355 - RNA, 19 nt, Artificial Sequence
  Description of Artificial Sequence: Synthetic oligonucleotide
aagcugugauuugucucca

SEQ ID NO: 2451356 - RNA, 19 nt, Artificial Sequence
  Description of Artificial Sequence: Synthetic oligonucleotide
gugaggguagcaccuuuuc

SEQ ID NO: 2451357 - RNA, 19 nt, Artificial Sequence
  Description of Artificial Sequence: Synthetic oligonucleotide
cucauuuguaaggagcucu

SEQ ID NO: 2451358 - RNA, 19 nt, Artificial Sequence
  Description of Artificial Sequence: Synthetic oligonucleotide
augaugguuucuacauucu

SEQ ID NO: 2451359 - RNA, 19 nt, Artificial Sequence
  Description of Artificial Sequence: Synthetic oligonucleotide
uaguaaaguucugguuagu

SEQ ID NO: 2451360 - RNA, 19 nt, Artificial Sequence
  Description of Artificial Sequence: Synthetic oligonucleotide
cugcccuagugucacuaug

SEQ ID NO: 2451361 - RNA, 19 nt, Artificial Sequence
  Description of Artificial Sequence: Synthetic oligonucleotide
cugcgggaagcguccauac

SEQ ID NO: 2451362 - RNA, 19 nt, Artificial Sequence
  Description of Artificial Sequence: Synthetic oligonucleotide
gacuucuggagucgagcaa

SEQ ID NO: 2451363 - RNA, 19 nt, Artificial Sequence
  Description of Artificial Sequence: Synthetic oligonucleotide
auccucucuaaagcagcag

SEQ ID NO: 2451364 - RNA, 19 nt, Artificial Sequence
  Description of Artificial Sequence: Synthetic oligonucleotide
cauucuguaucugaauccu

SEQ ID NO: 2451365 - RNA, 19 nt, Artificial Sequence
  Description of Artificial Sequence: Synthetic oligonucleotide
aggugcggagcgccccacc

SEQ ID NO: 2451366 - RNA, 19 nt, Artificial Sequence
  Description of Artificial Sequence: Synthetic oligonucleotide
gagaucugagagcagcuuu

SEQ ID NO: 2451367 - RNA, 19 nt, Artificial Sequence
  Description of Artificial Sequence: Synthetic oligonucleotide
uucuggagucgagcaaugu

SEQ ID NO: 2451368 - RNA, 19 nt, Artificial Sequence
  Description of Artificial Sequence: Synthetic oligonucleotide
cagaaaagcugacaucacu

SEQ ID NO: 2451369 - RNA, 19 nt, Artificial Sequence
  Description of Artificial Sequence: Synthetic oligonucleotide
gauggcccaugaugguuuc

SEQ ID NO: 2451370 - RNA, 19 nt, Artificial Sequence
  Description of Artificial Sequence: Synthetic oligonucleotide
gaagagacuugguuagguu

SEQ ID NO: 2451371 - RNA, 19 nt, Artificial Sequence
  Description of Artificial Sequence: Synthetic oligonucleotide
gacaagcugauggcccaug

SEQ ID NO: 2451372 - RNA, 19 nt, Artificial Sequence
  Description of Artificial Sequence: Synthetic oligonucleotide
cugagagcagcuuugccau

SEQ ID NO: 2451373 - RNA, 19 nt, Artificial Sequence
  Description of Artificial Sequence: Synthetic oligonucleotide
ggguagcaccuuuucacac

SEQ ID NO: 2451374 - RNA, 19 nt, Artificial Sequence
  Description of Artificial Sequence: Synthetic oligonucleotide
gagaugcuccagucugaca

SEQ ID NO: 2451375 - RNA, 19 nt, Artificial Sequence
  Description of Artificial Sequence: Synthetic oligonucleotide
gacgauguugcccgucacu

SEQ ID NO: 2451376 - RNA, 19 nt, Artificial Sequence
  Description of Artificial Sequence: Synthetic oligonucleotide
cuaaaugauggggaaaauu

SEQ ID NO: 2451377 - RNA, 19 nt, Artificial Sequence
  Description of Artificial Sequence: Synthetic oligonucleotide
aggagcucugaaugcgcaa

SEQ ID NO: 2451378 - RNA, 19 nt, Artificial Sequence
  Description of Artificial Sequence: Synthetic oligonucleotide
acugcccuagugucacuau

SEQ ID NO: 2451379 - RNA, 19 nt, Artificial Sequence
  Description of Artificial Sequence: Synthetic oligonucleotide
guugcccgucacuggaaca

SEQ ID NO: 2451380 - RNA, 19 nt, Artificial Sequence
  Description of Artificial Sequence: Synthetic oligonucleotide
gccauacuacucuaguaaa

SEQ ID NO: 2451381 - RNA, 19 nt, Artificial Sequence
  Description of Artificial Sequence: Synthetic oligonucleotide
uccaggugcggagcgcccc

SEQ ID NO: 2451382 - RNA, 19 nt, Artificial Sequence
  Description of Artificial Sequence: Synthetic oligonucleotide
cauuccaggugcggagcgc

SEQ ID NO: 2451383 - RNA, 19 nt, Artificial Sequence
  Description of Artificial Sequence: Synthetic oligonucleotide
gcucauuauggauguguga

SEQ ID NO: 2451384 - RNA, 19 nt, Artificial Sequence
  Description of Artificial Sequence: Synthetic oligonucleotide
cuguaucugaauccucucu

SEQ ID NO: 2451385 - RNA, 19 nt, Artificial Sequence
  Description of Artificial Sequence: Synthetic oligonucleotide
uucugccgucucuaauuua

SEQ ID NO: 2451386 - RNA, 19 nt, Artificial Sequence
  Description of Artificial Sequence: Synthetic oligonucleotide
cauuuguaaggagcucuga

SEQ ID NO: 2451387 - RNA, 19 nt, Artificial Sequence
  Description of Artificial Sequence: Synthetic oligonucleotide
ugggccacaaaggcagaau

SEQ ID NO: 2451388 - RNA, 19 nt, Artificial Sequence
  Description of Artificial Sequence: Synthetic oligonucleotide
ucacuauguggagggcccu

SEQ ID NO: 2451389 - RNA, 19 nt, Artificial Sequence
  Description of Artificial Sequence: Synthetic oligonucleotide
ggagucgagcaauguuggc

SEQ ID NO: 2451390 - RNA, 19 nt, Artificial Sequence
  Description of Artificial Sequence: Synthetic oligonucleotide
ccagccuuaaggacuucug

SEQ ID NO: 2451391 - RNA, 19 nt, Artificial Sequence
  Description of Artificial Sequence: Synthetic oligonucleotide
gggaagcguccauacugag

SEQ ID NO: 2451392 - RNA, 19 nt, Artificial Sequence
  Description of Artificial Sequence: Synthetic oligonucleotide
ggugcggagcgccccaccc

SEQ ID NO: 2451393 - RNA, 19 nt, Artificial Sequence
  Description of Artificial Sequence: Synthetic oligonucleotide
ugcccgucacuggaacacc

SEQ ID NO: 2451394 - RNA, 19 nt, Artificial Sequence
  Description of Artificial Sequence: Synthetic oligonucleotide
agagggguuggguccugau

SEQ ID NO: 2451395 - RNA, 19 nt, Artificial Sequence
  Description of Artificial Sequence: Synthetic oligonucleotide
aagagggguuggguccuga

SEQ ID NO: 2451396 - RNA, 19 nt, Artificial Sequence
  Description of Artificial Sequence: Synthetic oligonucleotide
uagcaccuuuucacacagu

SEQ ID NO: 2451397 - RNA, 19 nt, Artificial Sequence
  Description of Artificial Sequence: Synthetic oligonucleotide
agucugacaucaaguccga

SEQ ID NO: 2451398 - RNA, 19 nt, Artificial Sequence
  Description of Artificial Sequence: Synthetic oligonucleotide
gagcaauguuggcauccaa

SEQ ID NO: 2451399 - RNA, 19 nt, Artificial Sequence
  Description of Artificial Sequence: Synthetic oligonucleotide
gcccuagugucacuaugug

SEQ ID NO: 2451400 - RNA, 19 nt, Artificial Sequence
  Description of Artificial Sequence: Synthetic oligonucleotide
cugagaucugagagcagcu

SEQ ID NO: 2451401 - RNA, 19 nt, Artificial Sequence
  Description of Artificial Sequence: Synthetic oligonucleotide
ggcguaguguuauucccaa

SEQ ID NO: 2451402 - RNA, 19 nt, Artificial Sequence
  Description of Artificial Sequence: Synthetic oligonucleotide
ggagaugcuccagucugac

SEQ ID NO: 2451403 - RNA, 19 nt, Artificial Sequence
  Description of Artificial Sequence: Synthetic oligonucleotide
uggagggcccugugagggu

SEQ ID NO: 2451404 - RNA, 19 nt, Artificial Sequence
  Description of Artificial Sequence: Synthetic oligonucleotide
cacuauguggagggcccug

SEQ ID NO: 2451405 - RNA, 19 nt, Artificial Sequence
  Description of Artificial Sequence: Synthetic oligonucleotide
ggccacaaaggcagaauca

SEQ ID NO: 2451406 - RNA, 19 nt, Artificial Sequence
  Description of Artificial Sequence: Synthetic oligonucleotide
gggaaaauugggccacaaa

SEQ ID NO: 2451407 - RNA, 19 nt, Artificial Sequence
  Description of Artificial Sequence: Synthetic oligonucleotide
cguaguguuauucccaaua

SEQ ID NO: 2451408 - RNA, 19 nt, Artificial Sequence
  Description of Artificial Sequence: Synthetic oligonucleotide
cagcaucacgcuggcguag

SEQ ID NO: 2451409 - RNA, 19 nt, Artificial Sequence
  Description of Artificial Sequence: Synthetic oligonucleotide
ggaagcguccauacugaga

SEQ ID NO: 2451410 - RNA, 19 nt, Artificial Sequence
  Description of Artificial Sequence: Synthetic oligonucleotide
gugucacuauguggagggc

SEQ ID NO: 2451411 - RNA, 19 nt, Artificial Sequence
  Description of Artificial Sequence: Synthetic oligonucleotide
ugcugcgggaagcguccau

SEQ ID NO: 2451412 - RNA, 19 nt, Artificial Sequence
  Description of Artificial Sequence: Synthetic oligonucleotide
gcugugauuugucuccagu

SEQ ID NO: 2451413 - RNA, 19 nt, Artificial Sequence
  Description of Artificial Sequence: Synthetic oligonucleotide
ggcccaugaugguuucuac

SEQ ID NO: 2451414 - RNA, 19 nt, Artificial Sequence
  Description of Artificial Sequence: Synthetic oligonucleotide
ggagcucugaaugcgcaaa

SEQ ID NO: 2451415 - RNA, 19 nt, Artificial Sequence
  Description of Artificial Sequence: Synthetic oligonucleotide
cgauguugcccgucacugg

SEQ ID NO: 2451416 - RNA, 19 nt, Artificial Sequence
  Description of Artificial Sequence: Synthetic oligonucleotide
ggguuggguccugaugaag

SEQ ID NO: 2451417 - RNA, 19 nt, Artificial Sequence
  Description of Artificial Sequence: Synthetic oligonucleotide
gauuugucuccaguuuauu

SEQ ID NO: 2451418 - RNA, 19 nt, Artificial Sequence
  Description of Artificial Sequence: Synthetic oligonucleotide
gguccugaugaagcugcug

SEQ ID NO: 2451419 - RNA, 19 nt, Artificial Sequence
  Description of Artificial Sequence: Synthetic oligonucleotide
gcaaccucagcaucacgcu

SEQ ID NO: 2451420 - RNA, 19 nt, Artificial Sequence
  Description of Artificial Sequence: Synthetic oligonucleotide
cugccgucucuaauuuaaa

SEQ ID NO: 2451421 - RNA, 19 nt, Artificial Sequence
  Description of Artificial Sequence: Synthetic oligonucleotide
auugggccacaaaggcaga

SEQ ID NO: 2451422 - RNA, 19 nt, Artificial Sequence
  Description of Artificial Sequence: Synthetic oligonucleotide
gagacuugguuagguuacu

SEQ ID NO: 2451423 - RNA, 19 nt, Artificial Sequence
  Description of Artificial Sequence: Synthetic oligonucleotide
gccauuccaggugcggagc

SEQ ID NO: 2451424 - RNA, 19 nt, Artificial Sequence
  Description of Artificial Sequence: Synthetic oligonucleotide
cccgucacuggaacaccag

SEQ ID NO: 2451425 - RNA, 19 nt, Artificial Sequence
  Description of Artificial Sequence: Synthetic oligonucleotide
cgucucuaauuuaaaccga

SEQ ID NO: 2451426 - RNA, 19 nt, Artificial Sequence
  Description of Artificial Sequence: Synthetic oligonucleotide
ccuuaaggacuucuggagu

SEQ ID NO: 2451427 - RNA, 19 nt, Artificial Sequence
  Description of Artificial Sequence: Synthetic oligonucleotide
gcuuugccauacuacucua

SEQ ID NO: 2451428 - RNA, 19 nt, Artificial Sequence
  Description of Artificial Sequence: Synthetic oligonucleotide
uugcugcgggaagcgucca

SEQ ID NO: 2451429 - RNA, 19 nt, Artificial Sequence
  Description of Artificial Sequence: Synthetic oligonucleotide
auggcccaugaugguuucu

SEQ ID NO: 2451430 - RNA, 19 nt, Artificial Sequence
  Description of Artificial Sequence: Synthetic oligonucleotide
gccauuucugaagucuugu

SEQ ID NO: 2451431 - RNA, 19 nt, Artificial Sequence
  Description of Artificial Sequence: Synthetic oligonucleotide
gugcugagauuugcaaacu

SEQ ID NO: 2451432 - RNA, 19 nt, Artificial Sequence
  Description of Artificial Sequence: Synthetic oligonucleotide
caagcugauggcccaugau

SEQ ID NO: 2451433 - RNA, 19 nt, Artificial Sequence
  Description of Artificial Sequence: Synthetic oligonucleotide
auguugcccgucacuggaa

SEQ ID NO: 2451434 - RNA, 19 nt, Artificial Sequence
  Description of Artificial Sequence: Synthetic oligonucleotide
ggagcgccccacccacugc

SEQ ID NO: 2451435 - RNA, 19 nt, Artificial Sequence
  Description of Artificial Sequence: Synthetic oligonucleotide
ggcucuguggcuuccucau

SEQ ID NO: 2451436 - RNA, 19 nt, Artificial Sequence
  Description of Artificial Sequence: Synthetic oligonucleotide
ggaugugugaagagggguu

SEQ ID NO: 2451437 - RNA, 19 nt, Artificial Sequence
  Description of Artificial Sequence: Synthetic oligonucleotide
caucacgcuggcguagugu

SEQ ID NO: 2451438 - RNA, 19 nt, Artificial Sequence
  Description of Artificial Sequence: Synthetic oligonucleotide
cacgcuggcguaguguuau

SEQ ID NO: 2451439 - RNA, 19 nt, Artificial Sequence
  Description of Artificial Sequence: Synthetic oligonucleotide
cacugcccuagugucacua

SEQ ID NO: 2451440 - RNA, 19 nt, Artificial Sequence
  Description of Artificial Sequence: Synthetic oligonucleotide
gcguccauacugagaucug

SEQ ID NO: 2451441 - RNA, 19 nt, Artificial Sequence
  Description of Artificial Sequence: Synthetic oligonucleotide
gggguuggguccugaugaa

SEQ ID NO: 2451442 - RNA, 19 nt, Artificial Sequence
  Description of Artificial Sequence: Synthetic oligonucleotide
cgggaagcguccauacuga

SEQ ID NO: 2451443 - RNA, 19 nt, Artificial Sequence
  Description of Artificial Sequence: Synthetic oligonucleotide
gcugcugaucauaaauauu

SEQ ID NO: 2451444 - RNA, 19 nt, Artificial Sequence
  Description of Artificial Sequence: Synthetic oligonucleotide
ccuuuucugccgucucuaa

SEQ ID NO: 2451445 - RNA, 19 nt, Artificial Sequence
  Description of Artificial Sequence: Synthetic oligonucleotide
acgcuggcguaguguuauu

SEQ ID NO: 2451446 - RNA, 19 nt, Artificial Sequence
  Description of Artificial Sequence: Synthetic oligonucleotide
caggugcggagcgccccac

SEQ ID NO: 2451447 - RNA, 19 nt, Artificial Sequence
  Description of Artificial Sequence: Synthetic oligonucleotide
gguuacuccccagcuugcu

SEQ ID NO: 2451448 - RNA, 19 nt, Artificial Sequence
  Description of Artificial Sequence: Synthetic oligonucleotide
gcgcaaagcugugauuugu

SEQ ID NO: 2451449 - RNA, 19 nt, Artificial Sequence
  Description of Artificial Sequence: Synthetic oligonucleotide
gcuaaaugauggggaaaau

SEQ ID NO: 2451450 - RNA, 19 nt, Artificial Sequence
  Description of Artificial Sequence: Synthetic oligonucleotide
gcugcgggaagcguccaua

SEQ ID NO: 2451451 - RNA, 19 nt, Artificial Sequence
  Description of Artificial Sequence: Synthetic oligonucleotide
ggagggcccugugagggua

SEQ ID NO: 2451452 - RNA, 19 nt, Artificial Sequence
  Description of Artificial Sequence: Synthetic oligonucleotide
cggagcgccccacccacug

SEQ ID NO: 2451453 - RNA, 19 nt, Artificial Sequence
  Description of Artificial Sequence: Synthetic oligonucleotide
cgcuggcguaguguuauuc

SEQ ID NO: 2451454 - RNA, 19 nt, Artificial Sequence
  Description of Artificial Sequence: Synthetic oligonucleotide
cacugacgauguugcccgu

SEQ ID NO: 2451455 - RNA, 19 nt, Artificial Sequence
  Description of Artificial Sequence: Synthetic oligonucleotide
gcguaguguuauucccaau

SEQ ID NO: 2451456 - RNA, 19 nt, Artificial Sequence
  Description of Artificial Sequence: Synthetic oligonucleotide
gggcccugugaggguagca

SEQ ID NO: 2451457 - RNA, 19 nt, Artificial Sequence
  Description of Artificial Sequence: Synthetic oligonucleotide
ggguccugaugaagcugcu

SEQ ID NO: 2451458 - RNA, 19 nt, Artificial Sequence
  Description of Artificial Sequence: Synthetic oligonucleotide
ccccagcuugcugcgggaa

SEQ ID NO: 2451459 - RNA, 19 nt, Artificial Sequence
  Description of Artificial Sequence: Synthetic oligonucleotide
ccugugaggguagcaccuu

SEQ ID NO: 2451460 - RNA, 19 nt, Artificial Sequence
  Description of Artificial Sequence: Synthetic oligonucleotide
gcggagcgccccacccacu

SEQ ID NO: 2451461 - RNA, 19 nt, Artificial Sequence
  Description of Artificial Sequence: Synthetic oligonucleotide
uauaaguaccucuugagug

SEQ ID NO: 2451462 - RNA, 19 nt, Artificial Sequence
  Description of Artificial Sequence: Synthetic oligonucleotide
aagaggaauuuucuagugc

SEQ ID NO: 2451463 - RNA, 19 nt, Artificial Sequence
  Description of Artificial Sequence: Synthetic oligonucleotide
aauguuucaucucuggugu

SEQ ID NO: 2451464 - RNA, 19 nt, Artificial Sequence
  Description of Artificial Sequence: Synthetic oligonucleotide
aacuugagaaacugcaagg

SEQ ID NO: 2451465 - RNA, 19 nt, Artificial Sequence
  Description of Artificial Sequence: Synthetic oligonucleotide
uguaaucuguuucuguagg

SEQ ID NO: 2451466 - RNA, 19 nt, Artificial Sequence
  Description of Artificial Sequence: Synthetic oligonucleotide
uuggaaauguuuuauaagu

SEQ ID NO: 2451467 - RNA, 19 nt, Artificial Sequence
  Description of Artificial Sequence: Synthetic oligonucleotide
uacaguuuggcaucuaggg

SEQ ID NO: 2451468 - RNA, 19 nt, Artificial Sequence
  Description of Artificial Sequence: Synthetic oligonucleotide
uuuauaaguaccucuugag

SEQ ID NO: 2451469 - RNA, 19 nt, Artificial Sequence
  Description of Artificial Sequence: Synthetic oligonucleotide
uuucaaauugguauacugc

SEQ ID NO: 2451470 - RNA, 19 nt, Artificial Sequence
  Description of Artificial Sequence: Synthetic oligonucleotide
aaucaaucccucuaguucu

SEQ ID NO: 2451471 - RNA, 19 nt, Artificial Sequence
  Description of Artificial Sequence: Synthetic oligonucleotide
uuuuauaaguaccucuuga

SEQ ID NO: 2451472 - RNA, 19 nt, Artificial Sequence
  Description of Artificial Sequence: Synthetic oligonucleotide
gacgaggucgcucagaucc

SEQ ID NO: 2451473 - RNA, 19 nt, Artificial Sequence
  Description of Artificial Sequence: Synthetic oligonucleotide
aguucagcuacuuuggaag

SEQ ID NO: 2451474 - RNA, 19 nt, Artificial Sequence
  Description of Artificial Sequence: Synthetic oligonucleotide
cuuguaaaaccucugaaac

SEQ ID NO: 2451475 - RNA, 19 nt, Artificial Sequence
  Description of Artificial Sequence: Synthetic oligonucleotide
uuucaauucuuccaagagc

SEQ ID NO: 2451476 - RNA, 19 nt, Artificial Sequence
  Description of Artificial Sequence: Synthetic oligonucleotide
aagagcaacuggaacaacc

SEQ ID NO: 2451477 - RNA, 19 nt, Artificial Sequence
  Description of Artificial Sequence: Synthetic oligonucleotide
uucaaauugguauacugcu

SEQ ID NO: 2451478 - RNA, 19 nt, Artificial Sequence
  Description of Artificial Sequence: Synthetic oligonucleotide
auugguauacugcugcuuc

SEQ ID NO: 2451479 - RNA, 19 nt, Artificial Sequence
  Description of Artificial Sequence: Synthetic oligonucleotide
aauguuuuauaaguaccuc

SEQ ID NO: 2451480 - RNA, 19 nt, Artificial Sequence
  Description of Artificial Sequence: Synthetic oligonucleotide
uucuuguuuacccugcagc

SEQ ID NO: 2451481 - RNA, 19 nt, Artificial Sequence
  Description of Artificial Sequence: Synthetic oligonucleotide
aaaggauuuucuccauuuc

SEQ ID NO: 2451482 - RNA, 19 nt, Artificial Sequence
  Description of Artificial Sequence: Synthetic oligonucleotide
caaguucugacuaaaacuc

SEQ ID NO: 2451483 - RNA, 19 nt, Artificial Sequence
  Description of Artificial Sequence: Synthetic oligonucleotide
caaauugguauacugcugc

SEQ ID NO: 2451484 - RNA, 19 nt, Artificial Sequence
  Description of Artificial Sequence: Synthetic oligonucleotide
ugagugauuauuuugcgau

SEQ ID NO: 2451485 - RNA, 19 nt, Artificial Sequence
  Description of Artificial Sequence: Synthetic oligonucleotide
aauuuucuagugcauucug

SEQ ID NO: 2451486 - RNA, 19 nt, Artificial Sequence
  Description of Artificial Sequence: Synthetic oligonucleotide
uuauaaguaccucuugagu

SEQ ID NO: 2451487 - RNA, 19 nt, Artificial Sequence
  Description of Artificial Sequence: Synthetic oligonucleotide
aaaccucugaaacauggga

SEQ ID NO: 2451488 - RNA, 19 nt, Artificial Sequence
  Description of Artificial Sequence: Synthetic oligonucleotide
auuauuuugcgauucaguu

SEQ ID NO: 2451489 - RNA, 19 nt, Artificial Sequence
  Description of Artificial Sequence: Synthetic oligonucleotide
uguauuaucugcuggaguu

SEQ ID NO: 2451490 - RNA, 19 nt, Artificial Sequence
  Description of Artificial Sequence: Synthetic oligonucleotide
ugcgauucaguucagcuac

SEQ ID NO: 2451491 - RNA, 19 nt, Artificial Sequence
  Description of Artificial Sequence: Synthetic oligonucleotide
aaucccucuaguucuuuuc

SEQ ID NO: 2451492 - RNA, 19 nt, Artificial Sequence
  Description of Artificial Sequence: Synthetic oligonucleotide
ucaaucuguaguuuucuug

SEQ ID NO: 2451493 - RNA, 19 nt, Artificial Sequence
  Description of Artificial Sequence: Synthetic oligonucleotide
gaaucaaucccucuaguuc

SEQ ID NO: 2451494 - RNA, 19 nt, Artificial Sequence
  Description of Artificial Sequence: Synthetic oligonucleotide
aaucagugaaggugugugg

SEQ ID NO: 2451495 - RNA, 19 nt, Artificial Sequence
  Description of Artificial Sequence: Synthetic oligonucleotide
agaggaauuuucuagugca

SEQ ID NO: 2451496 - RNA, 19 nt, Artificial Sequence
  Description of Artificial Sequence: Synthetic oligonucleotide
uuuggaagaggaauuuucu

SEQ ID NO: 2451497 - RNA, 19 nt, Artificial Sequence
  Description of Artificial Sequence: Synthetic oligonucleotide
uaggauuucuucucgaacu

SEQ ID NO: 2451498 - RNA, 19 nt, Artificial Sequence
  Description of Artificial Sequence: Synthetic oligonucleotide
uaguuuucuuguaaaaccu

SEQ ID NO: 2451499 - RNA, 19 nt, Artificial Sequence
  Description of Artificial Sequence: Synthetic oligonucleotide
auguuuuccgacgaggucg

SEQ ID NO: 2451500 - RNA, 19 nt, Artificial Sequence
  Description of Artificial Sequence: Synthetic oligonucleotide
cauggaguuuucaaauugg

SEQ ID NO: 2451501 - RNA, 19 nt, Artificial Sequence
  Description of Artificial Sequence: Synthetic oligonucleotide
guuucuacuacuuggcgug

SEQ ID NO: 2451502 - RNA, 19 nt, Artificial Sequence
  Description of Artificial Sequence: Synthetic oligonucleotide
uuugcgauucaguucagcu

SEQ ID NO: 2451503 - RNA, 19 nt, Artificial Sequence
  Description of Artificial Sequence: Synthetic oligonucleotide
uuuucauggaguuuucaaa

SEQ ID NO: 2451504 - RNA, 19 nt, Artificial Sequence
  Description of Artificial Sequence: Synthetic oligonucleotide
ugcagugucguccuugacc

SEQ ID NO: 2451505 - RNA, 19 nt, Artificial Sequence
  Description of Artificial Sequence: Synthetic oligonucleotide
uuguuuacccugcagcuca

SEQ ID NO: 2451506 - RNA, 19 nt, Artificial Sequence
  Description of Artificial Sequence: Synthetic oligonucleotide
ucuagaaucaaucccucua

SEQ ID NO: 2451507 - RNA, 19 nt, Artificial Sequence
  Description of Artificial Sequence: Synthetic oligonucleotide
ucugacuaaaacucugcug

SEQ ID NO: 2451508 - RNA, 19 nt, Artificial Sequence
  Description of Artificial Sequence: Synthetic oligonucleotide
auguuuuauaaguaccucu

SEQ ID NO: 2451509 - RNA, 19 nt, Artificial Sequence
  Description of Artificial Sequence: Synthetic oligonucleotide
agugauuauuuugcgauuc

SEQ ID NO: 2451510 - RNA, 19 nt, Artificial Sequence
  Description of Artificial Sequence: Synthetic oligonucleotide
ucaaauugguauacugcug

SEQ ID NO: 2451511 - RNA, 19 nt, Artificial Sequence
  Description of Artificial Sequence: Synthetic oligonucleotide
agcaacuggaacaaccacc

SEQ ID NO: 2451512 - RNA, 19 nt, Artificial Sequence
  Description of Artificial Sequence: Synthetic oligonucleotide
auaaguaccucuugaguga

SEQ ID NO: 2451513 - RNA, 19 nt, Artificial Sequence
  Description of Artificial Sequence: Synthetic oligonucleotide
cuugagugauuauuuugcg

SEQ ID NO: 2451514 - RNA, 19 nt, Artificial Sequence
  Description of Artificial Sequence: Synthetic oligonucleotide
uuguaaucuguuucuguag

SEQ ID NO: 2451515 - RNA, 19 nt, Artificial Sequence
  Description of Artificial Sequence: Synthetic oligonucleotide
ugggaaucagugaaggugu

SEQ ID NO: 2451516 - RNA, 19 nt, Artificial Sequence
  Description of Artificial Sequence: Synthetic oligonucleotide
uucuagugcauucuggcaa

SEQ ID NO: 2451517 - RNA, 19 nt, Artificial Sequence
  Description of Artificial Sequence: Synthetic oligonucleotide
uggaguccaguucugugcg

SEQ ID NO: 2451518 - RNA, 19 nt, Artificial Sequence
  Description of Artificial Sequence: Synthetic oligonucleotide
aacugcaagggauucuugu

SEQ ID NO: 2451519 - RNA, 19 nt, Artificial Sequence
  Description of Artificial Sequence: Synthetic oligonucleotide
ucguccuugacccuuuuca

SEQ ID NO: 2451520 - RNA, 19 nt, Artificial Sequence
  Description of Artificial Sequence: Synthetic oligonucleotide
agugcauucuggcaaagga

SEQ ID NO: 2451521 - RNA, 19 nt, Artificial Sequence
  Description of Artificial Sequence: Synthetic oligonucleotide
acuugagaaacugcaaggg

SEQ ID NO: 2451522 - RNA, 19 nt, Artificial Sequence
  Description of Artificial Sequence: Synthetic oligonucleotide
uucauguuuuccgacgagg

SEQ ID NO: 2451523 - RNA, 19 nt, Artificial Sequence
  Description of Artificial Sequence: Synthetic oligonucleotide
uuugcuguauuaucugcug

SEQ ID NO: 2451524 - RNA, 19 nt, Artificial Sequence
  Description of Artificial Sequence: Synthetic oligonucleotide
uuauuuugcgauucaguuc

SEQ ID NO: 2451525 - RNA, 19 nt, Artificial Sequence
  Description of Artificial Sequence: Synthetic oligonucleotide
cuuuggaagaggaauuuuc

SEQ ID NO: 2451526 - RNA, 19 nt, Artificial Sequence
  Description of Artificial Sequence: Synthetic oligonucleotide
aguuucuacuacuuggcgu

SEQ ID NO: 2451527 - RNA, 19 nt, Artificial Sequence
  Description of Artificial Sequence: Synthetic oligonucleotide
uuucuaagcccaugaaaug

SEQ ID NO: 2451528 - RNA, 19 nt, Artificial Sequence
  Description of Artificial Sequence: Synthetic oligonucleotide
uguauucacuucaucugca

SEQ ID NO: 2451529 - RNA, 19 nt, Artificial Sequence
  Description of Artificial Sequence: Synthetic oligonucleotide
ggaaauguuuuauaaguac

SEQ ID NO: 2451530 - RNA, 19 nt, Artificial Sequence
  Description of Artificial Sequence: Synthetic oligonucleotide
aagcccaugaaauguuuca

SEQ ID NO: 2451531 - RNA, 19 nt, Artificial Sequence
  Description of Artificial Sequence: Synthetic oligonucleotide
cuguauucacuucaucugc

SEQ ID NO: 2451532 - RNA, 19 nt, Artificial Sequence
  Description of Artificial Sequence: Synthetic oligonucleotide
uggugugugguuuucuuug

SEQ ID NO: 2451533 - RNA, 19 nt, Artificial Sequence
  Description of Artificial Sequence: Synthetic oligonucleotide
cugaugagaugcuuugagg

SEQ ID NO: 2451534 - RNA, 19 nt, Artificial Sequence
  Description of Artificial Sequence: Synthetic oligonucleotide
uugaccuuggaaauguuuu

SEQ ID NO: 2451535 - RNA, 19 nt, Artificial Sequence
  Description of Artificial Sequence: Synthetic oligonucleotide
augggaaucagugaaggug

SEQ ID NO: 2451536 - RNA, 19 nt, Artificial Sequence
  Description of Artificial Sequence: Synthetic oligonucleotide
augagaugcuuugagggac

SEQ ID NO: 2451537 - RNA, 19 nt, Artificial Sequence
  Description of Artificial Sequence: Synthetic oligonucleotide
ucagcuacuuuggaagagg

SEQ ID NO: 2451538 - RNA, 19 nt, Artificial Sequence
  Description of Artificial Sequence: Synthetic oligonucleotide
ugauuauuuugcgauucag

SEQ ID NO: 2451539 - RNA, 19 nt, Artificial Sequence
  Description of Artificial Sequence: Synthetic oligonucleotide
aaauugguauacugcugcu

SEQ ID NO: 2451540 - RNA, 19 nt, Artificial Sequence
  Description of Artificial Sequence: Synthetic oligonucleotide
uugagugauuauuuugcga

SEQ ID NO: 2451541 - RNA, 19 nt, Artificial Sequence
  Description of Artificial Sequence: Synthetic oligonucleotide
uucuuuucucaaucuguag

SEQ ID NO: 2451542 - RNA, 19 nt, Artificial Sequence
  Description of Artificial Sequence: Synthetic oligonucleotide
uauuaucugcuggaguucc

SEQ ID NO: 2451543 - RNA, 19 nt, Artificial Sequence
  Description of Artificial Sequence: Synthetic oligonucleotide
agcuuuguaaucuguuucu

SEQ ID NO: 2451544 - RNA, 19 nt, Artificial Sequence
  Description of Artificial Sequence: Synthetic oligonucleotide
cucuugagugauuauuuug

SEQ ID NO: 2451545 - RNA, 19 nt, Artificial Sequence
  Description of Artificial Sequence: Synthetic oligonucleotide
ugcauucuggcaaaggauu

SEQ ID NO: 2451546 - RNA, 19 nt, Artificial Sequence
  Description of Artificial Sequence: Synthetic oligonucleotide
ugcuguauuaucugcugga

SEQ ID NO: 2451547 - RNA, 19 nt, Artificial Sequence
  Description of Artificial Sequence: Synthetic oligonucleotide
cucagauccaaguucugac

SEQ ID NO: 2451548 - RNA, 19 nt, Artificial Sequence
  Description of Artificial Sequence: Synthetic oligonucleotide
agugaaggugugugggugg

SEQ ID NO: 2451549 - RNA, 19 nt, Artificial Sequence
  Description of Artificial Sequence: Synthetic oligonucleotide
uucugacuaaaacucugcu

SEQ ID NO: 2451550 - RNA, 19 nt, Artificial Sequence
  Description of Artificial Sequence: Synthetic oligonucleotide
acaugggaaucagugaagg

SEQ ID NO: 2451551 - RNA, 19 nt, Artificial Sequence
  Description of Artificial Sequence: Synthetic oligonucleotide
guuuuauaaguaccucuug

SEQ ID NO: 2451552 - RNA, 19 nt, Artificial Sequence
  Description of Artificial Sequence: Synthetic oligonucleotide
uuccucucuagaaucaauc

SEQ ID NO: 2451553 - RNA, 19 nt, Artificial Sequence
  Description of Artificial Sequence: Synthetic oligonucleotide
ugugugguuuucuuuggcu

SEQ ID NO: 2451554 - RNA, 19 nt, Artificial Sequence
  Description of Artificial Sequence: Synthetic oligonucleotide
uuucuagugcauucuggca

SEQ ID NO: 2451555 - RNA, 19 nt, Artificial Sequence
  Description of Artificial Sequence: Synthetic oligonucleotide
uuucauguuuuccgacgag

SEQ ID NO: 2451556 - RNA, 19 nt, Artificial Sequence
  Description of Artificial Sequence: Synthetic oligonucleotide
cuccauuucccucugauga

SEQ ID NO: 2451557 - RNA, 19 nt, Artificial Sequence
  Description of Artificial Sequence: Synthetic oligonucleotide
uuuccgacgaggucgcuca

SEQ ID NO: 2451558 - RNA, 19 nt, Artificial Sequence
  Description of Artificial Sequence: Synthetic oligonucleotide
uugagggacgcgaugugug

SEQ ID NO: 2451559 - RNA, 19 nt, Artificial Sequence
  Description of Artificial Sequence: Synthetic oligonucleotide
ucugcaagagcaacuggaa

SEQ ID NO: 2451560 - RNA, 19 nt, Artificial Sequence
  Description of Artificial Sequence: Synthetic oligonucleotide
gaugcuuugagggacgcga

SEQ ID NO: 2451561 - RNA, 19 nt, Artificial Sequence
  Description of Artificial Sequence: Synthetic oligonucleotide
ugugcaagucucuuccacu

SEQ ID NO: 2451562 - RNA, 19 nt, Artificial Sequence
  Description of Artificial Sequence: Synthetic oligonucleotide
ugagaaacugcaagggauu

SEQ ID NO: 2451563 - RNA, 19 nt, Artificial Sequence
  Description of Artificial Sequence: Synthetic oligonucleotide
uucucaaucuguaguuuuc

SEQ ID NO: 2451564 - RNA, 19 nt, Artificial Sequence
  Description of Artificial Sequence: Synthetic oligonucleotide
uguuuuccgacgaggucgc

SEQ ID NO: 2451565 - RNA, 19 nt, Artificial Sequence
  Description of Artificial Sequence: Synthetic oligonucleotide
uguaggauuucuucucgaa

SEQ ID NO: 2451566 - RNA, 19 nt, Artificial Sequence
  Description of Artificial Sequence: Synthetic oligonucleotide
ucgcucagauccaaguucu

SEQ ID NO: 2451567 - RNA, 19 nt, Artificial Sequence
  Description of Artificial Sequence: Synthetic oligonucleotide
cugcuugugccucauuucc

SEQ ID NO: 2451568 - RNA, 19 nt, Artificial Sequence
  Description of Artificial Sequence: Synthetic oligonucleotide
ucucgaacuugagaaacug

SEQ ID NO: 2451569 - RNA, 19 nt, Artificial Sequence
  Description of Artificial Sequence: Synthetic oligonucleotide
uuuacccugcagcucauua

SEQ ID NO: 2451570 - RNA, 19 nt, Artificial Sequence
  Description of Artificial Sequence: Synthetic oligonucleotide
agaaucaaucccucuaguu

SEQ ID NO: 2451571 - RNA, 19 nt, Artificial Sequence
  Description of Artificial Sequence: Synthetic oligonucleotide
uggaguuuucaaauuggua

SEQ ID NO: 2451572 - RNA, 19 nt, Artificial Sequence
  Description of Artificial Sequence: Synthetic oligonucleotide
ugugggugguacaguuugg

SEQ ID NO: 2451573 - RNA, 19 nt, Artificial Sequence
  Description of Artificial Sequence: Synthetic oligonucleotide
uuucucaaucuguaguuuu

SEQ ID NO: 2451574 - RNA, 19 nt, Artificial Sequence
  Description of Artificial Sequence: Synthetic oligonucleotide
ggaguuuucaaauugguau

SEQ ID NO: 2451575 - RNA, 19 nt, Artificial Sequence
  Description of Artificial Sequence: Synthetic oligonucleotide
guaggauuucuucucgaac

SEQ ID NO: 2451576 - RNA, 19 nt, Artificial Sequence
  Description of Artificial Sequence: Synthetic oligonucleotide
cuucucgaacuugagaaac

SEQ ID NO: 2451577 - RNA, 19 nt, Artificial Sequence
  Description of Artificial Sequence: Synthetic oligonucleotide
gcuguauucacuucaucug

SEQ ID NO: 2451578 - RNA, 19 nt, Artificial Sequence
  Description of Artificial Sequence: Synthetic oligonucleotide
gugugggugguacaguuug

SEQ ID NO: 2451579 - RNA, 19 nt, Artificial Sequence
  Description of Artificial Sequence: Synthetic oligonucleotide
agcuuauuccucucuagaa

SEQ ID NO: 2451580 - RNA, 19 nt, Artificial Sequence
  Description of Artificial Sequence: Synthetic oligonucleotide
uucucgaacuugagaaacu

SEQ ID NO: 2451581 - RNA, 19 nt, Artificial Sequence
  Description of Artificial Sequence: Synthetic oligonucleotide
uaagcccaugaaauguuuc

SEQ ID NO: 2451582 - RNA, 19 nt, Artificial Sequence
  Description of Artificial Sequence: Synthetic oligonucleotide
gcagugucguccuugaccc

SEQ ID NO: 2451583 - RNA, 19 nt, Artificial Sequence
  Description of Artificial Sequence: Synthetic oligonucleotide
uacuuggcguguuugcugu

SEQ ID NO: 2451584 - RNA, 19 nt, Artificial Sequence
  Description of Artificial Sequence: Synthetic oligonucleotide
ucuagugcauucuggcaaa

SEQ ID NO: 2451585 - RNA, 19 nt, Artificial Sequence
  Description of Artificial Sequence: Synthetic oligonucleotide
caguuucuacuacuuggcg

SEQ ID NO: 2451586 - RNA, 19 nt, Artificial Sequence
  Description of Artificial Sequence: Synthetic oligonucleotide
ggaauuuucuagugcauuc

SEQ ID NO: 2451587 - RNA, 19 nt, Artificial Sequence
  Description of Artificial Sequence: Synthetic oligonucleotide
acaguggcacauuuucaug

SEQ ID NO: 2451588 - RNA, 19 nt, Artificial Sequence
  Description of Artificial Sequence: Synthetic oligonucleotide
uucagcuacuuuggaagag

SEQ ID NO: 2451589 - RNA, 19 nt, Artificial Sequence
  Description of Artificial Sequence: Synthetic oligonucleotide
uuggaagaggaauuuucua

SEQ ID NO: 2451590 - RNA, 19 nt, Artificial Sequence
  Description of Artificial Sequence: Synthetic oligonucleotide
uaaucuguuucuguaggau

SEQ ID NO: 2451591 - RNA, 19 nt, Artificial Sequence
  Description of Artificial Sequence: Synthetic oligonucleotide
ucucuagaaucaaucccuc

SEQ ID NO: 2451592 - RNA, 19 nt, Artificial Sequence
  Description of Artificial Sequence: Synthetic oligonucleotide
uguuucaucucuggugugu

SEQ ID NO: 2451593 - RNA, 19 nt, Artificial Sequence
  Description of Artificial Sequence: Synthetic oligonucleotide
ucaguucagcuacuuugga

SEQ ID NO: 2451594 - RNA, 19 nt, Artificial Sequence
  Description of Artificial Sequence: Synthetic oligonucleotide
uucagcuuauuccucucua

SEQ ID NO: 2451595 - RNA, 19 nt, Artificial Sequence
  Description of Artificial Sequence: Synthetic oligonucleotide
gaugugugcugcagugucg

SEQ ID NO: 2451596 - RNA, 19 nt, Artificial Sequence
  Description of Artificial Sequence: Synthetic oligonucleotide
ucugcuugugccucauuuc

SEQ ID NO: 2451597 - RNA, 19 nt, Artificial Sequence
  Description of Artificial Sequence: Synthetic oligonucleotide
ucuucucgaacuugagaaa

SEQ ID NO: 2451598 - RNA, 19 nt, Artificial Sequence
  Description of Artificial Sequence: Synthetic oligonucleotide
ugcaagggauucuuguuua

SEQ ID NO: 2451599 - RNA, 19 nt, Artificial Sequence
  Description of Artificial Sequence: Synthetic oligonucleotide
agggauucuuguuuacccu

SEQ ID NO: 2451600 - RNA, 19 nt, Artificial Sequence
  Description of Artificial Sequence: Synthetic oligonucleotide
uugguauacugcugcuuca

SEQ ID NO: 2451601 - RNA, 19 nt, Artificial Sequence
  Description of Artificial Sequence: Synthetic oligonucleotide
gaaggugugugggugguac

SEQ ID NO: 2451602 - RNA, 19 nt, Artificial Sequence
  Description of Artificial Sequence: Synthetic oligonucleotide
uggcacauuuucauguuuu

SEQ ID NO: 2451603 - RNA, 19 nt, Artificial Sequence
  Description of Artificial Sequence: Synthetic oligonucleotide
cuacuuggcguguuugcug

SEQ ID NO: 2451604 - RNA, 19 nt, Artificial Sequence
  Description of Artificial Sequence: Synthetic oligonucleotide
cuugagaaacugcaaggga

SEQ ID NO: 2451605 - RNA, 19 nt, Artificial Sequence
  Description of Artificial Sequence: Synthetic oligonucleotide
ggcaucuaggguuccagag

SEQ ID NO: 2451606 - RNA, 19 nt, Artificial Sequence
  Description of Artificial Sequence: Synthetic oligonucleotide
gucgcucagauccaaguuc

SEQ ID NO: 2451607 - RNA, 19 nt, Artificial Sequence
  Description of Artificial Sequence: Synthetic oligonucleotide
aguuuggcaucuaggguuc

SEQ ID NO: 2451608 - RNA, 19 nt, Artificial Sequence
  Description of Artificial Sequence: Synthetic oligonucleotide
aucugcaagagcaacugga

SEQ ID NO: 2451609 - RNA, 19 nt, Artificial Sequence
  Description of Artificial Sequence: Synthetic oligonucleotide
cucucuagaaucaaucccu

SEQ ID NO: 2451610 - RNA, 19 nt, Artificial Sequence
  Description of Artificial Sequence: Synthetic oligonucleotide
uuacccugcagcucauuaa

SEQ ID NO: 2451611 - RNA, 19 nt, Artificial Sequence
  Description of Artificial Sequence: Synthetic oligonucleotide
ugagggacgcgaugugugc

SEQ ID NO: 2451612 - RNA, 19 nt, Artificial Sequence
  Description of Artificial Sequence: Synthetic oligonucleotide
agcucauuaacuugaccuu

SEQ ID NO: 2451613 - RNA, 19 nt, Artificial Sequence
  Description of Artificial Sequence: Synthetic oligonucleotide
aucccucuaguucuuuucu

SEQ ID NO: 2451614 - RNA, 19 nt, Artificial Sequence
  Description of Artificial Sequence: Synthetic oligonucleotide
uagugcauucuggcaaagg

SEQ ID NO: 2451615 - RNA, 19 nt, Artificial Sequence
  Description of Artificial Sequence: Synthetic oligonucleotide
gauuauuuugcgauucagu

SEQ ID NO: 2451616 - RNA, 19 nt, Artificial Sequence
  Description of Artificial Sequence: Synthetic oligonucleotide
uugcgauucaguucagcua

SEQ ID NO: 2451617 - RNA, 19 nt, Artificial Sequence
  Description of Artificial Sequence: Synthetic oligonucleotide
guaaucuguuucuguagga

SEQ ID NO: 2451618 - RNA, 19 nt, Artificial Sequence
  Description of Artificial Sequence: Synthetic oligonucleotide
uuugagggacgcgaugugu

SEQ ID NO: 2451619 - RNA, 19 nt, Artificial Sequence
  Description of Artificial Sequence: Synthetic oligonucleotide
ugaccuuggaaauguuuua

SEQ ID NO: 2451620 - RNA, 19 nt, Artificial Sequence
  Description of Artificial Sequence: Synthetic oligonucleotide
aauugguauacugcugcuu

SEQ ID NO: 2451621 - RNA, 19 nt, Artificial Sequence
  Description of Artificial Sequence: Synthetic oligonucleotide
uggaguuccugcucucucu

SEQ ID NO: 2451622 - RNA, 19 nt, Artificial Sequence
  Description of Artificial Sequence: Synthetic oligonucleotide
aguaccucuugagugauua

SEQ ID NO: 2451623 - RNA, 19 nt, Artificial Sequence
  Description of Artificial Sequence: Synthetic oligonucleotide
agagcaacuggaacaacca

SEQ ID NO: 2451624 - RNA, 19 nt, Artificial Sequence
  Description of Artificial Sequence: Synthetic oligonucleotide
gcaacuggaacaaccaccc

SEQ ID NO: 2451625 - RNA, 19 nt, Artificial Sequence
  Description of Artificial Sequence: Synthetic oligonucleotide
uuuugcgauucaguucagc

SEQ ID NO: 2451626 - RNA, 19 nt, Artificial Sequence
  Description of Artificial Sequence: Synthetic oligonucleotide
uccuuucuaagcccaugaa

SEQ ID NO: 2451627 - RNA, 19 nt, Artificial Sequence
  Description of Artificial Sequence: Synthetic oligonucleotide
aaacucugcuguauucacu

SEQ ID NO: 2451628 - RNA, 19 nt, Artificial Sequence
  Description of Artificial Sequence: Synthetic oligonucleotide
ccucucuagaaucaauccc

SEQ ID NO: 2451629 - RNA, 19 nt, Artificial Sequence
  Description of Artificial Sequence: Synthetic oligonucleotide
ucucaacuuccuuguuuug

SEQ ID NO: 2451630 - RNA, 19 nt, Artificial Sequence
  Description of Artificial Sequence: Synthetic oligonucleotide
gagcaacuggaacaaccac

SEQ ID NO: 2451631 - RNA, 19 nt, Artificial Sequence
  Description of Artificial Sequence: Synthetic oligonucleotide
gauucuuguuuacccugca

SEQ ID NO: 2451632 - RNA, 19 nt, Artificial Sequence
  Description of Artificial Sequence: Synthetic oligonucleotide
cauguuuuccgacgagguc

SEQ ID NO: 2451633 - RNA, 19 nt, Artificial Sequence
  Description of Artificial Sequence: Synthetic oligonucleotide
caucuaggguuccagagaa

SEQ ID NO: 2451634 - RNA, 19 nt, Artificial Sequence
  Description of Artificial Sequence: Synthetic oligonucleotide
cugcaagagcaacuggaac

SEQ ID NO: 2451635 - RNA, 19 nt, Artificial Sequence
  Description of Artificial Sequence: Synthetic oligonucleotide
uuuucucaaucuguaguuu

SEQ ID NO: 2451636 - RNA, 19 nt, Artificial Sequence
  Description of Artificial Sequence: Synthetic oligonucleotide
acuacuuggcguguuugcu

SEQ ID NO: 2451637 - RNA, 19 nt, Artificial Sequence
  Description of Artificial Sequence: Synthetic oligonucleotide
augaaauguuucaucucug

SEQ ID NO: 2451638 - RNA, 19 nt, Artificial Sequence
  Description of Artificial Sequence: Synthetic oligonucleotide
aguucugugcggaacuugu

SEQ ID NO: 2451639 - RNA, 19 nt, Artificial Sequence
  Description of Artificial Sequence: Synthetic oligonucleotide
ugcagcucauuaacuugac

SEQ ID NO: 2451640 - RNA, 19 nt, Artificial Sequence
  Description of Artificial Sequence: Synthetic oligonucleotide
ugugcggaacuuguccagc

SEQ ID NO: 2451641 - RNA, 19 nt, Artificial Sequence
  Description of Artificial Sequence: Synthetic oligonucleotide
gaacuuguccagcucccga

SEQ ID NO: 2451642 - RNA, 19 nt, Artificial Sequence
  Description of Artificial Sequence: Synthetic oligonucleotide
uccacuucucaacuuccuu

SEQ ID NO: 2451643 - RNA, 19 nt, Artificial Sequence
  Description of Artificial Sequence: Synthetic oligonucleotide
gugauuauuuugcgauuca

SEQ ID NO: 2451644 - RNA, 19 nt, Artificial Sequence
  Description of Artificial Sequence: Synthetic oligonucleotide
auggaguuuucaaauuggu

SEQ ID NO: 2451645 - RNA, 19 nt, Artificial Sequence
  Description of Artificial Sequence: Synthetic oligonucleotide
gagaaacugcaagggauuc

SEQ ID NO: 2451646 - RNA, 19 nt, Artificial Sequence
  Description of Artificial Sequence: Synthetic oligonucleotide
ugacuaaaacucugcugua

SEQ ID NO: 2451647 - RNA, 19 nt, Artificial Sequence
  Description of Artificial Sequence: Synthetic oligonucleotide
uauuccucucuagaaucaa

SEQ ID NO: 2451648 - RNA, 19 nt, Artificial Sequence
  Description of Artificial Sequence: Synthetic oligonucleotide
ugucggugcagcucccgca

SEQ ID NO: 2451649 - RNA, 19 nt, Artificial Sequence
  Description of Artificial Sequence: Synthetic oligonucleotide
uacuuuggaagaggaauuu

SEQ ID NO: 2451650 - RNA, 19 nt, Artificial Sequence
  Description of Artificial Sequence: Synthetic oligonucleotide
ugcaagucucuuccacuuc

SEQ ID NO: 2451651 - RNA, 19 nt, Artificial Sequence
  Description of Artificial Sequence: Synthetic oligonucleotide
gugugugguuuucuuuggc

SEQ ID NO: 2451652 - RNA, 19 nt, Artificial Sequence
  Description of Artificial Sequence: Synthetic oligonucleotide
accuuggaaauguuuuaua

SEQ ID NO: 2451653 - RNA, 19 nt, Artificial Sequence
  Description of Artificial Sequence: Synthetic oligonucleotide
cuuguuuacccugcagcuc

SEQ ID NO: 2451654 - RNA, 19 nt, Artificial Sequence
  Description of Artificial Sequence: Synthetic oligonucleotide
aggaauuuucuagugcauu

SEQ ID NO: 2451655 - RNA, 19 nt, Artificial Sequence
  Description of Artificial Sequence: Synthetic oligonucleotide
cugugcggaacuuguccag

SEQ ID NO: 2451656 - RNA, 19 nt, Artificial Sequence
  Description of Artificial Sequence: Synthetic oligonucleotide
ugcugcuucagaguccauc

SEQ ID NO: 2451657 - RNA, 19 nt, Artificial Sequence
  Description of Artificial Sequence: Synthetic oligonucleotide
aaacugcaagggauucuug

SEQ ID NO: 2451658 - RNA, 19 nt, Artificial Sequence
  Description of Artificial Sequence: Synthetic oligonucleotide
gacgcgaugugugcugcag

SEQ ID NO: 2451659 - RNA, 19 nt, Artificial Sequence
  Description of Artificial Sequence: Synthetic oligonucleotide
aguggcacauuuucauguu

SEQ ID NO: 2451660 - RNA, 19 nt, Artificial Sequence
  Description of Artificial Sequence: Synthetic oligonucleotide
uuuuccgacgaggucgcuc

SEQ ID NO: 2451661 - RNA, 19 nt, Artificial Sequence
  Description of Artificial Sequence: Synthetic oligonucleotide
cuuugagggacgcgaugug

SEQ ID NO: 2451662 - RNA, 19 nt, Artificial Sequence
  Description of Artificial Sequence: Synthetic oligonucleotide
cuuuguaaucuguuucugu

SEQ ID NO: 2451663 - RNA, 19 nt, Artificial Sequence
  Description of Artificial Sequence: Synthetic oligonucleotide
cuacuacuuggcguguuug

SEQ ID NO: 2451664 - RNA, 19 nt, Artificial Sequence
  Description of Artificial Sequence: Synthetic oligonucleotide
uucccucugaugagaugcu

SEQ ID NO: 2451665 - RNA, 19 nt, Artificial Sequence
  Description of Artificial Sequence: Synthetic oligonucleotide
guauucacuucaucugcaa

SEQ ID NO: 2451666 - RNA, 19 nt, Artificial Sequence
  Description of Artificial Sequence: Synthetic oligonucleotide
ggaagaggaauuuucuagu

SEQ ID NO: 2451667 - RNA, 19 nt, Artificial Sequence
  Description of Artificial Sequence: Synthetic oligonucleotide
ugugugggugguacaguuu

SEQ ID NO: 2451668 - RNA, 19 nt, Artificial Sequence
  Description of Artificial Sequence: Synthetic oligonucleotide
cagcuuauuccucucuaga

SEQ ID NO: 2451669 - RNA, 19 nt, Artificial Sequence
  Description of Artificial Sequence: Synthetic oligonucleotide
agaugcuuugagggacgcg

SEQ ID NO: 2451670 - RNA, 19 nt, Artificial Sequence
  Description of Artificial Sequence: Synthetic oligonucleotide
gcucauuaacuugaccuug

SEQ ID NO: 2451671 - RNA, 19 nt, Artificial Sequence
  Description of Artificial Sequence: Synthetic oligonucleotide
gcuguauuaucugcuggag

SEQ ID NO: 2451672 - RNA, 19 nt, Artificial Sequence
  Description of Artificial Sequence: Synthetic oligonucleotide
augugugcugcagugucgu

SEQ ID NO: 2451673 - RNA, 19 nt, Artificial Sequence
  Description of Artificial Sequence: Synthetic oligonucleotide
gagaugcuuugagggacgc

SEQ ID NO: 2451674 - RNA, 19 nt, Artificial Sequence
  Description of Artificial Sequence: Synthetic oligonucleotide
ggauucuuguuuacccugc

SEQ ID NO: 2451675 - RNA, 19 nt, Artificial Sequence
  Description of Artificial Sequence: Synthetic oligonucleotide
caguucagcuacuuuggaa

SEQ ID NO: 2451676 - RNA, 19 nt, Artificial Sequence
  Description of Artificial Sequence: Synthetic oligonucleotide
caggauggaguccaguucu

SEQ ID NO: 2451677 - RNA, 19 nt, Artificial Sequence
  Description of Artificial Sequence: Synthetic oligonucleotide
uggcguguuugcuguauua

SEQ ID NO: 2451678 - RNA, 19 nt, Artificial Sequence
  Description of Artificial Sequence: Synthetic oligonucleotide
uuucuacuacuuggcgugu

SEQ ID NO: 2451679 - RNA, 19 nt, Artificial Sequence
  Description of Artificial Sequence: Synthetic oligonucleotide
cagcuacuuuggaagagga

SEQ ID NO: 2451680 - RNA, 19 nt, Artificial Sequence
  Description of Artificial Sequence: Synthetic oligonucleotide
ugucccgacaguggcacau

SEQ ID NO: 2451681 - RNA, 19 nt, Artificial Sequence
  Description of Artificial Sequence: Synthetic oligonucleotide
caguggcacauuuucaugu

SEQ ID NO: 2451682 - RNA, 19 nt, Artificial Sequence
  Description of Artificial Sequence: Synthetic oligonucleotide
ccgacaguggcacauuuuc

SEQ ID NO: 2451683 - RNA, 19 nt, Artificial Sequence
  Description of Artificial Sequence: Synthetic oligonucleotide
ggaguuccugcucucucug

SEQ ID NO: 2451684 - RNA, 19 nt, Artificial Sequence
  Description of Artificial Sequence: Synthetic oligonucleotide
caggacguccaggauggag

SEQ ID NO: 2451685 - RNA, 19 nt, Artificial Sequence
  Description of Artificial Sequence: Synthetic oligonucleotide
cuguaggauuucuucucga

SEQ ID NO: 2451686 - RNA, 19 nt, Artificial Sequence
  Description of Artificial Sequence: Synthetic oligonucleotide
gcuacuuuggaagaggaau

SEQ ID NO: 2451687 - RNA, 19 nt, Artificial Sequence
  Description of Artificial Sequence: Synthetic oligonucleotide
cugucggugcagcucccgc

SEQ ID NO: 2451688 - RNA, 19 nt, Artificial Sequence
  Description of Artificial Sequence: Synthetic oligonucleotide
agcccaugaaauguuucau

SEQ ID NO: 2451689 - RNA, 19 nt, Artificial Sequence
  Description of Artificial Sequence: Synthetic oligonucleotide
gauucaguucagcuacuuu

SEQ ID NO: 2451690 - RNA, 19 nt, Artificial Sequence
  Description of Artificial Sequence: Synthetic oligonucleotide
uuggcguguuugcuguauu

SEQ ID NO: 2451691 - RNA, 19 nt, Artificial Sequence
  Description of Artificial Sequence: Synthetic oligonucleotide
agugucguccuugacccuu

SEQ ID NO: 2451692 - RNA, 19 nt, Artificial Sequence
  Description of Artificial Sequence: Synthetic oligonucleotide
cuacuuuggaagaggaauu

SEQ ID NO: 2451693 - RNA, 19 nt, Artificial Sequence
  Description of Artificial Sequence: Synthetic oligonucleotide
cuagugcauucuggcaaag

SEQ ID NO: 2451694 - RNA, 19 nt, Artificial Sequence
  Description of Artificial Sequence: Synthetic oligonucleotide
gacuaaaacucugcuguau

SEQ ID NO: 2451695 - RNA, 19 nt, Artificial Sequence
  Description of Artificial Sequence: Synthetic oligonucleotide
gcccaugaaauguuucauc

SEQ ID NO: 2451696 - RNA, 19 nt, Artificial Sequence
  Description of Artificial Sequence: Synthetic oligonucleotide
cagcugugcaagucucuuc

SEQ ID NO: 2451697 - RNA, 19 nt, Artificial Sequence
  Description of Artificial Sequence: Synthetic oligonucleotide
acgcgaugugugcugcagu

SEQ ID NO: 2451698 - RNA, 19 nt, Artificial Sequence
  Description of Artificial Sequence: Synthetic oligonucleotide
cuguauuaucugcuggagu

SEQ ID NO: 2451699 - RNA, 19 nt, Artificial Sequence
  Description of Artificial Sequence: Synthetic oligonucleotide
caguucugugcggaacuug

SEQ ID NO: 2451700 - RNA, 19 nt, Artificial Sequence
  Description of Artificial Sequence: Synthetic oligonucleotide
ucccgacaguggcacauuu

SEQ ID NO: 2451701 - RNA, 19 nt, Artificial Sequence
  Description of Artificial Sequence: Synthetic oligonucleotide
gguauacugcugcuucaga

SEQ ID NO: 2451702 - RNA, 19 nt, Artificial Sequence
  Description of Artificial Sequence: Synthetic oligonucleotide
gcguguuugcuguauuauc

SEQ ID NO: 2451703 - RNA, 19 nt, Artificial Sequence
  Description of Artificial Sequence: Synthetic oligonucleotide
cucccgauucuucagcugu

SEQ ID NO: 2451704 - RNA, 19 nt, Artificial Sequence
  Description of Artificial Sequence: Synthetic oligonucleotide
gaccuuggaaauguuuuau

SEQ ID NO: 2451705 - RNA, 19 nt, Artificial Sequence
  Description of Artificial Sequence: Synthetic oligonucleotide
uuccgacgaggucgcucag

SEQ ID NO: 2451706 - RNA, 19 nt, Artificial Sequence
  Description of Artificial Sequence: Synthetic oligonucleotide
gcuuauuccucucuagaau

SEQ ID NO: 2451707 - RNA, 19 nt, Artificial Sequence
  Description of Artificial Sequence: Synthetic oligonucleotide
caagagcaacuggaacaac

SEQ ID NO: 2451708 - RNA, 19 nt, Artificial Sequence
  Description of Artificial Sequence: Synthetic oligonucleotide
gcaagggauucuuguuuac

SEQ ID NO: 2451709 - RNA, 19 nt, Artificial Sequence
  Description of Artificial Sequence: Synthetic oligonucleotide
uccgacgaggucgcucaga

SEQ ID NO: 2451710 - RNA, 19 nt, Artificial Sequence
  Description of Artificial Sequence: Synthetic oligonucleotide
gggugguacaguuuggcau

SEQ ID NO: 2451711 - RNA, 19 nt, Artificial Sequence
  Description of Artificial Sequence: Synthetic oligonucleotide
uucuacuacuuggcguguu

SEQ ID NO: 2451712 - RNA, 19 nt, Artificial Sequence
  Description of Artificial Sequence: Synthetic oligonucleotide
cucuagaaucaaucccucu

SEQ ID NO: 2451713 - RNA, 19 nt, Artificial Sequence
  Description of Artificial Sequence: Synthetic oligonucleotide
ucaaucccucuaguucuuu

SEQ ID NO: 2451714 - RNA, 19 nt, Artificial Sequence
  Description of Artificial Sequence: Synthetic oligonucleotide
agcuacuuuggaagaggaa

SEQ ID NO: 2451715 - RNA, 19 nt, Artificial Sequence
  Description of Artificial Sequence: Synthetic oligonucleotide
aggauggaguccaguucug

SEQ ID NO: 2451716 - RNA, 19 nt, Artificial Sequence
  Description of Artificial Sequence: Synthetic oligonucleotide
gcucagauccaaguucuga

SEQ ID NO: 2451717 - RNA, 19 nt, Artificial Sequence
  Description of Artificial Sequence: Synthetic oligonucleotide
gugcaagucucuuccacuu

SEQ ID NO: 2451718 - RNA, 19 nt, Artificial Sequence
  Description of Artificial Sequence: Synthetic oligonucleotide
gucguccuugacccuuuuc

SEQ ID NO: 2451719 - RNA, 19 nt, Artificial Sequence
  Description of Artificial Sequence: Synthetic oligonucleotide
cguguuugcuguauuaucu

SEQ ID NO: 2451720 - RNA, 19 nt, Artificial Sequence
  Description of Artificial Sequence: Synthetic oligonucleotide
ccccugucggugcagcucc

SEQ ID NO: 2451721 - RNA, 19 nt, Artificial Sequence
  Description of Artificial Sequence: Synthetic oligonucleotide
ccgcaggacguccaggaug

SEQ ID NO: 2451722 - RNA, 19 nt, Artificial Sequence
  Description of Artificial Sequence: Synthetic oligonucleotide
cucuaguucuuuucucaau

SEQ ID NO: 2451723 - RNA, 19 nt, Artificial Sequence
  Description of Artificial Sequence: Synthetic oligonucleotide
cugcaagggauucuuguuu

SEQ ID NO: 2451724 - RNA, 19 nt, Artificial Sequence
  Description of Artificial Sequence: Synthetic oligonucleotide
cgaugugugcugcaguguc

SEQ ID NO: 2451725 - RNA, 19 nt, Artificial Sequence
  Description of Artificial Sequence: Synthetic oligonucleotide
gugcauucuggcaaaggau

SEQ ID NO: 2451726 - RNA, 19 nt, Artificial Sequence
  Description of Artificial Sequence: Synthetic oligonucleotide
cgcgaugugugcugcagug

SEQ ID NO: 2451727 - RNA, 19 nt, Artificial Sequence
  Description of Artificial Sequence: Synthetic oligonucleotide
gugugugggugguacaguu

SEQ ID NO: 2451728 - RNA, 19 nt, Artificial Sequence
  Description of Artificial Sequence: Synthetic oligonucleotide
ccucugaaacaugggaauc

SEQ ID NO: 2451729 - RNA, 19 nt, Artificial Sequence
  Description of Artificial Sequence: Synthetic oligonucleotide
cugcagugucguccuugac

SEQ ID NO: 2451730 - RNA, 19 nt, Artificial Sequence
  Description of Artificial Sequence: Synthetic oligonucleotide
aaguaccucuugagugauu

SEQ ID NO: 2451731 - RNA, 19 nt, Artificial Sequence
  Description of Artificial Sequence: Synthetic oligonucleotide
augcuuugagggacgcgau

SEQ ID NO: 2451732 - RNA, 19 nt, Artificial Sequence
  Description of Artificial Sequence: Synthetic oligonucleotide
gcugugcaagucucuucca

SEQ ID NO: 2451733 - RNA, 19 nt, Artificial Sequence
  Description of Artificial Sequence: Synthetic oligonucleotide
acuuggcguguuugcugua

SEQ ID NO: 2451734 - RNA, 19 nt, Artificial Sequence
  Description of Artificial Sequence: Synthetic oligonucleotide
acgaggucgcucagaucca

SEQ ID NO: 2451735 - RNA, 19 nt, Artificial Sequence
  Description of Artificial Sequence: Synthetic oligonucleotide
cuggugugugguuuucuuu

SEQ ID NO: 2451736 - RNA, 19 nt, Artificial Sequence
  Description of Artificial Sequence: Synthetic oligonucleotide
gggacgcgaugugugcugc

SEQ ID NO: 2451737 - RNA, 19 nt, Artificial Sequence
  Description of Artificial Sequence: Synthetic oligonucleotide
ugguacaguuuggcaucua

SEQ ID NO: 2451738 - RNA, 19 nt, Artificial Sequence
  Description of Artificial Sequence: Synthetic oligonucleotide
ggucgcucagauccaaguu

SEQ ID NO: 2451739 - RNA, 19 nt, Artificial Sequence
  Description of Artificial Sequence: Synthetic oligonucleotide
gcaaaggauuuucuccauu

SEQ ID NO: 2451740 - RNA, 19 nt, Artificial Sequence
  Description of Artificial Sequence: Synthetic oligonucleotide
ccgauucuucagcugugca

SEQ ID NO: 2451741 - RNA, 19 nt, Artificial Sequence
  Description of Artificial Sequence: Synthetic oligonucleotide
cuuggcguguuugcuguau

SEQ ID NO: 2451742 - RNA, 19 nt, Artificial Sequence
  Description of Artificial Sequence: Synthetic oligonucleotide
cgacaguggcacauuuuca

SEQ ID NO: 2451743 - RNA, 19 nt, Artificial Sequence
  Description of Artificial Sequence: Synthetic oligonucleotide
caucucuggugugugguuu

SEQ ID NO: 2451744 - RNA, 19 nt, Artificial Sequence
  Description of Artificial Sequence: Synthetic oligonucleotide
ccugucggugcagcucccg

SEQ ID NO: 2451745 - RNA, 19 nt, Artificial Sequence
  Description of Artificial Sequence: Synthetic oligonucleotide
ggcguguuugcuguauuau

SEQ ID NO: 2451746 - RNA, 19 nt, Artificial Sequence
  Description of Artificial Sequence: Synthetic oligonucleotide
cugucccgacaguggcaca

SEQ ID NO: 2451747 - RNA, 19 nt, Artificial Sequence
  Description of Artificial Sequence: Synthetic oligonucleotide
ggacgcgaugugugcugca

SEQ ID NO: 2451748 - RNA, 19 nt, Artificial Sequence
  Description of Artificial Sequence: Synthetic oligonucleotide
gcauucuggcaaaggauuu

SEQ ID NO: 2451749 - RNA, 19 nt, Artificial Sequence
  Description of Artificial Sequence: Synthetic oligonucleotide
ggugugugggugguacagu

SEQ ID NO: 2451750 - RNA, 19 nt, Artificial Sequence
  Description of Artificial Sequence: Synthetic oligonucleotide
ccucuugagugauuauuuu

SEQ ID NO: 2451751 - RNA, 19 nt, Artificial Sequence
  Description of Artificial Sequence: Synthetic oligonucleotide
cccugucggugcagcuccc

SEQ ID NO: 2451752 - RNA, 19 nt, Artificial Sequence
  Description of Artificial Sequence: Synthetic oligonucleotide
ccgacgaggucgcucagau

SEQ ID NO: 2451753 - RNA, 19 nt, Artificial Sequence
  Description of Artificial Sequence: Synthetic oligonucleotide
gcgaugugugcugcagugu

SEQ ID NO: 2451754 - RNA, 19 nt, Artificial Sequence
  Description of Artificial Sequence: Synthetic oligonucleotide
cgacgaggucgcucagauc

SEQ ID NO: 2451755 - RNA, 19 nt, Artificial Sequence
  Description of Artificial Sequence: Synthetic oligonucleotide
guuuuccgacgaggucgcu

SEQ ID NO: 2451756 - RNA, 19 nt, Artificial Sequence
  Description of Artificial Sequence: Synthetic oligonucleotide
gugucguccuugacccuuu

SEQ ID NO: 2451757 - RNA, 19 nt, Artificial Sequence
  Description of Artificial Sequence: Synthetic oligonucleotide
gcgauucaguucagcuacu

SEQ ID NO: 2451758 - RNA, 19 nt, Artificial Sequence
  Description of Artificial Sequence: Synthetic oligonucleotide
gucccgacaguggcacauu

SEQ ID NO: 2451759 - RNA, 19 nt, Artificial Sequence
  Description of Artificial Sequence: Synthetic oligonucleotide
cccgacaguggcacauuuu

SEQ ID NO: 2451760 - RNA, 19 nt, Artificial Sequence
  Description of Artificial Sequence: Synthetic oligonucleotide
ccaguucugugcggaacuu

SEQ ID NO: 2451761 - RNA, 19 nt, Artificial Sequence
  Description of Artificial Sequence: Synthetic oligonucleotide
cccgcaggacguccaggau

SEQ ID NO: 2451762 - RNA, 19 nt, Artificial Sequence
  Description of Artificial Sequence: Synthetic oligonucleotide
ugagauguuaaucacaguc

SEQ ID NO: 2451763 - RNA, 19 nt, Artificial Sequence
  Description of Artificial Sequence: Synthetic oligonucleotide
acugcgugcgcucagaagc

SEQ ID NO: 2451764 - RNA, 19 nt, Artificial Sequence
  Description of Artificial Sequence: Synthetic oligonucleotide
uacaacaugucucuggcag

SEQ ID NO: 2451765 - RNA, 19 nt, Artificial Sequence
  Description of Artificial Sequence: Synthetic oligonucleotide
auguuaaucacagucuugc

SEQ ID NO: 2451766 - RNA, 19 nt, Artificial Sequence
  Description of Artificial Sequence: Synthetic oligonucleotide
aaauauccccaagaguacc

SEQ ID NO: 2451767 - RNA, 19 nt, Artificial Sequence
  Description of Artificial Sequence: Synthetic oligonucleotide
ucuuaacugucauagaagu

SEQ ID NO: 2451768 - RNA, 19 nt, Artificial Sequence
  Description of Artificial Sequence: Synthetic oligonucleotide
gaugagauguuaaucacag

SEQ ID NO: 2451769 - RNA, 19 nt, Artificial Sequence
  Description of Artificial Sequence: Synthetic oligonucleotide
aguaguuguucacuucugc

SEQ ID NO: 2451770 - RNA, 19 nt, Artificial Sequence
  Description of Artificial Sequence: Synthetic oligonucleotide
gaagcgaggguuuucuggg

SEQ ID NO: 2451771 - RNA, 19 nt, Artificial Sequence
  Description of Artificial Sequence: Synthetic oligonucleotide
ugaagcgaggguuuucugg

SEQ ID NO: 2451772 - RNA, 19 nt, Artificial Sequence
  Description of Artificial Sequence: Synthetic oligonucleotide
auggucuuaacugucauag

SEQ ID NO: 2451773 - RNA, 19 nt, Artificial Sequence
  Description of Artificial Sequence: Synthetic oligonucleotide
auagaagucaaugugggcu

SEQ ID NO: 2451774 - RNA, 19 nt, Artificial Sequence
  Description of Artificial Sequence: Synthetic oligonucleotide
uagaucaagcagagcaugg

SEQ ID NO: 2451775 - RNA, 19 nt, Artificial Sequence
  Description of Artificial Sequence: Synthetic oligonucleotide
guuaaucacagucuugcug

SEQ ID NO: 2451776 - RNA, 19 nt, Artificial Sequence
  Description of Artificial Sequence: Synthetic oligonucleotide
cuguagaucaagcagagca

SEQ ID NO: 2451777 - RNA, 19 nt, Artificial Sequence
  Description of Artificial Sequence: Synthetic oligonucleotide
uuugcagcaaggucaguag

SEQ ID NO: 2451778 - RNA, 19 nt, Artificial Sequence
  Description of Artificial Sequence: Synthetic oligonucleotide
uucacauucaggauggcuu

SEQ ID NO: 2451779 - RNA, 19 nt, Artificial Sequence
  Description of Artificial Sequence: Synthetic oligonucleotide
ugguccuuaacucuggguc

SEQ ID NO: 2451780 - RNA, 19 nt, Artificial Sequence
  Description of Artificial Sequence: Synthetic oligonucleotide
ugcgcucagaagcagcacg

SEQ ID NO: 2451781 - RNA, 19 nt, Artificial Sequence
  Description of Artificial Sequence: Synthetic oligonucleotide
gaucaagcagagcauggag

SEQ ID NO: 2451782 - RNA, 19 nt, Artificial Sequence
  Description of Artificial Sequence: Synthetic oligonucleotide
aagguguucuuuugcagca

SEQ ID NO: 2451783 - RNA, 19 nt, Artificial Sequence
  Description of Artificial Sequence: Synthetic oligonucleotide
ugggucauucacauucagg

SEQ ID NO: 2451784 - RNA, 19 nt, Artificial Sequence
  Description of Artificial Sequence: Synthetic oligonucleotide
acaacaugucucuggcagc

SEQ ID NO: 2451785 - RNA, 19 nt, Artificial Sequence
  Description of Artificial Sequence: Synthetic oligonucleotide
uggaaauauccccaagagu

SEQ ID NO: 2451786 - RNA, 19 nt, Artificial Sequence
  Description of Artificial Sequence: Synthetic oligonucleotide
uggagguuucucuagccag

SEQ ID NO: 2451787 - RNA, 19 nt, Artificial Sequence
  Description of Artificial Sequence: Synthetic oligonucleotide
uucucuagccagcugcugc

SEQ ID NO: 2451788 - RNA, 19 nt, Artificial Sequence
  Description of Artificial Sequence: Synthetic oligonucleotide
auuguugaugagcagcagu

SEQ ID NO: 2451789 - RNA, 19 nt, Artificial Sequence
  Description of Artificial Sequence: Synthetic oligonucleotide
ggugcuguagaucaagcag

SEQ ID NO: 2451790 - RNA, 19 nt, Artificial Sequence
  Description of Artificial Sequence: Synthetic oligonucleotide
gucaaugugggcuccagac

SEQ ID NO: 2451791 - RNA, 19 nt, Artificial Sequence
  Description of Artificial Sequence: Synthetic oligonucleotide
ggaaauauccccaagagua

SEQ ID NO: 2451792 - RNA, 19 nt, Artificial Sequence
  Description of Artificial Sequence: Synthetic oligonucleotide
uguagaucaagcagagcau

SEQ ID NO: 2451793 - RNA, 19 nt, Artificial Sequence
  Description of Artificial Sequence: Synthetic oligonucleotide
uguucuuuugcagcaaggu

SEQ ID NO: 2451794 - RNA, 19 nt, Artificial Sequence
  Description of Artificial Sequence: Synthetic oligonucleotide
agcagcacggaaccgggcg

SEQ ID NO: 2451795 - RNA, 19 nt, Artificial Sequence
  Description of Artificial Sequence: Synthetic oligonucleotide
aguaccugcauuguugaug

SEQ ID NO: 2451796 - RNA, 19 nt, Artificial Sequence
  Description of Artificial Sequence: Synthetic oligonucleotide
uugcgcacagugcacaaca

SEQ ID NO: 2451797 - RNA, 19 nt, Artificial Sequence
  Description of Artificial Sequence: Synthetic oligonucleotide
guaguuucugggcugagga

SEQ ID NO: 2451798 - RNA, 19 nt, Artificial Sequence
  Description of Artificial Sequence: Synthetic oligonucleotide
uuggagguuucucuagcca

SEQ ID NO: 2451799 - RNA, 19 nt, Artificial Sequence
  Description of Artificial Sequence: Synthetic oligonucleotide
cuuggagguuucucuagcc

SEQ ID NO: 2451800 - RNA, 19 nt, Artificial Sequence
  Description of Artificial Sequence: Synthetic oligonucleotide
agaguaccugcauuguuga

SEQ ID NO: 2451801 - RNA, 19 nt, Artificial Sequence
  Description of Artificial Sequence: Synthetic oligonucleotide
cuuaacugucauagaaguc

SEQ ID NO: 2451802 - RNA, 19 nt, Artificial Sequence
  Description of Artificial Sequence: Synthetic oligonucleotide
gaaauauccccaagaguac

SEQ ID NO: 2451803 - RNA, 19 nt, Artificial Sequence
  Description of Artificial Sequence: Synthetic oligonucleotide
aauauccccaagaguaccu

SEQ ID NO: 2451804 - RNA, 19 nt, Artificial Sequence
  Description of Artificial Sequence: Synthetic oligonucleotide
cauaucuguguccagggga

SEQ ID NO: 2451805 - RNA, 19 nt, Artificial Sequence
  Description of Artificial Sequence: Synthetic oligonucleotide
uguuaaucacagucuugcu

SEQ ID NO: 2451806 - RNA, 19 nt, Artificial Sequence
  Description of Artificial Sequence: Synthetic oligonucleotide
acacucgcaggccaggaug

SEQ ID NO: 2451807 - RNA, 19 nt, Artificial Sequence
  Description of Artificial Sequence: Synthetic oligonucleotide
ucccaguccgccuuccucc

SEQ ID NO: 2451808 - RNA, 19 nt, Artificial Sequence
  Description of Artificial Sequence: Synthetic oligonucleotide
uccuuggagguuucucuag

SEQ ID NO: 2451809 - RNA, 19 nt, Artificial Sequence
  Description of Artificial Sequence: Synthetic oligonucleotide
guagaucaagcagagcaug

SEQ ID NO: 2451810 - RNA, 19 nt, Artificial Sequence
  Description of Artificial Sequence: Synthetic oligonucleotide
cugaggacccacaauccac

SEQ ID NO: 2451811 - RNA, 19 nt, Artificial Sequence
  Description of Artificial Sequence: Synthetic oligonucleotide
cuuuggaaauauccccaag

SEQ ID NO: 2451812 - RNA, 19 nt, Artificial Sequence
  Description of Artificial Sequence: Synthetic oligonucleotide
cuggaagguguucuuuugc

SEQ ID NO: 2451813 - RNA, 19 nt, Artificial Sequence
  Description of Artificial Sequence: Synthetic oligonucleotide
caaggucaguaguuucugg

SEQ ID NO: 2451814 - RNA, 19 nt, Artificial Sequence
  Description of Artificial Sequence: Synthetic oligonucleotide
agcgccaagucacugcgug

SEQ ID NO: 2451815 - RNA, 19 nt, Artificial Sequence
  Description of Artificial Sequence: Synthetic oligonucleotide
aaugugggcuccagacugg

SEQ ID NO: 2451816 - RNA, 19 nt, Artificial Sequence
  Description of Artificial Sequence: Synthetic oligonucleotide
aaggcacacagagaugaga

SEQ ID NO: 2451817 - RNA, 19 nt, Artificial Sequence
  Description of Artificial Sequence: Synthetic oligonucleotide
caacaugucucuggcagcc

SEQ ID NO: 2451818 - RNA, 19 nt, Artificial Sequence
  Description of Artificial Sequence: Synthetic oligonucleotide
ggucagcacacacacagug

SEQ ID NO: 2451819 - RNA, 19 nt, Artificial Sequence
  Description of Artificial Sequence: Synthetic oligonucleotide
uggguuccucagcagcuag

SEQ ID NO: 2451820 - RNA, 19 nt, Artificial Sequence
  Description of Artificial Sequence: Synthetic oligonucleotide
ggaagguguucuuuugcag

SEQ ID NO: 2451821 - RNA, 19 nt, Artificial Sequence
  Description of Artificial Sequence: Synthetic oligonucleotide
uugcagcaaggucaguagu

SEQ ID NO: 2451822 - RNA, 19 nt, Artificial Sequence
  Description of Artificial Sequence: Synthetic oligonucleotide
aaagccucgggaggccccg

SEQ ID NO: 2451823 - RNA, 19 nt, Artificial Sequence
  Description of Artificial Sequence: Synthetic oligonucleotide
agucgcugaagccccucgg

SEQ ID NO: 2451824 - RNA, 19 nt, Artificial Sequence
  Description of Artificial Sequence: Synthetic oligonucleotide
agcacccucacacuggguu

SEQ ID NO: 2451825 - RNA, 19 nt, Artificial Sequence
  Description of Artificial Sequence: Synthetic oligonucleotide
caagggcgcggccaaagcc

SEQ ID NO: 2451826 - RNA, 19 nt, Artificial Sequence
  Description of Artificial Sequence: Synthetic oligonucleotide
cacacagugcaucccaguc

SEQ ID NO: 2451827 - RNA, 19 nt, Artificial Sequence
  Description of Artificial Sequence: Synthetic oligonucleotide
gagauguuaaucacagucu

SEQ ID NO: 2451828 - RNA, 19 nt, Artificial Sequence
  Description of Artificial Sequence: Synthetic oligonucleotide
aucccaguccgccuuccuc

SEQ ID NO: 2451829 - RNA, 19 nt, Artificial Sequence
  Description of Artificial Sequence: Synthetic oligonucleotide
ucgcaggccaggaugcugu

SEQ ID NO: 2451830 - RNA, 19 nt, Artificial Sequence
  Description of Artificial Sequence: Synthetic oligonucleotide
gguccuuaacucugggucc

SEQ ID NO: 2451831 - RNA, 19 nt, Artificial Sequence
  Description of Artificial Sequence: Synthetic oligonucleotide
ggagcuugcgcacagugca

SEQ ID NO: 2451832 - RNA, 19 nt, Artificial Sequence
  Description of Artificial Sequence: Synthetic oligonucleotide
ucaguaguuucugggcuga

SEQ ID NO: 2451833 - RNA, 19 nt, Artificial Sequence
  Description of Artificial Sequence: Synthetic oligonucleotide
cuugaagggcuccaaggca

SEQ ID NO: 2451834 - RNA, 19 nt, Artificial Sequence
  Description of Artificial Sequence: Synthetic oligonucleotide
cacucgcaggccaggaugc

SEQ ID NO: 2451835 - RNA, 19 nt, Artificial Sequence
  Description of Artificial Sequence: Synthetic oligonucleotide
accuggagcauagcucagc

SEQ ID NO: 2451836 - RNA, 19 nt, Artificial Sequence
  Description of Artificial Sequence: Synthetic oligonucleotide
cauagcucagcacccucac

SEQ ID NO: 2451837 - RNA, 19 nt, Artificial Sequence
  Description of Artificial Sequence: Synthetic oligonucleotide
ccggucagcacacacacag

SEQ ID NO: 2451838 - RNA, 19 nt, Artificial Sequence
  Description of Artificial Sequence: Synthetic oligonucleotide
gguguucuuuugcagcaag

SEQ ID NO: 2451839 - RNA, 19 nt, Artificial Sequence
  Description of Artificial Sequence: Synthetic oligonucleotide
ggaccuggagcauagcuca

SEQ ID NO: 2451840 - RNA, 19 nt, Artificial Sequence
  Description of Artificial Sequence: Synthetic oligonucleotide
agaucaagcagagcaugga

SEQ ID NO: 2451841 - RNA, 19 nt, Artificial Sequence
  Description of Artificial Sequence: Synthetic oligonucleotide
aagggcgcggccaaagccu

SEQ ID NO: 2451842 - RNA, 19 nt, Artificial Sequence
  Description of Artificial Sequence: Synthetic oligonucleotide
cacacuggguuccucagca

SEQ ID NO: 2451843 - RNA, 19 nt, Artificial Sequence
  Description of Artificial Sequence: Synthetic oligonucleotide
cagucuugcugaagcgagg

SEQ ID NO: 2451844 - RNA, 19 nt, Artificial Sequence
  Description of Artificial Sequence: Synthetic oligonucleotide
aacacucgcaggccaggau

SEQ ID NO: 2451845 - RNA, 19 nt, Artificial Sequence
  Description of Artificial Sequence: Synthetic oligonucleotide
aguggggcaagggcgcggc

SEQ ID NO: 2451846 - RNA, 19 nt, Artificial Sequence
  Description of Artificial Sequence: Synthetic oligonucleotide
aggacccacaauccaccag

SEQ ID NO: 2451847 - RNA, 19 nt, Artificial Sequence
  Description of Artificial Sequence: Synthetic oligonucleotide
uggucuuaacugucauaga

SEQ ID NO: 2451848 - RNA, 19 nt, Artificial Sequence
  Description of Artificial Sequence: Synthetic oligonucleotide
guuucugggcugaggaccc

SEQ ID NO: 2451849 - RNA, 19 nt, Artificial Sequence
  Description of Artificial Sequence: Synthetic oligonucleotide
cccaagaguaccugcauug

SEQ ID NO: 2451850 - RNA, 19 nt, Artificial Sequence
  Description of Artificial Sequence: Synthetic oligonucleotide
agugcaucccaguccgccu

SEQ ID NO: 2451851 - RNA, 19 nt, Artificial Sequence
  Description of Artificial Sequence: Synthetic oligonucleotide
caguaguuguucacuucug

SEQ ID NO: 2451852 - RNA, 19 nt, Artificial Sequence
  Description of Artificial Sequence: Synthetic oligonucleotide
gaugcugugugcacagcuc

SEQ ID NO: 2451853 - RNA, 19 nt, Artificial Sequence
  Description of Artificial Sequence: Synthetic oligonucleotide
cugcccgcaacacucgcag

SEQ ID NO: 2451854 - RNA, 19 nt, Artificial Sequence
  Description of Artificial Sequence: Synthetic oligonucleotide
aagcgaggguuuucuggga

SEQ ID NO: 2451855 - RNA, 19 nt, Artificial Sequence
  Description of Artificial Sequence: Synthetic oligonucleotide
cagcagucgcugaagcccc

SEQ ID NO: 2451856 - RNA, 19 nt, Artificial Sequence
  Description of Artificial Sequence: Synthetic oligonucleotide
agucugguccuuaacucug

SEQ ID NO: 2451857 - RNA, 19 nt, Artificial Sequence
  Description of Artificial Sequence: Synthetic oligonucleotide
augagauguuaaucacagu

SEQ ID NO: 2451858 - RNA, 19 nt, Artificial Sequence
  Description of Artificial Sequence: Synthetic oligonucleotide
agucaaugugggcuccaga

SEQ ID NO: 2451859 - RNA, 19 nt, Artificial Sequence
  Description of Artificial Sequence: Synthetic oligonucleotide
uuagagcccaguaguuguu

SEQ ID NO: 2451860 - RNA, 19 nt, Artificial Sequence
  Description of Artificial Sequence: Synthetic oligonucleotide
gaaccgggcgacagcaacc

SEQ ID NO: 2451861 - RNA, 19 nt, Artificial Sequence
  Description of Artificial Sequence: Synthetic oligonucleotide
caacagcugcugcacuccg

SEQ ID NO: 2451862 - RNA, 19 nt, Artificial Sequence
  Description of Artificial Sequence: Synthetic oligonucleotide
caggggaccuggagcauag

SEQ ID NO: 2451863 - RNA, 19 nt, Artificial Sequence
  Description of Artificial Sequence: Synthetic oligonucleotide
gcauaucuguguccagggg

SEQ ID NO: 2451864 - RNA, 19 nt, Artificial Sequence
  Description of Artificial Sequence: Synthetic oligonucleotide
cagugcaucccaguccgcc

SEQ ID NO: 2451865 - RNA, 19 nt, Artificial Sequence
  Description of Artificial Sequence: Synthetic oligonucleotide
cugggucauucacauucag

SEQ ID NO: 2451866 - RNA, 19 nt, Artificial Sequence
  Description of Artificial Sequence: Synthetic oligonucleotide
aagccccucgggccugggg

SEQ ID NO: 2451867 - RNA, 19 nt, Artificial Sequence
  Description of Artificial Sequence: Synthetic oligonucleotide
caugucucuggcagccuuc

SEQ ID NO: 2451868 - RNA, 19 nt, Artificial Sequence
  Description of Artificial Sequence: Synthetic oligonucleotide
cauuguugaugagcagcag

SEQ ID NO: 2451869 - RNA, 19 nt, Artificial Sequence
  Description of Artificial Sequence: Synthetic oligonucleotide
caagucacugcgugcgcuc

SEQ ID NO: 2451870 - RNA, 19 nt, Artificial Sequence
  Description of Artificial Sequence: Synthetic oligonucleotide
auagcucagcacccucaca

SEQ ID NO: 2451871 - RNA, 19 nt, Artificial Sequence
  Description of Artificial Sequence: Synthetic oligonucleotide
agcgaggguuuucugggaa

SEQ ID NO: 2451872 - RNA, 19 nt, Artificial Sequence
  Description of Artificial Sequence: Synthetic oligonucleotide
aagucacugcgugcgcuca

SEQ ID NO: 2451873 - RNA, 19 nt, Artificial Sequence
  Description of Artificial Sequence: Synthetic oligonucleotide
agccccucgggccugggga

SEQ ID NO: 2451874 - RNA, 19 nt, Artificial Sequence
  Description of Artificial Sequence: Synthetic oligonucleotide
ugggcugaggacccacaau

SEQ ID NO: 2451875 - RNA, 19 nt, Artificial Sequence
  Description of Artificial Sequence: Synthetic oligonucleotide
ucuagccagcugcugcaua

SEQ ID NO: 2451876 - RNA, 19 nt, Artificial Sequence
  Description of Artificial Sequence: Synthetic oligonucleotide
agcuaggaccugguacaac

SEQ ID NO: 2451877 - RNA, 19 nt, Artificial Sequence
  Description of Artificial Sequence: Synthetic oligonucleotide
cugcacuccggccucggug

SEQ ID NO: 2451878 - RNA, 19 nt, Artificial Sequence
  Description of Artificial Sequence: Synthetic oligonucleotide
uaucuguguccaggggacc

SEQ ID NO: 2451879 - RNA, 19 nt, Artificial Sequence
  Description of Artificial Sequence: Synthetic oligonucleotide
acacuggguuccucagcag

SEQ ID NO: 2451880 - RNA, 19 nt, Artificial Sequence
  Description of Artificial Sequence: Synthetic oligonucleotide
cagucgcugaagccccucg

SEQ ID NO: 2451881 - RNA, 19 nt, Artificial Sequence
  Description of Artificial Sequence: Synthetic oligonucleotide
cacugcgugcgcucagaag

SEQ ID NO: 2451882 - RNA, 19 nt, Artificial Sequence
  Description of Artificial Sequence: Synthetic oligonucleotide
agcccaguaguuguucacu

SEQ ID NO: 2451883 - RNA, 19 nt, Artificial Sequence
  Description of Artificial Sequence: Synthetic oligonucleotide
agucacugcgugcgcucag

SEQ ID NO: 2451884 - RNA, 19 nt, Artificial Sequence
  Description of Artificial Sequence: Synthetic oligonucleotide
ugcugcccgcaacacucgc

SEQ ID NO: 2451885 - RNA, 19 nt, Artificial Sequence
  Description of Artificial Sequence: Synthetic oligonucleotide
ucacugcgugcgcucagaa

SEQ ID NO: 2451886 - RNA, 19 nt, Artificial Sequence
  Description of Artificial Sequence: Synthetic oligonucleotide
cugaagcgaggguuuucug

SEQ ID NO: 2451887 - RNA, 19 nt, Artificial Sequence
  Description of Artificial Sequence: Synthetic oligonucleotide
gaggacccacaauccacca

SEQ ID NO: 2451888 - RNA, 19 nt, Artificial Sequence
  Description of Artificial Sequence: Synthetic oligonucleotide
acggaaccgggcgacagca

SEQ ID NO: 2451889 - RNA, 19 nt, Artificial Sequence
  Description of Artificial Sequence: Synthetic oligonucleotide
ggaaccgggcgacagcaac

SEQ ID NO: 2451890 - RNA, 19 nt, Artificial Sequence
  Description of Artificial Sequence: Synthetic oligonucleotide
aacaugucucuggcagccu

SEQ ID NO: 2451891 - RNA, 19 nt, Artificial Sequence
  Description of Artificial Sequence: Synthetic oligonucleotide
cacccucacacuggguucc

SEQ ID NO: 2451892 - RNA, 19 nt, Artificial Sequence
  Description of Artificial Sequence: Synthetic oligonucleotide
auccccaagaguaccugca

SEQ ID NO: 2451893 - RNA, 19 nt, Artificial Sequence
  Description of Artificial Sequence: Synthetic oligonucleotide
ggagguuucucuagccagc

SEQ ID NO: 2451894 - RNA, 19 nt, Artificial Sequence
  Description of Artificial Sequence: Synthetic oligonucleotide
acacagagaugagauguua

SEQ ID NO: 2451895 - RNA, 19 nt, Artificial Sequence
  Description of Artificial Sequence: Synthetic oligonucleotide
uagagcccaguaguuguuc

SEQ ID NO: 2451896 - RNA, 19 nt, Artificial Sequence
  Description of Artificial Sequence: Synthetic oligonucleotide
cacagucuugcugaagcga

SEQ ID NO: 2451897 - RNA, 19 nt, Artificial Sequence
  Description of Artificial Sequence: Synthetic oligonucleotide
ccgggcgacagcaaccggg

SEQ ID NO: 2451898 - RNA, 19 nt, Artificial Sequence
  Description of Artificial Sequence: Synthetic oligonucleotide
aggucagguuuagagccca

SEQ ID NO: 2451899 - RNA, 19 nt, Artificial Sequence
  Description of Artificial Sequence: Synthetic oligonucleotide
cauucaggauggcuuugga

SEQ ID NO: 2451900 - RNA, 19 nt, Artificial Sequence
  Description of Artificial Sequence: Synthetic oligonucleotide
cacggaaccgggcgacagc

SEQ ID NO: 2451901 - RNA, 19 nt, Artificial Sequence
  Description of Artificial Sequence: Synthetic oligonucleotide
ugcgugcgcucagaagcag

SEQ ID NO: 2451902 - RNA, 19 nt, Artificial Sequence
  Description of Artificial Sequence: Synthetic oligonucleotide
agcuugcgcacagugcaca

SEQ ID NO: 2451903 - RNA, 19 nt, Artificial Sequence
  Description of Artificial Sequence: Synthetic oligonucleotide
caguccgccuuccuccaug

SEQ ID NO: 2451904 - RNA, 19 nt, Artificial Sequence
  Description of Artificial Sequence: Synthetic oligonucleotide
ucggugcccaggucagcug

SEQ ID NO: 2451905 - RNA, 19 nt, Artificial Sequence
  Description of Artificial Sequence: Synthetic oligonucleotide
ggcgacagcaaccgggcca

SEQ ID NO: 2451906 - RNA, 19 nt, Artificial Sequence
  Description of Artificial Sequence: Synthetic oligonucleotide
cauggucuuaacugucaua

SEQ ID NO: 2451907 - RNA, 19 nt, Artificial Sequence
  Description of Artificial Sequence: Synthetic oligonucleotide
gaagucaaugugggcucca

SEQ ID NO: 2451908 - RNA, 19 nt, Artificial Sequence
  Description of Artificial Sequence: Synthetic oligonucleotide
gcaaggucaguaguuucug

SEQ ID NO: 2451909 - RNA, 19 nt, Artificial Sequence
  Description of Artificial Sequence: Synthetic oligonucleotide
cuugcgcacagugcacaac

SEQ ID NO: 2451910 - RNA, 19 nt, Artificial Sequence
  Description of Artificial Sequence: Synthetic oligonucleotide
aacccuugaagggcuccaa

SEQ ID NO: 2451911 - RNA, 19 nt, Artificial Sequence
  Description of Artificial Sequence: Synthetic oligonucleotide
cucgggaggccccggucag

SEQ ID NO: 2451912 - RNA, 19 nt, Artificial Sequence
  Description of Artificial Sequence: Synthetic oligonucleotide
uaccugcauuguugaugag

SEQ ID NO: 2451913 - RNA, 19 nt, Artificial Sequence
  Description of Artificial Sequence: Synthetic oligonucleotide
gcgaggguuuucugggaag

SEQ ID NO: 2451914 - RNA, 19 nt, Artificial Sequence
  Description of Artificial Sequence: Synthetic oligonucleotide
gaagggcuccaaggcacac

SEQ ID NO: 2451915 - RNA, 19 nt, Artificial Sequence
  Description of Artificial Sequence: Synthetic oligonucleotide
cagucugguccuuaacucu

SEQ ID NO: 2451916 - RNA, 19 nt, Artificial Sequence
  Description of Artificial Sequence: Synthetic oligonucleotide
gguuccucagcagcuagga

SEQ ID NO: 2451917 - RNA, 19 nt, Artificial Sequence
  Description of Artificial Sequence: Synthetic oligonucleotide
agacuggaagguguucuuu

SEQ ID NO: 2451918 - RNA, 19 nt, Artificial Sequence
  Description of Artificial Sequence: Synthetic oligonucleotide
gcgcacagugcacaacagc

SEQ ID NO: 2451919 - RNA, 19 nt, Artificial Sequence
  Description of Artificial Sequence: Synthetic oligonucleotide
ugaagccccucgggccugg

SEQ ID NO: 2451920 - RNA, 19 nt, Artificial Sequence
  Description of Artificial Sequence: Synthetic oligonucleotide
cugguacaacaugucucug

SEQ ID NO: 2451921 - RNA, 19 nt, Artificial Sequence
  Description of Artificial Sequence: Synthetic oligonucleotide
cucuggcagccuucccagc

SEQ ID NO: 2451922 - RNA, 19 nt, Artificial Sequence
  Description of Artificial Sequence: Synthetic oligonucleotide
cuagccagcugcugcauau

SEQ ID NO: 2451923 - RNA, 19 nt, Artificial Sequence
  Description of Artificial Sequence: Synthetic oligonucleotide
cuugcugaagcgaggguuu

SEQ ID NO: 2451924 - RNA, 19 nt, Artificial Sequence
  Description of Artificial Sequence: Synthetic oligonucleotide
agcaaccgggccagcagug

SEQ ID NO: 2451925 - RNA, 19 nt, Artificial Sequence
  Description of Artificial Sequence: Synthetic oligonucleotide
accgggcgacagcaaccgg

SEQ ID NO: 2451926 - RNA, 19 nt, Artificial Sequence
  Description of Artificial Sequence: Synthetic oligonucleotide
ggcauucagggugcuguag

SEQ ID NO: 2451927 - RNA, 19 nt, Artificial Sequence
  Description of Artificial Sequence: Synthetic oligonucleotide
cugcgugcgcucagaagca

SEQ ID NO: 2451928 - RNA, 19 nt, Artificial Sequence
  Description of Artificial Sequence: Synthetic oligonucleotide
agcauggaggucagguuua

SEQ ID NO: 2451929 - RNA, 19 nt, Artificial Sequence
  Description of Artificial Sequence: Synthetic oligonucleotide
cucgcaggccaggaugcug

SEQ ID NO: 2451930 - RNA, 19 nt, Artificial Sequence
  Description of Artificial Sequence: Synthetic oligonucleotide
cagccuucccagcacagua

SEQ ID NO: 2451931 - RNA, 19 nt, Artificial Sequence
  Description of Artificial Sequence: Synthetic oligonucleotide
gagguuucucuagccagcu

SEQ ID NO: 2451932 - RNA, 19 nt, Artificial Sequence
  Description of Artificial Sequence: Synthetic oligonucleotide
ggccaaagccucgggaggc

SEQ ID NO: 2451933 - RNA, 19 nt, Artificial Sequence
  Description of Artificial Sequence: Synthetic oligonucleotide
gagcuugcgcacagugcac

SEQ ID NO: 2451934 - RNA, 19 nt, Artificial Sequence
  Description of Artificial Sequence: Synthetic oligonucleotide
gcgacagcaaccgggccag

SEQ ID NO: 2451935 - RNA, 19 nt, Artificial Sequence
  Description of Artificial Sequence: Synthetic oligonucleotide
gcaacacucgcaggccagg

SEQ ID NO: 2451936 - RNA, 19 nt, Artificial Sequence
  Description of Artificial Sequence: Synthetic oligonucleotide
uccggccucggugcccagg

SEQ ID NO: 2451937 - RNA, 19 nt, Artificial Sequence
  Description of Artificial Sequence: Synthetic oligonucleotide
ccccggucagcacacacac

SEQ ID NO: 2451938 - RNA, 19 nt, Artificial Sequence
  Description of Artificial Sequence: Synthetic oligonucleotide
gggagcuugcgcacagugc

SEQ ID NO: 2451939 - RNA, 19 nt, Artificial Sequence
  Description of Artificial Sequence: Synthetic oligonucleotide
cgaggguuuucugggaagg

SEQ ID NO: 2451940 - RNA, 19 nt, Artificial Sequence
  Description of Artificial Sequence: Synthetic oligonucleotide
ggcaggacauggucuuaac

SEQ ID NO: 2451941 - RNA, 19 nt, Artificial Sequence
  Description of Artificial Sequence: Synthetic oligonucleotide
cccaguaguuguucacuuc

SEQ ID NO: 2451942 - RNA, 19 nt, Artificial Sequence
  Description of Artificial Sequence: Synthetic oligonucleotide
cgccaagucacugcgugcg

SEQ ID NO: 2451943 - RNA, 19 nt, Artificial Sequence
  Description of Artificial Sequence: Synthetic oligonucleotide
acccacaauccaccagcuu

SEQ ID NO: 2451944 - RNA, 19 nt, Artificial Sequence
  Description of Artificial Sequence: Synthetic oligonucleotide
aagccucgggaggccccgg

SEQ ID NO: 2451945 - RNA, 19 nt, Artificial Sequence
  Description of Artificial Sequence: Synthetic oligonucleotide
ccuggagcauagcucagca

SEQ ID NO: 2451946 - RNA, 19 nt, Artificial Sequence
  Description of Artificial Sequence: Synthetic oligonucleotide
ggcaagggcgcggccaaag

SEQ ID NO: 2451947 - RNA, 19 nt, Artificial Sequence
  Description of Artificial Sequence: Synthetic oligonucleotide
gcaaccgggccagcagugg

SEQ ID NO: 2451948 - RNA, 19 nt, Artificial Sequence
  Description of Artificial Sequence: Synthetic oligonucleotide
agguguucuuuugcagcaa

SEQ ID NO: 2451949 - RNA, 19 nt, Artificial Sequence
  Description of Artificial Sequence: Synthetic oligonucleotide
caguaguuucugggcugag

SEQ ID NO: 2451950 - RNA, 19 nt, Artificial Sequence
  Description of Artificial Sequence: Synthetic oligonucleotide
cagcacggaaccgggcgac

SEQ ID NO: 2451951 - RNA, 19 nt, Artificial Sequence
  Description of Artificial Sequence: Synthetic oligonucleotide
ggcuccagacuggaaggug

SEQ ID NO: 2451952 - RNA, 19 nt, Artificial Sequence
  Description of Artificial Sequence: Synthetic oligonucleotide
gcacccucacacuggguuc

SEQ ID NO: 2451953 - RNA, 19 nt, Artificial Sequence
  Description of Artificial Sequence: Synthetic oligonucleotide
cugguccuuaacucugggu

SEQ ID NO: 2451954 - RNA, 19 nt, Artificial Sequence
  Description of Artificial Sequence: Synthetic oligonucleotide
gcaggacauggucuuaacu

SEQ ID NO: 2451955 - RNA, 19 nt, Artificial Sequence
  Description of Artificial Sequence: Synthetic oligonucleotide
caguggggcaagggcgcgg

SEQ ID NO: 2451956 - RNA, 19 nt, Artificial Sequence
  Description of Artificial Sequence: Synthetic oligonucleotide
ggcgcggccaaagccucgg

SEQ ID NO: 2451957 - RNA, 19 nt, Artificial Sequence
  Description of Artificial Sequence: Synthetic oligonucleotide
caacccuugaagggcucca

SEQ ID NO: 2451958 - RNA, 19 nt, Artificial Sequence
  Description of Artificial Sequence: Synthetic oligonucleotide
caagaguaccugcauuguu

SEQ ID NO: 2451959 - RNA, 19 nt, Artificial Sequence
  Description of Artificial Sequence: Synthetic oligonucleotide
gcauagcucagcacccuca

SEQ ID NO: 2451960 - RNA, 19 nt, Artificial Sequence
  Description of Artificial Sequence: Synthetic oligonucleotide
cuaggaccugguacaacau

SEQ ID NO: 2451961 - RNA, 19 nt, Artificial Sequence
  Description of Artificial Sequence: Synthetic oligonucleotide
gucacugcgugcgcucaga

SEQ ID NO: 2451962 - RNA, 19 nt, Artificial Sequence
  Description of Artificial Sequence: Synthetic oligonucleotide
guccuuaacucuggguccu

SEQ ID NO: 2451963 - RNA, 19 nt, Artificial Sequence
  Description of Artificial Sequence: Synthetic oligonucleotide
gcauggaggucagguuuag

SEQ ID NO: 2451964 - RNA, 19 nt, Artificial Sequence
  Description of Artificial Sequence: Synthetic oligonucleotide
gccaagucacugcgugcgc

SEQ ID NO: 2451965 - RNA, 19 nt, Artificial Sequence
  Description of Artificial Sequence: Synthetic oligonucleotide
uggguccuuggagguuucu

SEQ ID NO: 2451966 - RNA, 19 nt, Artificial Sequence
  Description of Artificial Sequence: Synthetic oligonucleotide
gcgccaagucacugcgugc

SEQ ID NO: 2451967 - RNA, 19 nt, Artificial Sequence
  Description of Artificial Sequence: Synthetic oligonucleotide
gucagguuuagagcccagu

SEQ ID NO: 2451968 - RNA, 19 nt, Artificial Sequence
  Description of Artificial Sequence: Synthetic oligonucleotide
caacacucgcaggccagga

SEQ ID NO: 2451969 - RNA, 19 nt, Artificial Sequence
  Description of Artificial Sequence: Synthetic oligonucleotide
ccaacccuugaagggcucc

SEQ ID NO: 2451970 - RNA, 19 nt, Artificial Sequence
  Description of Artificial Sequence: Synthetic oligonucleotide
gcagcacggaaccgggcga

SEQ ID NO: 2451971 - RNA, 19 nt, Artificial Sequence
  Description of Artificial Sequence: Synthetic oligonucleotide
gcugaagcgaggguuuucu

SEQ ID NO: 2451972 - RNA, 19 nt, Artificial Sequence
  Description of Artificial Sequence: Synthetic oligonucleotide
gacccacaauccaccagcu

SEQ ID NO: 2451973 - RNA, 19 nt, Artificial Sequence
  Description of Artificial Sequence: Synthetic oligonucleotide
gaagccccucgggccuggg

SEQ ID NO: 2451974 - RNA, 19 nt, Artificial Sequence
  Description of Artificial Sequence: Synthetic oligonucleotide
cucgggccuggggagcuug

SEQ ID NO: 2451975 - RNA, 19 nt, Artificial Sequence
  Description of Artificial Sequence: Synthetic oligonucleotide
agccucgggaggccccggu

SEQ ID NO: 2451976 - RNA, 19 nt, Artificial Sequence
  Description of Artificial Sequence: Synthetic oligonucleotide
gaguaccugcauuguugau

SEQ ID NO: 2451977 - RNA, 19 nt, Artificial Sequence
  Description of Artificial Sequence: Synthetic oligonucleotide
cacacagagaugagauguu

SEQ ID NO: 2451978 - RNA, 19 nt, Artificial Sequence
  Description of Artificial Sequence: Synthetic oligonucleotide
cgggcgacagcaaccgggc

SEQ ID NO: 2451979 - RNA, 19 nt, Artificial Sequence
  Description of Artificial Sequence: Synthetic oligonucleotide
ccuuaacucuggguccuug

SEQ ID NO: 2451980 - RNA, 19 nt, Artificial Sequence
  Description of Artificial Sequence: Synthetic oligonucleotide
agcacggaaccgggcgaca

SEQ ID NO: 2451981 - RNA, 19 nt, Artificial Sequence
  Description of Artificial Sequence: Synthetic oligonucleotide
gucuugcugaagcgagggu

SEQ ID NO: 2451982 - RNA, 19 nt, Artificial Sequence
  Description of Artificial Sequence: Synthetic oligonucleotide
uccaggggaccuggagcau

SEQ ID NO: 2451983 - RNA, 19 nt, Artificial Sequence
  Description of Artificial Sequence: Synthetic oligonucleotide
cugaagccccucgggccug

SEQ ID NO: 2451984 - RNA, 19 nt, Artificial Sequence
  Description of Artificial Sequence: Synthetic oligonucleotide
cccgcaacacucgcaggcc

SEQ ID NO: 2451985 - RNA, 19 nt, Artificial Sequence
  Description of Artificial Sequence: Synthetic oligonucleotide
gcaguggggcaagggcgcg

SEQ ID NO: 2451986 - RNA, 19 nt, Artificial Sequence
  Description of Artificial Sequence: Synthetic oligonucleotide
cgugcgcucagaagcagca

SEQ ID NO: 2451987 - RNA, 19 nt, Artificial Sequence
  Description of Artificial Sequence: Synthetic oligonucleotide
cagcaaccgggccagcagu

SEQ ID NO: 2451988 - RNA, 19 nt, Artificial Sequence
  Description of Artificial Sequence: Synthetic oligonucleotide
guggggcaagggcgcggcc

SEQ ID NO: 2451989 - RNA, 19 nt, Artificial Sequence
  Description of Artificial Sequence: Synthetic oligonucleotide
gccccucgggccuggggag

SEQ ID NO: 2451990 - RNA, 19 nt, Artificial Sequence
  Description of Artificial Sequence: Synthetic oligonucleotide
ggauggcuuuggaaauauc

SEQ ID NO: 2451991 - RNA, 19 nt, Artificial Sequence
  Description of Artificial Sequence: Synthetic oligonucleotide
gcgugcgcucagaagcagc

SEQ ID NO: 2451992 - RNA, 19 nt, Artificial Sequence
  Description of Artificial Sequence: Synthetic oligonucleotide
gggcgacagcaaccgggcc

SEQ ID NO: 2451993 - RNA, 19 nt, Artificial Sequence
  Description of Artificial Sequence: Synthetic oligonucleotide
gugcaucccaguccgccuu

SEQ ID NO: 2451994 - RNA, 19 nt, Artificial Sequence
  Description of Artificial Sequence: Synthetic oligonucleotide
gggcaggacauggucuuaa

SEQ ID NO: 2451995 - RNA, 19 nt, Artificial Sequence
  Description of Artificial Sequence: Synthetic oligonucleotide
ccucgggaggccccgguca

SEQ ID NO: 2451996 - RNA, 19 nt, Artificial Sequence
  Description of Artificial Sequence: Synthetic oligonucleotide
cagcuaggaccugguacaa

SEQ ID NO: 2451997 - RNA, 19 nt, Artificial Sequence
  Description of Artificial Sequence: Synthetic oligonucleotide
gcugcccgcaacacucgca

SEQ ID NO: 2451998 - RNA, 19 nt, Artificial Sequence
  Description of Artificial Sequence: Synthetic oligonucleotide
gccccggucagcacacaca

SEQ ID NO: 2451999 - RNA, 19 nt, Artificial Sequence
  Description of Artificial Sequence: Synthetic oligonucleotide
cagcagcuaggaccuggua

SEQ ID NO: 2452000 - RNA, 19 nt, Artificial Sequence
  Description of Artificial Sequence: Synthetic oligonucleotide
gcgcggccaaagccucggg

SEQ ID NO: 2452001 - RNA, 19 nt, Artificial Sequence
  Description of Artificial Sequence: Synthetic oligonucleotide
gcacaacagcugcugcacu

SEQ ID NO: 2452002 - RNA, 19 nt, Artificial Sequence
  Description of Artificial Sequence: Synthetic oligonucleotide
cccaacccuugaagggcuc

SEQ ID NO: 2452003 - RNA, 19 nt, Artificial Sequence
  Description of Artificial Sequence: Synthetic oligonucleotide
gcccaguaguuguucacuu

SEQ ID NO: 2452004 - RNA, 19 nt, Artificial Sequence
  Description of Artificial Sequence: Synthetic oligonucleotide
ccgcaacacucgcaggcca

SEQ ID NO: 2452005 - RNA, 19 nt, Artificial Sequence
  Description of Artificial Sequence: Synthetic oligonucleotide
caucccaguccgccuuccu

SEQ ID NO: 2452006 - RNA, 19 nt, Artificial Sequence
  Description of Artificial Sequence: Synthetic oligonucleotide
gggcgcggccaaagccucg

SEQ ID NO: 2452007 - RNA, 19 nt, Artificial Sequence
  Description of Artificial Sequence: Synthetic oligonucleotide
ccaagaguaccugcauugu

SEQ ID NO: 2452008 - RNA, 19 nt, Artificial Sequence
  Description of Artificial Sequence: Synthetic oligonucleotide
ggucagcugcugcccgcaa

SEQ ID NO: 2452009 - RNA, 19 nt, Artificial Sequence
  Description of Artificial Sequence: Synthetic oligonucleotide
cagcgccaagucacugcgu

SEQ ID NO: 2452010 - RNA, 19 nt, Artificial Sequence
  Description of Artificial Sequence: Synthetic oligonucleotide
cucuagccagcugcugcau

SEQ ID NO: 2452011 - RNA, 19 nt, Artificial Sequence
  Description of Artificial Sequence: Synthetic oligonucleotide
cccggucagcacacacaca

SEQ ID NO: 2452012 - RNA, 19 nt, Artificial Sequence
  Description of Artificial Sequence: Synthetic oligonucleotide
ggaaggcauucagggugcu

SEQ ID NO: 2452013 - RNA, 19 nt, Artificial Sequence
  Description of Artificial Sequence: Synthetic oligonucleotide
cugcugggucauucacauu

SEQ ID NO: 2452014 - RNA, 19 nt, Artificial Sequence
  Description of Artificial Sequence: Synthetic oligonucleotide
cggucagcacacacacagu

SEQ ID NO: 2452015 - RNA, 19 nt, Artificial Sequence
  Description of Artificial Sequence: Synthetic oligonucleotide
cggaaccgggcgacagcaa

SEQ ID NO: 2452016 - RNA, 19 nt, Artificial Sequence
  Description of Artificial Sequence: Synthetic oligonucleotide
gggcaagggcgcggccaaa

SEQ ID NO: 2452017 - RNA, 19 nt, Artificial Sequence
  Description of Artificial Sequence: Synthetic oligonucleotide
cgacagcaaccgggccagc

SEQ ID NO: 2452018 - RNA, 19 nt, Artificial Sequence
  Description of Artificial Sequence: Synthetic oligonucleotide
ccaguccgccuuccuccau

SEQ ID NO: 2452019 - RNA, 19 nt, Artificial Sequence
  Description of Artificial Sequence: Synthetic oligonucleotide
ccucgggccuggggagcuu

SEQ ID NO: 2452020 - RNA, 19 nt, Artificial Sequence
  Description of Artificial Sequence: Synthetic oligonucleotide
uuuauaaucaaauugauca

SEQ ID NO: 2452021 - RNA, 19 nt, Artificial Sequence
  Description of Artificial Sequence: Synthetic oligonucleotide
aaauugaucacgaagaagc

SEQ ID NO: 2452022 - RNA, 19 nt, Artificial Sequence
  Description of Artificial Sequence: Synthetic oligonucleotide
uuaaauauagcauauguag

SEQ ID NO: 2452023 - RNA, 19 nt, Artificial Sequence
  Description of Artificial Sequence: Synthetic oligonucleotide
uuuaauauaucacagacaa

SEQ ID NO: 2452024 - RNA, 19 nt, Artificial Sequence
  Description of Artificial Sequence: Synthetic oligonucleotide
guauauuaaauauacaagg

SEQ ID NO: 2452025 - RNA, 19 nt, Artificial Sequence
  Description of Artificial Sequence: Synthetic oligonucleotide
uauaguauauuaaauauac

SEQ ID NO: 2452026 - RNA, 19 nt, Artificial Sequence
  Description of Artificial Sequence: Synthetic oligonucleotide
augauauuguacuauagcc

SEQ ID NO: 2452027 - RNA, 19 nt, Artificial Sequence
  Description of Artificial Sequence: Synthetic oligonucleotide
uuuaauaaauauuauagua

SEQ ID NO: 2452028 - RNA, 19 nt, Artificial Sequence
  Description of Artificial Sequence: Synthetic oligonucleotide
gaaguucugauacauaagg

SEQ ID NO: 2452029 - RNA, 19 nt, Artificial Sequence
  Description of Artificial Sequence: Synthetic oligonucleotide
aguaaugaacaauggagcc

SEQ ID NO: 2452030 - RNA, 19 nt, Artificial Sequence
  Description of Artificial Sequence: Synthetic oligonucleotide
uaaugaugggcaaagaugc

SEQ ID NO: 2452031 - RNA, 19 nt, Artificial Sequence
  Description of Artificial Sequence: Synthetic oligonucleotide
auauguaguagccaaaguc

SEQ ID NO: 2452032 - RNA, 19 nt, Artificial Sequence
  Description of Artificial Sequence: Synthetic oligonucleotide
gauauuguacuauagccag

SEQ ID NO: 2452033 - RNA, 19 nt, Artificial Sequence
  Description of Artificial Sequence: Synthetic oligonucleotide
aauguuaucuucaguauac

SEQ ID NO: 2452034 - RNA, 19 nt, Artificial Sequence
  Description of Artificial Sequence: Synthetic oligonucleotide
uuuccuugaagucagaaac

SEQ ID NO: 2452035 - RNA, 19 nt, Artificial Sequence
  Description of Artificial Sequence: Synthetic oligonucleotide
ugguuuauaaucaaauuga

SEQ ID NO: 2452036 - RNA, 19 nt, Artificial Sequence
  Description of Artificial Sequence: Synthetic oligonucleotide
aguucugauacauaagggg

SEQ ID NO: 2452037 - RNA, 19 nt, Artificial Sequence
  Description of Artificial Sequence: Synthetic oligonucleotide
ucuauauuggauuccauca

SEQ ID NO: 2452038 - RNA, 19 nt, Artificial Sequence
  Description of Artificial Sequence: Synthetic oligonucleotide
uauaucacagacaauuuga

SEQ ID NO: 2452039 - RNA, 19 nt, Artificial Sequence
  Description of Artificial Sequence: Synthetic oligonucleotide
uuaucuucaguauacaggu

SEQ ID NO: 2452040 - RNA, 19 nt, Artificial Sequence
  Description of Artificial Sequence: Synthetic oligonucleotide
uuguacuauagccagauac

SEQ ID NO: 2452041 - RNA, 19 nt, Artificial Sequence
  Description of Artificial Sequence: Synthetic oligonucleotide
aaaguuauuuauuuaggaa

SEQ ID NO: 2452042 - RNA, 19 nt, Artificial Sequence
  Description of Artificial Sequence: Synthetic oligonucleotide
gaugauauuguacuauagc

SEQ ID NO: 2452043 - RNA, 19 nt, Artificial Sequence
  Description of Artificial Sequence: Synthetic oligonucleotide
aaauauagcauauguagua

SEQ ID NO: 2452044 - RNA, 19 nt, Artificial Sequence
  Description of Artificial Sequence: Synthetic oligonucleotide
uuuauuuaggaaugaaaga

SEQ ID NO: 2452045 - RNA, 19 nt, Artificial Sequence
  Description of Artificial Sequence: Synthetic oligonucleotide
auuggauuccaucagaagu

SEQ ID NO: 2452046 - RNA, 19 nt, Artificial Sequence
  Description of Artificial Sequence: Synthetic oligonucleotide
uugaauuuuccauucagca

SEQ ID NO: 2452047 - RNA, 19 nt, Artificial Sequence
  Description of Artificial Sequence: Synthetic oligonucleotide
aucacgaagaagcuuauag

SEQ ID NO: 2452048 - RNA, 19 nt, Artificial Sequence
  Description of Artificial Sequence: Synthetic oligonucleotide
aaacucuacaguuagggau

SEQ ID NO: 2452049 - RNA, 19 nt, Artificial Sequence
  Description of Artificial Sequence: Synthetic oligonucleotide
uuuccauucagcaaaucca

SEQ ID NO: 2452050 - RNA, 19 nt, Artificial Sequence
  Description of Artificial Sequence: Synthetic oligonucleotide
ugauauuguacuauagcca

SEQ ID NO: 2452051 - RNA, 19 nt, Artificial Sequence
  Description of Artificial Sequence: Synthetic oligonucleotide
uauagcauauguaguagcc

SEQ ID NO: 2452052 - RNA, 19 nt, Artificial Sequence
  Description of Artificial Sequence: Synthetic oligonucleotide
aacaauggagccccugggc

SEQ ID NO: 2452053 - RNA, 19 nt, Artificial Sequence
  Description of Artificial Sequence: Synthetic oligonucleotide
auauagcauauguaguagc

SEQ ID NO: 2452054 - RNA, 19 nt, Artificial Sequence
  Description of Artificial Sequence: Synthetic oligonucleotide
gauuugagcauuucaguag

SEQ ID NO: 2452055 - RNA, 19 nt, Artificial Sequence
  Description of Artificial Sequence: Synthetic oligonucleotide
uucaguauacaggugacgg

SEQ ID NO: 2452056 - RNA, 19 nt, Artificial Sequence
  Description of Artificial Sequence: Synthetic oligonucleotide
uuaggaaugaaagaaacuc

SEQ ID NO: 2452057 - RNA, 19 nt, Artificial Sequence
  Description of Artificial Sequence: Synthetic oligonucleotide
uaaauauagcauauguagu

SEQ ID NO: 2452058 - RNA, 19 nt, Artificial Sequence
  Description of Artificial Sequence: Synthetic oligonucleotide
aauauagcauauguaguag

SEQ ID NO: 2452059 - RNA, 19 nt, Artificial Sequence
  Description of Artificial Sequence: Synthetic oligonucleotide
cugguuuauaaucaaauug

SEQ ID NO: 2452060 - RNA, 19 nt, Artificial Sequence
  Description of Artificial Sequence: Synthetic oligonucleotide
acaguaaugaacaauggag

SEQ ID NO: 2452061 - RNA, 19 nt, Artificial Sequence
  Description of Artificial Sequence: Synthetic oligonucleotide
cuaaugaugggcaaagaug

SEQ ID NO: 2452062 - RNA, 19 nt, Artificial Sequence
  Description of Artificial Sequence: Synthetic oligonucleotide
guuaucuucaguauacagg

SEQ ID NO: 2452063 - RNA, 19 nt, Artificial Sequence
  Description of Artificial Sequence: Synthetic oligonucleotide
aaggaguucuuaaauauag

SEQ ID NO: 2452064 - RNA, 19 nt, Artificial Sequence
  Description of Artificial Sequence: Synthetic oligonucleotide
uguauugucaaugccaaug

SEQ ID NO: 2452065 - RNA, 19 nt, Artificial Sequence
  Description of Artificial Sequence: Synthetic oligonucleotide
ugaacaauggagccccugg

SEQ ID NO: 2452066 - RNA, 19 nt, Artificial Sequence
  Description of Artificial Sequence: Synthetic oligonucleotide
aucacagacaauuugaauu

SEQ ID NO: 2452067 - RNA, 19 nt, Artificial Sequence
  Description of Artificial Sequence: Synthetic oligonucleotide
gaauuuuccauucagcaaa

SEQ ID NO: 2452068 - RNA, 19 nt, Artificial Sequence
  Description of Artificial Sequence: Synthetic oligonucleotide
auauuagaaaguuauuuau

SEQ ID NO: 2452069 - RNA, 19 nt, Artificial Sequence
  Description of Artificial Sequence: Synthetic oligonucleotide
gaaaguuauuuauuuagga

SEQ ID NO: 2452070 - RNA, 19 nt, Artificial Sequence
  Description of Artificial Sequence: Synthetic oligonucleotide
uguacuauagccagauacu

SEQ ID NO: 2452071 - RNA, 19 nt, Artificial Sequence
  Description of Artificial Sequence: Synthetic oligonucleotide
aguucuuaaauauagcaua

SEQ ID NO: 2452072 - RNA, 19 nt, Artificial Sequence
  Description of Artificial Sequence: Synthetic oligonucleotide
augaagucuuguccgagcc

SEQ ID NO: 2452073 - RNA, 19 nt, Artificial Sequence
  Description of Artificial Sequence: Synthetic oligonucleotide
agaguagcuaaugaugggc

SEQ ID NO: 2452074 - RNA, 19 nt, Artificial Sequence
  Description of Artificial Sequence: Synthetic oligonucleotide
aaaucuuucaagccacagu

SEQ ID NO: 2452075 - RNA, 19 nt, Artificial Sequence
  Description of Artificial Sequence: Synthetic oligonucleotide
uguuaucuucaguauacag

SEQ ID NO: 2452076 - RNA, 19 nt, Artificial Sequence
  Description of Artificial Sequence: Synthetic oligonucleotide
uuugcuaagagcuucuaua

SEQ ID NO: 2452077 - RNA, 19 nt, Artificial Sequence
  Description of Artificial Sequence: Synthetic oligonucleotide
aggaaugucaauguuaucu

SEQ ID NO: 2452078 - RNA, 19 nt, Artificial Sequence
  Description of Artificial Sequence: Synthetic oligonucleotide
uucugauacauaaggggag

SEQ ID NO: 2452079 - RNA, 19 nt, Artificial Sequence
  Description of Artificial Sequence: Synthetic oligonucleotide
uaaugaacaauggagcccc

SEQ ID NO: 2452080 - RNA, 19 nt, Artificial Sequence
  Description of Artificial Sequence: Synthetic oligonucleotide
aaugaaagaaacucacauu

SEQ ID NO: 2452081 - RNA, 19 nt, Artificial Sequence
  Description of Artificial Sequence: Synthetic oligonucleotide
uuuaggaaugaaagaaacu

SEQ ID NO: 2452082 - RNA, 19 nt, Artificial Sequence
  Description of Artificial Sequence: Synthetic oligonucleotide
uauauuggauuccaucaga

SEQ ID NO: 2452083 - RNA, 19 nt, Artificial Sequence
  Description of Artificial Sequence: Synthetic oligonucleotide
aguccgaugauauuguacu

SEQ ID NO: 2452084 - RNA, 19 nt, Artificial Sequence
  Description of Artificial Sequence: Synthetic oligonucleotide
uuauaaucaaauugaucac

SEQ ID NO: 2452085 - RNA, 19 nt, Artificial Sequence
  Description of Artificial Sequence: Synthetic oligonucleotide
uuucaagccacaguaauga

SEQ ID NO: 2452086 - RNA, 19 nt, Artificial Sequence
  Description of Artificial Sequence: Synthetic oligonucleotide
cauccuuuccauuuucugg

SEQ ID NO: 2452087 - RNA, 19 nt, Artificial Sequence
  Description of Artificial Sequence: Synthetic oligonucleotide
uuccauucagcaaauccag

SEQ ID NO: 2452088 - RNA, 19 nt, Artificial Sequence
  Description of Artificial Sequence: Synthetic oligonucleotide
guauugucaaugccaaugg

SEQ ID NO: 2452089 - RNA, 19 nt, Artificial Sequence
  Description of Artificial Sequence: Synthetic oligonucleotide
ucaucacacaauuuaauau

SEQ ID NO: 2452090 - RNA, 19 nt, Artificial Sequence
  Description of Artificial Sequence: Synthetic oligonucleotide
uuuucaucacacaauuuaa

SEQ ID NO: 2452091 - RNA, 19 nt, Artificial Sequence
  Description of Artificial Sequence: Synthetic oligonucleotide
uauagccagauacuguccc

SEQ ID NO: 2452092 - RNA, 19 nt, Artificial Sequence
  Description of Artificial Sequence: Synthetic oligonucleotide
ucucacugcuugaacaagg

SEQ ID NO: 2452093 - RNA, 19 nt, Artificial Sequence
  Description of Artificial Sequence: Synthetic oligonucleotide
aagagaguagcuaaugaug

SEQ ID NO: 2452094 - RNA, 19 nt, Artificial Sequence
  Description of Artificial Sequence: Synthetic oligonucleotide
uacaguuagggauuugagc

SEQ ID NO: 2452095 - RNA, 19 nt, Artificial Sequence
  Description of Artificial Sequence: Synthetic oligonucleotide
uugaucacgaagaagcuua

SEQ ID NO: 2452096 - RNA, 19 nt, Artificial Sequence
  Description of Artificial Sequence: Synthetic oligonucleotide
acauuuaauaaauauuaua

SEQ ID NO: 2452097 - RNA, 19 nt, Artificial Sequence
  Description of Artificial Sequence: Synthetic oligonucleotide
auugaguccgaugauauug

SEQ ID NO: 2452098 - RNA, 19 nt, Artificial Sequence
  Description of Artificial Sequence: Synthetic oligonucleotide
aaaacucuacaguuaggga

SEQ ID NO: 2452099 - RNA, 19 nt, Artificial Sequence
  Description of Artificial Sequence: Synthetic oligonucleotide
aucaaauugaucacgaaga

SEQ ID NO: 2452100 - RNA, 19 nt, Artificial Sequence
  Description of Artificial Sequence: Synthetic oligonucleotide
acauaaggggaguaugagg

SEQ ID NO: 2452101 - RNA, 19 nt, Artificial Sequence
  Description of Artificial Sequence: Synthetic oligonucleotide
aucuucaguauacagguga

SEQ ID NO: 2452102 - RNA, 19 nt, Artificial Sequence
  Description of Artificial Sequence: Synthetic oligonucleotide
uccauuuucuggauuguug

SEQ ID NO: 2452103 - RNA, 19 nt, Artificial Sequence
  Description of Artificial Sequence: Synthetic oligonucleotide
uauacaaggaguucuuaaa

SEQ ID NO: 2452104 - RNA, 19 nt, Artificial Sequence
  Description of Artificial Sequence: Synthetic oligonucleotide
aaauccagacugcauaaau

SEQ ID NO: 2452105 - RNA, 19 nt, Artificial Sequence
  Description of Artificial Sequence: Synthetic oligonucleotide
acucacauuuaauaaauau

SEQ ID NO: 2452106 - RNA, 19 nt, Artificial Sequence
  Description of Artificial Sequence: Synthetic oligonucleotide
aauuugaauuuuccauuca

SEQ ID NO: 2452107 - RNA, 19 nt, Artificial Sequence
  Description of Artificial Sequence: Synthetic oligonucleotide
aaaacugguuuauaaucaa

SEQ ID NO: 2452108 - RNA, 19 nt, Artificial Sequence
  Description of Artificial Sequence: Synthetic oligonucleotide
agaaaguuauuuauuuagg

SEQ ID NO: 2452109 - RNA, 19 nt, Artificial Sequence
  Description of Artificial Sequence: Synthetic oligonucleotide
uauuagaaaguuauuuauu

SEQ ID NO: 2452110 - RNA, 19 nt, Artificial Sequence
  Description of Artificial Sequence: Synthetic oligonucleotide
uuauagacgguaucuguga

SEQ ID NO: 2452111 - RNA, 19 nt, Artificial Sequence
  Description of Artificial Sequence: Synthetic oligonucleotide
cuuauagacgguaucugug

SEQ ID NO: 2452112 - RNA, 19 nt, Artificial Sequence
  Description of Artificial Sequence: Synthetic oligonucleotide
ucugcagucucuucaaaca

SEQ ID NO: 2452113 - RNA, 19 nt, Artificial Sequence
  Description of Artificial Sequence: Synthetic oligonucleotide
ugugaagcgcacaucauuc

SEQ ID NO: 2452114 - RNA, 19 nt, Artificial Sequence
  Description of Artificial Sequence: Synthetic oligonucleotide
cagacaauuugaauuuucc

SEQ ID NO: 2452115 - RNA, 19 nt, Artificial Sequence
  Description of Artificial Sequence: Synthetic oligonucleotide
gaaacucacauuuaauaaa

SEQ ID NO: 2452116 - RNA, 19 nt, Artificial Sequence
  Description of Artificial Sequence: Synthetic oligonucleotide
ugucaaaacugguuuauaa

SEQ ID NO: 2452117 - RNA, 19 nt, Artificial Sequence
  Description of Artificial Sequence: Synthetic oligonucleotide
aaaaucuuucaagccacag

SEQ ID NO: 2452118 - RNA, 19 nt, Artificial Sequence
  Description of Artificial Sequence: Synthetic oligonucleotide
uuuggcaagaugaagucuu

SEQ ID NO: 2452119 - RNA, 19 nt, Artificial Sequence
  Description of Artificial Sequence: Synthetic oligonucleotide
aguuauuuauuuaggaaug

SEQ ID NO: 2452120 - RNA, 19 nt, Artificial Sequence
  Description of Artificial Sequence: Synthetic oligonucleotide
acaaggaguucuuaaauau

SEQ ID NO: 2452121 - RNA, 19 nt, Artificial Sequence
  Description of Artificial Sequence: Synthetic oligonucleotide
uagccaaaguccuagagau

SEQ ID NO: 2452122 - RNA, 19 nt, Artificial Sequence
  Description of Artificial Sequence: Synthetic oligonucleotide
uaagagaguagcuaaugau

SEQ ID NO: 2452123 - RNA, 19 nt, Artificial Sequence
  Description of Artificial Sequence: Synthetic oligonucleotide
ugagcauuucaguagcucu

SEQ ID NO: 2452124 - RNA, 19 nt, Artificial Sequence
  Description of Artificial Sequence: Synthetic oligonucleotide
gauacauaaggggaguaug

SEQ ID NO: 2452125 - RNA, 19 nt, Artificial Sequence
  Description of Artificial Sequence: Synthetic oligonucleotide
acaauuugaauuuuccauu

SEQ ID NO: 2452126 - RNA, 19 nt, Artificial Sequence
  Description of Artificial Sequence: Synthetic oligonucleotide
gcuaagagcuucuauauug

SEQ ID NO: 2452127 - RNA, 19 nt, Artificial Sequence
  Description of Artificial Sequence: Synthetic oligonucleotide
ugaauuuuccauucagcaa

SEQ ID NO: 2452128 - RNA, 19 nt, Artificial Sequence
  Description of Artificial Sequence: Synthetic oligonucleotide
gucaauguuaucuucagua

SEQ ID NO: 2452129 - RNA, 19 nt, Artificial Sequence
  Description of Artificial Sequence: Synthetic oligonucleotide
ugggcaaagaugcugcugu

SEQ ID NO: 2452130 - RNA, 19 nt, Artificial Sequence
  Description of Artificial Sequence: Synthetic oligonucleotide
ucuuucaagccacaguaau

SEQ ID NO: 2452131 - RNA, 19 nt, Artificial Sequence
  Description of Artificial Sequence: Synthetic oligonucleotide
uauuggauuccaucagaag

SEQ ID NO: 2452132 - RNA, 19 nt, Artificial Sequence
  Description of Artificial Sequence: Synthetic oligonucleotide
uagacgguaucugugaagc

SEQ ID NO: 2452133 - RNA, 19 nt, Artificial Sequence
  Description of Artificial Sequence: Synthetic oligonucleotide
ucaaauugaucacgaagaa

SEQ ID NO: 2452134 - RNA, 19 nt, Artificial Sequence
  Description of Artificial Sequence: Synthetic oligonucleotide
guccuagagauguucauag

SEQ ID NO: 2452135 - RNA, 19 nt, Artificial Sequence
  Description of Artificial Sequence: Synthetic oligonucleotide
auacaggugacggaucacc

SEQ ID NO: 2452136 - RNA, 19 nt, Artificial Sequence
  Description of Artificial Sequence: Synthetic oligonucleotide
agagcuucuauauuggauu

SEQ ID NO: 2452137 - RNA, 19 nt, Artificial Sequence
  Description of Artificial Sequence: Synthetic oligonucleotide
aaacucacauuuaauaaau

SEQ ID NO: 2452138 - RNA, 19 nt, Artificial Sequence
  Description of Artificial Sequence: Synthetic oligonucleotide
uucaggaaugucaauguua

SEQ ID NO: 2452139 - RNA, 19 nt, Artificial Sequence
  Description of Artificial Sequence: Synthetic oligonucleotide
uuagaaaguuauuuauuua

SEQ ID NO: 2452140 - RNA, 19 nt, Artificial Sequence
  Description of Artificial Sequence: Synthetic oligonucleotide
agauguucuucuuucuuug

SEQ ID NO: 2452141 - RNA, 19 nt, Artificial Sequence
  Description of Artificial Sequence: Synthetic oligonucleotide
cuauauuggauuccaucag

SEQ ID NO: 2452142 - RNA, 19 nt, Artificial Sequence
  Description of Artificial Sequence: Synthetic oligonucleotide
aucugugaagcgcacauca

SEQ ID NO: 2452143 - RNA, 19 nt, Artificial Sequence
  Description of Artificial Sequence: Synthetic oligonucleotide
caaaacugguuuauaauca

SEQ ID NO: 2452144 - RNA, 19 nt, Artificial Sequence
  Description of Artificial Sequence: Synthetic oligonucleotide
ucuacaguuagggauuuga

SEQ ID NO: 2452145 - RNA, 19 nt, Artificial Sequence
  Description of Artificial Sequence: Synthetic oligonucleotide
caauuugaauuuuccauuc

SEQ ID NO: 2452146 - RNA, 19 nt, Artificial Sequence
  Description of Artificial Sequence: Synthetic oligonucleotide
cuucuuuccuugaagucag

SEQ ID NO: 2452147 - RNA, 19 nt, Artificial Sequence
  Description of Artificial Sequence: Synthetic oligonucleotide
gacaauuugaauuuuccau

SEQ ID NO: 2452148 - RNA, 19 nt, Artificial Sequence
  Description of Artificial Sequence: Synthetic oligonucleotide
uuaaauauacaaggaguuc

SEQ ID NO: 2452149 - RNA, 19 nt, Artificial Sequence
  Description of Artificial Sequence: Synthetic oligonucleotide
agacaauuugaauuuucca

SEQ ID NO: 2452150 - RNA, 19 nt, Artificial Sequence
  Description of Artificial Sequence: Synthetic oligonucleotide
aagcuuauagacgguaucu

SEQ ID NO: 2452151 - RNA, 19 nt, Artificial Sequence
  Description of Artificial Sequence: Synthetic oligonucleotide
ggaguaugagguaagagag

SEQ ID NO: 2452152 - RNA, 19 nt, Artificial Sequence
  Description of Artificial Sequence: Synthetic oligonucleotide
uauugucaaugccaauggc

SEQ ID NO: 2452153 - RNA, 19 nt, Artificial Sequence
  Description of Artificial Sequence: Synthetic oligonucleotide
uuggauuccaucagaaguu

SEQ ID NO: 2452154 - RNA, 19 nt, Artificial Sequence
  Description of Artificial Sequence: Synthetic oligonucleotide
gagaguagcuaaugauggg

SEQ ID NO: 2452155 - RNA, 19 nt, Artificial Sequence
  Description of Artificial Sequence: Synthetic oligonucleotide
ucacagacaauuugaauuu

SEQ ID NO: 2452156 - RNA, 19 nt, Artificial Sequence
  Description of Artificial Sequence: Synthetic oligonucleotide
gaacaauggagccccuggg

SEQ ID NO: 2452157 - RNA, 19 nt, Artificial Sequence
  Description of Artificial Sequence: Synthetic oligonucleotide
ucaauguuaucuucaguau

SEQ ID NO: 2452158 - RNA, 19 nt, Artificial Sequence
  Description of Artificial Sequence: Synthetic oligonucleotide
aacugguuuauaaucaaau

SEQ ID NO: 2452159 - RNA, 19 nt, Artificial Sequence
  Description of Artificial Sequence: Synthetic oligonucleotide
aaaccugccaguguauugu

SEQ ID NO: 2452160 - RNA, 19 nt, Artificial Sequence
  Description of Artificial Sequence: Synthetic oligonucleotide
gaugaagucuuguccgagc

SEQ ID NO: 2452161 - RNA, 19 nt, Artificial Sequence
  Description of Artificial Sequence: Synthetic oligonucleotide
uagcauauguaguagccaa

SEQ ID NO: 2452162 - RNA, 19 nt, Artificial Sequence
  Description of Artificial Sequence: Synthetic oligonucleotide
cgaagaagcuuauagacgg

SEQ ID NO: 2452163 - RNA, 19 nt, Artificial Sequence
  Description of Artificial Sequence: Synthetic oligonucleotide
cuuucaagccacaguaaug

SEQ ID NO: 2452164 - RNA, 19 nt, Artificial Sequence
  Description of Artificial Sequence: Synthetic oligonucleotide
aagcgcacaucauucuuug

SEQ ID NO: 2452165 - RNA, 19 nt, Artificial Sequence
  Description of Artificial Sequence: Synthetic oligonucleotide
uauuguacuauagccagau

SEQ ID NO: 2452166 - RNA, 19 nt, Artificial Sequence
  Description of Artificial Sequence: Synthetic oligonucleotide
augucaauguuaucuucag

SEQ ID NO: 2452167 - RNA, 19 nt, Artificial Sequence
  Description of Artificial Sequence: Synthetic oligonucleotide
ucauccuuuccauuuucug

SEQ ID NO: 2452168 - RNA, 19 nt, Artificial Sequence
  Description of Artificial Sequence: Synthetic oligonucleotide
ucuucaguauacaggugac

SEQ ID NO: 2452169 - RNA, 19 nt, Artificial Sequence
  Description of Artificial Sequence: Synthetic oligonucleotide
auacaaggaguucuuaaau

SEQ ID NO: 2452170 - RNA, 19 nt, Artificial Sequence
  Description of Artificial Sequence: Synthetic oligonucleotide
agccccugggcauugaguc

SEQ ID NO: 2452171 - RNA, 19 nt, Artificial Sequence
  Description of Artificial Sequence: Synthetic oligonucleotide
cauuucaguagcucugcag

SEQ ID NO: 2452172 - RNA, 19 nt, Artificial Sequence
  Description of Artificial Sequence: Synthetic oligonucleotide
cuuaaauauagcauaugua

SEQ ID NO: 2452173 - RNA, 19 nt, Artificial Sequence
  Description of Artificial Sequence: Synthetic oligonucleotide
auaaucaaauugaucacga

SEQ ID NO: 2452174 - RNA, 19 nt, Artificial Sequence
  Description of Artificial Sequence: Synthetic oligonucleotide
uacauaaggggaguaugag

SEQ ID NO: 2452175 - RNA, 19 nt, Artificial Sequence
  Description of Artificial Sequence: Synthetic oligonucleotide
uacaaggaguucuuaaaua

SEQ ID NO: 2452176 - RNA, 19 nt, Artificial Sequence
  Description of Artificial Sequence: Synthetic oligonucleotide
agggauuugagcauuucag

SEQ ID NO: 2452177 - RNA, 19 nt, Artificial Sequence
  Description of Artificial Sequence: Synthetic oligonucleotide
caucauucuuugcuaagag

SEQ ID NO: 2452178 - RNA, 19 nt, Artificial Sequence
  Description of Artificial Sequence: Synthetic oligonucleotide
ucuuuggcaagaugaaguc

SEQ ID NO: 2452179 - RNA, 19 nt, Artificial Sequence
  Description of Artificial Sequence: Synthetic oligonucleotide
agcauuucaguagcucugc

SEQ ID NO: 2452180 - RNA, 19 nt, Artificial Sequence
  Description of Artificial Sequence: Synthetic oligonucleotide
agcaaauccagacugcaua

SEQ ID NO: 2452181 - RNA, 19 nt, Artificial Sequence
  Description of Artificial Sequence: Synthetic oligonucleotide
gacgguaucugugaagcgc

SEQ ID NO: 2452182 - RNA, 19 nt, Artificial Sequence
  Description of Artificial Sequence: Synthetic oligonucleotide
gauacugucccuucaggaa

SEQ ID NO: 2452183 - RNA, 19 nt, Artificial Sequence
  Description of Artificial Sequence: Synthetic oligonucleotide
acgaagaagcuuauagacg

SEQ ID NO: 2452184 - RNA, 19 nt, Artificial Sequence
  Description of Artificial Sequence: Synthetic oligonucleotide
gaaaccugccaguguauug

SEQ ID NO: 2452185 - RNA, 19 nt, Artificial Sequence
  Description of Artificial Sequence: Synthetic oligonucleotide
auagacgguaucugugaag

SEQ ID NO: 2452186 - RNA, 19 nt, Artificial Sequence
  Description of Artificial Sequence: Synthetic oligonucleotide
uugcuaagagcuucuauau

SEQ ID NO: 2452187 - RNA, 19 nt, Artificial Sequence
  Description of Artificial Sequence: Synthetic oligonucleotide
gaagcuuauagacgguauc

SEQ ID NO: 2452188 - RNA, 19 nt, Artificial Sequence
  Description of Artificial Sequence: Synthetic oligonucleotide
guaguagccaaaguccuag

SEQ ID NO: 2452189 - RNA, 19 nt, Artificial Sequence
  Description of Artificial Sequence: Synthetic oligonucleotide
uggauuguuguuuccucug

SEQ ID NO: 2452190 - RNA, 19 nt, Artificial Sequence
  Description of Artificial Sequence: Synthetic oligonucleotide
aaagaaacucacauuuaau

SEQ ID NO: 2452191 - RNA, 19 nt, Artificial Sequence
  Description of Artificial Sequence: Synthetic oligonucleotide
cauaaggggaguaugaggu

SEQ ID NO: 2452192 - RNA, 19 nt, Artificial Sequence
  Description of Artificial Sequence: Synthetic oligonucleotide
gagguaagagaguagcuaa

SEQ ID NO: 2452193 - RNA, 19 nt, Artificial Sequence
  Description of Artificial Sequence: Synthetic oligonucleotide
uuuugucaaaacugguuua

SEQ ID NO: 2452194 - RNA, 19 nt, Artificial Sequence
  Description of Artificial Sequence: Synthetic oligonucleotide
uagagauguucauagcaaa

SEQ ID NO: 2452195 - RNA, 19 nt, Artificial Sequence
  Description of Artificial Sequence: Synthetic oligonucleotide
cuacaguuagggauuugag

SEQ ID NO: 2452196 - RNA, 19 nt, Artificial Sequence
  Description of Artificial Sequence: Synthetic oligonucleotide
caaauugaucacgaagaag

SEQ ID NO: 2452197 - RNA, 19 nt, Artificial Sequence
  Description of Artificial Sequence: Synthetic oligonucleotide
guaagagaguagcuaauga

SEQ ID NO: 2452198 - RNA, 19 nt, Artificial Sequence
  Description of Artificial Sequence: Synthetic oligonucleotide
uagcuaaugaugggcaaag

SEQ ID NO: 2452199 - RNA, 19 nt, Artificial Sequence
  Description of Artificial Sequence: Synthetic oligonucleotide
acaauggagccccugggca

SEQ ID NO: 2452200 - RNA, 19 nt, Artificial Sequence
  Description of Artificial Sequence: Synthetic oligonucleotide
guccgagccaaucaauucc

SEQ ID NO: 2452201 - RNA, 19 nt, Artificial Sequence
  Description of Artificial Sequence: Synthetic oligonucleotide
uugaguccgaugauauugu

SEQ ID NO: 2452202 - RNA, 19 nt, Artificial Sequence
  Description of Artificial Sequence: Synthetic oligonucleotide
aauugaucacgaagaagcu

SEQ ID NO: 2452203 - RNA, 19 nt, Artificial Sequence
  Description of Artificial Sequence: Synthetic oligonucleotide
caaagaugcugcugugucc

SEQ ID NO: 2452204 - RNA, 19 nt, Artificial Sequence
  Description of Artificial Sequence: Synthetic oligonucleotide
acaggugacggaucaccac

SEQ ID NO: 2452205 - RNA, 19 nt, Artificial Sequence
  Description of Artificial Sequence: Synthetic oligonucleotide
uucuuaaauauagcauaug

SEQ ID NO: 2452206 - RNA, 19 nt, Artificial Sequence
  Description of Artificial Sequence: Synthetic oligonucleotide
aguaugagguaagagagua

SEQ ID NO: 2452207 - RNA, 19 nt, Artificial Sequence
  Description of Artificial Sequence: Synthetic oligonucleotide
ucuuguccgagccaaucaa

SEQ ID NO: 2452208 - RNA, 19 nt, Artificial Sequence
  Description of Artificial Sequence: Synthetic oligonucleotide
ucaguauacaggugacgga

SEQ ID NO: 2452209 - RNA, 19 nt, Artificial Sequence
  Description of Artificial Sequence: Synthetic oligonucleotide
aaaguccuagagauguuca

SEQ ID NO: 2452210 - RNA, 19 nt, Artificial Sequence
  Description of Artificial Sequence: Synthetic oligonucleotide
guucugauacauaagggga

SEQ ID NO: 2452211 - RNA, 19 nt, Artificial Sequence
  Description of Artificial Sequence: Synthetic oligonucleotide
uauagacgguaucugugaa

SEQ ID NO: 2452212 - RNA, 19 nt, Artificial Sequence
  Description of Artificial Sequence: Synthetic oligonucleotide
uuugucaaaacugguuuau

SEQ ID NO: 2452213 - RNA, 19 nt, Artificial Sequence
  Description of Artificial Sequence: Synthetic oligonucleotide
uaucacagacaauuugaau

SEQ ID NO: 2452214 - RNA, 19 nt, Artificial Sequence
  Description of Artificial Sequence: Synthetic oligonucleotide
cuauagccagauacugucc

SEQ ID NO: 2452215 - RNA, 19 nt, Artificial Sequence
  Description of Artificial Sequence: Synthetic oligonucleotide
ugagguaagagaguagcua

SEQ ID NO: 2452216 - RNA, 19 nt, Artificial Sequence
  Description of Artificial Sequence: Synthetic oligonucleotide
acagacaauuugaauuuuc

SEQ ID NO: 2452217 - RNA, 19 nt, Artificial Sequence
  Description of Artificial Sequence: Synthetic oligonucleotide
agcuucuauauuggauucc

SEQ ID NO: 2452218 - RNA, 19 nt, Artificial Sequence
  Description of Artificial Sequence: Synthetic oligonucleotide
caucacacaauuuaauaua

SEQ ID NO: 2452219 - RNA, 19 nt, Artificial Sequence
  Description of Artificial Sequence: Synthetic oligonucleotide
ucagcaaauccagacugca

SEQ ID NO: 2452220 - RNA, 19 nt, Artificial Sequence
  Description of Artificial Sequence: Synthetic oligonucleotide
gggaguaugagguaagaga

SEQ ID NO: 2452221 - RNA, 19 nt, Artificial Sequence
  Description of Artificial Sequence: Synthetic oligonucleotide
guacuauagccagauacug

SEQ ID NO: 2452222 - RNA, 19 nt, Artificial Sequence
  Description of Artificial Sequence: Synthetic oligonucleotide
auuguuguuuccucugaaa

SEQ ID NO: 2452223 - RNA, 19 nt, Artificial Sequence
  Description of Artificial Sequence: Synthetic oligonucleotide
ucugauacauaaggggagu

SEQ ID NO: 2452224 - RNA, 19 nt, Artificial Sequence
  Description of Artificial Sequence: Synthetic oligonucleotide
uacaggugacggaucacca

SEQ ID NO: 2452225 - RNA, 19 nt, Artificial Sequence
  Description of Artificial Sequence: Synthetic oligonucleotide
ugcuugaacaaggcucugg

SEQ ID NO: 2452226 - RNA, 19 nt, Artificial Sequence
  Description of Artificial Sequence: Synthetic oligonucleotide
auacugucccuucaggaau

SEQ ID NO: 2452227 - RNA, 19 nt, Artificial Sequence
  Description of Artificial Sequence: Synthetic oligonucleotide
uucuuugcuaagagcuucu

SEQ ID NO: 2452228 - RNA, 19 nt, Artificial Sequence
  Description of Artificial Sequence: Synthetic oligonucleotide
uccgagccaaucaauuccu

SEQ ID NO: 2452229 - RNA, 19 nt, Artificial Sequence
  Description of Artificial Sequence: Synthetic oligonucleotide
uccaucagaaguucugaua

SEQ ID NO: 2452230 - RNA, 19 nt, Artificial Sequence
  Description of Artificial Sequence: Synthetic oligonucleotide
guauacaggugacggauca

SEQ ID NO: 2452231 - RNA, 19 nt, Artificial Sequence
  Description of Artificial Sequence: Synthetic oligonucleotide
uaucuucaguauacaggug

SEQ ID NO: 2452232 - RNA, 19 nt, Artificial Sequence
  Description of Artificial Sequence: Synthetic oligonucleotide
agccaaucaauuccuugug

SEQ ID NO: 2452233 - RNA, 19 nt, Artificial Sequence
  Description of Artificial Sequence: Synthetic oligonucleotide
ugaacaaggcucugguuuu

SEQ ID NO: 2452234 - RNA, 19 nt, Artificial Sequence
  Description of Artificial Sequence: Synthetic oligonucleotide
cacaguaaugaacaaugga

SEQ ID NO: 2452235 - RNA, 19 nt, Artificial Sequence
  Description of Artificial Sequence: Synthetic oligonucleotide
uuugagcauuucaguagcu

SEQ ID NO: 2452236 - RNA, 19 nt, Artificial Sequence
  Description of Artificial Sequence: Synthetic oligonucleotide
uaaggggaguaugagguaa

SEQ ID NO: 2452237 - RNA, 19 nt, Artificial Sequence
  Description of Artificial Sequence: Synthetic oligonucleotide
ugaagucuuguccgagcca

SEQ ID NO: 2452238 - RNA, 19 nt, Artificial Sequence
  Description of Artificial Sequence: Synthetic oligonucleotide
gagcuucuauauuggauuc

SEQ ID NO: 2452239 - RNA, 19 nt, Artificial Sequence
  Description of Artificial Sequence: Synthetic oligonucleotide
aauccagacugcauaaauu

SEQ ID NO: 2452240 - RNA, 19 nt, Artificial Sequence
  Description of Artificial Sequence: Synthetic oligonucleotide
ugccaguguauugucaaug

SEQ ID NO: 2452241 - RNA, 19 nt, Artificial Sequence
  Description of Artificial Sequence: Synthetic oligonucleotide
gccacaguaaugaacaaug

SEQ ID NO: 2452242 - RNA, 19 nt, Artificial Sequence
  Description of Artificial Sequence: Synthetic oligonucleotide
ugacggaucaccacagcuu

SEQ ID NO: 2452243 - RNA, 19 nt, Artificial Sequence
  Description of Artificial Sequence: Synthetic oligonucleotide
auagcauauguaguagcca

SEQ ID NO: 2452244 - RNA, 19 nt, Artificial Sequence
  Description of Artificial Sequence: Synthetic oligonucleotide
aacucuacaguuagggauu

SEQ ID NO: 2452245 - RNA, 19 nt, Artificial Sequence
  Description of Artificial Sequence: Synthetic oligonucleotide
uuggcaagaugaagucuug

SEQ ID NO: 2452246 - RNA, 19 nt, Artificial Sequence
  Description of Artificial Sequence: Synthetic oligonucleotide
augaugggcaaagaugcug

SEQ ID NO: 2452247 - RNA, 19 nt, Artificial Sequence
  Description of Artificial Sequence: Synthetic oligonucleotide
ucacugcuugaacaaggcu

SEQ ID NO: 2452248 - RNA, 19 nt, Artificial Sequence
  Description of Artificial Sequence: Synthetic oligonucleotide
aguguauugucaaugccaa

SEQ ID NO: 2452249 - RNA, 19 nt, Artificial Sequence
  Description of Artificial Sequence: Synthetic oligonucleotide
uguccgagccaaucaauuc

SEQ ID NO: 2452250 - RNA, 19 nt, Artificial Sequence
  Description of Artificial Sequence: Synthetic oligonucleotide
auaguauauuaaauauaca

SEQ ID NO: 2452251 - RNA, 19 nt, Artificial Sequence
  Description of Artificial Sequence: Synthetic oligonucleotide
auacauaaggggaguauga

SEQ ID NO: 2452252 - RNA, 19 nt, Artificial Sequence
  Description of Artificial Sequence: Synthetic oligonucleotide
acugcuugaacaaggcucu

SEQ ID NO: 2452253 - RNA, 19 nt, Artificial Sequence
  Description of Artificial Sequence: Synthetic oligonucleotide
cuucaguauacaggugacg

SEQ ID NO: 2452254 - RNA, 19 nt, Artificial Sequence
  Description of Artificial Sequence: Synthetic oligonucleotide
gagcauuucaguagcucug

SEQ ID NO: 2452255 - RNA, 19 nt, Artificial Sequence
  Description of Artificial Sequence: Synthetic oligonucleotide
uccuagagauguucauagc

SEQ ID NO: 2452256 - RNA, 19 nt, Artificial Sequence
  Description of Artificial Sequence: Synthetic oligonucleotide
uucaguagcucugcagucu

SEQ ID NO: 2452257 - RNA, 19 nt, Artificial Sequence
  Description of Artificial Sequence: Synthetic oligonucleotide
aagaagcuuauagacggua

SEQ ID NO: 2452258 - RNA, 19 nt, Artificial Sequence
  Description of Artificial Sequence: Synthetic oligonucleotide
agagauguucuucuuucuu

SEQ ID NO: 2452259 - RNA, 19 nt, Artificial Sequence
  Description of Artificial Sequence: Synthetic oligonucleotide
ugauacauaaggggaguau

SEQ ID NO: 2452260 - RNA, 19 nt, Artificial Sequence
  Description of Artificial Sequence: Synthetic oligonucleotide
uccgaugauauuguacuau

SEQ ID NO: 2452261 - RNA, 19 nt, Artificial Sequence
  Description of Artificial Sequence: Synthetic oligonucleotide
ugaagcgcacaucauucuu

SEQ ID NO: 2452262 - RNA, 19 nt, Artificial Sequence
  Description of Artificial Sequence: Synthetic oligonucleotide
agcgcacaucauucuuugc

SEQ ID NO: 2452263 - RNA, 19 nt, Artificial Sequence
  Description of Artificial Sequence: Synthetic oligonucleotide
uguaguagccaaaguccua

SEQ ID NO: 2452264 - RNA, 19 nt, Artificial Sequence
  Description of Artificial Sequence: Synthetic oligonucleotide
aaacugguuuauaaucaaa

SEQ ID NO: 2452265 - RNA, 19 nt, Artificial Sequence
  Description of Artificial Sequence: Synthetic oligonucleotide
agacgguaucugugaagcg

SEQ ID NO: 2452266 - RNA, 19 nt, Artificial Sequence
  Description of Artificial Sequence: Synthetic oligonucleotide
uuguccgagccaaucaauu

SEQ ID NO: 2452267 - RNA, 19 nt, Artificial Sequence
  Description of Artificial Sequence: Synthetic oligonucleotide
uucucacugcuugaacaag

SEQ ID NO: 2452268 - RNA, 19 nt, Artificial Sequence
  Description of Artificial Sequence: Synthetic oligonucleotide
aguagcuaaugaugggcaa

SEQ ID NO: 2452269 - RNA, 19 nt, Artificial Sequence
  Description of Artificial Sequence: Synthetic oligonucleotide
gguucucacugcuugaaca

SEQ ID NO: 2452270 - RNA, 19 nt, Artificial Sequence
  Description of Artificial Sequence: Synthetic oligonucleotide
agucuuguccgagccaauc

SEQ ID NO: 2452271 - RNA, 19 nt, Artificial Sequence
  Description of Artificial Sequence: Synthetic oligonucleotide
auuccaucagaaguucuga

SEQ ID NO: 2452272 - RNA, 19 nt, Artificial Sequence
  Description of Artificial Sequence: Synthetic oligonucleotide
caaaguccuagagauguuc

SEQ ID NO: 2452273 - RNA, 19 nt, Artificial Sequence
  Description of Artificial Sequence: Synthetic oligonucleotide
gaagucuuguccgagccaa

SEQ ID NO: 2452274 - RNA, 19 nt, Artificial Sequence
  Description of Artificial Sequence: Synthetic oligonucleotide
agcuuauagacgguaucug

SEQ ID NO: 2452275 - RNA, 19 nt, Artificial Sequence
  Description of Artificial Sequence: Synthetic oligonucleotide
gauuguuguuuccucugaa

SEQ ID NO: 2452276 - RNA, 19 nt, Artificial Sequence
  Description of Artificial Sequence: Synthetic oligonucleotide
gaguagcuaaugaugggca

SEQ ID NO: 2452277 - RNA, 19 nt, Artificial Sequence
  Description of Artificial Sequence: Synthetic oligonucleotide
gaguccgaugauauuguac

SEQ ID NO: 2452278 - RNA, 19 nt, Artificial Sequence
  Description of Artificial Sequence: Synthetic oligonucleotide
agucagaaaccugccagug

SEQ ID NO: 2452279 - RNA, 19 nt, Artificial Sequence
  Description of Artificial Sequence: Synthetic oligonucleotide
ucuuuccuugaagucagaa

SEQ ID NO: 2452280 - RNA, 19 nt, Artificial Sequence
  Description of Artificial Sequence: Synthetic oligonucleotide
agccagauacugucccuuc

SEQ ID NO: 2452281 - RNA, 19 nt, Artificial Sequence
  Description of Artificial Sequence: Synthetic oligonucleotide
uugagcauuucaguagcuc

SEQ ID NO: 2452282 - RNA, 19 nt, Artificial Sequence
  Description of Artificial Sequence: Synthetic oligonucleotide
aaugaugggcaaagaugcu

SEQ ID NO: 2452283 - RNA, 19 nt, Artificial Sequence
  Description of Artificial Sequence: Synthetic oligonucleotide
cuuuccuugaagucagaaa

SEQ ID NO: 2452284 - RNA, 19 nt, Artificial Sequence
  Description of Artificial Sequence: Synthetic oligonucleotide
gguaagagaguagcuaaug

SEQ ID NO: 2452285 - RNA, 19 nt, Artificial Sequence
  Description of Artificial Sequence: Synthetic oligonucleotide
auagccagauacugucccu

SEQ ID NO: 2452286 - RNA, 19 nt, Artificial Sequence
  Description of Artificial Sequence: Synthetic oligonucleotide
gcauauguaguagccaaag

SEQ ID NO: 2452287 - RNA, 19 nt, Artificial Sequence
  Description of Artificial Sequence: Synthetic oligonucleotide
auauuggauuccaucagaa

SEQ ID NO: 2452288 - RNA, 19 nt, Artificial Sequence
  Description of Artificial Sequence: Synthetic oligonucleotide
ugcuaagagcuucuauauu

SEQ ID NO: 2452289 - RNA, 19 nt, Artificial Sequence
  Description of Artificial Sequence: Synthetic oligonucleotide
ucugugaagcgcacaucau

SEQ ID NO: 2452290 - RNA, 19 nt, Artificial Sequence
  Description of Artificial Sequence: Synthetic oligonucleotide
ggauuugagcauuucagua

SEQ ID NO: 2452291 - RNA, 19 nt, Artificial Sequence
  Description of Artificial Sequence: Synthetic oligonucleotide
auaucacagacaauuugaa

SEQ ID NO: 2452292 - RNA, 19 nt, Artificial Sequence
  Description of Artificial Sequence: Synthetic oligonucleotide
guucucacugcuugaacaa

SEQ ID NO: 2452293 - RNA, 19 nt, Artificial Sequence
  Description of Artificial Sequence: Synthetic oligonucleotide
gaguucuuaaauauagcau

SEQ ID NO: 2452294 - RNA, 19 nt, Artificial Sequence
  Description of Artificial Sequence: Synthetic oligonucleotide
gucaaaacugguuuauaau

SEQ ID NO: 2452295 - RNA, 19 nt, Artificial Sequence
  Description of Artificial Sequence: Synthetic oligonucleotide
gccaguguauugucaaugc

SEQ ID NO: 2452296 - RNA, 19 nt, Artificial Sequence
  Description of Artificial Sequence: Synthetic oligonucleotide
uucaagccacaguaaugaa

SEQ ID NO: 2452297 - RNA, 19 nt, Artificial Sequence
  Description of Artificial Sequence: Synthetic oligonucleotide
ugaucacgaagaagcuuau

SEQ ID NO: 2452298 - RNA, 19 nt, Artificial Sequence
  Description of Artificial Sequence: Synthetic oligonucleotide
uggauuccaucagaaguuc

SEQ ID NO: 2452299 - RNA, 19 nt, Artificial Sequence
  Description of Artificial Sequence: Synthetic oligonucleotide
ccacaguaaugaacaaugg

SEQ ID NO: 2452300 - RNA, 19 nt, Artificial Sequence
  Description of Artificial Sequence: Synthetic oligonucleotide
agagauguucauagcaaaa

SEQ ID NO: 2452301 - RNA, 19 nt, Artificial Sequence
  Description of Artificial Sequence: Synthetic oligonucleotide
gccaauggccucugcaggg

SEQ ID NO: 2452302 - RNA, 19 nt, Artificial Sequence
  Description of Artificial Sequence: Synthetic oligonucleotide
gagauguucuucuuucuuu

SEQ ID NO: 2452303 - RNA, 19 nt, Artificial Sequence
  Description of Artificial Sequence: Synthetic oligonucleotide
aacucacauuuaauaaaua

SEQ ID NO: 2452304 - RNA, 19 nt, Artificial Sequence
  Description of Artificial Sequence: Synthetic oligonucleotide
gucuuguccgagccaauca

SEQ ID NO: 2452305 - RNA, 19 nt, Artificial Sequence
  Description of Artificial Sequence: Synthetic oligonucleotide
caggugacggaucaccaca

SEQ ID NO: 2452306 - RNA, 19 nt, Artificial Sequence
  Description of Artificial Sequence: Synthetic oligonucleotide
uauacaggugacggaucac

SEQ ID NO: 2452307 - RNA, 19 nt, Artificial Sequence
  Description of Artificial Sequence: Synthetic oligonucleotide
gacugcauaaauugcuuuu

SEQ ID NO: 2452308 - RNA, 19 nt, Artificial Sequence
  Description of Artificial Sequence: Synthetic oligonucleotide
caaggaguucuuaaauaua

SEQ ID NO: 2452309 - RNA, 19 nt, Artificial Sequence
  Description of Artificial Sequence: Synthetic oligonucleotide
gccaaucaauuccuugugc

SEQ ID NO: 2452310 - RNA, 19 nt, Artificial Sequence
  Description of Artificial Sequence: Synthetic oligonucleotide
cugggcauugaguccgaug

SEQ ID NO: 2452311 - RNA, 19 nt, Artificial Sequence
  Description of Artificial Sequence: Synthetic oligonucleotide
agaagcuuauagacgguau

SEQ ID NO: 2452312 - RNA, 19 nt, Artificial Sequence
  Description of Artificial Sequence: Synthetic oligonucleotide
auguuaucuucaguauaca

SEQ ID NO: 2452313 - RNA, 19 nt, Artificial Sequence
  Description of Artificial Sequence: Synthetic oligonucleotide
auaaggggaguaugaggua

SEQ ID NO: 2452314 - RNA, 19 nt, Artificial Sequence
  Description of Artificial Sequence: Synthetic oligonucleotide
guaucugugaagcgcacau

SEQ ID NO: 2452315 - RNA, 19 nt, Artificial Sequence
  Description of Artificial Sequence: Synthetic oligonucleotide
acgguaucugugaagcgca

SEQ ID NO: 2452316 - RNA, 19 nt, Artificial Sequence
  Description of Artificial Sequence: Synthetic oligonucleotide
aguccuagagauguucaua

SEQ ID NO: 2452317 - RNA, 19 nt, Artificial Sequence
  Description of Artificial Sequence: Synthetic oligonucleotide
caucagaaguucugauaca

SEQ ID NO: 2452318 - RNA, 19 nt, Artificial Sequence
  Description of Artificial Sequence: Synthetic oligonucleotide
aguuagggauuugagcauu

SEQ ID NO: 2452319 - RNA, 19 nt, Artificial Sequence
  Description of Artificial Sequence: Synthetic oligonucleotide
uugucaaaacugguuuaua

SEQ ID NO: 2452320 - RNA, 19 nt, Artificial Sequence
  Description of Artificial Sequence: Synthetic oligonucleotide
guucuuaaauauagcauau

SEQ ID NO: 2452321 - RNA, 19 nt, Artificial Sequence
  Description of Artificial Sequence: Synthetic oligonucleotide
ugaguccgaugauauugua

SEQ ID NO: 2452322 - RNA, 19 nt, Artificial Sequence
  Description of Artificial Sequence: Synthetic oligonucleotide
augaacaauggagccccug

SEQ ID NO: 2452323 - RNA, 19 nt, Artificial Sequence
  Description of Artificial Sequence: Synthetic oligonucleotide
uggcaagaugaagucuugu

SEQ ID NO: 2452324 - RNA, 19 nt, Artificial Sequence
  Description of Artificial Sequence: Synthetic oligonucleotide
augggcaaagaugcugcug

SEQ ID NO: 2452325 - RNA, 19 nt, Artificial Sequence
  Description of Artificial Sequence: Synthetic oligonucleotide
auauuguacuauagccaga

SEQ ID NO: 2452326 - RNA, 19 nt, Artificial Sequence
  Description of Artificial Sequence: Synthetic oligonucleotide
guagcuaaugaugggcaaa

SEQ ID NO: 2452327 - RNA, 19 nt, Artificial Sequence
  Description of Artificial Sequence: Synthetic oligonucleotide
cgaugauauuguacuauag

SEQ ID NO: 2452328 - RNA, 19 nt, Artificial Sequence
  Description of Artificial Sequence: Synthetic oligonucleotide
uccuuuccauuuucuggau

SEQ ID NO: 2452329 - RNA, 19 nt, Artificial Sequence
  Description of Artificial Sequence: Synthetic oligonucleotide
uucuuuccuugaagucaga

SEQ ID NO: 2452330 - RNA, 19 nt, Artificial Sequence
  Description of Artificial Sequence: Synthetic oligonucleotide
gugacggaucaccacagcu

SEQ ID NO: 2452331 - RNA, 19 nt, Artificial Sequence
  Description of Artificial Sequence: Synthetic oligonucleotide
uaucugugaagcgcacauc

SEQ ID NO: 2452332 - RNA, 19 nt, Artificial Sequence
  Description of Artificial Sequence: Synthetic oligonucleotide
auuguacuauagccagaua

SEQ ID NO: 2452333 - RNA, 19 nt, Artificial Sequence
  Description of Artificial Sequence: Synthetic oligonucleotide
aauggagccccugggcauu

SEQ ID NO: 2452334 - RNA, 19 nt, Artificial Sequence
  Description of Artificial Sequence: Synthetic oligonucleotide
aggugacggaucaccacag

SEQ ID NO: 2452335 - RNA, 19 nt, Artificial Sequence
  Description of Artificial Sequence: Synthetic oligonucleotide
gcuaaugaugggcaaagau

SEQ ID NO: 2452336 - RNA, 19 nt, Artificial Sequence
  Description of Artificial Sequence: Synthetic oligonucleotide
ggauuguuguuuccucuga

SEQ ID NO: 2452337 - RNA, 19 nt, Artificial Sequence
  Description of Artificial Sequence: Synthetic oligonucleotide
aaugaacaauggagccccu

SEQ ID NO: 2452338 - RNA, 19 nt, Artificial Sequence
  Description of Artificial Sequence: Synthetic oligonucleotide
ggggaguaugagguaagag

SEQ ID NO: 2452339 - RNA, 19 nt, Artificial Sequence
  Description of Artificial Sequence: Synthetic oligonucleotide
agaaaccugccaguguauu

SEQ ID NO: 2452340 - RNA, 19 nt, Artificial Sequence
  Description of Artificial Sequence: Synthetic oligonucleotide
gccaaaguccuagagaugu

SEQ ID NO: 2452341 - RNA, 19 nt, Artificial Sequence
  Description of Artificial Sequence: Synthetic oligonucleotide
cauauguaguagccaaagu

SEQ ID NO: 2452342 - RNA, 19 nt, Artificial Sequence
  Description of Artificial Sequence: Synthetic oligonucleotide
gcuuauagacgguaucugu

SEQ ID NO: 2452343 - RNA, 19 nt, Artificial Sequence
  Description of Artificial Sequence: Synthetic oligonucleotide
gggauuugagcauuucagu

SEQ ID NO: 2452344 - RNA, 19 nt, Artificial Sequence
  Description of Artificial Sequence: Synthetic oligonucleotide
ucuuugcuaagagcuucua

SEQ ID NO: 2452345 - RNA, 19 nt, Artificial Sequence
  Description of Artificial Sequence: Synthetic oligonucleotide
cuggauuguuguuuccucu

SEQ ID NO: 2452346 - RNA, 19 nt, Artificial Sequence
  Description of Artificial Sequence: Synthetic oligonucleotide
caggaaugucaauguuauc

SEQ ID NO: 2452347 - RNA, 19 nt, Artificial Sequence
  Description of Artificial Sequence: Synthetic oligonucleotide
uagccagauacugucccuu

SEQ ID NO: 2452348 - RNA, 19 nt, Artificial Sequence
  Description of Artificial Sequence: Synthetic oligonucleotide
agcuaaugaugggcaaaga

SEQ ID NO: 2452349 - RNA, 19 nt, Artificial Sequence
  Description of Artificial Sequence: Synthetic oligonucleotide
gucccuucaggaaugucaa

SEQ ID NO: 2452350 - RNA, 19 nt, Artificial Sequence
  Description of Artificial Sequence: Synthetic oligonucleotide
agguaagagaguagcuaau

SEQ ID NO: 2452351 - RNA, 19 nt, Artificial Sequence
  Description of Artificial Sequence: Synthetic oligonucleotide
aggggaguaugagguaaga

SEQ ID NO: 2452352 - RNA, 19 nt, Artificial Sequence
  Description of Artificial Sequence: Synthetic oligonucleotide
gaguaugagguaagagagu

SEQ ID NO: 2452353 - RNA, 19 nt, Artificial Sequence
  Description of Artificial Sequence: Synthetic oligonucleotide
caguauacaggugacggau

SEQ ID NO: 2452354 - RNA, 19 nt, Artificial Sequence
  Description of Artificial Sequence: Synthetic oligonucleotide
gguuuauaaucaaauugau

SEQ ID NO: 2452355 - RNA, 19 nt, Artificial Sequence
  Description of Artificial Sequence: Synthetic oligonucleotide
gucagaaaccugccagugu

SEQ ID NO: 2452356 - RNA, 19 nt, Artificial Sequence
  Description of Artificial Sequence: Synthetic oligonucleotide
ggugacggaucaccacagc

SEQ ID NO: 2452357 - RNA, 19 nt, Artificial Sequence
  Description of Artificial Sequence: Synthetic oligonucleotide
agccaaaguccuagagaug

SEQ ID NO: 2452358 - RNA, 19 nt, Artificial Sequence
  Description of Artificial Sequence: Synthetic oligonucleotide
ccauuuucuggauuguugu

SEQ ID NO: 2452359 - RNA, 19 nt, Artificial Sequence
  Description of Artificial Sequence: Synthetic oligonucleotide
gugaagcgcacaucauucu

SEQ ID NO: 2452360 - RNA, 19 nt, Artificial Sequence
  Description of Artificial Sequence: Synthetic oligonucleotide
gcgcacaucauucuuugcu

SEQ ID NO: 2452361 - RNA, 19 nt, Artificial Sequence
  Description of Artificial Sequence: Synthetic oligonucleotide
gaagcgcacaucauucuuu

SEQ ID NO: 2452362 - RNA, 19 nt, Artificial Sequence
  Description of Artificial Sequence: Synthetic oligonucleotide
acggaucaccacagcuuuc

SEQ ID NO: 2452363 - RNA, 19 nt, Artificial Sequence
  Description of Artificial Sequence: Synthetic oligonucleotide
gaagaagcuuauagacggu

SEQ ID NO: 2452364 - RNA, 19 nt, Artificial Sequence
  Description of Artificial Sequence: Synthetic oligonucleotide
ccagacugcauaaauugcu

SEQ ID NO: 2452365 - RNA, 19 nt, Artificial Sequence
  Description of Artificial Sequence: Synthetic oligonucleotide
guccgaugauauuguacua

SEQ ID NO: 2452366 - RNA, 19 nt, Artificial Sequence
  Description of Artificial Sequence: Synthetic oligonucleotide
cuuuggcaagaugaagucu

SEQ ID NO: 2452367 - RNA, 19 nt, Artificial Sequence
  Description of Artificial Sequence: Synthetic oligonucleotide
ucccuucaggaaugucaau

SEQ ID NO: 2452368 - RNA, 19 nt, Artificial Sequence
  Description of Artificial Sequence: Synthetic oligonucleotide
ggguucucacugcuugaac

SEQ ID NO: 2452369 - RNA, 19 nt, Artificial Sequence
  Description of Artificial Sequence: Synthetic oligonucleotide
ccccugggcauugaguccg

SEQ ID NO: 2452370 - RNA, 19 nt, Artificial Sequence
  Description of Artificial Sequence: Synthetic oligonucleotide
caaauccagacugcauaaa

SEQ ID NO: 2452371 - RNA, 19 nt, Artificial Sequence
  Description of Artificial Sequence: Synthetic oligonucleotide
acucuacaguuagggauuu

SEQ ID NO: 2452372 - RNA, 19 nt, Artificial Sequence
  Description of Artificial Sequence: Synthetic oligonucleotide
cagagauguucuucuuucu

SEQ ID NO: 2452373 - RNA, 19 nt, Artificial Sequence
  Description of Artificial Sequence: Synthetic oligonucleotide
gaucacgaagaagcuuaua

SEQ ID NO: 2452374 - RNA, 19 nt, Artificial Sequence
  Description of Artificial Sequence: Synthetic oligonucleotide
gguaucugugaagcgcaca

SEQ ID NO: 2452375 - RNA, 19 nt, Artificial Sequence
  Description of Artificial Sequence: Synthetic oligonucleotide
ccugccaguguauugucaa

SEQ ID NO: 2452376 - RNA, 19 nt, Artificial Sequence
  Description of Artificial Sequence: Synthetic oligonucleotide
ggagccccugggcauugag

SEQ ID NO: 2452377 - RNA, 19 nt, Artificial Sequence
  Description of Artificial Sequence: Synthetic oligonucleotide
gggcaaagaugcugcugug

SEQ ID NO: 2452378 - RNA, 19 nt, Artificial Sequence
  Description of Artificial Sequence: Synthetic oligonucleotide
cuuguccgagccaaucaau

SEQ ID NO: 2452379 - RNA, 19 nt, Artificial Sequence
  Description of Artificial Sequence: Synthetic oligonucleotide
cugugaagcgcacaucauu

SEQ ID NO: 2452380 - RNA, 19 nt, Artificial Sequence
  Description of Artificial Sequence: Synthetic oligonucleotide
ccacagcuuucuucuuucc

SEQ ID NO: 2452381 - RNA, 19 nt, Artificial Sequence
  Description of Artificial Sequence: Synthetic oligonucleotide
cugauacauaaggggagua

SEQ ID NO: 2452382 - RNA, 19 nt, Artificial Sequence
  Description of Artificial Sequence: Synthetic oligonucleotide
cugcagucucuucaaacau

SEQ ID NO: 2452383 - RNA, 19 nt, Artificial Sequence
  Description of Artificial Sequence: Synthetic oligonucleotide
cuucuauauuggauuccau

SEQ ID NO: 2452384 - RNA, 19 nt, Artificial Sequence
  Description of Artificial Sequence: Synthetic oligonucleotide
ccgaugauauuguacuaua

SEQ ID NO: 2452385 - RNA, 19 nt, Artificial Sequence
  Description of Artificial Sequence: Synthetic oligonucleotide
cuugaacaaggcucugguu

SEQ ID NO: 2452386 - RNA, 19 nt, Artificial Sequence
  Description of Artificial Sequence: Synthetic oligonucleotide
caauggagccccugggcau

SEQ ID NO: 2452387 - RNA, 19 nt, Artificial Sequence
  Description of Artificial Sequence: Synthetic oligonucleotide
cugcuugaacaaggcucug

SEQ ID NO: 2452388 - RNA, 19 nt, Artificial Sequence
  Description of Artificial Sequence: Synthetic oligonucleotide
gcauugaguccgaugauau

SEQ ID NO: 2452389 - RNA, 19 nt, Artificial Sequence
  Description of Artificial Sequence: Synthetic oligonucleotide
gccccugggcauugagucc

SEQ ID NO: 2452390 - RNA, 19 nt, Artificial Sequence
  Description of Artificial Sequence: Synthetic oligonucleotide
auggagccccugggcauug

SEQ ID NO: 2452391 - RNA, 19 nt, Artificial Sequence
  Description of Artificial Sequence: Synthetic oligonucleotide
cauugaguccgaugauauu

SEQ ID NO: 2452392 - RNA, 19 nt, Artificial Sequence
  Description of Artificial Sequence: Synthetic oligonucleotide
guguauugucaaugccaau

SEQ ID NO: 2452393 - RNA, 19 nt, Artificial Sequence
  Description of Artificial Sequence: Synthetic oligonucleotide
cagcaaauccagacugcau

SEQ ID NO: 2452394 - RNA, 19 nt, Artificial Sequence
  Description of Artificial Sequence: Synthetic oligonucleotide
ggcaaagaugcugcugugu

SEQ ID NO: 2452395 - RNA, 19 nt, Artificial Sequence
  Description of Artificial Sequence: Synthetic oligonucleotide
caccacagcuuucuucuuu

SEQ ID NO: 2452396 - RNA, 19 nt, Artificial Sequence
  Description of Artificial Sequence: Synthetic oligonucleotide
uggagccccugggcauuga

SEQ ID NO: 2452397 - RNA, 19 nt, Artificial Sequence
  Description of Artificial Sequence: Synthetic oligonucleotide
cugccaguguauugucaau

SEQ ID NO: 2452398 - RNA, 19 nt, Artificial Sequence
  Description of Artificial Sequence: Synthetic oligonucleotide
caguagcucugcagucucu

SEQ ID NO: 2452399 - RNA, 19 nt, Artificial Sequence
  Description of Artificial Sequence: Synthetic oligonucleotide
cgguaucugugaagcgcac

SEQ ID NO: 2452400 - RNA, 19 nt, Artificial Sequence
  Description of Artificial Sequence: Synthetic oligonucleotide
cagucucuucaaacauuuu

SEQ ID NO: 2452401 - RNA, 19 nt, Artificial Sequence
  Description of Artificial Sequence: Synthetic oligonucleotide
gggcauugaguccgaugau

SEQ ID NO: 2452402 - RNA, 19 nt, Artificial Sequence
  Description of Artificial Sequence: Synthetic oligonucleotide
ccaaaguccuagagauguu

SEQ ID NO: 2452403 - RNA, 19 nt, Artificial Sequence
  Description of Artificial Sequence: Synthetic oligonucleotide
cccugggcauugaguccga

SEQ ID NO: 2452404 - RNA, 19 nt, Artificial Sequence
  Description of Artificial Sequence: Synthetic oligonucleotide
ccgagccaaucaauuccuu

SEQ ID NO: 2452405 - RNA, 19 nt, Artificial Sequence
  Description of Artificial Sequence: Synthetic oligonucleotide
ccugggcauugaguccgau

SEQ ID NO: 2452406 - RNA, 19 nt, Artificial Sequence
  Description of Artificial Sequence: Synthetic oligonucleotide
aauuguaugggaucaaacc

SEQ ID NO: 2452407 - RNA, 19 nt, Artificial Sequence
  Description of Artificial Sequence: Synthetic oligonucleotide
aaaacauucaggaaacugg

SEQ ID NO: 2452408 - RNA, 19 nt, Artificial Sequence
  Description of Artificial Sequence: Synthetic oligonucleotide
aaaguaggagaucaccagc

SEQ ID NO: 2452409 - RNA, 19 nt, Artificial Sequence
  Description of Artificial Sequence: Synthetic oligonucleotide
auuguaugggaucaaaccg

SEQ ID NO: 2452410 - RNA, 19 nt, Artificial Sequence
  Description of Artificial Sequence: Synthetic oligonucleotide
gaacacauaggccugaugc

SEQ ID NO: 2452411 - RNA, 19 nt, Artificial Sequence
  Description of Artificial Sequence: Synthetic oligonucleotide
uaugggaucaaaccgauaa

SEQ ID NO: 2452412 - RNA, 19 nt, Artificial Sequence
  Description of Artificial Sequence: Synthetic oligonucleotide
aaacauggaaccuguauca

SEQ ID NO: 2452413 - RNA, 19 nt, Artificial Sequence
  Description of Artificial Sequence: Synthetic oligonucleotide
cacuuuaucaggaaaguag

SEQ ID NO: 2452414 - RNA, 19 nt, Artificial Sequence
  Description of Artificial Sequence: Synthetic oligonucleotide
ucagaaucggggcugagag

SEQ ID NO: 2452415 - RNA, 19 nt, Artificial Sequence
  Description of Artificial Sequence: Synthetic oligonucleotide
uuaucaggaaaguaggaga

SEQ ID NO: 2452416 - RNA, 19 nt, Artificial Sequence
  Description of Artificial Sequence: Synthetic oligonucleotide
uaaacauggaaccuguauc

SEQ ID NO: 2452417 - RNA, 19 nt, Artificial Sequence
  Description of Artificial Sequence: Synthetic oligonucleotide
uuuaucaggaaaguaggag

SEQ ID NO: 2452418 - RNA, 19 nt, Artificial Sequence
  Description of Artificial Sequence: Synthetic oligonucleotide
aaauuguaugggaucaaac

SEQ ID NO: 2452419 - RNA, 19 nt, Artificial Sequence
  Description of Artificial Sequence: Synthetic oligonucleotide
gaaaguaggagaucaccag

SEQ ID NO: 2452420 - RNA, 19 nt, Artificial Sequence
  Description of Artificial Sequence: Synthetic oligonucleotide
agcgaaaacauucaggaaa

SEQ ID NO: 2452421 - RNA, 19 nt, Artificial Sequence
  Description of Artificial Sequence: Synthetic oligonucleotide
agguucaagaaccaguuug

SEQ ID NO: 2452422 - RNA, 19 nt, Artificial Sequence
  Description of Artificial Sequence: Synthetic oligonucleotide
ugcacaauggggauguuca

SEQ ID NO: 2452423 - RNA, 19 nt, Artificial Sequence
  Description of Artificial Sequence: Synthetic oligonucleotide
aaccgauaagcacagagaa

SEQ ID NO: 2452424 - RNA, 19 nt, Artificial Sequence
  Description of Artificial Sequence: Synthetic oligonucleotide
gaauaccaggaacaggccg

SEQ ID NO: 2452425 - RNA, 19 nt, Artificial Sequence
  Description of Artificial Sequence: Synthetic oligonucleotide
cauggaaccuguaucacgc

SEQ ID NO: 2452426 - RNA, 19 nt, Artificial Sequence
  Description of Artificial Sequence: Synthetic oligonucleotide
gcuaaauuucuuuaugagg

SEQ ID NO: 2452427 - RNA, 19 nt, Artificial Sequence
  Description of Artificial Sequence: Synthetic oligonucleotide
aggggaaccacagugaccg

SEQ ID NO: 2452428 - RNA, 19 nt, Artificial Sequence
  Description of Artificial Sequence: Synthetic oligonucleotide
aaagucccagccauggccc

SEQ ID NO: 2452429 - RNA, 19 nt, Artificial Sequence
  Description of Artificial Sequence: Synthetic oligonucleotide
uuguaugggaucaaaccga

SEQ ID NO: 2452430 - RNA, 19 nt, Artificial Sequence
  Description of Artificial Sequence: Synthetic oligonucleotide
acuuuaucaggaaaguagg

SEQ ID NO: 2452431 - RNA, 19 nt, Artificial Sequence
  Description of Artificial Sequence: Synthetic oligonucleotide
ucuuuaugaggguuccagg

SEQ ID NO: 2452432 - RNA, 19 nt, Artificial Sequence
  Description of Artificial Sequence: Synthetic oligonucleotide
gaucaaaccgauaagcaca

SEQ ID NO: 2452433 - RNA, 19 nt, Artificial Sequence
  Description of Artificial Sequence: Synthetic oligonucleotide
uucuuuaugaggguuccag

SEQ ID NO: 2452434 - RNA, 19 nt, Artificial Sequence
  Description of Artificial Sequence: Synthetic oligonucleotide
aaaacugcacaauggggau

SEQ ID NO: 2452435 - RNA, 19 nt, Artificial Sequence
  Description of Artificial Sequence: Synthetic oligonucleotide
uuaugaggguuccaggaac

SEQ ID NO: 2452436 - RNA, 19 nt, Artificial Sequence
  Description of Artificial Sequence: Synthetic oligonucleotide
uguugcuugugccacucag

SEQ ID NO: 2452437 - RNA, 19 nt, Artificial Sequence
  Description of Artificial Sequence: Synthetic oligonucleotide
ucucgaaggaccuacggaa

SEQ ID NO: 2452438 - RNA, 19 nt, Artificial Sequence
  Description of Artificial Sequence: Synthetic oligonucleotide
acauggaaccuguaucacg

SEQ ID NO: 2452439 - RNA, 19 nt, Artificial Sequence
  Description of Artificial Sequence: Synthetic oligonucleotide
cacagcaaaagucccagcc

SEQ ID NO: 2452440 - RNA, 19 nt, Artificial Sequence
  Description of Artificial Sequence: Synthetic oligonucleotide
gaaccuguaucacgcaucc

SEQ ID NO: 2452441 - RNA, 19 nt, Artificial Sequence
  Description of Artificial Sequence: Synthetic oligonucleotide
ugggaucaaaccgauaagc

SEQ ID NO: 2452442 - RNA, 19 nt, Artificial Sequence
  Description of Artificial Sequence: Synthetic oligonucleotide
uaugaggguuccaggaacc

SEQ ID NO: 2452443 - RNA, 19 nt, Artificial Sequence
  Description of Artificial Sequence: Synthetic oligonucleotide
agguacagcgcgaaggugc

SEQ ID NO: 2452444 - RNA, 19 nt, Artificial Sequence
  Description of Artificial Sequence: Synthetic oligonucleotide
gagaagugagcguggacag

SEQ ID NO: 2452445 - RNA, 19 nt, Artificial Sequence
  Description of Artificial Sequence: Synthetic oligonucleotide
gaaagcagguagcagcaug

SEQ ID NO: 2452446 - RNA, 19 nt, Artificial Sequence
  Description of Artificial Sequence: Synthetic oligonucleotide
aacauggaaccuguaucac

SEQ ID NO: 2452447 - RNA, 19 nt, Artificial Sequence
  Description of Artificial Sequence: Synthetic oligonucleotide
ccgaauaccaggaacaggc

SEQ ID NO: 2452448 - RNA, 19 nt, Artificial Sequence
  Description of Artificial Sequence: Synthetic oligonucleotide
gacgucagcacacagcaca

SEQ ID NO: 2452449 - RNA, 19 nt, Artificial Sequence
  Description of Artificial Sequence: Synthetic oligonucleotide
aauaccaggaacaggccga

SEQ ID NO: 2452450 - RNA, 19 nt, Artificial Sequence
  Description of Artificial Sequence: Synthetic oligonucleotide
agagaagugagcguggaca

SEQ ID NO: 2452451 - RNA, 19 nt, Artificial Sequence
  Description of Artificial Sequence: Synthetic oligonucleotide
uagagguaggcacugcaga

SEQ ID NO: 2452452 - RNA, 19 nt, Artificial Sequence
  Description of Artificial Sequence: Synthetic oligonucleotide
augaaauuguaugggauca

SEQ ID NO: 2452453 - RNA, 19 nt, Artificial Sequence
  Description of Artificial Sequence: Synthetic oligonucleotide
gcuguguaaacauggaacc

SEQ ID NO: 2452454 - RNA, 19 nt, Artificial Sequence
  Description of Artificial Sequence: Synthetic oligonucleotide
acaauggggauguucagaa

SEQ ID NO: 2452455 - RNA, 19 nt, Artificial Sequence
  Description of Artificial Sequence: Synthetic oligonucleotide
uaucacgcauccuuccugc

SEQ ID NO: 2452456 - RNA, 19 nt, Artificial Sequence
  Description of Artificial Sequence: Synthetic oligonucleotide
ugcacacagaugaaauugu

SEQ ID NO: 2452457 - RNA, 19 nt, Artificial Sequence
  Description of Artificial Sequence: Synthetic oligonucleotide
agaaucggggcugagaggu

SEQ ID NO: 2452458 - RNA, 19 nt, Artificial Sequence
  Description of Artificial Sequence: Synthetic oligonucleotide
aaaccgauaagcacagaga

SEQ ID NO: 2452459 - RNA, 19 nt, Artificial Sequence
  Description of Artificial Sequence: Synthetic oligonucleotide
ugaguggacagcagguaca

SEQ ID NO: 2452460 - RNA, 19 nt, Artificial Sequence
  Description of Artificial Sequence: Synthetic oligonucleotide
ggcuaaauuucuuuaugag

SEQ ID NO: 2452461 - RNA, 19 nt, Artificial Sequence
  Description of Artificial Sequence: Synthetic oligonucleotide
agcagguacagcgcgaagg

SEQ ID NO: 2452462 - RNA, 19 nt, Artificial Sequence
  Description of Artificial Sequence: Synthetic oligonucleotide
aacugcacaauggggaugu

SEQ ID NO: 2452463 - RNA, 19 nt, Artificial Sequence
  Description of Artificial Sequence: Synthetic oligonucleotide
agcagcauguggcacccac

SEQ ID NO: 2452464 - RNA, 19 nt, Artificial Sequence
  Description of Artificial Sequence: Synthetic oligonucleotide
uguaucacgcauccuuccu

SEQ ID NO: 2452465 - RNA, 19 nt, Artificial Sequence
  Description of Artificial Sequence: Synthetic oligonucleotide
aaguaggagaucaccagcu

SEQ ID NO: 2452466 - RNA, 19 nt, Artificial Sequence
  Description of Artificial Sequence: Synthetic oligonucleotide
uacggaagagcucccgcag

SEQ ID NO: 2452467 - RNA, 19 nt, Artificial Sequence
  Description of Artificial Sequence: Synthetic oligonucleotide
ggaaacuggaaccagggga

SEQ ID NO: 2452468 - RNA, 19 nt, Artificial Sequence
  Description of Artificial Sequence: Synthetic oligonucleotide
ugaggggaaccacagugac

SEQ ID NO: 2452469 - RNA, 19 nt, Artificial Sequence
  Description of Artificial Sequence: Synthetic oligonucleotide
agaucaccagcuguuugcc

SEQ ID NO: 2452470 - RNA, 19 nt, Artificial Sequence
  Description of Artificial Sequence: Synthetic oligonucleotide
aaucggggcugagagguuc

SEQ ID NO: 2452471 - RNA, 19 nt, Artificial Sequence
  Description of Artificial Sequence: Synthetic oligonucleotide
gugagcguggacaggaugg

SEQ ID NO: 2452472 - RNA, 19 nt, Artificial Sequence
  Description of Artificial Sequence: Synthetic oligonucleotide
uguaugggaucaaaccgau

SEQ ID NO: 2452473 - RNA, 19 nt, Artificial Sequence
  Description of Artificial Sequence: Synthetic oligonucleotide
acagcaaaagucccagcca

SEQ ID NO: 2452474 - RNA, 19 nt, Artificial Sequence
  Description of Artificial Sequence: Synthetic oligonucleotide
acucucgaaggaccuacgg

SEQ ID NO: 2452475 - RNA, 19 nt, Artificial Sequence
  Description of Artificial Sequence: Synthetic oligonucleotide
ucaagacaguuucccagga

SEQ ID NO: 2452476 - RNA, 19 nt, Artificial Sequence
  Description of Artificial Sequence: Synthetic oligonucleotide
uuuguagagguaggcacug

SEQ ID NO: 2452477 - RNA, 19 nt, Artificial Sequence
  Description of Artificial Sequence: Synthetic oligonucleotide
acacauaggccugaugcuc

SEQ ID NO: 2452478 - RNA, 19 nt, Artificial Sequence
  Description of Artificial Sequence: Synthetic oligonucleotide
agcguggacaggauggagc

SEQ ID NO: 2452479 - RNA, 19 nt, Artificial Sequence
  Description of Artificial Sequence: Synthetic oligonucleotide
ucggcuagaucugagggga

SEQ ID NO: 2452480 - RNA, 19 nt, Artificial Sequence
  Description of Artificial Sequence: Synthetic oligonucleotide
ucuagacgagcaguguugc

SEQ ID NO: 2452481 - RNA, 19 nt, Artificial Sequence
  Description of Artificial Sequence: Synthetic oligonucleotide
cucggcuagaucugagggg

SEQ ID NO: 2452482 - RNA, 19 nt, Artificial Sequence
  Description of Artificial Sequence: Synthetic oligonucleotide
ggaucaaaccgauaagcac

SEQ ID NO: 2452483 - RNA, 19 nt, Artificial Sequence
  Description of Artificial Sequence: Synthetic oligonucleotide
accagcgaaaacauucagg

SEQ ID NO: 2452484 - RNA, 19 nt, Artificial Sequence
  Description of Artificial Sequence: Synthetic oligonucleotide
acagcgcgaaggugcagcc

SEQ ID NO: 2452485 - RNA, 19 nt, Artificial Sequence
  Description of Artificial Sequence: Synthetic oligonucleotide
cugacgucagcacacagca

SEQ ID NO: 2452486 - RNA, 19 nt, Artificial Sequence
  Description of Artificial Sequence: Synthetic oligonucleotide
uaggagaucaccagcuguu

SEQ ID NO: 2452487 - RNA, 19 nt, Artificial Sequence
  Description of Artificial Sequence: Synthetic oligonucleotide
gaucugaggggaaccacag

SEQ ID NO: 2452488 - RNA, 19 nt, Artificial Sequence
  Description of Artificial Sequence: Synthetic oligonucleotide
ugagagguucaagaaccag

SEQ ID NO: 2452489 - RNA, 19 nt, Artificial Sequence
  Description of Artificial Sequence: Synthetic oligonucleotide
aaccaggggauggcaaaac

SEQ ID NO: 2452490 - RNA, 19 nt, Artificial Sequence
  Description of Artificial Sequence: Synthetic oligonucleotide
gaagugagcguggacagga

SEQ ID NO: 2452491 - RNA, 19 nt, Artificial Sequence
  Description of Artificial Sequence: Synthetic oligonucleotide
aguaggagaucaccagcug

SEQ ID NO: 2452492 - RNA, 19 nt, Artificial Sequence
  Description of Artificial Sequence: Synthetic oligonucleotide
agcacagcaaaagucccag

SEQ ID NO: 2452493 - RNA, 19 nt, Artificial Sequence
  Description of Artificial Sequence: Synthetic oligonucleotide
cauguggcacccacugacg

SEQ ID NO: 2452494 - RNA, 19 nt, Artificial Sequence
  Description of Artificial Sequence: Synthetic oligonucleotide
uacucucgaaggaccuacg

SEQ ID NO: 2452495 - RNA, 19 nt, Artificial Sequence
  Description of Artificial Sequence: Synthetic oligonucleotide
agccauggcccaaacaagg

SEQ ID NO: 2452496 - RNA, 19 nt, Artificial Sequence
  Description of Artificial Sequence: Synthetic oligonucleotide
agcucggcuagaucugagg

SEQ ID NO: 2452497 - RNA, 19 nt, Artificial Sequence
  Description of Artificial Sequence: Synthetic oligonucleotide
aucaaaccgauaagcacag

SEQ ID NO: 2452498 - RNA, 19 nt, Artificial Sequence
  Description of Artificial Sequence: Synthetic oligonucleotide
agcaguguugcuugugcca

SEQ ID NO: 2452499 - RNA, 19 nt, Artificial Sequence
  Description of Artificial Sequence: Synthetic oligonucleotide
cuguaucacgcauccuucc

SEQ ID NO: 2452500 - RNA, 19 nt, Artificial Sequence
  Description of Artificial Sequence: Synthetic oligonucleotide
cuuuaucaggaaaguagga

SEQ ID NO: 2452501 - RNA, 19 nt, Artificial Sequence
  Description of Artificial Sequence: Synthetic oligonucleotide
cucgaaggaccuacggaag

SEQ ID NO: 2452502 - RNA, 19 nt, Artificial Sequence
  Description of Artificial Sequence: Synthetic oligonucleotide
guaucacgcauccuuccug

SEQ ID NO: 2452503 - RNA, 19 nt, Artificial Sequence
  Description of Artificial Sequence: Synthetic oligonucleotide
ucacgcauccuuccugcca

SEQ ID NO: 2452504 - RNA, 19 nt, Artificial Sequence
  Description of Artificial Sequence: Synthetic oligonucleotide
cagaugaaauuguauggga

SEQ ID NO: 2452505 - RNA, 19 nt, Artificial Sequence
  Description of Artificial Sequence: Synthetic oligonucleotide
aucacgcauccuuccugcc

SEQ ID NO: 2452506 - RNA, 19 nt, Artificial Sequence
  Description of Artificial Sequence: Synthetic oligonucleotide
acccuguuuguagagguag

SEQ ID NO: 2452507 - RNA, 19 nt, Artificial Sequence
  Description of Artificial Sequence: Synthetic oligonucleotide
aggugcagccgccgaauac

SEQ ID NO: 2452508 - RNA, 19 nt, Artificial Sequence
  Description of Artificial Sequence: Synthetic oligonucleotide
agugagcguggacaggaug

SEQ ID NO: 2452509 - RNA, 19 nt, Artificial Sequence
  Description of Artificial Sequence: Synthetic oligonucleotide
ccagcgaaaacauucagga

SEQ ID NO: 2452510 - RNA, 19 nt, Artificial Sequence
  Description of Artificial Sequence: Synthetic oligonucleotide
gugaguggacagcagguac

SEQ ID NO: 2452511 - RNA, 19 nt, Artificial Sequence
  Description of Artificial Sequence: Synthetic oligonucleotide
ggcuguguaaacauggaac

SEQ ID NO: 2452512 - RNA, 19 nt, Artificial Sequence
  Description of Artificial Sequence: Synthetic oligonucleotide
aguuuggugucauggggaa

SEQ ID NO: 2452513 - RNA, 19 nt, Artificial Sequence
  Description of Artificial Sequence: Synthetic oligonucleotide
uacagcgcgaaggugcagc

SEQ ID NO: 2452514 - RNA, 19 nt, Artificial Sequence
  Description of Artificial Sequence: Synthetic oligonucleotide
uccggcuaaauuucuuuau

SEQ ID NO: 2452515 - RNA, 19 nt, Artificial Sequence
  Description of Artificial Sequence: Synthetic oligonucleotide
ggaccuacggaagagcucc

SEQ ID NO: 2452516 - RNA, 19 nt, Artificial Sequence
  Description of Artificial Sequence: Synthetic oligonucleotide
aguguugcuugugccacuc

SEQ ID NO: 2452517 - RNA, 19 nt, Artificial Sequence
  Description of Artificial Sequence: Synthetic oligonucleotide
uggaaccuguaucacgcau

SEQ ID NO: 2452518 - RNA, 19 nt, Artificial Sequence
  Description of Artificial Sequence: Synthetic oligonucleotide
ccugucugcacacagauga

SEQ ID NO: 2452519 - RNA, 19 nt, Artificial Sequence
  Description of Artificial Sequence: Synthetic oligonucleotide
gcucggcuagaucugaggg

SEQ ID NO: 2452520 - RNA, 19 nt, Artificial Sequence
  Description of Artificial Sequence: Synthetic oligonucleotide
cagugaccggccuuggggc

SEQ ID NO: 2452521 - RNA, 19 nt, Artificial Sequence
  Description of Artificial Sequence: Synthetic oligonucleotide
aucuagacgagcaguguug

SEQ ID NO: 2452522 - RNA, 19 nt, Artificial Sequence
  Description of Artificial Sequence: Synthetic oligonucleotide
gaacaggcugcuucuguuc

SEQ ID NO: 2452523 - RNA, 19 nt, Artificial Sequence
  Description of Artificial Sequence: Synthetic oligonucleotide
ugcuugugccacucagugc

SEQ ID NO: 2452524 - RNA, 19 nt, Artificial Sequence
  Description of Artificial Sequence: Synthetic oligonucleotide
uuccgguacucucgaagga

SEQ ID NO: 2452525 - RNA, 19 nt, Artificial Sequence
  Description of Artificial Sequence: Synthetic oligonucleotide
caagacaguuucccaggag

SEQ ID NO: 2452526 - RNA, 19 nt, Artificial Sequence
  Description of Artificial Sequence: Synthetic oligonucleotide
uggggauguucagaaucgg

SEQ ID NO: 2452527 - RNA, 19 nt, Artificial Sequence
  Description of Artificial Sequence: Synthetic oligonucleotide
aaacaaggcaccagcgaaa

SEQ ID NO: 2452528 - RNA, 19 nt, Artificial Sequence
  Description of Artificial Sequence: Synthetic oligonucleotide
ucggccgaugccagccucg

SEQ ID NO: 2452529 - RNA, 19 nt, Artificial Sequence
  Description of Artificial Sequence: Synthetic oligonucleotide
caagaaccaguuugguguc

SEQ ID NO: 2452530 - RNA, 19 nt, Artificial Sequence
  Description of Artificial Sequence: Synthetic oligonucleotide
caaaagucccagccauggc

SEQ ID NO: 2452531 - RNA, 19 nt, Artificial Sequence
  Description of Artificial Sequence: Synthetic oligonucleotide
uagacgagcaguguugcuu

SEQ ID NO: 2452532 - RNA, 19 nt, Artificial Sequence
  Description of Artificial Sequence: Synthetic oligonucleotide
uuccggcuaaauuucuuua

SEQ ID NO: 2452533 - RNA, 19 nt, Artificial Sequence
  Description of Artificial Sequence: Synthetic oligonucleotide
auguucagaaucggggcug

SEQ ID NO: 2452534 - RNA, 19 nt, Artificial Sequence
  Description of Artificial Sequence: Synthetic oligonucleotide
gcagccgccgaauaccagg

SEQ ID NO: 2452535 - RNA, 19 nt, Artificial Sequence
  Description of Artificial Sequence: Synthetic oligonucleotide
agagguucaagaaccaguu

SEQ ID NO: 2452536 - RNA, 19 nt, Artificial Sequence
  Description of Artificial Sequence: Synthetic oligonucleotide
ugaaauuguaugggaucaa

SEQ ID NO: 2452537 - RNA, 19 nt, Artificial Sequence
  Description of Artificial Sequence: Synthetic oligonucleotide
ggcaccagcgaaaacauuc

SEQ ID NO: 2452538 - RNA, 19 nt, Artificial Sequence
  Description of Artificial Sequence: Synthetic oligonucleotide
aaggcaccagcgaaaacau

SEQ ID NO: 2452539 - RNA, 19 nt, Artificial Sequence
  Description of Artificial Sequence: Synthetic oligonucleotide
cagaaucggggcugagagg

SEQ ID NO: 2452540 - RNA, 19 nt, Artificial Sequence
  Description of Artificial Sequence: Synthetic oligonucleotide
ugccaucuagacgagcagu

SEQ ID NO: 2452541 - RNA, 19 nt, Artificial Sequence
  Description of Artificial Sequence: Synthetic oligonucleotide
gagugcauccagagaagug

SEQ ID NO: 2452542 - RNA, 19 nt, Artificial Sequence
  Description of Artificial Sequence: Synthetic oligonucleotide
ggccacuuuaucaggaaag

SEQ ID NO: 2452543 - RNA, 19 nt, Artificial Sequence
  Description of Artificial Sequence: Synthetic oligonucleotide
ugucugcacacagaugaaa

SEQ ID NO: 2452544 - RNA, 19 nt, Artificial Sequence
  Description of Artificial Sequence: Synthetic oligonucleotide
agaucugaggggaaccaca

SEQ ID NO: 2452545 - RNA, 19 nt, Artificial Sequence
  Description of Artificial Sequence: Synthetic oligonucleotide
gcauguggcacccacugac

SEQ ID NO: 2452546 - RNA, 19 nt, Artificial Sequence
  Description of Artificial Sequence: Synthetic oligonucleotide
agaagugagcguggacagg

SEQ ID NO: 2452547 - RNA, 19 nt, Artificial Sequence
  Description of Artificial Sequence: Synthetic oligonucleotide
ccgauaagcacagagaaga

SEQ ID NO: 2452548 - RNA, 19 nt, Artificial Sequence
  Description of Artificial Sequence: Synthetic oligonucleotide
uggggaagagucugagaaa

SEQ ID NO: 2452549 - RNA, 19 nt, Artificial Sequence
  Description of Artificial Sequence: Synthetic oligonucleotide
accgauaagcacagagaag

SEQ ID NO: 2452550 - RNA, 19 nt, Artificial Sequence
  Description of Artificial Sequence: Synthetic oligonucleotide
guacucucgaaggaccuac

SEQ ID NO: 2452551 - RNA, 19 nt, Artificial Sequence
  Description of Artificial Sequence: Synthetic oligonucleotide
ggugcuuccggcuaaauuu

SEQ ID NO: 2452552 - RNA, 19 nt, Artificial Sequence
  Description of Artificial Sequence: Synthetic oligonucleotide
gagagguucaagaaccagu

SEQ ID NO: 2452553 - RNA, 19 nt, Artificial Sequence
  Description of Artificial Sequence: Synthetic oligonucleotide
ggggcugagagguucaaga

SEQ ID NO: 2452554 - RNA, 19 nt, Artificial Sequence
  Description of Artificial Sequence: Synthetic oligonucleotide
aagagcucccgcagcucgg

SEQ ID NO: 2452555 - RNA, 19 nt, Artificial Sequence
  Description of Artificial Sequence: Synthetic oligonucleotide
aagcagguagcagcaugug

SEQ ID NO: 2452556 - RNA, 19 nt, Artificial Sequence
  Description of Artificial Sequence: Synthetic oligonucleotide
gccgaugccagccucggcc

SEQ ID NO: 2452557 - RNA, 19 nt, Artificial Sequence
  Description of Artificial Sequence: Synthetic oligonucleotide
uguucagaaucggggcuga

SEQ ID NO: 2452558 - RNA, 19 nt, Artificial Sequence
  Description of Artificial Sequence: Synthetic oligonucleotide
gcgaaaacauucaggaaac

SEQ ID NO: 2452559 - RNA, 19 nt, Artificial Sequence
  Description of Artificial Sequence: Synthetic oligonucleotide
aguggacagcagguacagc

SEQ ID NO: 2452560 - RNA, 19 nt, Artificial Sequence
  Description of Artificial Sequence: Synthetic oligonucleotide
guagcagcauguggcaccc

SEQ ID NO: 2452561 - RNA, 19 nt, Artificial Sequence
  Description of Artificial Sequence: Synthetic oligonucleotide
gaaccaguuuggugucaug

SEQ ID NO: 2452562 - RNA, 19 nt, Artificial Sequence
  Description of Artificial Sequence: Synthetic oligonucleotide
uguggcacccacugacguc

SEQ ID NO: 2452563 - RNA, 19 nt, Artificial Sequence
  Description of Artificial Sequence: Synthetic oligonucleotide
cucucgaaggaccuacgga

SEQ ID NO: 2452564 - RNA, 19 nt, Artificial Sequence
  Description of Artificial Sequence: Synthetic oligonucleotide
caccagcgaaaacauucag

SEQ ID NO: 2452565 - RNA, 19 nt, Artificial Sequence
  Description of Artificial Sequence: Synthetic oligonucleotide
uccucggccgaugccagcc

SEQ ID NO: 2452566 - RNA, 19 nt, Artificial Sequence
  Description of Artificial Sequence: Synthetic oligonucleotide
ggagccugucugcacacag

SEQ ID NO: 2452567 - RNA, 19 nt, Artificial Sequence
  Description of Artificial Sequence: Synthetic oligonucleotide
ggagaucaccagcuguuug

SEQ ID NO: 2452568 - RNA, 19 nt, Artificial Sequence
  Description of Artificial Sequence: Synthetic oligonucleotide
guaggagaucaccagcugu

SEQ ID NO: 2452569 - RNA, 19 nt, Artificial Sequence
  Description of Artificial Sequence: Synthetic oligonucleotide
ugagcguggacaggaugga

SEQ ID NO: 2452570 - RNA, 19 nt, Artificial Sequence
  Description of Artificial Sequence: Synthetic oligonucleotide
aagaaccaguuugguguca

SEQ ID NO: 2452571 - RNA, 19 nt, Artificial Sequence
  Description of Artificial Sequence: Synthetic oligonucleotide
ggccugaugcuccuuccgg

SEQ ID NO: 2452572 - RNA, 19 nt, Artificial Sequence
  Description of Artificial Sequence: Synthetic oligonucleotide
gaggggaaccacagugacc

SEQ ID NO: 2452573 - RNA, 19 nt, Artificial Sequence
  Description of Artificial Sequence: Synthetic oligonucleotide
cugccaucuagacgagcag

SEQ ID NO: 2452574 - RNA, 19 nt, Artificial Sequence
  Description of Artificial Sequence: Synthetic oligonucleotide
ccuuccugccaucuagacg

SEQ ID NO: 2452575 - RNA, 19 nt, Artificial Sequence
  Description of Artificial Sequence: Synthetic oligonucleotide
gcaaaacccuguuuguaga

SEQ ID NO: 2452576 - RNA, 19 nt, Artificial Sequence
  Description of Artificial Sequence: Synthetic oligonucleotide
aggaccuacggaagagcuc

SEQ ID NO: 2452577 - RNA, 19 nt, Artificial Sequence
  Description of Artificial Sequence: Synthetic oligonucleotide
aggugcuuccggcuaaauu

SEQ ID NO: 2452578 - RNA, 19 nt, Artificial Sequence
  Description of Artificial Sequence: Synthetic oligonucleotide
cuguuuguagagguaggca

SEQ ID NO: 2452579 - RNA, 19 nt, Artificial Sequence
  Description of Artificial Sequence: Synthetic oligonucleotide
agugaccggccuuggggcu

SEQ ID NO: 2452580 - RNA, 19 nt, Artificial Sequence
  Description of Artificial Sequence: Synthetic oligonucleotide
accuacggaagagcucccg

SEQ ID NO: 2452581 - RNA, 19 nt, Artificial Sequence
  Description of Artificial Sequence: Synthetic oligonucleotide
uuguagagguaggcacugc

SEQ ID NO: 2452582 - RNA, 19 nt, Artificial Sequence
  Description of Artificial Sequence: Synthetic oligonucleotide
agcauguggcacccacuga

SEQ ID NO: 2452583 - RNA, 19 nt, Artificial Sequence
  Description of Artificial Sequence: Synthetic oligonucleotide
gcuagaucugaggggaacc

SEQ ID NO: 2452584 - RNA, 19 nt, Artificial Sequence
  Description of Artificial Sequence: Synthetic oligonucleotide
ggaaccacagugaccggcc

SEQ ID NO: 2452585 - RNA, 19 nt, Artificial Sequence
  Description of Artificial Sequence: Synthetic oligonucleotide
cuagaucugaggggaacca

SEQ ID NO: 2452586 - RNA, 19 nt, Artificial Sequence
  Description of Artificial Sequence: Synthetic oligonucleotide
cagagaagugagcguggac

SEQ ID NO: 2452587 - RNA, 19 nt, Artificial Sequence
  Description of Artificial Sequence: Synthetic oligonucleotide
cacaauggggauguucaga

SEQ ID NO: 2452588 - RNA, 19 nt, Artificial Sequence
  Description of Artificial Sequence: Synthetic oligonucleotide
aaggugcagccgccgaaua

SEQ ID NO: 2452589 - RNA, 19 nt, Artificial Sequence
  Description of Artificial Sequence: Synthetic oligonucleotide
cacugacgucagcacacag

SEQ ID NO: 2452590 - RNA, 19 nt, Artificial Sequence
  Description of Artificial Sequence: Synthetic oligonucleotide
ccuguuuguagagguaggc

SEQ ID NO: 2452591 - RNA, 19 nt, Artificial Sequence
  Description of Artificial Sequence: Synthetic oligonucleotide
ccuguaucacgcauccuuc

SEQ ID NO: 2452592 - RNA, 19 nt, Artificial Sequence
  Description of Artificial Sequence: Synthetic oligonucleotide
ccggcuaaauuucuuuaug

SEQ ID NO: 2452593 - RNA, 19 nt, Artificial Sequence
  Description of Artificial Sequence: Synthetic oligonucleotide
acgucagcacacagcacag

SEQ ID NO: 2452594 - RNA, 19 nt, Artificial Sequence
  Description of Artificial Sequence: Synthetic oligonucleotide
agggccacuuuaucaggaa

SEQ ID NO: 2452595 - RNA, 19 nt, Artificial Sequence
  Description of Artificial Sequence: Synthetic oligonucleotide
gagcguggacaggauggag

SEQ ID NO: 2452596 - RNA, 19 nt, Artificial Sequence
  Description of Artificial Sequence: Synthetic oligonucleotide
ggaacacauaggccugaug

SEQ ID NO: 2452597 - RNA, 19 nt, Artificial Sequence
  Description of Artificial Sequence: Synthetic oligonucleotide
agaguccagggcuguguaa

SEQ ID NO: 2452598 - RNA, 19 nt, Artificial Sequence
  Description of Artificial Sequence: Synthetic oligonucleotide
ggaaccuguaucacgcauc

SEQ ID NO: 2452599 - RNA, 19 nt, Artificial Sequence
  Description of Artificial Sequence: Synthetic oligonucleotide
uggcccaaacaaggcacca

SEQ ID NO: 2452600 - RNA, 19 nt, Artificial Sequence
  Description of Artificial Sequence: Synthetic oligonucleotide
gugcuuccggcuaaauuuc

SEQ ID NO: 2452601 - RNA, 19 nt, Artificial Sequence
  Description of Artificial Sequence: Synthetic oligonucleotide
cccuguuuguagagguagg

SEQ ID NO: 2452602 - RNA, 19 nt, Artificial Sequence
  Description of Artificial Sequence: Synthetic oligonucleotide
augaggguuccaggaacca

SEQ ID NO: 2452603 - RNA, 19 nt, Artificial Sequence
  Description of Artificial Sequence: Synthetic oligonucleotide
cagggccacuuuaucagga

SEQ ID NO: 2452604 - RNA, 19 nt, Artificial Sequence
  Description of Artificial Sequence: Synthetic oligonucleotide
acagcagguacagcgcgaa

SEQ ID NO: 2452605 - RNA, 19 nt, Artificial Sequence
  Description of Artificial Sequence: Synthetic oligonucleotide
ccuacggaagagcucccgc

SEQ ID NO: 2452606 - RNA, 19 nt, Artificial Sequence
  Description of Artificial Sequence: Synthetic oligonucleotide
gggaaccacagugaccggc

SEQ ID NO: 2452607 - RNA, 19 nt, Artificial Sequence
  Description of Artificial Sequence: Synthetic oligonucleotide
gccgccgaauaccaggaac

SEQ ID NO: 2452608 - RNA, 19 nt, Artificial Sequence
  Description of Artificial Sequence: Synthetic oligonucleotide
ucaaaccgauaagcacaga

SEQ ID NO: 2452609 - RNA, 19 nt, Artificial Sequence
  Description of Artificial Sequence: Synthetic oligonucleotide
ggaaccaggggauggcaaa

SEQ ID NO: 2452610 - RNA, 19 nt, Artificial Sequence
  Description of Artificial Sequence: Synthetic oligonucleotide
aaccuguaucacgcauccu

SEQ ID NO: 2452611 - RNA, 19 nt, Artificial Sequence
  Description of Artificial Sequence: Synthetic oligonucleotide
cagcucggcuagaucugag

SEQ ID NO: 2452612 - RNA, 19 nt, Artificial Sequence
  Description of Artificial Sequence: Synthetic oligonucleotide
ccuuggggcuccucggccg

SEQ ID NO: 2452613 - RNA, 19 nt, Artificial Sequence
  Description of Artificial Sequence: Synthetic oligonucleotide
cagcgaaaacauucaggaa

SEQ ID NO: 2452614 - RNA, 19 nt, Artificial Sequence
  Description of Artificial Sequence: Synthetic oligonucleotide
acgggcaggugaguggaca

SEQ ID NO: 2452615 - RNA, 19 nt, Artificial Sequence
  Description of Artificial Sequence: Synthetic oligonucleotide
acgcauccuuccugccauc

SEQ ID NO: 2452616 - RNA, 19 nt, Artificial Sequence
  Description of Artificial Sequence: Synthetic oligonucleotide
uccugccaucuagacgagc

SEQ ID NO: 2452617 - RNA, 19 nt, Artificial Sequence
  Description of Artificial Sequence: Synthetic oligonucleotide
aacccuguuuguagaggua

SEQ ID NO: 2452618 - RNA, 19 nt, Artificial Sequence
  Description of Artificial Sequence: Synthetic oligonucleotide
cuuccggcuaaauuucuuu

SEQ ID NO: 2452619 - RNA, 19 nt, Artificial Sequence
  Description of Artificial Sequence: Synthetic oligonucleotide
cagguacagcgcgaaggug

SEQ ID NO: 2452620 - RNA, 19 nt, Artificial Sequence
  Description of Artificial Sequence: Synthetic oligonucleotide
ggcaggugaguggacagca

SEQ ID NO: 2452621 - RNA, 19 nt, Artificial Sequence
  Description of Artificial Sequence: Synthetic oligonucleotide
cagccgccgaauaccagga

SEQ ID NO: 2452622 - RNA, 19 nt, Artificial Sequence
  Description of Artificial Sequence: Synthetic oligonucleotide
cggcuaaauuucuuuauga

SEQ ID NO: 2452623 - RNA, 19 nt, Artificial Sequence
  Description of Artificial Sequence: Synthetic oligonucleotide
ugaccggccuuggggcucc

SEQ ID NO: 2452624 - RNA, 19 nt, Artificial Sequence
  Description of Artificial Sequence: Synthetic oligonucleotide
caucuagacgagcaguguu

SEQ ID NO: 2452625 - RNA, 19 nt, Artificial Sequence
  Description of Artificial Sequence: Synthetic oligonucleotide
aagugagcguggacaggau

SEQ ID NO: 2452626 - RNA, 19 nt, Artificial Sequence
  Description of Artificial Sequence: Synthetic oligonucleotide
cccacgggcaggugagugg

SEQ ID NO: 2452627 - RNA, 19 nt, Artificial Sequence
  Description of Artificial Sequence: Synthetic oligonucleotide
ggcuagaucugaggggaac

SEQ ID NO: 2452628 - RNA, 19 nt, Artificial Sequence
  Description of Artificial Sequence: Synthetic oligonucleotide
gggcuguguaaacauggaa

SEQ ID NO: 2452629 - RNA, 19 nt, Artificial Sequence
  Description of Artificial Sequence: Synthetic oligonucleotide
ccgccgaauaccaggaaca

SEQ ID NO: 2452630 - RNA, 19 nt, Artificial Sequence
  Description of Artificial Sequence: Synthetic oligonucleotide
ggauggagccugucugcac

SEQ ID NO: 2452631 - RNA, 19 nt, Artificial Sequence
  Description of Artificial Sequence: Synthetic oligonucleotide
cuugugccacucagugcca

SEQ ID NO: 2452632 - RNA, 19 nt, Artificial Sequence
  Description of Artificial Sequence: Synthetic oligonucleotide
cuguguaaacauggaaccu

SEQ ID NO: 2452633 - RNA, 19 nt, Artificial Sequence
  Description of Artificial Sequence: Synthetic oligonucleotide
guugcuugugccacucagu

SEQ ID NO: 2452634 - RNA, 19 nt, Artificial Sequence
  Description of Artificial Sequence: Synthetic oligonucleotide
gaccuacggaagagcuccc

SEQ ID NO: 2452635 - RNA, 19 nt, Artificial Sequence
  Description of Artificial Sequence: Synthetic oligonucleotide
ggcccaaacaaggcaccag

SEQ ID NO: 2452636 - RNA, 19 nt, Artificial Sequence
  Description of Artificial Sequence: Synthetic oligonucleotide
aggaacacauaggccugau

SEQ ID NO: 2452637 - RNA, 19 nt, Artificial Sequence
  Description of Artificial Sequence: Synthetic oligonucleotide
cccaggagaagagugcauc

SEQ ID NO: 2452638 - RNA, 19 nt, Artificial Sequence
  Description of Artificial Sequence: Synthetic oligonucleotide
ccagccucggccccacggg

SEQ ID NO: 2452639 - RNA, 19 nt, Artificial Sequence
  Description of Artificial Sequence: Synthetic oligonucleotide
gaaccacagugaccggccu

SEQ ID NO: 2452640 - RNA, 19 nt, Artificial Sequence
  Description of Artificial Sequence: Synthetic oligonucleotide
gcagguacagcgcgaaggu

SEQ ID NO: 2452641 - RNA, 19 nt, Artificial Sequence
  Description of Artificial Sequence: Synthetic oligonucleotide
cucggccgaugccagccuc

SEQ ID NO: 2452642 - RNA, 19 nt, Artificial Sequence
  Description of Artificial Sequence: Synthetic oligonucleotide
gcaccagcgaaaacauuca

SEQ ID NO: 2452643 - RNA, 19 nt, Artificial Sequence
  Description of Artificial Sequence: Synthetic oligonucleotide
gaaggugcagccgccgaau

SEQ ID NO: 2452644 - RNA, 19 nt, Artificial Sequence
  Description of Artificial Sequence: Synthetic oligonucleotide
cgaaggaccuacggaagag

SEQ ID NO: 2452645 - RNA, 19 nt, Artificial Sequence
  Description of Artificial Sequence: Synthetic oligonucleotide
cacgcauccuuccugccau

SEQ ID NO: 2452646 - RNA, 19 nt, Artificial Sequence
  Description of Artificial Sequence: Synthetic oligonucleotide
guguugcuugugccacuca

SEQ ID NO: 2452647 - RNA, 19 nt, Artificial Sequence
  Description of Artificial Sequence: Synthetic oligonucleotide
cagaguccagggcugugua

SEQ ID NO: 2452648 - RNA, 19 nt, Artificial Sequence
  Description of Artificial Sequence: Synthetic oligonucleotide
uggggcuccucggccgaug

SEQ ID NO: 2452649 - RNA, 19 nt, Artificial Sequence
  Description of Artificial Sequence: Synthetic oligonucleotide
ggggaaccacagugaccgg

SEQ ID NO: 2452650 - RNA, 19 nt, Artificial Sequence
  Description of Artificial Sequence: Synthetic oligonucleotide
gcaggugaguggacagcag

SEQ ID NO: 2452651 - RNA, 19 nt, Artificial Sequence
  Description of Artificial Sequence: Synthetic oligonucleotide
cuagacgagcaguguugcu

SEQ ID NO: 2452652 - RNA, 19 nt, Artificial Sequence
  Description of Artificial Sequence: Synthetic oligonucleotide
ggugaguggacagcaggua

SEQ ID NO: 2452653 - RNA, 19 nt, Artificial Sequence
  Description of Artificial Sequence: Synthetic oligonucleotide
agccgccgaauaccaggaa

SEQ ID NO: 2452654 - RNA, 19 nt, Artificial Sequence
  Description of Artificial Sequence: Synthetic oligonucleotide
gccacuuuaucaggaaagu

SEQ ID NO: 2452655 - RNA, 19 nt, Artificial Sequence
  Description of Artificial Sequence: Synthetic oligonucleotide
ggccccacgggcaggugag

SEQ ID NO: 2452656 - RNA, 19 nt, Artificial Sequence
  Description of Artificial Sequence: Synthetic oligonucleotide
guaugggaucaaaccgaua

SEQ ID NO: 2452657 - RNA, 19 nt, Artificial Sequence
  Description of Artificial Sequence: Synthetic oligonucleotide
gugaccggccuuggggcuc

SEQ ID NO: 2452658 - RNA, 19 nt, Artificial Sequence
  Description of Artificial Sequence: Synthetic oligonucleotide
agucccagccauggcccaa

SEQ ID NO: 2452659 - RNA, 19 nt, Artificial Sequence
  Description of Artificial Sequence: Synthetic oligonucleotide
caauggggauguucagaau

SEQ ID NO: 2452660 - RNA, 19 nt, Artificial Sequence
  Description of Artificial Sequence: Synthetic oligonucleotide
agccucggccccacgggca

SEQ ID NO: 2452661 - RNA, 19 nt, Artificial Sequence
  Description of Artificial Sequence: Synthetic oligonucleotide
gcgaaggugcagccgccga

SEQ ID NO: 2452662 - RNA, 19 nt, Artificial Sequence
  Description of Artificial Sequence: Synthetic oligonucleotide
gcagcucggcuagaucuga

SEQ ID NO: 2452663 - RNA, 19 nt, Artificial Sequence
  Description of Artificial Sequence: Synthetic oligonucleotide
cgauaagcacagagaagaa

SEQ ID NO: 2452664 - RNA, 19 nt, Artificial Sequence
  Description of Artificial Sequence: Synthetic oligonucleotide
ggauggcaaaacccuguuu

SEQ ID NO: 2452665 - RNA, 19 nt, Artificial Sequence
  Description of Artificial Sequence: Synthetic oligonucleotide
caguguugcuugugccacu

SEQ ID NO: 2452666 - RNA, 19 nt, Artificial Sequence
  Description of Artificial Sequence: Synthetic oligonucleotide
gggauggcaaaacccuguu

SEQ ID NO: 2452667 - RNA, 19 nt, Artificial Sequence
  Description of Artificial Sequence: Synthetic oligonucleotide
gccaggugcuuccggcuaa

SEQ ID NO: 2452668 - RNA, 19 nt, Artificial Sequence
  Description of Artificial Sequence: Synthetic oligonucleotide
ggccgaugccagccucggc

SEQ ID NO: 2452669 - RNA, 19 nt, Artificial Sequence
  Description of Artificial Sequence: Synthetic oligonucleotide
aggcaccagcgaaaacauu

SEQ ID NO: 2452670 - RNA, 19 nt, Artificial Sequence
  Description of Artificial Sequence: Synthetic oligonucleotide
gcagaguccagggcugugu

SEQ ID NO: 2452671 - RNA, 19 nt, Artificial Sequence
  Description of Artificial Sequence: Synthetic oligonucleotide
uuggggcuccucggccgau

SEQ ID NO: 2452672 - RNA, 19 nt, Artificial Sequence
  Description of Artificial Sequence: Synthetic oligonucleotide
caauggccagcagcuucaa

SEQ ID NO: 2452673 - RNA, 19 nt, Artificial Sequence
  Description of Artificial Sequence: Synthetic oligonucleotide
ccacgggcaggugagugga

SEQ ID NO: 2452674 - RNA, 19 nt, Artificial Sequence
  Description of Artificial Sequence: Synthetic oligonucleotide
ggacaggauggagccuguc

SEQ ID NO: 2452675 - RNA, 19 nt, Artificial Sequence
  Description of Artificial Sequence: Synthetic oligonucleotide
ccccacgggcaggugagug

SEQ ID NO: 2452676 - RNA, 19 nt, Artificial Sequence
  Description of Artificial Sequence: Synthetic oligonucleotide
cgucagcacacagcacagc

SEQ ID NO: 2452677 - RNA, 19 nt, Artificial Sequence
  Description of Artificial Sequence: Synthetic oligonucleotide
cgcgaaggugcagccgccg

SEQ ID NO: 2452678 - RNA, 19 nt, Artificial Sequence
  Description of Artificial Sequence: Synthetic oligonucleotide
cccagccauggcccaaaca

SEQ ID NO: 2452679 - RNA, 19 nt, Artificial Sequence
  Description of Artificial Sequence: Synthetic oligonucleotide
gaaucggggcugagagguu

SEQ ID NO: 2452680 - RNA, 19 nt, Artificial Sequence
  Description of Artificial Sequence: Synthetic oligonucleotide
gcgcgaaggugcagccgcc

SEQ ID NO: 2452681 - RNA, 19 nt, Artificial Sequence
  Description of Artificial Sequence: Synthetic oligonucleotide
ggaaagcagguagcagcau

SEQ ID NO: 2452682 - RNA, 19 nt, Artificial Sequence
  Description of Artificial Sequence: Synthetic oligonucleotide
ccaucuagacgagcagugu

SEQ ID NO: 2452683 - RNA, 19 nt, Artificial Sequence
  Description of Artificial Sequence: Synthetic oligonucleotide
ccacugacgucagcacaca

SEQ ID NO: 2452684 - RNA, 19 nt, Artificial Sequence
  Description of Artificial Sequence: Synthetic oligonucleotide
gcuuccggcuaaauuucuu

SEQ ID NO: 2452685 - RNA, 19 nt, Artificial Sequence
  Description of Artificial Sequence: Synthetic oligonucleotide
cggccgaugccagccucgg

SEQ ID NO: 2452686 - RNA, 19 nt, Artificial Sequence
  Description of Artificial Sequence: Synthetic oligonucleotide
cacucagugccaggugcuu

SEQ ID NO: 2452687 - RNA, 19 nt, Artificial Sequence
  Description of Artificial Sequence: Synthetic oligonucleotide
cauaggccugaugcuccuu

SEQ ID NO: 2452688 - RNA, 19 nt, Artificial Sequence
  Description of Artificial Sequence: Synthetic oligonucleotide
cgaaaacauucaggaaacu

SEQ ID NO: 2452689 - RNA, 19 nt, Artificial Sequence
  Description of Artificial Sequence: Synthetic oligonucleotide
ccaggugcuuccggcuaaa

SEQ ID NO: 2452690 - RNA, 19 nt, Artificial Sequence
  Description of Artificial Sequence: Synthetic oligonucleotide
cggccccacgggcagguga

SEQ ID NO: 2452691 - RNA, 19 nt, Artificial Sequence
  Description of Artificial Sequence: Synthetic oligonucleotide
ccucggccgaugccagccu

SEQ ID NO: 2452692 - RNA, 19 nt, Artificial Sequence
  Description of Artificial Sequence: Synthetic oligonucleotide
gaccggccuuggggcuccu

SEQ ID NO: 2452693 - RNA, 19 nt, Artificial Sequence
  Description of Artificial Sequence: Synthetic oligonucleotide
aauaaauugguccaaauaa

SEQ ID NO: 2452694 - RNA, 19 nt, Artificial Sequence
  Description of Artificial Sequence: Synthetic oligonucleotide
aauuuuauucccaugaagg

SEQ ID NO: 2452695 - RNA, 19 nt, Artificial Sequence
  Description of Artificial Sequence: Synthetic oligonucleotide
  modified_base (14)..(14): a, c, u, g, unknown or other
uuagaagucaaaunuuccg

SEQ ID NO: 2452696 - RNA, 19 nt, Artificial Sequence
  Description of Artificial Sequence: Synthetic oligonucleotide
aauugguccaaauaaauga

SEQ ID NO: 2452697 - RNA, 19 nt, Artificial Sequence
  Description of Artificial Sequence: Synthetic oligonucleotide
aaauucauuaguuuggaga

SEQ ID NO: 2452698 - RNA, 19 nt, Artificial Sequence
  Description of Artificial Sequence: Synthetic oligonucleotide
caaaccaugggaaagaggg

SEQ ID NO: 2452699 - RNA, 19 nt, Artificial Sequence
  Description of Artificial Sequence: Synthetic oligonucleotide
aaaaccauggcuaacaaug

SEQ ID NO: 2452700 - RNA, 19 nt, Artificial Sequence
  Description of Artificial Sequence: Synthetic oligonucleotide
uuagaaacuaaguuucugg

SEQ ID NO: 2452701 - RNA, 19 nt, Artificial Sequence
  Description of Artificial Sequence: Synthetic oligonucleotide
ucugcugugauaucgauag

SEQ ID NO: 2452702 - RNA, 19 nt, Artificial Sequence
  Description of Artificial Sequence: Synthetic oligonucleotide
aaggaaauucauuaguuug

SEQ ID NO: 2452703 - RNA, 19 nt, Artificial Sequence
  Description of Artificial Sequence: Synthetic oligonucleotide
  modified_base (18)..(18): a, c, u, g, unknown or other
uacauuagaagucaaaunu

SEQ ID NO: 2452704 - RNA, 19 nt, Artificial Sequence
  Description of Artificial Sequence: Synthetic oligonucleotide
auuaauuuuauucccauga

SEQ ID NO: 2452705 - RNA, 19 nt, Artificial Sequence
  Description of Artificial Sequence: Synthetic oligonucleotide
acucagaaacuuuagaaac

SEQ ID NO: 2452706 - RNA, 19 nt, Artificial Sequence
  Description of Artificial Sequence: Synthetic oligonucleotide
aauuugacugcacaaaacu

SEQ ID NO: 2452707 - RNA, 19 nt, Artificial Sequence
  Description of Artificial Sequence: Synthetic oligonucleotide
  modified_base (10)..(10): a, c, u, g, unknown or other
aagucaaaunuuccgaaug

SEQ ID NO: 2452708 - RNA, 19 nt, Artificial Sequence
  Description of Artificial Sequence: Synthetic oligonucleotide
  modified_base (9)..(9): a, c, u, g, unknown or other
agucaaaunuuccgaaugc

SEQ ID NO: 2452709 - RNA, 19 nt, Artificial Sequence
  Description of Artificial Sequence: Synthetic oligonucleotide
uagguucaaaauaugagag

SEQ ID NO: 2452710 - RNA, 19 nt, Artificial Sequence
  Description of Artificial Sequence: Synthetic oligonucleotide
aaagauaauaaugaguuaa

SEQ ID NO: 2452711 - RNA, 19 nt, Artificial Sequence
  Description of Artificial Sequence: Synthetic oligonucleotide
aaucccauacacuacaaga

SEQ ID NO: 2452712 - RNA, 19 nt, Artificial Sequence
  Description of Artificial Sequence: Synthetic oligonucleotide
uuggaaaucugauaaagug

SEQ ID NO: 2452713 - RNA, 19 nt, Artificial Sequence
  Description of Artificial Sequence: Synthetic oligonucleotide
aacuuuagaaacuaaguuu

SEQ ID NO: 2452714 - RNA, 19 nt, Artificial Sequence
  Description of Artificial Sequence: Synthetic oligonucleotide
uuugcaauagucaguaaca

SEQ ID NO: 2452715 - RNA, 19 nt, Artificial Sequence
  Description of Artificial Sequence: Synthetic oligonucleotide
cuggaauuaauuuuauucc

SEQ ID NO: 2452716 - RNA, 19 nt, Artificial Sequence
  Description of Artificial Sequence: Synthetic oligonucleotide
ugugauaucgauagguuca

SEQ ID NO: 2452717 - RNA, 19 nt, Artificial Sequence
  Description of Artificial Sequence: Synthetic oligonucleotide
uaauuuuauucccaugaag

SEQ ID NO: 2452718 - RNA, 19 nt, Artificial Sequence
  Description of Artificial Sequence: Synthetic oligonucleotide
uuugacugcacaaaacuca

SEQ ID NO: 2452719 - RNA, 19 nt, Artificial Sequence
  Description of Artificial Sequence: Synthetic oligonucleotide
acaagagaugacaugaugc

SEQ ID NO: 2452720 - RNA, 19 nt, Artificial Sequence
  Description of Artificial Sequence: Synthetic oligonucleotide
aaacuuuagaaacuaaguu

SEQ ID NO: 2452721 - RNA, 19 nt, Artificial Sequence
  Description of Artificial Sequence: Synthetic oligonucleotide
aaagauucucuguauauau

SEQ ID NO: 2452722 - RNA, 19 nt, Artificial Sequence
  Description of Artificial Sequence: Synthetic oligonucleotide
aguaucagauauuagaaaa

SEQ ID NO: 2452723 - RNA, 19 nt, Artificial Sequence
  Description of Artificial Sequence: Synthetic oligonucleotide
aauagucaguaacagcuug

SEQ ID NO: 2452724 - RNA, 19 nt, Artificial Sequence
  Description of Artificial Sequence: Synthetic oligonucleotide
auagguucaaaauaugaga

SEQ ID NO: 2452725 - RNA, 19 nt, Artificial Sequence
  Description of Artificial Sequence: Synthetic oligonucleotide
agagcuuuacuagaguucc

SEQ ID NO: 2452726 - RNA, 19 nt, Artificial Sequence
  Description of Artificial Sequence: Synthetic oligonucleotide
cugauaaagugcaaguucc

SEQ ID NO: 2452727 - RNA, 19 nt, Artificial Sequence
  Description of Artificial Sequence: Synthetic oligonucleotide
aaaucugauaaagugcaag

SEQ ID NO: 2452728 - RNA, 19 nt, Artificial Sequence
  Description of Artificial Sequence: Synthetic oligonucleotide
gagaacagcgaauacuccg

SEQ ID NO: 2452729 - RNA, 19 nt, Artificial Sequence
  Description of Artificial Sequence: Synthetic oligonucleotide
aauuaauuuuauucccaug

SEQ ID NO: 2452730 - RNA, 19 nt, Artificial Sequence
  Description of Artificial Sequence: Synthetic oligonucleotide
acagcgaauacuccggagc

SEQ ID NO: 2452731 - RNA, 19 nt, Artificial Sequence
  Description of Artificial Sequence: Synthetic oligonucleotide
uggaauuaauuuuauuccc

SEQ ID NO: 2452732 - RNA, 19 nt, Artificial Sequence
  Description of Artificial Sequence: Synthetic oligonucleotide
gauagguucaaaauaugag

SEQ ID NO: 2452733 - RNA, 19 nt, Artificial Sequence
  Description of Artificial Sequence: Synthetic oligonucleotide
ucucuguauauauaaaaga

SEQ ID NO: 2452734 - RNA, 19 nt, Artificial Sequence
  Description of Artificial Sequence: Synthetic oligonucleotide
ugacaugaugccaacauac

SEQ ID NO: 2452735 - RNA, 19 nt, Artificial Sequence
  Description of Artificial Sequence: Synthetic oligonucleotide
uuuuaagcucucaacuucc

SEQ ID NO: 2452736 - RNA, 19 nt, Artificial Sequence
  Description of Artificial Sequence: Synthetic oligonucleotide
uuaguuuggagauugcuaa

SEQ ID NO: 2452737 - RNA, 19 nt, Artificial Sequence
  Description of Artificial Sequence: Synthetic oligonucleotide
ucuguguaaauaaauuggu

SEQ ID NO: 2452738 - RNA, 19 nt, Artificial Sequence
  Description of Artificial Sequence: Synthetic oligonucleotide
uucaagguguaccaucccg

SEQ ID NO: 2452739 - RNA, 19 nt, Artificial Sequence
  Description of Artificial Sequence: Synthetic oligonucleotide
aacuacuaggauuaucaca

SEQ ID NO: 2452740 - RNA, 19 nt, Artificial Sequence
  Description of Artificial Sequence: Synthetic oligonucleotide
ugcucuuagcauuuuaaag

SEQ ID NO: 2452741 - RNA, 19 nt, Artificial Sequence
  Description of Artificial Sequence: Synthetic oligonucleotide
aacucagaaacuuuagaaa

SEQ ID NO: 2452742 - RNA, 19 nt, Artificial Sequence
  Description of Artificial Sequence: Synthetic oligonucleotide
aauacuccggagcuggcag

SEQ ID NO: 2452743 - RNA, 19 nt, Artificial Sequence
  Description of Artificial Sequence: Synthetic oligonucleotide
aaugaucuuauuucuaauu

SEQ ID NO: 2452744 - RNA, 19 nt, Artificial Sequence
  Description of Artificial Sequence: Synthetic oligonucleotide
aaauuugacugcacaaaac

SEQ ID NO: 2452745 - RNA, 19 nt, Artificial Sequence
  Description of Artificial Sequence: Synthetic oligonucleotide
uuucaaauuugacugcaca

SEQ ID NO: 2452746 - RNA, 19 nt, Artificial Sequence
  Description of Artificial Sequence: Synthetic oligonucleotide
  modified_base (13)..(13): a, c, u, g, unknown or other
uagaagucaaaunuuccga

SEQ ID NO: 2452747 - RNA, 19 nt, Artificial Sequence
  Description of Artificial Sequence: Synthetic oligonucleotide
aaaaggguuaguccuucag

SEQ ID NO: 2452748 - RNA, 19 nt, Artificial Sequence
  Description of Artificial Sequence: Synthetic oligonucleotide
gucuguguaaauaaauugg

SEQ ID NO: 2452749 - RNA, 19 nt, Artificial Sequence
  Description of Artificial Sequence: Synthetic oligonucleotide
agguucaaaauaugagagc

SEQ ID NO: 2452750 - RNA, 19 nt, Artificial Sequence
  Description of Artificial Sequence: Synthetic oligonucleotide
uguaccaucccgaaugcca

SEQ ID NO: 2452751 - RNA, 19 nt, Artificial Sequence
  Description of Artificial Sequence: Synthetic oligonucleotide
ucuguauauauaaaagaua

SEQ ID NO: 2452752 - RNA, 19 nt, Artificial Sequence
  Description of Artificial Sequence: Synthetic oligonucleotide
uaaauugguccaaauaaau

SEQ ID NO: 2452753 - RNA, 19 nt, Artificial Sequence
  Description of Artificial Sequence: Synthetic oligonucleotide
auugcuaacuacuaggauu

SEQ ID NO: 2452754 - RNA, 19 nt, Artificial Sequence
  Description of Artificial Sequence: Synthetic oligonucleotide
uacacuacaagagaugaca

SEQ ID NO: 2452755 - RNA, 19 nt, Artificial Sequence
  Description of Artificial Sequence: Synthetic oligonucleotide
uguugugugcguuucacca

SEQ ID NO: 2452756 - RNA, 19 nt, Artificial Sequence
  Description of Artificial Sequence: Synthetic oligonucleotide
cuaggauuaucacaggcag

SEQ ID NO: 2452757 - RNA, 19 nt, Artificial Sequence
  Description of Artificial Sequence: Synthetic oligonucleotide
uucauuaguuuggagauug

SEQ ID NO: 2452758 - RNA, 19 nt, Artificial Sequence
  Description of Artificial Sequence: Synthetic oligonucleotide
acuacaagagaugacauga

SEQ ID NO: 2452759 - RNA, 19 nt, Artificial Sequence
  Description of Artificial Sequence: Synthetic oligonucleotide
uuggagauugcuaacuacu

SEQ ID NO: 2452760 - RNA, 19 nt, Artificial Sequence
  Description of Artificial Sequence: Synthetic oligonucleotide
caagagaugacaugaugcc

SEQ ID NO: 2452761 - RNA, 19 nt, Artificial Sequence
  Description of Artificial Sequence: Synthetic oligonucleotide
  modified_base (7)..(7): a, c, u, g, unknown or other
ucaaaunuuccgaaugcuu

SEQ ID NO: 2452762 - RNA, 19 nt, Artificial Sequence
  Description of Artificial Sequence: Synthetic oligonucleotide
aaauugguccaaauaaaug

SEQ ID NO: 2452763 - RNA, 19 nt, Artificial Sequence
  Description of Artificial Sequence: Synthetic oligonucleotide
uaugcuacauuagaaguca

SEQ ID NO: 2452764 - RNA, 19 nt, Artificial Sequence
  Description of Artificial Sequence: Synthetic oligonucleotide
aaaggguuaguccuucagu

SEQ ID NO: 2452765 - RNA, 19 nt, Artificial Sequence
  Description of Artificial Sequence: Synthetic oligonucleotide
aaaucccauacacuacaag

SEQ ID NO: 2452766 - RNA, 19 nt, Artificial Sequence
  Description of Artificial Sequence: Synthetic oligonucleotide
auuuuauucccaugaagga

SEQ ID NO: 2452767 - RNA, 19 nt, Artificial Sequence
  Description of Artificial Sequence: Synthetic oligonucleotide
uaucgauagguucaaaaua

SEQ ID NO: 2452768 - RNA, 19 nt, Artificial Sequence
  Description of Artificial Sequence: Synthetic oligonucleotide
aaaccauggcuaacaaugc

SEQ ID NO: 2452769 - RNA, 19 nt, Artificial Sequence
  Description of Artificial Sequence: Synthetic oligonucleotide
agguguaccaucccgaaug

SEQ ID NO: 2452770 - RNA, 19 nt, Artificial Sequence
  Description of Artificial Sequence: Synthetic oligonucleotide
uagaaacuaaguuucugga

SEQ ID NO: 2452771 - RNA, 19 nt, Artificial Sequence
  Description of Artificial Sequence: Synthetic oligonucleotide
uauaaagauucucuguaua

SEQ ID NO: 2452772 - RNA, 19 nt, Artificial Sequence
  Description of Artificial Sequence: Synthetic oligonucleotide
aaaauccuggguuggaaau

SEQ ID NO: 2452773 - RNA, 19 nt, Artificial Sequence
  Description of Artificial Sequence: Synthetic oligonucleotide
agugcaaguucccucuucg

SEQ ID NO: 2452774 - RNA, 19 nt, Artificial Sequence
  Description of Artificial Sequence: Synthetic oligonucleotide
aguucaagguguaccaucc

SEQ ID NO: 2452775 - RNA, 19 nt, Artificial Sequence
  Description of Artificial Sequence: Synthetic oligonucleotide
cauggcgucagccuaaggc

SEQ ID NO: 2452776 - RNA, 19 nt, Artificial Sequence
  Description of Artificial Sequence: Synthetic oligonucleotide
ugaaggaaauucauuaguu

SEQ ID NO: 2452777 - RNA, 19 nt, Artificial Sequence
  Description of Artificial Sequence: Synthetic oligonucleotide
agauucucuguauauauaa

SEQ ID NO: 2452778 - RNA, 19 nt, Artificial Sequence
  Description of Artificial Sequence: Synthetic oligonucleotide
acaugaugccaacauacag

SEQ ID NO: 2452779 - RNA, 19 nt, Artificial Sequence
  Description of Artificial Sequence: Synthetic oligonucleotide
ugcuuuagaucucuguugu

SEQ ID NO: 2452780 - RNA, 19 nt, Artificial Sequence
  Description of Artificial Sequence: Synthetic oligonucleotide
auggcgucagccuaaggcg

SEQ ID NO: 2452781 - RNA, 19 nt, Artificial Sequence
  Description of Artificial Sequence: Synthetic oligonucleotide
caugaaggaaauucauuag

SEQ ID NO: 2452782 - RNA, 19 nt, Artificial Sequence
  Description of Artificial Sequence: Synthetic oligonucleotide
uccaaauaaaugaucuuau

SEQ ID NO: 2452783 - RNA, 19 nt, Artificial Sequence
  Description of Artificial Sequence: Synthetic oligonucleotide
auaucgauagguucaaaau

SEQ ID NO: 2452784 - RNA, 19 nt, Artificial Sequence
  Description of Artificial Sequence: Synthetic oligonucleotide
uucaaauuugacugcacaa

SEQ ID NO: 2452785 - RNA, 19 nt, Artificial Sequence
  Description of Artificial Sequence: Synthetic oligonucleotide
  modified_base (5)..(5): a, c, u, g, unknown or other
aaaunuuccgaaugcuuuu

SEQ ID NO: 2452786 - RNA, 19 nt, Artificial Sequence
  Description of Artificial Sequence: Synthetic oligonucleotide
aggaaauucauuaguuugg

SEQ ID NO: 2452787 - RNA, 19 nt, Artificial Sequence
  Description of Artificial Sequence: Synthetic oligonucleotide
uucaguucaagguguacca

SEQ ID NO: 2452788 - RNA, 19 nt, Artificial Sequence
  Description of Artificial Sequence: Synthetic oligonucleotide
agcuuuacuagaguucccc

SEQ ID NO: 2452789 - RNA, 19 nt, Artificial Sequence
  Description of Artificial Sequence: Synthetic oligonucleotide
uggcuaacaaugcucuuag

SEQ ID NO: 2452790 - RNA, 19 nt, Artificial Sequence
  Description of Artificial Sequence: Synthetic oligonucleotide
uuaguccuucaguucaagg

SEQ ID NO: 2452791 - RNA, 19 nt, Artificial Sequence
  Description of Artificial Sequence: Synthetic oligonucleotide
uccauaugcuacauuagaa

SEQ ID NO: 2452792 - RNA, 19 nt, Artificial Sequence
  Description of Artificial Sequence: Synthetic oligonucleotide
ugguaaucuuucaaauuug

SEQ ID NO: 2452793 - RNA, 19 nt, Artificial Sequence
  Description of Artificial Sequence: Synthetic oligonucleotide
gauaucgauagguucaaaa

SEQ ID NO: 2452794 - RNA, 19 nt, Artificial Sequence
  Description of Artificial Sequence: Synthetic oligonucleotide
uuaucaguaucagauauua

SEQ ID NO: 2452795 - RNA, 19 nt, Artificial Sequence
  Description of Artificial Sequence: Synthetic oligonucleotide
uguauauauaaaagauaau

SEQ ID NO: 2452796 - RNA, 19 nt, Artificial Sequence
  Description of Artificial Sequence: Synthetic oligonucleotide
caguagauccauaugcuac

SEQ ID NO: 2452797 - RNA, 19 nt, Artificial Sequence
  Description of Artificial Sequence: Synthetic oligonucleotide
ucuugguaaucuuucaaau

SEQ ID NO: 2452798 - RNA, 19 nt, Artificial Sequence
  Description of Artificial Sequence: Synthetic oligonucleotide
ugcaauagucaguaacagc

SEQ ID NO: 2452799 - RNA, 19 nt, Artificial Sequence
  Description of Artificial Sequence: Synthetic oligonucleotide
aguuucuggaauuaauuuu

SEQ ID NO: 2452800 - RNA, 19 nt, Artificial Sequence
  Description of Artificial Sequence: Synthetic oligonucleotide
ucaaauuugacugcacaaa

SEQ ID NO: 2452801 - RNA, 19 nt, Artificial Sequence
  Description of Artificial Sequence: Synthetic oligonucleotide
aaguguuucuugguaaucu

SEQ ID NO: 2452802 - RNA, 19 nt, Artificial Sequence
  Description of Artificial Sequence: Synthetic oligonucleotide
augaucuuauuucuaauua

SEQ ID NO: 2452803 - RNA, 19 nt, Artificial Sequence
  Description of Artificial Sequence: Synthetic oligonucleotide
ucaagguguaccaucccga

SEQ ID NO: 2452804 - RNA, 19 nt, Artificial Sequence
  Description of Artificial Sequence: Synthetic oligonucleotide
uuuggagauugcuaacuac

SEQ ID NO: 2452805 - RNA, 19 nt, Artificial Sequence
  Description of Artificial Sequence: Synthetic oligonucleotide
aguagauccauaugcuaca

SEQ ID NO: 2452806 - RNA, 19 nt, Artificial Sequence
  Description of Artificial Sequence: Synthetic oligonucleotide
aaauccuggguuggaaauc

SEQ ID NO: 2452807 - RNA, 19 nt, Artificial Sequence
  Description of Artificial Sequence: Synthetic oligonucleotide
aaacuaaguuucuggaauu

SEQ ID NO: 2452808 - RNA, 19 nt, Artificial Sequence
  Description of Artificial Sequence: Synthetic oligonucleotide
uuucuugguaaucuuucaa

SEQ ID NO: 2452809 - RNA, 19 nt, Artificial Sequence
  Description of Artificial Sequence: Synthetic oligonucleotide
gaaacuaaguuucuggaau

SEQ ID NO: 2452810 - RNA, 19 nt, Artificial Sequence
  Description of Artificial Sequence: Synthetic oligonucleotide
uaucaguaucagauauuag

SEQ ID NO: 2452811 - RNA, 19 nt, Artificial Sequence
  Description of Artificial Sequence: Synthetic oligonucleotide
auuugacugcacaaaacuc

SEQ ID NO: 2452812 - RNA, 19 nt, Artificial Sequence
  Description of Artificial Sequence: Synthetic oligonucleotide
ucccauacacuacaagaga

SEQ ID NO: 2452813 - RNA, 19 nt, Artificial Sequence
  Description of Artificial Sequence: Synthetic oligonucleotide
aagugcaaguucccucuuc

SEQ ID NO: 2452814 - RNA, 19 nt, Artificial Sequence
  Description of Artificial Sequence: Synthetic oligonucleotide
aacagcgaauacuccggag

SEQ ID NO: 2452815 - RNA, 19 nt, Artificial Sequence
  Description of Artificial Sequence: Synthetic oligonucleotide
auaugagagcuuuacuaga

SEQ ID NO: 2452816 - RNA, 19 nt, Artificial Sequence
  Description of Artificial Sequence: Synthetic oligonucleotide
gacugcacaaaacucagaa

SEQ ID NO: 2452817 - RNA, 19 nt, Artificial Sequence
  Description of Artificial Sequence: Synthetic oligonucleotide
ucagccuaaggcgcgaggg

SEQ ID NO: 2452818 - RNA, 19 nt, Artificial Sequence
  Description of Artificial Sequence: Synthetic oligonucleotide
uugugugcguuucaccacc

SEQ ID NO: 2452819 - RNA, 19 nt, Artificial Sequence
  Description of Artificial Sequence: Synthetic oligonucleotide
cuucaguucaagguguacc

SEQ ID NO: 2452820 - RNA, 19 nt, Artificial Sequence
  Description of Artificial Sequence: Synthetic oligonucleotide
aggcaguuuuaucaguauc

SEQ ID NO: 2452821 - RNA, 19 nt, Artificial Sequence
  Description of Artificial Sequence: Synthetic oligonucleotide
agaaacuaaguuucuggaa

SEQ ID NO: 2452822 - RNA, 19 nt, Artificial Sequence
  Description of Artificial Sequence: Synthetic oligonucleotide
uaacaaugcucuuagcauu

SEQ ID NO: 2452823 - RNA, 19 nt, Artificial Sequence
  Description of Artificial Sequence: Synthetic oligonucleotide
uugcaauagucaguaacag

SEQ ID NO: 2452824 - RNA, 19 nt, Artificial Sequence
  Description of Artificial Sequence: Synthetic oligonucleotide
ucuuccucugcugugauau

SEQ ID NO: 2452825 - RNA, 19 nt, Artificial Sequence
  Description of Artificial Sequence: Synthetic oligonucleotide
ucgauagguucaaaauaug

SEQ ID NO: 2452826 - RNA, 19 nt, Artificial Sequence
  Description of Artificial Sequence: Synthetic oligonucleotide
agaacagcgaauacuccgg

SEQ ID NO: 2452827 - RNA, 19 nt, Artificial Sequence
  Description of Artificial Sequence: Synthetic oligonucleotide
aaugcucuuagcauuuuaa

SEQ ID NO: 2452828 - RNA, 19 nt, Artificial Sequence
  Description of Artificial Sequence: Synthetic oligonucleotide
ugagagcuuuacuagaguu

SEQ ID NO: 2452829 - RNA, 19 nt, Artificial Sequence
  Description of Artificial Sequence: Synthetic oligonucleotide
aauccuggguuggaaaucu

SEQ ID NO: 2452830 - RNA, 19 nt, Artificial Sequence
  Description of Artificial Sequence: Synthetic oligonucleotide
augaugccaacauacagua

SEQ ID NO: 2452831 - RNA, 19 nt, Artificial Sequence
  Description of Artificial Sequence: Synthetic oligonucleotide
cuguguaaauaaauugguc

SEQ ID NO: 2452832 - RNA, 19 nt, Artificial Sequence
  Description of Artificial Sequence: Synthetic oligonucleotide
aguuaaaaggcaacauuug

SEQ ID NO: 2452833 - RNA, 19 nt, Artificial Sequence
  Description of Artificial Sequence: Synthetic oligonucleotide
gcuaacaaugcucuuagca

SEQ ID NO: 2452834 - RNA, 19 nt, Artificial Sequence
  Description of Artificial Sequence: Synthetic oligonucleotide
aagauaauaaugaguuaaa

SEQ ID NO: 2452835 - RNA, 19 nt, Artificial Sequence
  Description of Artificial Sequence: Synthetic oligonucleotide
aucgauagguucaaaauau

SEQ ID NO: 2452836 - RNA, 19 nt, Artificial Sequence
  Description of Artificial Sequence: Synthetic oligonucleotide
aggguuaguccuucaguuc

SEQ ID NO: 2452837 - RNA, 19 nt, Artificial Sequence
  Description of Artificial Sequence: Synthetic oligonucleotide
aucccauacacuacaagag

SEQ ID NO: 2452838 - RNA, 19 nt, Artificial Sequence
  Description of Artificial Sequence: Synthetic oligonucleotide
uugguccaaauaaaugauc

SEQ ID NO: 2452839 - RNA, 19 nt, Artificial Sequence
  Description of Artificial Sequence: Synthetic oligonucleotide
gugcuuuagaucucuguug

SEQ ID NO: 2452840 - RNA, 19 nt, Artificial Sequence
  Description of Artificial Sequence: Synthetic oligonucleotide
ugcguuucaccaccaaaac

SEQ ID NO: 2452841 - RNA, 19 nt, Artificial Sequence
  Description of Artificial Sequence: Synthetic oligonucleotide
gguuggaaaucugauaaag

SEQ ID NO: 2452842 - RNA, 19 nt, Artificial Sequence
  Description of Artificial Sequence: Synthetic oligonucleotide
uuuaagcucucaacuuccu

SEQ ID NO: 2452843 - RNA, 19 nt, Artificial Sequence
  Description of Artificial Sequence: Synthetic oligonucleotide
gauccauaugcuacauuag

SEQ ID NO: 2452844 - RNA, 19 nt, Artificial Sequence
  Description of Artificial Sequence: Synthetic oligonucleotide
cugugauaucgauagguuc

SEQ ID NO: 2452845 - RNA, 19 nt, Artificial Sequence
  Description of Artificial Sequence: Synthetic oligonucleotide
ggaaaucugauaaagugca

SEQ ID NO: 2452846 - RNA, 19 nt, Artificial Sequence
  Description of Artificial Sequence: Synthetic oligonucleotide
ccauaugcuacauuagaag

SEQ ID NO: 2452847 - RNA, 19 nt, Artificial Sequence
  Description of Artificial Sequence: Synthetic oligonucleotide
cauacacuacaagagauga

SEQ ID NO: 2452848 - RNA, 19 nt, Artificial Sequence
  Description of Artificial Sequence: Synthetic oligonucleotide
ucgggugcagagcucagca

SEQ ID NO: 2452849 - RNA, 19 nt, Artificial Sequence
  Description of Artificial Sequence: Synthetic oligonucleotide
aacagcuugucuguguaaa

SEQ ID NO: 2452850 - RNA, 19 nt, Artificial Sequence
  Description of Artificial Sequence: Synthetic oligonucleotide
agauaauaaugaguuaaaa

SEQ ID NO: 2452851 - RNA, 19 nt, Artificial Sequence
  Description of Artificial Sequence: Synthetic oligonucleotide
cauaugcuacauuagaagu

SEQ ID NO: 2452852 - RNA, 19 nt, Artificial Sequence
  Description of Artificial Sequence: Synthetic oligonucleotide
ccaauguccauuccaaacc

SEQ ID NO: 2452853 - RNA, 19 nt, Artificial Sequence
  Description of Artificial Sequence: Synthetic oligonucleotide
gaugacaugaugccaacau

SEQ ID NO: 2452854 - RNA, 19 nt, Artificial Sequence
  Description of Artificial Sequence: Synthetic oligonucleotide
aguuuggagauugcuaacu

SEQ ID NO: 2452855 - RNA, 19 nt, Artificial Sequence
  Description of Artificial Sequence: Synthetic oligonucleotide
uuaagcucucaacuuccuc

SEQ ID NO: 2452856 - RNA, 19 nt, Artificial Sequence
  Description of Artificial Sequence: Synthetic oligonucleotide
gcaaguucccucuucgucc

SEQ ID NO: 2452857 - RNA, 19 nt, Artificial Sequence
  Description of Artificial Sequence: Synthetic oligonucleotide
ucauuaguuuggagauugc

SEQ ID NO: 2452858 - RNA, 19 nt, Artificial Sequence
  Description of Artificial Sequence: Synthetic oligonucleotide
uggagauugcuaacuacua

SEQ ID NO: 2452859 - RNA, 19 nt, Artificial Sequence
  Description of Artificial Sequence: Synthetic oligonucleotide
aaccaugggaaagaggguu

SEQ ID NO: 2452860 - RNA, 19 nt, Artificial Sequence
  Description of Artificial Sequence: Synthetic oligonucleotide
ucuuagcauuuuaaaguua

SEQ ID NO: 2452861 - RNA, 19 nt, Artificial Sequence
  Description of Artificial Sequence: Synthetic oligonucleotide
aggauuaucacaggcaguu

SEQ ID NO: 2452862 - RNA, 19 nt, Artificial Sequence
  Description of Artificial Sequence: Synthetic oligonucleotide
ggagauugcuaacuacuag

SEQ ID NO: 2452863 - RNA, 19 nt, Artificial Sequence
  Description of Artificial Sequence: Synthetic oligonucleotide
gaauuaauuuuauucccau

SEQ ID NO: 2452864 - RNA, 19 nt, Artificial Sequence
  Description of Artificial Sequence: Synthetic oligonucleotide
caaauuugacugcacaaaa

SEQ ID NO: 2452865 - RNA, 19 nt, Artificial Sequence
  Description of Artificial Sequence: Synthetic oligonucleotide
ucucaacuuccucuuguuc

SEQ ID NO: 2452866 - RNA, 19 nt, Artificial Sequence
  Description of Artificial Sequence: Synthetic oligonucleotide
cacuacaagagaugacaug

SEQ ID NO: 2452867 - RNA, 19 nt, Artificial Sequence
  Description of Artificial Sequence: Synthetic oligonucleotide
uaggauuaucacaggcagu

SEQ ID NO: 2452868 - RNA, 19 nt, Artificial Sequence
  Description of Artificial Sequence: Synthetic oligonucleotide
  modified_base (19)..(19): a, c, u, g, unknown or other
cuacauuagaagucaaaun

SEQ ID NO: 2452869 - RNA, 19 nt, Artificial Sequence
  Description of Artificial Sequence: Synthetic oligonucleotide
agucaguaacagcuugucu

SEQ ID NO: 2452870 - RNA, 19 nt, Artificial Sequence
  Description of Artificial Sequence: Synthetic oligonucleotide
agauugcuaacuacuagga

SEQ ID NO: 2452871 - RNA, 19 nt, Artificial Sequence
  Description of Artificial Sequence: Synthetic oligonucleotide
auacacuacaagagaugac

SEQ ID NO: 2452872 - RNA, 19 nt, Artificial Sequence
  Description of Artificial Sequence: Synthetic oligonucleotide
accaccaaaaccauggcua

SEQ ID NO: 2452873 - RNA, 19 nt, Artificial Sequence
  Description of Artificial Sequence: Synthetic oligonucleotide
gcaauagucaguaacagcu

SEQ ID NO: 2452874 - RNA, 19 nt, Artificial Sequence
  Description of Artificial Sequence: Synthetic oligonucleotide
uggugcuuuagaucucugu

SEQ ID NO: 2452875 - RNA, 19 nt, Artificial Sequence
  Description of Artificial Sequence: Synthetic oligonucleotide
uccggagcuggcagggccg

SEQ ID NO: 2452876 - RNA, 19 nt, Artificial Sequence
  Description of Artificial Sequence: Synthetic oligonucleotide
aacuaaguuucuggaauua

SEQ ID NO: 2452877 - RNA, 19 nt, Artificial Sequence
  Description of Artificial Sequence: Synthetic oligonucleotide
augcucuuagcauuuuaaa

SEQ ID NO: 2452878 - RNA, 19 nt, Artificial Sequence
  Description of Artificial Sequence: Synthetic oligonucleotide
guccaaauaaaugaucuua

SEQ ID NO: 2452879 - RNA, 19 nt, Artificial Sequence
  Description of Artificial Sequence: Synthetic oligonucleotide
caguucaagguguaccauc

SEQ ID NO: 2452880 - RNA, 19 nt, Artificial Sequence
  Description of Artificial Sequence: Synthetic oligonucleotide
gcucuuagcauuuuaaagu

SEQ ID NO: 2452881 - RNA, 19 nt, Artificial Sequence
  Description of Artificial Sequence: Synthetic oligonucleotide
uaucacaggcaguuuuauc

SEQ ID NO: 2452882 - RNA, 19 nt, Artificial Sequence
  Description of Artificial Sequence: Synthetic oligonucleotide
uaguuuggagauugcuaac

SEQ ID NO: 2452883 - RNA, 19 nt, Artificial Sequence
  Description of Artificial Sequence: Synthetic oligonucleotide
acugcacaaaacucagaaa

SEQ ID NO: 2452884 - RNA, 19 nt, Artificial Sequence
  Description of Artificial Sequence: Synthetic oligonucleotide
gguucaaaauaugagagcu

SEQ ID NO: 2452885 - RNA, 19 nt, Artificial Sequence
  Description of Artificial Sequence: Synthetic oligonucleotide
cuguugugugcguuucacc

SEQ ID NO: 2452886 - RNA, 19 nt, Artificial Sequence
  Description of Artificial Sequence: Synthetic oligonucleotide
gagaugacaugaugccaac

SEQ ID NO: 2452887 - RNA, 19 nt, Artificial Sequence
  Description of Artificial Sequence: Synthetic oligonucleotide
ggaauuaauuuuauuccca

SEQ ID NO: 2452888 - RNA, 19 nt, Artificial Sequence
  Description of Artificial Sequence: Synthetic oligonucleotide
aagguguaccaucccgaau

SEQ ID NO: 2452889 - RNA, 19 nt, Artificial Sequence
  Description of Artificial Sequence: Synthetic oligonucleotide
uacuccggagcuggcaggg

SEQ ID NO: 2452890 - RNA, 19 nt, Artificial Sequence
  Description of Artificial Sequence: Synthetic oligonucleotide
guugugugcguuucaccac

SEQ ID NO: 2452891 - RNA, 19 nt, Artificial Sequence
  Description of Artificial Sequence: Synthetic oligonucleotide
  modified_base (6)..(6): a, c, u, g, unknown or other
caaaunuuccgaaugcuuu

SEQ ID NO: 2452892 - RNA, 19 nt, Artificial Sequence
  Description of Artificial Sequence: Synthetic oligonucleotide
augacaugaugccaacaua

SEQ ID NO: 2452893 - RNA, 19 nt, Artificial Sequence
  Description of Artificial Sequence: Synthetic oligonucleotide
ggguuaguccuucaguuca

SEQ ID NO: 2452894 - RNA, 19 nt, Artificial Sequence
  Description of Artificial Sequence: Synthetic oligonucleotide
uagucaguaacagcuuguc

SEQ ID NO: 2452895 - RNA, 19 nt, Artificial Sequence
  Description of Artificial Sequence: Synthetic oligonucleotide
aagauucucuguauauaua

SEQ ID NO: 2452896 - RNA, 19 nt, Artificial Sequence
  Description of Artificial Sequence: Synthetic oligonucleotide
  modified_base (11)..(11): a, c, u, g, unknown or other
gaagucaaaunuuccgaau

SEQ ID NO: 2452897 - RNA, 19 nt, Artificial Sequence
  Description of Artificial Sequence: Synthetic oligonucleotide
uaaggcgcgagggguagcc

SEQ ID NO: 2452898 - RNA, 19 nt, Artificial Sequence
  Description of Artificial Sequence: Synthetic oligonucleotide
ugugugcguuucaccacca

SEQ ID NO: 2452899 - RNA, 19 nt, Artificial Sequence
  Description of Artificial Sequence: Synthetic oligonucleotide
cucagaaacuuuagaaacu

SEQ ID NO: 2452900 - RNA, 19 nt, Artificial Sequence
  Description of Artificial Sequence: Synthetic oligonucleotide
cuuuagaucucuguugugu

SEQ ID NO: 2452901 - RNA, 19 nt, Artificial Sequence
  Description of Artificial Sequence: Synthetic oligonucleotide
ccaugaaggaaauucauua

SEQ ID NO: 2452902 - RNA, 19 nt, Artificial Sequence
  Description of Artificial Sequence: Synthetic oligonucleotide
auggcuaacaaugcucuua

SEQ ID NO: 2452903 - RNA, 19 nt, Artificial Sequence
  Description of Artificial Sequence: Synthetic oligonucleotide
guucaagguguaccauccc

SEQ ID NO: 2452904 - RNA, 19 nt, Artificial Sequence
  Description of Artificial Sequence: Synthetic oligonucleotide
gaacagcgaauacuccgga

SEQ ID NO: 2452905 - RNA, 19 nt, Artificial Sequence
  Description of Artificial Sequence: Synthetic oligonucleotide
cuaaguuucuggaauuaau

SEQ ID NO: 2452906 - RNA, 19 nt, Artificial Sequence
  Description of Artificial Sequence: Synthetic oligonucleotide
ucauggcgucagccuaagg

SEQ ID NO: 2452907 - RNA, 19 nt, Artificial Sequence
  Description of Artificial Sequence: Synthetic oligonucleotide
aauguccauuccaaaccau

SEQ ID NO: 2452908 - RNA, 19 nt, Artificial Sequence
  Description of Artificial Sequence: Synthetic oligonucleotide
guuuggagauugcuaacua

SEQ ID NO: 2452909 - RNA, 19 nt, Artificial Sequence
  Description of Artificial Sequence: Synthetic oligonucleotide
aggcgcgagggguagccuc

SEQ ID NO: 2452910 - RNA, 19 nt, Artificial Sequence
  Description of Artificial Sequence: Synthetic oligonucleotide
gcguuucaccaccaaaacc

SEQ ID NO: 2452911 - RNA, 19 nt, Artificial Sequence
  Description of Artificial Sequence: Synthetic oligonucleotide
ccauacacuacaagagaug

SEQ ID NO: 2452912 - RNA, 19 nt, Artificial Sequence
  Description of Artificial Sequence: Synthetic oligonucleotide
acagcuugucuguguaaau

SEQ ID NO: 2452913 - RNA, 19 nt, Artificial Sequence
  Description of Artificial Sequence: Synthetic oligonucleotide
ggaaauucauuaguuugga

SEQ ID NO: 2452914 - RNA, 19 nt, Artificial Sequence
  Description of Artificial Sequence: Synthetic oligonucleotide
cagccuaaggcgcgagggg

SEQ ID NO: 2452915 - RNA, 19 nt, Artificial Sequence
  Description of Artificial Sequence: Synthetic oligonucleotide
gucagccuaaggcgcgagg

SEQ ID NO: 2452916 - RNA, 19 nt, Artificial Sequence
  Description of Artificial Sequence: Synthetic oligonucleotide
uucauggcgucagccuaag

SEQ ID NO: 2452917 - RNA, 19 nt, Artificial Sequence
  Description of Artificial Sequence: Synthetic oligonucleotide
cuccggagcuggcagggcc

SEQ ID NO: 2452918 - RNA, 19 nt, Artificial Sequence
  Description of Artificial Sequence: Synthetic oligonucleotide
cucuuagcauuuuaaaguu

SEQ ID NO: 2452919 - RNA, 19 nt, Artificial Sequence
  Description of Artificial Sequence: Synthetic oligonucleotide
gguguaccaucccgaaugc

SEQ ID NO: 2452920 - RNA, 19 nt, Artificial Sequence
  Description of Artificial Sequence: Synthetic oligonucleotide
guuggaaaucugauaaagu

SEQ ID NO: 2452921 - RNA, 19 nt, Artificial Sequence
  Description of Artificial Sequence: Synthetic oligonucleotide
ucucuguugugugcguuuc

SEQ ID NO: 2452922 - RNA, 19 nt, Artificial Sequence
  Description of Artificial Sequence: Synthetic oligonucleotide
caaguucccucuucgucca

SEQ ID NO: 2452923 - RNA, 19 nt, Artificial Sequence
  Description of Artificial Sequence: Synthetic oligonucleotide
ucccgaaugccaguagauc

SEQ ID NO: 2452924 - RNA, 19 nt, Artificial Sequence
  Description of Artificial Sequence: Synthetic oligonucleotide
agcucucaacuuccucuug

SEQ ID NO: 2452925 - RNA, 19 nt, Artificial Sequence
  Description of Artificial Sequence: Synthetic oligonucleotide
acacuacaagagaugacau

SEQ ID NO: 2452926 - RNA, 19 nt, Artificial Sequence
  Description of Artificial Sequence: Synthetic oligonucleotide
cuugguaaucuuucaaauu

SEQ ID NO: 2452927 - RNA, 19 nt, Artificial Sequence
  Description of Artificial Sequence: Synthetic oligonucleotide
caucccgaaugccaguaga

SEQ ID NO: 2452928 - RNA, 19 nt, Artificial Sequence
  Description of Artificial Sequence: Synthetic oligonucleotide
  modified_base (8)..(8): a, c, u, g, unknown or other
gucaaaunuuccgaaugcu

SEQ ID NO: 2452929 - RNA, 19 nt, Artificial Sequence
  Description of Artificial Sequence: Synthetic oligonucleotide
agccuaaggcgcgaggggu

SEQ ID NO: 2452930 - RNA, 19 nt, Artificial Sequence
  Description of Artificial Sequence: Synthetic oligonucleotide
guagccucgggugcagagc

SEQ ID NO: 2452931 - RNA, 19 nt, Artificial Sequence
  Description of Artificial Sequence: Synthetic oligonucleotide
gagcuuuacuagaguuccc

SEQ ID NO: 2452932 - RNA, 19 nt, Artificial Sequence
  Description of Artificial Sequence: Synthetic oligonucleotide
cgauagguucaaaauauga

SEQ ID NO: 2452933 - RNA, 19 nt, Artificial Sequence
  Description of Artificial Sequence: Synthetic oligonucleotide
gcuacauuagaagucaaau

SEQ ID NO: 2452934 - RNA, 19 nt, Artificial Sequence
  Description of Artificial Sequence: Synthetic oligonucleotide
agcgaauacuccggagcug

SEQ ID NO: 2452935 - RNA, 19 nt, Artificial Sequence
  Description of Artificial Sequence: Synthetic oligonucleotide
ugauaucgauagguucaaa

SEQ ID NO: 2452936 - RNA, 19 nt, Artificial Sequence
  Description of Artificial Sequence: Synthetic oligonucleotide
cuucauggcgucagccuaa

SEQ ID NO: 2452937 - RNA, 19 nt, Artificial Sequence
  Description of Artificial Sequence: Synthetic oligonucleotide
augccaacauacaguauuu

SEQ ID NO: 2452938 - RNA, 19 nt, Artificial Sequence
  Description of Artificial Sequence: Synthetic oligonucleotide
ugguggugcuuuagaucuc

SEQ ID NO: 2452939 - RNA, 19 nt, Artificial Sequence
  Description of Artificial Sequence: Synthetic oligonucleotide
ugccaacauacaguauuuu

SEQ ID NO: 2452940 - RNA, 19 nt, Artificial Sequence
  Description of Artificial Sequence: Synthetic oligonucleotide
guucccucuucguccaaaa

SEQ ID NO: 2452941 - RNA, 19 nt, Artificial Sequence
  Description of Artificial Sequence: Synthetic oligonucleotide
aucccgaaugccaguagau

SEQ ID NO: 2452942 - RNA, 19 nt, Artificial Sequence
  Description of Artificial Sequence: Synthetic oligonucleotide
gcuaacuacuaggauuauc

SEQ ID NO: 2452943 - RNA, 19 nt, Artificial Sequence
  Description of Artificial Sequence: Synthetic oligonucleotide
caccaaaaccauggcuaac

SEQ ID NO: 2452944 - RNA, 19 nt, Artificial Sequence
  Description of Artificial Sequence: Synthetic oligonucleotide
guguaccaucccgaaugcc

SEQ ID NO: 2452945 - RNA, 19 nt, Artificial Sequence
  Description of Artificial Sequence: Synthetic oligonucleotide
cucgggugcagagcucagc

SEQ ID NO: 2452946 - RNA, 19 nt, Artificial Sequence
  Description of Artificial Sequence: Synthetic oligonucleotide
caaugcucuuagcauuuua

SEQ ID NO: 2452947 - RNA, 19 nt, Artificial Sequence
  Description of Artificial Sequence: Synthetic oligonucleotide
gggaaugguggugcuuuag

SEQ ID NO: 2452948 - RNA, 19 nt, Artificial Sequence
  Description of Artificial Sequence: Synthetic oligonucleotide
ggcuaacaaugcucuuagc

SEQ ID NO: 2452949 - RNA, 19 nt, Artificial Sequence
  Description of Artificial Sequence: Synthetic oligonucleotide
cagcgaauacuccggagcu

SEQ ID NO: 2452950 - RNA, 19 nt, Artificial Sequence
  Description of Artificial Sequence: Synthetic oligonucleotide
aguucccucuucguccaaa

SEQ ID NO: 2452951 - RNA, 19 nt, Artificial Sequence
  Description of Artificial Sequence: Synthetic oligonucleotide
cagcuugucuguguaaaua

SEQ ID NO: 2452952 - RNA, 19 nt, Artificial Sequence
  Description of Artificial Sequence: Synthetic oligonucleotide
cuacaagagaugacaugau

SEQ ID NO: 2452953 - RNA, 19 nt, Artificial Sequence
  Description of Artificial Sequence: Synthetic oligonucleotide
ggcgucagccuaaggcgcg

SEQ ID NO: 2452954 - RNA, 19 nt, Artificial Sequence
  Description of Artificial Sequence: Synthetic oligonucleotide
aaguucccucuucguccaa

SEQ ID NO: 2452955 - RNA, 19 nt, Artificial Sequence
  Description of Artificial Sequence: Synthetic oligonucleotide
agggguagccucgggugca

SEQ ID NO: 2452956 - RNA, 19 nt, Artificial Sequence
  Description of Artificial Sequence: Synthetic oligonucleotide
caauagucaguaacagcuu

SEQ ID NO: 2452957 - RNA, 19 nt, Artificial Sequence
  Description of Artificial Sequence: Synthetic oligonucleotide
ugcuaacuacuaggauuau

SEQ ID NO: 2452958 - RNA, 19 nt, Artificial Sequence
  Description of Artificial Sequence: Synthetic oligonucleotide
guccuucaguucaaggugu

SEQ ID NO: 2452959 - RNA, 19 nt, Artificial Sequence
  Description of Artificial Sequence: Synthetic oligonucleotide
aaggcgcgagggguagccu

SEQ ID NO: 2452960 - RNA, 19 nt, Artificial Sequence
  Description of Artificial Sequence: Synthetic oligonucleotide
ggcgcgagggguagccucg

SEQ ID NO: 2452961 - RNA, 19 nt, Artificial Sequence
  Description of Artificial Sequence: Synthetic oligonucleotide
cuaaggcgcgagggguagc

SEQ ID NO: 2452962 - RNA, 19 nt, Artificial Sequence
  Description of Artificial Sequence: Synthetic oligonucleotide
acaaugcucuuagcauuuu

SEQ ID NO: 2452963 - RNA, 19 nt, Artificial Sequence
  Description of Artificial Sequence: Synthetic oligonucleotide
gcucucaacuuccucuugu

SEQ ID NO: 2452964 - RNA, 19 nt, Artificial Sequence
  Description of Artificial Sequence: Synthetic oligonucleotide
guggugcuuuagaucucug

SEQ ID NO: 2452965 - RNA, 19 nt, Artificial Sequence
  Description of Artificial Sequence: Synthetic oligonucleotide
ccaguagauccauaugcua

SEQ ID NO: 2452966 - RNA, 19 nt, Artificial Sequence
  Description of Artificial Sequence: Synthetic oligonucleotide
gguccaaauaaaugaucuu

SEQ ID NO: 2452967 - RNA, 19 nt, Artificial Sequence
  Description of Artificial Sequence: Synthetic oligonucleotide
guagauccauaugcuacau

SEQ ID NO: 2452968 - RNA, 19 nt, Artificial Sequence
  Description of Artificial Sequence: Synthetic oligonucleotide
augcuacauuagaagucaa

SEQ ID NO: 2452969 - RNA, 19 nt, Artificial Sequence
  Description of Artificial Sequence: Synthetic oligonucleotide
cccauacacuacaagagau

SEQ ID NO: 2452970 - RNA, 19 nt, Artificial Sequence
  Description of Artificial Sequence: Synthetic oligonucleotide
ccuaaggcgcgagggguag

SEQ ID NO: 2452971 - RNA, 19 nt, Artificial Sequence
  Description of Artificial Sequence: Synthetic oligonucleotide
ccaccaaaaccauggcuaa

SEQ ID NO: 2452972 - RNA, 19 nt, Artificial Sequence
  Description of Artificial Sequence: Synthetic oligonucleotide
ggcagggccgcgcggcgag

SEQ ID NO: 2452973 - RNA, 19 nt, Artificial Sequence
  Description of Artificial Sequence: Synthetic oligonucleotide
gaaugccaguagauccaua

SEQ ID NO: 2452974 - RNA, 19 nt, Artificial Sequence
  Description of Artificial Sequence: Synthetic oligonucleotide
ccaaaaccauggcuaacaa

SEQ ID NO: 2452975 - RNA, 19 nt, Artificial Sequence
  Description of Artificial Sequence: Synthetic oligonucleotide
gccaguagauccauaugcu

SEQ ID NO: 2452976 - RNA, 19 nt, Artificial Sequence
  Description of Artificial Sequence: Synthetic oligonucleotide
ccaucccgaaugccaguag

SEQ ID NO: 2452977 - RNA, 19 nt, Artificial Sequence
  Description of Artificial Sequence: Synthetic oligonucleotide
gguggugcuuuagaucucu

SEQ ID NO: 2452978 - RNA, 19 nt, Artificial Sequence
  Description of Artificial Sequence: Synthetic oligonucleotide
ccaaauaaaugaucuuauu

SEQ ID NO: 2452979 - RNA, 19 nt, Artificial Sequence
  Description of Artificial Sequence: Synthetic oligonucleotide
gaucucuguugugugcguu

SEQ ID NO: 2452980 - RNA, 19 nt, Artificial Sequence
  Description of Artificial Sequence: Synthetic oligonucleotide
gguuaguccuucaguucaa

SEQ ID NO: 2452981 - RNA, 19 nt, Artificial Sequence
  Description of Artificial Sequence: Synthetic oligonucleotide
cagggccgcgcggcgaggc

SEQ ID NO: 2452982 - RNA, 19 nt, Artificial Sequence
  Description of Artificial Sequence: Synthetic oligonucleotide
ggcccggccgguuccuccc

SEQ ID NO: 2452983 - RNA, 19 nt, Artificial Sequence
  Description of Artificial Sequence: Synthetic oligonucleotide
agccucgggugcagagcuc

SEQ ID NO: 2452984 - RNA, 19 nt, Artificial Sequence
  Description of Artificial Sequence: Synthetic oligonucleotide
cgaauacuccggagcuggc

SEQ ID NO: 2452985 - RNA, 19 nt, Artificial Sequence
  Description of Artificial Sequence: Synthetic oligonucleotide
cauggcuaacaaugcucuu

SEQ ID NO: 2452986 - RNA, 19 nt, Artificial Sequence
  Description of Artificial Sequence: Synthetic oligonucleotide
cccaugaaggaaauucauu

SEQ ID NO: 2452987 - RNA, 19 nt, Artificial Sequence
  Description of Artificial Sequence: Synthetic oligonucleotide
gcucagcagagaacagcga

SEQ ID NO: 2452988 - RNA, 19 nt, Artificial Sequence
  Description of Artificial Sequence: Synthetic oligonucleotide
gcgagggguagccucgggu

SEQ ID NO: 2452989 - RNA, 19 nt, Artificial Sequence
  Description of Artificial Sequence: Synthetic oligonucleotide
ccucgggugcagagcucag

SEQ ID NO: 2452990 - RNA, 19 nt, Artificial Sequence
  Description of Artificial Sequence: Synthetic oligonucleotide
gggccgcgcggcgaggccc

SEQ ID NO: 2452991 - RNA, 19 nt, Artificial Sequence
  Description of Artificial Sequence: Synthetic oligonucleotide
gcgcggcgaggcccggccg

SEQ ID NO: 2452992 - RNA, 19 nt, Artificial Sequence
  Description of Artificial Sequence: Synthetic oligonucleotide
ggauuaucacaggcaguuu

SEQ ID NO: 2452993 - RNA, 19 nt, Artificial Sequence
  Description of Artificial Sequence: Synthetic oligonucleotide
gcgcgagggguagccucgg

SEQ ID NO: 2452994 - RNA, 19 nt, Artificial Sequence
  Description of Artificial Sequence: Synthetic oligonucleotide
gccuaaggcgcgaggggua

SEQ ID NO: 2452995 - RNA, 19 nt, Artificial Sequence
  Description of Artificial Sequence: Synthetic oligonucleotide
gcgucagccuaaggcgcga

SEQ ID NO: 2452996 - RNA, 19 nt, Artificial Sequence
  Description of Artificial Sequence: Synthetic oligonucleotide
cgcgagggguagccucggg

SEQ ID NO: 2452997 - RNA, 19 nt, Artificial Sequence
  Description of Artificial Sequence: Synthetic oligonucleotide
cgucagccuaaggcgcgag

SEQ ID NO: 2452998 - RNA, 19 nt, Artificial Sequence
  Description of Artificial Sequence: Synthetic oligonucleotide
gcagggccgcgcggcgagg

SEQ ID NO: 2452999 - RNA, 19 nt, Artificial Sequence
  Description of Artificial Sequence: Synthetic oligonucleotide
ggguagccucgggugcaga

SEQ ID NO: 2453000 - RNA, 19 nt, Artificial Sequence
  Description of Artificial Sequence: Synthetic oligonucleotide
cgaaugccaguagauccau

SEQ ID NO: 2453001 - RNA, 19 nt, Artificial Sequence
  Description of Artificial Sequence: Synthetic oligonucleotide
gcggcgaggcccggccggu

SEQ ID NO: 2453002 - RNA, 19 nt, Artificial Sequence
  Description of Artificial Sequence: Synthetic oligonucleotide
cgaggcccggccgguuccu

SEQ ID NO: 2453003 - RNA, 19 nt, Artificial Sequence
  Description of Artificial Sequence: Synthetic oligonucleotide
aaaguuagauccugcagcc

SEQ ID NO: 2453004 - RNA, 19 nt, Artificial Sequence
  Description of Artificial Sequence: Synthetic oligonucleotide
aacaccauccuucaacagc

SEQ ID NO: 2453005 - RNA, 19 nt, Artificial Sequence
  Description of Artificial Sequence: Synthetic oligonucleotide
aaacccaccaaucaggaag

SEQ ID NO: 2453006 - RNA, 19 nt, Artificial Sequence
  Description of Artificial Sequence: Synthetic oligonucleotide
uaauuugugaccuaccgag

SEQ ID NO: 2453007 - RNA, 19 nt, Artificial Sequence
  Description of Artificial Sequence: Synthetic oligonucleotide
ugggauauaaagcaggcag

SEQ ID NO: 2453008 - RNA, 19 nt, Artificial Sequence
  Description of Artificial Sequence: Synthetic oligonucleotide
ugcaugaccaucaagaaaa

SEQ ID NO: 2453009 - RNA, 19 nt, Artificial Sequence
  Description of Artificial Sequence: Synthetic oligonucleotide
gacaacuuccacuucaagg

SEQ ID NO: 2453010 - RNA, 19 nt, Artificial Sequence
  Description of Artificial Sequence: Synthetic oligonucleotide
auauaaagcaggcaggcag

SEQ ID NO: 2453011 - RNA, 19 nt, Artificial Sequence
  Description of Artificial Sequence: Synthetic oligonucleotide
aacagcuaagaaguuaccc

SEQ ID NO: 2453012 - RNA, 19 nt, Artificial Sequence
  Description of Artificial Sequence: Synthetic oligonucleotide
aaaugcaugaccaucaaga

SEQ ID NO: 2453013 - RNA, 19 nt, Artificial Sequence
  Description of Artificial Sequence: Synthetic oligonucleotide
augaccaucaagaaaacac

SEQ ID NO: 2453014 - RNA, 19 nt, Artificial Sequence
  Description of Artificial Sequence: Synthetic oligonucleotide
ucuugcauagacagcauag

SEQ ID NO: 2453015 - RNA, 19 nt, Artificial Sequence
  Description of Artificial Sequence: Synthetic oligonucleotide
ugaccuaccgagaaaaccc

SEQ ID NO: 2453016 - RNA, 19 nt, Artificial Sequence
  Description of Artificial Sequence: Synthetic oligonucleotide
aagaaguuacccuccagug

SEQ ID NO: 2453017 - RNA, 19 nt, Artificial Sequence
  Description of Artificial Sequence: Synthetic oligonucleotide
ugaggacucaaccagaaaa

SEQ ID NO: 2453018 - RNA, 19 nt, Artificial Sequence
  Description of Artificial Sequence: Synthetic oligonucleotide
uccaaguagacuaccaaug

SEQ ID NO: 2453019 - RNA, 19 nt, Artificial Sequence
  Description of Artificial Sequence: Synthetic oligonucleotide
ugaccaucaagaaaacacc

SEQ ID NO: 2453020 - RNA, 19 nt, Artificial Sequence
  Description of Artificial Sequence: Synthetic oligonucleotide
uaagaaguuacccuccagu

SEQ ID NO: 2453021 - RNA, 19 nt, Artificial Sequence
  Description of Artificial Sequence: Synthetic oligonucleotide
agaggcauguccucugucc

SEQ ID NO: 2453022 - RNA, 19 nt, Artificial Sequence
  Description of Artificial Sequence: Synthetic oligonucleotide
uccgaagccacauugggcc

SEQ ID NO: 2453023 - RNA, 19 nt, Artificial Sequence
  Description of Artificial Sequence: Synthetic oligonucleotide
caaucaggaagaaaugacc

SEQ ID NO: 2453024 - RNA, 19 nt, Artificial Sequence
  Description of Artificial Sequence: Synthetic oligonucleotide
gagauuggcagccagcccc

SEQ ID NO: 2453025 - RNA, 19 nt, Artificial Sequence
  Description of Artificial Sequence: Synthetic oligonucleotide
aguuagauccugcagccag

SEQ ID NO: 2453026 - RNA, 19 nt, Artificial Sequence
  Description of Artificial Sequence: Synthetic oligonucleotide
gacacgagaggaaagauac

SEQ ID NO: 2453027 - RNA, 19 nt, Artificial Sequence
  Description of Artificial Sequence: Synthetic oligonucleotide
gguagucuugcauagacag

SEQ ID NO: 2453028 - RNA, 19 nt, Artificial Sequence
  Description of Artificial Sequence: Synthetic oligonucleotide
uuccguaugagcuccaaca

SEQ ID NO: 2453029 - RNA, 19 nt, Artificial Sequence
  Description of Artificial Sequence: Synthetic oligonucleotide
aagggagacaacuuccacu

SEQ ID NO: 2453030 - RNA, 19 nt, Artificial Sequence
  Description of Artificial Sequence: Synthetic oligonucleotide
gguaauuugugaccuaccg

SEQ ID NO: 2453031 - RNA, 19 nt, Artificial Sequence
  Description of Artificial Sequence: Synthetic oligonucleotide
aaguagacuaccaauggcu

SEQ ID NO: 2453032 - RNA, 19 nt, Artificial Sequence
  Description of Artificial Sequence: Synthetic oligonucleotide
acagcuaagaaguuacccu

SEQ ID NO: 2453033 - RNA, 19 nt, Artificial Sequence
  Description of Artificial Sequence: Synthetic oligonucleotide
agauccugcagccagagau

SEQ ID NO: 2453034 - RNA, 19 nt, Artificial Sequence
  Description of Artificial Sequence: Synthetic oligonucleotide
uacuaggcuccacagaucu

SEQ ID NO: 2453035 - RNA, 19 nt, Artificial Sequence
  Description of Artificial Sequence: Synthetic oligonucleotide
aaugaccuuccuucccugg

SEQ ID NO: 2453036 - RNA, 19 nt, Artificial Sequence
  Description of Artificial Sequence: Synthetic oligonucleotide
gcuaaugugaacuccagac

SEQ ID NO: 2453037 - RNA, 19 nt, Artificial Sequence
  Description of Artificial Sequence: Synthetic oligonucleotide
ucguguugcacuuccagca

SEQ ID NO: 2453038 - RNA, 19 nt, Artificial Sequence
  Description of Artificial Sequence: Synthetic oligonucleotide
gaaguuacccuccagugaa

SEQ ID NO: 2453039 - RNA, 19 nt, Artificial Sequence
  Description of Artificial Sequence: Synthetic oligonucleotide
aggagcagccaauaugggg

SEQ ID NO: 2453040 - RNA, 19 nt, Artificial Sequence
  Description of Artificial Sequence: Synthetic oligonucleotide
acucucguguugcacuucc

SEQ ID NO: 2453041 - RNA, 19 nt, Artificial Sequence
  Description of Artificial Sequence: Synthetic oligonucleotide
ugagcuccaacaagacacg

SEQ ID NO: 2453042 - RNA, 19 nt, Artificial Sequence
  Description of Artificial Sequence: Synthetic oligonucleotide
aucaagaaaacaccauccu

SEQ ID NO: 2453043 - RNA, 19 nt, Artificial Sequence
  Description of Artificial Sequence: Synthetic oligonucleotide
cacgagaggaaagauaccc

SEQ ID NO: 2453044 - RNA, 19 nt, Artificial Sequence
  Description of Artificial Sequence: Synthetic oligonucleotide
ucucguguugcacuuccag

SEQ ID NO: 2453045 - RNA, 19 nt, Artificial Sequence
  Description of Artificial Sequence: Synthetic oligonucleotide
cuguccuacagugaggucc

SEQ ID NO: 2453046 - RNA, 19 nt, Artificial Sequence
  Description of Artificial Sequence: Synthetic oligonucleotide
ucucccagagguaauuugu

SEQ ID NO: 2453047 - RNA, 19 nt, Artificial Sequence
  Description of Artificial Sequence: Synthetic oligonucleotide
aacucaagcuggguccugc

SEQ ID NO: 2453048 - RNA, 19 nt, Artificial Sequence
  Description of Artificial Sequence: Synthetic oligonucleotide
aaggggcucucccagaggu

SEQ ID NO: 2453049 - RNA, 19 nt, Artificial Sequence
  Description of Artificial Sequence: Synthetic oligonucleotide
cuaggcuccacagaucugg

SEQ ID NO: 2453050 - RNA, 19 nt, Artificial Sequence
  Description of Artificial Sequence: Synthetic oligonucleotide
guagacuaccaauggcugg

SEQ ID NO: 2453051 - RNA, 19 nt, Artificial Sequence
  Description of Artificial Sequence: Synthetic oligonucleotide
ucaggaagaaaugaccuuc

SEQ ID NO: 2453052 - RNA, 19 nt, Artificial Sequence
  Description of Artificial Sequence: Synthetic oligonucleotide
aaacaccauccuucaacag

SEQ ID NO: 2453053 - RNA, 19 nt, Artificial Sequence
  Description of Artificial Sequence: Synthetic oligonucleotide
aacaagacacgagaggaaa

SEQ ID NO: 2453054 - RNA, 19 nt, Artificial Sequence
  Description of Artificial Sequence: Synthetic oligonucleotide
agagauuggcagccagccc

SEQ ID NO: 2453055 - RNA, 19 nt, Artificial Sequence
  Description of Artificial Sequence: Synthetic oligonucleotide
cagacauccaaguagacua

SEQ ID NO: 2453056 - RNA, 19 nt, Artificial Sequence
  Description of Artificial Sequence: Synthetic oligonucleotide
agcaucgagguuccuuggc

SEQ ID NO: 2453057 - RNA, 19 nt, Artificial Sequence
  Description of Artificial Sequence: Synthetic oligonucleotide
uaugggguagucuugcaua

SEQ ID NO: 2453058 - RNA, 19 nt, Artificial Sequence
  Description of Artificial Sequence: Synthetic oligonucleotide
ccaggagcagccaauaugg

SEQ ID NO: 2453059 - RNA, 19 nt, Artificial Sequence
  Description of Artificial Sequence: Synthetic oligonucleotide
caugccagguacuaggcuc

SEQ ID NO: 2453060 - RNA, 19 nt, Artificial Sequence
  Description of Artificial Sequence: Synthetic oligonucleotide
caugagcacagcuaaugug

SEQ ID NO: 2453061 - RNA, 19 nt, Artificial Sequence
  Description of Artificial Sequence: Synthetic oligonucleotide
agaaguuacccuccaguga

SEQ ID NO: 2453062 - RNA, 19 nt, Artificial Sequence
  Description of Artificial Sequence: Synthetic oligonucleotide
cagaaggcggucaucagug

SEQ ID NO: 2453063 - RNA, 19 nt, Artificial Sequence
  Description of Artificial Sequence: Synthetic oligonucleotide
uagacuaccaauggcuggc

SEQ ID NO: 2453064 - RNA, 19 nt, Artificial Sequence
  Description of Artificial Sequence: Synthetic oligonucleotide
aaaugaccuuccuucccug

SEQ ID NO: 2453065 - RNA, 19 nt, Artificial Sequence
  Description of Artificial Sequence: Synthetic oligonucleotide
auuugugaccuaccgagaa

SEQ ID NO: 2453066 - RNA, 19 nt, Artificial Sequence
  Description of Artificial Sequence: Synthetic oligonucleotide
cagaucuggcucuaacucc

SEQ ID NO: 2453067 - RNA, 19 nt, Artificial Sequence
  Description of Artificial Sequence: Synthetic oligonucleotide
accgagaaaacccaccaau

SEQ ID NO: 2453068 - RNA, 19 nt, Artificial Sequence
  Description of Artificial Sequence: Synthetic oligonucleotide
agcuaagaaguuacccucc

SEQ ID NO: 2453069 - RNA, 19 nt, Artificial Sequence
  Description of Artificial Sequence: Synthetic oligonucleotide
ucagacauccaaguagacu

SEQ ID NO: 2453070 - RNA, 19 nt, Artificial Sequence
  Description of Artificial Sequence: Synthetic oligonucleotide
uguccuacagugaggucca

SEQ ID NO: 2453071 - RNA, 19 nt, Artificial Sequence
  Description of Artificial Sequence: Synthetic oligonucleotide
aauaugggguagucuugca

SEQ ID NO: 2453072 - RNA, 19 nt, Artificial Sequence
  Description of Artificial Sequence: Synthetic oligonucleotide
uugacggaggcugccaggg

SEQ ID NO: 2453073 - RNA, 19 nt, Artificial Sequence
  Description of Artificial Sequence: Synthetic oligonucleotide
augggguagucuugcauag

SEQ ID NO: 2453074 - RNA, 19 nt, Artificial Sequence
  Description of Artificial Sequence: Synthetic oligonucleotide
acuucaaggccugaggacu

SEQ ID NO: 2453075 - RNA, 19 nt, Artificial Sequence
  Description of Artificial Sequence: Synthetic oligonucleotide
cuagcaggcguacauguuc

SEQ ID NO: 2453076 - RNA, 19 nt, Artificial Sequence
  Description of Artificial Sequence: Synthetic oligonucleotide
caggaagaaaugaccuucc

SEQ ID NO: 2453077 - RNA, 19 nt, Artificial Sequence
  Description of Artificial Sequence: Synthetic oligonucleotide
guaauuugugaccuaccga

SEQ ID NO: 2453078 - RNA, 19 nt, Artificial Sequence
  Description of Artificial Sequence: Synthetic oligonucleotide
cagcuaagaaguuacccuc

SEQ ID NO: 2453079 - RNA, 19 nt, Artificial Sequence
  Description of Artificial Sequence: Synthetic oligonucleotide
auccaaguagacuaccaau

SEQ ID NO: 2453080 - RNA, 19 nt, Artificial Sequence
  Description of Artificial Sequence: Synthetic oligonucleotide
augggcugcgcccacgggg

SEQ ID NO: 2453081 - RNA, 19 nt, Artificial Sequence
  Description of Artificial Sequence: Synthetic oligonucleotide
aucgagguuccuuggccac

SEQ ID NO: 2453082 - RNA, 19 nt, Artificial Sequence
  Description of Artificial Sequence: Synthetic oligonucleotide
cuggcucuaacuccagggg

SEQ ID NO: 2453083 - RNA, 19 nt, Artificial Sequence
  Description of Artificial Sequence: Synthetic oligonucleotide
gagguaauuugugaccuac

SEQ ID NO: 2453084 - RNA, 19 nt, Artificial Sequence
  Description of Artificial Sequence: Synthetic oligonucleotide
gacagcauagagcucagcu

SEQ ID NO: 2453085 - RNA, 19 nt, Artificial Sequence
  Description of Artificial Sequence: Synthetic oligonucleotide
acgagaggaaagauacccc

SEQ ID NO: 2453086 - RNA, 19 nt, Artificial Sequence
  Description of Artificial Sequence: Synthetic oligonucleotide
cucguguugcacuuccagc

SEQ ID NO: 2453087 - RNA, 19 nt, Artificial Sequence
  Description of Artificial Sequence: Synthetic oligonucleotide
uccguaugagcuccaacaa

SEQ ID NO: 2453088 - RNA, 19 nt, Artificial Sequence
  Description of Artificial Sequence: Synthetic oligonucleotide
ugcuagcaggcguacaugu

SEQ ID NO: 2453089 - RNA, 19 nt, Artificial Sequence
  Description of Artificial Sequence: Synthetic oligonucleotide
gaggaaggggcucucccag

SEQ ID NO: 2453090 - RNA, 19 nt, Artificial Sequence
  Description of Artificial Sequence: Synthetic oligonucleotide
uuugugaccuaccgagaaa

SEQ ID NO: 2453091 - RNA, 19 nt, Artificial Sequence
  Description of Artificial Sequence: Synthetic oligonucleotide
uuagauccugcagccagag

SEQ ID NO: 2453092 - RNA, 19 nt, Artificial Sequence
  Description of Artificial Sequence: Synthetic oligonucleotide
caauaugggguagucuugc

SEQ ID NO: 2453093 - RNA, 19 nt, Artificial Sequence
  Description of Artificial Sequence: Synthetic oligonucleotide
uugugaccuaccgagaaaa

SEQ ID NO: 2453094 - RNA, 19 nt, Artificial Sequence
  Description of Artificial Sequence: Synthetic oligonucleotide
uagcaggcguacauguuca

SEQ ID NO: 2453095 - RNA, 19 nt, Artificial Sequence
  Description of Artificial Sequence: Synthetic oligonucleotide
gcauagacagcauagagcu

SEQ ID NO: 2453096 - RNA, 19 nt, Artificial Sequence
  Description of Artificial Sequence: Synthetic oligonucleotide
ugcgcacagcccagcaucg

SEQ ID NO: 2453097 - RNA, 19 nt, Artificial Sequence
  Description of Artificial Sequence: Synthetic oligonucleotide
caaaugcaugaccaucaag

SEQ ID NO: 2453098 - RNA, 19 nt, Artificial Sequence
  Description of Artificial Sequence: Synthetic oligonucleotide
gacggaggcugccagggcc

SEQ ID NO: 2453099 - RNA, 19 nt, Artificial Sequence
  Description of Artificial Sequence: Synthetic oligonucleotide
guacauguucagcaacccc

SEQ ID NO: 2453100 - RNA, 19 nt, Artificial Sequence
  Description of Artificial Sequence: Synthetic oligonucleotide
uagcagaaggcggucauca

SEQ ID NO: 2453101 - RNA, 19 nt, Artificial Sequence
  Description of Artificial Sequence: Synthetic oligonucleotide
uucaacagcuaagaaguua

SEQ ID NO: 2453102 - RNA, 19 nt, Artificial Sequence
  Description of Artificial Sequence: Synthetic oligonucleotide
aguagacuaccaauggcug

SEQ ID NO: 2453103 - RNA, 19 nt, Artificial Sequence
  Description of Artificial Sequence: Synthetic oligonucleotide
uggcucuaacuccaggggu

SEQ ID NO: 2453104 - RNA, 19 nt, Artificial Sequence
  Description of Artificial Sequence: Synthetic oligonucleotide
gugaccuaccgagaaaacc

SEQ ID NO: 2453105 - RNA, 19 nt, Artificial Sequence
  Description of Artificial Sequence: Synthetic oligonucleotide
cuaagaaguuacccuccag

SEQ ID NO: 2453106 - RNA, 19 nt, Artificial Sequence
  Description of Artificial Sequence: Synthetic oligonucleotide
ccaaguagacuaccaaugg

SEQ ID NO: 2453107 - RNA, 19 nt, Artificial Sequence
  Description of Artificial Sequence: Synthetic oligonucleotide
ggggauggaacucaagcug

SEQ ID NO: 2453108 - RNA, 19 nt, Artificial Sequence
  Description of Artificial Sequence: Synthetic oligonucleotide
gaaaugaccuuccuucccu

SEQ ID NO: 2453109 - RNA, 19 nt, Artificial Sequence
  Description of Artificial Sequence: Synthetic oligonucleotide
caggcguacauguucagca

SEQ ID NO: 2453110 - RNA, 19 nt, Artificial Sequence
  Description of Artificial Sequence: Synthetic oligonucleotide
gaccaucaagaaaacacca

SEQ ID NO: 2453111 - RNA, 19 nt, Artificial Sequence
  Description of Artificial Sequence: Synthetic oligonucleotide
aauuugugaccuaccgaga

SEQ ID NO: 2453112 - RNA, 19 nt, Artificial Sequence
  Description of Artificial Sequence: Synthetic oligonucleotide
augccagguacuaggcucc

SEQ ID NO: 2453113 - RNA, 19 nt, Artificial Sequence
  Description of Artificial Sequence: Synthetic oligonucleotide
agacaacuuccacuucaag

SEQ ID NO: 2453114 - RNA, 19 nt, Artificial Sequence
  Description of Artificial Sequence: Synthetic oligonucleotide
auaugggguagucuugcau

SEQ ID NO: 2453115 - RNA, 19 nt, Artificial Sequence
  Description of Artificial Sequence: Synthetic oligonucleotide
cagguacuaggcuccacag

SEQ ID NO: 2453116 - RNA, 19 nt, Artificial Sequence
  Description of Artificial Sequence: Synthetic oligonucleotide
agcuaaugugaacuccaga

SEQ ID NO: 2453117 - RNA, 19 nt, Artificial Sequence
  Description of Artificial Sequence: Synthetic oligonucleotide
caccaaucaggaagaaaug

SEQ ID NO: 2453118 - RNA, 19 nt, Artificial Sequence
  Description of Artificial Sequence: Synthetic oligonucleotide
ugugaccuaccgagaaaac

SEQ ID NO: 2453119 - RNA, 19 nt, Artificial Sequence
  Description of Artificial Sequence: Synthetic oligonucleotide
ugggccggaucagacaucc

SEQ ID NO: 2453120 - RNA, 19 nt, Artificial Sequence
  Description of Artificial Sequence: Synthetic oligonucleotide
aagacacgagaggaaagau

SEQ ID NO: 2453121 - RNA, 19 nt, Artificial Sequence
  Description of Artificial Sequence: Synthetic oligonucleotide
aacccaccaaucaggaaga

SEQ ID NO: 2453122 - RNA, 19 nt, Artificial Sequence
  Description of Artificial Sequence: Synthetic oligonucleotide
cuaacuccaggggugcuag

SEQ ID NO: 2453123 - RNA, 19 nt, Artificial Sequence
  Description of Artificial Sequence: Synthetic oligonucleotide
acucaagcuggguccugcg

SEQ ID NO: 2453124 - RNA, 19 nt, Artificial Sequence
  Description of Artificial Sequence: Synthetic oligonucleotide
agacauccaaguagacuac

SEQ ID NO: 2453125 - RNA, 19 nt, Artificial Sequence
  Description of Artificial Sequence: Synthetic oligonucleotide
gggauggaacucaagcugg

SEQ ID NO: 2453126 - RNA, 19 nt, Artificial Sequence
  Description of Artificial Sequence: Synthetic oligonucleotide
cauguccucuguccuacag

SEQ ID NO: 2453127 - RNA, 19 nt, Artificial Sequence
  Description of Artificial Sequence: Synthetic oligonucleotide
cuaccgagaaaacccacca

SEQ ID NO: 2453128 - RNA, 19 nt, Artificial Sequence
  Description of Artificial Sequence: Synthetic oligonucleotide
aggccugaggacucaacca

SEQ ID NO: 2453129 - RNA, 19 nt, Artificial Sequence
  Description of Artificial Sequence: Synthetic oligonucleotide
cucucccagagguaauuug

SEQ ID NO: 2453130 - RNA, 19 nt, Artificial Sequence
  Description of Artificial Sequence: Synthetic oligonucleotide
cucccagagguaauuugug

SEQ ID NO: 2453131 - RNA, 19 nt, Artificial Sequence
  Description of Artificial Sequence: Synthetic oligonucleotide
uccuacagugagguccagg

SEQ ID NO: 2453132 - RNA, 19 nt, Artificial Sequence
  Description of Artificial Sequence: Synthetic oligonucleotide
ccuucccugggauauaaag

SEQ ID NO: 2453133 - RNA, 19 nt, Artificial Sequence
  Description of Artificial Sequence: Synthetic oligonucleotide
agaucuggcucuaacucca

SEQ ID NO: 2453134 - RNA, 19 nt, Artificial Sequence
  Description of Artificial Sequence: Synthetic oligonucleotide
acauugggccggaucagac

SEQ ID NO: 2453135 - RNA, 19 nt, Artificial Sequence
  Description of Artificial Sequence: Synthetic oligonucleotide
cuccuccgaagccacauug

SEQ ID NO: 2453136 - RNA, 19 nt, Artificial Sequence
  Description of Artificial Sequence: Synthetic oligonucleotide
auagagcucagcuccucaa

SEQ ID NO: 2453137 - RNA, 19 nt, Artificial Sequence
  Description of Artificial Sequence: Synthetic oligonucleotide
gcuccaacaagacacgaga

SEQ ID NO: 2453138 - RNA, 19 nt, Artificial Sequence
  Description of Artificial Sequence: Synthetic oligonucleotide
uuccacuucaaggccugag

SEQ ID NO: 2453139 - RNA, 19 nt, Artificial Sequence
  Description of Artificial Sequence: Synthetic oligonucleotide
cauccuucaacagcuaaga

SEQ ID NO: 2453140 - RNA, 19 nt, Artificial Sequence
  Description of Artificial Sequence: Synthetic oligonucleotide
cuacagugagguccaggag

SEQ ID NO: 2453141 - RNA, 19 nt, Artificial Sequence
  Description of Artificial Sequence: Synthetic oligonucleotide
agacuaccaauggcuggcc

SEQ ID NO: 2453142 - RNA, 19 nt, Artificial Sequence
  Description of Artificial Sequence: Synthetic oligonucleotide
acacgagaggaaagauacc

SEQ ID NO: 2453143 - RNA, 19 nt, Artificial Sequence
  Description of Artificial Sequence: Synthetic oligonucleotide
caguguccaugccagguac

SEQ ID NO: 2453144 - RNA, 19 nt, Artificial Sequence
  Description of Artificial Sequence: Synthetic oligonucleotide
uguccaugccagguacuag

SEQ ID NO: 2453145 - RNA, 19 nt, Artificial Sequence
  Description of Artificial Sequence: Synthetic oligonucleotide
ccaacuaggaagcgguccc

SEQ ID NO: 2453146 - RNA, 19 nt, Artificial Sequence
  Description of Artificial Sequence: Synthetic oligonucleotide
uaggcuccacagaucuggc

SEQ ID NO: 2453147 - RNA, 19 nt, Artificial Sequence
  Description of Artificial Sequence: Synthetic oligonucleotide
caagacacgagaggaaaga

SEQ ID NO: 2453148 - RNA, 19 nt, Artificial Sequence
  Description of Artificial Sequence: Synthetic oligonucleotide
cugcgcacagcccagcauc

SEQ ID NO: 2453149 - RNA, 19 nt, Artificial Sequence
  Description of Artificial Sequence: Synthetic oligonucleotide
aucagacauccaaguagac

SEQ ID NO: 2453150 - RNA, 19 nt, Artificial Sequence
  Description of Artificial Sequence: Synthetic oligonucleotide
accauccuucaacagcuaa

SEQ ID NO: 2453151 - RNA, 19 nt, Artificial Sequence
  Description of Artificial Sequence: Synthetic oligonucleotide
agguacuaggcuccacaga

SEQ ID NO: 2453152 - RNA, 19 nt, Artificial Sequence
  Description of Artificial Sequence: Synthetic oligonucleotide
guagucuugcauagacagc

SEQ ID NO: 2453153 - RNA, 19 nt, Artificial Sequence
  Description of Artificial Sequence: Synthetic oligonucleotide
auaaagcaggcaggcagca

SEQ ID NO: 2453154 - RNA, 19 nt, Artificial Sequence
  Description of Artificial Sequence: Synthetic oligonucleotide
cuaaugugaacuccagacu

SEQ ID NO: 2453155 - RNA, 19 nt, Artificial Sequence
  Description of Artificial Sequence: Synthetic oligonucleotide
aaguuagauccugcagcca

SEQ ID NO: 2453156 - RNA, 19 nt, Artificial Sequence
  Description of Artificial Sequence: Synthetic oligonucleotide
ccuaccgagaaaacccacc

SEQ ID NO: 2453157 - RNA, 19 nt, Artificial Sequence
  Description of Artificial Sequence: Synthetic oligonucleotide
cucaagcuggguccugcgc

SEQ ID NO: 2453158 - RNA, 19 nt, Artificial Sequence
  Description of Artificial Sequence: Synthetic oligonucleotide
gccacauugggccggauca

SEQ ID NO: 2453159 - RNA, 19 nt, Artificial Sequence
  Description of Artificial Sequence: Synthetic oligonucleotide
agcuccaacaagacacgag

SEQ ID NO: 2453160 - RNA, 19 nt, Artificial Sequence
  Description of Artificial Sequence: Synthetic oligonucleotide
cuccagacucucguguugc

SEQ ID NO: 2453161 - RNA, 19 nt, Artificial Sequence
  Description of Artificial Sequence: Synthetic oligonucleotide
agaaaacaccauccuucaa

SEQ ID NO: 2453162 - RNA, 19 nt, Artificial Sequence
  Description of Artificial Sequence: Synthetic oligonucleotide
cuugcauagacagcauaga

SEQ ID NO: 2453163 - RNA, 19 nt, Artificial Sequence
  Description of Artificial Sequence: Synthetic oligonucleotide
acauccaaguagacuacca

SEQ ID NO: 2453164 - RNA, 19 nt, Artificial Sequence
  Description of Artificial Sequence: Synthetic oligonucleotide
accaauggcuggccaguug

SEQ ID NO: 2453165 - RNA, 19 nt, Artificial Sequence
  Description of Artificial Sequence: Synthetic oligonucleotide
acacaggccucugggagag

SEQ ID NO: 2453166 - RNA, 19 nt, Artificial Sequence
  Description of Artificial Sequence: Synthetic oligonucleotide
guaugagcuccaacaagac

SEQ ID NO: 2453167 - RNA, 19 nt, Artificial Sequence
  Description of Artificial Sequence: Synthetic oligonucleotide
caugcuagcagaaggcggu

SEQ ID NO: 2453168 - RNA, 19 nt, Artificial Sequence
  Description of Artificial Sequence: Synthetic oligonucleotide
cuuccguaugagcuccaac

SEQ ID NO: 2453169 - RNA, 19 nt, Artificial Sequence
  Description of Artificial Sequence: Synthetic oligonucleotide
gagcacagcuaaugugaac

SEQ ID NO: 2453170 - RNA, 19 nt, Artificial Sequence
  Description of Artificial Sequence: Synthetic oligonucleotide
ccagcaucgagguuccuug

SEQ ID NO: 2453171 - RNA, 19 nt, Artificial Sequence
  Description of Artificial Sequence: Synthetic oligonucleotide
gcaucgagguuccuuggcc

SEQ ID NO: 2453172 - RNA, 19 nt, Artificial Sequence
  Description of Artificial Sequence: Synthetic oligonucleotide
caucgagguuccuuggcca

SEQ ID NO: 2453173 - RNA, 19 nt, Artificial Sequence
  Description of Artificial Sequence: Synthetic oligonucleotide
cagcaucgagguuccuugg

SEQ ID NO: 2453174 - RNA, 19 nt, Artificial Sequence
  Description of Artificial Sequence: Synthetic oligonucleotide
accaucaagaaaacaccau

SEQ ID NO: 2453175 - RNA, 19 nt, Artificial Sequence
  Description of Artificial Sequence: Synthetic oligonucleotide
acaguguccaugccaggua

SEQ ID NO: 2453176 - RNA, 19 nt, Artificial Sequence
  Description of Artificial Sequence: Synthetic oligonucleotide
cguaugagcuccaacaaga

SEQ ID NO: 2453177 - RNA, 19 nt, Artificial Sequence
  Description of Artificial Sequence: Synthetic oligonucleotide
gggaccaccaugagcacag

SEQ ID NO: 2453178 - RNA, 19 nt, Artificial Sequence
  Description of Artificial Sequence: Synthetic oligonucleotide
aggcggucaucagugcugg

SEQ ID NO: 2453179 - RNA, 19 nt, Artificial Sequence
  Description of Artificial Sequence: Synthetic oligonucleotide
ccuacagugagguccagga

SEQ ID NO: 2453180 - RNA, 19 nt, Artificial Sequence
  Description of Artificial Sequence: Synthetic oligonucleotide
aacuaggaagcggucccau

SEQ ID NO: 2453181 - RNA, 19 nt, Artificial Sequence
  Description of Artificial Sequence: Synthetic oligonucleotide
accuaccgagaaaacccac

SEQ ID NO: 2453182 - RNA, 19 nt, Artificial Sequence
  Description of Artificial Sequence: Synthetic oligonucleotide
caggacugcacacaggccu

SEQ ID NO: 2453183 - RNA, 19 nt, Artificial Sequence
  Description of Artificial Sequence: Synthetic oligonucleotide
aguuacccuccagugaaaa

SEQ ID NO: 2453184 - RNA, 19 nt, Artificial Sequence
  Description of Artificial Sequence: Synthetic oligonucleotide
cauagagcucagcuccuca

SEQ ID NO: 2453185 - RNA, 19 nt, Artificial Sequence
  Description of Artificial Sequence: Synthetic oligonucleotide
gaaggcggucaucagugcu

SEQ ID NO: 2453186 - RNA, 19 nt, Artificial Sequence
  Description of Artificial Sequence: Synthetic oligonucleotide
gacuaccaauggcuggcca

SEQ ID NO: 2453187 - RNA, 19 nt, Artificial Sequence
  Description of Artificial Sequence: Synthetic oligonucleotide
gaccuaccgagaaaaccca

SEQ ID NO: 2453188 - RNA, 19 nt, Artificial Sequence
  Description of Artificial Sequence: Synthetic oligonucleotide
uccagacucucguguugca

SEQ ID NO: 2453189 - RNA, 19 nt, Artificial Sequence
  Description of Artificial Sequence: Synthetic oligonucleotide
agacucucguguugcacuu

SEQ ID NO: 2453190 - RNA, 19 nt, Artificial Sequence
  Description of Artificial Sequence: Synthetic oligonucleotide
aggcguacauguucagcaa

SEQ ID NO: 2453191 - RNA, 19 nt, Artificial Sequence
  Description of Artificial Sequence: Synthetic oligonucleotide
ggccaguugacggaggcug

SEQ ID NO: 2453192 - RNA, 19 nt, Artificial Sequence
  Description of Artificial Sequence: Synthetic oligonucleotide
ccaauaugggguagucuug

SEQ ID NO: 2453193 - RNA, 19 nt, Artificial Sequence
  Description of Artificial Sequence: Synthetic oligonucleotide
agagguaauuugugaccua

SEQ ID NO: 2453194 - RNA, 19 nt, Artificial Sequence
  Description of Artificial Sequence: Synthetic oligonucleotide
gagacaacuuccacuucaa

SEQ ID NO: 2453195 - RNA, 19 nt, Artificial Sequence
  Description of Artificial Sequence: Synthetic oligonucleotide
ggcucuaacuccaggggug

SEQ ID NO: 2453196 - RNA, 19 nt, Artificial Sequence
  Description of Artificial Sequence: Synthetic oligonucleotide
ggcguacauguucagcaac

SEQ ID NO: 2453197 - RNA, 19 nt, Artificial Sequence
  Description of Artificial Sequence: Synthetic oligonucleotide
ccgagaaaacccaccaauc

SEQ ID NO: 2453198 - RNA, 19 nt, Artificial Sequence
  Description of Artificial Sequence: Synthetic oligonucleotide
cacagaucuggcucuaacu

SEQ ID NO: 2453199 - RNA, 19 nt, Artificial Sequence
  Description of Artificial Sequence: Synthetic oligonucleotide
agacacgagaggaaagaua

SEQ ID NO: 2453200 - RNA, 19 nt, Artificial Sequence
  Description of Artificial Sequence: Synthetic oligonucleotide
gcguacauguucagcaacc

SEQ ID NO: 2453201 - RNA, 19 nt, Artificial Sequence
  Description of Artificial Sequence: Synthetic oligonucleotide
agccaauaugggguagucu

SEQ ID NO: 2453202 - RNA, 19 nt, Artificial Sequence
  Description of Artificial Sequence: Synthetic oligonucleotide
uccaggggccaugcuagca

SEQ ID NO: 2453203 - RNA, 19 nt, Artificial Sequence
  Description of Artificial Sequence: Synthetic oligonucleotide
ccagagauuggcagccagc

SEQ ID NO: 2453204 - RNA, 19 nt, Artificial Sequence
  Description of Artificial Sequence: Synthetic oligonucleotide
gaucuggcucuaacuccag

SEQ ID NO: 2453205 - RNA, 19 nt, Artificial Sequence
  Description of Artificial Sequence: Synthetic oligonucleotide
uggguccugcgcacagccc

SEQ ID NO: 2453206 - RNA, 19 nt, Artificial Sequence
  Description of Artificial Sequence: Synthetic oligonucleotide
gcuaagaaguuacccucca

SEQ ID NO: 2453207 - RNA, 19 nt, Artificial Sequence
  Description of Artificial Sequence: Synthetic oligonucleotide
ucuguccuacagugagguc

SEQ ID NO: 2453208 - RNA, 19 nt, Artificial Sequence
  Description of Artificial Sequence: Synthetic oligonucleotide
gucuugcauagacagcaua

SEQ ID NO: 2453209 - RNA, 19 nt, Artificial Sequence
  Description of Artificial Sequence: Synthetic oligonucleotide
gccaauaugggguagucuu

SEQ ID NO: 2453210 - RNA, 19 nt, Artificial Sequence
  Description of Artificial Sequence: Synthetic oligonucleotide
augcuagcagaaggcgguc

SEQ ID NO: 2453211 - RNA, 19 nt, Artificial Sequence
  Description of Artificial Sequence: Synthetic oligonucleotide
ccguaugagcuccaacaag

SEQ ID NO: 2453212 - RNA, 19 nt, Artificial Sequence
  Description of Artificial Sequence: Synthetic oligonucleotide
cagagguaauuugugaccu

SEQ ID NO: 2453213 - RNA, 19 nt, Artificial Sequence
  Description of Artificial Sequence: Synthetic oligonucleotide
cagacucucguguugcacu

SEQ ID NO: 2453214 - RNA, 19 nt, Artificial Sequence
  Description of Artificial Sequence: Synthetic oligonucleotide
cacggggauggaacucaag

SEQ ID NO: 2453215 - RNA, 19 nt, Artificial Sequence
  Description of Artificial Sequence: Synthetic oligonucleotide
uaacuccaggggugcuagc

SEQ ID NO: 2453216 - RNA, 19 nt, Artificial Sequence
  Description of Artificial Sequence: Synthetic oligonucleotide
ucgagguuccuuggccaca

SEQ ID NO: 2453217 - RNA, 19 nt, Artificial Sequence
  Description of Artificial Sequence: Synthetic oligonucleotide
cugggauauaaagcaggca

SEQ ID NO: 2453218 - RNA, 19 nt, Artificial Sequence
  Description of Artificial Sequence: Synthetic oligonucleotide
cccaacuaggaagcggucc

SEQ ID NO: 2453219 - RNA, 19 nt, Artificial Sequence
  Description of Artificial Sequence: Synthetic oligonucleotide
caugggcugcgcccacggg

SEQ ID NO: 2453220 - RNA, 19 nt, Artificial Sequence
  Description of Artificial Sequence: Synthetic oligonucleotide
gcacagcccagcaucgagg

SEQ ID NO: 2453221 - RNA, 19 nt, Artificial Sequence
  Description of Artificial Sequence: Synthetic oligonucleotide
gccggaucagacauccaag

SEQ ID NO: 2453222 - RNA, 19 nt, Artificial Sequence
  Description of Artificial Sequence: Synthetic oligonucleotide
ggccggaucagacauccaa

SEQ ID NO: 2453223 - RNA, 19 nt, Artificial Sequence
  Description of Artificial Sequence: Synthetic oligonucleotide
uccuucccugggauauaaa

SEQ ID NO: 2453224 - RNA, 19 nt, Artificial Sequence
  Description of Artificial Sequence: Synthetic oligonucleotide
cuagcagaaggcggucauc

SEQ ID NO: 2453225 - RNA, 19 nt, Artificial Sequence
  Description of Artificial Sequence: Synthetic oligonucleotide
ccaauggcuggccaguuga

SEQ ID NO: 2453226 - RNA, 19 nt, Artificial Sequence
  Description of Artificial Sequence: Synthetic oligonucleotide
ggguccugcgcacagccca

SEQ ID NO: 2453227 - RNA, 19 nt, Artificial Sequence
  Description of Artificial Sequence: Synthetic oligonucleotide
gagcagccaauauggggua

SEQ ID NO: 2453228 - RNA, 19 nt, Artificial Sequence
  Description of Artificial Sequence: Synthetic oligonucleotide
aaguuacccuccagugaaa

SEQ ID NO: 2453229 - RNA, 19 nt, Artificial Sequence
  Description of Artificial Sequence: Synthetic oligonucleotide
gaacucaagcuggguccug

SEQ ID NO: 2453230 - RNA, 19 nt, Artificial Sequence
  Description of Artificial Sequence: Synthetic oligonucleotide
ggcauguccucuguccuac

SEQ ID NO: 2453231 - RNA, 19 nt, Artificial Sequence
  Description of Artificial Sequence: Synthetic oligonucleotide
cccagggaccaccaugagc

SEQ ID NO: 2453232 - RNA, 19 nt, Artificial Sequence
  Description of Artificial Sequence: Synthetic oligonucleotide
ggccccagggaccaccaug

SEQ ID NO: 2453233 - RNA, 19 nt, Artificial Sequence
  Description of Artificial Sequence: Synthetic oligonucleotide
uugggccggaucagacauc

SEQ ID NO: 2453234 - RNA, 19 nt, Artificial Sequence
  Description of Artificial Sequence: Synthetic oligonucleotide
cgccuguagcccaucauag

SEQ ID NO: 2453235 - RNA, 19 nt, Artificial Sequence
  Description of Artificial Sequence: Synthetic oligonucleotide
aguguccaugccagguacu

SEQ ID NO: 2453236 - RNA, 19 nt, Artificial Sequence
  Description of Artificial Sequence: Synthetic oligonucleotide
aggcauguccucuguccua

SEQ ID NO: 2453237 - RNA, 19 nt, Artificial Sequence
  Description of Artificial Sequence: Synthetic oligonucleotide
guacuaggcuccacagauc

SEQ ID NO: 2453238 - RNA, 19 nt, Artificial Sequence
  Description of Artificial Sequence: Synthetic oligonucleotide
cggucaucagugcuggccc

SEQ ID NO: 2453239 - RNA, 19 nt, Artificial Sequence
  Description of Artificial Sequence: Synthetic oligonucleotide
uggccaguugacggaggcu

SEQ ID NO: 2453240 - RNA, 19 nt, Artificial Sequence
  Description of Artificial Sequence: Synthetic oligonucleotide
gcucuaacuccaggggugc

SEQ ID NO: 2453241 - RNA, 19 nt, Artificial Sequence
  Description of Artificial Sequence: Synthetic oligonucleotide
agcggucccaugggcugcg

SEQ ID NO: 2453242 - RNA, 19 nt, Artificial Sequence
  Description of Artificial Sequence: Synthetic oligonucleotide
cguacauguucagcaaccc

SEQ ID NO: 2453243 - RNA, 19 nt, Artificial Sequence
  Description of Artificial Sequence: Synthetic oligonucleotide
cacagcccagcaucgaggu

SEQ ID NO: 2453244 - RNA, 19 nt, Artificial Sequence
  Description of Artificial Sequence: Synthetic oligonucleotide
aagcuggguccugcgcaca

SEQ ID NO: 2453245 - RNA, 19 nt, Artificial Sequence
  Description of Artificial Sequence: Synthetic oligonucleotide
cacauugggccggaucaga

SEQ ID NO: 2453246 - RNA, 19 nt, Artificial Sequence
  Description of Artificial Sequence: Synthetic oligonucleotide
agucuugcauagacagcau

SEQ ID NO: 2453247 - RNA, 19 nt, Artificial Sequence
  Description of Artificial Sequence: Synthetic oligonucleotide
cugaggacucaaccagaaa

SEQ ID NO: 2453248 - RNA, 19 nt, Artificial Sequence
  Description of Artificial Sequence: Synthetic oligonucleotide
gcagaaggcggucaucagu

SEQ ID NO: 2453249 - RNA, 19 nt, Artificial Sequence
  Description of Artificial Sequence: Synthetic oligonucleotide
caaugaggaaggggcucuc

SEQ ID NO: 2453250 - RNA, 19 nt, Artificial Sequence
  Description of Artificial Sequence: Synthetic oligonucleotide
ggggccaugcuagcagaag

SEQ ID NO: 2453251 - RNA, 19 nt, Artificial Sequence
  Description of Artificial Sequence: Synthetic oligonucleotide
gguuccuuggccacagugu

SEQ ID NO: 2453252 - RNA, 19 nt, Artificial Sequence
  Description of Artificial Sequence: Synthetic oligonucleotide
gaccuuccuucccugggau

SEQ ID NO: 2453253 - RNA, 19 nt, Artificial Sequence
  Description of Artificial Sequence: Synthetic oligonucleotide
ccaugggcugcgcccacgg

SEQ ID NO: 2453254 - RNA, 19 nt, Artificial Sequence
  Description of Artificial Sequence: Synthetic oligonucleotide
uaccaauggcuggccaguu

SEQ ID NO: 2453255 - RNA, 19 nt, Artificial Sequence
  Description of Artificial Sequence: Synthetic oligonucleotide
acggaggcugccagggccu

SEQ ID NO: 2453256 - RNA, 19 nt, Artificial Sequence
  Description of Artificial Sequence: Synthetic oligonucleotide
agguccaggagcagccaau

SEQ ID NO: 2453257 - RNA, 19 nt, Artificial Sequence
  Description of Artificial Sequence: Synthetic oligonucleotide
cucucguguugcacuucca

SEQ ID NO: 2453258 - RNA, 19 nt, Artificial Sequence
  Description of Artificial Sequence: Synthetic oligonucleotide
ggguagucuugcauagaca

SEQ ID NO: 2453259 - RNA, 19 nt, Artificial Sequence
  Description of Artificial Sequence: Synthetic oligonucleotide
caacuaggaagcgguccca

SEQ ID NO: 2453260 - RNA, 19 nt, Artificial Sequence
  Description of Artificial Sequence: Synthetic oligonucleotide
ccugaggacucaaccagaa

SEQ ID NO: 2453261 - RNA, 19 nt, Artificial Sequence
  Description of Artificial Sequence: Synthetic oligonucleotide
ugcgcccacggggauggaa

SEQ ID NO: 2453262 - RNA, 19 nt, Artificial Sequence
  Description of Artificial Sequence: Synthetic oligonucleotide
cuaccaauggcuggccagu

SEQ ID NO: 2453263 - RNA, 19 nt, Artificial Sequence
  Description of Artificial Sequence: Synthetic oligonucleotide
ccaguugacggaggcugcc

SEQ ID NO: 2453264 - RNA, 19 nt, Artificial Sequence
  Description of Artificial Sequence: Synthetic oligonucleotide
ggggcucucccagagguaa

SEQ ID NO: 2453265 - RNA, 19 nt, Artificial Sequence
  Description of Artificial Sequence: Synthetic oligonucleotide
ccagacucucguguugcac

SEQ ID NO: 2453266 - RNA, 19 nt, Artificial Sequence
  Description of Artificial Sequence: Synthetic oligonucleotide
caguugacggaggcugcca

SEQ ID NO: 2453267 - RNA, 19 nt, Artificial Sequence
  Description of Artificial Sequence: Synthetic oligonucleotide
guccucuguccuacaguga

SEQ ID NO: 2453268 - RNA, 19 nt, Artificial Sequence
  Description of Artificial Sequence: Synthetic oligonucleotide
gguccugcgcacagcccag

SEQ ID NO: 2453269 - RNA, 19 nt, Artificial Sequence
  Description of Artificial Sequence: Synthetic oligonucleotide
cuucaacagcuaagaaguu

SEQ ID NO: 2453270 - RNA, 19 nt, Artificial Sequence
  Description of Artificial Sequence: Synthetic oligonucleotide
gccaguugacggaggcugc

SEQ ID NO: 2453271 - RNA, 19 nt, Artificial Sequence
  Description of Artificial Sequence: Synthetic oligonucleotide
ggaagcggucccaugggcu

SEQ ID NO: 2453272 - RNA, 19 nt, Artificial Sequence
  Description of Artificial Sequence: Synthetic oligonucleotide
ccacauugggccggaucag

SEQ ID NO: 2453273 - RNA, 19 nt, Artificial Sequence
  Description of Artificial Sequence: Synthetic oligonucleotide
ccggaucagacauccaagu

SEQ ID NO: 2453274 - RNA, 19 nt, Artificial Sequence
  Description of Artificial Sequence: Synthetic oligonucleotide
gcuagcagaaggcggucau

SEQ ID NO: 2453275 - RNA, 19 nt, Artificial Sequence
  Description of Artificial Sequence: Synthetic oligonucleotide
guccaggagcagccaauau

SEQ ID NO: 2453276 - RNA, 19 nt, Artificial Sequence
  Description of Artificial Sequence: Synthetic oligonucleotide
gccugaggacucaaccaga

SEQ ID NO: 2453277 - RNA, 19 nt, Artificial Sequence
  Description of Artificial Sequence: Synthetic oligonucleotide
acccaccaaucaggaagaa

SEQ ID NO: 2453278 - RNA, 19 nt, Artificial Sequence
  Description of Artificial Sequence: Synthetic oligonucleotide
guccuacagugagguccag

SEQ ID NO: 2453279 - RNA, 19 nt, Artificial Sequence
  Description of Artificial Sequence: Synthetic oligonucleotide
caccauccuucaacagcua

SEQ ID NO: 2453280 - RNA, 19 nt, Artificial Sequence
  Description of Artificial Sequence: Synthetic oligonucleotide
ccgccuguagcccaucaua

SEQ ID NO: 2453281 - RNA, 19 nt, Artificial Sequence
  Description of Artificial Sequence: Synthetic oligonucleotide
gcauguccucuguccuaca

SEQ ID NO: 2453282 - RNA, 19 nt, Artificial Sequence
  Description of Artificial Sequence: Synthetic oligonucleotide
ggccucugggagaggcaug

SEQ ID NO: 2453283 - RNA, 19 nt, Artificial Sequence
  Description of Artificial Sequence: Synthetic oligonucleotide
cugccagggccuuccguau

SEQ ID NO: 2453284 - RNA, 19 nt, Artificial Sequence
  Description of Artificial Sequence: Synthetic oligonucleotide
cuccacagaucuggcucua

SEQ ID NO: 2453285 - RNA, 19 nt, Artificial Sequence
  Description of Artificial Sequence: Synthetic oligonucleotide
cucuaacuccaggggugcu

SEQ ID NO: 2453286 - RNA, 19 nt, Artificial Sequence
  Description of Artificial Sequence: Synthetic oligonucleotide
gccccuccaggggccaugc

SEQ ID NO: 2453287 - RNA, 19 nt, Artificial Sequence
  Description of Artificial Sequence: Synthetic oligonucleotide
gggugcuagcaggcguaca

SEQ ID NO: 2453288 - RNA, 19 nt, Artificial Sequence
  Description of Artificial Sequence: Synthetic oligonucleotide
cggucccaugggcugcgcc

SEQ ID NO: 2453289 - RNA, 19 nt, Artificial Sequence
  Description of Artificial Sequence: Synthetic oligonucleotide
gcccacggggauggaacuc

SEQ ID NO: 2453290 - RNA, 19 nt, Artificial Sequence
  Description of Artificial Sequence: Synthetic oligonucleotide
ggacugcacacaggccucu

SEQ ID NO: 2453291 - RNA, 19 nt, Artificial Sequence
  Description of Artificial Sequence: Synthetic oligonucleotide
gcuagcaggcguacauguu

SEQ ID NO: 2453292 - RNA, 19 nt, Artificial Sequence
  Description of Artificial Sequence: Synthetic oligonucleotide
ccuuccguaugagcuccaa

SEQ ID NO: 2453293 - RNA, 19 nt, Artificial Sequence
  Description of Artificial Sequence: Synthetic oligonucleotide
gcgcacagcccagcaucga

SEQ ID NO: 2453294 - RNA, 19 nt, Artificial Sequence
  Description of Artificial Sequence: Synthetic oligonucleotide
gccuuccguaugagcucca

SEQ ID NO: 2453295 - RNA, 19 nt, Artificial Sequence
  Description of Artificial Sequence: Synthetic oligonucleotide
ccccgccuguagcccauca

SEQ ID NO: 2453296 - RNA, 19 nt, Artificial Sequence
  Description of Artificial Sequence: Synthetic oligonucleotide
ccugcgcacagcccagcau

SEQ ID NO: 2453297 - RNA, 19 nt, Artificial Sequence
  Description of Artificial Sequence: Synthetic oligonucleotide
gggccggaucagacaucca

SEQ ID NO: 2453298 - RNA, 19 nt, Artificial Sequence
  Description of Artificial Sequence: Synthetic oligonucleotide
gcggucccaugggcugcgc

SEQ ID NO: 2453299 - RNA, 19 nt, Artificial Sequence
  Description of Artificial Sequence: Synthetic oligonucleotide
cccgccuguagcccaucau

SEQ ID NO: 2453300 - RNA, 19 nt, Artificial Sequence
  Description of Artificial Sequence: Synthetic oligonucleotide
gggcucucccagagguaau

SEQ ID NO: 2453301 - RNA, 19 nt, Artificial Sequence
  Description of Artificial Sequence: Synthetic oligonucleotide
cgcccacggggauggaacu

SEQ ID NO: 2453302 - RNA, 19 nt, Artificial Sequence
  Description of Artificial Sequence: Synthetic oligonucleotide
cugcgcccacggggaugga

SEQ ID NO: 2453303 - RNA, 19 nt, Artificial Sequence
  Description of Artificial Sequence: Synthetic oligonucleotide
ucaggauuaagacuuaugg

SEQ ID NO: 2453304 - RNA, 19 nt, Artificial Sequence
  Description of Artificial Sequence: Synthetic oligonucleotide
aauuacaugagguuauuag

SEQ ID NO: 2453305 - RNA, 19 nt, Artificial Sequence
  Description of Artificial Sequence: Synthetic oligonucleotide
aaguuaauguucgauagcc

SEQ ID NO: 2453306 - RNA, 19 nt, Artificial Sequence
  Description of Artificial Sequence: Synthetic oligonucleotide
ugcagaaggagaauaaucg

SEQ ID NO: 2453307 - RNA, 19 nt, Artificial Sequence
  Description of Artificial Sequence: Synthetic oligonucleotide
aauccagacagcuuugugg

SEQ ID NO: 2453308 - RNA, 19 nt, Artificial Sequence
  Description of Artificial Sequence: Synthetic oligonucleotide
uuuacuuccaacacccugg

SEQ ID NO: 2453309 - RNA, 19 nt, Artificial Sequence
  Description of Artificial Sequence: Synthetic oligonucleotide
acuucuaagcacuauuugc

SEQ ID NO: 2453310 - RNA, 19 nt, Artificial Sequence
  Description of Artificial Sequence: Synthetic oligonucleotide
uuaaguuaauguucgauag

SEQ ID NO: 2453311 - RNA, 19 nt, Artificial Sequence
  Description of Artificial Sequence: Synthetic oligonucleotide
aagcuaacugacuuugucc

SEQ ID NO: 2453312 - RNA, 19 nt, Artificial Sequence
  Description of Artificial Sequence: Synthetic oligonucleotide
uguaucuccauauucuugg

SEQ ID NO: 2453313 - RNA, 19 nt, Artificial Sequence
  Description of Artificial Sequence: Synthetic oligonucleotide
uuauauuagagaaaccaug

SEQ ID NO: 2453314 - RNA, 19 nt, Artificial Sequence
  Description of Artificial Sequence: Synthetic oligonucleotide
uccaauaucaagcacugag

SEQ ID NO: 2453315 - RNA, 19 nt, Artificial Sequence
  Description of Artificial Sequence: Synthetic oligonucleotide
aaagcuaacugacuuuguc

SEQ ID NO: 2453316 - RNA, 19 nt, Artificial Sequence
  Description of Artificial Sequence: Synthetic oligonucleotide
aggauuaagacuuauggca

SEQ ID NO: 2453317 - RNA, 19 nt, Artificial Sequence
  Description of Artificial Sequence: Synthetic oligonucleotide
aaagccuuuuacuuccaac

SEQ ID NO: 2453318 - RNA, 19 nt, Artificial Sequence
  Description of Artificial Sequence: Synthetic oligonucleotide
uucucucucauaaacagca

SEQ ID NO: 2453319 - RNA, 19 nt, Artificial Sequence
  Description of Artificial Sequence: Synthetic oligonucleotide
auuagagaaaccauguuuc

SEQ ID NO: 2453320 - RNA, 19 nt, Artificial Sequence
  Description of Artificial Sequence: Synthetic oligonucleotide
ugcauugucaggauuaaga

SEQ ID NO: 2453321 - RNA, 19 nt, Artificial Sequence
  Description of Artificial Sequence: Synthetic oligonucleotide
uauuagucgguucauacuc

SEQ ID NO: 2453322 - RNA, 19 nt, Artificial Sequence
  Description of Artificial Sequence: Synthetic oligonucleotide
uauuagagaaaccauguuu

SEQ ID NO: 2453323 - RNA, 19 nt, Artificial Sequence
  Description of Artificial Sequence: Synthetic oligonucleotide
acuuauggcaucgaaaguc

SEQ ID NO: 2453324 - RNA, 19 nt, Artificial Sequence
  Description of Artificial Sequence: Synthetic oligonucleotide
uuuaaguuaauguucgaua

SEQ ID NO: 2453325 - RNA, 19 nt, Artificial Sequence
  Description of Artificial Sequence: Synthetic oligonucleotide
ugaacuuggguguuggcag

SEQ ID NO: 2453326 - RNA, 19 nt, Artificial Sequence
  Description of Artificial Sequence: Synthetic oligonucleotide
aauacuugcagaaagcuua

SEQ ID NO: 2453327 - RNA, 19 nt, Artificial Sequence
  Description of Artificial Sequence: Synthetic oligonucleotide
ucuuucucuaaaauacuug

SEQ ID NO: 2453328 - RNA, 19 nt, Artificial Sequence
  Description of Artificial Sequence: Synthetic oligonucleotide
aauaaucgaucccaguuau

SEQ ID NO: 2453329 - RNA, 19 nt, Artificial Sequence
  Description of Artificial Sequence: Synthetic oligonucleotide
aaaguucaaauccuucacu

SEQ ID NO: 2453330 - RNA, 19 nt, Artificial Sequence
  Description of Artificial Sequence: Synthetic oligonucleotide
agagagacuucacauauug

SEQ ID NO: 2453331 - RNA, 19 nt, Artificial Sequence
  Description of Artificial Sequence: Synthetic oligonucleotide
uuuguggaaagacucaaaa

SEQ ID NO: 2453332 - RNA, 19 nt, Artificial Sequence
  Description of Artificial Sequence: Synthetic oligonucleotide
uuuuacuuccaacacccug

SEQ ID NO: 2453333 - RNA, 19 nt, Artificial Sequence
  Description of Artificial Sequence: Synthetic oligonucleotide
auuacaugagguuauuaga

SEQ ID NO: 2453334 - RNA, 19 nt, Artificial Sequence
  Description of Artificial Sequence: Synthetic oligonucleotide
caauaucaagcacugaggc

SEQ ID NO: 2453335 - RNA, 19 nt, Artificial Sequence
  Description of Artificial Sequence: Synthetic oligonucleotide
cuuauuagucgguucauac

SEQ ID NO: 2453336 - RNA, 19 nt, Artificial Sequence
  Description of Artificial Sequence: Synthetic oligonucleotide
ucaguucucucucauaaac

SEQ ID NO: 2453337 - RNA, 19 nt, Artificial Sequence
  Description of Artificial Sequence: Synthetic oligonucleotide
aauaucaagcacugaggca

SEQ ID NO: 2453338 - RNA, 19 nt, Artificial Sequence
  Description of Artificial Sequence: Synthetic oligonucleotide
uugcagaaagcuuaauugc

SEQ ID NO: 2453339 - RNA, 19 nt, Artificial Sequence
  Description of Artificial Sequence: Synthetic oligonucleotide
uccagaucuaccuccaaag

SEQ ID NO: 2453340 - RNA, 19 nt, Artificial Sequence
  Description of Artificial Sequence: Synthetic oligonucleotide
ucucuaaaauacuugcaga

SEQ ID NO: 2453341 - RNA, 19 nt, Artificial Sequence
  Description of Artificial Sequence: Synthetic oligonucleotide
uuuacuuugcuguuacagu

SEQ ID NO: 2453342 - RNA, 19 nt, Artificial Sequence
  Description of Artificial Sequence: Synthetic oligonucleotide
ugcagaaagcuuaauugca

SEQ ID NO: 2453343 - RNA, 19 nt, Artificial Sequence
  Description of Artificial Sequence: Synthetic oligonucleotide
auugcuuccucuucucaac

SEQ ID NO: 2453344 - RNA, 19 nt, Artificial Sequence
  Description of Artificial Sequence: Synthetic oligonucleotide
uaaguuaauguucgauagc

SEQ ID NO: 2453345 - RNA, 19 nt, Artificial Sequence
  Description of Artificial Sequence: Synthetic oligonucleotide
aacacauccagcaacucug

SEQ ID NO: 2453346 - RNA, 19 nt, Artificial Sequence
  Description of Artificial Sequence: Synthetic oligonucleotide
agaauaaucgaucccaguu

SEQ ID NO: 2453347 - RNA, 19 nt, Artificial Sequence
  Description of Artificial Sequence: Synthetic oligonucleotide
ucucaguucucucucauaa

SEQ ID NO: 2453348 - RNA, 19 nt, Artificial Sequence
  Description of Artificial Sequence: Synthetic oligonucleotide
cuuauggcaucgaaagucc

SEQ ID NO: 2453349 - RNA, 19 nt, Artificial Sequence
  Description of Artificial Sequence: Synthetic oligonucleotide
gaaaccauguuucacaagu

SEQ ID NO: 2453350 - RNA, 19 nt, Artificial Sequence
  Description of Artificial Sequence: Synthetic oligonucleotide
ugcuguuacaguuucuucu

SEQ ID NO: 2453351 - RNA, 19 nt, Artificial Sequence
  Description of Artificial Sequence: Synthetic oligonucleotide
uccuguaucuccauauucu

SEQ ID NO: 2453352 - RNA, 19 nt, Artificial Sequence
  Description of Artificial Sequence: Synthetic oligonucleotide
ucccaguuauauuagagaa

SEQ ID NO: 2453353 - RNA, 19 nt, Artificial Sequence
  Description of Artificial Sequence: Synthetic oligonucleotide
augaaauccagacagcuuu

SEQ ID NO: 2453354 - RNA, 19 nt, Artificial Sequence
  Description of Artificial Sequence: Synthetic oligonucleotide
cucgagauugcacagguac

SEQ ID NO: 2453355 - RNA, 19 nt, Artificial Sequence
  Description of Artificial Sequence: Synthetic oligonucleotide
uguaucagguuuacuuugc

SEQ ID NO: 2453356 - RNA, 19 nt, Artificial Sequence
  Description of Artificial Sequence: Synthetic oligonucleotide
gaaagcuuaauugcagaag

SEQ ID NO: 2453357 - RNA, 19 nt, Artificial Sequence
  Description of Artificial Sequence: Synthetic oligonucleotide
aagcugcuacaguauuucc

SEQ ID NO: 2453358 - RNA, 19 nt, Artificial Sequence
  Description of Artificial Sequence: Synthetic oligonucleotide
aacaugaaauccagacagc

SEQ ID NO: 2453359 - RNA, 19 nt, Artificial Sequence
  Description of Artificial Sequence: Synthetic oligonucleotide
cuuaauugcagaaggagaa

SEQ ID NO: 2453360 - RNA, 19 nt, Artificial Sequence
  Description of Artificial Sequence: Synthetic oligonucleotide
caggauuaagacuuauggc

SEQ ID NO: 2453361 - RNA, 19 nt, Artificial Sequence
  Description of Artificial Sequence: Synthetic oligonucleotide
ugguccaauuacaugaggu

SEQ ID NO: 2453362 - RNA, 19 nt, Artificial Sequence
  Description of Artificial Sequence: Synthetic oligonucleotide
uucacugaacacauccagc

SEQ ID NO: 2453363 - RNA, 19 nt, Artificial Sequence
  Description of Artificial Sequence: Synthetic oligonucleotide
auacucucuuccccaaacc

SEQ ID NO: 2453364 - RNA, 19 nt, Artificial Sequence
  Description of Artificial Sequence: Synthetic oligonucleotide
agaaggagaauaaucgauc

SEQ ID NO: 2453365 - RNA, 19 nt, Artificial Sequence
  Description of Artificial Sequence: Synthetic oligonucleotide
auaucaagcacugaggcau

SEQ ID NO: 2453366 - RNA, 19 nt, Artificial Sequence
  Description of Artificial Sequence: Synthetic oligonucleotide
ugcacuuugcuucuucugu

SEQ ID NO: 2453367 - RNA, 19 nt, Artificial Sequence
  Description of Artificial Sequence: Synthetic oligonucleotide
ucucauaaacagcauccca

SEQ ID NO: 2453368 - RNA, 19 nt, Artificial Sequence
  Description of Artificial Sequence: Synthetic oligonucleotide
auauucuuggaauguucuc

SEQ ID NO: 2453369 - RNA, 19 nt, Artificial Sequence
  Description of Artificial Sequence: Synthetic oligonucleotide
auucuuggaauguucucag

SEQ ID NO: 2453370 - RNA, 19 nt, Artificial Sequence
  Description of Artificial Sequence: Synthetic oligonucleotide
cuuccaacacccuggagag

SEQ ID NO: 2453371 - RNA, 19 nt, Artificial Sequence
  Description of Artificial Sequence: Synthetic oligonucleotide
agcuaacugacuuugucca

SEQ ID NO: 2453372 - RNA, 19 nt, Artificial Sequence
  Description of Artificial Sequence: Synthetic oligonucleotide
uuauuagucgguucauacu

SEQ ID NO: 2453373 - RNA, 19 nt, Artificial Sequence
  Description of Artificial Sequence: Synthetic oligonucleotide
ucugaugggaucuuguguu

SEQ ID NO: 2453374 - RNA, 19 nt, Artificial Sequence
  Description of Artificial Sequence: Synthetic oligonucleotide
ucuccauauucuuggaaug

SEQ ID NO: 2453375 - RNA, 19 nt, Artificial Sequence
  Description of Artificial Sequence: Synthetic oligonucleotide
aucgaucccaguuauauua

SEQ ID NO: 2453376 - RNA, 19 nt, Artificial Sequence
  Description of Artificial Sequence: Synthetic oligonucleotide
aaauccagacagcuuugug

SEQ ID NO: 2453377 - RNA, 19 nt, Artificial Sequence
  Description of Artificial Sequence: Synthetic oligonucleotide
uguucgauagcccuucuuu

SEQ ID NO: 2453378 - RNA, 19 nt, Artificial Sequence
  Description of Artificial Sequence: Synthetic oligonucleotide
uguccaagaaaguuucacu

SEQ ID NO: 2453379 - RNA, 19 nt, Artificial Sequence
  Description of Artificial Sequence: Synthetic oligonucleotide
acaguauuuccagaucuac

SEQ ID NO: 2453380 - RNA, 19 nt, Artificial Sequence
  Description of Artificial Sequence: Synthetic oligonucleotide
uugcagaaggagaauaauc

SEQ ID NO: 2453381 - RNA, 19 nt, Artificial Sequence
  Description of Artificial Sequence: Synthetic oligonucleotide
uccaauuacaugagguuau

SEQ ID NO: 2453382 - RNA, 19 nt, Artificial Sequence
  Description of Artificial Sequence: Synthetic oligonucleotide
cuucuaagcacuauuugca

SEQ ID NO: 2453383 - RNA, 19 nt, Artificial Sequence
  Description of Artificial Sequence: Synthetic oligonucleotide
auugcacagguaccgcagc

SEQ ID NO: 2453384 - RNA, 19 nt, Artificial Sequence
  Description of Artificial Sequence: Synthetic oligonucleotide
uaaucgaucccaguuauau

SEQ ID NO: 2453385 - RNA, 19 nt, Artificial Sequence
  Description of Artificial Sequence: Synthetic oligonucleotide
ugucaacacaaacaugaaa

SEQ ID NO: 2453386 - RNA, 19 nt, Artificial Sequence
  Description of Artificial Sequence: Synthetic oligonucleotide
uacucucuuccccaaacca

SEQ ID NO: 2453387 - RNA, 19 nt, Artificial Sequence
  Description of Artificial Sequence: Synthetic oligonucleotide
acaugagguuauuagaaaa

SEQ ID NO: 2453388 - RNA, 19 nt, Artificial Sequence
  Description of Artificial Sequence: Synthetic oligonucleotide
gaucccaguuauauuagag

SEQ ID NO: 2453389 - RNA, 19 nt, Artificial Sequence
  Description of Artificial Sequence: Synthetic oligonucleotide
agccuggguacuucuaagc

SEQ ID NO: 2453390 - RNA, 19 nt, Artificial Sequence
  Description of Artificial Sequence: Synthetic oligonucleotide
ucuaagcacuauuugcacu

SEQ ID NO: 2453391 - RNA, 19 nt, Artificial Sequence
  Description of Artificial Sequence: Synthetic oligonucleotide
ucgguucauacucucuucc

SEQ ID NO: 2453392 - RNA, 19 nt, Artificial Sequence
  Description of Artificial Sequence: Synthetic oligonucleotide
aucuccauauucuuggaau

SEQ ID NO: 2453393 - RNA, 19 nt, Artificial Sequence
  Description of Artificial Sequence: Synthetic oligonucleotide
uucacauauugcuuccucu

SEQ ID NO: 2453394 - RNA, 19 nt, Artificial Sequence
  Description of Artificial Sequence: Synthetic oligonucleotide
uguuacaguuucuucuaga

SEQ ID NO: 2453395 - RNA, 19 nt, Artificial Sequence
  Description of Artificial Sequence: Synthetic oligonucleotide
aguuaauguucgauagccc

SEQ ID NO: 2453396 - RNA, 19 nt, Artificial Sequence
  Description of Artificial Sequence: Synthetic oligonucleotide
aaaccaaagcugcuacagu

SEQ ID NO: 2453397 - RNA, 19 nt, Artificial Sequence
  Description of Artificial Sequence: Synthetic oligonucleotide
aucgaaagucccuuuguca

SEQ ID NO: 2453398 - RNA, 19 nt, Artificial Sequence
  Description of Artificial Sequence: Synthetic oligonucleotide
auuugcacuuugcuucuuc

SEQ ID NO: 2453399 - RNA, 19 nt, Artificial Sequence
  Description of Artificial Sequence: Synthetic oligonucleotide
uucuuucucuaaaauacuu

SEQ ID NO: 2453400 - RNA, 19 nt, Artificial Sequence
  Description of Artificial Sequence: Synthetic oligonucleotide
ucuguaucagguuuacuuu

SEQ ID NO: 2453401 - RNA, 19 nt, Artificial Sequence
  Description of Artificial Sequence: Synthetic oligonucleotide
agaucuaccuccaaagcug

SEQ ID NO: 2453402 - RNA, 19 nt, Artificial Sequence
  Description of Artificial Sequence: Synthetic oligonucleotide
acugacuuuguccaagaaa

SEQ ID NO: 2453403 - RNA, 19 nt, Artificial Sequence
  Description of Artificial Sequence: Synthetic oligonucleotide
uccaaagcugaacuugggu

SEQ ID NO: 2453404 - RNA, 19 nt, Artificial Sequence
  Description of Artificial Sequence: Synthetic oligonucleotide
agcauccgcguucaugucg

SEQ ID NO: 2453405 - RNA, 19 nt, Artificial Sequence
  Description of Artificial Sequence: Synthetic oligonucleotide
uaagacuuauggcaucgaa

SEQ ID NO: 2453406 - RNA, 19 nt, Artificial Sequence
  Description of Artificial Sequence: Synthetic oligonucleotide
gacgggacgaagucagccg

SEQ ID NO: 2453407 - RNA, 19 nt, Artificial Sequence
  Description of Artificial Sequence: Synthetic oligonucleotide
acgggacgaagucagccgc

SEQ ID NO: 2453408 - RNA, 19 nt, Artificial Sequence
  Description of Artificial Sequence: Synthetic oligonucleotide
aucccaguuauauuagaga

SEQ ID NO: 2453409 - RNA, 19 nt, Artificial Sequence
  Description of Artificial Sequence: Synthetic oligonucleotide
aucccaaugcucucguguc

SEQ ID NO: 2453410 - RNA, 19 nt, Artificial Sequence
  Description of Artificial Sequence: Synthetic oligonucleotide
ucgaucccaguuauauuag

SEQ ID NO: 2453411 - RNA, 19 nt, Artificial Sequence
  Description of Artificial Sequence: Synthetic oligonucleotide
acaaguucaaccaggaaaa

SEQ ID NO: 2453412 - RNA, 19 nt, Artificial Sequence
  Description of Artificial Sequence: Synthetic oligonucleotide
ucgagauugcacagguacc

SEQ ID NO: 2453413 - RNA, 19 nt, Artificial Sequence
  Description of Artificial Sequence: Synthetic oligonucleotide
ucauaaacagcaucccaau

SEQ ID NO: 2453414 - RNA, 19 nt, Artificial Sequence
  Description of Artificial Sequence: Synthetic oligonucleotide
aguucaaauccuucacuga

SEQ ID NO: 2453415 - RNA, 19 nt, Artificial Sequence
  Description of Artificial Sequence: Synthetic oligonucleotide
cuguaucagguuuacuuug

SEQ ID NO: 2453416 - RNA, 19 nt, Artificial Sequence
  Description of Artificial Sequence: Synthetic oligonucleotide
gaauaaucgaucccaguua

SEQ ID NO: 2453417 - RNA, 19 nt, Artificial Sequence
  Description of Artificial Sequence: Synthetic oligonucleotide
cucuaaaauacuugcagaa

SEQ ID NO: 2453418 - RNA, 19 nt, Artificial Sequence
  Description of Artificial Sequence: Synthetic oligonucleotide
uacaugagguuauuagaaa

SEQ ID NO: 2453419 - RNA, 19 nt, Artificial Sequence
  Description of Artificial Sequence: Synthetic oligonucleotide
guuaauguucgauagcccu

SEQ ID NO: 2453420 - RNA, 19 nt, Artificial Sequence
  Description of Artificial Sequence: Synthetic oligonucleotide
acagguaccgcagcgccgc

SEQ ID NO: 2453421 - RNA, 19 nt, Artificial Sequence
  Description of Artificial Sequence: Synthetic oligonucleotide
cucauaaacagcaucccaa

SEQ ID NO: 2453422 - RNA, 19 nt, Artificial Sequence
  Description of Artificial Sequence: Synthetic oligonucleotide
uuaauguucgauagcccuu

SEQ ID NO: 2453423 - RNA, 19 nt, Artificial Sequence
  Description of Artificial Sequence: Synthetic oligonucleotide
uuauggcaucgaaaguccc

SEQ ID NO: 2453424 - RNA, 19 nt, Artificial Sequence
  Description of Artificial Sequence: Synthetic oligonucleotide
aauugcagaaggagaauaa

SEQ ID NO: 2453425 - RNA, 19 nt, Artificial Sequence
  Description of Artificial Sequence: Synthetic oligonucleotide
aagcacuauuugcacuuug

SEQ ID NO: 2453426 - RNA, 19 nt, Artificial Sequence
  Description of Artificial Sequence: Synthetic oligonucleotide
cagcuuuguggaaagacuc

SEQ ID NO: 2453427 - RNA, 19 nt, Artificial Sequence
  Description of Artificial Sequence: Synthetic oligonucleotide
gucaacacaaacaugaaau

SEQ ID NO: 2453428 - RNA, 19 nt, Artificial Sequence
  Description of Artificial Sequence: Synthetic oligonucleotide
guuccaauaucaagcacug

SEQ ID NO: 2453429 - RNA, 19 nt, Artificial Sequence
  Description of Artificial Sequence: Synthetic oligonucleotide
ucacauauugcuuccucuu

SEQ ID NO: 2453430 - RNA, 19 nt, Artificial Sequence
  Description of Artificial Sequence: Synthetic oligonucleotide
ucuaccuccaaagcugaac

SEQ ID NO: 2453431 - RNA, 19 nt, Artificial Sequence
  Description of Artificial Sequence: Synthetic oligonucleotide
auauuagagaaaccauguu

SEQ ID NO: 2453432 - RNA, 19 nt, Artificial Sequence
  Description of Artificial Sequence: Synthetic oligonucleotide
caguuauauuagagaaacc

SEQ ID NO: 2453433 - RNA, 19 nt, Artificial Sequence
  Description of Artificial Sequence: Synthetic oligonucleotide
uuucuucuagaaagcuaac

SEQ ID NO: 2453434 - RNA, 19 nt, Artificial Sequence
  Description of Artificial Sequence: Synthetic oligonucleotide
gguucauacucucuucccc

SEQ ID NO: 2453435 - RNA, 19 nt, Artificial Sequence
  Description of Artificial Sequence: Synthetic oligonucleotide
guucauacucucuucccca

SEQ ID NO: 2453436 - RNA, 19 nt, Artificial Sequence
  Description of Artificial Sequence: Synthetic oligonucleotide
aaucgaucccaguuauauu

SEQ ID NO: 2453437 - RNA, 19 nt, Artificial Sequence
  Description of Artificial Sequence: Synthetic oligonucleotide
ccuugguccaauuacauga

SEQ ID NO: 2453438 - RNA, 19 nt, Artificial Sequence
  Description of Artificial Sequence: Synthetic oligonucleotide
agauugcacagguaccgca

SEQ ID NO: 2453439 - RNA, 19 nt, Artificial Sequence
  Description of Artificial Sequence: Synthetic oligonucleotide
accgcagcgccgcuguggc

SEQ ID NO: 2453440 - RNA, 19 nt, Artificial Sequence
  Description of Artificial Sequence: Synthetic oligonucleotide
uaauguucgauagcccuuc

SEQ ID NO: 2453441 - RNA, 19 nt, Artificial Sequence
  Description of Artificial Sequence: Synthetic oligonucleotide
gaauguucucaguucucuc

SEQ ID NO: 2453442 - RNA, 19 nt, Artificial Sequence
  Description of Artificial Sequence: Synthetic oligonucleotide
uagaaagcuaacugacuuu

SEQ ID NO: 2453443 - RNA, 19 nt, Artificial Sequence
  Description of Artificial Sequence: Synthetic oligonucleotide
accuccaaagcugaacuug

SEQ ID NO: 2453444 - RNA, 19 nt, Artificial Sequence
  Description of Artificial Sequence: Synthetic oligonucleotide
uuagucgguucauacucuc

SEQ ID NO: 2453445 - RNA, 19 nt, Artificial Sequence
  Description of Artificial Sequence: Synthetic oligonucleotide
gaacuuggguguuggcagc

SEQ ID NO: 2453446 - RNA, 19 nt, Artificial Sequence
  Description of Artificial Sequence: Synthetic oligonucleotide
ucgauagcccuucuuucuc

SEQ ID NO: 2453447 - RNA, 19 nt, Artificial Sequence
  Description of Artificial Sequence: Synthetic oligonucleotide
acgaagucagccgccacgg

SEQ ID NO: 2453448 - RNA, 19 nt, Artificial Sequence
  Description of Artificial Sequence: Synthetic oligonucleotide
guggccgucagcauccgcg

SEQ ID NO: 2453449 - RNA, 19 nt, Artificial Sequence
  Description of Artificial Sequence: Synthetic oligonucleotide
cucucauaaacagcauccc

SEQ ID NO: 2453450 - RNA, 19 nt, Artificial Sequence
  Description of Artificial Sequence: Synthetic oligonucleotide
aauguucgauagcccuucu

SEQ ID NO: 2453451 - RNA, 19 nt, Artificial Sequence
  Description of Artificial Sequence: Synthetic oligonucleotide
uguuggcagcucuucaaaa

SEQ ID NO: 2453452 - RNA, 19 nt, Artificial Sequence
  Description of Artificial Sequence: Synthetic oligonucleotide
ugcagccaccuuauuaguc

SEQ ID NO: 2453453 - RNA, 19 nt, Artificial Sequence
  Description of Artificial Sequence: Synthetic oligonucleotide
caucgaaagucccuuuguc

SEQ ID NO: 2453454 - RNA, 19 nt, Artificial Sequence
  Description of Artificial Sequence: Synthetic oligonucleotide
aagcuuaauugcagaagga

SEQ ID NO: 2453455 - RNA, 19 nt, Artificial Sequence
  Description of Artificial Sequence: Synthetic oligonucleotide
cauauucuuggaauguucu

SEQ ID NO: 2453456 - RNA, 19 nt, Artificial Sequence
  Description of Artificial Sequence: Synthetic oligonucleotide
uacuuugcuguuacaguuu

SEQ ID NO: 2453457 - RNA, 19 nt, Artificial Sequence
  Description of Artificial Sequence: Synthetic oligonucleotide
ucccaaugcucucgugucc

SEQ ID NO: 2453458 - RNA, 19 nt, Artificial Sequence
  Description of Artificial Sequence: Synthetic oligonucleotide
uugcuuccucuucucaacu

SEQ ID NO: 2453459 - RNA, 19 nt, Artificial Sequence
  Description of Artificial Sequence: Synthetic oligonucleotide
agucgguucauacucucuu

SEQ ID NO: 2453460 - RNA, 19 nt, Artificial Sequence
  Description of Artificial Sequence: Synthetic oligonucleotide
acucucuuccccaaaccag

SEQ ID NO: 2453461 - RNA, 19 nt, Artificial Sequence
  Description of Artificial Sequence: Synthetic oligonucleotide
ugcuuccucuucucaacug

SEQ ID NO: 2453462 - RNA, 19 nt, Artificial Sequence
  Description of Artificial Sequence: Synthetic oligonucleotide
cacauauugcuuccucuuc

SEQ ID NO: 2453463 - RNA, 19 nt, Artificial Sequence
  Description of Artificial Sequence: Synthetic oligonucleotide
cuaccuuuaaguuaauguu

SEQ ID NO: 2453464 - RNA, 19 nt, Artificial Sequence
  Description of Artificial Sequence: Synthetic oligonucleotide
gagagacuucacauauugc

SEQ ID NO: 2453465 - RNA, 19 nt, Artificial Sequence
  Description of Artificial Sequence: Synthetic oligonucleotide
agcugaacuuggguguugg

SEQ ID NO: 2453466 - RNA, 19 nt, Artificial Sequence
  Description of Artificial Sequence: Synthetic oligonucleotide
auugcagaaggagaauaau

SEQ ID NO: 2453467 - RNA, 19 nt, Artificial Sequence
  Description of Artificial Sequence: Synthetic oligonucleotide
cagccaccuuauuagucgg

SEQ ID NO: 2453468 - RNA, 19 nt, Artificial Sequence
  Description of Artificial Sequence: Synthetic oligonucleotide
cucucguguccccagcgcc

SEQ ID NO: 2453469 - RNA, 19 nt, Artificial Sequence
  Description of Artificial Sequence: Synthetic oligonucleotide
uagcccuucuuucucuaaa

SEQ ID NO: 2453470 - RNA, 19 nt, Artificial Sequence
  Description of Artificial Sequence: Synthetic oligonucleotide
uucauacucucuuccccaa

SEQ ID NO: 2453471 - RNA, 19 nt, Artificial Sequence
  Description of Artificial Sequence: Synthetic oligonucleotide
ucacaaguucaaccaggaa

SEQ ID NO: 2453472 - RNA, 19 nt, Artificial Sequence
  Description of Artificial Sequence: Synthetic oligonucleotide
ugccuugguccaauuacau

SEQ ID NO: 2453473 - RNA, 19 nt, Artificial Sequence
  Description of Artificial Sequence: Synthetic oligonucleotide
uagucgguucauacucucu

SEQ ID NO: 2453474 - RNA, 19 nt, Artificial Sequence
  Description of Artificial Sequence: Synthetic oligonucleotide
uugcuguuacaguuucuuc

SEQ ID NO: 2453475 - RNA, 19 nt, Artificial Sequence
  Description of Artificial Sequence: Synthetic oligonucleotide
gucaggauuaagacuuaug

SEQ ID NO: 2453476 - RNA, 19 nt, Artificial Sequence
  Description of Artificial Sequence: Synthetic oligonucleotide
ccuccaaagcugaacuugg

SEQ ID NO: 2453477 - RNA, 19 nt, Artificial Sequence
  Description of Artificial Sequence: Synthetic oligonucleotide
cuagaaagcuaacugacuu

SEQ ID NO: 2453478 - RNA, 19 nt, Artificial Sequence
  Description of Artificial Sequence: Synthetic oligonucleotide
gcagaaagcuuaauugcag

SEQ ID NO: 2453479 - RNA, 19 nt, Artificial Sequence
  Description of Artificial Sequence: Synthetic oligonucleotide
caguucucucucauaaaca

SEQ ID NO: 2453480 - RNA, 19 nt, Artificial Sequence
  Description of Artificial Sequence: Synthetic oligonucleotide
uuaagacuuauggcaucga

SEQ ID NO: 2453481 - RNA, 19 nt, Artificial Sequence
  Description of Artificial Sequence: Synthetic oligonucleotide
augcucucguguccccagc

SEQ ID NO: 2453482 - RNA, 19 nt, Artificial Sequence
  Description of Artificial Sequence: Synthetic oligonucleotide
uaucaagcacugaggcauc

SEQ ID NO: 2453483 - RNA, 19 nt, Artificial Sequence
  Description of Artificial Sequence: Synthetic oligonucleotide
gagauugcacagguaccgc

SEQ ID NO: 2453484 - RNA, 19 nt, Artificial Sequence
  Description of Artificial Sequence: Synthetic oligonucleotide
auuagucgguucauacucu

SEQ ID NO: 2453485 - RNA, 19 nt, Artificial Sequence
  Description of Artificial Sequence: Synthetic oligonucleotide
gcuuaauugcagaaggaga

SEQ ID NO: 2453486 - RNA, 19 nt, Artificial Sequence
  Description of Artificial Sequence: Synthetic oligonucleotide
gacugcccucucgagauug

SEQ ID NO: 2453487 - RNA, 19 nt, Artificial Sequence
  Description of Artificial Sequence: Synthetic oligonucleotide
ggagaauaaucgaucccag

SEQ ID NO: 2453488 - RNA, 19 nt, Artificial Sequence
  Description of Artificial Sequence: Synthetic oligonucleotide
gaucuaccuccaaagcuga

SEQ ID NO: 2453489 - RNA, 19 nt, Artificial Sequence
  Description of Artificial Sequence: Synthetic oligonucleotide
gagaauaaucgaucccagu

SEQ ID NO: 2453490 - RNA, 19 nt, Artificial Sequence
  Description of Artificial Sequence: Synthetic oligonucleotide
cuggguacuucuaagcacu

SEQ ID NO: 2453491 - RNA, 19 nt, Artificial Sequence
  Description of Artificial Sequence: Synthetic oligonucleotide
aaaccauguuucacaaguu

SEQ ID NO: 2453492 - RNA, 19 nt, Artificial Sequence
  Description of Artificial Sequence: Synthetic oligonucleotide
gcagaaggagaauaaucga

SEQ ID NO: 2453493 - RNA, 19 nt, Artificial Sequence
  Description of Artificial Sequence: Synthetic oligonucleotide
cuaagcacuauuugcacuu

SEQ ID NO: 2453494 - RNA, 19 nt, Artificial Sequence
  Description of Artificial Sequence: Synthetic oligonucleotide
guccaauuacaugagguua

SEQ ID NO: 2453495 - RNA, 19 nt, Artificial Sequence
  Description of Artificial Sequence: Synthetic oligonucleotide
caacacccuggagagagac

SEQ ID NO: 2453496 - RNA, 19 nt, Artificial Sequence
  Description of Artificial Sequence: Synthetic oligonucleotide
cagaaggagaauaaucgau

SEQ ID NO: 2453497 - RNA, 19 nt, Artificial Sequence
  Description of Artificial Sequence: Synthetic oligonucleotide
ucaagcacugaggcaucug

SEQ ID NO: 2453498 - RNA, 19 nt, Artificial Sequence
  Description of Artificial Sequence: Synthetic oligonucleotide
gucgguucauacucucuuc

SEQ ID NO: 2453499 - RNA, 19 nt, Artificial Sequence
  Description of Artificial Sequence: Synthetic oligonucleotide
cuaccuccaaagcugaacu

SEQ ID NO: 2453500 - RNA, 19 nt, Artificial Sequence
  Description of Artificial Sequence: Synthetic oligonucleotide
ugucaggauuaagacuuau

SEQ ID NO: 2453501 - RNA, 19 nt, Artificial Sequence
  Description of Artificial Sequence: Synthetic oligonucleotide
cagcaucccaaugcucucg

SEQ ID NO: 2453502 - RNA, 19 nt, Artificial Sequence
  Description of Artificial Sequence: Synthetic oligonucleotide
ugaacacauccagcaacuc

SEQ ID NO: 2453503 - RNA, 19 nt, Artificial Sequence
  Description of Artificial Sequence: Synthetic oligonucleotide
gacuuauggcaucgaaagu

SEQ ID NO: 2453504 - RNA, 19 nt, Artificial Sequence
  Description of Artificial Sequence: Synthetic oligonucleotide
gauagcccuucuuucucua

SEQ ID NO: 2453505 - RNA, 19 nt, Artificial Sequence
  Description of Artificial Sequence: Synthetic oligonucleotide
cgagauugcacagguaccg

SEQ ID NO: 2453506 - RNA, 19 nt, Artificial Sequence
  Description of Artificial Sequence: Synthetic oligonucleotide
ugaugggaucuuguguuuu

SEQ ID NO: 2453507 - RNA, 19 nt, Artificial Sequence
  Description of Artificial Sequence: Synthetic oligonucleotide
uuccaauaucaagcacuga

SEQ ID NO: 2453508 - RNA, 19 nt, Artificial Sequence
  Description of Artificial Sequence: Synthetic oligonucleotide
auagcccuucuuucucuaa

SEQ ID NO: 2453509 - RNA, 19 nt, Artificial Sequence
  Description of Artificial Sequence: Synthetic oligonucleotide
auggcaucgaaagucccuu

SEQ ID NO: 2453510 - RNA, 19 nt, Artificial Sequence
  Description of Artificial Sequence: Synthetic oligonucleotide
ucucgagauugcacaggua

SEQ ID NO: 2453511 - RNA, 19 nt, Artificial Sequence
  Description of Artificial Sequence: Synthetic oligonucleotide
caucccaaugcucucgugu

SEQ ID NO: 2453512 - RNA, 19 nt, Artificial Sequence
  Description of Artificial Sequence: Synthetic oligonucleotide
guguuggcagcucuucaaa

SEQ ID NO: 2453513 - RNA, 19 nt, Artificial Sequence
  Description of Artificial Sequence: Synthetic oligonucleotide
cuauuugcacuuugcuucu

SEQ ID NO: 2453514 - RNA, 19 nt, Artificial Sequence
  Description of Artificial Sequence: Synthetic oligonucleotide
uggguacuucuaagcacua

SEQ ID NO: 2453515 - RNA, 19 nt, Artificial Sequence
  Description of Artificial Sequence: Synthetic oligonucleotide
aacacccuggagagagacu

SEQ ID NO: 2453516 - RNA, 19 nt, Artificial Sequence
  Description of Artificial Sequence: Synthetic oligonucleotide
uggccgucagcauccgcgu

SEQ ID NO: 2453517 - RNA, 19 nt, Artificial Sequence
  Description of Artificial Sequence: Synthetic oligonucleotide
auacuugcagaaagcuuaa

SEQ ID NO: 2453518 - RNA, 19 nt, Artificial Sequence
  Description of Artificial Sequence: Synthetic oligonucleotide
gguacuucuaagcacuauu

SEQ ID NO: 2453519 - RNA, 19 nt, Artificial Sequence
  Description of Artificial Sequence: Synthetic oligonucleotide
cugcauugucaggauuaag

SEQ ID NO: 2453520 - RNA, 19 nt, Artificial Sequence
  Description of Artificial Sequence: Synthetic oligonucleotide
gccuugguccaauuacaug

SEQ ID NO: 2453521 - RNA, 19 nt, Artificial Sequence
  Description of Artificial Sequence: Synthetic oligonucleotide
acgggacugcccucucgag

SEQ ID NO: 2453522 - RNA, 19 nt, Artificial Sequence
  Description of Artificial Sequence: Synthetic oligonucleotide
auguucgauagcccuucuu

SEQ ID NO: 2453523 - RNA, 19 nt, Artificial Sequence
  Description of Artificial Sequence: Synthetic oligonucleotide
gcuguggccgucagcaucc

SEQ ID NO: 2453524 - RNA, 19 nt, Artificial Sequence
  Description of Artificial Sequence: Synthetic oligonucleotide
guaucagguuuacuuugcu

SEQ ID NO: 2453525 - RNA, 19 nt, Artificial Sequence
  Description of Artificial Sequence: Synthetic oligonucleotide
uaagcacuauuugcacuuu

SEQ ID NO: 2453526 - RNA, 19 nt, Artificial Sequence
  Description of Artificial Sequence: Synthetic oligonucleotide
aucaagcacugaggcaucu

SEQ ID NO: 2453527 - RNA, 19 nt, Artificial Sequence
  Description of Artificial Sequence: Synthetic oligonucleotide
cucaguucucucucauaaa

SEQ ID NO: 2453528 - RNA, 19 nt, Artificial Sequence
  Description of Artificial Sequence: Synthetic oligonucleotide
gccuggguacuucuaagca

SEQ ID NO: 2453529 - RNA, 19 nt, Artificial Sequence
  Description of Artificial Sequence: Synthetic oligonucleotide
cucucgagauugcacaggu

SEQ ID NO: 2453530 - RNA, 19 nt, Artificial Sequence
  Description of Artificial Sequence: Synthetic oligonucleotide
uccccagcgccgacgggac

SEQ ID NO: 2453531 - RNA, 19 nt, Artificial Sequence
  Description of Artificial Sequence: Synthetic oligonucleotide
gccgacgggacgaagucag

SEQ ID NO: 2453532 - RNA, 19 nt, Artificial Sequence
  Description of Artificial Sequence: Synthetic oligonucleotide
gcccucucgagauugcaca

SEQ ID NO: 2453533 - RNA, 19 nt, Artificial Sequence
  Description of Artificial Sequence: Synthetic oligonucleotide
guacuucuaagcacuauuu

SEQ ID NO: 2453534 - RNA, 19 nt, Artificial Sequence
  Description of Artificial Sequence: Synthetic oligonucleotide
cacgggacugcccucucga

SEQ ID NO: 2453535 - RNA, 19 nt, Artificial Sequence
  Description of Artificial Sequence: Synthetic oligonucleotide
agucagccgccacgggacu

SEQ ID NO: 2453536 - RNA, 19 nt, Artificial Sequence
  Description of Artificial Sequence: Synthetic oligonucleotide
agcgccgacgggacgaagu

SEQ ID NO: 2453537 - RNA, 19 nt, Artificial Sequence
  Description of Artificial Sequence: Synthetic oligonucleotide
uacuugcagaaagcuuaau

SEQ ID NO: 2453538 - RNA, 19 nt, Artificial Sequence
  Description of Artificial Sequence: Synthetic oligonucleotide
gccgcuguggccgucagca

SEQ ID NO: 2453539 - RNA, 19 nt, Artificial Sequence
  Description of Artificial Sequence: Synthetic oligonucleotide
cccaaugcucucguguccc

SEQ ID NO: 2453540 - RNA, 19 nt, Artificial Sequence
  Description of Artificial Sequence: Synthetic oligonucleotide
gguccaauuacaugagguu

SEQ ID NO: 2453541 - RNA, 19 nt, Artificial Sequence
  Description of Artificial Sequence: Synthetic oligonucleotide
cuccauauucuuggaaugu

SEQ ID NO: 2453542 - RNA, 19 nt, Artificial Sequence
  Description of Artificial Sequence: Synthetic oligonucleotide
uggcaucgaaagucccuuu

SEQ ID NO: 2453543 - RNA, 19 nt, Artificial Sequence
  Description of Artificial Sequence: Synthetic oligonucleotide
auaaucgaucccaguuaua

SEQ ID NO: 2453544 - RNA, 19 nt, Artificial Sequence
  Description of Artificial Sequence: Synthetic oligonucleotide
gguuuacuuugcuguuaca

SEQ ID NO: 2453545 - RNA, 19 nt, Artificial Sequence
  Description of Artificial Sequence: Synthetic oligonucleotide
gcugaacuuggguguuggc

SEQ ID NO: 2453546 - RNA, 19 nt, Artificial Sequence
  Description of Artificial Sequence: Synthetic oligonucleotide
cuuggguguuggcagcucu

SEQ ID NO: 2453547 - RNA, 19 nt, Artificial Sequence
  Description of Artificial Sequence: Synthetic oligonucleotide
gcucucguguccccagcgc

SEQ ID NO: 2453548 - RNA, 19 nt, Artificial Sequence
  Description of Artificial Sequence: Synthetic oligonucleotide
ccucucgagauugcacagg

SEQ ID NO: 2453549 - RNA, 19 nt, Artificial Sequence
  Description of Artificial Sequence: Synthetic oligonucleotide
gggacugcccucucgagau

SEQ ID NO: 2453550 - RNA, 19 nt, Artificial Sequence
  Description of Artificial Sequence: Synthetic oligonucleotide
gcuaacugacuuuguccaa

SEQ ID NO: 2453551 - RNA, 19 nt, Artificial Sequence
  Description of Artificial Sequence: Synthetic oligonucleotide
gcacuuugcuucuucugua

SEQ ID NO: 2453552 - RNA, 19 nt, Artificial Sequence
  Description of Artificial Sequence: Synthetic oligonucleotide
gcaucgaaagucccuuugu

SEQ ID NO: 2453553 - RNA, 19 nt, Artificial Sequence
  Description of Artificial Sequence: Synthetic oligonucleotide
caaugcucucgugucccca

SEQ ID NO: 2453554 - RNA, 19 nt, Artificial Sequence
  Description of Artificial Sequence: Synthetic oligonucleotide
ccuuuaaguuaauguucga

SEQ ID NO: 2453555 - RNA, 19 nt, Artificial Sequence
  Description of Artificial Sequence: Synthetic oligonucleotide
ccaaugcucucgugucccc

SEQ ID NO: 2453556 - RNA, 19 nt, Artificial Sequence
  Description of Artificial Sequence: Synthetic oligonucleotide
cucugccuugguccaauua

SEQ ID NO: 2453557 - RNA, 19 nt, Artificial Sequence
  Description of Artificial Sequence: Synthetic oligonucleotide
agccaccuuauuagucggu

SEQ ID NO: 2453558 - RNA, 19 nt, Artificial Sequence
  Description of Artificial Sequence: Synthetic oligonucleotide
agguaccgcagcgccgcug

SEQ ID NO: 2453559 - RNA, 19 nt, Artificial Sequence
  Description of Artificial Sequence: Synthetic oligonucleotide
ggacgaagucagccgccac

SEQ ID NO: 2453560 - RNA, 19 nt, Artificial Sequence
  Description of Artificial Sequence: Synthetic oligonucleotide
gguaccgcagcgccgcugu

SEQ ID NO: 2453561 - RNA, 19 nt, Artificial Sequence
  Description of Artificial Sequence: Synthetic oligonucleotide
cgacgggacgaagucagcc

SEQ ID NO: 2453562 - RNA, 19 nt, Artificial Sequence
  Description of Artificial Sequence: Synthetic oligonucleotide
acucugccuugguccaauu

SEQ ID NO: 2453563 - RNA, 19 nt, Artificial Sequence
  Description of Artificial Sequence: Synthetic oligonucleotide
gcaucccaaugcucucgug

SEQ ID NO: 2453564 - RNA, 19 nt, Artificial Sequence
  Description of Artificial Sequence: Synthetic oligonucleotide
agccgccacgggacugccc

SEQ ID NO: 2453565 - RNA, 19 nt, Artificial Sequence
  Description of Artificial Sequence: Synthetic oligonucleotide
gagagagacuucacauauu

SEQ ID NO: 2453566 - RNA, 19 nt, Artificial Sequence
  Description of Artificial Sequence: Synthetic oligonucleotide
cuguggccgucagcauccg

SEQ ID NO: 2453567 - RNA, 19 nt, Artificial Sequence
  Description of Artificial Sequence: Synthetic oligonucleotide
gggacgaagucagccgcca

SEQ ID NO: 2453568 - RNA, 19 nt, Artificial Sequence
  Description of Artificial Sequence: Synthetic oligonucleotide
guaccgcagcgccgcugug

SEQ ID NO: 2453569 - RNA, 19 nt, Artificial Sequence
  Description of Artificial Sequence: Synthetic oligonucleotide
gcaucugaugggaucuugu

SEQ ID NO: 2453570 - RNA, 19 nt, Artificial Sequence
  Description of Artificial Sequence: Synthetic oligonucleotide
gcgccgacgggacgaaguc

SEQ ID NO: 2453571 - RNA, 19 nt, Artificial Sequence
  Description of Artificial Sequence: Synthetic oligonucleotide
gccgccacgggacugcccu

SEQ ID NO: 2453572 - RNA, 19 nt, Artificial Sequence
  Description of Artificial Sequence: Synthetic oligonucleotide
ccuguaucuccauauucuu

SEQ ID NO: 2453573 - RNA, 19 nt, Artificial Sequence
  Description of Artificial Sequence: Synthetic oligonucleotide
cgaucccaguuauauuaga

SEQ ID NO: 2453574 - RNA, 19 nt, Artificial Sequence
  Description of Artificial Sequence: Synthetic oligonucleotide
ccuuauuagucgguucaua

SEQ ID NO: 2453575 - RNA, 19 nt, Artificial Sequence
  Description of Artificial Sequence: Synthetic oligonucleotide
cugaggcaucugaugggau

SEQ ID NO: 2453576 - RNA, 19 nt, Artificial Sequence
  Description of Artificial Sequence: Synthetic oligonucleotide
ccgacgggacgaagucagc

SEQ ID NO: 2453577 - RNA, 19 nt, Artificial Sequence
  Description of Artificial Sequence: Synthetic oligonucleotide
cguguccccagcgccgacg

SEQ ID NO: 2453578 - RNA, 19 nt, Artificial Sequence
  Description of Artificial Sequence: Synthetic oligonucleotide
cagccgccacgggacugcc

SEQ ID NO: 2453579 - RNA, 19 nt, Artificial Sequence
  Description of Artificial Sequence: Synthetic oligonucleotide
cagcgccgacgggacgaag

SEQ ID NO: 2453580 - RNA, 19 nt, Artificial Sequence
  Description of Artificial Sequence: Synthetic oligonucleotide
ccaacacccuggagagaga

SEQ ID NO: 2453581 - RNA, 19 nt, Artificial Sequence
  Description of Artificial Sequence: Synthetic oligonucleotide
gccaccuuauuagucgguu

SEQ ID NO: 2453582 - RNA, 19 nt, Artificial Sequence
  Description of Artificial Sequence: Synthetic oligonucleotide
ggguacuucuaagcacuau

SEQ ID NO: 2453583 - RNA, 19 nt, Artificial Sequence
  Description of Artificial Sequence: Synthetic oligonucleotide
cgauagcccuucuuucucu

SEQ ID NO: 2453584 - RNA, 19 nt, Artificial Sequence
  Description of Artificial Sequence: Synthetic oligonucleotide
gcgccgcuguggccgucag

SEQ ID NO: 2453585 - RNA, 19 nt, Artificial Sequence
  Description of Artificial Sequence: Synthetic oligonucleotide
ccccagcgccgacgggacg

SEQ ID NO: 2453586 - RNA, 19 nt, Artificial Sequence
  Description of Artificial Sequence: Synthetic oligonucleotide
ccaauuacaugagguuauu

SEQ ID NO: 2453587 - RNA, 19 nt, Artificial Sequence
  Description of Artificial Sequence: Synthetic oligonucleotide
cagguaccgcagcgccgcu

SEQ ID NO: 2453588 - RNA, 19 nt, Artificial Sequence
  Description of Artificial Sequence: Synthetic oligonucleotide
ggacugcccucucgagauu

SEQ ID NO: 2453589 - RNA, 19 nt, Artificial Sequence
  Description of Artificial Sequence: Synthetic oligonucleotide
cgccgcuguggccgucagc

SEQ ID NO: 2453590 - RNA, 19 nt, Artificial Sequence
  Description of Artificial Sequence: Synthetic oligonucleotide
cgccgacgggacgaaguca

SEQ ID NO: 2453591 - RNA, 19 nt, Artificial Sequence
  Description of Artificial Sequence: Synthetic oligonucleotide
ggccgucagcauccgcguu

SEQ ID NO: 2453592 - RNA, 19 nt, Artificial Sequence
  Description of Artificial Sequence: Synthetic oligonucleotide
ccagcgccgacgggacgaa

SEQ ID NO: 2453593 - RNA, 19 nt, Artificial Sequence
  Description of Artificial Sequence: Synthetic oligonucleotide
cgccacgggacugcccucu

SEQ ID NO: 2453594 - RNA, 19 nt, Artificial Sequence
  Description of Artificial Sequence: Synthetic oligonucleotide
ccgcuguggccgucagcau

SEQ ID NO: 2453595 - RNA, 19 nt, Artificial Sequence
  Description of Artificial Sequence: Synthetic oligonucleotide
cgucagcauccgcguucau

SEQ ID NO: 2453596 - RNA, 19 nt, Artificial Sequence
  Description of Artificial Sequence: Synthetic oligonucleotide
aaauauaagagcuuuucgg

SEQ ID NO: 2453597 - RNA, 19 nt, Artificial Sequence
  Description of Artificial Sequence: Synthetic oligonucleotide
uaaauuuucuugaagacag

SEQ ID NO: 2453598 - RNA, 19 nt, Artificial Sequence
  Description of Artificial Sequence: Synthetic oligonucleotide
aacuuaaugauuauugugc

SEQ ID NO: 2453599 - RNA, 19 nt, Artificial Sequence
  Description of Artificial Sequence: Synthetic oligonucleotide
uguaacuuaaugauuauug

SEQ ID NO: 2453600 - RNA, 19 nt, Artificial Sequence
  Description of Artificial Sequence: Synthetic oligonucleotide
aaauauuucauucuaguaa

SEQ ID NO: 2453601 - RNA, 19 nt, Artificial Sequence
  Description of Artificial Sequence: Synthetic oligonucleotide
uuucauucuaguaauugcg

SEQ ID NO: 2453602 - RNA, 19 nt, Artificial Sequence
  Description of Artificial Sequence: Synthetic oligonucleotide
uuguauacaaucauaagcu

SEQ ID NO: 2453603 - RNA, 19 nt, Artificial Sequence
  Description of Artificial Sequence: Synthetic oligonucleotide
ugaaauucaauuaauacuu

SEQ ID NO: 2453604 - RNA, 19 nt, Artificial Sequence
  Description of Artificial Sequence: Synthetic oligonucleotide
ucccuguuaauauugaugg

SEQ ID NO: 2453605 - RNA, 19 nt, Artificial Sequence
  Description of Artificial Sequence: Synthetic oligonucleotide
uuuaaauuagcauuccaca

SEQ ID NO: 2453606 - RNA, 19 nt, Artificial Sequence
  Description of Artificial Sequence: Synthetic oligonucleotide
gaaauauaagagcuuuucg

SEQ ID NO: 2453607 - RNA, 19 nt, Artificial Sequence
  Description of Artificial Sequence: Synthetic oligonucleotide
agaacuuuugacacgaugc

SEQ ID NO: 2453608 - RNA, 19 nt, Artificial Sequence
  Description of Artificial Sequence: Synthetic oligonucleotide
aauuuucuugaagacagcg

SEQ ID NO: 2453609 - RNA, 19 nt, Artificial Sequence
  Description of Artificial Sequence: Synthetic oligonucleotide
uauacaaucauaagcugug

SEQ ID NO: 2453610 - RNA, 19 nt, Artificial Sequence
  Description of Artificial Sequence: Synthetic oligonucleotide
ugugcauggacacacaaug

SEQ ID NO: 2453611 - RNA, 19 nt, Artificial Sequence
  Description of Artificial Sequence: Synthetic oligonucleotide
aaacuuucagcucuuaagu

SEQ ID NO: 2453612 - RNA, 19 nt, Artificial Sequence
  Description of Artificial Sequence: Synthetic oligonucleotide
acucaauccaaaaucaucc

SEQ ID NO: 2453613 - RNA, 19 nt, Artificial Sequence
  Description of Artificial Sequence: Synthetic oligonucleotide
gaaacuuucagcucuuaag

SEQ ID NO: 2453614 - RNA, 19 nt, Artificial Sequence
  Description of Artificial Sequence: Synthetic oligonucleotide
aagggaaucuauuugaaau

SEQ ID NO: 2453615 - RNA, 19 nt, Artificial Sequence
  Description of Artificial Sequence: Synthetic oligonucleotide
uuuucggaaacuuucagcu

SEQ ID NO: 2453616 - RNA, 19 nt, Artificial Sequence
  Description of Artificial Sequence: Synthetic oligonucleotide
augauuauugugcauggac

SEQ ID NO: 2453617 - RNA, 19 nt, Artificial Sequence
  Description of Artificial Sequence: Synthetic oligonucleotide
cuaggucagaucuugagcg

SEQ ID NO: 2453618 - RNA, 19 nt, Artificial Sequence
  Description of Artificial Sequence: Synthetic oligonucleotide
uauugaugggaccagaacu

SEQ ID NO: 2453619 - RNA, 19 nt, Artificial Sequence
  Description of Artificial Sequence: Synthetic oligonucleotide
uaccuauugaaugauaagg

SEQ ID NO: 2453620 - RNA, 19 nt, Artificial Sequence
  Description of Artificial Sequence: Synthetic oligonucleotide
aaugauaagggagaccuag

SEQ ID NO: 2453621 - RNA, 19 nt, Artificial Sequence
  Description of Artificial Sequence: Synthetic oligonucleotide
uauugaaugauaagggaga

SEQ ID NO: 2453622 - RNA, 19 nt, Artificial Sequence
  Description of Artificial Sequence: Synthetic oligonucleotide
ugaaugauaagggagaccu

SEQ ID NO: 2453623 - RNA, 19 nt, Artificial Sequence
  Description of Artificial Sequence: Synthetic oligonucleotide
aggauuguaaugcuggagg

SEQ ID NO: 2453624 - RNA, 19 nt, Artificial Sequence
  Description of Artificial Sequence: Synthetic oligonucleotide
cuauugaaugauaagggag

SEQ ID NO: 2453625 - RNA, 19 nt, Artificial Sequence
  Description of Artificial Sequence: Synthetic oligonucleotide
auauacauguaacuuaaug

SEQ ID NO: 2453626 - RNA, 19 nt, Artificial Sequence
  Description of Artificial Sequence: Synthetic oligonucleotide
gaagauuaucuccucaugc

SEQ ID NO: 2453627 - RNA, 19 nt, Artificial Sequence
  Description of Artificial Sequence: Synthetic oligonucleotide
ucuauuugaaauucaauua

SEQ ID NO: 2453628 - RNA, 19 nt, Artificial Sequence
  Description of Artificial Sequence: Synthetic oligonucleotide
uaacuuaaugauuauugug

SEQ ID NO: 2453629 - RNA, 19 nt, Artificial Sequence
  Description of Artificial Sequence: Synthetic oligonucleotide
ugguagagugauaaagugg

SEQ ID NO: 2453630 - RNA, 19 nt, Artificial Sequence
  Description of Artificial Sequence: Synthetic oligonucleotide
aaauuagcauuccacaaau

SEQ ID NO: 2453631 - RNA, 19 nt, Artificial Sequence
  Description of Artificial Sequence: Synthetic oligonucleotide
aaguggaucagucuuuuca

SEQ ID NO: 2453632 - RNA, 19 nt, Artificial Sequence
  Description of Artificial Sequence: Synthetic oligonucleotide
uaaugauuauugugcaugg

SEQ ID NO: 2453633 - RNA, 19 nt, Artificial Sequence
  Description of Artificial Sequence: Synthetic oligonucleotide
agagugauaaaguggauca

SEQ ID NO: 2453634 - RNA, 19 nt, Artificial Sequence
  Description of Artificial Sequence: Synthetic oligonucleotide
ugauuauugugcauggaca

SEQ ID NO: 2453635 - RNA, 19 nt, Artificial Sequence
  Description of Artificial Sequence: Synthetic oligonucleotide
aucuauuugaaauucaauu

SEQ ID NO: 2453636 - RNA, 19 nt, Artificial Sequence
  Description of Artificial Sequence: Synthetic oligonucleotide
auacauguaacuuaaugau

SEQ ID NO: 2453637 - RNA, 19 nt, Artificial Sequence
  Description of Artificial Sequence: Synthetic oligonucleotide
aaaucaucccuguuaauau

SEQ ID NO: 2453638 - RNA, 19 nt, Artificial Sequence
  Description of Artificial Sequence: Synthetic oligonucleotide
auuagcauuccacaaauau

SEQ ID NO: 2453639 - RNA, 19 nt, Artificial Sequence
  Description of Artificial Sequence: Synthetic oligonucleotide
ucuaauggcgguucgaaac

SEQ ID NO: 2453640 - RNA, 19 nt, Artificial Sequence
  Description of Artificial Sequence: Synthetic oligonucleotide
uuaaauuagcauuccacaa

SEQ ID NO: 2453641 - RNA, 19 nt, Artificial Sequence
  Description of Artificial Sequence: Synthetic oligonucleotide
acaaaagggaaucuauuug

SEQ ID NO: 2453642 - RNA, 19 nt, Artificial Sequence
  Description of Artificial Sequence: Synthetic oligonucleotide
auucuaguaauugcgauag

SEQ ID NO: 2453643 - RNA, 19 nt, Artificial Sequence
  Description of Artificial Sequence: Synthetic oligonucleotide
auaagagcuuuucggaaac

SEQ ID NO: 2453644 - RNA, 19 nt, Artificial Sequence
  Description of Artificial Sequence: Synthetic oligonucleotide
auuccacaaauauacaugu

SEQ ID NO: 2453645 - RNA, 19 nt, Artificial Sequence
  Description of Artificial Sequence: Synthetic oligonucleotide
cagaaugaaauugagcagg

SEQ ID NO: 2453646 - RNA, 19 nt, Artificial Sequence
  Description of Artificial Sequence: Synthetic oligonucleotide
gauuauugugcauggacac

SEQ ID NO: 2453647 - RNA, 19 nt, Artificial Sequence
  Description of Artificial Sequence: Synthetic oligonucleotide
ugcucauauacacaaacuc

SEQ ID NO: 2453648 - RNA, 19 nt, Artificial Sequence
  Description of Artificial Sequence: Synthetic oligonucleotide
auuuguauacaaucauaag

SEQ ID NO: 2453649 - RNA, 19 nt, Artificial Sequence
  Description of Artificial Sequence: Synthetic oligonucleotide
auauugaugggaccagaac

SEQ ID NO: 2453650 - RNA, 19 nt, Artificial Sequence
  Description of Artificial Sequence: Synthetic oligonucleotide
aauugagcaggauuguaau

SEQ ID NO: 2453651 - RNA, 19 nt, Artificial Sequence
  Description of Artificial Sequence: Synthetic oligonucleotide
guuuguauuggucccauug

SEQ ID NO: 2453652 - RNA, 19 nt, Artificial Sequence
  Description of Artificial Sequence: Synthetic oligonucleotide
ugucaugugucuuggaucu

SEQ ID NO: 2453653 - RNA, 19 nt, Artificial Sequence
  Description of Artificial Sequence: Synthetic oligonucleotide
ucuuaaguauuuuccauaa

SEQ ID NO: 2453654 - RNA, 19 nt, Artificial Sequence
  Description of Artificial Sequence: Synthetic oligonucleotide
augaaauugagcaggauug

SEQ ID NO: 2453655 - RNA, 19 nt, Artificial Sequence
  Description of Artificial Sequence: Synthetic oligonucleotide
uggacucaauccaaaauca

SEQ ID NO: 2453656 - RNA, 19 nt, Artificial Sequence
  Description of Artificial Sequence: Synthetic oligonucleotide
uccaaaaucaucccuguua

SEQ ID NO: 2453657 - RNA, 19 nt, Artificial Sequence
  Description of Artificial Sequence: Synthetic oligonucleotide
ucuaguaauugcgauagac

SEQ ID NO: 2453658 - RNA, 19 nt, Artificial Sequence
  Description of Artificial Sequence: Synthetic oligonucleotide
uguauacaaucauaagcug

SEQ ID NO: 2453659 - RNA, 19 nt, Artificial Sequence
  Description of Artificial Sequence: Synthetic oligonucleotide
gcgauagacacucuaaugg

SEQ ID NO: 2453660 - RNA, 19 nt, Artificial Sequence
  Description of Artificial Sequence: Synthetic oligonucleotide
uccaguuugucuuuaugug

SEQ ID NO: 2453661 - RNA, 19 nt, Artificial Sequence
  Description of Artificial Sequence: Synthetic oligonucleotide
uggugaguccuucugugcg

SEQ ID NO: 2453662 - RNA, 19 nt, Artificial Sequence
  Description of Artificial Sequence: Synthetic oligonucleotide
uggguauccuuccaugcgg

SEQ ID NO: 2453663 - RNA, 19 nt, Artificial Sequence
  Description of Artificial Sequence: Synthetic oligonucleotide
uucauucuaguaauugcga

SEQ ID NO: 2453664 - RNA, 19 nt, Artificial Sequence
  Description of Artificial Sequence: Synthetic oligonucleotide
caauccaaaaucaucccug

SEQ ID NO: 2453665 - RNA, 19 nt, Artificial Sequence
  Description of Artificial Sequence: Synthetic oligonucleotide
auaaauuuucuugaagaca

SEQ ID NO: 2453666 - RNA, 19 nt, Artificial Sequence
  Description of Artificial Sequence: Synthetic oligonucleotide
uugacuuacaaaagggaau

SEQ ID NO: 2453667 - RNA, 19 nt, Artificial Sequence
  Description of Artificial Sequence: Synthetic oligonucleotide
augucaugugucuuggauc

SEQ ID NO: 2453668 - RNA, 19 nt, Artificial Sequence
  Description of Artificial Sequence: Synthetic oligonucleotide
aaggauuuguauacaauca

SEQ ID NO: 2453669 - RNA, 19 nt, Artificial Sequence
  Description of Artificial Sequence: Synthetic oligonucleotide
auuguaaugcuggagguug

SEQ ID NO: 2453670 - RNA, 19 nt, Artificial Sequence
  Description of Artificial Sequence: Synthetic oligonucleotide
acaaaagagccauugacuu

SEQ ID NO: 2453671 - RNA, 19 nt, Artificial Sequence
  Description of Artificial Sequence: Synthetic oligonucleotide
accuauugaaugauaaggg

SEQ ID NO: 2453672 - RNA, 19 nt, Artificial Sequence
  Description of Artificial Sequence: Synthetic oligonucleotide
acuuaaugauuauugugca

SEQ ID NO: 2453673 - RNA, 19 nt, Artificial Sequence
  Description of Artificial Sequence: Synthetic oligonucleotide
ugcauggacacacaaugcu

SEQ ID NO: 2453674 - RNA, 19 nt, Artificial Sequence
  Description of Artificial Sequence: Synthetic oligonucleotide
gauuuguauacaaucauaa

SEQ ID NO: 2453675 - RNA, 19 nt, Artificial Sequence
  Description of Artificial Sequence: Synthetic oligonucleotide
uguuaauauugaugggacc

SEQ ID NO: 2453676 - RNA, 19 nt, Artificial Sequence
  Description of Artificial Sequence: Synthetic oligonucleotide
cuguuaauauugaugggac

SEQ ID NO: 2453677 - RNA, 19 nt, Artificial Sequence
  Description of Artificial Sequence: Synthetic oligonucleotide
auugaaugauaagggagac

SEQ ID NO: 2453678 - RNA, 19 nt, Artificial Sequence
  Description of Artificial Sequence: Synthetic oligonucleotide
guaauugcgauagacacuc

SEQ ID NO: 2453679 - RNA, 19 nt, Artificial Sequence
  Description of Artificial Sequence: Synthetic oligonucleotide
aaccaaauauuucauucua

SEQ ID NO: 2453680 - RNA, 19 nt, Artificial Sequence
  Description of Artificial Sequence: Synthetic oligonucleotide
cuggcaaggauuuguauac

SEQ ID NO: 2453681 - RNA, 19 nt, Artificial Sequence
  Description of Artificial Sequence: Synthetic oligonucleotide
auaagcuguguuuguauug

SEQ ID NO: 2453682 - RNA, 19 nt, Artificial Sequence
  Description of Artificial Sequence: Synthetic oligonucleotide
aguuccaguccacugguag

SEQ ID NO: 2453683 - RNA, 19 nt, Artificial Sequence
  Description of Artificial Sequence: Synthetic oligonucleotide
aucagcaagagucccuggg

SEQ ID NO: 2453684 - RNA, 19 nt, Artificial Sequence
  Description of Artificial Sequence: Synthetic oligonucleotide
acaaauauacauguaacuu

SEQ ID NO: 2453685 - RNA, 19 nt, Artificial Sequence
  Description of Artificial Sequence: Synthetic oligonucleotide
ucugaaauauaagagcuuu

SEQ ID NO: 2453686 - RNA, 19 nt, Artificial Sequence
  Description of Artificial Sequence: Synthetic oligonucleotide
uuccaugcgggcaagcagc

SEQ ID NO: 2453687 - RNA, 19 nt, Artificial Sequence
  Description of Artificial Sequence: Synthetic oligonucleotide
aaucauaagcuguguuugu

SEQ ID NO: 2453688 - RNA, 19 nt, Artificial Sequence
  Description of Artificial Sequence: Synthetic oligonucleotide
aaaucagcaagagucccug

SEQ ID NO: 2453689 - RNA, 19 nt, Artificial Sequence
  Description of Artificial Sequence: Synthetic oligonucleotide
caaaagggaaucuauuuga

SEQ ID NO: 2453690 - RNA, 19 nt, Artificial Sequence
  Description of Artificial Sequence: Synthetic oligonucleotide
caagcagccccauaguggc

SEQ ID NO: 2453691 - RNA, 19 nt, Artificial Sequence
  Description of Artificial Sequence: Synthetic oligonucleotide
ugcgauagacacucuaaug

SEQ ID NO: 2453692 - RNA, 19 nt, Artificial Sequence
  Description of Artificial Sequence: Synthetic oligonucleotide
gauuaucuccucaugccag

SEQ ID NO: 2453693 - RNA, 19 nt, Artificial Sequence
  Description of Artificial Sequence: Synthetic oligonucleotide
acuuucagcucuuaaguau

SEQ ID NO: 2453694 - RNA, 19 nt, Artificial Sequence
  Description of Artificial Sequence: Synthetic oligonucleotide
uuugucuuuaugugcuggc

SEQ ID NO: 2453695 - RNA, 19 nt, Artificial Sequence
  Description of Artificial Sequence: Synthetic oligonucleotide
ucaugccagaaugaaauug

SEQ ID NO: 2453696 - RNA, 19 nt, Artificial Sequence
  Description of Artificial Sequence: Synthetic oligonucleotide
acaaucauaagcuguguuu

SEQ ID NO: 2453697 - RNA, 19 nt, Artificial Sequence
  Description of Artificial Sequence: Synthetic oligonucleotide
auagacacucuaauggcgg

SEQ ID NO: 2453698 - RNA, 19 nt, Artificial Sequence
  Description of Artificial Sequence: Synthetic oligonucleotide
ugauaaaguggaucagucu

SEQ ID NO: 2453699 - RNA, 19 nt, Artificial Sequence
  Description of Artificial Sequence: Synthetic oligonucleotide
ucuuuucaacaccuggacu

SEQ ID NO: 2453700 - RNA, 19 nt, Artificial Sequence
  Description of Artificial Sequence: Synthetic oligonucleotide
uuaugugcuggcaaggauu

SEQ ID NO: 2453701 - RNA, 19 nt, Artificial Sequence
  Description of Artificial Sequence: Synthetic oligonucleotide
ucuuuaugugcuggcaagg

SEQ ID NO: 2453702 - RNA, 19 nt, Artificial Sequence
  Description of Artificial Sequence: Synthetic oligonucleotide
accuagggaaaucuagguc

SEQ ID NO: 2453703 - RNA, 19 nt, Artificial Sequence
  Description of Artificial Sequence: Synthetic oligonucleotide
agauuaucuccucaugcca

SEQ ID NO: 2453704 - RNA, 19 nt, Artificial Sequence
  Description of Artificial Sequence: Synthetic oligonucleotide
agcaagagucccuggguac

SEQ ID NO: 2453705 - RNA, 19 nt, Artificial Sequence
  Description of Artificial Sequence: Synthetic oligonucleotide
ugacuuacaaaagggaauc

SEQ ID NO: 2453706 - RNA, 19 nt, Artificial Sequence
  Description of Artificial Sequence: Synthetic oligonucleotide
cugguagagugauaaagug

SEQ ID NO: 2453707 - RNA, 19 nt, Artificial Sequence
  Description of Artificial Sequence: Synthetic oligonucleotide
gaucagucuuuucaacacc

SEQ ID NO: 2453708 - RNA, 19 nt, Artificial Sequence
  Description of Artificial Sequence: Synthetic oligonucleotide
caaucauaagcuguguuug

SEQ ID NO: 2453709 - RNA, 19 nt, Artificial Sequence
  Description of Artificial Sequence: Synthetic oligonucleotide
aaauugagcaggauuguaa

SEQ ID NO: 2453710 - RNA, 19 nt, Artificial Sequence
  Description of Artificial Sequence: Synthetic oligonucleotide
aucuaggucagaucuugag

SEQ ID NO: 2453711 - RNA, 19 nt, Artificial Sequence
  Description of Artificial Sequence: Synthetic oligonucleotide
aauugcgauagacacucua

SEQ ID NO: 2453712 - RNA, 19 nt, Artificial Sequence
  Description of Artificial Sequence: Synthetic oligonucleotide
gccauugacuuacaaaagg

SEQ ID NO: 2453713 - RNA, 19 nt, Artificial Sequence
  Description of Artificial Sequence: Synthetic oligonucleotide
cuaguaauugcgauagaca

SEQ ID NO: 2453714 - RNA, 19 nt, Artificial Sequence
  Description of Artificial Sequence: Synthetic oligonucleotide
ugaaaucagcaagaguccc

SEQ ID NO: 2453715 - RNA, 19 nt, Artificial Sequence
  Description of Artificial Sequence: Synthetic oligonucleotide
uuuugacacgaugccaccg

SEQ ID NO: 2453716 - RNA, 19 nt, Artificial Sequence
  Description of Artificial Sequence: Synthetic oligonucleotide
gaagacagcguucucagua

SEQ ID NO: 2453717 - RNA, 19 nt, Artificial Sequence
  Description of Artificial Sequence: Synthetic oligonucleotide
gagaccuagggaaaucuag

SEQ ID NO: 2453718 - RNA, 19 nt, Artificial Sequence
  Description of Artificial Sequence: Synthetic oligonucleotide
cucaauccaaaaucauccc

SEQ ID NO: 2453719 - RNA, 19 nt, Artificial Sequence
  Description of Artificial Sequence: Synthetic oligonucleotide
uuguauuggucccauugaa

SEQ ID NO: 2453720 - RNA, 19 nt, Artificial Sequence
  Description of Artificial Sequence: Synthetic oligonucleotide
guaccuauugaaugauaag

SEQ ID NO: 2453721 - RNA, 19 nt, Artificial Sequence
  Description of Artificial Sequence: Synthetic oligonucleotide
uccacugguagagugauaa

SEQ ID NO: 2453722 - RNA, 19 nt, Artificial Sequence
  Description of Artificial Sequence: Synthetic oligonucleotide
uguauuggucccauugaau

SEQ ID NO: 2453723 - RNA, 19 nt, Artificial Sequence
  Description of Artificial Sequence: Synthetic oligonucleotide
gcuguguuuguauuggucc

SEQ ID NO: 2453724 - RNA, 19 nt, Artificial Sequence
  Description of Artificial Sequence: Synthetic oligonucleotide
acauguaacuuaaugauua

SEQ ID NO: 2453725 - RNA, 19 nt, Artificial Sequence
  Description of Artificial Sequence: Synthetic oligonucleotide
ccauugacuuacaaaaggg

SEQ ID NO: 2453726 - RNA, 19 nt, Artificial Sequence
  Description of Artificial Sequence: Synthetic oligonucleotide
ucauucuaguaauugcgau

SEQ ID NO: 2453727 - RNA, 19 nt, Artificial Sequence
  Description of Artificial Sequence: Synthetic oligonucleotide
aggauuuguauacaaucau

SEQ ID NO: 2453728 - RNA, 19 nt, Artificial Sequence
  Description of Artificial Sequence: Synthetic oligonucleotide
cacugguagagugauaaag

SEQ ID NO: 2453729 - RNA, 19 nt, Artificial Sequence
  Description of Artificial Sequence: Synthetic oligonucleotide
auugacuuacaaaagggaa

SEQ ID NO: 2453730 - RNA, 19 nt, Artificial Sequence
  Description of Artificial Sequence: Synthetic oligonucleotide
uuuaugugcuggcaaggau

SEQ ID NO: 2453731 - RNA, 19 nt, Artificial Sequence
  Description of Artificial Sequence: Synthetic oligonucleotide
agagccauugacuuacaaa

SEQ ID NO: 2453732 - RNA, 19 nt, Artificial Sequence
  Description of Artificial Sequence: Synthetic oligonucleotide
aaucuauuugaaauucaau

SEQ ID NO: 2453733 - RNA, 19 nt, Artificial Sequence
  Description of Artificial Sequence: Synthetic oligonucleotide
agugauaaaguggaucagu

SEQ ID NO: 2453734 - RNA, 19 nt, Artificial Sequence
  Description of Artificial Sequence: Synthetic oligonucleotide
aacuuuugacacgaugcca

SEQ ID NO: 2453735 - RNA, 19 nt, Artificial Sequence
  Description of Artificial Sequence: Synthetic oligonucleotide
ugagcggcaugucaugugu

SEQ ID NO: 2453736 - RNA, 19 nt, Artificial Sequence
  Description of Artificial Sequence: Synthetic oligonucleotide
uagagugauaaaguggauc

SEQ ID NO: 2453737 - RNA, 19 nt, Artificial Sequence
  Description of Artificial Sequence: Synthetic oligonucleotide
ucucauggucucucaagcc

SEQ ID NO: 2453738 - RNA, 19 nt, Artificial Sequence
  Description of Artificial Sequence: Synthetic oligonucleotide
ggaaaucuaggucagaucu

SEQ ID NO: 2453739 - RNA, 19 nt, Artificial Sequence
  Description of Artificial Sequence: Synthetic oligonucleotide
caugccagaaugaaauuga

SEQ ID NO: 2453740 - RNA, 19 nt, Artificial Sequence
  Description of Artificial Sequence: Synthetic oligonucleotide
cuagggaaaucuaggucag

SEQ ID NO: 2453741 - RNA, 19 nt, Artificial Sequence
  Description of Artificial Sequence: Synthetic oligonucleotide
ucauaagcuguguuuguau

SEQ ID NO: 2453742 - RNA, 19 nt, Artificial Sequence
  Description of Artificial Sequence: Synthetic oligonucleotide
ucagcaagagucccugggu

SEQ ID NO: 2453743 - RNA, 19 nt, Artificial Sequence
  Description of Artificial Sequence: Synthetic oligonucleotide
gaccagaacuuuugacacg

SEQ ID NO: 2453744 - RNA, 19 nt, Artificial Sequence
  Description of Artificial Sequence: Synthetic oligonucleotide
caacaccuggacucaaucc

SEQ ID NO: 2453745 - RNA, 19 nt, Artificial Sequence
  Description of Artificial Sequence: Synthetic oligonucleotide
aaucaucccuguuaauauu

SEQ ID NO: 2453746 - RNA, 19 nt, Artificial Sequence
  Description of Artificial Sequence: Synthetic oligonucleotide
gucuuggaucuucacacag

SEQ ID NO: 2453747 - RNA, 19 nt, Artificial Sequence
  Description of Artificial Sequence: Synthetic oligonucleotide
ucuuggaucuucacacagu

SEQ ID NO: 2453748 - RNA, 19 nt, Artificial Sequence
  Description of Artificial Sequence: Synthetic oligonucleotide
gguagagugauaaagugga

SEQ ID NO: 2453749 - RNA, 19 nt, Artificial Sequence
  Description of Artificial Sequence: Synthetic oligonucleotide
uauuggucccauugaauau

SEQ ID NO: 2453750 - RNA, 19 nt, Artificial Sequence
  Description of Artificial Sequence: Synthetic oligonucleotide
gacucaauccaaaaucauc

SEQ ID NO: 2453751 - RNA, 19 nt, Artificial Sequence
  Description of Artificial Sequence: Synthetic oligonucleotide
uauccuuccaugcgggcaa

SEQ ID NO: 2453752 - RNA, 19 nt, Artificial Sequence
  Description of Artificial Sequence: Synthetic oligonucleotide
ccauaaauuuucuugaaga

SEQ ID NO: 2453753 - RNA, 19 nt, Artificial Sequence
  Description of Artificial Sequence: Synthetic oligonucleotide
agaccuagggaaaucuagg

SEQ ID NO: 2453754 - RNA, 19 nt, Artificial Sequence
  Description of Artificial Sequence: Synthetic oligonucleotide
caugcgggcaagcagcccc

SEQ ID NO: 2453755 - RNA, 19 nt, Artificial Sequence
  Description of Artificial Sequence: Synthetic oligonucleotide
uaugugcuggcaaggauuu

SEQ ID NO: 2453756 - RNA, 19 nt, Artificial Sequence
  Description of Artificial Sequence: Synthetic oligonucleotide
uacaaucauaagcuguguu

SEQ ID NO: 2453757 - RNA, 19 nt, Artificial Sequence
  Description of Artificial Sequence: Synthetic oligonucleotide
aaugauuauugugcaugga

SEQ ID NO: 2453758 - RNA, 19 nt, Artificial Sequence
  Description of Artificial Sequence: Synthetic oligonucleotide
aggucagaucuugagcggc

SEQ ID NO: 2453759 - RNA, 19 nt, Artificial Sequence
  Description of Artificial Sequence: Synthetic oligonucleotide
ucaucccuguuaauauuga

SEQ ID NO: 2453760 - RNA, 19 nt, Artificial Sequence
  Description of Artificial Sequence: Synthetic oligonucleotide
acugguagagugauaaagu

SEQ ID NO: 2453761 - RNA, 19 nt, Artificial Sequence
  Description of Artificial Sequence: Synthetic oligonucleotide
uuccauaaauuuucuugaa

SEQ ID NO: 2453762 - RNA, 19 nt, Artificial Sequence
  Description of Artificial Sequence: Synthetic oligonucleotide
guaacuuaaugauuauugu

SEQ ID NO: 2453763 - RNA, 19 nt, Artificial Sequence
  Description of Artificial Sequence: Synthetic oligonucleotide
ugagcaggauuguaaugcu

SEQ ID NO: 2453764 - RNA, 19 nt, Artificial Sequence
  Description of Artificial Sequence: Synthetic oligonucleotide
uugcgauagacacucuaau

SEQ ID NO: 2453765 - RNA, 19 nt, Artificial Sequence
  Description of Artificial Sequence: Synthetic oligonucleotide
cuuuugacacgaugccacc

SEQ ID NO: 2453766 - RNA, 19 nt, Artificial Sequence
  Description of Artificial Sequence: Synthetic oligonucleotide
gcucauauacacaaacucc

SEQ ID NO: 2453767 - RNA, 19 nt, Artificial Sequence
  Description of Artificial Sequence: Synthetic oligonucleotide
aucccuguuaauauugaug

SEQ ID NO: 2453768 - RNA, 19 nt, Artificial Sequence
  Description of Artificial Sequence: Synthetic oligonucleotide
uucugaaauauaagagcuu

SEQ ID NO: 2453769 - RNA, 19 nt, Artificial Sequence
  Description of Artificial Sequence: Synthetic oligonucleotide
uugaaugauaagggagacc

SEQ ID NO: 2453770 - RNA, 19 nt, Artificial Sequence
  Description of Artificial Sequence: Synthetic oligonucleotide
ugaaauugagcaggauugu

SEQ ID NO: 2453771 - RNA, 19 nt, Artificial Sequence
  Description of Artificial Sequence: Synthetic oligonucleotide
agggaaucuauuugaaauu

SEQ ID NO: 2453772 - RNA, 19 nt, Artificial Sequence
  Description of Artificial Sequence: Synthetic oligonucleotide
auuaucuccucaugccaga

SEQ ID NO: 2453773 - RNA, 19 nt, Artificial Sequence
  Description of Artificial Sequence: Synthetic oligonucleotide
aucaucccuguuaauauug

SEQ ID NO: 2453774 - RNA, 19 nt, Artificial Sequence
  Description of Artificial Sequence: Synthetic oligonucleotide
ggaccagaacuuuugacac

SEQ ID NO: 2453775 - RNA, 19 nt, Artificial Sequence
  Description of Artificial Sequence: Synthetic oligonucleotide
gaucuugagcggcauguca

SEQ ID NO: 2453776 - RNA, 19 nt, Artificial Sequence
  Description of Artificial Sequence: Synthetic oligonucleotide
gcacaaaagagccauugac

SEQ ID NO: 2453777 - RNA, 19 nt, Artificial Sequence
  Description of Artificial Sequence: Synthetic oligonucleotide
uugacacgaugccaccgcc

SEQ ID NO: 2453778 - RNA, 19 nt, Artificial Sequence
  Description of Artificial Sequence: Synthetic oligonucleotide
ucuugagcggcaugucaug

SEQ ID NO: 2453779 - RNA, 19 nt, Artificial Sequence
  Description of Artificial Sequence: Synthetic oligonucleotide
ccuagggaaaucuagguca

SEQ ID NO: 2453780 - RNA, 19 nt, Artificial Sequence
  Description of Artificial Sequence: Synthetic oligonucleotide
agucccuggguaccuauug

SEQ ID NO: 2453781 - RNA, 19 nt, Artificial Sequence
  Description of Artificial Sequence: Synthetic oligonucleotide
acaguuccaguccacuggu

SEQ ID NO: 2453782 - RNA, 19 nt, Artificial Sequence
  Description of Artificial Sequence: Synthetic oligonucleotide
ggaucagucuuuucaacac

SEQ ID NO: 2453783 - RNA, 19 nt, Artificial Sequence
  Description of Artificial Sequence: Synthetic oligonucleotide
acgaugccaccgccgaacc

SEQ ID NO: 2453784 - RNA, 19 nt, Artificial Sequence
  Description of Artificial Sequence: Synthetic oligonucleotide
gggaccagaacuuuugaca

SEQ ID NO: 2453785 - RNA, 19 nt, Artificial Sequence
  Description of Artificial Sequence: Synthetic oligonucleotide
uauugugcauggacacaca

SEQ ID NO: 2453786 - RNA, 19 nt, Artificial Sequence
  Description of Artificial Sequence: Synthetic oligonucleotide
ugggaccagaacuuuugac

SEQ ID NO: 2453787 - RNA, 19 nt, Artificial Sequence
  Description of Artificial Sequence: Synthetic oligonucleotide
auuuucuugaagacagcgu

SEQ ID NO: 2453788 - RNA, 19 nt, Artificial Sequence
  Description of Artificial Sequence: Synthetic oligonucleotide
uguguuuguauugguccca

SEQ ID NO: 2453789 - RNA, 19 nt, Artificial Sequence
  Description of Artificial Sequence: Synthetic oligonucleotide
uucagaagauuaucuccuc

SEQ ID NO: 2453790 - RNA, 19 nt, Artificial Sequence
  Description of Artificial Sequence: Synthetic oligonucleotide
ugucuuggaucuucacaca

SEQ ID NO: 2453791 - RNA, 19 nt, Artificial Sequence
  Description of Artificial Sequence: Synthetic oligonucleotide
uuguaaugcuggagguuga

SEQ ID NO: 2453792 - RNA, 19 nt, Artificial Sequence
  Description of Artificial Sequence: Synthetic oligonucleotide
cuggguaccuauugaauga

SEQ ID NO: 2453793 - RNA, 19 nt, Artificial Sequence
  Description of Artificial Sequence: Synthetic oligonucleotide
uuucggaaacuuucagcuc

SEQ ID NO: 2453794 - RNA, 19 nt, Artificial Sequence
  Description of Artificial Sequence: Synthetic oligonucleotide
gauugaaaucagcaagagu

SEQ ID NO: 2453795 - RNA, 19 nt, Artificial Sequence
  Description of Artificial Sequence: Synthetic oligonucleotide
cgaaccaaauauuucauuc

SEQ ID NO: 2453796 - RNA, 19 nt, Artificial Sequence
  Description of Artificial Sequence: Synthetic oligonucleotide
guaaugcuggagguugagg

SEQ ID NO: 2453797 - RNA, 19 nt, Artificial Sequence
  Description of Artificial Sequence: Synthetic oligonucleotide
ggucccauugaauauucac

SEQ ID NO: 2453798 - RNA, 19 nt, Artificial Sequence
  Description of Artificial Sequence: Synthetic oligonucleotide
gagugauaaaguggaucag

SEQ ID NO: 2453799 - RNA, 19 nt, Artificial Sequence
  Description of Artificial Sequence: Synthetic oligonucleotide
uccucaugccagaaugaaa

SEQ ID NO: 2453800 - RNA, 19 nt, Artificial Sequence
  Description of Artificial Sequence: Synthetic oligonucleotide
cacaaaagagccauugacu

SEQ ID NO: 2453801 - RNA, 19 nt, Artificial Sequence
  Description of Artificial Sequence: Synthetic oligonucleotide
augauaagggagaccuagg

SEQ ID NO: 2453802 - RNA, 19 nt, Artificial Sequence
  Description of Artificial Sequence: Synthetic oligonucleotide
auuauugugcauggacaca

SEQ ID NO: 2453803 - RNA, 19 nt, Artificial Sequence
  Description of Artificial Sequence: Synthetic oligonucleotide
cucuuaaguauuuuccaua

SEQ ID NO: 2453804 - RNA, 19 nt, Artificial Sequence
  Description of Artificial Sequence: Synthetic oligonucleotide
aaucuucccaggagcagca

SEQ ID NO: 2453805 - RNA, 19 nt, Artificial Sequence
  Description of Artificial Sequence: Synthetic oligonucleotide
guauacaaucauaagcugu

SEQ ID NO: 2453806 - RNA, 19 nt, Artificial Sequence
  Description of Artificial Sequence: Synthetic oligonucleotide
acagcguucucaguaguca

SEQ ID NO: 2453807 - RNA, 19 nt, Artificial Sequence
  Description of Artificial Sequence: Synthetic oligonucleotide
auugaugggaccagaacuu

SEQ ID NO: 2453808 - RNA, 19 nt, Artificial Sequence
  Description of Artificial Sequence: Synthetic oligonucleotide
agaaugaaauugagcagga

SEQ ID NO: 2453809 - RNA, 19 nt, Artificial Sequence
  Description of Artificial Sequence: Synthetic oligonucleotide
uugagcggcaugucaugug

SEQ ID NO: 2453810 - RNA, 19 nt, Artificial Sequence
  Description of Artificial Sequence: Synthetic oligonucleotide
cauucuaguaauugcgaua

SEQ ID NO: 2453811 - RNA, 19 nt, Artificial Sequence
  Description of Artificial Sequence: Synthetic oligonucleotide
gacacgaugccaccgccga

SEQ ID NO: 2453812 - RNA, 19 nt, Artificial Sequence
  Description of Artificial Sequence: Synthetic oligonucleotide
acuuacaaaagggaaucua

SEQ ID NO: 2453813 - RNA, 19 nt, Artificial Sequence
  Description of Artificial Sequence: Synthetic oligonucleotide
agggaaaucuaggucagau

SEQ ID NO: 2453814 - RNA, 19 nt, Artificial Sequence
  Description of Artificial Sequence: Synthetic oligonucleotide
auugcgauagacacucuaa

SEQ ID NO: 2453815 - RNA, 19 nt, Artificial Sequence
  Description of Artificial Sequence: Synthetic oligonucleotide
uagacacucuaauggcggu

SEQ ID NO: 2453816 - RNA, 19 nt, Artificial Sequence
  Description of Artificial Sequence: Synthetic oligonucleotide
agcggcaugucaugugucu

SEQ ID NO: 2453817 - RNA, 19 nt, Artificial Sequence
  Description of Artificial Sequence: Synthetic oligonucleotide
ccuggguaccuauugaaug

SEQ ID NO: 2453818 - RNA, 19 nt, Artificial Sequence
  Description of Artificial Sequence: Synthetic oligonucleotide
guucgaaaccuggugaguc

SEQ ID NO: 2453819 - RNA, 19 nt, Artificial Sequence
  Description of Artificial Sequence: Synthetic oligonucleotide
uccaugcgggcaagcagcc

SEQ ID NO: 2453820 - RNA, 19 nt, Artificial Sequence
  Description of Artificial Sequence: Synthetic oligonucleotide
ggauugaaaucagcaagag

SEQ ID NO: 2453821 - RNA, 19 nt, Artificial Sequence
  Description of Artificial Sequence: Synthetic oligonucleotide
caggauuguaaugcuggag

SEQ ID NO: 2453822 - RNA, 19 nt, Artificial Sequence
  Description of Artificial Sequence: Synthetic oligonucleotide
uggucucucaagccugggu

SEQ ID NO: 2453823 - RNA, 19 nt, Artificial Sequence
  Description of Artificial Sequence: Synthetic oligonucleotide
ggugaguccuucugugcgg

SEQ ID NO: 2453824 - RNA, 19 nt, Artificial Sequence
  Description of Artificial Sequence: Synthetic oligonucleotide
gcaagcagccccauagugg

SEQ ID NO: 2453825 - RNA, 19 nt, Artificial Sequence
  Description of Artificial Sequence: Synthetic oligonucleotide
gaugccaccgccgaaccaa

SEQ ID NO: 2453826 - RNA, 19 nt, Artificial Sequence
  Description of Artificial Sequence: Synthetic oligonucleotide
uucuaguaauugcgauaga

SEQ ID NO: 2453827 - RNA, 19 nt, Artificial Sequence
  Description of Artificial Sequence: Synthetic oligonucleotide
gcuuuucggaaacuuucag

SEQ ID NO: 2453828 - RNA, 19 nt, Artificial Sequence
  Description of Artificial Sequence: Synthetic oligonucleotide
ugaugggaccagaacuuuu

SEQ ID NO: 2453829 - RNA, 19 nt, Artificial Sequence
  Description of Artificial Sequence: Synthetic oligonucleotide
ucgaaaccuggugaguccu

SEQ ID NO: 2453830 - RNA, 19 nt, Artificial Sequence
  Description of Artificial Sequence: Synthetic oligonucleotide
ggggaggucaaggacacag

SEQ ID NO: 2453831 - RNA, 19 nt, Artificial Sequence
  Description of Artificial Sequence: Synthetic oligonucleotide
agccauugacuuacaaaag

SEQ ID NO: 2453832 - RNA, 19 nt, Artificial Sequence
  Description of Artificial Sequence: Synthetic oligonucleotide
gguaccuauugaaugauaa

SEQ ID NO: 2453833 - RNA, 19 nt, Artificial Sequence
  Description of Artificial Sequence: Synthetic oligonucleotide
auggcgguucgaaaccugg

SEQ ID NO: 2453834 - RNA, 19 nt, Artificial Sequence
  Description of Artificial Sequence: Synthetic oligonucleotide
augcucauauacacaaacu

SEQ ID NO: 2453835 - RNA, 19 nt, Artificial Sequence
  Description of Artificial Sequence: Synthetic oligonucleotide
gggaaucuauuugaaauuc

SEQ ID NO: 2453836 - RNA, 19 nt, Artificial Sequence
  Description of Artificial Sequence: Synthetic oligonucleotide
aauggcgguucgaaaccug

SEQ ID NO: 2453837 - RNA, 19 nt, Artificial Sequence
  Description of Artificial Sequence: Synthetic oligonucleotide
agcguucucaguagucagg

SEQ ID NO: 2453838 - RNA, 19 nt, Artificial Sequence
  Description of Artificial Sequence: Synthetic oligonucleotide
agcagguauuucuucugaa

SEQ ID NO: 2453839 - RNA, 19 nt, Artificial Sequence
  Description of Artificial Sequence: Synthetic oligonucleotide
aaucuaggucagaucuuga

SEQ ID NO: 2453840 - RNA, 19 nt, Artificial Sequence
  Description of Artificial Sequence: Synthetic oligonucleotide
cgauagacacucuaauggc

SEQ ID NO: 2453841 - RNA, 19 nt, Artificial Sequence
  Description of Artificial Sequence: Synthetic oligonucleotide
ccuauugaaugauaaggga

SEQ ID NO: 2453842 - RNA, 19 nt, Artificial Sequence
  Description of Artificial Sequence: Synthetic oligonucleotide
auuggucccauugaauauu

SEQ ID NO: 2453843 - RNA, 19 nt, Artificial Sequence
  Description of Artificial Sequence: Synthetic oligonucleotide
uaauggcgguucgaaaccu

SEQ ID NO: 2453844 - RNA, 19 nt, Artificial Sequence
  Description of Artificial Sequence: Synthetic oligonucleotide
ugaagacagcguucucagu

SEQ ID NO: 2453845 - RNA, 19 nt, Artificial Sequence
  Description of Artificial Sequence: Synthetic oligonucleotide
gguugaggggaggucaagg

SEQ ID NO: 2453846 - RNA, 19 nt, Artificial Sequence
  Description of Artificial Sequence: Synthetic oligonucleotide
gaccuagggaaaucuaggu

SEQ ID NO: 2453847 - RNA, 19 nt, Artificial Sequence
  Description of Artificial Sequence: Synthetic oligonucleotide
gaaauugagcaggauugua

SEQ ID NO: 2453848 - RNA, 19 nt, Artificial Sequence
  Description of Artificial Sequence: Synthetic oligonucleotide
augccagaaugaaauugag

SEQ ID NO: 2453849 - RNA, 19 nt, Artificial Sequence
  Description of Artificial Sequence: Synthetic oligonucleotide
ccauugaauauucacaaua

SEQ ID NO: 2453850 - RNA, 19 nt, Artificial Sequence
  Description of Artificial Sequence: Synthetic oligonucleotide
ccuguuaauauugauggga

SEQ ID NO: 2453851 - RNA, 19 nt, Artificial Sequence
  Description of Artificial Sequence: Synthetic oligonucleotide
auguaacuuaaugauuauu

SEQ ID NO: 2453852 - RNA, 19 nt, Artificial Sequence
  Description of Artificial Sequence: Synthetic oligonucleotide
aauuagcauuccacaaaua

SEQ ID NO: 2453853 - RNA, 19 nt, Artificial Sequence
  Description of Artificial Sequence: Synthetic oligonucleotide
ucuugaagacagcguucuc

SEQ ID NO: 2453854 - RNA, 19 nt, Artificial Sequence
  Description of Artificial Sequence: Synthetic oligonucleotide
acucuaauggcgguucgaa

SEQ ID NO: 2453855 - RNA, 19 nt, Artificial Sequence
  Description of Artificial Sequence: Synthetic oligonucleotide
agcuuuucggaaacuuuca

SEQ ID NO: 2453856 - RNA, 19 nt, Artificial Sequence
  Description of Artificial Sequence: Synthetic oligonucleotide
uggucccauugaauauuca

SEQ ID NO: 2453857 - RNA, 19 nt, Artificial Sequence
  Description of Artificial Sequence: Synthetic oligonucleotide
uaagagcuuuucggaaacu

SEQ ID NO: 2453858 - RNA, 19 nt, Artificial Sequence
  Description of Artificial Sequence: Synthetic oligonucleotide
cuuuaugugcuggcaagga

SEQ ID NO: 2453859 - RNA, 19 nt, Artificial Sequence
  Description of Artificial Sequence: Synthetic oligonucleotide
agacagcguucucaguagu

SEQ ID NO: 2453860 - RNA, 19 nt, Artificial Sequence
  Description of Artificial Sequence: Synthetic oligonucleotide
ccccauaguggcaucuucg

SEQ ID NO: 2453861 - RNA, 19 nt, Artificial Sequence
  Description of Artificial Sequence: Synthetic oligonucleotide
gugcauggacacacaaugc

SEQ ID NO: 2453862 - RNA, 19 nt, Artificial Sequence
  Description of Artificial Sequence: Synthetic oligonucleotide
gaggggaggucaaggacac

SEQ ID NO: 2453863 - RNA, 19 nt, Artificial Sequence
  Description of Artificial Sequence: Synthetic oligonucleotide
aucauaagcuguguuugua

SEQ ID NO: 2453864 - RNA, 19 nt, Artificial Sequence
  Description of Artificial Sequence: Synthetic oligonucleotide
ucgcacuccuggaaucuuc

SEQ ID NO: 2453865 - RNA, 19 nt, Artificial Sequence
  Description of Artificial Sequence: Synthetic oligonucleotide
ggcaugucaugugucuugg

SEQ ID NO: 2453866 - RNA, 19 nt, Artificial Sequence
  Description of Artificial Sequence: Synthetic oligonucleotide
aucuugagcggcaugucau

SEQ ID NO: 2453867 - RNA, 19 nt, Artificial Sequence
  Description of Artificial Sequence: Synthetic oligonucleotide
ccuggguauccuuccaugc

SEQ ID NO: 2453868 - RNA, 19 nt, Artificial Sequence
  Description of Artificial Sequence: Synthetic oligonucleotide
caugugucuuggaucuuca

SEQ ID NO: 2453869 - RNA, 19 nt, Artificial Sequence
  Description of Artificial Sequence: Synthetic oligonucleotide
uuaucuccucaugccagaa

SEQ ID NO: 2453870 - RNA, 19 nt, Artificial Sequence
  Description of Artificial Sequence: Synthetic oligonucleotide
ugcuggcaaggauuuguau

SEQ ID NO: 2453871 - RNA, 19 nt, Artificial Sequence
  Description of Artificial Sequence: Synthetic oligonucleotide
uaauugcgauagacacucu

SEQ ID NO: 2453872 - RNA, 19 nt, Artificial Sequence
  Description of Artificial Sequence: Synthetic oligonucleotide
cagguauuucuucugaaau

SEQ ID NO: 2453873 - RNA, 19 nt, Artificial Sequence
  Description of Artificial Sequence: Synthetic oligonucleotide
ggcgguucgaaaccuggug

SEQ ID NO: 2453874 - RNA, 19 nt, Artificial Sequence
  Description of Artificial Sequence: Synthetic oligonucleotide
uggcgguucgaaaccuggu

SEQ ID NO: 2453875 - RNA, 19 nt, Artificial Sequence
  Description of Artificial Sequence: Synthetic oligonucleotide
gaaaucagcaagagucccu

SEQ ID NO: 2453876 - RNA, 19 nt, Artificial Sequence
  Description of Artificial Sequence: Synthetic oligonucleotide
uggguaccuauugaaugau

SEQ ID NO: 2453877 - RNA, 19 nt, Artificial Sequence
  Description of Artificial Sequence: Synthetic oligonucleotide
gacagcguucucaguaguc

SEQ ID NO: 2453878 - RNA, 19 nt, Artificial Sequence
  Description of Artificial Sequence: Synthetic oligonucleotide
cccauaguggcaucuucgc

SEQ ID NO: 2453879 - RNA, 19 nt, Artificial Sequence
  Description of Artificial Sequence: Synthetic oligonucleotide
gcuggcaaggauuuguaua

SEQ ID NO: 2453880 - RNA, 19 nt, Artificial Sequence
  Description of Artificial Sequence: Synthetic oligonucleotide
ggucaaggacacaggauug

SEQ ID NO: 2453881 - RNA, 19 nt, Artificial Sequence
  Description of Artificial Sequence: Synthetic oligonucleotide
ggaaucuauuugaaauuca

SEQ ID NO: 2453882 - RNA, 19 nt, Artificial Sequence
  Description of Artificial Sequence: Synthetic oligonucleotide
gggaaaucuaggucagauc

SEQ ID NO: 2453883 - RNA, 19 nt, Artificial Sequence
  Description of Artificial Sequence: Synthetic oligonucleotide
uggcaaggauuuguauaca

SEQ ID NO: 2453884 - RNA, 19 nt, Artificial Sequence
  Description of Artificial Sequence: Synthetic oligonucleotide
ucggaaacuuucagcucuu

SEQ ID NO: 2453885 - RNA, 19 nt, Artificial Sequence
  Description of Artificial Sequence: Synthetic oligonucleotide
ugaguccuucugugcggcc

SEQ ID NO: 2453886 - RNA, 19 nt, Artificial Sequence
  Description of Artificial Sequence: Synthetic oligonucleotide
ggcaaggauuuguauacaa

SEQ ID NO: 2453887 - RNA, 19 nt, Artificial Sequence
  Description of Artificial Sequence: Synthetic oligonucleotide
caugucaugugucuuggau

SEQ ID NO: 2453888 - RNA, 19 nt, Artificial Sequence
  Description of Artificial Sequence: Synthetic oligonucleotide
cagaagauuaucuccucau

SEQ ID NO: 2453889 - RNA, 19 nt, Artificial Sequence
  Description of Artificial Sequence: Synthetic oligonucleotide
cuuggaucuucacacaguu

SEQ ID NO: 2453890 - RNA, 19 nt, Artificial Sequence
  Description of Artificial Sequence: Synthetic oligonucleotide
ggucucucaagccugggua

SEQ ID NO: 2453891 - RNA, 19 nt, Artificial Sequence
  Description of Artificial Sequence: Synthetic oligonucleotide
uugaugggaccagaacuuu

SEQ ID NO: 2453892 - RNA, 19 nt, Artificial Sequence
  Description of Artificial Sequence: Synthetic oligonucleotide
cuuucagcucuuaaguauu

SEQ ID NO: 2453893 - RNA, 19 nt, Artificial Sequence
  Description of Artificial Sequence: Synthetic oligonucleotide
agagucccuggguaccuau

SEQ ID NO: 2453894 - RNA, 19 nt, Artificial Sequence
  Description of Artificial Sequence: Synthetic oligonucleotide
accgccgaaccaaauauuu

SEQ ID NO: 2453895 - RNA, 19 nt, Artificial Sequence
  Description of Artificial Sequence: Synthetic oligonucleotide
gggaccaucucauggucuc

SEQ ID NO: 2453896 - RNA, 19 nt, Artificial Sequence
  Description of Artificial Sequence: Synthetic oligonucleotide
gcagguauuucuucugaaa

SEQ ID NO: 2453897 - RNA, 19 nt, Artificial Sequence
  Description of Artificial Sequence: Synthetic oligonucleotide
cccuguuaauauugauggg

SEQ ID NO: 2453898 - RNA, 19 nt, Artificial Sequence
  Description of Artificial Sequence: Synthetic oligonucleotide
gugaguccuucugugcggc

SEQ ID NO: 2453899 - RNA, 19 nt, Artificial Sequence
  Description of Artificial Sequence: Synthetic oligonucleotide
ggguauccuuccaugcggg

SEQ ID NO: 2453900 - RNA, 19 nt, Artificial Sequence
  Description of Artificial Sequence: Synthetic oligonucleotide
aaagagccauugacuuaca

SEQ ID NO: 2453901 - RNA, 19 nt, Artificial Sequence
  Description of Artificial Sequence: Synthetic oligonucleotide
ggauuguaaugcuggaggu

SEQ ID NO: 2453902 - RNA, 19 nt, Artificial Sequence
  Description of Artificial Sequence: Synthetic oligonucleotide
uagggaaaucuaggucaga

SEQ ID NO: 2453903 - RNA, 19 nt, Artificial Sequence
  Description of Artificial Sequence: Synthetic oligonucleotide
cucuaauggcgguucgaaa

SEQ ID NO: 2453904 - RNA, 19 nt, Artificial Sequence
  Description of Artificial Sequence: Synthetic oligonucleotide
gcgguucgaaaccugguga

SEQ ID NO: 2453905 - RNA, 19 nt, Artificial Sequence
  Description of Artificial Sequence: Synthetic oligonucleotide
ccucaugccagaaugaaau

SEQ ID NO: 2453906 - RNA, 19 nt, Artificial Sequence
  Description of Artificial Sequence: Synthetic oligonucleotide
uggacacacaaugcucaua

SEQ ID NO: 2453907 - RNA, 19 nt, Artificial Sequence
  Description of Artificial Sequence: Synthetic oligonucleotide
auggucucucaagccuggg

SEQ ID NO: 2453908 - RNA, 19 nt, Artificial Sequence
  Description of Artificial Sequence: Synthetic oligonucleotide
gcaagagucccuggguacc

SEQ ID NO: 2453909 - RNA, 19 nt, Artificial Sequence
  Description of Artificial Sequence: Synthetic oligonucleotide
ugugcggccggggaccauc

SEQ ID NO: 2453910 - RNA, 19 nt, Artificial Sequence
  Description of Artificial Sequence: Synthetic oligonucleotide
cgggcaagcagccccauag

SEQ ID NO: 2453911 - RNA, 19 nt, Artificial Sequence
  Description of Artificial Sequence: Synthetic oligonucleotide
cagaucuugagcggcaugu

SEQ ID NO: 2453912 - RNA, 19 nt, Artificial Sequence
  Description of Artificial Sequence: Synthetic oligonucleotide
gccuggguauccuuccaug

SEQ ID NO: 2453913 - RNA, 19 nt, Artificial Sequence
  Description of Artificial Sequence: Synthetic oligonucleotide
caucuucgcacuccuggaa

SEQ ID NO: 2453914 - RNA, 19 nt, Artificial Sequence
  Description of Artificial Sequence: Synthetic oligonucleotide
acaccuggacucaauccaa

SEQ ID NO: 2453915 - RNA, 19 nt, Artificial Sequence
  Description of Artificial Sequence: Synthetic oligonucleotide
cgccgaaccaaauauuuca

SEQ ID NO: 2453916 - RNA, 19 nt, Artificial Sequence
  Description of Artificial Sequence: Synthetic oligonucleotide
gaaaucuaggucagaucuu

SEQ ID NO: 2453917 - RNA, 19 nt, Artificial Sequence
  Description of Artificial Sequence: Synthetic oligonucleotide
gcaucuucgcacuccugga

SEQ ID NO: 2453918 - RNA, 19 nt, Artificial Sequence
  Description of Artificial Sequence: Synthetic oligonucleotide
cgguucgaaaccuggugag

SEQ ID NO: 2453919 - RNA, 19 nt, Artificial Sequence
  Description of Artificial Sequence: Synthetic oligonucleotide
gaaugaaauugagcaggau

SEQ ID NO: 2453920 - RNA, 19 nt, Artificial Sequence
  Description of Artificial Sequence: Synthetic oligonucleotide
uccuuccaugcgggcaagc

SEQ ID NO: 2453921 - RNA, 19 nt, Artificial Sequence
  Description of Artificial Sequence: Synthetic oligonucleotide
uucgcacuccuggaaucuu

SEQ ID NO: 2453922 - RNA, 19 nt, Artificial Sequence
  Description of Artificial Sequence: Synthetic oligonucleotide
guggcaucuucgcacuccu

SEQ ID NO: 2453923 - RNA, 19 nt, Artificial Sequence
  Description of Artificial Sequence: Synthetic oligonucleotide
gagcggcaugucauguguc

SEQ ID NO: 2453924 - RNA, 19 nt, Artificial Sequence
  Description of Artificial Sequence: Synthetic oligonucleotide
caccuggacucaauccaaa

SEQ ID NO: 2453925 - RNA, 19 nt, Artificial Sequence
  Description of Artificial Sequence: Synthetic oligonucleotide
cacucuaauggcgguucga

SEQ ID NO: 2453926 - RNA, 19 nt, Artificial Sequence
  Description of Artificial Sequence: Synthetic oligonucleotide
caucccuguuaauauugau

SEQ ID NO: 2453927 - RNA, 19 nt, Artificial Sequence
  Description of Artificial Sequence: Synthetic oligonucleotide
ugccaccgccgaaccaaau

SEQ ID NO: 2453928 - RNA, 19 nt, Artificial Sequence
  Description of Artificial Sequence: Synthetic oligonucleotide
ccgccgaaccaaauauuuc

SEQ ID NO: 2453929 - RNA, 19 nt, Artificial Sequence
  Description of Artificial Sequence: Synthetic oligonucleotide
cuugagcggcaugucaugu

SEQ ID NO: 2453930 - RNA, 19 nt, Artificial Sequence
  Description of Artificial Sequence: Synthetic oligonucleotide
ggucagaucuugagcggca

SEQ ID NO: 2453931 - RNA, 19 nt, Artificial Sequence
  Description of Artificial Sequence: Synthetic oligonucleotide
ccauaguggcaucuucgca

SEQ ID NO: 2453932 - RNA, 19 nt, Artificial Sequence
  Description of Artificial Sequence: Synthetic oligonucleotide
guccuucugugcggccggg

SEQ ID NO: 2453933 - RNA, 19 nt, Artificial Sequence
  Description of Artificial Sequence: Synthetic oligonucleotide
cggcaugucaugugucuug

SEQ ID NO: 2453934 - RNA, 19 nt, Artificial Sequence
  Description of Artificial Sequence: Synthetic oligonucleotide
cacacaguuccaguccacu

SEQ ID NO: 2453935 - RNA, 19 nt, Artificial Sequence
  Description of Artificial Sequence: Synthetic oligonucleotide
gccccauaguggcaucuuc

SEQ ID NO: 2453936 - RNA, 19 nt, Artificial Sequence
  Description of Artificial Sequence: Synthetic oligonucleotide
cucaugccagaaugaaauu

SEQ ID NO: 2453937 - RNA, 19 nt, Artificial Sequence
  Description of Artificial Sequence: Synthetic oligonucleotide
gcggccggggaccaucuca

SEQ ID NO: 2453938 - RNA, 19 nt, Artificial Sequence
  Description of Artificial Sequence: Synthetic oligonucleotide
gggagaccuagggaaaucu

SEQ ID NO: 2453939 - RNA, 19 nt, Artificial Sequence
  Description of Artificial Sequence: Synthetic oligonucleotide
gcaaggauuuguauacaau

SEQ ID NO: 2453940 - RNA, 19 nt, Artificial Sequence
  Description of Artificial Sequence: Synthetic oligonucleotide
guagagugauaaaguggau

SEQ ID NO: 2453941 - RNA, 19 nt, Artificial Sequence
  Description of Artificial Sequence: Synthetic oligonucleotide
gugcuggcaaggauuugua

SEQ ID NO: 2453942 - RNA, 19 nt, Artificial Sequence
  Description of Artificial Sequence: Synthetic oligonucleotide
gccaccgccgaaccaaaua

SEQ ID NO: 2453943 - RNA, 19 nt, Artificial Sequence
  Description of Artificial Sequence: Synthetic oligonucleotide
augcgggcaagcagcccca

SEQ ID NO: 2453944 - RNA, 19 nt, Artificial Sequence
  Description of Artificial Sequence: Synthetic oligonucleotide
gcaugucaugugucuugga

SEQ ID NO: 2453945 - RNA, 19 nt, Artificial Sequence
  Description of Artificial Sequence: Synthetic oligonucleotide
guguuuguauuggucccau

SEQ ID NO: 2453946 - RNA, 19 nt, Artificial Sequence
  Description of Artificial Sequence: Synthetic oligonucleotide
ggagaccuagggaaaucua

SEQ ID NO: 2453947 - RNA, 19 nt, Artificial Sequence
  Description of Artificial Sequence: Synthetic oligonucleotide
ugcggccggggaccaucuc

SEQ ID NO: 2453948 - RNA, 19 nt, Artificial Sequence
  Description of Artificial Sequence: Synthetic oligonucleotide
agccccauaguggcaucuu

SEQ ID NO: 2453949 - RNA, 19 nt, Artificial Sequence
  Description of Artificial Sequence: Synthetic oligonucleotide
ggacucaauccaaaaucau

SEQ ID NO: 2453950 - RNA, 19 nt, Artificial Sequence
  Description of Artificial Sequence: Synthetic oligonucleotide
gguucgaaaccuggugagu

SEQ ID NO: 2453951 - RNA, 19 nt, Artificial Sequence
  Description of Artificial Sequence: Synthetic oligonucleotide
augccaccgccgaaccaaa

SEQ ID NO: 2453952 - RNA, 19 nt, Artificial Sequence
  Description of Artificial Sequence: Synthetic oligonucleotide
ggguaccuauugaaugaua

SEQ ID NO: 2453953 - RNA, 19 nt, Artificial Sequence
  Description of Artificial Sequence: Synthetic oligonucleotide
ccaccgccgaaccaaauau

SEQ ID NO: 2453954 - RNA, 19 nt, Artificial Sequence
  Description of Artificial Sequence: Synthetic oligonucleotide
gccgaaccaaauauuucau

SEQ ID NO: 2453955 - RNA, 19 nt, Artificial Sequence
  Description of Artificial Sequence: Synthetic oligonucleotide
ggccggggaccaucucaug

SEQ ID NO: 2453956 - RNA, 19 nt, Artificial Sequence
  Description of Artificial Sequence: Synthetic oligonucleotide
ugcgggcaagcagccccau

SEQ ID NO: 2453957 - RNA, 19 nt, Artificial Sequence
  Description of Artificial Sequence: Synthetic oligonucleotide
caccgccgaaccaaauauu

SEQ ID NO: 2453958 - RNA, 19 nt, Artificial Sequence
  Description of Artificial Sequence: Synthetic oligonucleotide
cccauugaauauucacaau

SEQ ID NO: 2453959 - RNA, 19 nt, Artificial Sequence
  Description of Artificial Sequence: Synthetic oligonucleotide
ggggaccaucucauggucu

SEQ ID NO: 2453960 - RNA, 19 nt, Artificial Sequence
  Description of Artificial Sequence: Synthetic oligonucleotide
ccgaaccaaauauuucauu

SEQ ID NO: 2453961 - RNA, 19 nt, Artificial Sequence
  Description of Artificial Sequence: Synthetic oligonucleotide
ccggggaccaucucauggu

SEQ ID NO: 2453962 - RNA, 19 nt, Artificial Sequence
  Description of Artificial Sequence: Synthetic oligonucleotide
ccaugcgggcaagcagccc

SEQ ID NO: 2453963 - RNA, 19 nt, Artificial Sequence
  Description of Artificial Sequence: Synthetic oligonucleotide
ccacugguagagugauaaa

SEQ ID NO: 2453964 - RNA, 19 nt, Artificial Sequence
  Description of Artificial Sequence: Synthetic oligonucleotide
gagucccuggguaccuauu

SEQ ID NO: 2453965 - RNA, 19 nt, Artificial Sequence
  Description of Artificial Sequence: Synthetic oligonucleotide
guccacugguagagugaua

SEQ ID NO: 2453966 - RNA, 19 nt, Artificial Sequence
  Description of Artificial Sequence: Synthetic oligonucleotide
ggaccaucucauggucucu

SEQ ID NO: 2453967 - RNA, 19 nt, Artificial Sequence
  Description of Artificial Sequence: Synthetic oligonucleotide
gucaugugucuuggaucuu

SEQ ID NO: 2453968 - RNA, 19 nt, Artificial Sequence
  Description of Artificial Sequence: Synthetic oligonucleotide
gugcggccggggaccaucu

SEQ ID NO: 2453969 - RNA, 19 nt, Artificial Sequence
  Description of Artificial Sequence: Synthetic oligonucleotide
gcgggcaagcagccccaua

SEQ ID NO: 2453970 - RNA, 19 nt, Artificial Sequence
  Description of Artificial Sequence: Synthetic oligonucleotide
cgaugccaccgccgaacca

SEQ ID NO: 2453971 - RNA, 19 nt, Artificial Sequence
  Description of Artificial Sequence: Synthetic oligonucleotide
gcggcaugucaugugucuu

SEQ ID NO: 2453972 - RNA, 19 nt, Artificial Sequence
  Description of Artificial Sequence: Synthetic oligonucleotide
ccagaacuuuugacacgau

SEQ ID NO: 2453973 - RNA, 19 nt, Artificial Sequence
  Description of Artificial Sequence: Synthetic oligonucleotide
cggccggggaccaucucau

SEQ ID NO: 2453974 - RNA, 19 nt, Artificial Sequence
  Description of Artificial Sequence: Synthetic oligonucleotide
cugugcggccggggaccau

SEQ ID NO: 2453975 - RNA, 19 nt, Artificial Sequence
  Description of Artificial Sequence: Synthetic oligonucleotide
cuuaguaugaaauuuuccg

SEQ ID NO: 2453976 - RNA, 19 nt, Artificial Sequence
  Description of Artificial Sequence: Synthetic oligonucleotide
augagcacaaaguugaagc

SEQ ID NO: 2453977 - RNA, 19 nt, Artificial Sequence
  Description of Artificial Sequence: Synthetic oligonucleotide
uguaagaccagaaaaggug

SEQ ID NO: 2453978 - RNA, 19 nt, Artificial Sequence
  Description of Artificial Sequence: Synthetic oligonucleotide
aaaagguguaugucagucc

SEQ ID NO: 2453979 - RNA, 19 nt, Artificial Sequence
  Description of Artificial Sequence: Synthetic oligonucleotide
uuuccgaaaagucaaguug

SEQ ID NO: 2453980 - RNA, 19 nt, Artificial Sequence
  Description of Artificial Sequence: Synthetic oligonucleotide
cauuuuauuucuuaguaug

SEQ ID NO: 2453981 - RNA, 19 nt, Artificial Sequence
  Description of Artificial Sequence: Synthetic oligonucleotide
uuauuucuuaguaugaaau

SEQ ID NO: 2453982 - RNA, 19 nt, Artificial Sequence
  Description of Artificial Sequence: Synthetic oligonucleotide
uaaaauacuccacuucuug

SEQ ID NO: 2453983 - RNA, 19 nt, Artificial Sequence
  Description of Artificial Sequence: Synthetic oligonucleotide
aacaggacgguguaaucac

SEQ ID NO: 2453984 - RNA, 19 nt, Artificial Sequence
  Description of Artificial Sequence: Synthetic oligonucleotide
aaagguguaugucagucca

SEQ ID NO: 2453985 - RNA, 19 nt, Artificial Sequence
  Description of Artificial Sequence: Synthetic oligonucleotide
uuaguaugaaauuuuccga

SEQ ID NO: 2453986 - RNA, 19 nt, Artificial Sequence
  Description of Artificial Sequence: Synthetic oligonucleotide
gagacugugguaccaaugg

SEQ ID NO: 2453987 - RNA, 19 nt, Artificial Sequence
  Description of Artificial Sequence: Synthetic oligonucleotide
uguaaucacaauucagacc

SEQ ID NO: 2453988 - RNA, 19 nt, Artificial Sequence
  Description of Artificial Sequence: Synthetic oligonucleotide
guaaucacaauucagaccu

SEQ ID NO: 2453989 - RNA, 19 nt, Artificial Sequence
  Description of Artificial Sequence: Synthetic oligonucleotide
ucacaauucagaccuugcg

SEQ ID NO: 2453990 - RNA, 19 nt, Artificial Sequence
  Description of Artificial Sequence: Synthetic oligonucleotide
ucgaacacgcuccagaacu

SEQ ID NO: 2453991 - RNA, 19 nt, Artificial Sequence
  Description of Artificial Sequence: Synthetic oligonucleotide
ugucaguccagcaucuccg

SEQ ID NO: 2453992 - RNA, 19 nt, Artificial Sequence
  Description of Artificial Sequence: Synthetic oligonucleotide
uguuaaugagcacaaaguu

SEQ ID NO: 2453993 - RNA, 19 nt, Artificial Sequence
  Description of Artificial Sequence: Synthetic oligonucleotide
uuccgaaaagucaaguuga

SEQ ID NO: 2453994 - RNA, 19 nt, Artificial Sequence
  Description of Artificial Sequence: Synthetic oligonucleotide
uucaccaggaaccugucca

SEQ ID NO: 2453995 - RNA, 19 nt, Artificial Sequence
  Description of Artificial Sequence: Synthetic oligonucleotide
gaugcgaugggacucccgg

SEQ ID NO: 2453996 - RNA, 19 nt, Artificial Sequence
  Description of Artificial Sequence: Synthetic oligonucleotide
uuuauuucuuaguaugaaa

SEQ ID NO: 2453997 - RNA, 19 nt, Artificial Sequence
  Description of Artificial Sequence: Synthetic oligonucleotide
acaauucagaccuugcgca

SEQ ID NO: 2453998 - RNA, 19 nt, Artificial Sequence
  Description of Artificial Sequence: Synthetic oligonucleotide
ucggcuuugccaaacagga

SEQ ID NO: 2453999 - RNA, 19 nt, Artificial Sequence
  Description of Artificial Sequence: Synthetic oligonucleotide
uaccaaugggcguuggugg

SEQ ID NO: 2454000 - RNA, 19 nt, Artificial Sequence
  Description of Artificial Sequence: Synthetic oligonucleotide
uccacugucugccugggcc

SEQ ID NO: 2454001 - RNA, 19 nt, Artificial Sequence
  Description of Artificial Sequence: Synthetic oligonucleotide
uaguaugaaauuuuccgaa

SEQ ID NO: 2454002 - RNA, 19 nt, Artificial Sequence
  Description of Artificial Sequence: Synthetic oligonucleotide
gucgcaaccaucuuuguac

SEQ ID NO: 2454003 - RNA, 19 nt, Artificial Sequence
  Description of Artificial Sequence: Synthetic oligonucleotide
ucgaucucgaacacgcucc

SEQ ID NO: 2454004 - RNA, 19 nt, Artificial Sequence
  Description of Artificial Sequence: Synthetic oligonucleotide
ucuuugugccggaagagga

SEQ ID NO: 2454005 - RNA, 19 nt, Artificial Sequence
  Description of Artificial Sequence: Synthetic oligonucleotide
auacuccacuucuugcucc

SEQ ID NO: 2454006 - RNA, 19 nt, Artificial Sequence
  Description of Artificial Sequence: Synthetic oligonucleotide
uuuggcgucaguguaagac

SEQ ID NO: 2454007 - RNA, 19 nt, Artificial Sequence
  Description of Artificial Sequence: Synthetic oligonucleotide
aaugagcacaaaguugaag

SEQ ID NO: 2454008 - RNA, 19 nt, Artificial Sequence
  Description of Artificial Sequence: Synthetic oligonucleotide
uccaacucucggaagaucu

SEQ ID NO: 2454009 - RNA, 19 nt, Artificial Sequence
  Description of Artificial Sequence: Synthetic oligonucleotide
cacaauucagaccuugcgc

SEQ ID NO: 2454010 - RNA, 19 nt, Artificial Sequence
  Description of Artificial Sequence: Synthetic oligonucleotide
ucaucaguaggcuuccgug

SEQ ID NO: 2454011 - RNA, 19 nt, Artificial Sequence
  Description of Artificial Sequence: Synthetic oligonucleotide
aggaagucucugcaggccc

SEQ ID NO: 2454012 - RNA, 19 nt, Artificial Sequence
  Description of Artificial Sequence: Synthetic oligonucleotide
cagugcaccgguaaaauac

SEQ ID NO: 2454013 - RNA, 19 nt, Artificial Sequence
  Description of Artificial Sequence: Synthetic oligonucleotide
uucuuaguaugaaauuuuc

SEQ ID NO: 2454014 - RNA, 19 nt, Artificial Sequence
  Description of Artificial Sequence: Synthetic oligonucleotide
ucaaguugacccgaggagc

SEQ ID NO: 2454015 - RNA, 19 nt, Artificial Sequence
  Description of Artificial Sequence: Synthetic oligonucleotide
ugcgaugggacucccgggg

SEQ ID NO: 2454016 - RNA, 19 nt, Artificial Sequence
  Description of Artificial Sequence: Synthetic oligonucleotide
ugcaccgguaaaauacucc

SEQ ID NO: 2454017 - RNA, 19 nt, Artificial Sequence
  Description of Artificial Sequence: Synthetic oligonucleotide
gaagaggaagucucugcag

SEQ ID NO: 2454018 - RNA, 19 nt, Artificial Sequence
  Description of Artificial Sequence: Synthetic oligonucleotide
aggaccuucuugcggaugg

SEQ ID NO: 2454019 - RNA, 19 nt, Artificial Sequence
  Description of Artificial Sequence: Synthetic oligonucleotide
uauuucuuaguaugaaauu

SEQ ID NO: 2454020 - RNA, 19 nt, Artificial Sequence
  Description of Artificial Sequence: Synthetic oligonucleotide
gacucgaucucgaacacgc

SEQ ID NO: 2454021 - RNA, 19 nt, Artificial Sequence
  Description of Artificial Sequence: Synthetic oligonucleotide
gacccgaggagccaggacc

SEQ ID NO: 2454022 - RNA, 19 nt, Artificial Sequence
  Description of Artificial Sequence: Synthetic oligonucleotide
ucucggaagaucucgucug

SEQ ID NO: 2454023 - RNA, 19 nt, Artificial Sequence
  Description of Artificial Sequence: Synthetic oligonucleotide
caucaguaggcuuccgugg

SEQ ID NO: 2454024 - RNA, 19 nt, Artificial Sequence
  Description of Artificial Sequence: Synthetic oligonucleotide
aacgcugugccacuuucca

SEQ ID NO: 2454025 - RNA, 19 nt, Artificial Sequence
  Description of Artificial Sequence: Synthetic oligonucleotide
accgguaaaauacuccacu

SEQ ID NO: 2454026 - RNA, 19 nt, Artificial Sequence
  Description of Artificial Sequence: Synthetic oligonucleotide
gauggggagacugugguac

SEQ ID NO: 2454027 - RNA, 19 nt, Artificial Sequence
  Description of Artificial Sequence: Synthetic oligonucleotide
cucggcuuugccaaacagg

SEQ ID NO: 2454028 - RNA, 19 nt, Artificial Sequence
  Description of Artificial Sequence: Synthetic oligonucleotide
caaguugacccgaggagcc

SEQ ID NO: 2454029 - RNA, 19 nt, Artificial Sequence
  Description of Artificial Sequence: Synthetic oligonucleotide
acuuuccaaacaccuggac

SEQ ID NO: 2454030 - RNA, 19 nt, Artificial Sequence
  Description of Artificial Sequence: Synthetic oligonucleotide
aaaagucaaguugacccga

SEQ ID NO: 2454031 - RNA, 19 nt, Artificial Sequence
  Description of Artificial Sequence: Synthetic oligonucleotide
ugccacuuuccaaacaccu

SEQ ID NO: 2454032 - RNA, 19 nt, Artificial Sequence
  Description of Artificial Sequence: Synthetic oligonucleotide
uuggcgucaguguaagacc

SEQ ID NO: 2454033 - RNA, 19 nt, Artificial Sequence
  Description of Artificial Sequence: Synthetic oligonucleotide
acugugguaccaaugggcg

SEQ ID NO: 2454034 - RNA, 19 nt, Artificial Sequence
  Description of Artificial Sequence: Synthetic oligonucleotide
ucgagagucuuugugccgg

SEQ ID NO: 2454035 - RNA, 19 nt, Artificial Sequence
  Description of Artificial Sequence: Synthetic oligonucleotide
gaaccuguccaucccgccg

SEQ ID NO: 2454036 - RNA, 19 nt, Artificial Sequence
  Description of Artificial Sequence: Synthetic oligonucleotide
uugccaaacaggacggugu

SEQ ID NO: 2454037 - RNA, 19 nt, Artificial Sequence
  Description of Artificial Sequence: Synthetic oligonucleotide
gacgguguaaucacaauuc

SEQ ID NO: 2454038 - RNA, 19 nt, Artificial Sequence
  Description of Artificial Sequence: Synthetic oligonucleotide
aauuuuccgaaaagucaag

SEQ ID NO: 2454039 - RNA, 19 nt, Artificial Sequence
  Description of Artificial Sequence: Synthetic oligonucleotide
gacugugguaccaaugggc

SEQ ID NO: 2454040 - RNA, 19 nt, Artificial Sequence
  Description of Artificial Sequence: Synthetic oligonucleotide
uuuuccgaaaagucaaguu

SEQ ID NO: 2454041 - RNA, 19 nt, Artificial Sequence
  Description of Artificial Sequence: Synthetic oligonucleotide
ucuugcuccaacucucgga

SEQ ID NO: 2454042 - RNA, 19 nt, Artificial Sequence
  Description of Artificial Sequence: Synthetic oligonucleotide
uuugugccggaagaggaag

SEQ ID NO: 2454043 - RNA, 19 nt, Artificial Sequence
  Description of Artificial Sequence: Synthetic oligonucleotide
aucacaauucagaccuugc

SEQ ID NO: 2454044 - RNA, 19 nt, Artificial Sequence
  Description of Artificial Sequence: Synthetic oligonucleotide
aucaucucugugcuccccg

SEQ ID NO: 2454045 - RNA, 19 nt, Artificial Sequence
  Description of Artificial Sequence: Synthetic oligonucleotide
uuugccaaacaggacggug

SEQ ID NO: 2454046 - RNA, 19 nt, Artificial Sequence
  Description of Artificial Sequence: Synthetic oligonucleotide
ggagccaggaccuucuugc

SEQ ID NO: 2454047 - RNA, 19 nt, Artificial Sequence
  Description of Artificial Sequence: Synthetic oligonucleotide
ccuguuaaugagcacaaag

SEQ ID NO: 2454048 - RNA, 19 nt, Artificial Sequence
  Description of Artificial Sequence: Synthetic oligonucleotide
aguccagcaucuccguagg

SEQ ID NO: 2454049 - RNA, 19 nt, Artificial Sequence
  Description of Artificial Sequence: Synthetic oligonucleotide
gaauccagggcuuuggcgu

SEQ ID NO: 2454050 - RNA, 19 nt, Artificial Sequence
  Description of Artificial Sequence: Synthetic oligonucleotide
acagaugcgaugggacucc

SEQ ID NO: 2454051 - RNA, 19 nt, Artificial Sequence
  Description of Artificial Sequence: Synthetic oligonucleotide
caguccagcaucuccguag

SEQ ID NO: 2454052 - RNA, 19 nt, Artificial Sequence
  Description of Artificial Sequence: Synthetic oligonucleotide
gguguaaucacaauucaga

SEQ ID NO: 2454053 - RNA, 19 nt, Artificial Sequence
  Description of Artificial Sequence: Synthetic oligonucleotide
uggcgucaguguaagacca

SEQ ID NO: 2454054 - RNA, 19 nt, Artificial Sequence
  Description of Artificial Sequence: Synthetic oligonucleotide
guaccuguuaaugagcaca

SEQ ID NO: 2454055 - RNA, 19 nt, Artificial Sequence
  Description of Artificial Sequence: Synthetic oligonucleotide
accaaugggcguugguggg

SEQ ID NO: 2454056 - RNA, 19 nt, Artificial Sequence
  Description of Artificial Sequence: Synthetic oligonucleotide
uccaguuggggcucggcug

SEQ ID NO: 2454057 - RNA, 19 nt, Artificial Sequence
  Description of Artificial Sequence: Synthetic oligonucleotide
gguaaaauacuccacuucu

SEQ ID NO: 2454058 - RNA, 19 nt, Artificial Sequence
  Description of Artificial Sequence: Synthetic oligonucleotide
ccacuuuccaaacaccugg

SEQ ID NO: 2454059 - RNA, 19 nt, Artificial Sequence
  Description of Artificial Sequence: Synthetic oligonucleotide
agaccuugcgcacggaggu

SEQ ID NO: 2454060 - RNA, 19 nt, Artificial Sequence
  Description of Artificial Sequence: Synthetic oligonucleotide
uguggucgcaaccaucuuu

SEQ ID NO: 2454061 - RNA, 19 nt, Artificial Sequence
  Description of Artificial Sequence: Synthetic oligonucleotide
uaccuguuaaugagcacaa

SEQ ID NO: 2454062 - RNA, 19 nt, Artificial Sequence
  Description of Artificial Sequence: Synthetic oligonucleotide
uccgaaaagucaaguugac

SEQ ID NO: 2454063 - RNA, 19 nt, Artificial Sequence
  Description of Artificial Sequence: Synthetic oligonucleotide
aagaucucgucugccucgg

SEQ ID NO: 2454064 - RNA, 19 nt, Artificial Sequence
  Description of Artificial Sequence: Synthetic oligonucleotide
ucccucgagagucuuugug

SEQ ID NO: 2454065 - RNA, 19 nt, Artificial Sequence
  Description of Artificial Sequence: Synthetic oligonucleotide
aucaucaguaggcuuccgu

SEQ ID NO: 2454066 - RNA, 19 nt, Artificial Sequence
  Description of Artificial Sequence: Synthetic oligonucleotide
acgguguaaucacaauuca

SEQ ID NO: 2454067 - RNA, 19 nt, Artificial Sequence
  Description of Artificial Sequence: Synthetic oligonucleotide
ggaauccagggcuuuggcg

SEQ ID NO: 2454068 - RNA, 19 nt, Artificial Sequence
  Description of Artificial Sequence: Synthetic oligonucleotide
ugccggaagaggaagucuc

SEQ ID NO: 2454069 - RNA, 19 nt, Artificial Sequence
  Description of Artificial Sequence: Synthetic oligonucleotide
auggggagacugugguacc

SEQ ID NO: 2454070 - RNA, 19 nt, Artificial Sequence
  Description of Artificial Sequence: Synthetic oligonucleotide
guaccaaugggcguuggug

SEQ ID NO: 2454071 - RNA, 19 nt, Artificial Sequence
  Description of Artificial Sequence: Synthetic oligonucleotide
ucgcaaccaucuuuguacc

SEQ ID NO: 2454072 - RNA, 19 nt, Artificial Sequence
  Description of Artificial Sequence: Synthetic oligonucleotide
aagaccagaaaagguguau

SEQ ID NO: 2454073 - RNA, 19 nt, Artificial Sequence
  Description of Artificial Sequence: Synthetic oligonucleotide
ggugguucaucaucaguag

SEQ ID NO: 2454074 - RNA, 19 nt, Artificial Sequence
  Description of Artificial Sequence: Synthetic oligonucleotide
gaacacgcuccagaacugg

SEQ ID NO: 2454075 - RNA, 19 nt, Artificial Sequence
  Description of Artificial Sequence: Synthetic oligonucleotide
uccgaggucgcccgggucu

SEQ ID NO: 2454076 - RNA, 19 nt, Artificial Sequence
  Description of Artificial Sequence: Synthetic oligonucleotide
acgcuccagaacuggaauc

SEQ ID NO: 2454077 - RNA, 19 nt, Artificial Sequence
  Description of Artificial Sequence: Synthetic oligonucleotide
ccagcaucuccguaggucg

SEQ ID NO: 2454078 - RNA, 19 nt, Artificial Sequence
  Description of Artificial Sequence: Synthetic oligonucleotide
uaagaccagaaaaggugua

SEQ ID NO: 2454079 - RNA, 19 nt, Artificial Sequence
  Description of Artificial Sequence: Synthetic oligonucleotide
ugugguaccaaugggcguu

SEQ ID NO: 2454080 - RNA, 19 nt, Artificial Sequence
  Description of Artificial Sequence: Synthetic oligonucleotide
cucgaucucgaacacgcuc

SEQ ID NO: 2454081 - RNA, 19 nt, Artificial Sequence
  Description of Artificial Sequence: Synthetic oligonucleotide
uguaccuguuaaugagcac

SEQ ID NO: 2454082 - RNA, 19 nt, Artificial Sequence
  Description of Artificial Sequence: Synthetic oligonucleotide
cucgagagucuuugugccg

SEQ ID NO: 2454083 - RNA, 19 nt, Artificial Sequence
  Description of Artificial Sequence: Synthetic oligonucleotide
cuugcggauggggagacug

SEQ ID NO: 2454084 - RNA, 19 nt, Artificial Sequence
  Description of Artificial Sequence: Synthetic oligonucleotide
gagcacaaaguugaagcuc

SEQ ID NO: 2454085 - RNA, 19 nt, Artificial Sequence
  Description of Artificial Sequence: Synthetic oligonucleotide
guggucgcaaccaucuuug

SEQ ID NO: 2454086 - RNA, 19 nt, Artificial Sequence
  Description of Artificial Sequence: Synthetic oligonucleotide
agucuuugugccggaagag

SEQ ID NO: 2454087 - RNA, 19 nt, Artificial Sequence
  Description of Artificial Sequence: Synthetic oligonucleotide
aggaaccuguccaucccgc

SEQ ID NO: 2454088 - RNA, 19 nt, Artificial Sequence
  Description of Artificial Sequence: Synthetic oligonucleotide
gauguggucgcaaccaucu

SEQ ID NO: 2454089 - RNA, 19 nt, Artificial Sequence
  Description of Artificial Sequence: Synthetic oligonucleotide
caggaaccuguccaucccg

SEQ ID NO: 2454090 - RNA, 19 nt, Artificial Sequence
  Description of Artificial Sequence: Synthetic oligonucleotide
gucaguguaagaccagaaa

SEQ ID NO: 2454091 - RNA, 19 nt, Artificial Sequence
  Description of Artificial Sequence: Synthetic oligonucleotide
ccagaaaagguguauguca

SEQ ID NO: 2454092 - RNA, 19 nt, Artificial Sequence
  Description of Artificial Sequence: Synthetic oligonucleotide
cuugcuccaacucucggaa

SEQ ID NO: 2454093 - RNA, 19 nt, Artificial Sequence
  Description of Artificial Sequence: Synthetic oligonucleotide
ggaagaggaagucucugca

SEQ ID NO: 2454094 - RNA, 19 nt, Artificial Sequence
  Description of Artificial Sequence: Synthetic oligonucleotide
gaccuucuugcggaugggg

SEQ ID NO: 2454095 - RNA, 19 nt, Artificial Sequence
  Description of Artificial Sequence: Synthetic oligonucleotide
agacucgaucucgaacacg

SEQ ID NO: 2454096 - RNA, 19 nt, Artificial Sequence
  Description of Artificial Sequence: Synthetic oligonucleotide
uugugccggaagaggaagu

SEQ ID NO: 2454097 - RNA, 19 nt, Artificial Sequence
  Description of Artificial Sequence: Synthetic oligonucleotide
cuucaccaggaaccugucc

SEQ ID NO: 2454098 - RNA, 19 nt, Artificial Sequence
  Description of Artificial Sequence: Synthetic oligonucleotide
ugccaaacaggacggugua

SEQ ID NO: 2454099 - RNA, 19 nt, Artificial Sequence
  Description of Artificial Sequence: Synthetic oligonucleotide
aguugacccgaggagccag

SEQ ID NO: 2454100 - RNA, 19 nt, Artificial Sequence
  Description of Artificial Sequence: Synthetic oligonucleotide
aacucucggaagaucucgu

SEQ ID NO: 2454101 - RNA, 19 nt, Artificial Sequence
  Description of Artificial Sequence: Synthetic oligonucleotide
caccgguaaaauacuccac

SEQ ID NO: 2454102 - RNA, 19 nt, Artificial Sequence
  Description of Artificial Sequence: Synthetic oligonucleotide
ugcuuccugggaacgcugu

SEQ ID NO: 2454103 - RNA, 19 nt, Artificial Sequence
  Description of Artificial Sequence: Synthetic oligonucleotide
uccguaggucgccugcuuc

SEQ ID NO: 2454104 - RNA, 19 nt, Artificial Sequence
  Description of Artificial Sequence: Synthetic oligonucleotide
ugcaggccccaaaggagac

SEQ ID NO: 2454105 - RNA, 19 nt, Artificial Sequence
  Description of Artificial Sequence: Synthetic oligonucleotide
ccucgagagucuuugugcc

SEQ ID NO: 2454106 - RNA, 19 nt, Artificial Sequence
  Description of Artificial Sequence: Synthetic oligonucleotide
agugcaccgguaaaauacu

SEQ ID NO: 2454107 - RNA, 19 nt, Artificial Sequence
  Description of Artificial Sequence: Synthetic oligonucleotide
cucccgacggggcugacuc

SEQ ID NO: 2454108 - RNA, 19 nt, Artificial Sequence
  Description of Artificial Sequence: Synthetic oligonucleotide
caaacaccuggaccuuggc

SEQ ID NO: 2454109 - RNA, 19 nt, Artificial Sequence
  Description of Artificial Sequence: Synthetic oligonucleotide
gcaccgguaaaauacucca

SEQ ID NO: 2454110 - RNA, 19 nt, Artificial Sequence
  Description of Artificial Sequence: Synthetic oligonucleotide
cccucgagagucuuugugc

SEQ ID NO: 2454111 - RNA, 19 nt, Artificial Sequence
  Description of Artificial Sequence: Synthetic oligonucleotide
ugcggauggggagacugug

SEQ ID NO: 2454112 - RNA, 19 nt, Artificial Sequence
  Description of Artificial Sequence: Synthetic oligonucleotide
agaucucgucugccucggc

SEQ ID NO: 2454113 - RNA, 19 nt, Artificial Sequence
  Description of Artificial Sequence: Synthetic oligonucleotide
uccaaacaccuggaccuug

SEQ ID NO: 2454114 - RNA, 19 nt, Artificial Sequence
  Description of Artificial Sequence: Synthetic oligonucleotide
aacacgcuccagaacugga

SEQ ID NO: 2454115 - RNA, 19 nt, Artificial Sequence
  Description of Artificial Sequence: Synthetic oligonucleotide
ugugccggaagaggaaguc

SEQ ID NO: 2454116 - RNA, 19 nt, Artificial Sequence
  Description of Artificial Sequence: Synthetic oligonucleotide
uggggugguucaucaucag

SEQ ID NO: 2454117 - RNA, 19 nt, Artificial Sequence
  Description of Artificial Sequence: Synthetic oligonucleotide
uccgugggccagcugcagc

SEQ ID NO: 2454118 - RNA, 19 nt, Artificial Sequence
  Description of Artificial Sequence: Synthetic oligonucleotide
gcaaccaucuuuguaccug

SEQ ID NO: 2454119 - RNA, 19 nt, Artificial Sequence
  Description of Artificial Sequence: Synthetic oligonucleotide
gaacgcugugccacuuucc

SEQ ID NO: 2454120 - RNA, 19 nt, Artificial Sequence
  Description of Artificial Sequence: Synthetic oligonucleotide
aguugaagcucugcccugu

SEQ ID NO: 2454121 - RNA, 19 nt, Artificial Sequence
  Description of Artificial Sequence: Synthetic oligonucleotide
cugacuaccuccacugucu

SEQ ID NO: 2454122 - RNA, 19 nt, Artificial Sequence
  Description of Artificial Sequence: Synthetic oligonucleotide
cucgaacacgcuccagaac

SEQ ID NO: 2454123 - RNA, 19 nt, Artificial Sequence
  Description of Artificial Sequence: Synthetic oligonucleotide
aaugggcguugguggggug

SEQ ID NO: 2454124 - RNA, 19 nt, Artificial Sequence
  Description of Artificial Sequence: Synthetic oligonucleotide
aucucgucugccucggcuu

SEQ ID NO: 2454125 - RNA, 19 nt, Artificial Sequence
  Description of Artificial Sequence: Synthetic oligonucleotide
uugcggauggggagacugu

SEQ ID NO: 2454126 - RNA, 19 nt, Artificial Sequence
  Description of Artificial Sequence: Synthetic oligonucleotide
gacggggcugacuccuccc

SEQ ID NO: 2454127 - RNA, 19 nt, Artificial Sequence
  Description of Artificial Sequence: Synthetic oligonucleotide
cagacucgaucucgaacac

SEQ ID NO: 2454128 - RNA, 19 nt, Artificial Sequence
  Description of Artificial Sequence: Synthetic oligonucleotide
cugucacccugcagacucg

SEQ ID NO: 2454129 - RNA, 19 nt, Artificial Sequence
  Description of Artificial Sequence: Synthetic oligonucleotide
caguucucuuucaucaucu

SEQ ID NO: 2454130 - RNA, 19 nt, Artificial Sequence
  Description of Artificial Sequence: Synthetic oligonucleotide
ucaguccagcaucuccgua

SEQ ID NO: 2454131 - RNA, 19 nt, Artificial Sequence
  Description of Artificial Sequence: Synthetic oligonucleotide
aguaggcuuccgugggcca

SEQ ID NO: 2454132 - RNA, 19 nt, Artificial Sequence
  Description of Artificial Sequence: Synthetic oligonucleotide
accuuggccagugcaccgg

SEQ ID NO: 2454133 - RNA, 19 nt, Artificial Sequence
  Description of Artificial Sequence: Synthetic oligonucleotide
ugacccgaggagccaggac

SEQ ID NO: 2454134 - RNA, 19 nt, Artificial Sequence
  Description of Artificial Sequence: Synthetic oligonucleotide
uccccgauguggucgcaac

SEQ ID NO: 2454135 - RNA, 19 nt, Artificial Sequence
  Description of Artificial Sequence: Synthetic oligonucleotide
ugcuccccgauguggucgc

SEQ ID NO: 2454136 - RNA, 19 nt, Artificial Sequence
  Description of Artificial Sequence: Synthetic oligonucleotide
cuuugugccggaagaggaa

SEQ ID NO: 2454137 - RNA, 19 nt, Artificial Sequence
  Description of Artificial Sequence: Synthetic oligonucleotide
guguaugucaguccagcau

SEQ ID NO: 2454138 - RNA, 19 nt, Artificial Sequence
  Description of Artificial Sequence: Synthetic oligonucleotide
ucgccugcuuccugggaac

SEQ ID NO: 2454139 - RNA, 19 nt, Artificial Sequence
  Description of Artificial Sequence: Synthetic oligonucleotide
gaucucgaacacgcuccag

SEQ ID NO: 2454140 - RNA, 19 nt, Artificial Sequence
  Description of Artificial Sequence: Synthetic oligonucleotide
cccaaaggagacagaugcg

SEQ ID NO: 2454141 - RNA, 19 nt, Artificial Sequence
  Description of Artificial Sequence: Synthetic oligonucleotide
ggagacugugguaccaaug

SEQ ID NO: 2454142 - RNA, 19 nt, Artificial Sequence
  Description of Artificial Sequence: Synthetic oligonucleotide
guguaagaccagaaaaggu

SEQ ID NO: 2454143 - RNA, 19 nt, Artificial Sequence
  Description of Artificial Sequence: Synthetic oligonucleotide
caggacgguguaaucacaa

SEQ ID NO: 2454144 - RNA, 19 nt, Artificial Sequence
  Description of Artificial Sequence: Synthetic oligonucleotide
uggggagacugugguacca

SEQ ID NO: 2454145 - RNA, 19 nt, Artificial Sequence
  Description of Artificial Sequence: Synthetic oligonucleotide
cuggaccuuggccagugca

SEQ ID NO: 2454146 - RNA, 19 nt, Artificial Sequence
  Description of Artificial Sequence: Synthetic oligonucleotide
uggccagugcaccgguaaa

SEQ ID NO: 2454147 - RNA, 19 nt, Artificial Sequence
  Description of Artificial Sequence: Synthetic oligonucleotide
gguguaugucaguccagca

SEQ ID NO: 2454148 - RNA, 19 nt, Artificial Sequence
  Description of Artificial Sequence: Synthetic oligonucleotide
uaugucaguccagcaucuc

SEQ ID NO: 2454149 - RNA, 19 nt, Artificial Sequence
  Description of Artificial Sequence: Synthetic oligonucleotide
ugucacccugcagacucga

SEQ ID NO: 2454150 - RNA, 19 nt, Artificial Sequence
  Description of Artificial Sequence: Synthetic oligonucleotide
gacuccuccccucccgcuc

SEQ ID NO: 2454151 - RNA, 19 nt, Artificial Sequence
  Description of Artificial Sequence: Synthetic oligonucleotide
guugacccgaggagccagg

SEQ ID NO: 2454152 - RNA, 19 nt, Artificial Sequence
  Description of Artificial Sequence: Synthetic oligonucleotide
ggaaccuguccaucccgcc

SEQ ID NO: 2454153 - RNA, 19 nt, Artificial Sequence
  Description of Artificial Sequence: Synthetic oligonucleotide
ugcgcacggaggugccucc

SEQ ID NO: 2454154 - RNA, 19 nt, Artificial Sequence
  Description of Artificial Sequence: Synthetic oligonucleotide
gaggugccuccaguugggg

SEQ ID NO: 2454155 - RNA, 19 nt, Artificial Sequence
  Description of Artificial Sequence: Synthetic oligonucleotide
ucuucccucgagagucuuu

SEQ ID NO: 2454156 - RNA, 19 nt, Artificial Sequence
  Description of Artificial Sequence: Synthetic oligonucleotide
cugcuuccugggaacgcug

SEQ ID NO: 2454157 - RNA, 19 nt, Artificial Sequence
  Description of Artificial Sequence: Synthetic oligonucleotide
gcuuuggcgucaguguaag

SEQ ID NO: 2454158 - RNA, 19 nt, Artificial Sequence
  Description of Artificial Sequence: Synthetic oligonucleotide
cgguguaaucacaauucag

SEQ ID NO: 2454159 - RNA, 19 nt, Artificial Sequence
  Description of Artificial Sequence: Synthetic oligonucleotide
ugguaccaaugggcguugg

SEQ ID NO: 2454160 - RNA, 19 nt, Artificial Sequence
  Description of Artificial Sequence: Synthetic oligonucleotide
ugacuccuccccucccgcu

SEQ ID NO: 2454161 - RNA, 19 nt, Artificial Sequence
  Description of Artificial Sequence: Synthetic oligonucleotide
ucuccguaggucgccugcu

SEQ ID NO: 2454162 - RNA, 19 nt, Artificial Sequence
  Description of Artificial Sequence: Synthetic oligonucleotide
agaugcgaugggacucccg

SEQ ID NO: 2454163 - RNA, 19 nt, Artificial Sequence
  Description of Artificial Sequence: Synthetic oligonucleotide
cuucuugcggauggggaga

SEQ ID NO: 2454164 - RNA, 19 nt, Artificial Sequence
  Description of Artificial Sequence: Synthetic oligonucleotide
uugacccgaggagccagga

SEQ ID NO: 2454165 - RNA, 19 nt, Artificial Sequence
  Description of Artificial Sequence: Synthetic oligonucleotide
uucccucgagagucuuugu

SEQ ID NO: 2454166 - RNA, 19 nt, Artificial Sequence
  Description of Artificial Sequence: Synthetic oligonucleotide
uggucgcaaccaucuuugu

SEQ ID NO: 2454167 - RNA, 19 nt, Artificial Sequence
  Description of Artificial Sequence: Synthetic oligonucleotide
ccugacuaccuccacuguc

SEQ ID NO: 2454168 - RNA, 19 nt, Artificial Sequence
  Description of Artificial Sequence: Synthetic oligonucleotide
ccgaaaagucaaguugacc

SEQ ID NO: 2454169 - RNA, 19 nt, Artificial Sequence
  Description of Artificial Sequence: Synthetic oligonucleotide
ucgucugccucggcuuugc

SEQ ID NO: 2454170 - RNA, 19 nt, Artificial Sequence
  Description of Artificial Sequence: Synthetic oligonucleotide
agucucugcaggccccaaa

SEQ ID NO: 2454171 - RNA, 19 nt, Artificial Sequence
  Description of Artificial Sequence: Synthetic oligonucleotide
guaggucgccugcuuccug

SEQ ID NO: 2454172 - RNA, 19 nt, Artificial Sequence
  Description of Artificial Sequence: Synthetic oligonucleotide
ggaccuuggccagugcacc

SEQ ID NO: 2454173 - RNA, 19 nt, Artificial Sequence
  Description of Artificial Sequence: Synthetic oligonucleotide
guugaagcucugcccuguc

SEQ ID NO: 2454174 - RNA, 19 nt, Artificial Sequence
  Description of Artificial Sequence: Synthetic oligonucleotide
caaaggagacagaugcgau

SEQ ID NO: 2454175 - RNA, 19 nt, Artificial Sequence
  Description of Artificial Sequence: Synthetic oligonucleotide
caucaucaguaggcuuccg

SEQ ID NO: 2454176 - RNA, 19 nt, Artificial Sequence
  Description of Artificial Sequence: Synthetic oligonucleotide
acaggacgguguaaucaca

SEQ ID NO: 2454177 - RNA, 19 nt, Artificial Sequence
  Description of Artificial Sequence: Synthetic oligonucleotide
caaccaucuuuguaccugu

SEQ ID NO: 2454178 - RNA, 19 nt, Artificial Sequence
  Description of Artificial Sequence: Synthetic oligonucleotide
ccguaggucgccugcuucc

SEQ ID NO: 2454179 - RNA, 19 nt, Artificial Sequence
  Description of Artificial Sequence: Synthetic oligonucleotide
caucuccguaggucgccug

SEQ ID NO: 2454180 - RNA, 19 nt, Artificial Sequence
  Description of Artificial Sequence: Synthetic oligonucleotide
cgguaaaauacuccacuuc

SEQ ID NO: 2454181 - RNA, 19 nt, Artificial Sequence
  Description of Artificial Sequence: Synthetic oligonucleotide
acgcugugccacuuuccaa

SEQ ID NO: 2454182 - RNA, 19 nt, Artificial Sequence
  Description of Artificial Sequence: Synthetic oligonucleotide
ucccgcuccgaggucgccc

SEQ ID NO: 2454183 - RNA, 19 nt, Artificial Sequence
  Description of Artificial Sequence: Synthetic oligonucleotide
cuuccgugggccagcugca

SEQ ID NO: 2454184 - RNA, 19 nt, Artificial Sequence
  Description of Artificial Sequence: Synthetic oligonucleotide
gcugugccacuuuccaaac

SEQ ID NO: 2454185 - RNA, 19 nt, Artificial Sequence
  Description of Artificial Sequence: Synthetic oligonucleotide
cuccaacucucggaagauc

SEQ ID NO: 2454186 - RNA, 19 nt, Artificial Sequence
  Description of Artificial Sequence: Synthetic oligonucleotide
acacgcuccagaacuggaa

SEQ ID NO: 2454187 - RNA, 19 nt, Artificial Sequence
  Description of Artificial Sequence: Synthetic oligonucleotide
guaugucaguccagcaucu

SEQ ID NO: 2454188 - RNA, 19 nt, Artificial Sequence
  Description of Artificial Sequence: Synthetic oligonucleotide
gaccuugcgcacggaggug

SEQ ID NO: 2454189 - RNA, 19 nt, Artificial Sequence
  Description of Artificial Sequence: Synthetic oligonucleotide
ugccucggcuuugccaaac

SEQ ID NO: 2454190 - RNA, 19 nt, Artificial Sequence
  Description of Artificial Sequence: Synthetic oligonucleotide
ggacgguguaaucacaauu

SEQ ID NO: 2454191 - RNA, 19 nt, Artificial Sequence
  Description of Artificial Sequence: Synthetic oligonucleotide
cucggcuggccgcccgagg

SEQ ID NO: 2454192 - RNA, 19 nt, Artificial Sequence
  Description of Artificial Sequence: Synthetic oligonucleotide
gugcaccgguaaaauacuc

SEQ ID NO: 2454193 - RNA, 19 nt, Artificial Sequence
  Description of Artificial Sequence: Synthetic oligonucleotide
uggggcucggcuggccgcc

SEQ ID NO: 2454194 - RNA, 19 nt, Artificial Sequence
  Description of Artificial Sequence: Synthetic oligonucleotide
ccucggcuuugccaaacag

SEQ ID NO: 2454195 - RNA, 19 nt, Artificial Sequence
  Description of Artificial Sequence: Synthetic oligonucleotide
gugguaccaaugggcguug

SEQ ID NO: 2454196 - RNA, 19 nt, Artificial Sequence
  Description of Artificial Sequence: Synthetic oligonucleotide
gaggucgcccgggucuggc

SEQ ID NO: 2454197 - RNA, 19 nt, Artificial Sequence
  Description of Artificial Sequence: Synthetic oligonucleotide
ccaacucucggaagaucuc

SEQ ID NO: 2454198 - RNA, 19 nt, Artificial Sequence
  Description of Artificial Sequence: Synthetic oligonucleotide
ggucgcaaccaucuuugua

SEQ ID NO: 2454199 - RNA, 19 nt, Artificial Sequence
  Description of Artificial Sequence: Synthetic oligonucleotide
cuccacugucugccugggc

SEQ ID NO: 2454200 - RNA, 19 nt, Artificial Sequence
  Description of Artificial Sequence: Synthetic oligonucleotide
auguggucgcaaccaucuu

SEQ ID NO: 2454201 - RNA, 19 nt, Artificial Sequence
  Description of Artificial Sequence: Synthetic oligonucleotide
ccgaggcuccucccgacgg

SEQ ID NO: 2454202 - RNA, 19 nt, Artificial Sequence
  Description of Artificial Sequence: Synthetic oligonucleotide
cagaugcgaugggacuccc

SEQ ID NO: 2454203 - RNA, 19 nt, Artificial Sequence
  Description of Artificial Sequence: Synthetic oligonucleotide
accuguuaaugagcacaaa

SEQ ID NO: 2454204 - RNA, 19 nt, Artificial Sequence
  Description of Artificial Sequence: Synthetic oligonucleotide
acucgaucucgaacacgcu

SEQ ID NO: 2454205 - RNA, 19 nt, Artificial Sequence
  Description of Artificial Sequence: Synthetic oligonucleotide
gucaguccagcaucuccgu

SEQ ID NO: 2454206 - RNA, 19 nt, Artificial Sequence
  Description of Artificial Sequence: Synthetic oligonucleotide
gagagucuuugugccggaa

SEQ ID NO: 2454207 - RNA, 19 nt, Artificial Sequence
  Description of Artificial Sequence: Synthetic oligonucleotide
ucuugcggauggggagacu

SEQ ID NO: 2454208 - RNA, 19 nt, Artificial Sequence
  Description of Artificial Sequence: Synthetic oligonucleotide
aggucgcccgggucuggcu

SEQ ID NO: 2454209 - RNA, 19 nt, Artificial Sequence
  Description of Artificial Sequence: Synthetic oligonucleotide
ggcgucaguguaagaccag

SEQ ID NO: 2454210 - RNA, 19 nt, Artificial Sequence
  Description of Artificial Sequence: Synthetic oligonucleotide
cacgcuccagaacuggaau

SEQ ID NO: 2454211 - RNA, 19 nt, Artificial Sequence
  Description of Artificial Sequence: Synthetic oligonucleotide
gucgcccgggucuggcuuc

SEQ ID NO: 2454212 - RNA, 19 nt, Artificial Sequence
  Description of Artificial Sequence: Synthetic oligonucleotide
cuccaguuggggcucggcu

SEQ ID NO: 2454213 - RNA, 19 nt, Artificial Sequence
  Description of Artificial Sequence: Synthetic oligonucleotide
cugugguaccaaugggcgu

SEQ ID NO: 2454214 - RNA, 19 nt, Artificial Sequence
  Description of Artificial Sequence: Synthetic oligonucleotide
ggggcugacuccuccccuc

SEQ ID NO: 2454215 - RNA, 19 nt, Artificial Sequence
  Description of Artificial Sequence: Synthetic oligonucleotide
cccgggucuggcuucacca

SEQ ID NO: 2454216 - RNA, 19 nt, Artificial Sequence
  Description of Artificial Sequence: Synthetic oligonucleotide
cugcagacucgaucucgaa

SEQ ID NO: 2454217 - RNA, 19 nt, Artificial Sequence
  Description of Artificial Sequence: Synthetic oligonucleotide
ggcugacuccuccccuccc

SEQ ID NO: 2454218 - RNA, 19 nt, Artificial Sequence
  Description of Artificial Sequence: Synthetic oligonucleotide
gcgucaguguaagaccaga

SEQ ID NO: 2454219 - RNA, 19 nt, Artificial Sequence
  Description of Artificial Sequence: Synthetic oligonucleotide
ggcguugguggggugguuc

SEQ ID NO: 2454220 - RNA, 19 nt, Artificial Sequence
  Description of Artificial Sequence: Synthetic oligonucleotide
ugggaacgcugugccacuu

SEQ ID NO: 2454221 - RNA, 19 nt, Artificial Sequence
  Description of Artificial Sequence: Synthetic oligonucleotide
ccccgauguggucgcaacc

SEQ ID NO: 2454222 - RNA, 19 nt, Artificial Sequence
  Description of Artificial Sequence: Synthetic oligonucleotide
cuccgaggucgcccggguc

SEQ ID NO: 2454223 - RNA, 19 nt, Artificial Sequence
  Description of Artificial Sequence: Synthetic oligonucleotide
gguaccaaugggcguuggu

SEQ ID NO: 2454224 - RNA, 19 nt, Artificial Sequence
  Description of Artificial Sequence: Synthetic oligonucleotide
cgauguggucgcaaccauc

SEQ ID NO: 2454225 - RNA, 19 nt, Artificial Sequence
  Description of Artificial Sequence: Synthetic oligonucleotide
ggggugguucaucaucagu

SEQ ID NO: 2454226 - RNA, 19 nt, Artificial Sequence
  Description of Artificial Sequence: Synthetic oligonucleotide
cccgauguggucgcaacca

SEQ ID NO: 2454227 - RNA, 19 nt, Artificial Sequence
  Description of Artificial Sequence: Synthetic oligonucleotide
gaacuggaauccagggcuu

SEQ ID NO: 2454228 - RNA, 19 nt, Artificial Sequence
  Description of Artificial Sequence: Synthetic oligonucleotide
gugccggaagaggaagucu

SEQ ID NO: 2454229 - RNA, 19 nt, Artificial Sequence
  Description of Artificial Sequence: Synthetic oligonucleotide
ucgcccgggucuggcuuca

SEQ ID NO: 2454230 - RNA, 19 nt, Artificial Sequence
  Description of Artificial Sequence: Synthetic oligonucleotide
ggccagugcaccgguaaaa

SEQ ID NO: 2454231 - RNA, 19 nt, Artificial Sequence
  Description of Artificial Sequence: Synthetic oligonucleotide
caaugggcguugguggggu

SEQ ID NO: 2454232 - RNA, 19 nt, Artificial Sequence
  Description of Artificial Sequence: Synthetic oligonucleotide
gccugcuuccugggaacgc

SEQ ID NO: 2454233 - RNA, 19 nt, Artificial Sequence
  Description of Artificial Sequence: Synthetic oligonucleotide
gcccgggucuggcuucacc

SEQ ID NO: 2454234 - RNA, 19 nt, Artificial Sequence
  Description of Artificial Sequence: Synthetic oligonucleotide
cgucaguguaagaccagaa

SEQ ID NO: 2454235 - RNA, 19 nt, Artificial Sequence
  Description of Artificial Sequence: Synthetic oligonucleotide
gccucggcuuugccaaaca

SEQ ID NO: 2454236 - RNA, 19 nt, Artificial Sequence
  Description of Artificial Sequence: Synthetic oligonucleotide
gggcucggcuggccgcccg

SEQ ID NO: 2454237 - RNA, 19 nt, Artificial Sequence
  Description of Artificial Sequence: Synthetic oligonucleotide
ccgguaaaauacuccacuu

SEQ ID NO: 2454238 - RNA, 19 nt, Artificial Sequence
  Description of Artificial Sequence: Synthetic oligonucleotide
cggcuuugccaaacaggac

SEQ ID NO: 2454239 - RNA, 19 nt, Artificial Sequence
  Description of Artificial Sequence: Synthetic oligonucleotide
ccucccgcuccgaggucgc

SEQ ID NO: 2454240 - RNA, 19 nt, Artificial Sequence
  Description of Artificial Sequence: Synthetic oligonucleotide
cgacggggcugacuccucc

SEQ ID NO: 2454241 - RNA, 19 nt, Artificial Sequence
  Description of Artificial Sequence: Synthetic oligonucleotide
ggggccaguucucuuucau

SEQ ID NO: 2454242 - RNA, 19 nt, Artificial Sequence
  Description of Artificial Sequence: Synthetic oligonucleotide
ccgaggagccaggaccuuc

SEQ ID NO: 2454243 - RNA, 19 nt, Artificial Sequence
  Description of Artificial Sequence: Synthetic oligonucleotide
guccagcaucuccguaggu

SEQ ID NO: 2454244 - RNA, 19 nt, Artificial Sequence
  Description of Artificial Sequence: Synthetic oligonucleotide
cucccgcuccgaggucgcc

SEQ ID NO: 2454245 - RNA, 19 nt, Artificial Sequence
  Description of Artificial Sequence: Synthetic oligonucleotide
gccagugcaccgguaaaau

SEQ ID NO: 2454246 - RNA, 19 nt, Artificial Sequence
  Description of Artificial Sequence: Synthetic oligonucleotide
cuccccgauguggucgcaa

SEQ ID NO: 2454247 - RNA, 19 nt, Artificial Sequence
  Description of Artificial Sequence: Synthetic oligonucleotide
gcccgaggcuccucccgac

SEQ ID NO: 2454248 - RNA, 19 nt, Artificial Sequence
  Description of Artificial Sequence: Synthetic oligonucleotide
cugccucggcuuugccaaa

SEQ ID NO: 2454249 - RNA, 19 nt, Artificial Sequence
  Description of Artificial Sequence: Synthetic oligonucleotide
cgccugcuuccugggaacg

SEQ ID NO: 2454250 - RNA, 19 nt, Artificial Sequence
  Description of Artificial Sequence: Synthetic oligonucleotide
gccuccaguuggggcucgg

SEQ ID NO: 2454251 - RNA, 19 nt, Artificial Sequence
  Description of Artificial Sequence: Synthetic oligonucleotide
gccggaagaggaagucucu

SEQ ID NO: 2454252 - RNA, 19 nt, Artificial Sequence
  Description of Artificial Sequence: Synthetic oligonucleotide
ggcucggcuggccgcccga

SEQ ID NO: 2454253 - RNA, 19 nt, Artificial Sequence
  Description of Artificial Sequence: Synthetic oligonucleotide
ccgaggucgcccgggucug

SEQ ID NO: 2454254 - RNA, 19 nt, Artificial Sequence
  Description of Artificial Sequence: Synthetic oligonucleotide
cgaggagccaggaccuucu

SEQ ID NO: 2454255 - RNA, 19 nt, Artificial Sequence
  Description of Artificial Sequence: Synthetic oligonucleotide
ggucgcccgggucuggcuu

SEQ ID NO: 2454256 - RNA, 19 nt, Artificial Sequence
  Description of Artificial Sequence: Synthetic oligonucleotide
cuccguaggucgccugcuu

SEQ ID NO: 2454257 - RNA, 19 nt, Artificial Sequence
  Description of Artificial Sequence: Synthetic oligonucleotide
gcaucuccguaggucgccu

SEQ ID NO: 2454258 - RNA, 19 nt, Artificial Sequence
  Description of Artificial Sequence: Synthetic oligonucleotide
ccgacggggcugacuccuc

SEQ ID NO: 2454259 - RNA, 19 nt, Artificial Sequence
  Description of Artificial Sequence: Synthetic oligonucleotide
uggccgcccgaggcuccuc

SEQ ID NO: 2454260 - RNA, 19 nt, Artificial Sequence
  Description of Artificial Sequence: Synthetic oligonucleotide
gcuccgaggucgcccgggu

SEQ ID NO: 2454261 - RNA, 19 nt, Artificial Sequence
  Description of Artificial Sequence: Synthetic oligonucleotide
ccgauguggucgcaaccau

SEQ ID NO: 2454262 - RNA, 19 nt, Artificial Sequence
  Description of Artificial Sequence: Synthetic oligonucleotide
cccgacggggcugacuccu

SEQ ID NO: 2454263 - RNA, 19 nt, Artificial Sequence
  Description of Artificial Sequence: Synthetic oligonucleotide
cgaggucgcccgggucugg

SEQ ID NO: 2454264 - RNA, 19 nt, Artificial Sequence
  Description of Artificial Sequence: Synthetic oligonucleotide
cguaggucgccugcuuccu

SEQ ID NO: 2454265 - RNA, 19 nt, Artificial Sequence
  Description of Artificial Sequence: Synthetic oligonucleotide
ccucccgacggggcugacu

SEQ ID NO: 2454266 - RNA, 19 nt, Artificial Sequence
  Description of Artificial Sequence: Synthetic oligonucleotide
cgcccgggucuggcuucac

SEQ ID NO: 2454267 - RNA, 19 nt, Artificial Sequence
  Description of Artificial Sequence: Synthetic oligonucleotide
uauguuaccagcauaaaca

SEQ ID NO: 2454268 - RNA, 19 nt, Artificial Sequence
  Description of Artificial Sequence: Synthetic oligonucleotide
uuguuuaucauguauguug

SEQ ID NO: 2454269 - RNA, 19 nt, Artificial Sequence
  Description of Artificial Sequence: Synthetic oligonucleotide
uuuggcaggaaccacgugg

SEQ ID NO: 2454270 - RNA, 19 nt, Artificial Sequence
  Description of Artificial Sequence: Synthetic oligonucleotide
agaucaguauuauaggugg

SEQ ID NO: 2454271 - RNA, 19 nt, Artificial Sequence
  Description of Artificial Sequence: Synthetic oligonucleotide
guuaccagcauaaacauag

SEQ ID NO: 2454272 - RNA, 19 nt, Artificial Sequence
  Description of Artificial Sequence: Synthetic oligonucleotide
ucuucuuggaugcauaucu

SEQ ID NO: 2454273 - RNA, 19 nt, Artificial Sequence
  Description of Artificial Sequence: Synthetic oligonucleotide
uuuucuugaugccauagug

SEQ ID NO: 2454274 - RNA, 19 nt, Artificial Sequence
  Description of Artificial Sequence: Synthetic oligonucleotide
uugacuuccacuauuacau

SEQ ID NO: 2454275 - RNA, 19 nt, Artificial Sequence
  Description of Artificial Sequence: Synthetic oligonucleotide
ucuuguagagcacagcgcc

SEQ ID NO: 2454276 - RNA, 19 nt, Artificial Sequence
  Description of Artificial Sequence: Synthetic oligonucleotide
uauuacaugccccuguggc

SEQ ID NO: 2454277 - RNA, 19 nt, Artificial Sequence
  Description of Artificial Sequence: Synthetic oligonucleotide
caccagaucaguauuauag

SEQ ID NO: 2454278 - RNA, 19 nt, Artificial Sequence
  Description of Artificial Sequence: Synthetic oligonucleotide
uuuaucauguauguugugc

SEQ ID NO: 2454279 - RNA, 19 nt, Artificial Sequence
  Description of Artificial Sequence: Synthetic oligonucleotide
uuaucauguauguugugcc

SEQ ID NO: 2454280 - RNA, 19 nt, Artificial Sequence
  Description of Artificial Sequence: Synthetic oligonucleotide
aacaggaucaaagcauggc

SEQ ID NO: 2454281 - RNA, 19 nt, Artificial Sequence
  Description of Artificial Sequence: Synthetic oligonucleotide
ucgaaacugacgcugagug

SEQ ID NO: 2454282 - RNA, 19 nt, Artificial Sequence
  Description of Artificial Sequence: Synthetic oligonucleotide
gaugguuucaacaggauca

SEQ ID NO: 2454283 - RNA, 19 nt, Artificial Sequence
  Description of Artificial Sequence: Synthetic oligonucleotide
gaaacugacgcugagugcc

SEQ ID NO: 2454284 - RNA, 19 nt, Artificial Sequence
  Description of Artificial Sequence: Synthetic oligonucleotide
uguuuaucauguauguugu

SEQ ID NO: 2454285 - RNA, 19 nt, Artificial Sequence
  Description of Artificial Sequence: Synthetic oligonucleotide
auagugaccuuccauuuuc

SEQ ID NO: 2454286 - RNA, 19 nt, Artificial Sequence
  Description of Artificial Sequence: Synthetic oligonucleotide
uauuuuguuuaucauguau

SEQ ID NO: 2454287 - RNA, 19 nt, Artificial Sequence
  Description of Artificial Sequence: Synthetic oligonucleotide
agcauaaacauagugaccu

SEQ ID NO: 2454288 - RNA, 19 nt, Artificial Sequence
  Description of Artificial Sequence: Synthetic oligonucleotide
aacauagugaccuuccauu

SEQ ID NO: 2454289 - RNA, 19 nt, Artificial Sequence
  Description of Artificial Sequence: Synthetic oligonucleotide
uucaacaggaucaaagcau

SEQ ID NO: 2454290 - RNA, 19 nt, Artificial Sequence
  Description of Artificial Sequence: Synthetic oligonucleotide
ucaacaggaucaaagcaug

SEQ ID NO: 2454291 - RNA, 19 nt, Artificial Sequence
  Description of Artificial Sequence: Synthetic oligonucleotide
ugaccuuccauuuucuuga

SEQ ID NO: 2454292 - RNA, 19 nt, Artificial Sequence
  Description of Artificial Sequence: Synthetic oligonucleotide
uguauguugugccugccug

SEQ ID NO: 2454293 - RNA, 19 nt, Artificial Sequence
  Description of Artificial Sequence: Synthetic oligonucleotide
cuuguuuuggggauugggc

SEQ ID NO: 2454294 - RNA, 19 nt, Artificial Sequence
  Description of Artificial Sequence: Synthetic oligonucleotide
uuucccaccaagauucuug

SEQ ID NO: 2454295 - RNA, 19 nt, Artificial Sequence
  Description of Artificial Sequence: Synthetic oligonucleotide
gggacuuuaacucaugacc

SEQ ID NO: 2454296 - RNA, 19 nt, Artificial Sequence
  Description of Artificial Sequence: Synthetic oligonucleotide
uuguuuuggggauugggca

SEQ ID NO: 2454297 - RNA, 19 nt, Artificial Sequence
  Description of Artificial Sequence: Synthetic oligonucleotide
uuguguagcggacuguccc

SEQ ID NO: 2454298 - RNA, 19 nt, Artificial Sequence
  Description of Artificial Sequence: Synthetic oligonucleotide
ucagcgaaaguacugccga

SEQ ID NO: 2454299 - RNA, 19 nt, Artificial Sequence
  Description of Artificial Sequence: Synthetic oligonucleotide
ucuuuuguguagcggacug

SEQ ID NO: 2454300 - RNA, 19 nt, Artificial Sequence
  Description of Artificial Sequence: Synthetic oligonucleotide
augcauaucugacugcaag

SEQ ID NO: 2454301 - RNA, 19 nt, Artificial Sequence
  Description of Artificial Sequence: Synthetic oligonucleotide
agauucuuggagcuaccac

SEQ ID NO: 2454302 - RNA, 19 nt, Artificial Sequence
  Description of Artificial Sequence: Synthetic oligonucleotide
aggaucaaagcauggccac

SEQ ID NO: 2454303 - RNA, 19 nt, Artificial Sequence
  Description of Artificial Sequence: Synthetic oligonucleotide
gacuuccacuauuacaugc

SEQ ID NO: 2454304 - RNA, 19 nt, Artificial Sequence
  Description of Artificial Sequence: Synthetic oligonucleotide
cauccgaugguuucaacag

SEQ ID NO: 2454305 - RNA, 19 nt, Artificial Sequence
  Description of Artificial Sequence: Synthetic oligonucleotide
auaucugacugcaagagcu

SEQ ID NO: 2454306 - RNA, 19 nt, Artificial Sequence
  Description of Artificial Sequence: Synthetic oligonucleotide
cuugaugccauaguguuug

SEQ ID NO: 2454307 - RNA, 19 nt, Artificial Sequence
  Description of Artificial Sequence: Synthetic oligonucleotide
ucuuggaugcauaucugac

SEQ ID NO: 2454308 - RNA, 19 nt, Artificial Sequence
  Description of Artificial Sequence: Synthetic oligonucleotide
aaacauagugaccuuccau

SEQ ID NO: 2454309 - RNA, 19 nt, Artificial Sequence
  Description of Artificial Sequence: Synthetic oligonucleotide
gugccaucgaaacugacgc

SEQ ID NO: 2454310 - RNA, 19 nt, Artificial Sequence
  Description of Artificial Sequence: Synthetic oligonucleotide
uauuuauuuuguuuaucau

SEQ ID NO: 2454311 - RNA, 19 nt, Artificial Sequence
  Description of Artificial Sequence: Synthetic oligonucleotide
cagaucaguauuauaggug

SEQ ID NO: 2454312 - RNA, 19 nt, Artificial Sequence
  Description of Artificial Sequence: Synthetic oligonucleotide
caaagcauggccaccaguc

SEQ ID NO: 2454313 - RNA, 19 nt, Artificial Sequence
  Description of Artificial Sequence: Synthetic oligonucleotide
uccacuauuacaugccccu

SEQ ID NO: 2454314 - RNA, 19 nt, Artificial Sequence
  Description of Artificial Sequence: Synthetic oligonucleotide
acuuccacuauuacaugcc

SEQ ID NO: 2454315 - RNA, 19 nt, Artificial Sequence
  Description of Artificial Sequence: Synthetic oligonucleotide
cuucccgagucccacaugg

SEQ ID NO: 2454316 - RNA, 19 nt, Artificial Sequence
  Description of Artificial Sequence: Synthetic oligonucleotide
ucaguauuauaggugguug

SEQ ID NO: 2454317 - RNA, 19 nt, Artificial Sequence
  Description of Artificial Sequence: Synthetic oligonucleotide
uuggggauugggcacguag

SEQ ID NO: 2454318 - RNA, 19 nt, Artificial Sequence
  Description of Artificial Sequence: Synthetic oligonucleotide
guauguuaccagcauaaac

SEQ ID NO: 2454319 - RNA, 19 nt, Artificial Sequence
  Description of Artificial Sequence: Synthetic oligonucleotide
uuaacucaugaccucugga

SEQ ID NO: 2454320 - RNA, 19 nt, Artificial Sequence
  Description of Artificial Sequence: Synthetic oligonucleotide
uccgaugguuucaacagga

SEQ ID NO: 2454321 - RNA, 19 nt, Artificial Sequence
  Description of Artificial Sequence: Synthetic oligonucleotide
ucugaagguucccucaggu

SEQ ID NO: 2454322 - RNA, 19 nt, Artificial Sequence
  Description of Artificial Sequence: Synthetic oligonucleotide
uaccagcauaaacauagug

SEQ ID NO: 2454323 - RNA, 19 nt, Artificial Sequence
  Description of Artificial Sequence: Synthetic oligonucleotide
ugagugccgaguauguuac

SEQ ID NO: 2454324 - RNA, 19 nt, Artificial Sequence
  Description of Artificial Sequence: Synthetic oligonucleotide
aaaugucuuguagagcaca

SEQ ID NO: 2454325 - RNA, 19 nt, Artificial Sequence
  Description of Artificial Sequence: Synthetic oligonucleotide
uaaacauagugaccuucca

SEQ ID NO: 2454326 - RNA, 19 nt, Artificial Sequence
  Description of Artificial Sequence: Synthetic oligonucleotide
ugcauaucugacugcaaga

SEQ ID NO: 2454327 - RNA, 19 nt, Artificial Sequence
  Description of Artificial Sequence: Synthetic oligonucleotide
uucuuggaugcauaucuga

SEQ ID NO: 2454328 - RNA, 19 nt, Artificial Sequence
  Description of Artificial Sequence: Synthetic oligonucleotide
uccauuuucuugaugccau

SEQ ID NO: 2454329 - RNA, 19 nt, Artificial Sequence
  Description of Artificial Sequence: Synthetic oligonucleotide
aaagcauggccaccagucu

SEQ ID NO: 2454330 - RNA, 19 nt, Artificial Sequence
  Description of Artificial Sequence: Synthetic oligonucleotide
gaaaguacugccgacgcca

SEQ ID NO: 2454331 - RNA, 19 nt, Artificial Sequence
  Description of Artificial Sequence: Synthetic oligonucleotide
uguugugccugccugccug

SEQ ID NO: 2454332 - RNA, 19 nt, Artificial Sequence
  Description of Artificial Sequence: Synthetic oligonucleotide
acuauuacaugccccugug

SEQ ID NO: 2454333 - RNA, 19 nt, Artificial Sequence
  Description of Artificial Sequence: Synthetic oligonucleotide
aaugucuuguagagcacag

SEQ ID NO: 2454334 - RNA, 19 nt, Artificial Sequence
  Description of Artificial Sequence: Synthetic oligonucleotide
aguauuauaggugguugug

SEQ ID NO: 2454335 - RNA, 19 nt, Artificial Sequence
  Description of Artificial Sequence: Synthetic oligonucleotide
ucauguauguugugccugc

SEQ ID NO: 2454336 - RNA, 19 nt, Artificial Sequence
  Description of Artificial Sequence: Synthetic oligonucleotide
cucagcgaaaguacugccg

SEQ ID NO: 2454337 - RNA, 19 nt, Artificial Sequence
  Description of Artificial Sequence: Synthetic oligonucleotide
ucuuggagcuaccaccugu

SEQ ID NO: 2454338 - RNA, 19 nt, Artificial Sequence
  Description of Artificial Sequence: Synthetic oligonucleotide
accucuuuuguguagcgga

SEQ ID NO: 2454339 - RNA, 19 nt, Artificial Sequence
  Description of Artificial Sequence: Synthetic oligonucleotide
accagcauaaacauaguga

SEQ ID NO: 2454340 - RNA, 19 nt, Artificial Sequence
  Description of Artificial Sequence: Synthetic oligonucleotide
uguuuuggggauugggcac

SEQ ID NO: 2454341 - RNA, 19 nt, Artificial Sequence
  Description of Artificial Sequence: Synthetic oligonucleotide
cuugacuuccacuauuaca

SEQ ID NO: 2454342 - RNA, 19 nt, Artificial Sequence
  Description of Artificial Sequence: Synthetic oligonucleotide
augccauaguguuugccuc

SEQ ID NO: 2454343 - RNA, 19 nt, Artificial Sequence
  Description of Artificial Sequence: Synthetic oligonucleotide
uuccacuauuacaugcccc

SEQ ID NO: 2454344 - RNA, 19 nt, Artificial Sequence
  Description of Artificial Sequence: Synthetic oligonucleotide
ugccauaguguuugccucg

SEQ ID NO: 2454345 - RNA, 19 nt, Artificial Sequence
  Description of Artificial Sequence: Synthetic oligonucleotide
auaggugguugugagcuac

SEQ ID NO: 2454346 - RNA, 19 nt, Artificial Sequence
  Description of Artificial Sequence: Synthetic oligonucleotide
acguagaccucuuuugugu

SEQ ID NO: 2454347 - RNA, 19 nt, Artificial Sequence
  Description of Artificial Sequence: Synthetic oligonucleotide
auuuucuugaugccauagu

SEQ ID NO: 2454348 - RNA, 19 nt, Artificial Sequence
  Description of Artificial Sequence: Synthetic oligonucleotide
cauaucugacugcaagagc

SEQ ID NO: 2454349 - RNA, 19 nt, Artificial Sequence
  Description of Artificial Sequence: Synthetic oligonucleotide
uaucauguauguugugccu

SEQ ID NO: 2454350 - RNA, 19 nt, Artificial Sequence
  Description of Artificial Sequence: Synthetic oligonucleotide
agagcuguagcugccgugg

SEQ ID NO: 2454351 - RNA, 19 nt, Artificial Sequence
  Description of Artificial Sequence: Synthetic oligonucleotide
uuugccucgugauuuccca

SEQ ID NO: 2454352 - RNA, 19 nt, Artificial Sequence
  Description of Artificial Sequence: Synthetic oligonucleotide
uuggcaggaaccacgugga

SEQ ID NO: 2454353 - RNA, 19 nt, Artificial Sequence
  Description of Artificial Sequence: Synthetic oligonucleotide
uuuguguagcggacugucc

SEQ ID NO: 2454354 - RNA, 19 nt, Artificial Sequence
  Description of Artificial Sequence: Synthetic oligonucleotide
ucaacagggcugcugcccc

SEQ ID NO: 2454355 - RNA, 19 nt, Artificial Sequence
  Description of Artificial Sequence: Synthetic oligonucleotide
auguuaccagcauaaacau

SEQ ID NO: 2454356 - RNA, 19 nt, Artificial Sequence
  Description of Artificial Sequence: Synthetic oligonucleotide
ugccguggggcucaacagg

SEQ ID NO: 2454357 - RNA, 19 nt, Artificial Sequence
  Description of Artificial Sequence: Synthetic oligonucleotide
caucuuuccagcucuucug

SEQ ID NO: 2454358 - RNA, 19 nt, Artificial Sequence
  Description of Artificial Sequence: Synthetic oligonucleotide
uaucugacugcaagagcug

SEQ ID NO: 2454359 - RNA, 19 nt, Artificial Sequence
  Description of Artificial Sequence: Synthetic oligonucleotide
auaguguuugccucgugau

SEQ ID NO: 2454360 - RNA, 19 nt, Artificial Sequence
  Description of Artificial Sequence: Synthetic oligonucleotide
ucgugauuucccaccaaga

SEQ ID NO: 2454361 - RNA, 19 nt, Artificial Sequence
  Description of Artificial Sequence: Synthetic oligonucleotide
cucgugauuucccaccaag

SEQ ID NO: 2454362 - RNA, 19 nt, Artificial Sequence
  Description of Artificial Sequence: Synthetic oligonucleotide
gaugccauaguguuugccu

SEQ ID NO: 2454363 - RNA, 19 nt, Artificial Sequence
  Description of Artificial Sequence: Synthetic oligonucleotide
ugggacuuuaacucaugac

SEQ ID NO: 2454364 - RNA, 19 nt, Artificial Sequence
  Description of Artificial Sequence: Synthetic oligonucleotide
cuuccacuauuacaugccc

SEQ ID NO: 2454365 - RNA, 19 nt, Artificial Sequence
  Description of Artificial Sequence: Synthetic oligonucleotide
auccgaugguuucaacagg

SEQ ID NO: 2454366 - RNA, 19 nt, Artificial Sequence
  Description of Artificial Sequence: Synthetic oligonucleotide
uuccauuuucuugaugcca

SEQ ID NO: 2454367 - RNA, 19 nt, Artificial Sequence
  Description of Artificial Sequence: Synthetic oligonucleotide
uuuuguguagcggacuguc

SEQ ID NO: 2454368 - RNA, 19 nt, Artificial Sequence
  Description of Artificial Sequence: Synthetic oligonucleotide
aagagcuguagcugccgug

SEQ ID NO: 2454369 - RNA, 19 nt, Artificial Sequence
  Description of Artificial Sequence: Synthetic oligonucleotide
uguguagcggacugucccc

SEQ ID NO: 2454370 - RNA, 19 nt, Artificial Sequence
  Description of Artificial Sequence: Synthetic oligonucleotide
agcgaaaguacugccgacg

SEQ ID NO: 2454371 - RNA, 19 nt, Artificial Sequence
  Description of Artificial Sequence: Synthetic oligonucleotide
acugcaagagcuguagcug

SEQ ID NO: 2454372 - RNA, 19 nt, Artificial Sequence
  Description of Artificial Sequence: Synthetic oligonucleotide
aguacugccgacgccaucu

SEQ ID NO: 2454373 - RNA, 19 nt, Artificial Sequence
  Description of Artificial Sequence: Synthetic oligonucleotide
cugggugccaucgaaacug

SEQ ID NO: 2454374 - RNA, 19 nt, Artificial Sequence
  Description of Artificial Sequence: Synthetic oligonucleotide
gaguauguuaccagcauaa

SEQ ID NO: 2454375 - RNA, 19 nt, Artificial Sequence
  Description of Artificial Sequence: Synthetic oligonucleotide
agggcauagaggcacuugu

SEQ ID NO: 2454376 - RNA, 19 nt, Artificial Sequence
  Description of Artificial Sequence: Synthetic oligonucleotide
cauaaacauagugaccuuc

SEQ ID NO: 2454377 - RNA, 19 nt, Artificial Sequence
  Description of Artificial Sequence: Synthetic oligonucleotide
cuauuacaugccccugugg

SEQ ID NO: 2454378 - RNA, 19 nt, Artificial Sequence
  Description of Artificial Sequence: Synthetic oligonucleotide
cagcauaaacauagugacc

SEQ ID NO: 2454379 - RNA, 19 nt, Artificial Sequence
  Description of Artificial Sequence: Synthetic oligonucleotide
uuacaugccccuguggccu

SEQ ID NO: 2454380 - RNA, 19 nt, Artificial Sequence
  Description of Artificial Sequence: Synthetic oligonucleotide
ugccgaguauguuaccagc

SEQ ID NO: 2454381 - RNA, 19 nt, Artificial Sequence
  Description of Artificial Sequence: Synthetic oligonucleotide
agucugaagguucccucag

SEQ ID NO: 2454382 - RNA, 19 nt, Artificial Sequence
  Description of Artificial Sequence: Synthetic oligonucleotide
caacaggaucaaagcaugg

SEQ ID NO: 2454383 - RNA, 19 nt, Artificial Sequence
  Description of Artificial Sequence: Synthetic oligonucleotide
cuaccaccugucuucuugg

SEQ ID NO: 2454384 - RNA, 19 nt, Artificial Sequence
  Description of Artificial Sequence: Synthetic oligonucleotide
ucccgagucccacaugggc

SEQ ID NO: 2454385 - RNA, 19 nt, Artificial Sequence
  Description of Artificial Sequence: Synthetic oligonucleotide
cuuguucuucccgaguccc

SEQ ID NO: 2454386 - RNA, 19 nt, Artificial Sequence
  Description of Artificial Sequence: Synthetic oligonucleotide
auagaggcacuuguucuuc

SEQ ID NO: 2454387 - RNA, 19 nt, Artificial Sequence
  Description of Artificial Sequence: Synthetic oligonucleotide
gagcacagcgcccuugggc

SEQ ID NO: 2454388 - RNA, 19 nt, Artificial Sequence
  Description of Artificial Sequence: Synthetic oligonucleotide
cuuguagagcacagcgccc

SEQ ID NO: 2454389 - RNA, 19 nt, Artificial Sequence
  Description of Artificial Sequence: Synthetic oligonucleotide
ucuguggggaccugguccu

SEQ ID NO: 2454390 - RNA, 19 nt, Artificial Sequence
  Description of Artificial Sequence: Synthetic oligonucleotide
uguccccuccuccagggca

SEQ ID NO: 2454391 - RNA, 19 nt, Artificial Sequence
  Description of Artificial Sequence: Synthetic oligonucleotide
aguguuugccucgugauuu

SEQ ID NO: 2454392 - RNA, 19 nt, Artificial Sequence
  Description of Artificial Sequence: Synthetic oligonucleotide
agaccucuuuuguguagcg

SEQ ID NO: 2454393 - RNA, 19 nt, Artificial Sequence
  Description of Artificial Sequence: Synthetic oligonucleotide
aagauucuuggagcuacca

SEQ ID NO: 2454394 - RNA, 19 nt, Artificial Sequence
  Description of Artificial Sequence: Synthetic oligonucleotide
aucauguauguugugccug

SEQ ID NO: 2454395 - RNA, 19 nt, Artificial Sequence
  Description of Artificial Sequence: Synthetic oligonucleotide
gaucaaagcauggccacca

SEQ ID NO: 2454396 - RNA, 19 nt, Artificial Sequence
  Description of Artificial Sequence: Synthetic oligonucleotide
augucuuguagagcacagc

SEQ ID NO: 2454397 - RNA, 19 nt, Artificial Sequence
  Description of Artificial Sequence: Synthetic oligonucleotide
uagaccucuuuuguguagc

SEQ ID NO: 2454398 - RNA, 19 nt, Artificial Sequence
  Description of Artificial Sequence: Synthetic oligonucleotide
caccugucuucuuggaugc

SEQ ID NO: 2454399 - RNA, 19 nt, Artificial Sequence
  Description of Artificial Sequence: Synthetic oligonucleotide
ugccucgugauuucccacc

SEQ ID NO: 2454400 - RNA, 19 nt, Artificial Sequence
  Description of Artificial Sequence: Synthetic oligonucleotide
gaagguucccucagguuug

SEQ ID NO: 2454401 - RNA, 19 nt, Artificial Sequence
  Description of Artificial Sequence: Synthetic oligonucleotide
cauaguguuugccucguga

SEQ ID NO: 2454402 - RNA, 19 nt, Artificial Sequence
  Description of Artificial Sequence: Synthetic oligonucleotide
agguuuggcaggaaccacg

SEQ ID NO: 2454403 - RNA, 19 nt, Artificial Sequence
  Description of Artificial Sequence: Synthetic oligonucleotide
guauguugugccugccugc

SEQ ID NO: 2454404 - RNA, 19 nt, Artificial Sequence
  Description of Artificial Sequence: Synthetic oligonucleotide
guuuuggggauugggcacg

SEQ ID NO: 2454405 - RNA, 19 nt, Artificial Sequence
  Description of Artificial Sequence: Synthetic oligonucleotide
cuucuuggaugcauaucug

SEQ ID NO: 2454406 - RNA, 19 nt, Artificial Sequence
  Description of Artificial Sequence: Synthetic oligonucleotide
ggugccaucgaaacugacg

SEQ ID NO: 2454407 - RNA, 19 nt, Artificial Sequence
  Description of Artificial Sequence: Synthetic oligonucleotide
acauagugaccuuccauuu

SEQ ID NO: 2454408 - RNA, 19 nt, Artificial Sequence
  Description of Artificial Sequence: Synthetic oligonucleotide
cacuuguucuucccgaguc

SEQ ID NO: 2454409 - RNA, 19 nt, Artificial Sequence
  Description of Artificial Sequence: Synthetic oligonucleotide
caggaucaaagcauggcca

SEQ ID NO: 2454410 - RNA, 19 nt, Artificial Sequence
  Description of Artificial Sequence: Synthetic oligonucleotide
cacaugggcgccugggugc

SEQ ID NO: 2454411 - RNA, 19 nt, Artificial Sequence
  Description of Artificial Sequence: Synthetic oligonucleotide
uuauuuuguuuaucaugua

SEQ ID NO: 2454412 - RNA, 19 nt, Artificial Sequence
  Description of Artificial Sequence: Synthetic oligonucleotide
ugacuuccacuauuacaug

SEQ ID NO: 2454413 - RNA, 19 nt, Artificial Sequence
  Description of Artificial Sequence: Synthetic oligonucleotide
uguuaccagcauaaacaua

SEQ ID NO: 2454414 - RNA, 19 nt, Artificial Sequence
  Description of Artificial Sequence: Synthetic oligonucleotide
ugacugcaagagcuguagc

SEQ ID NO: 2454415 - RNA, 19 nt, Artificial Sequence
  Description of Artificial Sequence: Synthetic oligonucleotide
cugacugcaagagcuguag

SEQ ID NO: 2454416 - RNA, 19 nt, Artificial Sequence
  Description of Artificial Sequence: Synthetic oligonucleotide
cacguagaccucuuuugug

SEQ ID NO: 2454417 - RNA, 19 nt, Artificial Sequence
  Description of Artificial Sequence: Synthetic oligonucleotide
cuuggagcuaccaccuguc

SEQ ID NO: 2454418 - RNA, 19 nt, Artificial Sequence
  Description of Artificial Sequence: Synthetic oligonucleotide
aaguacugccgacgccauc

SEQ ID NO: 2454419 - RNA, 19 nt, Artificial Sequence
  Description of Artificial Sequence: Synthetic oligonucleotide
uuuguuuaucauguauguu

SEQ ID NO: 2454420 - RNA, 19 nt, Artificial Sequence
  Description of Artificial Sequence: Synthetic oligonucleotide
guuuaucauguauguugug

SEQ ID NO: 2454421 - RNA, 19 nt, Artificial Sequence
  Description of Artificial Sequence: Synthetic oligonucleotide
aaacugacgcugagugccg

SEQ ID NO: 2454422 - RNA, 19 nt, Artificial Sequence
  Description of Artificial Sequence: Synthetic oligonucleotide
gacugcaagagcuguagcu

SEQ ID NO: 2454423 - RNA, 19 nt, Artificial Sequence
  Description of Artificial Sequence: Synthetic oligonucleotide
ggagcuaccaccugucuuc

SEQ ID NO: 2454424 - RNA, 19 nt, Artificial Sequence
  Description of Artificial Sequence: Synthetic oligonucleotide
cccaccaagauucuuggag

SEQ ID NO: 2454425 - RNA, 19 nt, Artificial Sequence
  Description of Artificial Sequence: Synthetic oligonucleotide
ugucuucuuggaugcauau

SEQ ID NO: 2454426 - RNA, 19 nt, Artificial Sequence
  Description of Artificial Sequence: Synthetic oligonucleotide
uggaugcauaucugacugc

SEQ ID NO: 2454427 - RNA, 19 nt, Artificial Sequence
  Description of Artificial Sequence: Synthetic oligonucleotide
caaaugucuuguagagcac

SEQ ID NO: 2454428 - RNA, 19 nt, Artificial Sequence
  Description of Artificial Sequence: Synthetic oligonucleotide
agugccgaguauguuacca

SEQ ID NO: 2454429 - RNA, 19 nt, Artificial Sequence
  Description of Artificial Sequence: Synthetic oligonucleotide
gaccucuuuuguguagcgg

SEQ ID NO: 2454430 - RNA, 19 nt, Artificial Sequence
  Description of Artificial Sequence: Synthetic oligonucleotide
caagauucuuggagcuacc

SEQ ID NO: 2454431 - RNA, 19 nt, Artificial Sequence
  Description of Artificial Sequence: Synthetic oligonucleotide
guauuauaggugguuguga

SEQ ID NO: 2454432 - RNA, 19 nt, Artificial Sequence
  Description of Artificial Sequence: Synthetic oligonucleotide
gcauaucugacugcaagag

SEQ ID NO: 2454433 - RNA, 19 nt, Artificial Sequence
  Description of Artificial Sequence: Synthetic oligonucleotide
gacuguccccuccuccagg

SEQ ID NO: 2454434 - RNA, 19 nt, Artificial Sequence
  Description of Artificial Sequence: Synthetic oligonucleotide
auguauguugugccugccu

SEQ ID NO: 2454435 - RNA, 19 nt, Artificial Sequence
  Description of Artificial Sequence: Synthetic oligonucleotide
ggcacguagaccucuuuug

SEQ ID NO: 2454436 - RNA, 19 nt, Artificial Sequence
  Description of Artificial Sequence: Synthetic oligonucleotide
uucccgagucccacauggg

SEQ ID NO: 2454437 - RNA, 19 nt, Artificial Sequence
  Description of Artificial Sequence: Synthetic oligonucleotide
cacguggacaaaugucuug

SEQ ID NO: 2454438 - RNA, 19 nt, Artificial Sequence
  Description of Artificial Sequence: Synthetic oligonucleotide
gcuaccaccugucuucuug

SEQ ID NO: 2454439 - RNA, 19 nt, Artificial Sequence
  Description of Artificial Sequence: Synthetic oligonucleotide
ugaugccauaguguuugcc

SEQ ID NO: 2454440 - RNA, 19 nt, Artificial Sequence
  Description of Artificial Sequence: Synthetic oligonucleotide
acguggacaaaugucuugu

SEQ ID NO: 2454441 - RNA, 19 nt, Artificial Sequence
  Description of Artificial Sequence: Synthetic oligonucleotide
aucaaagcauggccaccag

SEQ ID NO: 2454442 - RNA, 19 nt, Artificial Sequence
  Description of Artificial Sequence: Synthetic oligonucleotide
ucuugaugccauaguguuu

SEQ ID NO: 2454443 - RNA, 19 nt, Artificial Sequence
  Description of Artificial Sequence: Synthetic oligonucleotide
uguucuucccgagucccac

SEQ ID NO: 2454444 - RNA, 19 nt, Artificial Sequence
  Description of Artificial Sequence: Synthetic oligonucleotide
ugaccagguccacagccuc

SEQ ID NO: 2454445 - RNA, 19 nt, Artificial Sequence
  Description of Artificial Sequence: Synthetic oligonucleotide
gugccgaguauguuaccag

SEQ ID NO: 2454446 - RNA, 19 nt, Artificial Sequence
  Description of Artificial Sequence: Synthetic oligonucleotide
uucuucccgagucccacau

SEQ ID NO: 2454447 - RNA, 19 nt, Artificial Sequence
  Description of Artificial Sequence: Synthetic oligonucleotide
acugccgacgccaucuuug

SEQ ID NO: 2454448 - RNA, 19 nt, Artificial Sequence
  Description of Artificial Sequence: Synthetic oligonucleotide
ggcucaacagggcugcugc

SEQ ID NO: 2454449 - RNA, 19 nt, Artificial Sequence
  Description of Artificial Sequence: Synthetic oligonucleotide
aucaguauuauaggugguu

SEQ ID NO: 2454450 - RNA, 19 nt, Artificial Sequence
  Description of Artificial Sequence: Synthetic oligonucleotide
ucugacugcaagagcugua

SEQ ID NO: 2454451 - RNA, 19 nt, Artificial Sequence
  Description of Artificial Sequence: Synthetic oligonucleotide
ugcugggacuuuaacucau

SEQ ID NO: 2454452 - RNA, 19 nt, Artificial Sequence
  Description of Artificial Sequence: Synthetic oligonucleotide
ggauugggcacguagaccu

SEQ ID NO: 2454453 - RNA, 19 nt, Artificial Sequence
  Description of Artificial Sequence: Synthetic oligonucleotide
uggagcuaccaccugucuu

SEQ ID NO: 2454454 - RNA, 19 nt, Artificial Sequence
  Description of Artificial Sequence: Synthetic oligonucleotide
aagguucccucagguuugg

SEQ ID NO: 2454455 - RNA, 19 nt, Artificial Sequence
  Description of Artificial Sequence: Synthetic oligonucleotide
aggcacuuguucuucccga

SEQ ID NO: 2454456 - RNA, 19 nt, Artificial Sequence
  Description of Artificial Sequence: Synthetic oligonucleotide
uguuugccucgugauuucc

SEQ ID NO: 2454457 - RNA, 19 nt, Artificial Sequence
  Description of Artificial Sequence: Synthetic oligonucleotide
uaguguuugccucgugauu

SEQ ID NO: 2454458 - RNA, 19 nt, Artificial Sequence
  Description of Artificial Sequence: Synthetic oligonucleotide
ucuccauccgaugguuuca

SEQ ID NO: 2454459 - RNA, 19 nt, Artificial Sequence
  Description of Artificial Sequence: Synthetic oligonucleotide
ucacccgggcucuugacuu

SEQ ID NO: 2454460 - RNA, 19 nt, Artificial Sequence
  Description of Artificial Sequence: Synthetic oligonucleotide
uuggagcuaccaccugucu

SEQ ID NO: 2454461 - RNA, 19 nt, Artificial Sequence
  Description of Artificial Sequence: Synthetic oligonucleotide
gucuccauccgaugguuuc

SEQ ID NO: 2454462 - RNA, 19 nt, Artificial Sequence
  Description of Artificial Sequence: Synthetic oligonucleotide
uucuuggagcuaccaccug

SEQ ID NO: 2454463 - RNA, 19 nt, Artificial Sequence
  Description of Artificial Sequence: Synthetic oligonucleotide
cugagugccgaguauguua

SEQ ID NO: 2454464 - RNA, 19 nt, Artificial Sequence
  Description of Artificial Sequence: Synthetic oligonucleotide
cuuggaugcauaucugacu

SEQ ID NO: 2454465 - RNA, 19 nt, Artificial Sequence
  Description of Artificial Sequence: Synthetic oligonucleotide
uggggcucaacagggcugc

SEQ ID NO: 2454466 - RNA, 19 nt, Artificial Sequence
  Description of Artificial Sequence: Synthetic oligonucleotide
agagcacagcgcccuuggg

SEQ ID NO: 2454467 - RNA, 19 nt, Artificial Sequence
  Description of Artificial Sequence: Synthetic oligonucleotide
gagcuguagcugccguggg

SEQ ID NO: 2454468 - RNA, 19 nt, Artificial Sequence
  Description of Artificial Sequence: Synthetic oligonucleotide
gcgaaaguacugccgacgc

SEQ ID NO: 2454469 - RNA, 19 nt, Artificial Sequence
  Description of Artificial Sequence: Synthetic oligonucleotide
ugacgcugagugccgagua

SEQ ID NO: 2454470 - RNA, 19 nt, Artificial Sequence
  Description of Artificial Sequence: Synthetic oligonucleotide
guagcggacuguccccucc

SEQ ID NO: 2454471 - RNA, 19 nt, Artificial Sequence
  Description of Artificial Sequence: Synthetic oligonucleotide
aucgaaacugacgcugagu

SEQ ID NO: 2454472 - RNA, 19 nt, Artificial Sequence
  Description of Artificial Sequence: Synthetic oligonucleotide
acaugggcgccugggugcc

SEQ ID NO: 2454473 - RNA, 19 nt, Artificial Sequence
  Description of Artificial Sequence: Synthetic oligonucleotide
ucuucccgagucccacaug

SEQ ID NO: 2454474 - RNA, 19 nt, Artificial Sequence
  Description of Artificial Sequence: Synthetic oligonucleotide
cugccguggggcucaacag

SEQ ID NO: 2454475 - RNA, 19 nt, Artificial Sequence
  Description of Artificial Sequence: Synthetic oligonucleotide
guuugccucgugauuuccc

SEQ ID NO: 2454476 - RNA, 19 nt, Artificial Sequence
  Description of Artificial Sequence: Synthetic oligonucleotide
aguauguuaccagcauaaa

SEQ ID NO: 2454477 - RNA, 19 nt, Artificial Sequence
  Description of Artificial Sequence: Synthetic oligonucleotide
ugugccugccugccugcca

SEQ ID NO: 2454478 - RNA, 19 nt, Artificial Sequence
  Description of Artificial Sequence: Synthetic oligonucleotide
gccaucgaaacugacgcug

SEQ ID NO: 2454479 - RNA, 19 nt, Artificial Sequence
  Description of Artificial Sequence: Synthetic oligonucleotide
uccucacccgggcucuuga

SEQ ID NO: 2454480 - RNA, 19 nt, Artificial Sequence
  Description of Artificial Sequence: Synthetic oligonucleotide
ccaagauucuuggagcuac

SEQ ID NO: 2454481 - RNA, 19 nt, Artificial Sequence
  Description of Artificial Sequence: Synthetic oligonucleotide
auugggcacguagaccucu

SEQ ID NO: 2454482 - RNA, 19 nt, Artificial Sequence
  Description of Artificial Sequence: Synthetic oligonucleotide
ggaugcauaucugacugca

SEQ ID NO: 2454483 - RNA, 19 nt, Artificial Sequence
  Description of Artificial Sequence: Synthetic oligonucleotide
uauaggugguugugagcua

SEQ ID NO: 2454484 - RNA, 19 nt, Artificial Sequence
  Description of Artificial Sequence: Synthetic oligonucleotide
ggaccugguccucacccgg

SEQ ID NO: 2454485 - RNA, 19 nt, Artificial Sequence
  Description of Artificial Sequence: Synthetic oligonucleotide
ugccaucgaaacugacgcu

SEQ ID NO: 2454486 - RNA, 19 nt, Artificial Sequence
  Description of Artificial Sequence: Synthetic oligonucleotide
accaccugucuucuuggau

SEQ ID NO: 2454487 - RNA, 19 nt, Artificial Sequence
  Description of Artificial Sequence: Synthetic oligonucleotide
ggggaccugguccucaccc

SEQ ID NO: 2454488 - RNA, 19 nt, Artificial Sequence
  Description of Artificial Sequence: Synthetic oligonucleotide
cugggacuuuaacucauga

SEQ ID NO: 2454489 - RNA, 19 nt, Artificial Sequence
  Description of Artificial Sequence: Synthetic oligonucleotide
agcgcccuugggcaggcug

SEQ ID NO: 2454490 - RNA, 19 nt, Artificial Sequence
  Description of Artificial Sequence: Synthetic oligonucleotide
uccuuguuuuggggauugg

SEQ ID NO: 2454491 - RNA, 19 nt, Artificial Sequence
  Description of Artificial Sequence: Synthetic oligonucleotide
uggugaccagguccacagc

SEQ ID NO: 2454492 - RNA, 19 nt, Artificial Sequence
  Description of Artificial Sequence: Synthetic oligonucleotide
uaccaccugucuucuugga

SEQ ID NO: 2454493 - RNA, 19 nt, Artificial Sequence
  Description of Artificial Sequence: Synthetic oligonucleotide
ggaaccacguggacaaaug

SEQ ID NO: 2454494 - RNA, 19 nt, Artificial Sequence
  Description of Artificial Sequence: Synthetic oligonucleotide
ggacuuuaacucaugaccu

SEQ ID NO: 2454495 - RNA, 19 nt, Artificial Sequence
  Description of Artificial Sequence: Synthetic oligonucleotide
aaaguacugccgacgccau

SEQ ID NO: 2454496 - RNA, 19 nt, Artificial Sequence
  Description of Artificial Sequence: Synthetic oligonucleotide
ggggauugggcacguagac

SEQ ID NO: 2454497 - RNA, 19 nt, Artificial Sequence
  Description of Artificial Sequence: Synthetic oligonucleotide
agcauggccaccagucuga

SEQ ID NO: 2454498 - RNA, 19 nt, Artificial Sequence
  Description of Artificial Sequence: Synthetic oligonucleotide
uccgggucuccauccgaug

SEQ ID NO: 2454499 - RNA, 19 nt, Artificial Sequence
  Description of Artificial Sequence: Synthetic oligonucleotide
gcuguagcugccguggggc

SEQ ID NO: 2454500 - RNA, 19 nt, Artificial Sequence
  Description of Artificial Sequence: Synthetic oligonucleotide
gaccugguccucacccggg

SEQ ID NO: 2454501 - RNA, 19 nt, Artificial Sequence
  Description of Artificial Sequence: Synthetic oligonucleotide
caguauuauaggugguugu

SEQ ID NO: 2454502 - RNA, 19 nt, Artificial Sequence
  Description of Artificial Sequence: Synthetic oligonucleotide
cagcgaaaguacugccgac

SEQ ID NO: 2454503 - RNA, 19 nt, Artificial Sequence
  Description of Artificial Sequence: Synthetic oligonucleotide
ucccaccaagauucuugga

SEQ ID NO: 2454504 - RNA, 19 nt, Artificial Sequence
  Description of Artificial Sequence: Synthetic oligonucleotide
agcggacuguccccuccuc

SEQ ID NO: 2454505 - RNA, 19 nt, Artificial Sequence
  Description of Artificial Sequence: Synthetic oligonucleotide
uagcggacuguccccuccu

SEQ ID NO: 2454506 - RNA, 19 nt, Artificial Sequence
  Description of Artificial Sequence: Synthetic oligonucleotide
cugguccucacccgggcuc

SEQ ID NO: 2454507 - RNA, 19 nt, Artificial Sequence
  Description of Artificial Sequence: Synthetic oligonucleotide
aggaaccacguggacaaau

SEQ ID NO: 2454508 - RNA, 19 nt, Artificial Sequence
  Description of Artificial Sequence: Synthetic oligonucleotide
guuuggcaggaaccacgug

SEQ ID NO: 2454509 - RNA, 19 nt, Artificial Sequence
  Description of Artificial Sequence: Synthetic oligonucleotide
aacugacgcugagugccga

SEQ ID NO: 2454510 - RNA, 19 nt, Artificial Sequence
  Description of Artificial Sequence: Synthetic oligonucleotide
gagugccgaguauguuacc

SEQ ID NO: 2454511 - RNA, 19 nt, Artificial Sequence
  Description of Artificial Sequence: Synthetic oligonucleotide
uccauccgaugguuucaac

SEQ ID NO: 2454512 - RNA, 19 nt, Artificial Sequence
  Description of Artificial Sequence: Synthetic oligonucleotide
gggaccugguccucacccg

SEQ ID NO: 2454513 - RNA, 19 nt, Artificial Sequence
  Description of Artificial Sequence: Synthetic oligonucleotide
guguuugccucgugauuuc

SEQ ID NO: 2454514 - RNA, 19 nt, Artificial Sequence
  Description of Artificial Sequence: Synthetic oligonucleotide
uuuuggggauugggcacgu

SEQ ID NO: 2454515 - RNA, 19 nt, Artificial Sequence
  Description of Artificial Sequence: Synthetic oligonucleotide
gaugcauaucugacugcaa

SEQ ID NO: 2454516 - RNA, 19 nt, Artificial Sequence
  Description of Artificial Sequence: Synthetic oligonucleotide
uguagcugccguggggcuc

SEQ ID NO: 2454517 - RNA, 19 nt, Artificial Sequence
  Description of Artificial Sequence: Synthetic oligonucleotide
gcugccguggggcucaaca

SEQ ID NO: 2454518 - RNA, 19 nt, Artificial Sequence
  Description of Artificial Sequence: Synthetic oligonucleotide
gccucagcgaaaguacugc

SEQ ID NO: 2454519 - RNA, 19 nt, Artificial Sequence
  Description of Artificial Sequence: Synthetic oligonucleotide
ccgggucuccauccgaugg

SEQ ID NO: 2454520 - RNA, 19 nt, Artificial Sequence
  Description of Artificial Sequence: Synthetic oligonucleotide
ggaucaaagcauggccacc

SEQ ID NO: 2454521 - RNA, 19 nt, Artificial Sequence
  Description of Artificial Sequence: Synthetic oligonucleotide
uguagcggacuguccccuc

SEQ ID NO: 2454522 - RNA, 19 nt, Artificial Sequence
  Description of Artificial Sequence: Synthetic oligonucleotide
uggcaggaaccacguggac

SEQ ID NO: 2454523 - RNA, 19 nt, Artificial Sequence
  Description of Artificial Sequence: Synthetic oligonucleotide
ccucagcgaaaguacugcc

SEQ ID NO: 2454524 - RNA, 19 nt, Artificial Sequence
  Description of Artificial Sequence: Synthetic oligonucleotide
ccucuuuuguguagcggac

SEQ ID NO: 2454525 - RNA, 19 nt, Artificial Sequence
  Description of Artificial Sequence: Synthetic oligonucleotide
gcaagagcuguagcugccg

SEQ ID NO: 2454526 - RNA, 19 nt, Artificial Sequence
  Description of Artificial Sequence: Synthetic oligonucleotide
gccguggggcucaacaggg

SEQ ID NO: 2454527 - RNA, 19 nt, Artificial Sequence
  Description of Artificial Sequence: Synthetic oligonucleotide
augccccuguggccugggc

SEQ ID NO: 2454528 - RNA, 19 nt, Artificial Sequence
  Description of Artificial Sequence: Synthetic oligonucleotide
gggcucuugacuuccacua

SEQ ID NO: 2454529 - RNA, 19 nt, Artificial Sequence
  Description of Artificial Sequence: Synthetic oligonucleotide
cacuauuacaugccccugu

SEQ ID NO: 2454530 - RNA, 19 nt, Artificial Sequence
  Description of Artificial Sequence: Synthetic oligonucleotide
acagcgcccuugggcaggc

SEQ ID NO: 2454531 - RNA, 19 nt, Artificial Sequence
  Description of Artificial Sequence: Synthetic oligonucleotide
guggccugggcuccggguc

SEQ ID NO: 2454532 - RNA, 19 nt, Artificial Sequence
  Description of Artificial Sequence: Synthetic oligonucleotide
gggauugggcacguagacc

SEQ ID NO: 2454533 - RNA, 19 nt, Artificial Sequence
  Description of Artificial Sequence: Synthetic oligonucleotide
gccugggugccaucgaaac

SEQ ID NO: 2454534 - RNA, 19 nt, Artificial Sequence
  Description of Artificial Sequence: Synthetic oligonucleotide
ccgagucccacaugggcgc

SEQ ID NO: 2454535 - RNA, 19 nt, Artificial Sequence
  Description of Artificial Sequence: Synthetic oligonucleotide
gaucaguauuauagguggu

SEQ ID NO: 2454536 - RNA, 19 nt, Artificial Sequence
  Description of Artificial Sequence: Synthetic oligonucleotide
ccggccucagcgaaaguac

SEQ ID NO: 2454537 - RNA, 19 nt, Artificial Sequence
  Description of Artificial Sequence: Synthetic oligonucleotide
ugguuucaacaggaucaaa

SEQ ID NO: 2454538 - RNA, 19 nt, Artificial Sequence
  Description of Artificial Sequence: Synthetic oligonucleotide
cagggcauagaggcacuug

SEQ ID NO: 2454539 - RNA, 19 nt, Artificial Sequence
  Description of Artificial Sequence: Synthetic oligonucleotide
cacagcgcccuugggcagg

SEQ ID NO: 2454540 - RNA, 19 nt, Artificial Sequence
  Description of Artificial Sequence: Synthetic oligonucleotide
ccagucugaagguucccuc

SEQ ID NO: 2454541 - RNA, 19 nt, Artificial Sequence
  Description of Artificial Sequence: Synthetic oligonucleotide
ugguccucacccgggcucu

SEQ ID NO: 2454542 - RNA, 19 nt, Artificial Sequence
  Description of Artificial Sequence: Synthetic oligonucleotide
ccagaucaguauuauaggu

SEQ ID NO: 2454543 - RNA, 19 nt, Artificial Sequence
  Description of Artificial Sequence: Synthetic oligonucleotide
guagcugccguggggcuca

SEQ ID NO: 2454544 - RNA, 19 nt, Artificial Sequence
  Description of Artificial Sequence: Synthetic oligonucleotide
guucuucccgagucccaca

SEQ ID NO: 2454545 - RNA, 19 nt, Artificial Sequence
  Description of Artificial Sequence: Synthetic oligonucleotide
cgaugguuucaacaggauc

SEQ ID NO: 2454546 - RNA, 19 nt, Artificial Sequence
  Description of Artificial Sequence: Synthetic oligonucleotide
cgaaacugacgcugagugc

SEQ ID NO: 2454547 - RNA, 19 nt, Artificial Sequence
  Description of Artificial Sequence: Synthetic oligonucleotide
agguucccucagguuuggc

SEQ ID NO: 2454548 - RNA, 19 nt, Artificial Sequence
  Description of Artificial Sequence: Synthetic oligonucleotide
uacugccgacgccaucuuu

SEQ ID NO: 2454549 - RNA, 19 nt, Artificial Sequence
  Description of Artificial Sequence: Synthetic oligonucleotide
gauugggcacguagaccuc

SEQ ID NO: 2454550 - RNA, 19 nt, Artificial Sequence
  Description of Artificial Sequence: Synthetic oligonucleotide
auuucccaccaagauucuu

SEQ ID NO: 2454551 - RNA, 19 nt, Artificial Sequence
  Description of Artificial Sequence: Synthetic oligonucleotide
accaagauucuuggagcua

SEQ ID NO: 2454552 - RNA, 19 nt, Artificial Sequence
  Description of Artificial Sequence: Synthetic oligonucleotide
agucccacaugggcgccug

SEQ ID NO: 2454553 - RNA, 19 nt, Artificial Sequence
  Description of Artificial Sequence: Synthetic oligonucleotide
ugggcacguagaccucuuu

SEQ ID NO: 2454554 - RNA, 19 nt, Artificial Sequence
  Description of Artificial Sequence: Synthetic oligonucleotide
uugugccugccugccugcc

SEQ ID NO: 2454555 - RNA, 19 nt, Artificial Sequence
  Description of Artificial Sequence: Synthetic oligonucleotide
ggccucagcgaaaguacug

SEQ ID NO: 2454556 - RNA, 19 nt, Artificial Sequence
  Description of Artificial Sequence: Synthetic oligonucleotide
cauagugaccuuccauuuu

SEQ ID NO: 2454557 - RNA, 19 nt, Artificial Sequence
  Description of Artificial Sequence: Synthetic oligonucleotide
gcggacuguccccuccucc

SEQ ID NO: 2454558 - RNA, 19 nt, Artificial Sequence
  Description of Artificial Sequence: Synthetic oligonucleotide
caccagucugaagguuccc

SEQ ID NO: 2454559 - RNA, 19 nt, Artificial Sequence
  Description of Artificial Sequence: Synthetic oligonucleotide
gccgaguauguuaccagca

SEQ ID NO: 2454560 - RNA, 19 nt, Artificial Sequence
  Description of Artificial Sequence: Synthetic oligonucleotide
acaugccccuguggccugg

SEQ ID NO: 2454561 - RNA, 19 nt, Artificial Sequence
  Description of Artificial Sequence: Synthetic oligonucleotide
cgaaaguacugccgacgcc

SEQ ID NO: 2454562 - RNA, 19 nt, Artificial Sequence
  Description of Artificial Sequence: Synthetic oligonucleotide
gacgcugagugccgaguau

SEQ ID NO: 2454563 - RNA, 19 nt, Artificial Sequence
  Description of Artificial Sequence: Synthetic oligonucleotide
gcacguagaccucuuuugu

SEQ ID NO: 2454564 - RNA, 19 nt, Artificial Sequence
  Description of Artificial Sequence: Synthetic oligonucleotide
gggcuccgggucuccaucc

SEQ ID NO: 2454565 - RNA, 19 nt, Artificial Sequence
  Description of Artificial Sequence: Synthetic oligonucleotide
gucccacaugggcgccugg

SEQ ID NO: 2454566 - RNA, 19 nt, Artificial Sequence
  Description of Artificial Sequence: Synthetic oligonucleotide
gcugggacuuuaacucaug

SEQ ID NO: 2454567 - RNA, 19 nt, Artificial Sequence
  Description of Artificial Sequence: Synthetic oligonucleotide
cucuuuuguguagcggacu

SEQ ID NO: 2454568 - RNA, 19 nt, Artificial Sequence
  Description of Artificial Sequence: Synthetic oligonucleotide
gccucgugauuucccacca

SEQ ID NO: 2454569 - RNA, 19 nt, Artificial Sequence
  Description of Artificial Sequence: Synthetic oligonucleotide
caagagcuguagcugccgu

SEQ ID NO: 2454570 - RNA, 19 nt, Artificial Sequence
  Description of Artificial Sequence: Synthetic oligonucleotide
gcgcccuugggcaggcugg

SEQ ID NO: 2454571 - RNA, 19 nt, Artificial Sequence
  Description of Artificial Sequence: Synthetic oligonucleotide
caugccccuguggccuggg

SEQ ID NO: 2454572 - RNA, 19 nt, Artificial Sequence
  Description of Artificial Sequence: Synthetic oligonucleotide
cuuuuguguagcggacugu

SEQ ID NO: 2454573 - RNA, 19 nt, Artificial Sequence
  Description of Artificial Sequence: Synthetic oligonucleotide
gugaccagguccacagccu

SEQ ID NO: 2454574 - RNA, 19 nt, Artificial Sequence
  Description of Artificial Sequence: Synthetic oligonucleotide
cugaagguucccucagguu

SEQ ID NO: 2454575 - RNA, 19 nt, Artificial Sequence
  Description of Artificial Sequence: Synthetic oligonucleotide
gguuuggcaggaaccacgu

SEQ ID NO: 2454576 - RNA, 19 nt, Artificial Sequence
  Description of Artificial Sequence: Synthetic oligonucleotide
ccaucuuuccagcucuucu

SEQ ID NO: 2454577 - RNA, 19 nt, Artificial Sequence
  Description of Artificial Sequence: Synthetic oligonucleotide
gggcgccugggugccaucg

SEQ ID NO: 2454578 - RNA, 19 nt, Artificial Sequence
  Description of Artificial Sequence: Synthetic oligonucleotide
accugucuucuuggaugca

SEQ ID NO: 2454579 - RNA, 19 nt, Artificial Sequence
  Description of Artificial Sequence: Synthetic oligonucleotide
ccacuauuacaugccccug

SEQ ID NO: 2454580 - RNA, 19 nt, Artificial Sequence
  Description of Artificial Sequence: Synthetic oligonucleotide
gggcucaacagggcugcug

SEQ ID NO: 2454581 - RNA, 19 nt, Artificial Sequence
  Description of Artificial Sequence: Synthetic oligonucleotide
agcuaccaccugucuucuu

SEQ ID NO: 2454582 - RNA, 19 nt, Artificial Sequence
  Description of Artificial Sequence: Synthetic oligonucleotide
cuccauccgaugguuucaa

SEQ ID NO: 2454583 - RNA, 19 nt, Artificial Sequence
  Description of Artificial Sequence: Synthetic oligonucleotide
guccucacccgggcucuug

SEQ ID NO: 2454584 - RNA, 19 nt, Artificial Sequence
  Description of Artificial Sequence: Synthetic oligonucleotide
ggugguugugagcuaccau

SEQ ID NO: 2454585 - RNA, 19 nt, Artificial Sequence
  Description of Artificial Sequence: Synthetic oligonucleotide
augggcgccugggugccau

SEQ ID NO: 2454586 - RNA, 19 nt, Artificial Sequence
  Description of Artificial Sequence: Synthetic oligonucleotide
guguagcggacuguccccu

SEQ ID NO: 2454587 - RNA, 19 nt, Artificial Sequence
  Description of Artificial Sequence: Synthetic oligonucleotide
cgugauuucccaccaagau

SEQ ID NO: 2454588 - RNA, 19 nt, Artificial Sequence
  Description of Artificial Sequence: Synthetic oligonucleotide
gccaucuuuccagcucuuc

SEQ ID NO: 2454589 - RNA, 19 nt, Artificial Sequence
  Description of Artificial Sequence: Synthetic oligonucleotide
cgaguauguuaccagcaua

SEQ ID NO: 2454590 - RNA, 19 nt, Artificial Sequence
  Description of Artificial Sequence: Synthetic oligonucleotide
ccauaguguuugccucgug

SEQ ID NO: 2454591 - RNA, 19 nt, Artificial Sequence
  Description of Artificial Sequence: Synthetic oligonucleotide
cuccgggucuccauccgau

SEQ ID NO: 2454592 - RNA, 19 nt, Artificial Sequence
  Description of Artificial Sequence: Synthetic oligonucleotide
ccguggggcucaacagggc

SEQ ID NO: 2454593 - RNA, 19 nt, Artificial Sequence
  Description of Artificial Sequence: Synthetic oligonucleotide
gccuccuuguuuuggggau

SEQ ID NO: 2454594 - RNA, 19 nt, Artificial Sequence
  Description of Artificial Sequence: Synthetic oligonucleotide
gcauaaacauagugaccuu

SEQ ID NO: 2454595 - RNA, 19 nt, Artificial Sequence
  Description of Artificial Sequence: Synthetic oligonucleotide
gcuccgggucuccauccga

SEQ ID NO: 2454596 - RNA, 19 nt, Artificial Sequence
  Description of Artificial Sequence: Synthetic oligonucleotide
ggcaccagaucaguauuau

SEQ ID NO: 2454597 - RNA, 19 nt, Artificial Sequence
  Description of Artificial Sequence: Synthetic oligonucleotide
cugacgcugagugccgagu

SEQ ID NO: 2454598 - RNA, 19 nt, Artificial Sequence
  Description of Artificial Sequence: Synthetic oligonucleotide
ccucacccgggcucuugac

SEQ ID NO: 2454599 - RNA, 19 nt, Artificial Sequence
  Description of Artificial Sequence: Synthetic oligonucleotide
gggcacguagaccucuuuu

SEQ ID NO: 2454600 - RNA, 19 nt, Artificial Sequence
  Description of Artificial Sequence: Synthetic oligonucleotide
ggcucuugacuuccacuau

SEQ ID NO: 2454601 - RNA, 19 nt, Artificial Sequence
  Description of Artificial Sequence: Synthetic oligonucleotide
agcugccguggggcucaac

SEQ ID NO: 2454602 - RNA, 19 nt, Artificial Sequence
  Description of Artificial Sequence: Synthetic oligonucleotide
cguagaccucuuuugugua

SEQ ID NO: 2454603 - RNA, 19 nt, Artificial Sequence
  Description of Artificial Sequence: Synthetic oligonucleotide
ccauuuucuugaugccaua

SEQ ID NO: 2454604 - RNA, 19 nt, Artificial Sequence
  Description of Artificial Sequence: Synthetic oligonucleotide
ugggcgccugggugccauc

SEQ ID NO: 2454605 - RNA, 19 nt, Artificial Sequence
  Description of Artificial Sequence: Synthetic oligonucleotide
cuguggggaccugguccuc

SEQ ID NO: 2454606 - RNA, 19 nt, Artificial Sequence
  Description of Artificial Sequence: Synthetic oligonucleotide
gcgccugggugccaucgaa

SEQ ID NO: 2454607 - RNA, 19 nt, Artificial Sequence
  Description of Artificial Sequence: Synthetic oligonucleotide
ccgaguauguuaccagcau

SEQ ID NO: 2454608 - RNA, 19 nt, Artificial Sequence
  Description of Artificial Sequence: Synthetic oligonucleotide
gagucccacaugggcgccu

SEQ ID NO: 2454609 - RNA, 19 nt, Artificial Sequence
  Description of Artificial Sequence: Synthetic oligonucleotide
ggcgccugggugccaucga

SEQ ID NO: 2454610 - RNA, 19 nt, Artificial Sequence
  Description of Artificial Sequence: Synthetic oligonucleotide
ccuguggccugggcuccgg

SEQ ID NO: 2454611 - RNA, 19 nt, Artificial Sequence
  Description of Artificial Sequence: Synthetic oligonucleotide
cccggccucagcgaaagua

SEQ ID NO: 2454612 - RNA, 19 nt, Artificial Sequence
  Description of Artificial Sequence: Synthetic oligonucleotide
gccauaguguuugccucgu

SEQ ID NO: 2454613 - RNA, 19 nt, Artificial Sequence
  Description of Artificial Sequence: Synthetic oligonucleotide
guacugccgacgccaucuu

SEQ ID NO: 2454614 - RNA, 19 nt, Artificial Sequence
  Description of Artificial Sequence: Synthetic oligonucleotide
ccugggugccaucgaaacu

SEQ ID NO: 2454615 - RNA, 19 nt, Artificial Sequence
  Description of Artificial Sequence: Synthetic oligonucleotide
cugggcuccgggucuccau

SEQ ID NO: 2454616 - RNA, 19 nt, Artificial Sequence
  Description of Artificial Sequence: Synthetic oligonucleotide
ccccuguggccugggcucc

SEQ ID NO: 2454617 - RNA, 19 nt, Artificial Sequence
  Description of Artificial Sequence: Synthetic oligonucleotide
cguggacaaaugucuugua

SEQ ID NO: 2454618 - RNA, 19 nt, Artificial Sequence
  Description of Artificial Sequence: Synthetic oligonucleotide
caggaaccacguggacaaa

SEQ ID NO: 2454619 - RNA, 19 nt, Artificial Sequence
  Description of Artificial Sequence: Synthetic oligonucleotide
ccacguggacaaaugucuu

SEQ ID NO: 2454620 - RNA, 19 nt, Artificial Sequence
  Description of Artificial Sequence: Synthetic oligonucleotide
cgagucccacaugggcgcc

SEQ ID NO: 2454621 - RNA, 19 nt, Artificial Sequence
  Description of Artificial Sequence: Synthetic oligonucleotide
ccgaugguuucaacaggau

SEQ ID NO: 2454622 - RNA, 19 nt, Artificial Sequence
  Description of Artificial Sequence: Synthetic oligonucleotide
gggucuccauccgaugguu

SEQ ID NO: 2454623 - RNA, 19 nt, Artificial Sequence
  Description of Artificial Sequence: Synthetic oligonucleotide
cgcugagugccgaguaugu

SEQ ID NO: 2454624 - RNA, 19 nt, Artificial Sequence
  Description of Artificial Sequence: Synthetic oligonucleotide
gcugagugccgaguauguu

SEQ ID NO: 2454625 - RNA, 19 nt, Artificial Sequence
  Description of Artificial Sequence: Synthetic oligonucleotide
ccccuccuccagggcauag

SEQ ID NO: 2454626 - RNA, 19 nt, Artificial Sequence
  Description of Artificial Sequence: Synthetic oligonucleotide
cccacaugggcgccugggu

SEQ ID NO: 2454627 - RNA, 19 nt, Artificial Sequence
  Description of Artificial Sequence: Synthetic oligonucleotide
ggucuccauccgaugguuu

SEQ ID NO: 2454628 - RNA, 19 nt, Artificial Sequence
  Description of Artificial Sequence: Synthetic oligonucleotide
caugggcgccugggugcca

SEQ ID NO: 2454629 - RNA, 19 nt, Artificial Sequence
  Description of Artificial Sequence: Synthetic oligonucleotide
uagcugccguggggcucaa

SEQ ID NO: 2454630 - RNA, 19 nt, Artificial Sequence
  Description of Artificial Sequence: Synthetic oligonucleotide
cggccucagcgaaaguacu

SEQ ID NO: 2454631 - RNA, 19 nt, Artificial Sequence
  Description of Artificial Sequence: Synthetic oligonucleotide
cgggucuccauccgauggu

SEQ ID NO: 2454632 - RNA, 19 nt, Artificial Sequence
  Description of Artificial Sequence: Synthetic oligonucleotide
ccuccuuguuuuggggauu

SEQ ID NO: 2454633 - RNA, 19 nt, Artificial Sequence
  Description of Artificial Sequence: Synthetic oligonucleotide
ggggcucaacagggcugcu

SEQ ID NO: 2454634 - RNA, 19 nt, Artificial Sequence
  Description of Artificial Sequence: Synthetic oligonucleotide
gguccucacccgggcucuu

SEQ ID NO: 2454635 - RNA, 19 nt, Artificial Sequence
  Description of Artificial Sequence: Synthetic oligonucleotide
cagcgcccuugggcaggcu

SEQ ID NO: 2454636 - RNA, 19 nt, Artificial Sequence
  Description of Artificial Sequence: Synthetic oligonucleotide
ccccggccucagcgaaagu

SEQ ID NO: 2454637 - RNA, 19 nt, Artificial Sequence
  Description of Artificial Sequence: Synthetic oligonucleotide
aauguaucgagucaggcac

SEQ ID NO: 2454638 - RNA, 19 nt, Artificial Sequence
  Description of Artificial Sequence: Synthetic oligonucleotide
aauaugaagaggcgugggc

SEQ ID NO: 2454639 - RNA, 19 nt, Artificial Sequence
  Description of Artificial Sequence: Synthetic oligonucleotide
uuuaucuggcucaaggcgg

SEQ ID NO: 2454640 - RNA, 19 nt, Artificial Sequence
  Description of Artificial Sequence: Synthetic oligonucleotide
ucugacauggauagaagcc

SEQ ID NO: 2454641 - RNA, 19 nt, Artificial Sequence
  Description of Artificial Sequence: Synthetic oligonucleotide
cuuuaucuggcucaaggcg

SEQ ID NO: 2454642 - RNA, 19 nt, Artificial Sequence
  Description of Artificial Sequence: Synthetic oligonucleotide
acugagauccaacucgugg

SEQ ID NO: 2454643 - RNA, 19 nt, Artificial Sequence
  Description of Artificial Sequence: Synthetic oligonucleotide
aguguuugguggcauagac

SEQ ID NO: 2454644 - RNA, 19 nt, Artificial Sequence
  Description of Artificial Sequence: Synthetic oligonucleotide
uaucgagucaggcacagga

SEQ ID NO: 2454645 - RNA, 19 nt, Artificial Sequence
  Description of Artificial Sequence: Synthetic oligonucleotide
auaugaagaggcgugggcc

SEQ ID NO: 2454646 - RNA, 19 nt, Artificial Sequence
  Description of Artificial Sequence: Synthetic oligonucleotide
auggauagaagccgugccc

SEQ ID NO: 2454647 - RNA, 19 nt, Artificial Sequence
  Description of Artificial Sequence: Synthetic oligonucleotide
aacauggaaccaucccagc

SEQ ID NO: 2454648 - RNA, 19 nt, Artificial Sequence
  Description of Artificial Sequence: Synthetic oligonucleotide
aauggaagagcaccggccu

SEQ ID NO: 2454649 - RNA, 19 nt, Artificial Sequence
  Description of Artificial Sequence: Synthetic oligonucleotide
acaggaacacgucuccacc

SEQ ID NO: 2454650 - RNA, 19 nt, Artificial Sequence
  Description of Artificial Sequence: Synthetic oligonucleotide
uggggccagacgcagaucg

SEQ ID NO: 2454651 - RNA, 19 nt, Artificial Sequence
  Description of Artificial Sequence: Synthetic oligonucleotide
aaguugcuggagcaggcgg

SEQ ID NO: 2454652 - RNA, 19 nt, Artificial Sequence
  Description of Artificial Sequence: Synthetic oligonucleotide
auugggucgcagcagucgc

SEQ ID NO: 2454653 - RNA, 19 nt, Artificial Sequence
  Description of Artificial Sequence: Synthetic oligonucleotide
acauggaaccaucccagcg

SEQ ID NO: 2454654 - RNA, 19 nt, Artificial Sequence
  Description of Artificial Sequence: Synthetic oligonucleotide
accacaggagcucagcguc

SEQ ID NO: 2454655 - RNA, 19 nt, Artificial Sequence
  Description of Artificial Sequence: Synthetic oligonucleotide
gucuccaccggccugaaag

SEQ ID NO: 2454656 - RNA, 19 nt, Artificial Sequence
  Description of Artificial Sequence: Synthetic oligonucleotide
agacggaaguugcuggagc

SEQ ID NO: 2454657 - RNA, 19 nt, Artificial Sequence
  Description of Artificial Sequence: Synthetic oligonucleotide
aaggcggaagaccuggcug

SEQ ID NO: 2454658 - RNA, 19 nt, Artificial Sequence
  Description of Artificial Sequence: Synthetic oligonucleotide
uggauagaagccgugcccg

SEQ ID NO: 2454659 - RNA, 19 nt, Artificial Sequence
  Description of Artificial Sequence: Synthetic oligonucleotide
ugcaguggcuccaggaucc

SEQ ID NO: 2454660 - RNA, 19 nt, Artificial Sequence
  Description of Artificial Sequence: Synthetic oligonucleotide
cugacauggauagaagccg

SEQ ID NO: 2454661 - RNA, 19 nt, Artificial Sequence
  Description of Artificial Sequence: Synthetic oligonucleotide
uaugaagaggcgugggccc

SEQ ID NO: 2454662 - RNA, 19 nt, Artificial Sequence
  Description of Artificial Sequence: Synthetic oligonucleotide
uccaggaucccuuuaucug

SEQ ID NO: 2454663 - RNA, 19 nt, Artificial Sequence
  Description of Artificial Sequence: Synthetic oligonucleotide
gaacauggaaccaucccag

SEQ ID NO: 2454664 - RNA, 19 nt, Artificial Sequence
  Description of Artificial Sequence: Synthetic oligonucleotide
ucgagacggaaguugcugg

SEQ ID NO: 2454665 - RNA, 19 nt, Artificial Sequence
  Description of Artificial Sequence: Synthetic oligonucleotide
cauggaaccaucccagcgc

SEQ ID NO: 2454666 - RNA, 19 nt, Artificial Sequence
  Description of Artificial Sequence: Synthetic oligonucleotide
acauggauagaagccgugc

SEQ ID NO: 2454667 - RNA, 19 nt, Artificial Sequence
  Description of Artificial Sequence: Synthetic oligonucleotide
agcagaguggugcugccgg

SEQ ID NO: 2454668 - RNA, 19 nt, Artificial Sequence
  Description of Artificial Sequence: Synthetic oligonucleotide
aucgggacuggcccgagac

SEQ ID NO: 2454669 - RNA, 19 nt, Artificial Sequence
  Description of Artificial Sequence: Synthetic oligonucleotide
ugagauccaacucguggug

SEQ ID NO: 2454670 - RNA, 19 nt, Artificial Sequence
  Description of Artificial Sequence: Synthetic oligonucleotide
aaccaauggaagagcaccg

SEQ ID NO: 2454671 - RNA, 19 nt, Artificial Sequence
  Description of Artificial Sequence: Synthetic oligonucleotide
ugaagcacgcagcgaagag

SEQ ID NO: 2454672 - RNA, 19 nt, Artificial Sequence
  Description of Artificial Sequence: Synthetic oligonucleotide
ucuggcucaaggcggaaga

SEQ ID NO: 2454673 - RNA, 19 nt, Artificial Sequence
  Description of Artificial Sequence: Synthetic oligonucleotide
agcgucauugggucgcagc

SEQ ID NO: 2454674 - RNA, 19 nt, Artificial Sequence
  Description of Artificial Sequence: Synthetic oligonucleotide
cucaaagcggccaccaaac

SEQ ID NO: 2454675 - RNA, 19 nt, Artificial Sequence
  Description of Artificial Sequence: Synthetic oligonucleotide
cauggauagaagccgugcc

SEQ ID NO: 2454676 - RNA, 19 nt, Artificial Sequence
  Description of Artificial Sequence: Synthetic oligonucleotide
cugugcgccucucaaagcg

SEQ ID NO: 2454677 - RNA, 19 nt, Artificial Sequence
  Description of Artificial Sequence: Synthetic oligonucleotide
gaucccuuuaucuggcuca

SEQ ID NO: 2454678 - RNA, 19 nt, Artificial Sequence
  Description of Artificial Sequence: Synthetic oligonucleotide
aggauggccaacuggucuc

SEQ ID NO: 2454679 - RNA, 19 nt, Artificial Sequence
  Description of Artificial Sequence: Synthetic oligonucleotide
uggaguccccaauguaucg

SEQ ID NO: 2454680 - RNA, 19 nt, Artificial Sequence
  Description of Artificial Sequence: Synthetic oligonucleotide
gagaccacaggugcgagcc

SEQ ID NO: 2454681 - RNA, 19 nt, Artificial Sequence
  Description of Artificial Sequence: Synthetic oligonucleotide
agcgcaugaccauggaguc

SEQ ID NO: 2454682 - RNA, 19 nt, Artificial Sequence
  Description of Artificial Sequence: Synthetic oligonucleotide
gaagccagcagcagaugcg

SEQ ID NO: 2454683 - RNA, 19 nt, Artificial Sequence
  Description of Artificial Sequence: Synthetic oligonucleotide
accaucccagcgcaugacc

SEQ ID NO: 2454684 - RNA, 19 nt, Artificial Sequence
  Description of Artificial Sequence: Synthetic oligonucleotide
aaccacaggagcucagcgu

SEQ ID NO: 2454685 - RNA, 19 nt, Artificial Sequence
  Description of Artificial Sequence: Synthetic oligonucleotide
ugcguggggcccuugaagc

SEQ ID NO: 2454686 - RNA, 19 nt, Artificial Sequence
  Description of Artificial Sequence: Synthetic oligonucleotide
ugacauggauagaagccgu

SEQ ID NO: 2454687 - RNA, 19 nt, Artificial Sequence
  Description of Artificial Sequence: Synthetic oligonucleotide
gucgcgacacagcagagug

SEQ ID NO: 2454688 - RNA, 19 nt, Artificial Sequence
  Description of Artificial Sequence: Synthetic oligonucleotide
uuaucuggcucaaggcgga

SEQ ID NO: 2454689 - RNA, 19 nt, Artificial Sequence
  Description of Artificial Sequence: Synthetic oligonucleotide
gcagccaauaugaagaggc

SEQ ID NO: 2454690 - RNA, 19 nt, Artificial Sequence
  Description of Artificial Sequence: Synthetic oligonucleotide
aaagcggccaccaaaccaa

SEQ ID NO: 2454691 - RNA, 19 nt, Artificial Sequence
  Description of Artificial Sequence: Synthetic oligonucleotide
ugugcgccucucaaagcgg

SEQ ID NO: 2454692 - RNA, 19 nt, Artificial Sequence
  Description of Artificial Sequence: Synthetic oligonucleotide
ugguagaucugcguggggc

SEQ ID NO: 2454693 - RNA, 19 nt, Artificial Sequence
  Description of Artificial Sequence: Synthetic oligonucleotide
cugcguuggggccagacgc

SEQ ID NO: 2454694 - RNA, 19 nt, Artificial Sequence
  Description of Artificial Sequence: Synthetic oligonucleotide
ucguggugcugguagaucu

SEQ ID NO: 2454695 - RNA, 19 nt, Artificial Sequence
  Description of Artificial Sequence: Synthetic oligonucleotide
aggaacacgucuccaccgg

SEQ ID NO: 2454696 - RNA, 19 nt, Artificial Sequence
  Description of Artificial Sequence: Synthetic oligonucleotide
caacucguggugcugguag

SEQ ID NO: 2454697 - RNA, 19 nt, Artificial Sequence
  Description of Artificial Sequence: Synthetic oligonucleotide
caggaacacgucuccaccg

SEQ ID NO: 2454698 - RNA, 19 nt, Artificial Sequence
  Description of Artificial Sequence: Synthetic oligonucleotide
aacacgucuccaccggccu

SEQ ID NO: 2454699 - RNA, 19 nt, Artificial Sequence
  Description of Artificial Sequence: Synthetic oligonucleotide
guggcauagacguccucgg

SEQ ID NO: 2454700 - RNA, 19 nt, Artificial Sequence
  Description of Artificial Sequence: Synthetic oligonucleotide
gaguccccaauguaucgag

SEQ ID NO: 2454701 - RNA, 19 nt, Artificial Sequence
  Description of Artificial Sequence: Synthetic oligonucleotide
ucaaagcggccaccaaacc

SEQ ID NO: 2454702 - RNA, 19 nt, Artificial Sequence
  Description of Artificial Sequence: Synthetic oligonucleotide
caccaaaccaauggaagag

SEQ ID NO: 2454703 - RNA, 19 nt, Artificial Sequence
  Description of Artificial Sequence: Synthetic oligonucleotide
uguaucgagucaggcacag

SEQ ID NO: 2454704 - RNA, 19 nt, Artificial Sequence
  Description of Artificial Sequence: Synthetic oligonucleotide
uccccaauguaucgaguca

SEQ ID NO: 2454705 - RNA, 19 nt, Artificial Sequence
  Description of Artificial Sequence: Synthetic oligonucleotide
caauguaucgagucaggca

SEQ ID NO: 2454706 - RNA, 19 nt, Artificial Sequence
  Description of Artificial Sequence: Synthetic oligonucleotide
ggaacauggaaccauccca

SEQ ID NO: 2454707 - RNA, 19 nt, Artificial Sequence
  Description of Artificial Sequence: Synthetic oligonucleotide
cacgcagcgaagagaaagc

SEQ ID NO: 2454708 - RNA, 19 nt, Artificial Sequence
  Description of Artificial Sequence: Synthetic oligonucleotide
gaaguugcuggagcaggcg

SEQ ID NO: 2454709 - RNA, 19 nt, Artificial Sequence
  Description of Artificial Sequence: Synthetic oligonucleotide
caauaugaagaggcguggg

SEQ ID NO: 2454710 - RNA, 19 nt, Artificial Sequence
  Description of Artificial Sequence: Synthetic oligonucleotide
acaggugcgagccucccca

SEQ ID NO: 2454711 - RNA, 19 nt, Artificial Sequence
  Description of Artificial Sequence: Synthetic oligonucleotide
caaccacaggagcucagcg

SEQ ID NO: 2454712 - RNA, 19 nt, Artificial Sequence
  Description of Artificial Sequence: Synthetic oligonucleotide
ucgcagcagucgcugaggg

SEQ ID NO: 2454713 - RNA, 19 nt, Artificial Sequence
  Description of Artificial Sequence: Synthetic oligonucleotide
gguggcauagacguccucg

SEQ ID NO: 2454714 - RNA, 19 nt, Artificial Sequence
  Description of Artificial Sequence: Synthetic oligonucleotide
gugacuugggcaaaggcuc

SEQ ID NO: 2454715 - RNA, 19 nt, Artificial Sequence
  Description of Artificial Sequence: Synthetic oligonucleotide
gcagcgaagagaaagcgcc

SEQ ID NO: 2454716 - RNA, 19 nt, Artificial Sequence
  Description of Artificial Sequence: Synthetic oligonucleotide
cuugaagcacgcagcgaag

SEQ ID NO: 2454717 - RNA, 19 nt, Artificial Sequence
  Description of Artificial Sequence: Synthetic oligonucleotide
gcggccaccaaaccaaugg

SEQ ID NO: 2454718 - RNA, 19 nt, Artificial Sequence
  Description of Artificial Sequence: Synthetic oligonucleotide
uggugcugguagaucugcg

SEQ ID NO: 2454719 - RNA, 19 nt, Artificial Sequence
  Description of Artificial Sequence: Synthetic oligonucleotide
guguuugguggcauagacg

SEQ ID NO: 2454720 - RNA, 19 nt, Artificial Sequence
  Description of Artificial Sequence: Synthetic oligonucleotide
gacguccucggccucuggg

SEQ ID NO: 2454721 - RNA, 19 nt, Artificial Sequence
  Description of Artificial Sequence: Synthetic oligonucleotide
ccaggaucccuuuaucugg

SEQ ID NO: 2454722 - RNA, 19 nt, Artificial Sequence
  Description of Artificial Sequence: Synthetic oligonucleotide
gacggaaguugcuggagca

SEQ ID NO: 2454723 - RNA, 19 nt, Artificial Sequence
  Description of Artificial Sequence: Synthetic oligonucleotide
agauccaacucguggugcu

SEQ ID NO: 2454724 - RNA, 19 nt, Artificial Sequence
  Description of Artificial Sequence: Synthetic oligonucleotide
cacaggaacacgucuccac

SEQ ID NO: 2454725 - RNA, 19 nt, Artificial Sequence
  Description of Artificial Sequence: Synthetic oligonucleotide
auggaaccaucccagcgca

SEQ ID NO: 2454726 - RNA, 19 nt, Artificial Sequence
  Description of Artificial Sequence: Synthetic oligonucleotide
auggaguccccaauguauc

SEQ ID NO: 2454727 - RNA, 19 nt, Artificial Sequence
  Description of Artificial Sequence: Synthetic oligonucleotide
cauugggucgcagcagucg

SEQ ID NO: 2454728 - RNA, 19 nt, Artificial Sequence
  Description of Artificial Sequence: Synthetic oligonucleotide
ugcccgucgcgacacagca

SEQ ID NO: 2454729 - RNA, 19 nt, Artificial Sequence
  Description of Artificial Sequence: Synthetic oligonucleotide
aaccaucccagcgcaugac

SEQ ID NO: 2454730 - RNA, 19 nt, Artificial Sequence
  Description of Artificial Sequence: Synthetic oligonucleotide
ugcgagccuccccacaggc

SEQ ID NO: 2454731 - RNA, 19 nt, Artificial Sequence
  Description of Artificial Sequence: Synthetic oligonucleotide
agcaggcggaacauggaac

SEQ ID NO: 2454732 - RNA, 19 nt, Artificial Sequence
  Description of Artificial Sequence: Synthetic oligonucleotide
ggcauagacguccucggcc

SEQ ID NO: 2454733 - RNA, 19 nt, Artificial Sequence
  Description of Artificial Sequence: Synthetic oligonucleotide
accaauggaagagcaccgg

SEQ ID NO: 2454734 - RNA, 19 nt, Artificial Sequence
  Description of Artificial Sequence: Synthetic oligonucleotide
uugaagcacgcagcgaaga

SEQ ID NO: 2454735 - RNA, 19 nt, Artificial Sequence
  Description of Artificial Sequence: Synthetic oligonucleotide
aacucguggugcugguaga

SEQ ID NO: 2454736 - RNA, 19 nt, Artificial Sequence
  Description of Artificial Sequence: Synthetic oligonucleotide
caggaucccuuuaucuggc

SEQ ID NO: 2454737 - RNA, 19 nt, Artificial Sequence
  Description of Artificial Sequence: Synthetic oligonucleotide
ucgcgacacagcagagugg

SEQ ID NO: 2454738 - RNA, 19 nt, Artificial Sequence
  Description of Artificial Sequence: Synthetic oligonucleotide
aaagcgccuucccgccacg

SEQ ID NO: 2454739 - RNA, 19 nt, Artificial Sequence
  Description of Artificial Sequence: Synthetic oligonucleotide
uccaccggccugaaagugu

SEQ ID NO: 2454740 - RNA, 19 nt, Artificial Sequence
  Description of Artificial Sequence: Synthetic oligonucleotide
gugcugccggcuuuggagg

SEQ ID NO: 2454741 - RNA, 19 nt, Artificial Sequence
  Description of Artificial Sequence: Synthetic oligonucleotide
gacgugggccccucgagac

SEQ ID NO: 2454742 - RNA, 19 nt, Artificial Sequence
  Description of Artificial Sequence: Synthetic oligonucleotide
ugacuugggcaaaggcucu

SEQ ID NO: 2454743 - RNA, 19 nt, Artificial Sequence
  Description of Artificial Sequence: Synthetic oligonucleotide
caaagcggccaccaaacca

SEQ ID NO: 2454744 - RNA, 19 nt, Artificial Sequence
  Description of Artificial Sequence: Synthetic oligonucleotide
agcaccggccucugggagg

SEQ ID NO: 2454745 - RNA, 19 nt, Artificial Sequence
  Description of Artificial Sequence: Synthetic oligonucleotide
gaaagcgccuucccgccac

SEQ ID NO: 2454746 - RNA, 19 nt, Artificial Sequence
  Description of Artificial Sequence: Synthetic oligonucleotide
guccccaauguaucgaguc

SEQ ID NO: 2454747 - RNA, 19 nt, Artificial Sequence
  Description of Artificial Sequence: Synthetic oligonucleotide
gagauccaacucguggugc

SEQ ID NO: 2454748 - RNA, 19 nt, Artificial Sequence
  Description of Artificial Sequence: Synthetic oligonucleotide
cucagcgucauugggucgc

SEQ ID NO: 2454749 - RNA, 19 nt, Artificial Sequence
  Description of Artificial Sequence: Synthetic oligonucleotide
aggcggaagaccuggcuga

SEQ ID NO: 2454750 - RNA, 19 nt, Artificial Sequence
  Description of Artificial Sequence: Synthetic oligonucleotide
uggcauagacguccucggc

SEQ ID NO: 2454751 - RNA, 19 nt, Artificial Sequence
  Description of Artificial Sequence: Synthetic oligonucleotide
agccaauaugaagaggcgu

SEQ ID NO: 2454752 - RNA, 19 nt, Artificial Sequence
  Description of Artificial Sequence: Synthetic oligonucleotide
ccugaaaguguuugguggc

SEQ ID NO: 2454753 - RNA, 19 nt, Artificial Sequence
  Description of Artificial Sequence: Synthetic oligonucleotide
acgcagcgaagagaaagcg

SEQ ID NO: 2454754 - RNA, 19 nt, Artificial Sequence
  Description of Artificial Sequence: Synthetic oligonucleotide
gagacggaaguugcuggag

SEQ ID NO: 2454755 - RNA, 19 nt, Artificial Sequence
  Description of Artificial Sequence: Synthetic oligonucleotide
gccaauaugaagaggcgug

SEQ ID NO: 2454756 - RNA, 19 nt, Artificial Sequence
  Description of Artificial Sequence: Synthetic oligonucleotide
ggagcucagcgucauuggg

SEQ ID NO: 2454757 - RNA, 19 nt, Artificial Sequence
  Description of Artificial Sequence: Synthetic oligonucleotide
ucagcgucggugucgcggu

SEQ ID NO: 2454758 - RNA, 19 nt, Artificial Sequence
  Description of Artificial Sequence: Synthetic oligonucleotide
augaccauggaguccccaa

SEQ ID NO: 2454759 - RNA, 19 nt, Artificial Sequence
  Description of Artificial Sequence: Synthetic oligonucleotide
gagucaggcacaggaacac

SEQ ID NO: 2454760 - RNA, 19 nt, Artificial Sequence
  Description of Artificial Sequence: Synthetic oligonucleotide
gaagcacgcagcgaagaga

SEQ ID NO: 2454761 - RNA, 19 nt, Artificial Sequence
  Description of Artificial Sequence: Synthetic oligonucleotide
cucgagacggaaguugcug

SEQ ID NO: 2454762 - RNA, 19 nt, Artificial Sequence
  Description of Artificial Sequence: Synthetic oligonucleotide
acuugggcaaaggcucugg

SEQ ID NO: 2454763 - RNA, 19 nt, Artificial Sequence
  Description of Artificial Sequence: Synthetic oligonucleotide
gaaccaucccagcgcauga

SEQ ID NO: 2454764 - RNA, 19 nt, Artificial Sequence
  Description of Artificial Sequence: Synthetic oligonucleotide
gaagacgugggccccucga

SEQ ID NO: 2454765 - RNA, 19 nt, Artificial Sequence
  Description of Artificial Sequence: Synthetic oligonucleotide
aggcacaggaacacgucuc

SEQ ID NO: 2454766 - RNA, 19 nt, Artificial Sequence
  Description of Artificial Sequence: Synthetic oligonucleotide
gacauggauagaagccgug

SEQ ID NO: 2454767 - RNA, 19 nt, Artificial Sequence
  Description of Artificial Sequence: Synthetic oligonucleotide
gcacgcagcgaagagaaag

SEQ ID NO: 2454768 - RNA, 19 nt, Artificial Sequence
  Description of Artificial Sequence: Synthetic oligonucleotide
acgcagaucgggacuggcc

SEQ ID NO: 2454769 - RNA, 19 nt, Artificial Sequence
  Description of Artificial Sequence: Synthetic oligonucleotide
ggcaaagucgcugccgagg

SEQ ID NO: 2454770 - RNA, 19 nt, Artificial Sequence
  Description of Artificial Sequence: Synthetic oligonucleotide
guccugccgagccucaggc

SEQ ID NO: 2454771 - RNA, 19 nt, Artificial Sequence
  Description of Artificial Sequence: Synthetic oligonucleotide
caggcgggcagccaauaug

SEQ ID NO: 2454772 - RNA, 19 nt, Artificial Sequence
  Description of Artificial Sequence: Synthetic oligonucleotide
gaagagcaccggccucugg

SEQ ID NO: 2454773 - RNA, 19 nt, Artificial Sequence
  Description of Artificial Sequence: Synthetic oligonucleotide
gaggcaucggccaccacga

SEQ ID NO: 2454774 - RNA, 19 nt, Artificial Sequence
  Description of Artificial Sequence: Synthetic oligonucleotide
agggccucagcgucggugu

SEQ ID NO: 2454775 - RNA, 19 nt, Artificial Sequence
  Description of Artificial Sequence: Synthetic oligonucleotide
cugagauccaacucguggu

SEQ ID NO: 2454776 - RNA, 19 nt, Artificial Sequence
  Description of Artificial Sequence: Synthetic oligonucleotide
uagaagccgugcccgucgc

SEQ ID NO: 2454777 - RNA, 19 nt, Artificial Sequence
  Description of Artificial Sequence: Synthetic oligonucleotide
agcgucggugucgcggugc

SEQ ID NO: 2454778 - RNA, 19 nt, Artificial Sequence
  Description of Artificial Sequence: Synthetic oligonucleotide
cauggaguccccaauguau

SEQ ID NO: 2454779 - RNA, 19 nt, Artificial Sequence
  Description of Artificial Sequence: Synthetic oligonucleotide
ucauugggucgcagcaguc

SEQ ID NO: 2454780 - RNA, 19 nt, Artificial Sequence
  Description of Artificial Sequence: Synthetic oligonucleotide
gaugucugugcgccucuca

SEQ ID NO: 2454781 - RNA, 19 nt, Artificial Sequence
  Description of Artificial Sequence: Synthetic oligonucleotide
cugcguggggcccuugaag

SEQ ID NO: 2454782 - RNA, 19 nt, Artificial Sequence
  Description of Artificial Sequence: Synthetic oligonucleotide
cagcgcaugaccauggagu

SEQ ID NO: 2454783 - RNA, 19 nt, Artificial Sequence
  Description of Artificial Sequence: Synthetic oligonucleotide
ggcacaggaacacgucucc

SEQ ID NO: 2454784 - RNA, 19 nt, Artificial Sequence
  Description of Artificial Sequence: Synthetic oligonucleotide
gcuaggaccugcguugggg

SEQ ID NO: 2454785 - RNA, 19 nt, Artificial Sequence
  Description of Artificial Sequence: Synthetic oligonucleotide
gggcccuugaagcacgcag

SEQ ID NO: 2454786 - RNA, 19 nt, Artificial Sequence
  Description of Artificial Sequence: Synthetic oligonucleotide
gaugcgggcggccguccag

SEQ ID NO: 2454787 - RNA, 19 nt, Artificial Sequence
  Description of Artificial Sequence: Synthetic oligonucleotide
ucugcguggggcccuugaa

SEQ ID NO: 2454788 - RNA, 19 nt, Artificial Sequence
  Description of Artificial Sequence: Synthetic oligonucleotide
ccaauaugaagaggcgugg

SEQ ID NO: 2454789 - RNA, 19 nt, Artificial Sequence
  Description of Artificial Sequence: Synthetic oligonucleotide
accggccugaaaguguuug

SEQ ID NO: 2454790 - RNA, 19 nt, Artificial Sequence
  Description of Artificial Sequence: Synthetic oligonucleotide
ucgcugccgaggauggcca

SEQ ID NO: 2454791 - RNA, 19 nt, Artificial Sequence
  Description of Artificial Sequence: Synthetic oligonucleotide
ugcgccucucaaagcggcc

SEQ ID NO: 2454792 - RNA, 19 nt, Artificial Sequence
  Description of Artificial Sequence: Synthetic oligonucleotide
gagcaccggccucugggag

SEQ ID NO: 2454793 - RNA, 19 nt, Artificial Sequence
  Description of Artificial Sequence: Synthetic oligonucleotide
ggaagaccuggcugaaggc

SEQ ID NO: 2454794 - RNA, 19 nt, Artificial Sequence
  Description of Artificial Sequence: Synthetic oligonucleotide
aggcgggcagccaauauga

SEQ ID NO: 2454795 - RNA, 19 nt, Artificial Sequence
  Description of Artificial Sequence: Synthetic oligonucleotide
cugcaguggcuccaggauc

SEQ ID NO: 2454796 - RNA, 19 nt, Artificial Sequence
  Description of Artificial Sequence: Synthetic oligonucleotide
gagcaggcggaacauggaa

SEQ ID NO: 2454797 - RNA, 19 nt, Artificial Sequence
  Description of Artificial Sequence: Synthetic oligonucleotide
agaagccgugcccgucgcg

SEQ ID NO: 2454798 - RNA, 19 nt, Artificial Sequence
  Description of Artificial Sequence: Synthetic oligonucleotide
gcccuugaagcacgcagcg

SEQ ID NO: 2454799 - RNA, 19 nt, Artificial Sequence
  Description of Artificial Sequence: Synthetic oligonucleotide
ugggucgcagcagucgcug

SEQ ID NO: 2454800 - RNA, 19 nt, Artificial Sequence
  Description of Artificial Sequence: Synthetic oligonucleotide
ugucgcggugccaggcgug

SEQ ID NO: 2454801 - RNA, 19 nt, Artificial Sequence
  Description of Artificial Sequence: Synthetic oligonucleotide
ugcugccggcuuuggaggc

SEQ ID NO: 2454802 - RNA, 19 nt, Artificial Sequence
  Description of Artificial Sequence: Synthetic oligonucleotide
uugggucgcagcagucgcu

SEQ ID NO: 2454803 - RNA, 19 nt, Artificial Sequence
  Description of Artificial Sequence: Synthetic oligonucleotide
accacgaagcagggcugcc

SEQ ID NO: 2454804 - RNA, 19 nt, Artificial Sequence
  Description of Artificial Sequence: Synthetic oligonucleotide
gauccaacucguggugcug

SEQ ID NO: 2454805 - RNA, 19 nt, Artificial Sequence
  Description of Artificial Sequence: Synthetic oligonucleotide
acggaaguugcuggagcag

SEQ ID NO: 2454806 - RNA, 19 nt, Artificial Sequence
  Description of Artificial Sequence: Synthetic oligonucleotide
ggaaccaucccagcgcaug

SEQ ID NO: 2454807 - RNA, 19 nt, Artificial Sequence
  Description of Artificial Sequence: Synthetic oligonucleotide
aggggcuaggaccugcguu

SEQ ID NO: 2454808 - RNA, 19 nt, Artificial Sequence
  Description of Artificial Sequence: Synthetic oligonucleotide
acgugggccccucgagacg

SEQ ID NO: 2454809 - RNA, 19 nt, Artificial Sequence
  Description of Artificial Sequence: Synthetic oligonucleotide
cagacgcagaucgggacug

SEQ ID NO: 2454810 - RNA, 19 nt, Artificial Sequence
  Description of Artificial Sequence: Synthetic oligonucleotide
ccaauguaucgagucaggc

SEQ ID NO: 2454811 - RNA, 19 nt, Artificial Sequence
  Description of Artificial Sequence: Synthetic oligonucleotide
gcagaucgggacuggcccg

SEQ ID NO: 2454812 - RNA, 19 nt, Artificial Sequence
  Description of Artificial Sequence: Synthetic oligonucleotide
aucuggcucaaggcggaag

SEQ ID NO: 2454813 - RNA, 19 nt, Artificial Sequence
  Description of Artificial Sequence: Synthetic oligonucleotide
caggcgugcaggcucugac

SEQ ID NO: 2454814 - RNA, 19 nt, Artificial Sequence
  Description of Artificial Sequence: Synthetic oligonucleotide
cacuuccaggguccugccg

SEQ ID NO: 2454815 - RNA, 19 nt, Artificial Sequence
  Description of Artificial Sequence: Synthetic oligonucleotide
acggugacuugggcaaagg

SEQ ID NO: 2454816 - RNA, 19 nt, Artificial Sequence
  Description of Artificial Sequence: Synthetic oligonucleotide
cccaauguaucgagucagg

SEQ ID NO: 2454817 - RNA, 19 nt, Artificial Sequence
  Description of Artificial Sequence: Synthetic oligonucleotide
augcgggcggccguccagc

SEQ ID NO: 2454818 - RNA, 19 nt, Artificial Sequence
  Description of Artificial Sequence: Synthetic oligonucleotide
ucccgccacggugacuugg

SEQ ID NO: 2454819 - RNA, 19 nt, Artificial Sequence
  Description of Artificial Sequence: Synthetic oligonucleotide
ugggaugucugugcgccuc

SEQ ID NO: 2454820 - RNA, 19 nt, Artificial Sequence
  Description of Artificial Sequence: Synthetic oligonucleotide
ccaaaccaauggaagagca

SEQ ID NO: 2454821 - RNA, 19 nt, Artificial Sequence
  Description of Artificial Sequence: Synthetic oligonucleotide
aggcgugcaggcucugaca

SEQ ID NO: 2454822 - RNA, 19 nt, Artificial Sequence
  Description of Artificial Sequence: Synthetic oligonucleotide
cugguagaucugcgugggg

SEQ ID NO: 2454823 - RNA, 19 nt, Artificial Sequence
  Description of Artificial Sequence: Synthetic oligonucleotide
auagacguccucggccucu

SEQ ID NO: 2454824 - RNA, 19 nt, Artificial Sequence
  Description of Artificial Sequence: Synthetic oligonucleotide
ggugucgcggugccaggcg

SEQ ID NO: 2454825 - RNA, 19 nt, Artificial Sequence
  Description of Artificial Sequence: Synthetic oligonucleotide
cacugagauccaacucgug

SEQ ID NO: 2454826 - RNA, 19 nt, Artificial Sequence
  Description of Artificial Sequence: Synthetic oligonucleotide
ucggugucgcggugccagg

SEQ ID NO: 2454827 - RNA, 19 nt, Artificial Sequence
  Description of Artificial Sequence: Synthetic oligonucleotide
aguggugcugccggcuuug

SEQ ID NO: 2454828 - RNA, 19 nt, Artificial Sequence
  Description of Artificial Sequence: Synthetic oligonucleotide
gacgcagaucgggacuggc

SEQ ID NO: 2454829 - RNA, 19 nt, Artificial Sequence
  Description of Artificial Sequence: Synthetic oligonucleotide
ugccgaggauggccaacug

SEQ ID NO: 2454830 - RNA, 19 nt, Artificial Sequence
  Description of Artificial Sequence: Synthetic oligonucleotide
gaccuggcugaaggcaaag

SEQ ID NO: 2454831 - RNA, 19 nt, Artificial Sequence
  Description of Artificial Sequence: Synthetic oligonucleotide
gaccacaggugcgagccuc

SEQ ID NO: 2454832 - RNA, 19 nt, Artificial Sequence
  Description of Artificial Sequence: Synthetic oligonucleotide
accugcguuggggccagac

SEQ ID NO: 2454833 - RNA, 19 nt, Artificial Sequence
  Description of Artificial Sequence: Synthetic oligonucleotide
ggaaguugcuggagcaggc

SEQ ID NO: 2454834 - RNA, 19 nt, Artificial Sequence
  Description of Artificial Sequence: Synthetic oligonucleotide
ggugacuugggcaaaggcu

SEQ ID NO: 2454835 - RNA, 19 nt, Artificial Sequence
  Description of Artificial Sequence: Synthetic oligonucleotide
gacuugggcaaaggcucug

SEQ ID NO: 2454836 - RNA, 19 nt, Artificial Sequence
  Description of Artificial Sequence: Synthetic oligonucleotide
gcaaagucgcugccgagga

SEQ ID NO: 2454837 - RNA, 19 nt, Artificial Sequence
  Description of Artificial Sequence: Synthetic oligonucleotide
cccucgagacggaaguugc

SEQ ID NO: 2454838 - RNA, 19 nt, Artificial Sequence
  Description of Artificial Sequence: Synthetic oligonucleotide
acacgucuccaccggccug

SEQ ID NO: 2454839 - RNA, 19 nt, Artificial Sequence
  Description of Artificial Sequence: Synthetic oligonucleotide
guaucgagucaggcacagg

SEQ ID NO: 2454840 - RNA, 19 nt, Artificial Sequence
  Description of Artificial Sequence: Synthetic oligonucleotide
cuccaggaucccuuuaucu

SEQ ID NO: 2454841 - RNA, 19 nt, Artificial Sequence
  Description of Artificial Sequence: Synthetic oligonucleotide
cgagccuccccacaggcgg

SEQ ID NO: 2454842 - RNA, 19 nt, Artificial Sequence
  Description of Artificial Sequence: Synthetic oligonucleotide
cgcaugaccauggaguccc

SEQ ID NO: 2454843 - RNA, 19 nt, Artificial Sequence
  Description of Artificial Sequence: Synthetic oligonucleotide
gugccaggcgugcaggcuc

SEQ ID NO: 2454844 - RNA, 19 nt, Artificial Sequence
  Description of Artificial Sequence: Synthetic oligonucleotide
cacaggugcgagccucccc

SEQ ID NO: 2454845 - RNA, 19 nt, Artificial Sequence
  Description of Artificial Sequence: Synthetic oligonucleotide
augaagaggcgugggccca

SEQ ID NO: 2454846 - RNA, 19 nt, Artificial Sequence
  Description of Artificial Sequence: Synthetic oligonucleotide
guggggcccuugaagcacg

SEQ ID NO: 2454847 - RNA, 19 nt, Artificial Sequence
  Description of Artificial Sequence: Synthetic oligonucleotide
uagaucugcguggggcccu

SEQ ID NO: 2454848 - RNA, 19 nt, Artificial Sequence
  Description of Artificial Sequence: Synthetic oligonucleotide
gacuggcccgagaccacag

SEQ ID NO: 2454849 - RNA, 19 nt, Artificial Sequence
  Description of Artificial Sequence: Synthetic oligonucleotide
cgcagaucgggacuggccc

SEQ ID NO: 2454850 - RNA, 19 nt, Artificial Sequence
  Description of Artificial Sequence: Synthetic oligonucleotide
uccugccgagccucaggca

SEQ ID NO: 2454851 - RNA, 19 nt, Artificial Sequence
  Description of Artificial Sequence: Synthetic oligonucleotide
caggcacugagauccaacu

SEQ ID NO: 2454852 - RNA, 19 nt, Artificial Sequence
  Description of Artificial Sequence: Synthetic oligonucleotide
gcgucauugggucgcagca

SEQ ID NO: 2454853 - RNA, 19 nt, Artificial Sequence
  Description of Artificial Sequence: Synthetic oligonucleotide
accggccucugggaggccg

SEQ ID NO: 2454854 - RNA, 19 nt, Artificial Sequence
  Description of Artificial Sequence: Synthetic oligonucleotide
gggccagacgcagaucggg

SEQ ID NO: 2454855 - RNA, 19 nt, Artificial Sequence
  Description of Artificial Sequence: Synthetic oligonucleotide
cagcagaugcgggcggccg

SEQ ID NO: 2454856 - RNA, 19 nt, Artificial Sequence
  Description of Artificial Sequence: Synthetic oligonucleotide
cagcagaguggugcugccg

SEQ ID NO: 2454857 - RNA, 19 nt, Artificial Sequence
  Description of Artificial Sequence: Synthetic oligonucleotide
cacggugacuugggcaaag

SEQ ID NO: 2454858 - RNA, 19 nt, Artificial Sequence
  Description of Artificial Sequence: Synthetic oligonucleotide
auguaucgagucaggcaca

SEQ ID NO: 2454859 - RNA, 19 nt, Artificial Sequence
  Description of Artificial Sequence: Synthetic oligonucleotide
auccaaccacaggagcuca

SEQ ID NO: 2454860 - RNA, 19 nt, Artificial Sequence
  Description of Artificial Sequence: Synthetic oligonucleotide
gugcgccucucaaagcggc

SEQ ID NO: 2454861 - RNA, 19 nt, Artificial Sequence
  Description of Artificial Sequence: Synthetic oligonucleotide
uagacguccucggccucug

SEQ ID NO: 2454862 - RNA, 19 nt, Artificial Sequence
  Description of Artificial Sequence: Synthetic oligonucleotide
agacgcagaucgggacugg

SEQ ID NO: 2454863 - RNA, 19 nt, Artificial Sequence
  Description of Artificial Sequence: Synthetic oligonucleotide
aggcggaacauggaaccau

SEQ ID NO: 2454864 - RNA, 19 nt, Artificial Sequence
  Description of Artificial Sequence: Synthetic oligonucleotide
ccugcguuggggccagacg

SEQ ID NO: 2454865 - RNA, 19 nt, Artificial Sequence
  Description of Artificial Sequence: Synthetic oligonucleotide
aucgagucaggcacaggaa

SEQ ID NO: 2454866 - RNA, 19 nt, Artificial Sequence
  Description of Artificial Sequence: Synthetic oligonucleotide
cauagacguccucggccuc

SEQ ID NO: 2454867 - RNA, 19 nt, Artificial Sequence
  Description of Artificial Sequence: Synthetic oligonucleotide
ucagcgucauugggucgca

SEQ ID NO: 2454868 - RNA, 19 nt, Artificial Sequence
  Description of Artificial Sequence: Synthetic oligonucleotide
agcgccuucccgccacggu

SEQ ID NO: 2454869 - RNA, 19 nt, Artificial Sequence
  Description of Artificial Sequence: Synthetic oligonucleotide
ugccgagccucaggcacug

SEQ ID NO: 2454870 - RNA, 19 nt, Artificial Sequence
  Description of Artificial Sequence: Synthetic oligonucleotide
gaagaggcgugggcccagc

SEQ ID NO: 2454871 - RNA, 19 nt, Artificial Sequence
  Description of Artificial Sequence: Synthetic oligonucleotide
acucguggugcugguagau

SEQ ID NO: 2454872 - RNA, 19 nt, Artificial Sequence
  Description of Artificial Sequence: Synthetic oligonucleotide
gcucagcgucauugggucg

SEQ ID NO: 2454873 - RNA, 19 nt, Artificial Sequence
  Description of Artificial Sequence: Synthetic oligonucleotide
gucaggcacaggaacacgu

SEQ ID NO: 2454874 - RNA, 19 nt, Artificial Sequence
  Description of Artificial Sequence: Synthetic oligonucleotide
uggaaccaucccagcgcau

SEQ ID NO: 2454875 - RNA, 19 nt, Artificial Sequence
  Description of Artificial Sequence: Synthetic oligonucleotide
ccggccugaaaguguuugg

SEQ ID NO: 2454876 - RNA, 19 nt, Artificial Sequence
  Description of Artificial Sequence: Synthetic oligonucleotide
aggugcgagccuccccaca

SEQ ID NO: 2454877 - RNA, 19 nt, Artificial Sequence
  Description of Artificial Sequence: Synthetic oligonucleotide
aguccccaauguaucgagu

SEQ ID NO: 2454878 - RNA, 19 nt, Artificial Sequence
  Description of Artificial Sequence: Synthetic oligonucleotide
gcauagacguccucggccu

SEQ ID NO: 2454879 - RNA, 19 nt, Artificial Sequence
  Description of Artificial Sequence: Synthetic oligonucleotide
gccggcuuuggaggcaucg

SEQ ID NO: 2454880 - RNA, 19 nt, Artificial Sequence
  Description of Artificial Sequence: Synthetic oligonucleotide
ggaagacgugggccccucg

SEQ ID NO: 2454881 - RNA, 19 nt, Artificial Sequence
  Description of Artificial Sequence: Synthetic oligonucleotide
gccagacgcagaucgggac

SEQ ID NO: 2454882 - RNA, 19 nt, Artificial Sequence
  Description of Artificial Sequence: Synthetic oligonucleotide
agaugcgggcggccgucca

SEQ ID NO: 2454883 - RNA, 19 nt, Artificial Sequence
  Description of Artificial Sequence: Synthetic oligonucleotide
gaucgggacuggcccgaga

SEQ ID NO: 2454884 - RNA, 19 nt, Artificial Sequence
  Description of Artificial Sequence: Synthetic oligonucleotide
guuugguggcauagacguc

SEQ ID NO: 2454885 - RNA, 19 nt, Artificial Sequence
  Description of Artificial Sequence: Synthetic oligonucleotide
cggaaguugcuggagcagg

SEQ ID NO: 2454886 - RNA, 19 nt, Artificial Sequence
  Description of Artificial Sequence: Synthetic oligonucleotide
gcgccuucccgccacggug

SEQ ID NO: 2454887 - RNA, 19 nt, Artificial Sequence
  Description of Artificial Sequence: Synthetic oligonucleotide
cggccguccagcuccaggg

SEQ ID NO: 2454888 - RNA, 19 nt, Artificial Sequence
  Description of Artificial Sequence: Synthetic oligonucleotide
ggcucaaggcggaagaccu

SEQ ID NO: 2454889 - RNA, 19 nt, Artificial Sequence
  Description of Artificial Sequence: Synthetic oligonucleotide
agccgugcccgucgcgaca

SEQ ID NO: 2454890 - RNA, 19 nt, Artificial Sequence
  Description of Artificial Sequence: Synthetic oligonucleotide
ggaguccccaauguaucga

SEQ ID NO: 2454891 - RNA, 19 nt, Artificial Sequence
  Description of Artificial Sequence: Synthetic oligonucleotide
ggcuaggaccugcguuggg

SEQ ID NO: 2454892 - RNA, 19 nt, Artificial Sequence
  Description of Artificial Sequence: Synthetic oligonucleotide
gcggccguccagcuccagg

SEQ ID NO: 2454893 - RNA, 19 nt, Artificial Sequence
  Description of Artificial Sequence: Synthetic oligonucleotide
caggugcgagccuccccac

SEQ ID NO: 2454894 - RNA, 19 nt, Artificial Sequence
  Description of Artificial Sequence: Synthetic oligonucleotide
cacgucuccaccggccuga

SEQ ID NO: 2454895 - RNA, 19 nt, Artificial Sequence
  Description of Artificial Sequence: Synthetic oligonucleotide
gggcuaggaccugcguugg

SEQ ID NO: 2454896 - RNA, 19 nt, Artificial Sequence
  Description of Artificial Sequence: Synthetic oligonucleotide
ggcggaacauggaaccauc

SEQ ID NO: 2454897 - RNA, 19 nt, Artificial Sequence
  Description of Artificial Sequence: Synthetic oligonucleotide
agaucgggacuggcccgag

SEQ ID NO: 2454898 - RNA, 19 nt, Artificial Sequence
  Description of Artificial Sequence: Synthetic oligonucleotide
cagucgcugaggggcuagg

SEQ ID NO: 2454899 - RNA, 19 nt, Artificial Sequence
  Description of Artificial Sequence: Synthetic oligonucleotide
cgagucaggcacaggaaca

SEQ ID NO: 2454900 - RNA, 19 nt, Artificial Sequence
  Description of Artificial Sequence: Synthetic oligonucleotide
caaggcggaagaccuggcu

SEQ ID NO: 2454901 - RNA, 19 nt, Artificial Sequence
  Description of Artificial Sequence: Synthetic oligonucleotide
ugcgggcggccguccagcu

SEQ ID NO: 2454902 - RNA, 19 nt, Artificial Sequence
  Description of Artificial Sequence: Synthetic oligonucleotide
cuucccgccacggugacuu

SEQ ID NO: 2454903 - RNA, 19 nt, Artificial Sequence
  Description of Artificial Sequence: Synthetic oligonucleotide
gugcccgucgcgacacagc

SEQ ID NO: 2454904 - RNA, 19 nt, Artificial Sequence
  Description of Artificial Sequence: Synthetic oligonucleotide
uucccgccacggugacuug

SEQ ID NO: 2454905 - RNA, 19 nt, Artificial Sequence
  Description of Artificial Sequence: Synthetic oligonucleotide
cgugggccccucgagacgg

SEQ ID NO: 2454906 - RNA, 19 nt, Artificial Sequence
  Description of Artificial Sequence: Synthetic oligonucleotide
cagaugcgggcggccgucc

SEQ ID NO: 2454907 - RNA, 19 nt, Artificial Sequence
  Description of Artificial Sequence: Synthetic oligonucleotide
caucggccaccacgaagca

SEQ ID NO: 2454908 - RNA, 19 nt, Artificial Sequence
  Description of Artificial Sequence: Synthetic oligonucleotide
caggcggaacauggaacca

SEQ ID NO: 2454909 - RNA, 19 nt, Artificial Sequence
  Description of Artificial Sequence: Synthetic oligonucleotide
gcaccggccucugggaggc

SEQ ID NO: 2454910 - RNA, 19 nt, Artificial Sequence
  Description of Artificial Sequence: Synthetic oligonucleotide
cucuggcgaucagcagcgg

SEQ ID NO: 2454911 - RNA, 19 nt, Artificial Sequence
  Description of Artificial Sequence: Synthetic oligonucleotide
cagaucgggacuggcccga

SEQ ID NO: 2454912 - RNA, 19 nt, Artificial Sequence
  Description of Artificial Sequence: Synthetic oligonucleotide
ggcgugcaggcucugacau

SEQ ID NO: 2454913 - RNA, 19 nt, Artificial Sequence
  Description of Artificial Sequence: Synthetic oligonucleotide
ccccucgagacggaaguug

SEQ ID NO: 2454914 - RNA, 19 nt, Artificial Sequence
  Description of Artificial Sequence: Synthetic oligonucleotide
ggagcaggcggaacaugga

SEQ ID NO: 2454915 - RNA, 19 nt, Artificial Sequence
  Description of Artificial Sequence: Synthetic oligonucleotide
cagcgaagagaaagcgccu

SEQ ID NO: 2454916 - RNA, 19 nt, Artificial Sequence
  Description of Artificial Sequence: Synthetic oligonucleotide
gccucagcgucggugucgc

SEQ ID NO: 2454917 - RNA, 19 nt, Artificial Sequence
  Description of Artificial Sequence: Synthetic oligonucleotide
gcccgagaccacaggugcg

SEQ ID NO: 2454918 - RNA, 19 nt, Artificial Sequence
  Description of Artificial Sequence: Synthetic oligonucleotide
gcgagccuccccacaggcg

SEQ ID NO: 2454919 - RNA, 19 nt, Artificial Sequence
  Description of Artificial Sequence: Synthetic oligonucleotide
gcgcaugaccauggagucc

SEQ ID NO: 2454920 - RNA, 19 nt, Artificial Sequence
  Description of Artificial Sequence: Synthetic oligonucleotide
gcgucggugucgcggugcc

SEQ ID NO: 2454921 - RNA, 19 nt, Artificial Sequence
  Description of Artificial Sequence: Synthetic oligonucleotide
gcagucgcugaggggcuag

SEQ ID NO: 2454922 - RNA, 19 nt, Artificial Sequence
  Description of Artificial Sequence: Synthetic oligonucleotide
ggauagaagccgugcccgu

SEQ ID NO: 2454923 - RNA, 19 nt, Artificial Sequence
  Description of Artificial Sequence: Synthetic oligonucleotide
gcgugcaggcucugacaug

SEQ ID NO: 2454924 - RNA, 19 nt, Artificial Sequence
  Description of Artificial Sequence: Synthetic oligonucleotide
gcguuggggccagacgcag

SEQ ID NO: 2454925 - RNA, 19 nt, Artificial Sequence
  Description of Artificial Sequence: Synthetic oligonucleotide
ugggccccucgagacggaa

SEQ ID NO: 2454926 - RNA, 19 nt, Artificial Sequence
  Description of Artificial Sequence: Synthetic oligonucleotide
gcucaaggcggaagaccug

SEQ ID NO: 2454927 - RNA, 19 nt, Artificial Sequence
  Description of Artificial Sequence: Synthetic oligonucleotide
gugucgcggugccaggcgu

SEQ ID NO: 2454928 - RNA, 19 nt, Artificial Sequence
  Description of Artificial Sequence: Synthetic oligonucleotide
gcguggggcccuugaagca

SEQ ID NO: 2454929 - RNA, 19 nt, Artificial Sequence
  Description of Artificial Sequence: Synthetic oligonucleotide
ggaccugcguuggggccag

SEQ ID NO: 2454930 - RNA, 19 nt, Artificial Sequence
  Description of Artificial Sequence: Synthetic oligonucleotide
cgaggauggccaacugguc

SEQ ID NO: 2454931 - RNA, 19 nt, Artificial Sequence
  Description of Artificial Sequence: Synthetic oligonucleotide
ggccagacgcagaucggga

SEQ ID NO: 2454932 - RNA, 19 nt, Artificial Sequence
  Description of Artificial Sequence: Synthetic oligonucleotide
gccucucaaagcggccacc

SEQ ID NO: 2454933 - RNA, 19 nt, Artificial Sequence
  Description of Artificial Sequence: Synthetic oligonucleotide
cagcgucauugggucgcag

SEQ ID NO: 2454934 - RNA, 19 nt, Artificial Sequence
  Description of Artificial Sequence: Synthetic oligonucleotide
ugccggcuuuggaggcauc

SEQ ID NO: 2454935 - RNA, 19 nt, Artificial Sequence
  Description of Artificial Sequence: Synthetic oligonucleotide
cucaggcacugagauccaa

SEQ ID NO: 2454936 - RNA, 19 nt, Artificial Sequence
  Description of Artificial Sequence: Synthetic oligonucleotide
ggacuggcccgagaccaca

SEQ ID NO: 2454937 - RNA, 19 nt, Artificial Sequence
  Description of Artificial Sequence: Synthetic oligonucleotide
cugccgaggauggccaacu

SEQ ID NO: 2454938 - RNA, 19 nt, Artificial Sequence
  Description of Artificial Sequence: Synthetic oligonucleotide
gcugccgaggauggccaac

SEQ ID NO: 2454939 - RNA, 19 nt, Artificial Sequence
  Description of Artificial Sequence: Synthetic oligonucleotide
agaucugcguggggcccuu

SEQ ID NO: 2454940 - RNA, 19 nt, Artificial Sequence
  Description of Artificial Sequence: Synthetic oligonucleotide
ccuccccacaggcgggcag

SEQ ID NO: 2454941 - RNA, 19 nt, Artificial Sequence
  Description of Artificial Sequence: Synthetic oligonucleotide
cguggggcccuugaagcac

SEQ ID NO: 2454942 - RNA, 19 nt, Artificial Sequence
  Description of Artificial Sequence: Synthetic oligonucleotide
cagcgucggugucgcggug

SEQ ID NO: 2454943 - RNA, 19 nt, Artificial Sequence
  Description of Artificial Sequence: Synthetic oligonucleotide
gggccccucgagacggaag

SEQ ID NO: 2454944 - RNA, 19 nt, Artificial Sequence
  Description of Artificial Sequence: Synthetic oligonucleotide
cgagccucaggcacugaga

SEQ ID NO: 2454945 - RNA, 19 nt, Artificial Sequence
  Description of Artificial Sequence: Synthetic oligonucleotide
gcagcggcuggaagacgug

SEQ ID NO: 2454946 - RNA, 19 nt, Artificial Sequence
  Description of Artificial Sequence: Synthetic oligonucleotide
agcagucgcugaggggcua

SEQ ID NO: 2454947 - RNA, 19 nt, Artificial Sequence
  Description of Artificial Sequence: Synthetic oligonucleotide
cagaguggugcugccggcu

SEQ ID NO: 2454948 - RNA, 19 nt, Artificial Sequence
  Description of Artificial Sequence: Synthetic oligonucleotide
gccgaagccagcagcagau

SEQ ID NO: 2454949 - RNA, 19 nt, Artificial Sequence
  Description of Artificial Sequence: Synthetic oligonucleotide
gcagaugcgggcggccguc

SEQ ID NO: 2454950 - RNA, 19 nt, Artificial Sequence
  Description of Artificial Sequence: Synthetic oligonucleotide
ggaugucugugcgccucuc

SEQ ID NO: 2454951 - RNA, 19 nt, Artificial Sequence
  Description of Artificial Sequence: Synthetic oligonucleotide
ccagacgcagaucgggacu

SEQ ID NO: 2454952 - RNA, 19 nt, Artificial Sequence
  Description of Artificial Sequence: Synthetic oligonucleotide
aggguccugccgagccuca

SEQ ID NO: 2454953 - RNA, 19 nt, Artificial Sequence
  Description of Artificial Sequence: Synthetic oligonucleotide
gccgugcccgucgcgacac

SEQ ID NO: 2454954 - RNA, 19 nt, Artificial Sequence
  Description of Artificial Sequence: Synthetic oligonucleotide
caaagucgcugccgaggau

SEQ ID NO: 2454955 - RNA, 19 nt, Artificial Sequence
  Description of Artificial Sequence: Synthetic oligonucleotide
ccgagaccacaggugcgag

SEQ ID NO: 2454956 - RNA, 19 nt, Artificial Sequence
  Description of Artificial Sequence: Synthetic oligonucleotide
cacaggagcucagcgucau

SEQ ID NO: 2454957 - RNA, 19 nt, Artificial Sequence
  Description of Artificial Sequence: Synthetic oligonucleotide
cucggccucugggaugucu

SEQ ID NO: 2454958 - RNA, 19 nt, Artificial Sequence
  Description of Artificial Sequence: Synthetic oligonucleotide
gcgacacagcagaguggug

SEQ ID NO: 2454959 - RNA, 19 nt, Artificial Sequence
  Description of Artificial Sequence: Synthetic oligonucleotide
cacaggcgggcagccaaua

SEQ ID NO: 2454960 - RNA, 19 nt, Artificial Sequence
  Description of Artificial Sequence: Synthetic oligonucleotide
ggauggccaacuggucucu

SEQ ID NO: 2454961 - RNA, 19 nt, Artificial Sequence
  Description of Artificial Sequence: Synthetic oligonucleotide
cgugcccgucgcgacacag

SEQ ID NO: 2454962 - RNA, 19 nt, Artificial Sequence
  Description of Artificial Sequence: Synthetic oligonucleotide
gccuucccgccacggugac

SEQ ID NO: 2454963 - RNA, 19 nt, Artificial Sequence
  Description of Artificial Sequence: Synthetic oligonucleotide
acgucuccaccggccugaa

SEQ ID NO: 2454964 - RNA, 19 nt, Artificial Sequence
  Description of Artificial Sequence: Synthetic oligonucleotide
ggcggaagaccuggcugaa

SEQ ID NO: 2454965 - RNA, 19 nt, Artificial Sequence
  Description of Artificial Sequence: Synthetic oligonucleotide
cgcgacacagcagaguggu

SEQ ID NO: 2454966 - RNA, 19 nt, Artificial Sequence
  Description of Artificial Sequence: Synthetic oligonucleotide
ccaacuggucucuggcgau

SEQ ID NO: 2454967 - RNA, 19 nt, Artificial Sequence
  Description of Artificial Sequence: Synthetic oligonucleotide
ccucagcgucggugucgcg

SEQ ID NO: 2454968 - RNA, 19 nt, Artificial Sequence
  Description of Artificial Sequence: Synthetic oligonucleotide
ccucaggcacugagaucca

SEQ ID NO: 2454969 - RNA, 19 nt, Artificial Sequence
  Description of Artificial Sequence: Synthetic oligonucleotide
cccuugaagcacgcagcga

SEQ ID NO: 2454970 - RNA, 19 nt, Artificial Sequence
  Description of Artificial Sequence: Synthetic oligonucleotide
ccucgagacggaaguugcu

SEQ ID NO: 2454971 - RNA, 19 nt, Artificial Sequence
  Description of Artificial Sequence: Synthetic oligonucleotide
ggcgggcagccaauaugaa

SEQ ID NO: 2454972 - RNA, 19 nt, Artificial Sequence
  Description of Artificial Sequence: Synthetic oligonucleotide
cggugucgcggugccaggc

SEQ ID NO: 2454973 - RNA, 19 nt, Artificial Sequence
  Description of Artificial Sequence: Synthetic oligonucleotide
cccagcgcaugaccaugga

SEQ ID NO: 2454974 - RNA, 19 nt, Artificial Sequence
  Description of Artificial Sequence: Synthetic oligonucleotide
ccaccggccugaaaguguu

SEQ ID NO: 2454975 - RNA, 19 nt, Artificial Sequence
  Description of Artificial Sequence: Synthetic oligonucleotide
gugggccccucgagacgga

SEQ ID NO: 2454976 - RNA, 19 nt, Artificial Sequence
  Description of Artificial Sequence: Synthetic oligonucleotide
caccggccucugggaggcc

SEQ ID NO: 2454977 - RNA, 19 nt, Artificial Sequence
  Description of Artificial Sequence: Synthetic oligonucleotide
ccggccucugggaggccga

SEQ ID NO: 2454978 - RNA, 19 nt, Artificial Sequence
  Description of Artificial Sequence: Synthetic oligonucleotide
ccaacucguggugcuggua

SEQ ID NO: 2454979 - RNA, 19 nt, Artificial Sequence
  Description of Artificial Sequence: Synthetic oligonucleotide
ccaggcgugcaggcucuga

SEQ ID NO: 2454980 - RNA, 19 nt, Artificial Sequence
  Description of Artificial Sequence: Synthetic oligonucleotide
ggcggccguccagcuccag

SEQ ID NO: 2454981 - RNA, 19 nt, Artificial Sequence
  Description of Artificial Sequence: Synthetic oligonucleotide
caccggccugaaaguguuu

SEQ ID NO: 2454982 - RNA, 19 nt, Artificial Sequence
  Description of Artificial Sequence: Synthetic oligonucleotide
gaccugcguuggggccaga

SEQ ID NO: 2454983 - RNA, 19 nt, Artificial Sequence
  Description of Artificial Sequence: Synthetic oligonucleotide
ccacggugacuugggcaaa

SEQ ID NO: 2454984 - RNA, 19 nt, Artificial Sequence
  Description of Artificial Sequence: Synthetic oligonucleotide
ccacaggcgggcagccaau

SEQ ID NO: 2454985 - RNA, 19 nt, Artificial Sequence
  Description of Artificial Sequence: Synthetic oligonucleotide
cgucgcgacacagcagagu

SEQ ID NO: 2454986 - RNA, 19 nt, Artificial Sequence
  Description of Artificial Sequence: Synthetic oligonucleotide
gccgagccucaggcacuga

SEQ ID NO: 2454987 - RNA, 19 nt, Artificial Sequence
  Description of Artificial Sequence: Synthetic oligonucleotide
gggcggccguccagcucca

SEQ ID NO: 2454988 - RNA, 19 nt, Artificial Sequence
  Description of Artificial Sequence: Synthetic oligonucleotide
ccccacaggcgggcagcca

SEQ ID NO: 2454989 - RNA, 19 nt, Artificial Sequence
  Description of Artificial Sequence: Synthetic oligonucleotide
cgcugccgaggauggccaa

SEQ ID NO: 2454990 - RNA, 19 nt, Artificial Sequence
  Description of Artificial Sequence: Synthetic oligonucleotide
ccgugcccgucgcgacaca

SEQ ID NO: 2454991 - RNA, 19 nt, Artificial Sequence
  Description of Artificial Sequence: Synthetic oligonucleotide
cgucuccaccggccugaaa

SEQ ID NO: 2454992 - RNA, 19 nt, Artificial Sequence
  Description of Artificial Sequence: Synthetic oligonucleotide
cgucggugucgcggugcca

SEQ ID NO: 2454993 - RNA, 19 nt, Artificial Sequence
  Description of Artificial Sequence: Synthetic oligonucleotide
ccagggccucagcgucggu

SEQ ID NO: 2454994 - RNA, 19 nt, Artificial Sequence
  Description of Artificial Sequence: Synthetic oligonucleotide
guuugaaucauuuugauga

SEQ ID NO: 2454995 - RNA, 19 nt, Artificial Sequence
  Description of Artificial Sequence: Synthetic oligonucleotide
aagagaaugguuuuggucu

SEQ ID NO: 2454996 - RNA, 19 nt, Artificial Sequence
  Description of Artificial Sequence: Synthetic oligonucleotide
aaugucaaugccuucauca

SEQ ID NO: 2454997 - RNA, 19 nt, Artificial Sequence
  Description of Artificial Sequence: Synthetic oligonucleotide
auuucuuuaaagcauccac

SEQ ID NO: 2454998 - RNA, 19 nt, Artificial Sequence
  Description of Artificial Sequence: Synthetic oligonucleotide
uuuccuuguaacauguucg

SEQ ID NO: 2454999 - RNA, 19 nt, Artificial Sequence
  Description of Artificial Sequence: Synthetic oligonucleotide
aacgcuugcagauucugcc

SEQ ID NO: 2455000 - RNA, 19 nt, Artificial Sequence
  Description of Artificial Sequence: Synthetic oligonucleotide
uuuucuucaauccauuucu

SEQ ID NO: 2455001 - RNA, 19 nt, Artificial Sequence
  Description of Artificial Sequence: Synthetic oligonucleotide
aaucccaauuuucaauggc

SEQ ID NO: 2455002 - RNA, 19 nt, Artificial Sequence
  Description of Artificial Sequence: Synthetic oligonucleotide
aaucauuuugaugacauug

SEQ ID NO: 2455003 - RNA, 19 nt, Artificial Sequence
  Description of Artificial Sequence: Synthetic oligonucleotide
uccacaguaaccugcaugg

SEQ ID NO: 2455004 - RNA, 19 nt, Artificial Sequence
  Description of Artificial Sequence: Synthetic oligonucleotide
ucugaaugcuuccagcgcg

SEQ ID NO: 2455005 - RNA, 19 nt, Artificial Sequence
  Description of Artificial Sequence: Synthetic oligonucleotide
agcauugcuagucaggagg

SEQ ID NO: 2455006 - RNA, 19 nt, Artificial Sequence
  Description of Artificial Sequence: Synthetic oligonucleotide
uuuaaagcauccacaagug

SEQ ID NO: 2455007 - RNA, 19 nt, Artificial Sequence
  Description of Artificial Sequence: Synthetic oligonucleotide
uacucauacaggaugacca

SEQ ID NO: 2455008 - RNA, 19 nt, Artificial Sequence
  Description of Artificial Sequence: Synthetic oligonucleotide
caauccauuucuuuaaagc

SEQ ID NO: 2455009 - RNA, 19 nt, Artificial Sequence
  Description of Artificial Sequence: Synthetic oligonucleotide
cugacauagucucugaacg

SEQ ID NO: 2455010 - RNA, 19 nt, Artificial Sequence
  Description of Artificial Sequence: Synthetic oligonucleotide
auugcccacauacucauac

SEQ ID NO: 2455011 - RNA, 19 nt, Artificial Sequence
  Description of Artificial Sequence: Synthetic oligonucleotide
gauauacuggacuucauca

SEQ ID NO: 2455012 - RNA, 19 nt, Artificial Sequence
  Description of Artificial Sequence: Synthetic oligonucleotide
aacauguucguccuuuucu

SEQ ID NO: 2455013 - RNA, 19 nt, Artificial Sequence
  Description of Artificial Sequence: Synthetic oligonucleotide
aucagaauguuguuaucac

SEQ ID NO: 2455014 - RNA, 19 nt, Artificial Sequence
  Description of Artificial Sequence: Synthetic oligonucleotide
  modified_base (19)..(19): a, c, u, g, unknown or other
ucagcugucauucugugun

SEQ ID NO: 2455015 - RNA, 19 nt, Artificial Sequence
  Description of Artificial Sequence: Synthetic oligonucleotide
uuagaaagcucagugcagg

SEQ ID NO: 2455016 - RNA, 19 nt, Artificial Sequence
  Description of Artificial Sequence: Synthetic oligonucleotide
gauuuguuuugccacgucc

SEQ ID NO: 2455017 - RNA, 19 nt, Artificial Sequence
  Description of Artificial Sequence: Synthetic oligonucleotide
uaaccugcaugguacaggg

SEQ ID NO: 2455018 - RNA, 19 nt, Artificial Sequence
  Description of Artificial Sequence: Synthetic oligonucleotide
uucacgaagagaaugguuu

SEQ ID NO: 2455019 - RNA, 19 nt, Artificial Sequence
  Description of Artificial Sequence: Synthetic oligonucleotide
uuuuccuuguaacauguuc

SEQ ID NO: 2455020 - RNA, 19 nt, Artificial Sequence
  Description of Artificial Sequence: Synthetic oligonucleotide
aucauuuugaugacauugc

SEQ ID NO: 2455021 - RNA, 19 nt, Artificial Sequence
  Description of Artificial Sequence: Synthetic oligonucleotide
aaagccacuagaagugagc

SEQ ID NO: 2455022 - RNA, 19 nt, Artificial Sequence
  Description of Artificial Sequence: Synthetic oligonucleotide
agugaggcagccuccaugg

SEQ ID NO: 2455023 - RNA, 19 nt, Artificial Sequence
  Description of Artificial Sequence: Synthetic oligonucleotide
  modified_base (9)..(9): a, c, u, g, unknown or other
ucugccucnguucagcugu

SEQ ID NO: 2455024 - RNA, 19 nt, Artificial Sequence
  Description of Artificial Sequence: Synthetic oligonucleotide
cauuuugaugacauugccc

SEQ ID NO: 2455025 - RNA, 19 nt, Artificial Sequence
  Description of Artificial Sequence: Synthetic oligonucleotide
aagugcucugguuuucacg

SEQ ID NO: 2455026 - RNA, 19 nt, Artificial Sequence
  Description of Artificial Sequence: Synthetic oligonucleotide
uuaagugguacuccucuug

SEQ ID NO: 2455027 - RNA, 19 nt, Artificial Sequence
  Description of Artificial Sequence: Synthetic oligonucleotide
uucuuuaaagcauccacaa

SEQ ID NO: 2455028 - RNA, 19 nt, Artificial Sequence
  Description of Artificial Sequence: Synthetic oligonucleotide
ucaccacuggcucugaaug

SEQ ID NO: 2455029 - RNA, 19 nt, Artificial Sequence
  Description of Artificial Sequence: Synthetic oligonucleotide
uggaggaacagugaggcag

SEQ ID NO: 2455030 - RNA, 19 nt, Artificial Sequence
  Description of Artificial Sequence: Synthetic oligonucleotide
ucuugaaauggauucauuu

SEQ ID NO: 2455031 - RNA, 19 nt, Artificial Sequence
  Description of Artificial Sequence: Synthetic oligonucleotide
acaguaaccugcaugguac

SEQ ID NO: 2455032 - RNA, 19 nt, Artificial Sequence
  Description of Artificial Sequence: Synthetic oligonucleotide
cugguuuucacgaagagaa

SEQ ID NO: 2455033 - RNA, 19 nt, Artificial Sequence
  Description of Artificial Sequence: Synthetic oligonucleotide
guuuucacgaagagaaugg

SEQ ID NO: 2455034 - RNA, 19 nt, Artificial Sequence
  Description of Artificial Sequence: Synthetic oligonucleotide
ucuucaauccauuucuuua

SEQ ID NO: 2455035 - RNA, 19 nt, Artificial Sequence
  Description of Artificial Sequence: Synthetic oligonucleotide
cuuuagaaagcucagugca

SEQ ID NO: 2455036 - RNA, 19 nt, Artificial Sequence
  Description of Artificial Sequence: Synthetic oligonucleotide
uuaaagcauccacaagugc

SEQ ID NO: 2455037 - RNA, 19 nt, Artificial Sequence
  Description of Artificial Sequence: Synthetic oligonucleotide
gucaaugccuucaucagcg

SEQ ID NO: 2455038 - RNA, 19 nt, Artificial Sequence
  Description of Artificial Sequence: Synthetic oligonucleotide
ucaauccauuucuuuaaag

SEQ ID NO: 2455039 - RNA, 19 nt, Artificial Sequence
  Description of Artificial Sequence: Synthetic oligonucleotide
ucagaauguuguuaucacc

SEQ ID NO: 2455040 - RNA, 19 nt, Artificial Sequence
  Description of Artificial Sequence: Synthetic oligonucleotide
agaagugagcgcuguaggg

SEQ ID NO: 2455041 - RNA, 19 nt, Artificial Sequence
  Description of Artificial Sequence: Synthetic oligonucleotide
gaagagaaugguuuugguc

SEQ ID NO: 2455042 - RNA, 19 nt, Artificial Sequence
  Description of Artificial Sequence: Synthetic oligonucleotide
uuuguuuugccacguccag

SEQ ID NO: 2455043 - RNA, 19 nt, Artificial Sequence
  Description of Artificial Sequence: Synthetic oligonucleotide
ucugccucugguuugaauc

SEQ ID NO: 2455044 - RNA, 19 nt, Artificial Sequence
  Description of Artificial Sequence: Synthetic oligonucleotide
agugcucugguuuucacga

SEQ ID NO: 2455045 - RNA, 19 nt, Artificial Sequence
  Description of Artificial Sequence: Synthetic oligonucleotide
aucccaauuuucaauggcc

SEQ ID NO: 2455046 - RNA, 19 nt, Artificial Sequence
  Description of Artificial Sequence: Synthetic oligonucleotide
acugagcaaugucaaugcc

SEQ ID NO: 2455047 - RNA, 19 nt, Artificial Sequence
  Description of Artificial Sequence: Synthetic oligonucleotide
uugcuagucaggaggaagc

SEQ ID NO: 2455048 - RNA, 19 nt, Artificial Sequence
  Description of Artificial Sequence: Synthetic oligonucleotide
aaauggauucauuucuauu

SEQ ID NO: 2455049 - RNA, 19 nt, Artificial Sequence
  Description of Artificial Sequence: Synthetic oligonucleotide
uguuuugccacguccaguc

SEQ ID NO: 2455050 - RNA, 19 nt, Artificial Sequence
  Description of Artificial Sequence: Synthetic oligonucleotide
uccauuucuuuaaagcauc

SEQ ID NO: 2455051 - RNA, 19 nt, Artificial Sequence
  Description of Artificial Sequence: Synthetic oligonucleotide
uacuggaggaacagugagg

SEQ ID NO: 2455052 - RNA, 19 nt, Artificial Sequence
  Description of Artificial Sequence: Synthetic oligonucleotide
ugagcaaugucaaugccuu

SEQ ID NO: 2455053 - RNA, 19 nt, Artificial Sequence
  Description of Artificial Sequence: Synthetic oligonucleotide
ugucaaugccuucaucagc

SEQ ID NO: 2455054 - RNA, 19 nt, Artificial Sequence
  Description of Artificial Sequence: Synthetic oligonucleotide
uuuuggaaaucccaauuuu

SEQ ID NO: 2455055 - RNA, 19 nt, Artificial Sequence
  Description of Artificial Sequence: Synthetic oligonucleotide
aaugcuuccagcgcguacu

SEQ ID NO: 2455056 - RNA, 19 nt, Artificial Sequence
  Description of Artificial Sequence: Synthetic oligonucleotide
cagaauguuguuaucacca

SEQ ID NO: 2455057 - RNA, 19 nt, Artificial Sequence
  Description of Artificial Sequence: Synthetic oligonucleotide
ugcaggauuuucuucaauc

SEQ ID NO: 2455058 - RNA, 19 nt, Artificial Sequence
  Description of Artificial Sequence: Synthetic oligonucleotide
auagucucugaacgcuugc

SEQ ID NO: 2455059 - RNA, 19 nt, Artificial Sequence
  Description of Artificial Sequence: Synthetic oligonucleotide
uaagugguacuccucuuga

SEQ ID NO: 2455060 - RNA, 19 nt, Artificial Sequence
  Description of Artificial Sequence: Synthetic oligonucleotide
cgaaguagcaaucagaaug

SEQ ID NO: 2455061 - RNA, 19 nt, Artificial Sequence
  Description of Artificial Sequence: Synthetic oligonucleotide
uuugaaucauuuugaugac

SEQ ID NO: 2455062 - RNA, 19 nt, Artificial Sequence
  Description of Artificial Sequence: Synthetic oligonucleotide
aggaugaccagguugcacu

SEQ ID NO: 2455063 - RNA, 19 nt, Artificial Sequence
  Description of Artificial Sequence: Synthetic oligonucleotide
uucaucauccuggagccag

SEQ ID NO: 2455064 - RNA, 19 nt, Artificial Sequence
  Description of Artificial Sequence: Synthetic oligonucleotide
uuggucuccggcuuuaagu

SEQ ID NO: 2455065 - RNA, 19 nt, Artificial Sequence
  Description of Artificial Sequence: Synthetic oligonucleotide
uguagcugaggauguagug

SEQ ID NO: 2455066 - RNA, 19 nt, Artificial Sequence
  Description of Artificial Sequence: Synthetic oligonucleotide
augaaguccacaguaaccu

SEQ ID NO: 2455067 - RNA, 19 nt, Artificial Sequence
  Description of Artificial Sequence: Synthetic oligonucleotide
agagaaugguuuuggucuc

SEQ ID NO: 2455068 - RNA, 19 nt, Artificial Sequence
  Description of Artificial Sequence: Synthetic oligonucleotide
ccuuguaacauguucgucc

SEQ ID NO: 2455069 - RNA, 19 nt, Artificial Sequence
  Description of Artificial Sequence: Synthetic oligonucleotide
uccacaagugcucugguuu

SEQ ID NO: 2455070 - RNA, 19 nt, Artificial Sequence
  Description of Artificial Sequence: Synthetic oligonucleotide
gagucuuccugacauaguc

SEQ ID NO: 2455071 - RNA, 19 nt, Artificial Sequence
  Description of Artificial Sequence: Synthetic oligonucleotide
ucccaauuuucaauggccu

SEQ ID NO: 2455072 - RNA, 19 nt, Artificial Sequence
  Description of Artificial Sequence: Synthetic oligonucleotide
uuugaugacauugcccaca

SEQ ID NO: 2455073 - RNA, 19 nt, Artificial Sequence
  Description of Artificial Sequence: Synthetic oligonucleotide
ucugaacgcuugcagauuc

SEQ ID NO: 2455074 - RNA, 19 nt, Artificial Sequence
  Description of Artificial Sequence: Synthetic oligonucleotide
ugacauagucucugaacgc

SEQ ID NO: 2455075 - RNA, 19 nt, Artificial Sequence
  Description of Artificial Sequence: Synthetic oligonucleotide
ucagcauugcuagucagga

SEQ ID NO: 2455076 - RNA, 19 nt, Artificial Sequence
  Description of Artificial Sequence: Synthetic oligonucleotide
ucugucuguagcugcagca

SEQ ID NO: 2455077 - RNA, 19 nt, Artificial Sequence
  Description of Artificial Sequence: Synthetic oligonucleotide
cacugagcaaugucaaugc

SEQ ID NO: 2455078 - RNA, 19 nt, Artificial Sequence
  Description of Artificial Sequence: Synthetic oligonucleotide
uggucuccggcuuuaagug

SEQ ID NO: 2455079 - RNA, 19 nt, Artificial Sequence
  Description of Artificial Sequence: Synthetic oligonucleotide
acuggcucugaaugcuucc

SEQ ID NO: 2455080 - RNA, 19 nt, Artificial Sequence
  Description of Artificial Sequence: Synthetic oligonucleotide
  modified_base (16)..(16): a, c, u, g, unknown or other
ugcagauucugccucnguu

SEQ ID NO: 2455081 - RNA, 19 nt, Artificial Sequence
  Description of Artificial Sequence: Synthetic oligonucleotide
uuguuaucaccacuggcuc

SEQ ID NO: 2455082 - RNA, 19 nt, Artificial Sequence
  Description of Artificial Sequence: Synthetic oligonucleotide
ugcucugguuuucacgaag

SEQ ID NO: 2455083 - RNA, 19 nt, Artificial Sequence
  Description of Artificial Sequence: Synthetic oligonucleotide
  modified_base (4)..(4): a, c, u, g, unknown or other
cucnguucagcugucauuc

SEQ ID NO: 2455084 - RNA, 19 nt, Artificial Sequence
  Description of Artificial Sequence: Synthetic oligonucleotide
auguuguuaucaccacugg

SEQ ID NO: 2455085 - RNA, 19 nt, Artificial Sequence
  Description of Artificial Sequence: Synthetic oligonucleotide
guacuggaggaacagugag

SEQ ID NO: 2455086 - RNA, 19 nt, Artificial Sequence
  Description of Artificial Sequence: Synthetic oligonucleotide
acgaagagaaugguuuugg

SEQ ID NO: 2455087 - RNA, 19 nt, Artificial Sequence
  Description of Artificial Sequence: Synthetic oligonucleotide
auugcuagucaggaggaag

SEQ ID NO: 2455088 - RNA, 19 nt, Artificial Sequence
  Description of Artificial Sequence: Synthetic oligonucleotide
gucaggaggaagcacuugc

SEQ ID NO: 2455089 - RNA, 19 nt, Artificial Sequence
  Description of Artificial Sequence: Synthetic oligonucleotide
agucucugaacgcuugcag

SEQ ID NO: 2455090 - RNA, 19 nt, Artificial Sequence
  Description of Artificial Sequence: Synthetic oligonucleotide
cuagaagugagcgcuguag

SEQ ID NO: 2455091 - RNA, 19 nt, Artificial Sequence
  Description of Artificial Sequence: Synthetic oligonucleotide
guagcaaucagaauguugu

SEQ ID NO: 2455092 - RNA, 19 nt, Artificial Sequence
  Description of Artificial Sequence: Synthetic oligonucleotide
agcgcuguagggauuuucc

SEQ ID NO: 2455093 - RNA, 19 nt, Artificial Sequence
  Description of Artificial Sequence: Synthetic oligonucleotide
gaccagguugcacugagca

SEQ ID NO: 2455094 - RNA, 19 nt, Artificial Sequence
  Description of Artificial Sequence: Synthetic oligonucleotide
ucucugaacgcuugcagau

SEQ ID NO: 2455095 - RNA, 19 nt, Artificial Sequence
  Description of Artificial Sequence: Synthetic oligonucleotide
uuuggucuccggcuuuaag

SEQ ID NO: 2455096 - RNA, 19 nt, Artificial Sequence
  Description of Artificial Sequence: Synthetic oligonucleotide
auauacuggacuucaucau

SEQ ID NO: 2455097 - RNA, 19 nt, Artificial Sequence
  Description of Artificial Sequence: Synthetic oligonucleotide
uuuugccacguccagucaa

SEQ ID NO: 2455098 - RNA, 19 nt, Artificial Sequence
  Description of Artificial Sequence: Synthetic oligonucleotide
aagugagcgcuguagggau

SEQ ID NO: 2455099 - RNA, 19 nt, Artificial Sequence
  Description of Artificial Sequence: Synthetic oligonucleotide
agccacuagaagugagcgc

SEQ ID NO: 2455100 - RNA, 19 nt, Artificial Sequence
  Description of Artificial Sequence: Synthetic oligonucleotide
uuccuuguaacauguucgu

SEQ ID NO: 2455101 - RNA, 19 nt, Artificial Sequence
  Description of Artificial Sequence: Synthetic oligonucleotide
  modified_base (12)..(12): a, c, u, g, unknown or other
gauucugccucnguucagc

SEQ ID NO: 2455102 - RNA, 19 nt, Artificial Sequence
  Description of Artificial Sequence: Synthetic oligonucleotide
guaaccugcaugguacagg

SEQ ID NO: 2455103 - RNA, 19 nt, Artificial Sequence
  Description of Artificial Sequence: Synthetic oligonucleotide
uucaucagcgaccgaagua

SEQ ID NO: 2455104 - RNA, 19 nt, Artificial Sequence
  Description of Artificial Sequence: Synthetic oligonucleotide
agugguacuccucuugaau

SEQ ID NO: 2455105 - RNA, 19 nt, Artificial Sequence
  Description of Artificial Sequence: Synthetic oligonucleotide
agcaaugucaaugccuuca

SEQ ID NO: 2455106 - RNA, 19 nt, Artificial Sequence
  Description of Artificial Sequence: Synthetic oligonucleotide
uguaacauguucguccuuu

SEQ ID NO: 2455107 - RNA, 19 nt, Artificial Sequence
  Description of Artificial Sequence: Synthetic oligonucleotide
gguuugaaucauuuugaug

SEQ ID NO: 2455108 - RNA, 19 nt, Artificial Sequence
  Description of Artificial Sequence: Synthetic oligonucleotide
uuucacgaagagaaugguu

SEQ ID NO: 2455109 - RNA, 19 nt, Artificial Sequence
  Description of Artificial Sequence: Synthetic oligonucleotide
ugaaguccacaguaaccug

SEQ ID NO: 2455110 - RNA, 19 nt, Artificial Sequence
  Description of Artificial Sequence: Synthetic oligonucleotide
ugaggauguaguggggucc

SEQ ID NO: 2455111 - RNA, 19 nt, Artificial Sequence
  Description of Artificial Sequence: Synthetic oligonucleotide
augaccagguugcacugag

SEQ ID NO: 2455112 - RNA, 19 nt, Artificial Sequence
  Description of Artificial Sequence: Synthetic oligonucleotide
ugccugauuuguuuugcca

SEQ ID NO: 2455113 - RNA, 19 nt, Artificial Sequence
  Description of Artificial Sequence: Synthetic oligonucleotide
gaaugguuuuggucuccgg

SEQ ID NO: 2455114 - RNA, 19 nt, Artificial Sequence
  Description of Artificial Sequence: Synthetic oligonucleotide
gcucugaaugcuuccagcg

SEQ ID NO: 2455115 - RNA, 19 nt, Artificial Sequence
  Description of Artificial Sequence: Synthetic oligonucleotide
uguuaucaccacuggcucu

SEQ ID NO: 2455116 - RNA, 19 nt, Artificial Sequence
  Description of Artificial Sequence: Synthetic oligonucleotide
cuccaugggacccuuguug

SEQ ID NO: 2455117 - RNA, 19 nt, Artificial Sequence
  Description of Artificial Sequence: Synthetic oligonucleotide
gcuuuagaaagcucagugc

SEQ ID NO: 2455118 - RNA, 19 nt, Artificial Sequence
  Description of Artificial Sequence: Synthetic oligonucleotide
cauagucucugaacgcuug

SEQ ID NO: 2455119 - RNA, 19 nt, Artificial Sequence
  Description of Artificial Sequence: Synthetic oligonucleotide
ucaggaggaagcacuugcu

SEQ ID NO: 2455120 - RNA, 19 nt, Artificial Sequence
  Description of Artificial Sequence: Synthetic oligonucleotide
aggaggaagcacuugcuau

SEQ ID NO: 2455121 - RNA, 19 nt, Artificial Sequence
  Description of Artificial Sequence: Synthetic oligonucleotide
gcuguagggauuuuccaag

SEQ ID NO: 2455122 - RNA, 19 nt, Artificial Sequence
  Description of Artificial Sequence: Synthetic oligonucleotide
uugaaucauuuugaugaca

SEQ ID NO: 2455123 - RNA, 19 nt, Artificial Sequence
  Description of Artificial Sequence: Synthetic oligonucleotide
gugucauuccuguugccug

SEQ ID NO: 2455124 - RNA, 19 nt, Artificial Sequence
  Description of Artificial Sequence: Synthetic oligonucleotide
guccacaguaaccugcaug

SEQ ID NO: 2455125 - RNA, 19 nt, Artificial Sequence
  Description of Artificial Sequence: Synthetic oligonucleotide
guuguuaucaccacuggcu

SEQ ID NO: 2455126 - RNA, 19 nt, Artificial Sequence
  Description of Artificial Sequence: Synthetic oligonucleotide
ugguacagggcauccaaaa

SEQ ID NO: 2455127 - RNA, 19 nt, Artificial Sequence
  Description of Artificial Sequence: Synthetic oligonucleotide
guuaucaccacuggcucug

SEQ ID NO: 2455128 - RNA, 19 nt, Artificial Sequence
  Description of Artificial Sequence: Synthetic oligonucleotide
ugucauuccuguugccuga

SEQ ID NO: 2455129 - RNA, 19 nt, Artificial Sequence
  Description of Artificial Sequence: Synthetic oligonucleotide
uggacuucaucauccugga

SEQ ID NO: 2455130 - RNA, 19 nt, Artificial Sequence
  Description of Artificial Sequence: Synthetic oligonucleotide
uuuucacgaagagaauggu

SEQ ID NO: 2455131 - RNA, 19 nt, Artificial Sequence
  Description of Artificial Sequence: Synthetic oligonucleotide
acaucagcauugcuaguca

SEQ ID NO: 2455132 - RNA, 19 nt, Artificial Sequence
  Description of Artificial Sequence: Synthetic oligonucleotide
cucugaaugcuuccagcgc

SEQ ID NO: 2455133 - RNA, 19 nt, Artificial Sequence
  Description of Artificial Sequence: Synthetic oligonucleotide
  modified_base (10)..(10): a, c, u, g, unknown or other
uucugccucnguucagcug

SEQ ID NO: 2455134 - RNA, 19 nt, Artificial Sequence
  Description of Artificial Sequence: Synthetic oligonucleotide
aucagcauugcuagucagg

SEQ ID NO: 2455135 - RNA, 19 nt, Artificial Sequence
  Description of Artificial Sequence: Synthetic oligonucleotide
caggcuuuagaaagcucag

SEQ ID NO: 2455136 - RNA, 19 nt, Artificial Sequence
  Description of Artificial Sequence: Synthetic oligonucleotide
uaacauguucguccuuuuc

SEQ ID NO: 2455137 - RNA, 19 nt, Artificial Sequence
  Description of Artificial Sequence: Synthetic oligonucleotide
uagaaagcucagugcagga

SEQ ID NO: 2455138 - RNA, 19 nt, Artificial Sequence
  Description of Artificial Sequence: Synthetic oligonucleotide
guccagucaauaugccagg

SEQ ID NO: 2455139 - RNA, 19 nt, Artificial Sequence
  Description of Artificial Sequence: Synthetic oligonucleotide
  modified_base (14)..(14): a, c, u, g, unknown or other
cagauucugccucnguuca

SEQ ID NO: 2455140 - RNA, 19 nt, Artificial Sequence
  Description of Artificial Sequence: Synthetic oligonucleotide
agccuggauauacuggacu

SEQ ID NO: 2455141 - RNA, 19 nt, Artificial Sequence
  Description of Artificial Sequence: Synthetic oligonucleotide
acauugcccacauacucau

SEQ ID NO: 2455142 - RNA, 19 nt, Artificial Sequence
  Description of Artificial Sequence: Synthetic oligonucleotide
  modified_base (15)..(15): a, c, u, g, unknown or other
cugucauucugugunuccc

SEQ ID NO: 2455143 - RNA, 19 nt, Artificial Sequence
  Description of Artificial Sequence: Synthetic oligonucleotide
agguacuggaggaacagug

SEQ ID NO: 2455144 - RNA, 19 nt, Artificial Sequence
  Description of Artificial Sequence: Synthetic oligonucleotide
gaagugagcgcuguaggga

SEQ ID NO: 2455145 - RNA, 19 nt, Artificial Sequence
  Description of Artificial Sequence: Synthetic oligonucleotide
ucagugcaggauuuucuuc

SEQ ID NO: 2455146 - RNA, 19 nt, Artificial Sequence
  Description of Artificial Sequence: Synthetic oligonucleotide
agaaugguuuuggucuccg

SEQ ID NO: 2455147 - RNA, 19 nt, Artificial Sequence
  Description of Artificial Sequence: Synthetic oligonucleotide
cagugcaggauuuucuuca

SEQ ID NO: 2455148 - RNA, 19 nt, Artificial Sequence
  Description of Artificial Sequence: Synthetic oligonucleotide
uggagccagggacucaugu

SEQ ID NO: 2455149 - RNA, 19 nt, Artificial Sequence
  Description of Artificial Sequence: Synthetic oligonucleotide
gacauugcccacauacuca

SEQ ID NO: 2455150 - RNA, 19 nt, Artificial Sequence
  Description of Artificial Sequence: Synthetic oligonucleotide
cuuccugacauagucucug

SEQ ID NO: 2455151 - RNA, 19 nt, Artificial Sequence
  Description of Artificial Sequence: Synthetic oligonucleotide
caauaugccaggcuuuaga

SEQ ID NO: 2455152 - RNA, 19 nt, Artificial Sequence
  Description of Artificial Sequence: Synthetic oligonucleotide
ugaacgcuugcagauucug

SEQ ID NO: 2455153 - RNA, 19 nt, Artificial Sequence
  Description of Artificial Sequence: Synthetic oligonucleotide
ggaaccagccaucugucug

SEQ ID NO: 2455154 - RNA, 19 nt, Artificial Sequence
  Description of Artificial Sequence: Synthetic oligonucleotide
acuggacuucaucauccug

SEQ ID NO: 2455155 - RNA, 19 nt, Artificial Sequence
  Description of Artificial Sequence: Synthetic oligonucleotide
acauguucguccuuuucuu

SEQ ID NO: 2455156 - RNA, 19 nt, Artificial Sequence
  Description of Artificial Sequence: Synthetic oligonucleotide
uugccugauuuguuuugcc

SEQ ID NO: 2455157 - RNA, 19 nt, Artificial Sequence
  Description of Artificial Sequence: Synthetic oligonucleotide
auaugccaggcuuuagaaa

SEQ ID NO: 2455158 - RNA, 19 nt, Artificial Sequence
  Description of Artificial Sequence: Synthetic oligonucleotide
ucaauaugccaggcuuuag

SEQ ID NO: 2455159 - RNA, 19 nt, Artificial Sequence
  Description of Artificial Sequence: Synthetic oligonucleotide
caucagcauugcuagucag

SEQ ID NO: 2455160 - RNA, 19 nt, Artificial Sequence
  Description of Artificial Sequence: Synthetic oligonucleotide
uccagcgcguacuucugug

SEQ ID NO: 2455161 - RNA, 19 nt, Artificial Sequence
  Description of Artificial Sequence: Synthetic oligonucleotide
uuugccacguccagucaau

SEQ ID NO: 2455162 - RNA, 19 nt, Artificial Sequence
  Description of Artificial Sequence: Synthetic oligonucleotide
uuuaagugguacuccucuu

SEQ ID NO: 2455163 - RNA, 19 nt, Artificial Sequence
  Description of Artificial Sequence: Synthetic oligonucleotide
uacuucugugcugggagug

SEQ ID NO: 2455164 - RNA, 19 nt, Artificial Sequence
  Description of Artificial Sequence: Synthetic oligonucleotide
augaucgcccuggaucccc

SEQ ID NO: 2455165 - RNA, 19 nt, Artificial Sequence
  Description of Artificial Sequence: Synthetic oligonucleotide
  modified_base (16)..(16): a, c, u, g, unknown or other
gcugucauucugugunucc

SEQ ID NO: 2455166 - RNA, 19 nt, Artificial Sequence
  Description of Artificial Sequence: Synthetic oligonucleotide
aagugguacuccucuugaa

SEQ ID NO: 2455167 - RNA, 19 nt, Artificial Sequence
  Description of Artificial Sequence: Synthetic oligonucleotide
ggauauacuggacuucauc

SEQ ID NO: 2455168 - RNA, 19 nt, Artificial Sequence
  Description of Artificial Sequence: Synthetic oligonucleotide
acguccagucaauaugcca

SEQ ID NO: 2455169 - RNA, 19 nt, Artificial Sequence
  Description of Artificial Sequence: Synthetic oligonucleotide
gaauguuguuaucaccacu

SEQ ID NO: 2455170 - RNA, 19 nt, Artificial Sequence
  Description of Artificial Sequence: Synthetic oligonucleotide
cuuuaagugguacuccucu

SEQ ID NO: 2455171 - RNA, 19 nt, Artificial Sequence
  Description of Artificial Sequence: Synthetic oligonucleotide
  modified_base (2)..(2): a, c, u, g, unknown or other
cnguucagcugucauucug

SEQ ID NO: 2455172 - RNA, 19 nt, Artificial Sequence
  Description of Artificial Sequence: Synthetic oligonucleotide
uccggcuuuaagugguacu

SEQ ID NO: 2455173 - RNA, 19 nt, Artificial Sequence
  Description of Artificial Sequence: Synthetic oligonucleotide
cucugguuuucacgaagag

SEQ ID NO: 2455174 - RNA, 19 nt, Artificial Sequence
  Description of Artificial Sequence: Synthetic oligonucleotide
aguaaccugcaugguacag

SEQ ID NO: 2455175 - RNA, 19 nt, Artificial Sequence
  Description of Artificial Sequence: Synthetic oligonucleotide
ugguacuccucuugaauuu

SEQ ID NO: 2455176 - RNA, 19 nt, Artificial Sequence
  Description of Artificial Sequence: Synthetic oligonucleotide
uucagcugucauucugugu

SEQ ID NO: 2455177 - RNA, 19 nt, Artificial Sequence
  Description of Artificial Sequence: Synthetic oligonucleotide
ucacgaagagaaugguuuu

SEQ ID NO: 2455178 - RNA, 19 nt, Artificial Sequence
  Description of Artificial Sequence: Synthetic oligonucleotide
uuccuguugccugauuugu

SEQ ID NO: 2455179 - RNA, 19 nt, Artificial Sequence
  Description of Artificial Sequence: Synthetic oligonucleotide
gucucugaacgcuugcaga

SEQ ID NO: 2455180 - RNA, 19 nt, Artificial Sequence
  Description of Artificial Sequence: Synthetic oligonucleotide
agcucagugcaggauuuuc

SEQ ID NO: 2455181 - RNA, 19 nt, Artificial Sequence
  Description of Artificial Sequence: Synthetic oligonucleotide
gaacgcuugcagauucugc

SEQ ID NO: 2455182 - RNA, 19 nt, Artificial Sequence
  Description of Artificial Sequence: Synthetic oligonucleotide
aaguccacaguaaccugca

SEQ ID NO: 2455183 - RNA, 19 nt, Artificial Sequence
  Description of Artificial Sequence: Synthetic oligonucleotide
ggacucauguagcugagga

SEQ ID NO: 2455184 - RNA, 19 nt, Artificial Sequence
  Description of Artificial Sequence: Synthetic oligonucleotide
ugcugggagugucauuccu

SEQ ID NO: 2455185 - RNA, 19 nt, Artificial Sequence
  Description of Artificial Sequence: Synthetic oligonucleotide
guucagcugucauucugug

SEQ ID NO: 2455186 - RNA, 19 nt, Artificial Sequence
  Description of Artificial Sequence: Synthetic oligonucleotide
cguccagucaauaugccag

SEQ ID NO: 2455187 - RNA, 19 nt, Artificial Sequence
  Description of Artificial Sequence: Synthetic oligonucleotide
caaugccuucaucagcgac

SEQ ID NO: 2455188 - RNA, 19 nt, Artificial Sequence
  Description of Artificial Sequence: Synthetic oligonucleotide
gaaauggauucauuucuau

SEQ ID NO: 2455189 - RNA, 19 nt, Artificial Sequence
  Description of Artificial Sequence: Synthetic oligonucleotide
ccugacauagucucugaac

SEQ ID NO: 2455190 - RNA, 19 nt, Artificial Sequence
  Description of Artificial Sequence: Synthetic oligonucleotide
uccugacauagucucugaa

SEQ ID NO: 2455191 - RNA, 19 nt, Artificial Sequence
  Description of Artificial Sequence: Synthetic oligonucleotide
gcgaugaucgcccuggauc

SEQ ID NO: 2455192 - RNA, 19 nt, Artificial Sequence
  Description of Artificial Sequence: Synthetic oligonucleotide
agucuugaaauggauucau

SEQ ID NO: 2455193 - RNA, 19 nt, Artificial Sequence
  Description of Artificial Sequence: Synthetic oligonucleotide
ccacguccagucaauaugc

SEQ ID NO: 2455194 - RNA, 19 nt, Artificial Sequence
  Description of Artificial Sequence: Synthetic oligonucleotide
ccagccaucugucuguagc

SEQ ID NO: 2455195 - RNA, 19 nt, Artificial Sequence
  Description of Artificial Sequence: Synthetic oligonucleotide
ugcaugguacagggcaucc

SEQ ID NO: 2455196 - RNA, 19 nt, Artificial Sequence
  Description of Artificial Sequence: Synthetic oligonucleotide
uugcccacauacucauaca

SEQ ID NO: 2455197 - RNA, 19 nt, Artificial Sequence
  Description of Artificial Sequence: Synthetic oligonucleotide
uccagucaauaugccaggc

SEQ ID NO: 2455198 - RNA, 19 nt, Artificial Sequence
  Description of Artificial Sequence: Synthetic oligonucleotide
  modified_base (11)..(11): a, c, u, g, unknown or other
auucugccucnguucagcu

SEQ ID NO: 2455199 - RNA, 19 nt, Artificial Sequence
  Description of Artificial Sequence: Synthetic oligonucleotide
cugucuguagcugcagcag

SEQ ID NO: 2455200 - RNA, 19 nt, Artificial Sequence
  Description of Artificial Sequence: Synthetic oligonucleotide
cuggauauacuggacuuca

SEQ ID NO: 2455201 - RNA, 19 nt, Artificial Sequence
  Description of Artificial Sequence: Synthetic oligonucleotide
gacauagucucugaacgcu

SEQ ID NO: 2455202 - RNA, 19 nt, Artificial Sequence
  Description of Artificial Sequence: Synthetic oligonucleotide
uacuggacuucaucauccu

SEQ ID NO: 2455203 - RNA, 19 nt, Artificial Sequence
  Description of Artificial Sequence: Synthetic oligonucleotide
caucagcgaccgaaguagc

SEQ ID NO: 2455204 - RNA, 19 nt, Artificial Sequence
  Description of Artificial Sequence: Synthetic oligonucleotide
ugcuagucaggaggaagca

SEQ ID NO: 2455205 - RNA, 19 nt, Artificial Sequence
  Description of Artificial Sequence: Synthetic oligonucleotide
  modified_base (3)..(3): a, c, u, g, unknown or other
ucnguucagcugucauucu

SEQ ID NO: 2455206 - RNA, 19 nt, Artificial Sequence
  Description of Artificial Sequence: Synthetic oligonucleotide
uuccugacauagucucuga

SEQ ID NO: 2455207 - RNA, 19 nt, Artificial Sequence
  Description of Artificial Sequence: Synthetic oligonucleotide
ugguuuuggucuccggcuu

SEQ ID NO: 2455208 - RNA, 19 nt, Artificial Sequence
  Description of Artificial Sequence: Synthetic oligonucleotide
uuacaucagcauugcuagu

SEQ ID NO: 2455209 - RNA, 19 nt, Artificial Sequence
  Description of Artificial Sequence: Synthetic oligonucleotide
ucaaugccuucaucagcga

SEQ ID NO: 2455210 - RNA, 19 nt, Artificial Sequence
  Description of Artificial Sequence: Synthetic oligonucleotide
cucuugcucuuccucugcc

SEQ ID NO: 2455211 - RNA, 19 nt, Artificial Sequence
  Description of Artificial Sequence: Synthetic oligonucleotide
ccaggcuuuagaaagcuca

SEQ ID NO: 2455212 - RNA, 19 nt, Artificial Sequence
  Description of Artificial Sequence: Synthetic oligonucleotide
caugguacagggcauccaa

SEQ ID NO: 2455213 - RNA, 19 nt, Artificial Sequence
  Description of Artificial Sequence: Synthetic oligonucleotide
ugguuuucacgaagagaau

SEQ ID NO: 2455214 - RNA, 19 nt, Artificial Sequence
  Description of Artificial Sequence: Synthetic oligonucleotide
cacgaagagaaugguuuug

SEQ ID NO: 2455215 - RNA, 19 nt, Artificial Sequence
  Description of Artificial Sequence: Synthetic oligonucleotide
cuggaaccagccaucuguc

SEQ ID NO: 2455216 - RNA, 19 nt, Artificial Sequence
  Description of Artificial Sequence: Synthetic oligonucleotide
cacguccagucaauaugcc

SEQ ID NO: 2455217 - RNA, 19 nt, Artificial Sequence
  Description of Artificial Sequence: Synthetic oligonucleotide
cagugaggcagccuccaug

SEQ ID NO: 2455218 - RNA, 19 nt, Artificial Sequence
  Description of Artificial Sequence: Synthetic oligonucleotide
acgcuugcagauucugccu

SEQ ID NO: 2455219 - RNA, 19 nt, Artificial Sequence
  Description of Artificial Sequence: Synthetic oligonucleotide
agugcaggauuuucuucaa

SEQ ID NO: 2455220 - RNA, 19 nt, Artificial Sequence
  Description of Artificial Sequence: Synthetic oligonucleotide
uggauauacuggacuucau

SEQ ID NO: 2455221 - RNA, 19 nt, Artificial Sequence
  Description of Artificial Sequence: Synthetic oligonucleotide
cugagcaaugucaaugccu

SEQ ID NO: 2455222 - RNA, 19 nt, Artificial Sequence
  Description of Artificial Sequence: Synthetic oligonucleotide
gcauccacaagugcucugg

SEQ ID NO: 2455223 - RNA, 19 nt, Artificial Sequence
  Description of Artificial Sequence: Synthetic oligonucleotide
auguagugggguccagagu

SEQ ID NO: 2455224 - RNA, 19 nt, Artificial Sequence
  Description of Artificial Sequence: Synthetic oligonucleotide
  modified_base (15)..(15): a, c, u, g, unknown or other
gcagauucugccucnguuc

SEQ ID NO: 2455225 - RNA, 19 nt, Artificial Sequence
  Description of Artificial Sequence: Synthetic oligonucleotide
ggucuccggcuuuaagugg

SEQ ID NO: 2455226 - RNA, 19 nt, Artificial Sequence
  Description of Artificial Sequence: Synthetic oligonucleotide
cauacucauacaggaugac

SEQ ID NO: 2455227 - RNA, 19 nt, Artificial Sequence
  Description of Artificial Sequence: Synthetic oligonucleotide
uagucaggaggaagcacuu

SEQ ID NO: 2455228 - RNA, 19 nt, Artificial Sequence
  Description of Artificial Sequence: Synthetic oligonucleotide
uggaaccagccaucugucu

SEQ ID NO: 2455229 - RNA, 19 nt, Artificial Sequence
  Description of Artificial Sequence: Synthetic oligonucleotide
ugccaggcuuuagaaagcu

SEQ ID NO: 2455230 - RNA, 19 nt, Artificial Sequence
  Description of Artificial Sequence: Synthetic oligonucleotide
caagugcucugguuuucac

SEQ ID NO: 2455231 - RNA, 19 nt, Artificial Sequence
  Description of Artificial Sequence: Synthetic oligonucleotide
cagguugcacugagcaaug

SEQ ID NO: 2455232 - RNA, 19 nt, Artificial Sequence
  Description of Artificial Sequence: Synthetic oligonucleotide
cgaugaucgcccuggaucc

SEQ ID NO: 2455233 - RNA, 19 nt, Artificial Sequence
  Description of Artificial Sequence: Synthetic oligonucleotide
cguacuucugugcugggag

SEQ ID NO: 2455234 - RNA, 19 nt, Artificial Sequence
  Description of Artificial Sequence: Synthetic oligonucleotide
  modified_base (18)..(18): a, c, u, g, unknown or other
cuugcagauucugccucng

SEQ ID NO: 2455235 - RNA, 19 nt, Artificial Sequence
  Description of Artificial Sequence: Synthetic oligonucleotide
agcgcguacuucugugcug

SEQ ID NO: 2455236 - RNA, 19 nt, Artificial Sequence
  Description of Artificial Sequence: Synthetic oligonucleotide
gagugucauuccuguugcc

SEQ ID NO: 2455237 - RNA, 19 nt, Artificial Sequence
  Description of Artificial Sequence: Synthetic oligonucleotide
  modified_base (17)..(17): a, c, u, g, unknown or other
uugcagauucugccucngu

SEQ ID NO: 2455238 - RNA, 19 nt, Artificial Sequence
  Description of Artificial Sequence: Synthetic oligonucleotide
cagcauugcuagucaggag

SEQ ID NO: 2455239 - RNA, 19 nt, Artificial Sequence
  Description of Artificial Sequence: Synthetic oligonucleotide
cugccucugguuugaauca

SEQ ID NO: 2455240 - RNA, 19 nt, Artificial Sequence
  Description of Artificial Sequence: Synthetic oligonucleotide
agcauccacaagugcucug

SEQ ID NO: 2455241 - RNA, 19 nt, Artificial Sequence
  Description of Artificial Sequence: Synthetic oligonucleotide
uuccagcgcguacuucugu

SEQ ID NO: 2455242 - RNA, 19 nt, Artificial Sequence
  Description of Artificial Sequence: Synthetic oligonucleotide
acaagugcucugguuuuca

SEQ ID NO: 2455243 - RNA, 19 nt, Artificial Sequence
  Description of Artificial Sequence: Synthetic oligonucleotide
cuuccagcgcguacuucug

SEQ ID NO: 2455244 - RNA, 19 nt, Artificial Sequence
  Description of Artificial Sequence: Synthetic oligonucleotide
uccuuguaacauguucguc

SEQ ID NO: 2455245 - RNA, 19 nt, Artificial Sequence
  Description of Artificial Sequence: Synthetic oligonucleotide
agcgaccgaaguagcaauc

SEQ ID NO: 2455246 - RNA, 19 nt, Artificial Sequence
  Description of Artificial Sequence: Synthetic oligonucleotide
cacuugcuaucucuugcuc

SEQ ID NO: 2455247 - RNA, 19 nt, Artificial Sequence
  Description of Artificial Sequence: Synthetic oligonucleotide
gccaucugucuguagcugc

SEQ ID NO: 2455248 - RNA, 19 nt, Artificial Sequence
  Description of Artificial Sequence: Synthetic oligonucleotide
gguugcacugagcaauguc

SEQ ID NO: 2455249 - RNA, 19 nt, Artificial Sequence
  Description of Artificial Sequence: Synthetic oligonucleotide
aucauccuggagccaggga

SEQ ID NO: 2455250 - RNA, 19 nt, Artificial Sequence
  Description of Artificial Sequence: Synthetic oligonucleotide
accagguugcacugagcaa

SEQ ID NO: 2455251 - RNA, 19 nt, Artificial Sequence
  Description of Artificial Sequence: Synthetic oligonucleotide
acuagaagugagcgcugua

SEQ ID NO: 2455252 - RNA, 19 nt, Artificial Sequence
  Description of Artificial Sequence: Synthetic oligonucleotide
  modified_base (13)..(13): a, c, u, g, unknown or other
agauucugccucnguucag

SEQ ID NO: 2455253 - RNA, 19 nt, Artificial Sequence
  Description of Artificial Sequence: Synthetic oligonucleotide
gaugaucgcccuggauccc

SEQ ID NO: 2455254 - RNA, 19 nt, Artificial Sequence
  Description of Artificial Sequence: Synthetic oligonucleotide
gcccacauacucauacagg

SEQ ID NO: 2455255 - RNA, 19 nt, Artificial Sequence
  Description of Artificial Sequence: Synthetic oligonucleotide
auccuggagccagggacuc

SEQ ID NO: 2455256 - RNA, 19 nt, Artificial Sequence
  Description of Artificial Sequence: Synthetic oligonucleotide
cagccuggauauacuggac

SEQ ID NO: 2455257 - RNA, 19 nt, Artificial Sequence
  Description of Artificial Sequence: Synthetic oligonucleotide
agucaauaugccaggcuuu

SEQ ID NO: 2455258 - RNA, 19 nt, Artificial Sequence
  Description of Artificial Sequence: Synthetic oligonucleotide
gaggaacagugaggcagcc

SEQ ID NO: 2455259 - RNA, 19 nt, Artificial Sequence
  Description of Artificial Sequence: Synthetic oligonucleotide
agucaggaggaagcacuug

SEQ ID NO: 2455260 - RNA, 19 nt, Artificial Sequence
  Description of Artificial Sequence: Synthetic oligonucleotide
ccaauuuucaauggccuca

SEQ ID NO: 2455261 - RNA, 19 nt, Artificial Sequence
  Description of Artificial Sequence: Synthetic oligonucleotide
cagucaauaugccaggcuu

SEQ ID NO: 2455262 - RNA, 19 nt, Artificial Sequence
  Description of Artificial Sequence: Synthetic oligonucleotide
ggaggaacagugaggcagc

SEQ ID NO: 2455263 - RNA, 19 nt, Artificial Sequence
  Description of Artificial Sequence: Synthetic oligonucleotide
gugguacuccucuugaauu

SEQ ID NO: 2455264 - RNA, 19 nt, Artificial Sequence
  Description of Artificial Sequence: Synthetic oligonucleotide
gagcaaugucaaugccuuc

SEQ ID NO: 2455265 - RNA, 19 nt, Artificial Sequence
  Description of Artificial Sequence: Synthetic oligonucleotide
acuucugugcugggagugu

SEQ ID NO: 2455266 - RNA, 19 nt, Artificial Sequence
  Description of Artificial Sequence: Synthetic oligonucleotide
caggaugaccagguugcac

SEQ ID NO: 2455267 - RNA, 19 nt, Artificial Sequence
  Description of Artificial Sequence: Synthetic oligonucleotide
cagcagguacuggaggaac

SEQ ID NO: 2455268 - RNA, 19 nt, Artificial Sequence
  Description of Artificial Sequence: Synthetic oligonucleotide
gucaauaugccaggcuuua

SEQ ID NO: 2455269 - RNA, 19 nt, Artificial Sequence
  Description of Artificial Sequence: Synthetic oligonucleotide
aucagcgaccgaaguagca

SEQ ID NO: 2455270 - RNA, 19 nt, Artificial Sequence
  Description of Artificial Sequence: Synthetic oligonucleotide
gguacuggaggaacaguga

SEQ ID NO: 2455271 - RNA, 19 nt, Artificial Sequence
  Description of Artificial Sequence: Synthetic oligonucleotide
uuguaacauguucguccuu

SEQ ID NO: 2455272 - RNA, 19 nt, Artificial Sequence
  Description of Artificial Sequence: Synthetic oligonucleotide
augggacccuuguuguuuu

SEQ ID NO: 2455273 - RNA, 19 nt, Artificial Sequence
  Description of Artificial Sequence: Synthetic oligonucleotide
gcgcguacuucugugcugg

SEQ ID NO: 2455274 - RNA, 19 nt, Artificial Sequence
  Description of Artificial Sequence: Synthetic oligonucleotide
agcgaugaucgcccuggau

SEQ ID NO: 2455275 - RNA, 19 nt, Artificial Sequence
  Description of Artificial Sequence: Synthetic oligonucleotide
auggccucaugaaguccac

SEQ ID NO: 2455276 - RNA, 19 nt, Artificial Sequence
  Description of Artificial Sequence: Synthetic oligonucleotide
cccaauuuucaauggccuc

SEQ ID NO: 2455277 - RNA, 19 nt, Artificial Sequence
  Description of Artificial Sequence: Synthetic oligonucleotide
guuuugccacguccaguca

SEQ ID NO: 2455278 - RNA, 19 nt, Artificial Sequence
  Description of Artificial Sequence: Synthetic oligonucleotide
gccacuagaagugagcgcu

SEQ ID NO: 2455279 - RNA, 19 nt, Artificial Sequence
  Description of Artificial Sequence: Synthetic oligonucleotide
agagucuuccugacauagu

SEQ ID NO: 2455280 - RNA, 19 nt, Artificial Sequence
  Description of Artificial Sequence: Synthetic oligonucleotide
cauuccuguugccugauuu

SEQ ID NO: 2455281 - RNA, 19 nt, Artificial Sequence
  Description of Artificial Sequence: Synthetic oligonucleotide
uuaucaccacuggcucuga

SEQ ID NO: 2455282 - RNA, 19 nt, Artificial Sequence
  Description of Artificial Sequence: Synthetic oligonucleotide
  modified_base (7)..(7): a, c, u, g, unknown or other
ugccucnguucagcuguca

SEQ ID NO: 2455283 - RNA, 19 nt, Artificial Sequence
  Description of Artificial Sequence: Synthetic oligonucleotide
cugggagugucauuccugu

SEQ ID NO: 2455284 - RNA, 19 nt, Artificial Sequence
  Description of Artificial Sequence: Synthetic oligonucleotide
ggcuuuaagugguacuccu

SEQ ID NO: 2455285 - RNA, 19 nt, Artificial Sequence
  Description of Artificial Sequence: Synthetic oligonucleotide
caguaaccugcaugguaca

SEQ ID NO: 2455286 - RNA, 19 nt, Artificial Sequence
  Description of Artificial Sequence: Synthetic oligonucleotide
uuuucucagccuggauaua

SEQ ID NO: 2455287 - RNA, 19 nt, Artificial Sequence
  Description of Artificial Sequence: Synthetic oligonucleotide
ucuccggcuuuaaguggua

SEQ ID NO: 2455288 - RNA, 19 nt, Artificial Sequence
  Description of Artificial Sequence: Synthetic oligonucleotide
ugggguccagagucuuccu

SEQ ID NO: 2455289 - RNA, 19 nt, Artificial Sequence
  Description of Artificial Sequence: Synthetic oligonucleotide
ugaugacauugcccacaua

SEQ ID NO: 2455290 - RNA, 19 nt, Artificial Sequence
  Description of Artificial Sequence: Synthetic oligonucleotide
gcuuccagcgcguacuucu

SEQ ID NO: 2455291 - RNA, 19 nt, Artificial Sequence
  Description of Artificial Sequence: Synthetic oligonucleotide
cgagcgaugaucgcccugg

SEQ ID NO: 2455292 - RNA, 19 nt, Artificial Sequence
  Description of Artificial Sequence: Synthetic oligonucleotide
aggaacagugaggcagccu

SEQ ID NO: 2455293 - RNA, 19 nt, Artificial Sequence
  Description of Artificial Sequence: Synthetic oligonucleotide
cacaagugcucugguuuuc

SEQ ID NO: 2455294 - RNA, 19 nt, Artificial Sequence
  Description of Artificial Sequence: Synthetic oligonucleotide
ccuggaaccagccaucugu

SEQ ID NO: 2455295 - RNA, 19 nt, Artificial Sequence
  Description of Artificial Sequence: Synthetic oligonucleotide
gagcgcuguagggauuuuc

SEQ ID NO: 2455296 - RNA, 19 nt, Artificial Sequence
  Description of Artificial Sequence: Synthetic oligonucleotide
aguccacaguaaccugcau

SEQ ID NO: 2455297 - RNA, 19 nt, Artificial Sequence
  Description of Artificial Sequence: Synthetic oligonucleotide
gcugggagugucauuccug

SEQ ID NO: 2455298 - RNA, 19 nt, Artificial Sequence
  Description of Artificial Sequence: Synthetic oligonucleotide
cauccuggagccagggacu

SEQ ID NO: 2455299 - RNA, 19 nt, Artificial Sequence
  Description of Artificial Sequence: Synthetic oligonucleotide
ugccucugguuugaaucau

SEQ ID NO: 2455300 - RNA, 19 nt, Artificial Sequence
  Description of Artificial Sequence: Synthetic oligonucleotide
uggccucaugaaguccaca

SEQ ID NO: 2455301 - RNA, 19 nt, Artificial Sequence
  Description of Artificial Sequence: Synthetic oligonucleotide
ccggcuuuaagugguacuc

SEQ ID NO: 2455302 - RNA, 19 nt, Artificial Sequence
  Description of Artificial Sequence: Synthetic oligonucleotide
ugggagugucauuccuguu

SEQ ID NO: 2455303 - RNA, 19 nt, Artificial Sequence
  Description of Artificial Sequence: Synthetic oligonucleotide
cugcaugguacagggcauc

SEQ ID NO: 2455304 - RNA, 19 nt, Artificial Sequence
  Description of Artificial Sequence: Synthetic oligonucleotide
guccagagucuuccugaca

SEQ ID NO: 2455305 - RNA, 19 nt, Artificial Sequence
  Description of Artificial Sequence: Synthetic oligonucleotide
gccuucaucagcgaccgaa

SEQ ID NO: 2455306 - RNA, 19 nt, Artificial Sequence
  Description of Artificial Sequence: Synthetic oligonucleotide
cucagugcaggauuuucuu

SEQ ID NO: 2455307 - RNA, 19 nt, Artificial Sequence
  Description of Artificial Sequence: Synthetic oligonucleotide
  modified_base (19)..(19): a, c, u, g, unknown or other
gcuugcagauucugccucn

SEQ ID NO: 2455308 - RNA, 19 nt, Artificial Sequence
  Description of Artificial Sequence: Synthetic oligonucleotide
gaagcacuugcuaucucuu

SEQ ID NO: 2455309 - RNA, 19 nt, Artificial Sequence
  Description of Artificial Sequence: Synthetic oligonucleotide
guacuucugugcugggagu

SEQ ID NO: 2455310 - RNA, 19 nt, Artificial Sequence
  Description of Artificial Sequence: Synthetic oligonucleotide
cuucaucagcgaccgaagu

SEQ ID NO: 2455311 - RNA, 19 nt, Artificial Sequence
  Description of Artificial Sequence: Synthetic oligonucleotide
gcuagucaggaggaagcac

SEQ ID NO: 2455312 - RNA, 19 nt, Artificial Sequence
  Description of Artificial Sequence: Synthetic oligonucleotide
gcauugcuagucaggagga

SEQ ID NO: 2455313 - RNA, 19 nt, Artificial Sequence
  Description of Artificial Sequence: Synthetic oligonucleotide
aagcucagugcaggauuuu

SEQ ID NO: 2455314 - RNA, 19 nt, Artificial Sequence
  Description of Artificial Sequence: Synthetic oligonucleotide
ccccgagcgaugaucgccc

SEQ ID NO: 2455315 - RNA, 19 nt, Artificial Sequence
  Description of Artificial Sequence: Synthetic oligonucleotide
gggacucauguagcugagg

SEQ ID NO: 2455316 - RNA, 19 nt, Artificial Sequence
  Description of Artificial Sequence: Synthetic oligonucleotide
cuccggcuuuaagugguac

SEQ ID NO: 2455317 - RNA, 19 nt, Artificial Sequence
  Description of Artificial Sequence: Synthetic oligonucleotide
augguacagggcauccaaa

SEQ ID NO: 2455318 - RNA, 19 nt, Artificial Sequence
  Description of Artificial Sequence: Synthetic oligonucleotide
cugaaugcuuccagcgcgu

SEQ ID NO: 2455319 - RNA, 19 nt, Artificial Sequence
  Description of Artificial Sequence: Synthetic oligonucleotide
aaccagccaucugucugua

SEQ ID NO: 2455320 - RNA, 19 nt, Artificial Sequence
  Description of Artificial Sequence: Synthetic oligonucleotide
gucuccggcuuuaaguggu

SEQ ID NO: 2455321 - RNA, 19 nt, Artificial Sequence
  Description of Artificial Sequence: Synthetic oligonucleotide
agguugcacugagcaaugu

SEQ ID NO: 2455322 - RNA, 19 nt, Artificial Sequence
  Description of Artificial Sequence: Synthetic oligonucleotide
guaacauguucguccuuuu

SEQ ID NO: 2455323 - RNA, 19 nt, Artificial Sequence
  Description of Artificial Sequence: Synthetic oligonucleotide
uagugggguccagagucuu

SEQ ID NO: 2455324 - RNA, 19 nt, Artificial Sequence
  Description of Artificial Sequence: Synthetic oligonucleotide
cugauuuguuuugccacgu

SEQ ID NO: 2455325 - RNA, 19 nt, Artificial Sequence
  Description of Artificial Sequence: Synthetic oligonucleotide
gagcgaugaucgcccugga

SEQ ID NO: 2455326 - RNA, 19 nt, Artificial Sequence
  Description of Artificial Sequence: Synthetic oligonucleotide
ggcagccuccaugggaccc

SEQ ID NO: 2455327 - RNA, 19 nt, Artificial Sequence
  Description of Artificial Sequence: Synthetic oligonucleotide
  modified_base (8)..(8): a, c, u, g, unknown or other
cugccucnguucagcuguc

SEQ ID NO: 2455328 - RNA, 19 nt, Artificial Sequence
  Description of Artificial Sequence: Synthetic oligonucleotide
ggauguagugggguccaga

SEQ ID NO: 2455329 - RNA, 19 nt, Artificial Sequence
  Description of Artificial Sequence: Synthetic oligonucleotide
uugccacguccagucaaua

SEQ ID NO: 2455330 - RNA, 19 nt, Artificial Sequence
  Description of Artificial Sequence: Synthetic oligonucleotide
gcgaccgaaguagcaauca

SEQ ID NO: 2455331 - RNA, 19 nt, Artificial Sequence
  Description of Artificial Sequence: Synthetic oligonucleotide
cgaccgaaguagcaaucag

SEQ ID NO: 2455332 - RNA, 19 nt, Artificial Sequence
  Description of Artificial Sequence: Synthetic oligonucleotide
gcgcuguagggauuuucca

SEQ ID NO: 2455333 - RNA, 19 nt, Artificial Sequence
  Description of Artificial Sequence: Synthetic oligonucleotide
caauuuucaauggccucau

SEQ ID NO: 2455334 - RNA, 19 nt, Artificial Sequence
  Description of Artificial Sequence: Synthetic oligonucleotide
cauguucguccuuuucuuu

SEQ ID NO: 2455335 - RNA, 19 nt, Artificial Sequence
  Description of Artificial Sequence: Synthetic oligonucleotide
ccacuagaagugagcgcug

SEQ ID NO: 2455336 - RNA, 19 nt, Artificial Sequence
  Description of Artificial Sequence: Synthetic oligonucleotide
ugccuucaucagcgaccga

SEQ ID NO: 2455337 - RNA, 19 nt, Artificial Sequence
  Description of Artificial Sequence: Synthetic oligonucleotide
cauugcuagucaggaggaa

SEQ ID NO: 2455338 - RNA, 19 nt, Artificial Sequence
  Description of Artificial Sequence: Synthetic oligonucleotide
cugaacgcuugcagauucu

SEQ ID NO: 2455339 - RNA, 19 nt, Artificial Sequence
  Description of Artificial Sequence: Synthetic oligonucleotide
caugggacccuuguuguuu

SEQ ID NO: 2455340 - RNA, 19 nt, Artificial Sequence
  Description of Artificial Sequence: Synthetic oligonucleotide
cagcgcguacuucugugcu

SEQ ID NO: 2455341 - RNA, 19 nt, Artificial Sequence
  Description of Artificial Sequence: Synthetic oligonucleotide
cuucaucauccuggagcca

SEQ ID NO: 2455342 - RNA, 19 nt, Artificial Sequence
  Description of Artificial Sequence: Synthetic oligonucleotide
gccuggauauacuggacuu

SEQ ID NO: 2455343 - RNA, 19 nt, Artificial Sequence
  Description of Artificial Sequence: Synthetic oligonucleotide
guagugggguccagagucu

SEQ ID NO: 2455344 - RNA, 19 nt, Artificial Sequence
  Description of Artificial Sequence: Synthetic oligonucleotide
gcugaggauguaguggggu

SEQ ID NO: 2455345 - RNA, 19 nt, Artificial Sequence
  Description of Artificial Sequence: Synthetic oligonucleotide
cagcgaccgaaguagcaau

SEQ ID NO: 2455346 - RNA, 19 nt, Artificial Sequence
  Description of Artificial Sequence: Synthetic oligonucleotide
cacuagaagugagcgcugu

SEQ ID NO: 2455347 - RNA, 19 nt, Artificial Sequence
  Description of Artificial Sequence: Synthetic oligonucleotide
cauccacaagugcucuggu

SEQ ID NO: 2455348 - RNA, 19 nt, Artificial Sequence
  Description of Artificial Sequence: Synthetic oligonucleotide
cauugcccacauacucaua

SEQ ID NO: 2455349 - RNA, 19 nt, Artificial Sequence
  Description of Artificial Sequence: Synthetic oligonucleotide
agugagcgcuguagggauu

SEQ ID NO: 2455350 - RNA, 19 nt, Artificial Sequence
  Description of Artificial Sequence: Synthetic oligonucleotide
cgcuugcagauucugccuc

SEQ ID NO: 2455351 - RNA, 19 nt, Artificial Sequence
  Description of Artificial Sequence: Synthetic oligonucleotide
cgcuguagggauuuuccaa

SEQ ID NO: 2455352 - RNA, 19 nt, Artificial Sequence
  Description of Artificial Sequence: Synthetic oligonucleotide
cggcuuuaagugguacucc

SEQ ID NO: 2455353 - RNA, 19 nt, Artificial Sequence
  Description of Artificial Sequence: Synthetic oligonucleotide
ccagguugcacugagcaau

SEQ ID NO: 2455354 - RNA, 19 nt, Artificial Sequence
  Description of Artificial Sequence: Synthetic oligonucleotide
gcucagugcaggauuuucu

SEQ ID NO: 2455355 - RNA, 19 nt, Artificial Sequence
  Description of Artificial Sequence: Synthetic oligonucleotide
gccagggacucauguagcu

SEQ ID NO: 2455356 - RNA, 19 nt, Artificial Sequence
  Description of Artificial Sequence: Synthetic oligonucleotide
gccuggaaccagccaucug

SEQ ID NO: 2455357 - RNA, 19 nt, Artificial Sequence
  Description of Artificial Sequence: Synthetic oligonucleotide
gucuugaaauggauucauu

SEQ ID NO: 2455358 - RNA, 19 nt, Artificial Sequence
  Description of Artificial Sequence: Synthetic oligonucleotide
gccucaugaaguccacagu

SEQ ID NO: 2455359 - RNA, 19 nt, Artificial Sequence
  Description of Artificial Sequence: Synthetic oligonucleotide
ugagcgcuguagggauuuu

SEQ ID NO: 2455360 - RNA, 19 nt, Artificial Sequence
  Description of Artificial Sequence: Synthetic oligonucleotide
gugagcgcuguagggauuu

SEQ ID NO: 2455361 - RNA, 19 nt, Artificial Sequence
  Description of Artificial Sequence: Synthetic oligonucleotide
ccagucaauaugccaggcu

SEQ ID NO: 2455362 - RNA, 19 nt, Artificial Sequence
  Description of Artificial Sequence: Synthetic oligonucleotide
  modified_base (18)..(18): a, c, u, g, unknown or other
cagcugucauucugugunu

SEQ ID NO: 2455363 - RNA, 19 nt, Artificial Sequence
  Description of Artificial Sequence: Synthetic oligonucleotide
gcguacuucugugcuggga

SEQ ID NO: 2455364 - RNA, 19 nt, Artificial Sequence
  Description of Artificial Sequence: Synthetic oligonucleotide
cucugccucugguuugaau

SEQ ID NO: 2455365 - RNA, 19 nt, Artificial Sequence
  Description of Artificial Sequence: Synthetic oligonucleotide
gccaggcuuuagaaagcuc

SEQ ID NO: 2455366 - RNA, 19 nt, Artificial Sequence
  Description of Artificial Sequence: Synthetic oligonucleotide
  modified_base (6)..(6): a, c, u, g, unknown or other
gccucnguucagcugucau

SEQ ID NO: 2455367 - RNA, 19 nt, Artificial Sequence
  Description of Artificial Sequence: Synthetic oligonucleotide
ccgagcgaugaucgcccug

SEQ ID NO: 2455368 - RNA, 19 nt, Artificial Sequence
  Description of Artificial Sequence: Synthetic oligonucleotide
cgaagagaaugguuuuggu

SEQ ID NO: 2455369 - RNA, 19 nt, Artificial Sequence
  Description of Artificial Sequence: Synthetic oligonucleotide
  modified_base (5)..(5): a, c, u, g, unknown or other
ccucnguucagcugucauu

SEQ ID NO: 2455370 - RNA, 19 nt, Artificial Sequence
  Description of Artificial Sequence: Synthetic oligonucleotide
cucugaacgcuugcagauu

SEQ ID NO: 2455371 - RNA, 19 nt, Artificial Sequence
  Description of Artificial Sequence: Synthetic oligonucleotide
cgcguacuucugugcuggg

SEQ ID NO: 2455372 - RNA, 19 nt, Artificial Sequence
  Description of Artificial Sequence: Synthetic oligonucleotide
ccacaagugcucugguuuu

SEQ ID NO: 2455373 - RNA, 19 nt, Artificial Sequence
  Description of Artificial Sequence: Synthetic oligonucleotide
ccgaaguagcaaucagaau

SEQ ID NO: 2455374 - RNA, 19 nt, Artificial Sequence
  Description of Artificial Sequence: Synthetic oligonucleotide
ggccuggaaccagccaucu

SEQ ID NO: 2455375 - RNA, 19 nt, Artificial Sequence
  Description of Artificial Sequence: Synthetic oligonucleotide
gccucugguuugaaucauu

SEQ ID NO: 2455376 - RNA, 19 nt, Artificial Sequence
  Description of Artificial Sequence: Synthetic oligonucleotide
ccaugggacccuuguuguu

SEQ ID NO: 2455377 - RNA, 19 nt, Artificial Sequence
  Description of Artificial Sequence: Synthetic oligonucleotide
cccgagcgaugaucgcccu

SEQ ID NO: 2455378 - RNA, 19 nt, Artificial Sequence
  Description of Artificial Sequence: Synthetic oligonucleotide
  modified_base (1)..(1): a, c, u, g, unknown or other
nguucagcugucauucugu

SEQ ID NO: 2455379 - RNA, 19 nt, Artificial Sequence
  Description of Artificial Sequence: Synthetic oligonucleotide
aagaaauacaaacccaugc

SEQ ID NO: 2455380 - RNA, 19 nt, Artificial Sequence
  Description of Artificial Sequence: Synthetic oligonucleotide
ucuacauugaaaccaacgg

SEQ ID NO: 2455381 - RNA, 19 nt, Artificial Sequence
  Description of Artificial Sequence: Synthetic oligonucleotide
ugagauuaugaaaauaucc

SEQ ID NO: 2455382 - RNA, 19 nt, Artificial Sequence
  Description of Artificial Sequence: Synthetic oligonucleotide
ucugauuucaagcaauggg

SEQ ID NO: 2455383 - RNA, 19 nt, Artificial Sequence
  Description of Artificial Sequence: Synthetic oligonucleotide
aaggauaagcuguugugcc

SEQ ID NO: 2455384 - RNA, 19 nt, Artificial Sequence
  Description of Artificial Sequence: Synthetic oligonucleotide
uuugagauuaugaaaauau

SEQ ID NO: 2455385 - RNA, 19 nt, Artificial Sequence
  Description of Artificial Sequence: Synthetic oligonucleotide
gaaucagugacacaugucc

SEQ ID NO: 2455386 - RNA, 19 nt, Artificial Sequence
  Description of Artificial Sequence: Synthetic oligonucleotide
agaggcucuacauugaaac

SEQ ID NO: 2455387 - RNA, 19 nt, Artificial Sequence
  Description of Artificial Sequence: Synthetic oligonucleotide
aaaauauccuguccaaaag

SEQ ID NO: 2455388 - RNA, 19 nt, Artificial Sequence
  Description of Artificial Sequence: Synthetic oligonucleotide
uacauugaaaccaacggug

SEQ ID NO: 2455389 - RNA, 19 nt, Artificial Sequence
  Description of Artificial Sequence: Synthetic oligonucleotide
ucugauaaauccaacugca

SEQ ID NO: 2455390 - RNA, 19 nt, Artificial Sequence
  Description of Artificial Sequence: Synthetic oligonucleotide
uguaguuucugaaggauca

SEQ ID NO: 2455391 - RNA, 19 nt, Artificial Sequence
  Description of Artificial Sequence: Synthetic oligonucleotide
aaaguagaaggauuucuug

SEQ ID NO: 2455392 - RNA, 19 nt, Artificial Sequence
  Description of Artificial Sequence: Synthetic oligonucleotide
gauguuagugccuuccagg

SEQ ID NO: 2455393 - RNA, 19 nt, Artificial Sequence
  Description of Artificial Sequence: Synthetic oligonucleotide
uucugaagaaauacaaacc

SEQ ID NO: 2455394 - RNA, 19 nt, Artificial Sequence
  Description of Artificial Sequence: Synthetic oligonucleotide
uucugauaaauccaacugc

SEQ ID NO: 2455395 - RNA, 19 nt, Artificial Sequence
  Description of Artificial Sequence: Synthetic oligonucleotide
aguaccaagaaagggacgc

SEQ ID NO: 2455396 - RNA, 19 nt, Artificial Sequence
  Description of Artificial Sequence: Synthetic oligonucleotide
ugauaaauccaacugcaga

SEQ ID NO: 2455397 - RNA, 19 nt, Artificial Sequence
  Description of Artificial Sequence: Synthetic oligonucleotide
uucaagaggcucuacauug

SEQ ID NO: 2455398 - RNA, 19 nt, Artificial Sequence
  Description of Artificial Sequence: Synthetic oligonucleotide
aaauauccuguccaaaagu

SEQ ID NO: 2455399 - RNA, 19 nt, Artificial Sequence
  Description of Artificial Sequence: Synthetic oligonucleotide
uacacaaggauguuagugc

SEQ ID NO: 2455400 - RNA, 19 nt, Artificial Sequence
  Description of Artificial Sequence: Synthetic oligonucleotide
agauuaugaaaauauccug

SEQ ID NO: 2455401 - RNA, 19 nt, Artificial Sequence
  Description of Artificial Sequence: Synthetic oligonucleotide
aggauuguggucuugccgg

SEQ ID NO: 2455402 - RNA, 19 nt, Artificial Sequence
  Description of Artificial Sequence: Synthetic oligonucleotide
ugauuucaagcaaugggag

SEQ ID NO: 2455403 - RNA, 19 nt, Artificial Sequence
  Description of Artificial Sequence: Synthetic oligonucleotide
auugucuuggaaccucucc

SEQ ID NO: 2455404 - RNA, 19 nt, Artificial Sequence
  Description of Artificial Sequence: Synthetic oligonucleotide
uccaacugcagaaaggcug

SEQ ID NO: 2455405 - RNA, 19 nt, Artificial Sequence
  Description of Artificial Sequence: Synthetic oligonucleotide
uguguguugaacuggguug

SEQ ID NO: 2455406 - RNA, 19 nt, Artificial Sequence
  Description of Artificial Sequence: Synthetic oligonucleotide
gauaaauccaacugcagaa

SEQ ID NO: 2455407 - RNA, 19 nt, Artificial Sequence
  Description of Artificial Sequence: Synthetic oligonucleotide
agaaauacaaacccaugca

SEQ ID NO: 2455408 - RNA, 19 nt, Artificial Sequence
  Description of Artificial Sequence: Synthetic oligonucleotide
guuagugccuuccagguag

SEQ ID NO: 2455409 - RNA, 19 nt, Artificial Sequence
  Description of Artificial Sequence: Synthetic oligonucleotide
gaggcuaccacauuucagc

SEQ ID NO: 2455410 - RNA, 19 nt, Artificial Sequence
  Description of Artificial Sequence: Synthetic oligonucleotide
auuucuuguguguugaacu

SEQ ID NO: 2455411 - RNA, 19 nt, Artificial Sequence
  Description of Artificial Sequence: Synthetic oligonucleotide
aaggauguuagugccuucc

SEQ ID NO: 2455412 - RNA, 19 nt, Artificial Sequence
  Description of Artificial Sequence: Synthetic oligonucleotide
ucuuguguguugaacuggg

SEQ ID NO: 2455413 - RNA, 19 nt, Artificial Sequence
  Description of Artificial Sequence: Synthetic oligonucleotide
auuucaagcaaugggagag

SEQ ID NO: 2455414 - RNA, 19 nt, Artificial Sequence
  Description of Artificial Sequence: Synthetic oligonucleotide
uucccuuucagcuuguaca

SEQ ID NO: 2455415 - RNA, 19 nt, Artificial Sequence
  Description of Artificial Sequence: Synthetic oligonucleotide
ugaccucucgaauucacgg

SEQ ID NO: 2455416 - RNA, 19 nt, Artificial Sequence
  Description of Artificial Sequence: Synthetic oligonucleotide
uauccuguccaaaaguaga

SEQ ID NO: 2455417 - RNA, 19 nt, Artificial Sequence
  Description of Artificial Sequence: Synthetic oligonucleotide
aguagaaggauuucuugug

SEQ ID NO: 2455418 - RNA, 19 nt, Artificial Sequence
  Description of Artificial Sequence: Synthetic oligonucleotide
ucuuccaggacuucguuga

SEQ ID NO: 2455419 - RNA, 19 nt, Artificial Sequence
  Description of Artificial Sequence: Synthetic oligonucleotide
gaauucacggggcccaugg

SEQ ID NO: 2455420 - RNA, 19 nt, Artificial Sequence
  Description of Artificial Sequence: Synthetic oligonucleotide
uccaaaaguagaaggauuu

SEQ ID NO: 2455421 - RNA, 19 nt, Artificial Sequence
  Description of Artificial Sequence: Synthetic oligonucleotide
ugacacauguccaggagcu

SEQ ID NO: 2455422 - RNA, 19 nt, Artificial Sequence
  Description of Artificial Sequence: Synthetic oligonucleotide
accacauuucagcaggauc

SEQ ID NO: 2455423 - RNA, 19 nt, Artificial Sequence
  Description of Artificial Sequence: Synthetic oligonucleotide
uuucuuguguguugaacug

SEQ ID NO: 2455424 - RNA, 19 nt, Artificial Sequence
  Description of Artificial Sequence: Synthetic oligonucleotide
uugagauuaugaaaauauc

SEQ ID NO: 2455425 - RNA, 19 nt, Artificial Sequence
  Description of Artificial Sequence: Synthetic oligonucleotide
cugauuucaagcaauggga

SEQ ID NO: 2455426 - RNA, 19 nt, Artificial Sequence
  Description of Artificial Sequence: Synthetic oligonucleotide
acauacacaaggauguuag

SEQ ID NO: 2455427 - RNA, 19 nt, Artificial Sequence
  Description of Artificial Sequence: Synthetic oligonucleotide
ugacccuuucuguucauag

SEQ ID NO: 2455428 - RNA, 19 nt, Artificial Sequence
  Description of Artificial Sequence: Synthetic oligonucleotide
ucuuggaaccucuccaggc

SEQ ID NO: 2455429 - RNA, 19 nt, Artificial Sequence
  Description of Artificial Sequence: Synthetic oligonucleotide
agcaucaggugccuccugc

SEQ ID NO: 2455430 - RNA, 19 nt, Artificial Sequence
  Description of Artificial Sequence: Synthetic oligonucleotide
ugaaggaucagcugacccu

SEQ ID NO: 2455431 - RNA, 19 nt, Artificial Sequence
  Description of Artificial Sequence: Synthetic oligonucleotide
uggguuguaguuucugaag

SEQ ID NO: 2455432 - RNA, 19 nt, Artificial Sequence
  Description of Artificial Sequence: Synthetic oligonucleotide
aucauuaccaccugggcuu

SEQ ID NO: 2455433 - RNA, 19 nt, Artificial Sequence
  Description of Artificial Sequence: Synthetic oligonucleotide
cagcaauugucuuggaacc

SEQ ID NO: 2455434 - RNA, 19 nt, Artificial Sequence
  Description of Artificial Sequence: Synthetic oligonucleotide
agcggauucccuuucagcu

SEQ ID NO: 2455435 - RNA, 19 nt, Artificial Sequence
  Description of Artificial Sequence: Synthetic oligonucleotide
auacacaaggauguuagug

SEQ ID NO: 2455436 - RNA, 19 nt, Artificial Sequence
  Description of Artificial Sequence: Synthetic oligonucleotide
aaaccaacgguggguaagg

SEQ ID NO: 2455437 - RNA, 19 nt, Artificial Sequence
  Description of Artificial Sequence: Synthetic oligonucleotide
ucugccuugugaccucucg

SEQ ID NO: 2455438 - RNA, 19 nt, Artificial Sequence
  Description of Artificial Sequence: Synthetic oligonucleotide
ugaacuggguuguaguuuc

SEQ ID NO: 2455439 - RNA, 19 nt, Artificial Sequence
  Description of Artificial Sequence: Synthetic oligonucleotide
ucucugauuucaagcaaug

SEQ ID NO: 2455440 - RNA, 19 nt, Artificial Sequence
  Description of Artificial Sequence: Synthetic oligonucleotide
cauuucagcaggaucucag

SEQ ID NO: 2455441 - RNA, 19 nt, Artificial Sequence
  Description of Artificial Sequence: Synthetic oligonucleotide
aucagugacacauguccag

SEQ ID NO: 2455442 - RNA, 19 nt, Artificial Sequence
  Description of Artificial Sequence: Synthetic oligonucleotide
auucccuuucagcuuguac

SEQ ID NO: 2455443 - RNA, 19 nt, Artificial Sequence
  Description of Artificial Sequence: Synthetic oligonucleotide
accucucgaauucacgggg

SEQ ID NO: 2455444 - RNA, 19 nt, Artificial Sequence
  Description of Artificial Sequence: Synthetic oligonucleotide
ucccuuucagcuuguacag

SEQ ID NO: 2455445 - RNA, 19 nt, Artificial Sequence
  Description of Artificial Sequence: Synthetic oligonucleotide
acaggauuguggucuugcc

SEQ ID NO: 2455446 - RNA, 19 nt, Artificial Sequence
  Description of Artificial Sequence: Synthetic oligonucleotide
aauauccuguccaaaagua

SEQ ID NO: 2455447 - RNA, 19 nt, Artificial Sequence
  Description of Artificial Sequence: Synthetic oligonucleotide
gacuucguugagcucagcc

SEQ ID NO: 2455448 - RNA, 19 nt, Artificial Sequence
  Description of Artificial Sequence: Synthetic oligonucleotide
uccaggcccaucauuacca

SEQ ID NO: 2455449 - RNA, 19 nt, Artificial Sequence
  Description of Artificial Sequence: Synthetic oligonucleotide
uguugugccugcucagggg

SEQ ID NO: 2455450 - RNA, 19 nt, Artificial Sequence
  Description of Artificial Sequence: Synthetic oligonucleotide
aaaaguagaaggauuucuu

SEQ ID NO: 2455451 - RNA, 19 nt, Artificial Sequence
  Description of Artificial Sequence: Synthetic oligonucleotide
gagauuaugaaaauauccu

SEQ ID NO: 2455452 - RNA, 19 nt, Artificial Sequence
  Description of Artificial Sequence: Synthetic oligonucleotide
ugggagagcaucaggugcc

SEQ ID NO: 2455453 - RNA, 19 nt, Artificial Sequence
  Description of Artificial Sequence: Synthetic oligonucleotide
caaggauaagcuguugugc

SEQ ID NO: 2455454 - RNA, 19 nt, Artificial Sequence
  Description of Artificial Sequence: Synthetic oligonucleotide
cagcacauacacaaggaug

SEQ ID NO: 2455455 - RNA, 19 nt, Artificial Sequence
  Description of Artificial Sequence: Synthetic oligonucleotide
cauugaaaccaacgguggg

SEQ ID NO: 2455456 - RNA, 19 nt, Artificial Sequence
  Description of Artificial Sequence: Synthetic oligonucleotide
agaaggauuucuugugugu

SEQ ID NO: 2455457 - RNA, 19 nt, Artificial Sequence
  Description of Artificial Sequence: Synthetic oligonucleotide
acuucguugagcucagcca

SEQ ID NO: 2455458 - RNA, 19 nt, Artificial Sequence
  Description of Artificial Sequence: Synthetic oligonucleotide
cuucguugagcucagccac

SEQ ID NO: 2455459 - RNA, 19 nt, Artificial Sequence
  Description of Artificial Sequence: Synthetic oligonucleotide
ucagugacacauguccagg

SEQ ID NO: 2455460 - RNA, 19 nt, Artificial Sequence
  Description of Artificial Sequence: Synthetic oligonucleotide
acauugaaaccaacggugg

SEQ ID NO: 2455461 - RNA, 19 nt, Artificial Sequence
  Description of Artificial Sequence: Synthetic oligonucleotide
gaccucucgaauucacggg

SEQ ID NO: 2455462 - RNA, 19 nt, Artificial Sequence
  Description of Artificial Sequence: Synthetic oligonucleotide
uaccaagaaagggacgccg

SEQ ID NO: 2455463 - RNA, 19 nt, Artificial Sequence
  Description of Artificial Sequence: Synthetic oligonucleotide
gaaaccaacgguggguaag

SEQ ID NO: 2455464 - RNA, 19 nt, Artificial Sequence
  Description of Artificial Sequence: Synthetic oligonucleotide
uggccaguaccaagaaagg

SEQ ID NO: 2455465 - RNA, 19 nt, Artificial Sequence
  Description of Artificial Sequence: Synthetic oligonucleotide
agcaaggauaagcuguugu

SEQ ID NO: 2455466 - RNA, 19 nt, Artificial Sequence
  Description of Artificial Sequence: Synthetic oligonucleotide
gauuucaagcaaugggaga

SEQ ID NO: 2455467 - RNA, 19 nt, Artificial Sequence
  Description of Artificial Sequence: Synthetic oligonucleotide
gauggagcaggcucugcag

SEQ ID NO: 2455468 - RNA, 19 nt, Artificial Sequence
  Description of Artificial Sequence: Synthetic oligonucleotide
cuuucuguucauaggagca

SEQ ID NO: 2455469 - RNA, 19 nt, Artificial Sequence
  Description of Artificial Sequence: Synthetic oligonucleotide
ugcuguccagcacauacac

SEQ ID NO: 2455470 - RNA, 19 nt, Artificial Sequence
  Description of Artificial Sequence: Synthetic oligonucleotide
cuuggaaccucuccaggcc

SEQ ID NO: 2455471 - RNA, 19 nt, Artificial Sequence
  Description of Artificial Sequence: Synthetic oligonucleotide
gaucagcugacccuuucug

SEQ ID NO: 2455472 - RNA, 19 nt, Artificial Sequence
  Description of Artificial Sequence: Synthetic oligonucleotide
ccuguccaaaaguagaagg

SEQ ID NO: 2455473 - RNA, 19 nt, Artificial Sequence
  Description of Artificial Sequence: Synthetic oligonucleotide
cugauaaauccaacugcag

SEQ ID NO: 2455474 - RNA, 19 nt, Artificial Sequence
  Description of Artificial Sequence: Synthetic oligonucleotide
uuuugagauuaugaaaaua

SEQ ID NO: 2455475 - RNA, 19 nt, Artificial Sequence
  Description of Artificial Sequence: Synthetic oligonucleotide
acugccucaggcaagcggg

SEQ ID NO: 2455476 - RNA, 19 nt, Artificial Sequence
  Description of Artificial Sequence: Synthetic oligonucleotide
caagcaaugggagagcauc

SEQ ID NO: 2455477 - RNA, 19 nt, Artificial Sequence
  Description of Artificial Sequence: Synthetic oligonucleotide
ucaagaggcucuacauuga

SEQ ID NO: 2455478 - RNA, 19 nt, Artificial Sequence
  Description of Artificial Sequence: Synthetic oligonucleotide
caggauuguggucuugccg

SEQ ID NO: 2455479 - RNA, 19 nt, Artificial Sequence
  Description of Artificial Sequence: Synthetic oligonucleotide
auaggagcaaggauaagcu

SEQ ID NO: 2455480 - RNA, 19 nt, Artificial Sequence
  Description of Artificial Sequence: Synthetic oligonucleotide
augaaaauauccuguccaa

SEQ ID NO: 2455481 - RNA, 19 nt, Artificial Sequence
  Description of Artificial Sequence: Synthetic oligonucleotide
cuugugaccucucgaauuc

SEQ ID NO: 2455482 - RNA, 19 nt, Artificial Sequence
  Description of Artificial Sequence: Synthetic oligonucleotide
uucuguucauaggagcaag

SEQ ID NO: 2455483 - RNA, 19 nt, Artificial Sequence
  Description of Artificial Sequence: Synthetic oligonucleotide
uuggaaccucuccaggccc

SEQ ID NO: 2455484 - RNA, 19 nt, Artificial Sequence
  Description of Artificial Sequence: Synthetic oligonucleotide
gaggcucuacauugaaacc

SEQ ID NO: 2455485 - RNA, 19 nt, Artificial Sequence
  Description of Artificial Sequence: Synthetic oligonucleotide
auucacggggcccauggug

SEQ ID NO: 2455486 - RNA, 19 nt, Artificial Sequence
  Description of Artificial Sequence: Synthetic oligonucleotide
aggcaagcgggcuucaucu

SEQ ID NO: 2455487 - RNA, 19 nt, Artificial Sequence
  Description of Artificial Sequence: Synthetic oligonucleotide
uggucuugccggcagaguc

SEQ ID NO: 2455488 - RNA, 19 nt, Artificial Sequence
  Description of Artificial Sequence: Synthetic oligonucleotide
ccagcaauugucuuggaac

SEQ ID NO: 2455489 - RNA, 19 nt, Artificial Sequence
  Description of Artificial Sequence: Synthetic oligonucleotide
uguccaaaaguagaaggau

SEQ ID NO: 2455490 - RNA, 19 nt, Artificial Sequence
  Description of Artificial Sequence: Synthetic oligonucleotide
aguuucugaaggaucagcu

SEQ ID NO: 2455491 - RNA, 19 nt, Artificial Sequence
  Description of Artificial Sequence: Synthetic oligonucleotide
guucauaggagcaaggaua

SEQ ID NO: 2455492 - RNA, 19 nt, Artificial Sequence
  Description of Artificial Sequence: Synthetic oligonucleotide
aggagcaaggauaagcugu

SEQ ID NO: 2455493 - RNA, 19 nt, Artificial Sequence
  Description of Artificial Sequence: Synthetic oligonucleotide
gugacacauguccaggagc

SEQ ID NO: 2455494 - RNA, 19 nt, Artificial Sequence
  Description of Artificial Sequence: Synthetic oligonucleotide
ugucucugauuucaagcaa

SEQ ID NO: 2455495 - RNA, 19 nt, Artificial Sequence
  Description of Artificial Sequence: Synthetic oligonucleotide
aggaucucagcagauggag

SEQ ID NO: 2455496 - RNA, 19 nt, Artificial Sequence
  Description of Artificial Sequence: Synthetic oligonucleotide
auauccuguccaaaaguag

SEQ ID NO: 2455497 - RNA, 19 nt, Artificial Sequence
  Description of Artificial Sequence: Synthetic oligonucleotide
uacaggauuguggucuugc

SEQ ID NO: 2455498 - RNA, 19 nt, Artificial Sequence
  Description of Artificial Sequence: Synthetic oligonucleotide
accaacgguggguaagguc

SEQ ID NO: 2455499 - RNA, 19 nt, Artificial Sequence
  Description of Artificial Sequence: Synthetic oligonucleotide
uaggagcaaggauaagcug

SEQ ID NO: 2455500 - RNA, 19 nt, Artificial Sequence
  Description of Artificial Sequence: Synthetic oligonucleotide
agcuucaagaggcucuaca

SEQ ID NO: 2455501 - RNA, 19 nt, Artificial Sequence
  Description of Artificial Sequence: Synthetic oligonucleotide
ugugaccucucgaauucac

SEQ ID NO: 2455502 - RNA, 19 nt, Artificial Sequence
  Description of Artificial Sequence: Synthetic oligonucleotide
aggcucuacauugaaacca

SEQ ID NO: 2455503 - RNA, 19 nt, Artificial Sequence
  Description of Artificial Sequence: Synthetic oligonucleotide
aauugucuuggaaccucuc

SEQ ID NO: 2455504 - RNA, 19 nt, Artificial Sequence
  Description of Artificial Sequence: Synthetic oligonucleotide
ccugucucugauuucaagc

SEQ ID NO: 2455505 - RNA, 19 nt, Artificial Sequence
  Description of Artificial Sequence: Synthetic oligonucleotide
cugucucugauuucaagca

SEQ ID NO: 2455506 - RNA, 19 nt, Artificial Sequence
  Description of Artificial Sequence: Synthetic oligonucleotide
aguccaggcccaucauuac

SEQ ID NO: 2455507 - RNA, 19 nt, Artificial Sequence
  Description of Artificial Sequence: Synthetic oligonucleotide
uucaagcaaugggagagca

SEQ ID NO: 2455508 - RNA, 19 nt, Artificial Sequence
  Description of Artificial Sequence: Synthetic oligonucleotide
acuggguuguaguuucuga

SEQ ID NO: 2455509 - RNA, 19 nt, Artificial Sequence
  Description of Artificial Sequence: Synthetic oligonucleotide
cucugauuucaagcaaugg

SEQ ID NO: 2455510 - RNA, 19 nt, Artificial Sequence
  Description of Artificial Sequence: Synthetic oligonucleotide
cugaucccaguccugcucc

SEQ ID NO: 2455511 - RNA, 19 nt, Artificial Sequence
  Description of Artificial Sequence: Synthetic oligonucleotide
gucuuggaaccucuccagg

SEQ ID NO: 2455512 - RNA, 19 nt, Artificial Sequence
  Description of Artificial Sequence: Synthetic oligonucleotide
aucagcugacccuuucugu

SEQ ID NO: 2455513 - RNA, 19 nt, Artificial Sequence
  Description of Artificial Sequence: Synthetic oligonucleotide
aacgguggguaaggucucc

SEQ ID NO: 2455514 - RNA, 19 nt, Artificial Sequence
  Description of Artificial Sequence: Synthetic oligonucleotide
agaaucagugacacauguc

SEQ ID NO: 2455515 - RNA, 19 nt, Artificial Sequence
  Description of Artificial Sequence: Synthetic oligonucleotide
ucagcugacccuuucuguu

SEQ ID NO: 2455516 - RNA, 19 nt, Artificial Sequence
  Description of Artificial Sequence: Synthetic oligonucleotide
uccuguccaaaaguagaag

SEQ ID NO: 2455517 - RNA, 19 nt, Artificial Sequence
  Description of Artificial Sequence: Synthetic oligonucleotide
agggacgccggccauguug

SEQ ID NO: 2455518 - RNA, 19 nt, Artificial Sequence
  Description of Artificial Sequence: Synthetic oligonucleotide
gagaaucagugacacaugu

SEQ ID NO: 2455519 - RNA, 19 nt, Artificial Sequence
  Description of Artificial Sequence: Synthetic oligonucleotide
guaaggucuccaccagcgg

SEQ ID NO: 2455520 - RNA, 19 nt, Artificial Sequence
  Description of Artificial Sequence: Synthetic oligonucleotide
cuguugugccugcucaggg

SEQ ID NO: 2455521 - RNA, 19 nt, Artificial Sequence
  Description of Artificial Sequence: Synthetic oligonucleotide
gcaaggauaagcuguugug

SEQ ID NO: 2455522 - RNA, 19 nt, Artificial Sequence
  Description of Artificial Sequence: Synthetic oligonucleotide
ugccuugugaccucucgaa

SEQ ID NO: 2455523 - RNA, 19 nt, Artificial Sequence
  Description of Artificial Sequence: Synthetic oligonucleotide
auaaauccaacugcagaaa

SEQ ID NO: 2455524 - RNA, 19 nt, Artificial Sequence
  Description of Artificial Sequence: Synthetic oligonucleotide
aacuggguuguaguuucug

SEQ ID NO: 2455525 - RNA, 19 nt, Artificial Sequence
  Description of Artificial Sequence: Synthetic oligonucleotide
ccaacugcagaaaggcugg

SEQ ID NO: 2455526 - RNA, 19 nt, Artificial Sequence
  Description of Artificial Sequence: Synthetic oligonucleotide
aauucacggggcccauggu

SEQ ID NO: 2455527 - RNA, 19 nt, Artificial Sequence
  Description of Artificial Sequence: Synthetic oligonucleotide
aaagggacgccggccaugu

SEQ ID NO: 2455528 - RNA, 19 nt, Artificial Sequence
  Description of Artificial Sequence: Synthetic oligonucleotide
cagcagauggagcaggcuc

SEQ ID NO: 2455529 - RNA, 19 nt, Artificial Sequence
  Description of Artificial Sequence: Synthetic oligonucleotide
uuucuguucauaggagcaa

SEQ ID NO: 2455530 - RNA, 19 nt, Artificial Sequence
  Description of Artificial Sequence: Synthetic oligonucleotide
uccuguagccccuggccug

SEQ ID NO: 2455531 - RNA, 19 nt, Artificial Sequence
  Description of Artificial Sequence: Synthetic oligonucleotide
cucucgaauucacggggcc

SEQ ID NO: 2455532 - RNA, 19 nt, Artificial Sequence
  Description of Artificial Sequence: Synthetic oligonucleotide
uugaaaccaacggugggua

SEQ ID NO: 2455533 - RNA, 19 nt, Artificial Sequence
  Description of Artificial Sequence: Synthetic oligonucleotide
ggauguuagugccuuccag

SEQ ID NO: 2455534 - RNA, 19 nt, Artificial Sequence
  Description of Artificial Sequence: Synthetic oligonucleotide
ucucgaauucacggggccc

SEQ ID NO: 2455535 - RNA, 19 nt, Artificial Sequence
  Description of Artificial Sequence: Synthetic oligonucleotide
ggcacugcaggcccgaagc

SEQ ID NO: 2455536 - RNA, 19 nt, Artificial Sequence
  Description of Artificial Sequence: Synthetic oligonucleotide
uccgaggcuaccacauuuc

SEQ ID NO: 2455537 - RNA, 19 nt, Artificial Sequence
  Description of Artificial Sequence: Synthetic oligonucleotide
cuacauugaaaccaacggu

SEQ ID NO: 2455538 - RNA, 19 nt, Artificial Sequence
  Description of Artificial Sequence: Synthetic oligonucleotide
ucaggugccuccugcuugu

SEQ ID NO: 2455539 - RNA, 19 nt, Artificial Sequence
  Description of Artificial Sequence: Synthetic oligonucleotide
cagcggauucccuuucagc

SEQ ID NO: 2455540 - RNA, 19 nt, Artificial Sequence
  Description of Artificial Sequence: Synthetic oligonucleotide
uguuggccaguaccaagaa

SEQ ID NO: 2455541 - RNA, 19 nt, Artificial Sequence
  Description of Artificial Sequence: Synthetic oligonucleotide
uugaacuggguuguaguuu

SEQ ID NO: 2455542 - RNA, 19 nt, Artificial Sequence
  Description of Artificial Sequence: Synthetic oligonucleotide
cagagaaucagugacacau

SEQ ID NO: 2455543 - RNA, 19 nt, Artificial Sequence
  Description of Artificial Sequence: Synthetic oligonucleotide
caggacuucguugagcuca

SEQ ID NO: 2455544 - RNA, 19 nt, Artificial Sequence
  Description of Artificial Sequence: Synthetic oligonucleotide
aagcaaugggagagcauca

SEQ ID NO: 2455545 - RNA, 19 nt, Artificial Sequence
  Description of Artificial Sequence: Synthetic oligonucleotide
ucaagcaaugggagagcau

SEQ ID NO: 2455546 - RNA, 19 nt, Artificial Sequence
  Description of Artificial Sequence: Synthetic oligonucleotide
uagcccugagcugagucug

SEQ ID NO: 2455547 - RNA, 19 nt, Artificial Sequence
  Description of Artificial Sequence: Synthetic oligonucleotide
agcaaugggagagcaucag

SEQ ID NO: 2455548 - RNA, 19 nt, Artificial Sequence
  Description of Artificial Sequence: Synthetic oligonucleotide
agcugacccuuucuguuca

SEQ ID NO: 2455549 - RNA, 19 nt, Artificial Sequence
  Description of Artificial Sequence: Synthetic oligonucleotide
aggauguuagugccuucca

SEQ ID NO: 2455550 - RNA, 19 nt, Artificial Sequence
  Description of Artificial Sequence: Synthetic oligonucleotide
gugaccucucgaauucacg

SEQ ID NO: 2455551 - RNA, 19 nt, Artificial Sequence
  Description of Artificial Sequence: Synthetic oligonucleotide
uggaguccgaggcuaccac

SEQ ID NO: 2455552 - RNA, 19 nt, Artificial Sequence
  Description of Artificial Sequence: Synthetic oligonucleotide
gguggguaaggucuccacc

SEQ ID NO: 2455553 - RNA, 19 nt, Artificial Sequence
  Description of Artificial Sequence: Synthetic oligonucleotide
uggaaccucuccaggccca

SEQ ID NO: 2455554 - RNA, 19 nt, Artificial Sequence
  Description of Artificial Sequence: Synthetic oligonucleotide
agcuguugugccugcucag

SEQ ID NO: 2455555 - RNA, 19 nt, Artificial Sequence
  Description of Artificial Sequence: Synthetic oligonucleotide
cugagcugagucugucccc

SEQ ID NO: 2455556 - RNA, 19 nt, Artificial Sequence
  Description of Artificial Sequence: Synthetic oligonucleotide
uccagguagcccugagcug

SEQ ID NO: 2455557 - RNA, 19 nt, Artificial Sequence
  Description of Artificial Sequence: Synthetic oligonucleotide
cugugagggcacugcaggc

SEQ ID NO: 2455558 - RNA, 19 nt, Artificial Sequence
  Description of Artificial Sequence: Synthetic oligonucleotide
guaguuucugaaggaucag

SEQ ID NO: 2455559 - RNA, 19 nt, Artificial Sequence
  Description of Artificial Sequence: Synthetic oligonucleotide
uccaccagcggauucccuu

SEQ ID NO: 2455560 - RNA, 19 nt, Artificial Sequence
  Description of Artificial Sequence: Synthetic oligonucleotide
guagccccuggccugugag

SEQ ID NO: 2455561 - RNA, 19 nt, Artificial Sequence
  Description of Artificial Sequence: Synthetic oligonucleotide
caaaaguagaaggauuucu

SEQ ID NO: 2455562 - RNA, 19 nt, Artificial Sequence
  Description of Artificial Sequence: Synthetic oligonucleotide
guguugaacuggguuguag

SEQ ID NO: 2455563 - RNA, 19 nt, Artificial Sequence
  Description of Artificial Sequence: Synthetic oligonucleotide
ugaaaccaacgguggguaa

SEQ ID NO: 2455564 - RNA, 19 nt, Artificial Sequence
  Description of Artificial Sequence: Synthetic oligonucleotide
agagaaucagugacacaug

SEQ ID NO: 2455565 - RNA, 19 nt, Artificial Sequence
  Description of Artificial Sequence: Synthetic oligonucleotide
caucauuaccaccugggcu

SEQ ID NO: 2455566 - RNA, 19 nt, Artificial Sequence
  Description of Artificial Sequence: Synthetic oligonucleotide
cuggguuguaguuucugaa

SEQ ID NO: 2455567 - RNA, 19 nt, Artificial Sequence
  Description of Artificial Sequence: Synthetic oligonucleotide
ggccaguaccaagaaaggg

SEQ ID NO: 2455568 - RNA, 19 nt, Artificial Sequence
  Description of Artificial Sequence: Synthetic oligonucleotide
uuagugccuuccagguagu

SEQ ID NO: 2455569 - RNA, 19 nt, Artificial Sequence
  Description of Artificial Sequence: Synthetic oligonucleotide
agcaauugucuuggaaccu

SEQ ID NO: 2455570 - RNA, 19 nt, Artificial Sequence
  Description of Artificial Sequence: Synthetic oligonucleotide
agcagauggagcaggcucu

SEQ ID NO: 2455571 - RNA, 19 nt, Artificial Sequence
  Description of Artificial Sequence: Synthetic oligonucleotide
ggauaagcuguugugccug

SEQ ID NO: 2455572 - RNA, 19 nt, Artificial Sequence
  Description of Artificial Sequence: Synthetic oligonucleotide
ucguugagcucagccacug

SEQ ID NO: 2455573 - RNA, 19 nt, Artificial Sequence
  Description of Artificial Sequence: Synthetic oligonucleotide
aagaggcucuacauugaaa

SEQ ID NO: 2455574 - RNA, 19 nt, Artificial Sequence
  Description of Artificial Sequence: Synthetic oligonucleotide
guaccaagaaagggacgcc

SEQ ID NO: 2455575 - RNA, 19 nt, Artificial Sequence
  Description of Artificial Sequence: Synthetic oligonucleotide
ggcuaccacauuucagcag

SEQ ID NO: 2455576 - RNA, 19 nt, Artificial Sequence
  Description of Artificial Sequence: Synthetic oligonucleotide
augguggcuucugauaaau

SEQ ID NO: 2455577 - RNA, 19 nt, Artificial Sequence
  Description of Artificial Sequence: Synthetic oligonucleotide
aggcccgaagcucccagca

SEQ ID NO: 2455578 - RNA, 19 nt, Artificial Sequence
  Description of Artificial Sequence: Synthetic oligonucleotide
auuaccaccugggcuucug

SEQ ID NO: 2455579 - RNA, 19 nt, Artificial Sequence
  Description of Artificial Sequence: Synthetic oligonucleotide
gcucccagcaauugucuug

SEQ ID NO: 2455580 - RNA, 19 nt, Artificial Sequence
  Description of Artificial Sequence: Synthetic oligonucleotide
ugguggcuucugauaaauc

SEQ ID NO: 2455581 - RNA, 19 nt, Artificial Sequence
  Description of Artificial Sequence: Synthetic oligonucleotide
ucagcagauggagcaggcu

SEQ ID NO: 2455582 - RNA, 19 nt, Artificial Sequence
  Description of Artificial Sequence: Synthetic oligonucleotide
ccacauuucagcaggaucu

SEQ ID NO: 2455583 - RNA, 19 nt, Artificial Sequence
  Description of Artificial Sequence: Synthetic oligonucleotide
cuuccaggacuucguugag

SEQ ID NO: 2455584 - RNA, 19 nt, Artificial Sequence
  Description of Artificial Sequence: Synthetic oligonucleotide
ccaucauuaccaccugggc

SEQ ID NO: 2455585 - RNA, 19 nt, Artificial Sequence
  Description of Artificial Sequence: Synthetic oligonucleotide
cagcugacccuuucuguuc

SEQ ID NO: 2455586 - RNA, 19 nt, Artificial Sequence
  Description of Artificial Sequence: Synthetic oligonucleotide
cacauguccaggagcuuca

SEQ ID NO: 2455587 - RNA, 19 nt, Artificial Sequence
  Description of Artificial Sequence: Synthetic oligonucleotide
auccuguccaaaaguagaa

SEQ ID NO: 2455588 - RNA, 19 nt, Artificial Sequence
  Description of Artificial Sequence: Synthetic oligonucleotide
ugaucccaguccugcucca

SEQ ID NO: 2455589 - RNA, 19 nt, Artificial Sequence
  Description of Artificial Sequence: Synthetic oligonucleotide
caggcaagcgggcuucauc

SEQ ID NO: 2455590 - RNA, 19 nt, Artificial Sequence
  Description of Artificial Sequence: Synthetic oligonucleotide
agcgggcuucaucugugcu

SEQ ID NO: 2455591 - RNA, 19 nt, Artificial Sequence
  Description of Artificial Sequence: Synthetic oligonucleotide
caggaucucagcagaugga

SEQ ID NO: 2455592 - RNA, 19 nt, Artificial Sequence
  Description of Artificial Sequence: Synthetic oligonucleotide
ccauguuggggucuuccag

SEQ ID NO: 2455593 - RNA, 19 nt, Artificial Sequence
  Description of Artificial Sequence: Synthetic oligonucleotide
cagugacacauguccagga

SEQ ID NO: 2455594 - RNA, 19 nt, Artificial Sequence
  Description of Artificial Sequence: Synthetic oligonucleotide
agaaagggacgccggccau

SEQ ID NO: 2455595 - RNA, 19 nt, Artificial Sequence
  Description of Artificial Sequence: Synthetic oligonucleotide
cucgaauucacggggccca

SEQ ID NO: 2455596 - RNA, 19 nt, Artificial Sequence
  Description of Artificial Sequence: Synthetic oligonucleotide
guuguaguuucugaaggau

SEQ ID NO: 2455597 - RNA, 19 nt, Artificial Sequence
  Description of Artificial Sequence: Synthetic oligonucleotide
ggggucuuccaggacuucg

SEQ ID NO: 2455598 - RNA, 19 nt, Artificial Sequence
  Description of Artificial Sequence: Synthetic oligonucleotide
gaucccaguccugcuccag

SEQ ID NO: 2455599 - RNA, 19 nt, Artificial Sequence
  Description of Artificial Sequence: Synthetic oligonucleotide
gguagcccugagcugaguc

SEQ ID NO: 2455600 - RNA, 19 nt, Artificial Sequence
  Description of Artificial Sequence: Synthetic oligonucleotide
aaccaacgguggguaaggu

SEQ ID NO: 2455601 - RNA, 19 nt, Artificial Sequence
  Description of Artificial Sequence: Synthetic oligonucleotide
gggacgccggccauguugg

SEQ ID NO: 2455602 - RNA, 19 nt, Artificial Sequence
  Description of Artificial Sequence: Synthetic oligonucleotide
ccaacgguggguaaggucu

SEQ ID NO: 2455603 - RNA, 19 nt, Artificial Sequence
  Description of Artificial Sequence: Synthetic oligonucleotide
cccuuucuguucauaggag

SEQ ID NO: 2455604 - RNA, 19 nt, Artificial Sequence
  Description of Artificial Sequence: Synthetic oligonucleotide
guaguccuuccagguagcc

SEQ ID NO: 2455605 - RNA, 19 nt, Artificial Sequence
  Description of Artificial Sequence: Synthetic oligonucleotide
ggauuguggucuugccggc

SEQ ID NO: 2455606 - RNA, 19 nt, Artificial Sequence
  Description of Artificial Sequence: Synthetic oligonucleotide
cagccugucucugauuuca

SEQ ID NO: 2455607 - RNA, 19 nt, Artificial Sequence
  Description of Artificial Sequence: Synthetic oligonucleotide
gagcaaggauaagcuguug

SEQ ID NO: 2455608 - RNA, 19 nt, Artificial Sequence
  Description of Artificial Sequence: Synthetic oligonucleotide
accagcggauucccuuuca

SEQ ID NO: 2455609 - RNA, 19 nt, Artificial Sequence
  Description of Artificial Sequence: Synthetic oligonucleotide
ggaucucagcagauggagc

SEQ ID NO: 2455610 - RNA, 19 nt, Artificial Sequence
  Description of Artificial Sequence: Synthetic oligonucleotide
cccagagaaucagugacac

SEQ ID NO: 2455611 - RNA, 19 nt, Artificial Sequence
  Description of Artificial Sequence: Synthetic oligonucleotide
caagaggcucuacauugaa

SEQ ID NO: 2455612 - RNA, 19 nt, Artificial Sequence
  Description of Artificial Sequence: Synthetic oligonucleotide
ccgcacaccagcuauucuc

SEQ ID NO: 2455613 - RNA, 19 nt, Artificial Sequence
  Description of Artificial Sequence: Synthetic oligonucleotide
ggguaaggucuccaccagc

SEQ ID NO: 2455614 - RNA, 19 nt, Artificial Sequence
  Description of Artificial Sequence: Synthetic oligonucleotide
gauuguggucuugccggca

SEQ ID NO: 2455615 - RNA, 19 nt, Artificial Sequence
  Description of Artificial Sequence: Synthetic oligonucleotide
uaccacauuucagcaggau

SEQ ID NO: 2455616 - RNA, 19 nt, Artificial Sequence
  Description of Artificial Sequence: Synthetic oligonucleotide
gaaggaucagcugacccuu

SEQ ID NO: 2455617 - RNA, 19 nt, Artificial Sequence
  Description of Artificial Sequence: Synthetic oligonucleotide
cugccucaggcaagcgggc

SEQ ID NO: 2455618 - RNA, 19 nt, Artificial Sequence
  Description of Artificial Sequence: Synthetic oligonucleotide
gcccaucauuaccaccugg

SEQ ID NO: 2455619 - RNA, 19 nt, Artificial Sequence
  Description of Artificial Sequence: Synthetic oligonucleotide
gcgggcuucaucugugcug

SEQ ID NO: 2455620 - RNA, 19 nt, Artificial Sequence
  Description of Artificial Sequence: Synthetic oligonucleotide
guagcccugagcugagucu

SEQ ID NO: 2455621 - RNA, 19 nt, Artificial Sequence
  Description of Artificial Sequence: Synthetic oligonucleotide
aggacuucguugagcucag

SEQ ID NO: 2455622 - RNA, 19 nt, Artificial Sequence
  Description of Artificial Sequence: Synthetic oligonucleotide
gccugucucugauuucaag

SEQ ID NO: 2455623 - RNA, 19 nt, Artificial Sequence
  Description of Artificial Sequence: Synthetic oligonucleotide
auccaacugcagaaaggcu

SEQ ID NO: 2455624 - RNA, 19 nt, Artificial Sequence
  Description of Artificial Sequence: Synthetic oligonucleotide
gcaauugucuuggaaccuc

SEQ ID NO: 2455625 - RNA, 19 nt, Artificial Sequence
  Description of Artificial Sequence: Synthetic oligonucleotide
caauugucuuggaaccucu

SEQ ID NO: 2455626 - RNA, 19 nt, Artificial Sequence
  Description of Artificial Sequence: Synthetic oligonucleotide
ugccuccugcuuguuggcc

SEQ ID NO: 2455627 - RNA, 19 nt, Artificial Sequence
  Description of Artificial Sequence: Synthetic oligonucleotide
auaagcuguugugccugcu

SEQ ID NO: 2455628 - RNA, 19 nt, Artificial Sequence
  Description of Artificial Sequence: Synthetic oligonucleotide
cagguagcccugagcugag

SEQ ID NO: 2455629 - RNA, 19 nt, Artificial Sequence
  Description of Artificial Sequence: Synthetic oligonucleotide
cuaccacauuucagcagga

SEQ ID NO: 2455630 - RNA, 19 nt, Artificial Sequence
  Description of Artificial Sequence: Synthetic oligonucleotide
ccucucgaauucacggggc

SEQ ID NO: 2455631 - RNA, 19 nt, Artificial Sequence
  Description of Artificial Sequence: Synthetic oligonucleotide
caggcccgaagcucccagc

SEQ ID NO: 2455632 - RNA, 19 nt, Artificial Sequence
  Description of Artificial Sequence: Synthetic oligonucleotide
gagcaucaggugccuccug

SEQ ID NO: 2455633 - RNA, 19 nt, Artificial Sequence
  Description of Artificial Sequence: Synthetic oligonucleotide
agcucccagcaauugucuu

SEQ ID NO: 2455634 - RNA, 19 nt, Artificial Sequence
  Description of Artificial Sequence: Synthetic oligonucleotide
ccaaaaguagaaggauuuc

SEQ ID NO: 2455635 - RNA, 19 nt, Artificial Sequence
  Description of Artificial Sequence: Synthetic oligonucleotide
cugccuugugaccucucga

SEQ ID NO: 2455636 - RNA, 19 nt, Artificial Sequence
  Description of Artificial Sequence: Synthetic oligonucleotide
caugguggcuucugauaaa

SEQ ID NO: 2455637 - RNA, 19 nt, Artificial Sequence
  Description of Artificial Sequence: Synthetic oligonucleotide
gcuucaagaggcucuacau

SEQ ID NO: 2455638 - RNA, 19 nt, Artificial Sequence
  Description of Artificial Sequence: Synthetic oligonucleotide
guguguugaacuggguugu

SEQ ID NO: 2455639 - RNA, 19 nt, Artificial Sequence
  Description of Artificial Sequence: Synthetic oligonucleotide
uguguugaacuggguugua

SEQ ID NO: 2455640 - RNA, 19 nt, Artificial Sequence
  Description of Artificial Sequence: Synthetic oligonucleotide
uucugccuugugaccucuc

SEQ ID NO: 2455641 - RNA, 19 nt, Artificial Sequence
  Description of Artificial Sequence: Synthetic oligonucleotide
gucucugauuucaagcaau

SEQ ID NO: 2455642 - RNA, 19 nt, Artificial Sequence
  Description of Artificial Sequence: Synthetic oligonucleotide
ugccucaggcaagcgggcu

SEQ ID NO: 2455643 - RNA, 19 nt, Artificial Sequence
  Description of Artificial Sequence: Synthetic oligonucleotide
ggaguccgaggcuaccaca

SEQ ID NO: 2455644 - RNA, 19 nt, Artificial Sequence
  Description of Artificial Sequence: Synthetic oligonucleotide
cgaggcuaccacauuucag

SEQ ID NO: 2455645 - RNA, 19 nt, Artificial Sequence
  Description of Artificial Sequence: Synthetic oligonucleotide
ccaugguggcuucugauaa

SEQ ID NO: 2455646 - RNA, 19 nt, Artificial Sequence
  Description of Artificial Sequence: Synthetic oligonucleotide
cggauucccuuucagcuug

SEQ ID NO: 2455647 - RNA, 19 nt, Artificial Sequence
  Description of Artificial Sequence: Synthetic oligonucleotide
gaaccucuccaggcccagc

SEQ ID NO: 2455648 - RNA, 19 nt, Artificial Sequence
  Description of Artificial Sequence: Synthetic oligonucleotide
aguccgaggcuaccacauu

SEQ ID NO: 2455649 - RNA, 19 nt, Artificial Sequence
  Description of Artificial Sequence: Synthetic oligonucleotide
ccagcggauucccuuucag

SEQ ID NO: 2455650 - RNA, 19 nt, Artificial Sequence
  Description of Artificial Sequence: Synthetic oligonucleotide
ccugaucccaguccugcuc

SEQ ID NO: 2455651 - RNA, 19 nt, Artificial Sequence
  Description of Artificial Sequence: Synthetic oligonucleotide
ccagguagcccugagcuga

SEQ ID NO: 2455652 - RNA, 19 nt, Artificial Sequence
  Description of Artificial Sequence: Synthetic oligonucleotide
aggcccagccugucucuga

SEQ ID NO: 2455653 - RNA, 19 nt, Artificial Sequence
  Description of Artificial Sequence: Synthetic oligonucleotide
cuggaguccgaggcuacca

SEQ ID NO: 2455654 - RNA, 19 nt, Artificial Sequence
  Description of Artificial Sequence: Synthetic oligonucleotide
ggcuucugauaaauccaac

SEQ ID NO: 2455655 - RNA, 19 nt, Artificial Sequence
  Description of Artificial Sequence: Synthetic oligonucleotide
ggcaagcgggcuucaucug

SEQ ID NO: 2455656 - RNA, 19 nt, Artificial Sequence
  Description of Artificial Sequence: Synthetic oligonucleotide
gaguccgaggcuaccacau

SEQ ID NO: 2455657 - RNA, 19 nt, Artificial Sequence
  Description of Artificial Sequence: Synthetic oligonucleotide
ucccagcaauugucuugga

SEQ ID NO: 2455658 - RNA, 19 nt, Artificial Sequence
  Description of Artificial Sequence: Synthetic oligonucleotide
uccuuccagguagcccuga

SEQ ID NO: 2455659 - RNA, 19 nt, Artificial Sequence
  Description of Artificial Sequence: Synthetic oligonucleotide
acgguggguaaggucucca

SEQ ID NO: 2455660 - RNA, 19 nt, Artificial Sequence
  Description of Artificial Sequence: Synthetic oligonucleotide
caccugggcuucugccuug

SEQ ID NO: 2455661 - RNA, 19 nt, Artificial Sequence
  Description of Artificial Sequence: Synthetic oligonucleotide
guccgaggcuaccacauuu

SEQ ID NO: 2455662 - RNA, 19 nt, Artificial Sequence
  Description of Artificial Sequence: Synthetic oligonucleotide
cccugagcugagucugucc

SEQ ID NO: 2455663 - RNA, 19 nt, Artificial Sequence
  Description of Artificial Sequence: Synthetic oligonucleotide
caccagcggauucccuuuc

SEQ ID NO: 2455664 - RNA, 19 nt, Artificial Sequence
  Description of Artificial Sequence: Synthetic oligonucleotide
agccuggaguccgaggcua

SEQ ID NO: 2455665 - RNA, 19 nt, Artificial Sequence
  Description of Artificial Sequence: Synthetic oligonucleotide
cuuguguguugaacugggu

SEQ ID NO: 2455666 - RNA, 19 nt, Artificial Sequence
  Description of Artificial Sequence: Synthetic oligonucleotide
ucgaauucacggggcccau

SEQ ID NO: 2455667 - RNA, 19 nt, Artificial Sequence
  Description of Artificial Sequence: Synthetic oligonucleotide
gccauguuggggucuucca

SEQ ID NO: 2455668 - RNA, 19 nt, Artificial Sequence
  Description of Artificial Sequence: Synthetic oligonucleotide
gagcuucaagaggcucuac

SEQ ID NO: 2455669 - RNA, 19 nt, Artificial Sequence
  Description of Artificial Sequence: Synthetic oligonucleotide
gcccugaucccaguccugc

SEQ ID NO: 2455670 - RNA, 19 nt, Artificial Sequence
  Description of Artificial Sequence: Synthetic oligonucleotide
ucaggcaagcgggcuucau

SEQ ID NO: 2455671 - RNA, 19 nt, Artificial Sequence
  Description of Artificial Sequence: Synthetic oligonucleotide
ggaucagcugacccuuucu

SEQ ID NO: 2455672 - RNA, 19 nt, Artificial Sequence
  Description of Artificial Sequence: Synthetic oligonucleotide
ugcaggcccgaagcuccca

SEQ ID NO: 2455673 - RNA, 19 nt, Artificial Sequence
  Description of Artificial Sequence: Synthetic oligonucleotide
cuggccugugagggcacug

SEQ ID NO: 2455674 - RNA, 19 nt, Artificial Sequence
  Description of Artificial Sequence: Synthetic oligonucleotide
ggaaccucuccaggcccag

SEQ ID NO: 2455675 - RNA, 19 nt, Artificial Sequence
  Description of Artificial Sequence: Synthetic oligonucleotide
cacaccagcuauucucuuu

SEQ ID NO: 2455676 - RNA, 19 nt, Artificial Sequence
  Description of Artificial Sequence: Synthetic oligonucleotide
gcagauggagcaggcucug

SEQ ID NO: 2455677 - RNA, 19 nt, Artificial Sequence
  Description of Artificial Sequence: Synthetic oligonucleotide
cccuuucagcuuguacagg

SEQ ID NO: 2455678 - RNA, 19 nt, Artificial Sequence
  Description of Artificial Sequence: Synthetic oligonucleotide
gcaagcgggcuucaucugu

SEQ ID NO: 2455679 - RNA, 19 nt, Artificial Sequence
  Description of Artificial Sequence: Synthetic oligonucleotide
gagggcacugcaggcccga

SEQ ID NO: 2455680 - RNA, 19 nt, Artificial Sequence
  Description of Artificial Sequence: Synthetic oligonucleotide
ccaggcccaucauuaccac

SEQ ID NO: 2455681 - RNA, 19 nt, Artificial Sequence
  Description of Artificial Sequence: Synthetic oligonucleotide
ccagguaguccuuccaggu

SEQ ID NO: 2455682 - RNA, 19 nt, Artificial Sequence
  Description of Artificial Sequence: Synthetic oligonucleotide
ggagcuucaagaggcucua

SEQ ID NO: 2455683 - RNA, 19 nt, Artificial Sequence
  Description of Artificial Sequence: Synthetic oligonucleotide
ggccugugagggcacugca

SEQ ID NO: 2455684 - RNA, 19 nt, Artificial Sequence
  Description of Artificial Sequence: Synthetic oligonucleotide
aagggacgccggccauguu

SEQ ID NO: 2455685 - RNA, 19 nt, Artificial Sequence
  Description of Artificial Sequence: Synthetic oligonucleotide
cccagcaauugucuuggaa

SEQ ID NO: 2455686 - RNA, 19 nt, Artificial Sequence
  Description of Artificial Sequence: Synthetic oligonucleotide
ccgaagcucccagcaauug

SEQ ID NO: 2455687 - RNA, 19 nt, Artificial Sequence
  Description of Artificial Sequence: Synthetic oligonucleotide
gaacuggguuguaguuucu

SEQ ID NO: 2455688 - RNA, 19 nt, Artificial Sequence
  Description of Artificial Sequence: Synthetic oligonucleotide
ccagccugucucugauuuc

SEQ ID NO: 2455689 - RNA, 19 nt, Artificial Sequence
  Description of Artificial Sequence: Synthetic oligonucleotide
ccagagaaucagugacaca

SEQ ID NO: 2455690 - RNA, 19 nt, Artificial Sequence
  Description of Artificial Sequence: Synthetic oligonucleotide
ggccgcacaccagcuauuc

SEQ ID NO: 2455691 - RNA, 19 nt, Artificial Sequence
  Description of Artificial Sequence: Synthetic oligonucleotide
ggcccaugguggcuucuga

SEQ ID NO: 2455692 - RNA, 19 nt, Artificial Sequence
  Description of Artificial Sequence: Synthetic oligonucleotide
ccgaggcuaccacauuuca

SEQ ID NO: 2455693 - RNA, 19 nt, Artificial Sequence
  Description of Artificial Sequence: Synthetic oligonucleotide
ccuggaguccgaggcuacc

SEQ ID NO: 2455694 - RNA, 19 nt, Artificial Sequence
  Description of Artificial Sequence: Synthetic oligonucleotide
gcuguccagcacauacaca

SEQ ID NO: 2455695 - RNA, 19 nt, Artificial Sequence
  Description of Artificial Sequence: Synthetic oligonucleotide
agccugucucugauuucaa

SEQ ID NO: 2455696 - RNA, 19 nt, Artificial Sequence
  Description of Artificial Sequence: Synthetic oligonucleotide
acggggcccaugguggcuu

SEQ ID NO: 2455697 - RNA, 19 nt, Artificial Sequence
  Description of Artificial Sequence: Synthetic oligonucleotide
cugacccuuucuguucaua

SEQ ID NO: 2455698 - RNA, 19 nt, Artificial Sequence
  Description of Artificial Sequence: Synthetic oligonucleotide
ggagcaaggauaagcuguu

SEQ ID NO: 2455699 - RNA, 19 nt, Artificial Sequence
  Description of Artificial Sequence: Synthetic oligonucleotide
agguagcccugagcugagu

SEQ ID NO: 2455700 - RNA, 19 nt, Artificial Sequence
  Description of Artificial Sequence: Synthetic oligonucleotide
ccagcacauacacaaggau

SEQ ID NO: 2455701 - RNA, 19 nt, Artificial Sequence
  Description of Artificial Sequence: Synthetic oligonucleotide
ggggccgcacaccagcuau

SEQ ID NO: 2455702 - RNA, 19 nt, Artificial Sequence
  Description of Artificial Sequence: Synthetic oligonucleotide
cguugagcucagccacugc

SEQ ID NO: 2455703 - RNA, 19 nt, Artificial Sequence
  Description of Artificial Sequence: Synthetic oligonucleotide
cgguggguaaggucuccac

SEQ ID NO: 2455704 - RNA, 19 nt, Artificial Sequence
  Description of Artificial Sequence: Synthetic oligonucleotide
gcccgaagcucccagcaau

SEQ ID NO: 2455705 - RNA, 19 nt, Artificial Sequence
  Description of Artificial Sequence: Synthetic oligonucleotide
gacacauguccaggagcuu

SEQ ID NO: 2455706 - RNA, 19 nt, Artificial Sequence
  Description of Artificial Sequence: Synthetic oligonucleotide
cagcaggaucucagcagau

SEQ ID NO: 2455707 - RNA, 19 nt, Artificial Sequence
  Description of Artificial Sequence: Synthetic oligonucleotide
gccuugugaccucucgaau

SEQ ID NO: 2455708 - RNA, 19 nt, Artificial Sequence
  Description of Artificial Sequence: Synthetic oligonucleotide
cucaggcaagcgggcuuca

SEQ ID NO: 2455709 - RNA, 19 nt, Artificial Sequence
  Description of Artificial Sequence: Synthetic oligonucleotide
cagccuggaguccgaggcu

SEQ ID NO: 2455710 - RNA, 19 nt, Artificial Sequence
  Description of Artificial Sequence: Synthetic oligonucleotide
ggcccugaucccaguccug

SEQ ID NO: 2455711 - RNA, 19 nt, Artificial Sequence
  Description of Artificial Sequence: Synthetic oligonucleotide
gcggauucccuuucagcuu

SEQ ID NO: 2455712 - RNA, 19 nt, Artificial Sequence
  Description of Artificial Sequence: Synthetic oligonucleotide
ggacuucguugagcucagc

SEQ ID NO: 2455713 - RNA, 19 nt, Artificial Sequence
  Description of Artificial Sequence: Synthetic oligonucleotide
cgcacaccagcuauucucu

SEQ ID NO: 2455714 - RNA, 19 nt, Artificial Sequence
  Description of Artificial Sequence: Synthetic oligonucleotide
gcccaugguggcuucugau

SEQ ID NO: 2455715 - RNA, 19 nt, Artificial Sequence
  Description of Artificial Sequence: Synthetic oligonucleotide
gccuggaguccgaggcuac

SEQ ID NO: 2455716 - RNA, 19 nt, Artificial Sequence
  Description of Artificial Sequence: Synthetic oligonucleotide
cgaagcucccagcaauugu

SEQ ID NO: 2455717 - RNA, 19 nt, Artificial Sequence
  Description of Artificial Sequence: Synthetic oligonucleotide
ccacugccucaggcaagcg

SEQ ID NO: 2455718 - RNA, 19 nt, Artificial Sequence
  Description of Artificial Sequence: Synthetic oligonucleotide
cuccaccagcggauucccu

SEQ ID NO: 2455719 - RNA, 19 nt, Artificial Sequence
  Description of Artificial Sequence: Synthetic oligonucleotide
cgaauucacggggcccaug

SEQ ID NO: 2455720 - RNA, 19 nt, Artificial Sequence
  Description of Artificial Sequence: Synthetic oligonucleotide
gccgcacaccagcuauucu

SEQ ID NO: 2455721 - RNA, 19 nt, Artificial Sequence
  Description of Artificial Sequence: Synthetic oligonucleotide
cauuaccaccugggcuucu

SEQ ID NO: 2455722 - RNA, 19 nt, Artificial Sequence
  Description of Artificial Sequence: Synthetic oligonucleotide
gccucaggcaagcgggcuu

SEQ ID NO: 2455723 - RNA, 19 nt, Artificial Sequence
  Description of Artificial Sequence: Synthetic oligonucleotide
cgggcuucaucugugcugu

SEQ ID NO: 2455724 - RNA, 19 nt, Artificial Sequence
  Description of Artificial Sequence: Synthetic oligonucleotide
gcacauacacaaggauguu

SEQ ID NO: 2455725 - RNA, 19 nt, Artificial Sequence
  Description of Artificial Sequence: Synthetic oligonucleotide
gcuccagccuggaguccga

SEQ ID NO: 2455726 - RNA, 19 nt, Artificial Sequence
  Description of Artificial Sequence: Synthetic oligonucleotide
gcacaccagcuauucucuu

SEQ ID NO: 2455727 - RNA, 19 nt, Artificial Sequence
  Description of Artificial Sequence: Synthetic oligonucleotide
ccaccagcggauucccuuu

SEQ ID NO: 2455728 - RNA, 19 nt, Artificial Sequence
  Description of Artificial Sequence: Synthetic oligonucleotide
gcugacccuuucuguucau

SEQ ID NO: 2455729 - RNA, 19 nt, Artificial Sequence
  Description of Artificial Sequence: Synthetic oligonucleotide
ggggucuggcuggcccuga

SEQ ID NO: 2455730 - RNA, 19 nt, Artificial Sequence
  Description of Artificial Sequence: Synthetic oligonucleotide
cccgaagcucccagcaauu

SEQ ID NO: 2455731 - RNA, 19 nt, Artificial Sequence
  Description of Artificial Sequence: Synthetic oligonucleotide
cccugaucccaguccugcu

SEQ ID NO: 2455732 - RNA, 19 nt, Artificial Sequence
  Description of Artificial Sequence: Synthetic oligonucleotide
cccaguccugcuccagccu

SEQ ID NO: 2455733 - RNA, 19 nt, Artificial Sequence
  Description of Artificial Sequence: Synthetic oligonucleotide
cgccggccauguugggguc

SEQ ID NO: 2455734 - RNA, 19 nt, Artificial Sequence
  Description of Artificial Sequence: Synthetic oligonucleotide
gccggccauguuggggucu

SEQ ID NO: 2455735 - RNA, 19 nt, Artificial Sequence
  Description of Artificial Sequence: Synthetic oligonucleotide
cggggcccaugguggcuuc

SEQ ID NO: 2455736 - RNA, 19 nt, Artificial Sequence
  Description of Artificial Sequence: Synthetic oligonucleotide
gggccgcacaccagcuauu

SEQ ID NO: 2455737 - RNA, 19 nt, Artificial Sequence
  Description of Artificial Sequence: Synthetic oligonucleotide
caggugccuccugcuuguu

SEQ ID NO: 2455738 - RNA, 19 nt, Artificial Sequence
  Description of Artificial Sequence: Synthetic oligonucleotide
ccuggccugugagggcacu

SEQ ID NO: 2455739 - RNA, 19 nt, Artificial Sequence
  Description of Artificial Sequence: Synthetic oligonucleotide
ccggccauguuggggucuu

SEQ ID NO: 2455740 - RNA, 19 nt, Artificial Sequence
  Description of Artificial Sequence: Synthetic oligonucleotide
uauaaaucaacccaguaag

SEQ ID NO: 2455741 - RNA, 19 nt, Artificial Sequence
  Description of Artificial Sequence: Synthetic oligonucleotide
aaaacugguagccugcugc

SEQ ID NO: 2455742 - RNA, 19 nt, Artificial Sequence
  Description of Artificial Sequence: Synthetic oligonucleotide
uguacaaccaucaauagac

SEQ ID NO: 2455743 - RNA, 19 nt, Artificial Sequence
  Description of Artificial Sequence: Synthetic oligonucleotide
  modified_base (14)..(14): a, c, u, g, unknown or other
uguacauguggaunuaugg

SEQ ID NO: 2455744 - RNA, 19 nt, Artificial Sequence
  Description of Artificial Sequence: Synthetic oligonucleotide
ucuacaaaggaauuaaacc

SEQ ID NO: 2455745 - RNA, 19 nt, Artificial Sequence
  Description of Artificial Sequence: Synthetic oligonucleotide
aaaucaacccaguaagugg

SEQ ID NO: 2455746 - RNA, 19 nt, Artificial Sequence
  Description of Artificial Sequence: Synthetic oligonucleotide
uuuaacacuaaaagcauug

SEQ ID NO: 2455747 - RNA, 19 nt, Artificial Sequence
  Description of Artificial Sequence: Synthetic oligonucleotide
aauguaaugagcacauggc

SEQ ID NO: 2455748 - RNA, 19 nt, Artificial Sequence
  Description of Artificial Sequence: Synthetic oligonucleotide
uacacauugacuaauuaug

SEQ ID NO: 2455749 - RNA, 19 nt, Artificial Sequence
  Description of Artificial Sequence: Synthetic oligonucleotide
uuacuugacaaucugaaac

SEQ ID NO: 2455750 - RNA, 19 nt, Artificial Sequence
  Description of Artificial Sequence: Synthetic oligonucleotide
cauuauacaguccaguagg

SEQ ID NO: 2455751 - RNA, 19 nt, Artificial Sequence
  Description of Artificial Sequence: Synthetic oligonucleotide
aaagcgaccacacacuuca

SEQ ID NO: 2455752 - RNA, 19 nt, Artificial Sequence
  Description of Artificial Sequence: Synthetic oligonucleotide
uugacaaucugaaacagcu

SEQ ID NO: 2455753 - RNA, 19 nt, Artificial Sequence
  Description of Artificial Sequence: Synthetic oligonucleotide
uccucgguuaucuugaggg

SEQ ID NO: 2455754 - RNA, 19 nt, Artificial Sequence
  Description of Artificial Sequence: Synthetic oligonucleotide
auagucaaagucuuuacug

SEQ ID NO: 2455755 - RNA, 19 nt, Artificial Sequence
  Description of Artificial Sequence: Synthetic oligonucleotide
uggcauagaaaacugguag

SEQ ID NO: 2455756 - RNA, 19 nt, Artificial Sequence
  Description of Artificial Sequence: Synthetic oligonucleotide
uaaugagucgccaaugggc

SEQ ID NO: 2455757 - RNA, 19 nt, Artificial Sequence
  Description of Artificial Sequence: Synthetic oligonucleotide
aacacuaaaagcauugucu

SEQ ID NO: 2455758 - RNA, 19 nt, Artificial Sequence
  Description of Artificial Sequence: Synthetic oligonucleotide
uauacaguccaguagguac

SEQ ID NO: 2455759 - RNA, 19 nt, Artificial Sequence
  Description of Artificial Sequence: Synthetic oligonucleotide
aaggaauuaaaccugccau

SEQ ID NO: 2455760 - RNA, 19 nt, Artificial Sequence
  Description of Artificial Sequence: Synthetic oligonucleotide
aaaggaauuaaaccugcca

SEQ ID NO: 2455761 - RNA, 19 nt, Artificial Sequence
  Description of Artificial Sequence: Synthetic oligonucleotide
ucuggaaaacaacggacgg

SEQ ID NO: 2455762 - RNA, 19 nt, Artificial Sequence
  Description of Artificial Sequence: Synthetic oligonucleotide
  modified_base (2)..(2): a, c, u, g, unknown or other
unuauggcauagaaaacug

SEQ ID NO: 2455763 - RNA, 19 nt, Artificial Sequence
  Description of Artificial Sequence: Synthetic oligonucleotide
auaccaagguuuaugaacc

SEQ ID NO: 2455764 - RNA, 19 nt, Artificial Sequence
  Description of Artificial Sequence: Synthetic oligonucleotide
auacaacacacucagcagg

SEQ ID NO: 2455765 - RNA, 19 nt, Artificial Sequence
  Description of Artificial Sequence: Synthetic oligonucleotide
uuaugaacccuucuauucc

SEQ ID NO: 2455766 - RNA, 19 nt, Artificial Sequence
  Description of Artificial Sequence: Synthetic oligonucleotide
uacuggauaucucaaacca

SEQ ID NO: 2455767 - RNA, 19 nt, Artificial Sequence
  Description of Artificial Sequence: Synthetic oligonucleotide
uuaaugagucgccaauggg

SEQ ID NO: 2455768 - RNA, 19 nt, Artificial Sequence
  Description of Artificial Sequence: Synthetic oligonucleotide
cauaccaagguuuaugaac

SEQ ID NO: 2455769 - RNA, 19 nt, Artificial Sequence
  Description of Artificial Sequence: Synthetic oligonucleotide
uuuaugaacccuucuauuc

SEQ ID NO: 2455770 - RNA, 19 nt, Artificial Sequence
  Description of Artificial Sequence: Synthetic oligonucleotide
ugacuaauuaugcuugccc

SEQ ID NO: 2455771 - RNA, 19 nt, Artificial Sequence
  Description of Artificial Sequence: Synthetic oligonucleotide
uucaaggacagcauaguca

SEQ ID NO: 2455772 - RNA, 19 nt, Artificial Sequence
  Description of Artificial Sequence: Synthetic oligonucleotide
  modified_base (5)..(5): a, c, u, g, unknown or other
ggaunuauggcauagaaaa

SEQ ID NO: 2455773 - RNA, 19 nt, Artificial Sequence
  Description of Artificial Sequence: Synthetic oligonucleotide
aaacugguagccugcugcc

SEQ ID NO: 2455774 - RNA, 19 nt, Artificial Sequence
  Description of Artificial Sequence: Synthetic oligonucleotide
uauggcauagaaaacuggu

SEQ ID NO: 2455775 - RNA, 19 nt, Artificial Sequence
  Description of Artificial Sequence: Synthetic oligonucleotide
caaugauauaaaucaaccc

SEQ ID NO: 2455776 - RNA, 19 nt, Artificial Sequence
  Description of Artificial Sequence: Synthetic oligonucleotide
  modified_base (12)..(12): a, c, u, g, unknown or other
uacauguggaunuauggca

SEQ ID NO: 2455777 - RNA, 19 nt, Artificial Sequence
  Description of Artificial Sequence: Synthetic oligonucleotide
auuaugcuugcccacuuac

SEQ ID NO: 2455778 - RNA, 19 nt, Artificial Sequence
  Description of Artificial Sequence: Synthetic oligonucleotide
aaggacagcauagucaaag

SEQ ID NO: 2455779 - RNA, 19 nt, Artificial Sequence
  Description of Artificial Sequence: Synthetic oligonucleotide
acuaauuaugcuugcccac

SEQ ID NO: 2455780 - RNA, 19 nt, Artificial Sequence
  Description of Artificial Sequence: Synthetic oligonucleotide
uucuuuguugccuauuccc

SEQ ID NO: 2455781 - RNA, 19 nt, Artificial Sequence
  Description of Artificial Sequence: Synthetic oligonucleotide
auagaaaacugguagccug

SEQ ID NO: 2455782 - RNA, 19 nt, Artificial Sequence
  Description of Artificial Sequence: Synthetic oligonucleotide
guuaaugagucgccaaugg

SEQ ID NO: 2455783 - RNA, 19 nt, Artificial Sequence
  Description of Artificial Sequence: Synthetic oligonucleotide
ucuuuggguguacaugugg

SEQ ID NO: 2455784 - RNA, 19 nt, Artificial Sequence
  Description of Artificial Sequence: Synthetic oligonucleotide
auugacuaauuaugcuugc

SEQ ID NO: 2455785 - RNA, 19 nt, Artificial Sequence
  Description of Artificial Sequence: Synthetic oligonucleotide
  modified_base (3)..(3): a, c, u, g, unknown or other
aunuauggcauagaaaacu

SEQ ID NO: 2455786 - RNA, 19 nt, Artificial Sequence
  Description of Artificial Sequence: Synthetic oligonucleotide
cauaccagcauuucuuugc

SEQ ID NO: 2455787 - RNA, 19 nt, Artificial Sequence
  Description of Artificial Sequence: Synthetic oligonucleotide
aucaccuguacacauugac

SEQ ID NO: 2455788 - RNA, 19 nt, Artificial Sequence
  Description of Artificial Sequence: Synthetic oligonucleotide
uaaaucaacccaguaagug

SEQ ID NO: 2455789 - RNA, 19 nt, Artificial Sequence
  Description of Artificial Sequence: Synthetic oligonucleotide
cauugacuaauuaugcuug

SEQ ID NO: 2455790 - RNA, 19 nt, Artificial Sequence
  Description of Artificial Sequence: Synthetic oligonucleotide
ugaaguuuccugcaccuca

SEQ ID NO: 2455791 - RNA, 19 nt, Artificial Sequence
  Description of Artificial Sequence: Synthetic oligonucleotide
aauuaaaccugccauccuu

SEQ ID NO: 2455792 - RNA, 19 nt, Artificial Sequence
  Description of Artificial Sequence: Synthetic oligonucleotide
aggaauuaaaccugccauc

SEQ ID NO: 2455793 - RNA, 19 nt, Artificial Sequence
  Description of Artificial Sequence: Synthetic oligonucleotide
aucugaaacagcuugcccu

SEQ ID NO: 2455794 - RNA, 19 nt, Artificial Sequence
  Description of Artificial Sequence: Synthetic oligonucleotide
caauagacuucuuuucucc

SEQ ID NO: 2455795 - RNA, 19 nt, Artificial Sequence
  Description of Artificial Sequence: Synthetic oligonucleotide
acacauugacuaauuaugc

SEQ ID NO: 2455796 - RNA, 19 nt, Artificial Sequence
  Description of Artificial Sequence: Synthetic oligonucleotide
cucuacaaaggaauuaaac

SEQ ID NO: 2455797 - RNA, 19 nt, Artificial Sequence
  Description of Artificial Sequence: Synthetic oligonucleotide
cauugucuuuucuuggugg

SEQ ID NO: 2455798 - RNA, 19 nt, Artificial Sequence
  Description of Artificial Sequence: Synthetic oligonucleotide
uggauaucucaaaccaagg

SEQ ID NO: 2455799 - RNA, 19 nt, Artificial Sequence
  Description of Artificial Sequence: Synthetic oligonucleotide
uuacuggauaucucaaacc

SEQ ID NO: 2455800 - RNA, 19 nt, Artificial Sequence
  Description of Artificial Sequence: Synthetic oligonucleotide
augauauaaaucaacccag

SEQ ID NO: 2455801 - RNA, 19 nt, Artificial Sequence
  Description of Artificial Sequence: Synthetic oligonucleotide
aagucuuuacuggauaucu

SEQ ID NO: 2455802 - RNA, 19 nt, Artificial Sequence
  Description of Artificial Sequence: Synthetic oligonucleotide
aucaauagacuucuuuucu

SEQ ID NO: 2455803 - RNA, 19 nt, Artificial Sequence
  Description of Artificial Sequence: Synthetic oligonucleotide
uggaaaacaacggacgggc

SEQ ID NO: 2455804 - RNA, 19 nt, Artificial Sequence
  Description of Artificial Sequence: Synthetic oligonucleotide
ucuugccugaacauucucc

SEQ ID NO: 2455805 - RNA, 19 nt, Artificial Sequence
  Description of Artificial Sequence: Synthetic oligonucleotide
gucauuguuaaugagucgc

SEQ ID NO: 2455806 - RNA, 19 nt, Artificial Sequence
  Description of Artificial Sequence: Synthetic oligonucleotide
uuuccugcaccucagaauu

SEQ ID NO: 2455807 - RNA, 19 nt, Artificial Sequence
  Description of Artificial Sequence: Synthetic oligonucleotide
uguaacacaucaacuggcu

SEQ ID NO: 2455808 - RNA, 19 nt, Artificial Sequence
  Description of Artificial Sequence: Synthetic oligonucleotide
acagaguuugguccccucc

SEQ ID NO: 2455809 - RNA, 19 nt, Artificial Sequence
  Description of Artificial Sequence: Synthetic oligonucleotide
aacagcuugcccuguaaca

SEQ ID NO: 2455810 - RNA, 19 nt, Artificial Sequence
  Description of Artificial Sequence: Synthetic oligonucleotide
ucauuguuaaugagucgcc

SEQ ID NO: 2455811 - RNA, 19 nt, Artificial Sequence
  Description of Artificial Sequence: Synthetic oligonucleotide
acauugacuaauuaugcuu

SEQ ID NO: 2455812 - RNA, 19 nt, Artificial Sequence
  Description of Artificial Sequence: Synthetic oligonucleotide
uagaaaacugguagccugc

SEQ ID NO: 2455813 - RNA, 19 nt, Artificial Sequence
  Description of Artificial Sequence: Synthetic oligonucleotide
gacuaauuaugcuugccca

SEQ ID NO: 2455814 - RNA, 19 nt, Artificial Sequence
  Description of Artificial Sequence: Synthetic oligonucleotide
uaacacuaaaagcauuguc

SEQ ID NO: 2455815 - RNA, 19 nt, Artificial Sequence
  Description of Artificial Sequence: Synthetic oligonucleotide
ugucauuguuaaugagucg

SEQ ID NO: 2455816 - RNA, 19 nt, Artificial Sequence
  Description of Artificial Sequence: Synthetic oligonucleotide
augggcacucucuacaaag

SEQ ID NO: 2455817 - RNA, 19 nt, Artificial Sequence
  Description of Artificial Sequence: Synthetic oligonucleotide
aacacacucagcaggugac

SEQ ID NO: 2455818 - RNA, 19 nt, Artificial Sequence
  Description of Artificial Sequence: Synthetic oligonucleotide
caucuggaaaacaacggac

SEQ ID NO: 2455819 - RNA, 19 nt, Artificial Sequence
  Description of Artificial Sequence: Synthetic oligonucleotide
uccuugugaaguuuccugc

SEQ ID NO: 2455820 - RNA, 19 nt, Artificial Sequence
  Description of Artificial Sequence: Synthetic oligonucleotide
uugccuauucccaacugca

SEQ ID NO: 2455821 - RNA, 19 nt, Artificial Sequence
  Description of Artificial Sequence: Synthetic oligonucleotide
cuguaacacaucaacuggc

SEQ ID NO: 2455822 - RNA, 19 nt, Artificial Sequence
  Description of Artificial Sequence: Synthetic oligonucleotide
agaucaccuguacacauug

SEQ ID NO: 2455823 - RNA, 19 nt, Artificial Sequence
  Description of Artificial Sequence: Synthetic oligonucleotide
cuugacaaucugaaacagc

SEQ ID NO: 2455824 - RNA, 19 nt, Artificial Sequence
  Description of Artificial Sequence: Synthetic oligonucleotide
auguaaugagcacauggcu

SEQ ID NO: 2455825 - RNA, 19 nt, Artificial Sequence
  Description of Artificial Sequence: Synthetic oligonucleotide
ucuauuccuucuaugccac

SEQ ID NO: 2455826 - RNA, 19 nt, Artificial Sequence
  Description of Artificial Sequence: Synthetic oligonucleotide
aaugagucgccaaugggca

SEQ ID NO: 2455827 - RNA, 19 nt, Artificial Sequence
  Description of Artificial Sequence: Synthetic oligonucleotide
ugcaccucagaauucuuug

SEQ ID NO: 2455828 - RNA, 19 nt, Artificial Sequence
  Description of Artificial Sequence: Synthetic oligonucleotide
acaaucugaaacagcuugc

SEQ ID NO: 2455829 - RNA, 19 nt, Artificial Sequence
  Description of Artificial Sequence: Synthetic oligonucleotide
uuucuccucacuuucaguu

SEQ ID NO: 2455830 - RNA, 19 nt, Artificial Sequence
  Description of Artificial Sequence: Synthetic oligonucleotide
caucaauagacuucuuuuc

SEQ ID NO: 2455831 - RNA, 19 nt, Artificial Sequence
  Description of Artificial Sequence: Synthetic oligonucleotide
ucaauagacuucuuuucuc

SEQ ID NO: 2455832 - RNA, 19 nt, Artificial Sequence
  Description of Artificial Sequence: Synthetic oligonucleotide
caguaaguggugcagggcc

SEQ ID NO: 2455833 - RNA, 19 nt, Artificial Sequence
  Description of Artificial Sequence: Synthetic oligonucleotide
  modified_base (6)..(6): a, c, u, g, unknown or other
uggaunuauggcauagaaa

SEQ ID NO: 2455834 - RNA, 19 nt, Artificial Sequence
  Description of Artificial Sequence: Synthetic oligonucleotide
acagcuugcccuguaacac

SEQ ID NO: 2455835 - RNA, 19 nt, Artificial Sequence
  Description of Artificial Sequence: Synthetic oligonucleotide
uuccuucuaugccacauac

SEQ ID NO: 2455836 - RNA, 19 nt, Artificial Sequence
  Description of Artificial Sequence: Synthetic oligonucleotide
uaugccacauaccagcauu

SEQ ID NO: 2455837 - RNA, 19 nt, Artificial Sequence
  Description of Artificial Sequence: Synthetic oligonucleotide
uaugcuugcccacuuacuu

SEQ ID NO: 2455838 - RNA, 19 nt, Artificial Sequence
  Description of Artificial Sequence: Synthetic oligonucleotide
uacaacacacucagcaggu

SEQ ID NO: 2455839 - RNA, 19 nt, Artificial Sequence
  Description of Artificial Sequence: Synthetic oligonucleotide
ucgguuaucuugagggacc

SEQ ID NO: 2455840 - RNA, 19 nt, Artificial Sequence
  Description of Artificial Sequence: Synthetic oligonucleotide
ucuugagggaccacuguac

SEQ ID NO: 2455841 - RNA, 19 nt, Artificial Sequence
  Description of Artificial Sequence: Synthetic oligonucleotide
ucaccuguacacauugacu

SEQ ID NO: 2455842 - RNA, 19 nt, Artificial Sequence
  Description of Artificial Sequence: Synthetic oligonucleotide
aagguuuaugaacccuucu

SEQ ID NO: 2455843 - RNA, 19 nt, Artificial Sequence
  Description of Artificial Sequence: Synthetic oligonucleotide
  modified_base (4)..(4): a, c, u, g, unknown or other
gaunuauggcauagaaaac

SEQ ID NO: 2455844 - RNA, 19 nt, Artificial Sequence
  Description of Artificial Sequence: Synthetic oligonucleotide
ugggcacucucuacaaagg

SEQ ID NO: 2455845 - RNA, 19 nt, Artificial Sequence
  Description of Artificial Sequence: Synthetic oligonucleotide
ucagaauucuuuguugccu

SEQ ID NO: 2455846 - RNA, 19 nt, Artificial Sequence
  Description of Artificial Sequence: Synthetic oligonucleotide
aguagguacuuccugucca

SEQ ID NO: 2455847 - RNA, 19 nt, Artificial Sequence
  Description of Artificial Sequence: Synthetic oligonucleotide
uguuaaugagucgccaaug

SEQ ID NO: 2455848 - RNA, 19 nt, Artificial Sequence
  Description of Artificial Sequence: Synthetic oligonucleotide
aguggugcagggccuauuc

SEQ ID NO: 2455849 - RNA, 19 nt, Artificial Sequence
  Description of Artificial Sequence: Synthetic oligonucleotide
  modified_base (13)..(13): a, c, u, g, unknown or other
guacauguggaunuauggc

SEQ ID NO: 2455850 - RNA, 19 nt, Artificial Sequence
  Description of Artificial Sequence: Synthetic oligonucleotide
aacugcauguauguaaaau

SEQ ID NO: 2455851 - RNA, 19 nt, Artificial Sequence
  Description of Artificial Sequence: Synthetic oligonucleotide
acaacggacgggcauacca

SEQ ID NO: 2455852 - RNA, 19 nt, Artificial Sequence
  Description of Artificial Sequence: Synthetic oligonucleotide
uuaaaccugccauccuucc

SEQ ID NO: 2455853 - RNA, 19 nt, Artificial Sequence
  Description of Artificial Sequence: Synthetic oligonucleotide
uccauuauacaguccagua

SEQ ID NO: 2455854 - RNA, 19 nt, Artificial Sequence
  Description of Artificial Sequence: Synthetic oligonucleotide
uuguuaaugagucgccaau

SEQ ID NO: 2455855 - RNA, 19 nt, Artificial Sequence
  Description of Artificial Sequence: Synthetic oligonucleotide
uccaguagguacuuccugu

SEQ ID NO: 2455856 - RNA, 19 nt, Artificial Sequence
  Description of Artificial Sequence: Synthetic oligonucleotide
ggccuauuccauuauacag

SEQ ID NO: 2455857 - RNA, 19 nt, Artificial Sequence
  Description of Artificial Sequence: Synthetic oligonucleotide
caaaaucaaagaucaccug

SEQ ID NO: 2455858 - RNA, 19 nt, Artificial Sequence
  Description of Artificial Sequence: Synthetic oligonucleotide
aaaucaaagaucaccugua

SEQ ID NO: 2455859 - RNA, 19 nt, Artificial Sequence
  Description of Artificial Sequence: Synthetic oligonucleotide
ccuuugaagccauagacac

SEQ ID NO: 2455860 - RNA, 19 nt, Artificial Sequence
  Description of Artificial Sequence: Synthetic oligonucleotide
auuaaaccugccauccuuc

SEQ ID NO: 2455861 - RNA, 19 nt, Artificial Sequence
  Description of Artificial Sequence: Synthetic oligonucleotide
  modified_base (7)..(7): a, c, u, g, unknown or other
guggaunuauggcauagaa

SEQ ID NO: 2455862 - RNA, 19 nt, Artificial Sequence
  Description of Artificial Sequence: Synthetic oligonucleotide
acaucaacuggcugggugu

SEQ ID NO: 2455863 - RNA, 19 nt, Artificial Sequence
  Description of Artificial Sequence: Synthetic oligonucleotide
uguacacauugacuaauua

SEQ ID NO: 2455864 - RNA, 19 nt, Artificial Sequence
  Description of Artificial Sequence: Synthetic oligonucleotide
aaacaacggacgggcauac

SEQ ID NO: 2455865 - RNA, 19 nt, Artificial Sequence
  Description of Artificial Sequence: Synthetic oligonucleotide
guugccuauucccaacugc

SEQ ID NO: 2455866 - RNA, 19 nt, Artificial Sequence
  Description of Artificial Sequence: Synthetic oligonucleotide
auuguuaaugagucgccaa

SEQ ID NO: 2455867 - RNA, 19 nt, Artificial Sequence
  Description of Artificial Sequence: Synthetic oligonucleotide
gauaucucaaaccaagguu

SEQ ID NO: 2455868 - RNA, 19 nt, Artificial Sequence
  Description of Artificial Sequence: Synthetic oligonucleotide
uaugguggugucauuguua

SEQ ID NO: 2455869 - RNA, 19 nt, Artificial Sequence
  Description of Artificial Sequence: Synthetic oligonucleotide
ggaauuaaaccugccaucc

SEQ ID NO: 2455870 - RNA, 19 nt, Artificial Sequence
  Description of Artificial Sequence: Synthetic oligonucleotide
uuuguugccuauucccaac

SEQ ID NO: 2455871 - RNA, 19 nt, Artificial Sequence
  Description of Artificial Sequence: Synthetic oligonucleotide
accucagaauucuuuguug

SEQ ID NO: 2455872 - RNA, 19 nt, Artificial Sequence
  Description of Artificial Sequence: Synthetic oligonucleotide
uccuccaguucaaggacag

SEQ ID NO: 2455873 - RNA, 19 nt, Artificial Sequence
  Description of Artificial Sequence: Synthetic oligonucleotide
ugacuggucaaagcgacca

SEQ ID NO: 2455874 - RNA, 19 nt, Artificial Sequence
  Description of Artificial Sequence: Synthetic oligonucleotide
uucccaacugcauguaugu

SEQ ID NO: 2455875 - RNA, 19 nt, Artificial Sequence
  Description of Artificial Sequence: Synthetic oligonucleotide
auaucucaaaccaagguuu

SEQ ID NO: 2455876 - RNA, 19 nt, Artificial Sequence
  Description of Artificial Sequence: Synthetic oligonucleotide
ucucaaaccaagguuuaac

SEQ ID NO: 2455877 - RNA, 19 nt, Artificial Sequence
  Description of Artificial Sequence: Synthetic oligonucleotide
uuaacacuaaaagcauugu

SEQ ID NO: 2455878 - RNA, 19 nt, Artificial Sequence
  Description of Artificial Sequence: Synthetic oligonucleotide
caaaggaauuaaaccugcc

SEQ ID NO: 2455879 - RNA, 19 nt, Artificial Sequence
  Description of Artificial Sequence: Synthetic oligonucleotide
uuugguccccuccuuguga

SEQ ID NO: 2455880 - RNA, 19 nt, Artificial Sequence
  Description of Artificial Sequence: Synthetic oligonucleotide
  modified_base (18)..(18): a, c, u, g, unknown or other
uggguguacauguggaunu

SEQ ID NO: 2455881 - RNA, 19 nt, Artificial Sequence
  Description of Artificial Sequence: Synthetic oligonucleotide
ggucaaagcgaccacacac

SEQ ID NO: 2455882 - RNA, 19 nt, Artificial Sequence
  Description of Artificial Sequence: Synthetic oligonucleotide
uugcccacuuacuugacaa

SEQ ID NO: 2455883 - RNA, 19 nt, Artificial Sequence
  Description of Artificial Sequence: Synthetic oligonucleotide
ugcuaugguggugucauug

SEQ ID NO: 2455884 - RNA, 19 nt, Artificial Sequence
  Description of Artificial Sequence: Synthetic oligonucleotide
uuaugcuugcccacuuacu

SEQ ID NO: 2455885 - RNA, 19 nt, Artificial Sequence
  Description of Artificial Sequence: Synthetic oligonucleotide
cugucuugccugaacauuc

SEQ ID NO: 2455886 - RNA, 19 nt, Artificial Sequence
  Description of Artificial Sequence: Synthetic oligonucleotide
agggccuauuccauuauac

SEQ ID NO: 2455887 - RNA, 19 nt, Artificial Sequence
  Description of Artificial Sequence: Synthetic oligonucleotide
ccuguaacacaucaacugg

SEQ ID NO: 2455888 - RNA, 19 nt, Artificial Sequence
  Description of Artificial Sequence: Synthetic oligonucleotide
cuucuaugccacauaccag

SEQ ID NO: 2455889 - RNA, 19 nt, Artificial Sequence
  Description of Artificial Sequence: Synthetic oligonucleotide
agcauugucuuuucuuggu

SEQ ID NO: 2455890 - RNA, 19 nt, Artificial Sequence
  Description of Artificial Sequence: Synthetic oligonucleotide
uugacuaauuaugcuugcc

SEQ ID NO: 2455891 - RNA, 19 nt, Artificial Sequence
  Description of Artificial Sequence: Synthetic oligonucleotide
caaucugaaacagcuugcc

SEQ ID NO: 2455892 - RNA, 19 nt, Artificial Sequence
  Description of Artificial Sequence: Synthetic oligonucleotide
cuccuugugaaguuuccug

SEQ ID NO: 2455893 - RNA, 19 nt, Artificial Sequence
  Description of Artificial Sequence: Synthetic oligonucleotide
uacaaccaucaauagacuu

SEQ ID NO: 2455894 - RNA, 19 nt, Artificial Sequence
  Description of Artificial Sequence: Synthetic oligonucleotide
cuuccuguccauuuuccuc

SEQ ID NO: 2455895 - RNA, 19 nt, Artificial Sequence
  Description of Artificial Sequence: Synthetic oligonucleotide
aaaacaacggacgggcaua

SEQ ID NO: 2455896 - RNA, 19 nt, Artificial Sequence
  Description of Artificial Sequence: Synthetic oligonucleotide
uuggugggaacucuucaaa

SEQ ID NO: 2455897 - RNA, 19 nt, Artificial Sequence
  Description of Artificial Sequence: Synthetic oligonucleotide
uuccucgguuaucuugagg

SEQ ID NO: 2455898 - RNA, 19 nt, Artificial Sequence
  Description of Artificial Sequence: Synthetic oligonucleotide
aauuaugcuugcccacuua

SEQ ID NO: 2455899 - RNA, 19 nt, Artificial Sequence
  Description of Artificial Sequence: Synthetic oligonucleotide
gugggaacucuucaaaauc

SEQ ID NO: 2455900 - RNA, 19 nt, Artificial Sequence
  Description of Artificial Sequence: Synthetic oligonucleotide
  modified_base (9)..(9): a, c, u, g, unknown or other
auguggaunuauggcauag

SEQ ID NO: 2455901 - RNA, 19 nt, Artificial Sequence
  Description of Artificial Sequence: Synthetic oligonucleotide
cuggaaaacaacggacggg

SEQ ID NO: 2455902 - RNA, 19 nt, Artificial Sequence
  Description of Artificial Sequence: Synthetic oligonucleotide
ggcauagaaaacugguagc

SEQ ID NO: 2455903 - RNA, 19 nt, Artificial Sequence
  Description of Artificial Sequence: Synthetic oligonucleotide
uggucucuccuuugaagcc

SEQ ID NO: 2455904 - RNA, 19 nt, Artificial Sequence
  Description of Artificial Sequence: Synthetic oligonucleotide
ggaaaauguaaugagcaca

SEQ ID NO: 2455905 - RNA, 19 nt, Artificial Sequence
  Description of Artificial Sequence: Synthetic oligonucleotide
cuggguguuugcuauggug

SEQ ID NO: 2455906 - RNA, 19 nt, Artificial Sequence
  Description of Artificial Sequence: Synthetic oligonucleotide
acugguagccugcugccug

SEQ ID NO: 2455907 - RNA, 19 nt, Artificial Sequence
  Description of Artificial Sequence: Synthetic oligonucleotide
aacccaguaaguggugcag

SEQ ID NO: 2455908 - RNA, 19 nt, Artificial Sequence
  Description of Artificial Sequence: Synthetic oligonucleotide
uccuucuaugccacauacc

SEQ ID NO: 2455909 - RNA, 19 nt, Artificial Sequence
  Description of Artificial Sequence: Synthetic oligonucleotide
gagggaccacuguacaacc

SEQ ID NO: 2455910 - RNA, 19 nt, Artificial Sequence
  Description of Artificial Sequence: Synthetic oligonucleotide
uaaaccugccauccuuccu

SEQ ID NO: 2455911 - RNA, 19 nt, Artificial Sequence
  Description of Artificial Sequence: Synthetic oligonucleotide
cuugugaaguuuccugcac

SEQ ID NO: 2455912 - RNA, 19 nt, Artificial Sequence
  Description of Artificial Sequence: Synthetic oligonucleotide
ugggugucuuucuaucucu

SEQ ID NO: 2455913 - RNA, 19 nt, Artificial Sequence
  Description of Artificial Sequence: Synthetic oligonucleotide
cacaucaacuggcugggug

SEQ ID NO: 2455914 - RNA, 19 nt, Artificial Sequence
  Description of Artificial Sequence: Synthetic oligonucleotide
ucaacccaguaaguggugc

SEQ ID NO: 2455915 - RNA, 19 nt, Artificial Sequence
  Description of Artificial Sequence: Synthetic oligonucleotide
ucaacuggcuggguguuug

SEQ ID NO: 2455916 - RNA, 19 nt, Artificial Sequence
  Description of Artificial Sequence: Synthetic oligonucleotide
ugucuuuucuuggugggaa

SEQ ID NO: 2455917 - RNA, 19 nt, Artificial Sequence
  Description of Artificial Sequence: Synthetic oligonucleotide
cuggucaaagcgaccacac

SEQ ID NO: 2455918 - RNA, 19 nt, Artificial Sequence
  Description of Artificial Sequence: Synthetic oligonucleotide
gcauagaaaacugguagcc

SEQ ID NO: 2455919 - RNA, 19 nt, Artificial Sequence
  Description of Artificial Sequence: Synthetic oligonucleotide
uucuuuggguguacaugug

SEQ ID NO: 2455920 - RNA, 19 nt, Artificial Sequence
  Description of Artificial Sequence: Synthetic oligonucleotide
gaaaacugguagccugcug

SEQ ID NO: 2455921 - RNA, 19 nt, Artificial Sequence
  Description of Artificial Sequence: Synthetic oligonucleotide
augcuugcccacuuacuug

SEQ ID NO: 2455922 - RNA, 19 nt, Artificial Sequence
  Description of Artificial Sequence: Synthetic oligonucleotide
caagguuuaugaacccuuc

SEQ ID NO: 2455923 - RNA, 19 nt, Artificial Sequence
  Description of Artificial Sequence: Synthetic oligonucleotide
cuuuggguguacaugugga

SEQ ID NO: 2455924 - RNA, 19 nt, Artificial Sequence
  Description of Artificial Sequence: Synthetic oligonucleotide
aguuugguccccuccuugu

SEQ ID NO: 2455925 - RNA, 19 nt, Artificial Sequence
  Description of Artificial Sequence: Synthetic oligonucleotide
cuauuccauuauacagucc

SEQ ID NO: 2455926 - RNA, 19 nt, Artificial Sequence
  Description of Artificial Sequence: Synthetic oligonucleotide
ugucuugccugaacauucu

SEQ ID NO: 2455927 - RNA, 19 nt, Artificial Sequence
  Description of Artificial Sequence: Synthetic oligonucleotide
uuuggguguacauguggau

SEQ ID NO: 2455928 - RNA, 19 nt, Artificial Sequence
  Description of Artificial Sequence: Synthetic oligonucleotide
cuugcccuguaacacauca

SEQ ID NO: 2455929 - RNA, 19 nt, Artificial Sequence
  Description of Artificial Sequence: Synthetic oligonucleotide
guucaaggacagcauaguc

SEQ ID NO: 2455930 - RNA, 19 nt, Artificial Sequence
  Description of Artificial Sequence: Synthetic oligonucleotide
ucgccaaugggcacucucu

SEQ ID NO: 2455931 - RNA, 19 nt, Artificial Sequence
  Description of Artificial Sequence: Synthetic oligonucleotide
uaauuaugcuugcccacuu

SEQ ID NO: 2455932 - RNA, 19 nt, Artificial Sequence
  Description of Artificial Sequence: Synthetic oligonucleotide
uaccaagguuuaugaaccc

SEQ ID NO: 2455933 - RNA, 19 nt, Artificial Sequence
  Description of Artificial Sequence: Synthetic oligonucleotide
aacccuucuauuccuucua

SEQ ID NO: 2455934 - RNA, 19 nt, Artificial Sequence
  Description of Artificial Sequence: Synthetic oligonucleotide
augagucgccaaugggcac

SEQ ID NO: 2455935 - RNA, 19 nt, Artificial Sequence
  Description of Artificial Sequence: Synthetic oligonucleotide
gccauagacacagaguuug

SEQ ID NO: 2455936 - RNA, 19 nt, Artificial Sequence
  Description of Artificial Sequence: Synthetic oligonucleotide
uggugggaacucuucaaaa

SEQ ID NO: 2455937 - RNA, 19 nt, Artificial Sequence
  Description of Artificial Sequence: Synthetic oligonucleotide
cccuguaacacaucaacug

SEQ ID NO: 2455938 - RNA, 19 nt, Artificial Sequence
  Description of Artificial Sequence: Synthetic oligonucleotide
auaaaucaacccaguaagu

SEQ ID NO: 2455939 - RNA, 19 nt, Artificial Sequence
  Description of Artificial Sequence: Synthetic oligonucleotide
ccauuauacaguccaguag

SEQ ID NO: 2455940 - RNA, 19 nt, Artificial Sequence
  Description of Artificial Sequence: Synthetic oligonucleotide
guggugucauuguuaauga

SEQ ID NO: 2455941 - RNA, 19 nt, Artificial Sequence
  Description of Artificial Sequence: Synthetic oligonucleotide
caguagguacuuccugucc

SEQ ID NO: 2455942 - RNA, 19 nt, Artificial Sequence
  Description of Artificial Sequence: Synthetic oligonucleotide
aacaacggacgggcauacc

SEQ ID NO: 2455943 - RNA, 19 nt, Artificial Sequence
  Description of Artificial Sequence: Synthetic oligonucleotide
uauucccaacugcauguau

SEQ ID NO: 2455944 - RNA, 19 nt, Artificial Sequence
  Description of Artificial Sequence: Synthetic oligonucleotide
uucuuggugggaacucuuc

SEQ ID NO: 2455945 - RNA, 19 nt, Artificial Sequence
  Description of Artificial Sequence: Synthetic oligonucleotide
ccuauuccauuauacaguc

SEQ ID NO: 2455946 - RNA, 19 nt, Artificial Sequence
  Description of Artificial Sequence: Synthetic oligonucleotide
cucgguuaucuugagggac

SEQ ID NO: 2455947 - RNA, 19 nt, Artificial Sequence
  Description of Artificial Sequence: Synthetic oligonucleotide
agucuuuacuggauaucuc

SEQ ID NO: 2455948 - RNA, 19 nt, Artificial Sequence
  Description of Artificial Sequence: Synthetic oligonucleotide
agaguggucuugauggucu

SEQ ID NO: 2455949 - RNA, 19 nt, Artificial Sequence
  Description of Artificial Sequence: Synthetic oligonucleotide
cuguacaaccaucaauaga

SEQ ID NO: 2455950 - RNA, 19 nt, Artificial Sequence
  Description of Artificial Sequence: Synthetic oligonucleotide
uggucaaagcgaccacaca

SEQ ID NO: 2455951 - RNA, 19 nt, Artificial Sequence
  Description of Artificial Sequence: Synthetic oligonucleotide
  modified_base (19)..(19): a, c, u, g, unknown or other
uuggguguacauguggaun

SEQ ID NO: 2455952 - RNA, 19 nt, Artificial Sequence
  Description of Artificial Sequence: Synthetic oligonucleotide
  modified_base (8)..(8): a, c, u, g, unknown or other
uguggaunuauggcauaga

SEQ ID NO: 2455953 - RNA, 19 nt, Artificial Sequence
  Description of Artificial Sequence: Synthetic oligonucleotide
ccucacaauuucuuccucg

SEQ ID NO: 2455954 - RNA, 19 nt, Artificial Sequence
  Description of Artificial Sequence: Synthetic oligonucleotide
gaaaacaacggacgggcau

SEQ ID NO: 2455955 - RNA, 19 nt, Artificial Sequence
  Description of Artificial Sequence: Synthetic oligonucleotide
auuauacaguccaguaggu

SEQ ID NO: 2455956 - RNA, 19 nt, Artificial Sequence
  Description of Artificial Sequence: Synthetic oligonucleotide
cuuacuugacaaucugaaa

SEQ ID NO: 2455957 - RNA, 19 nt, Artificial Sequence
  Description of Artificial Sequence: Synthetic oligonucleotide
ggcauaccaagguuuauga

SEQ ID NO: 2455958 - RNA, 19 nt, Artificial Sequence
  Description of Artificial Sequence: Synthetic oligonucleotide
uuauacaguccaguaggua

SEQ ID NO: 2455959 - RNA, 19 nt, Artificial Sequence
  Description of Artificial Sequence: Synthetic oligonucleotide
uccugcaccucagaauucu

SEQ ID NO: 2455960 - RNA, 19 nt, Artificial Sequence
  Description of Artificial Sequence: Synthetic oligonucleotide
cuccaguucaaggacagca

SEQ ID NO: 2455961 - RNA, 19 nt, Artificial Sequence
  Description of Artificial Sequence: Synthetic oligonucleotide
ugagucgccaaugggcacu

SEQ ID NO: 2455962 - RNA, 19 nt, Artificial Sequence
  Description of Artificial Sequence: Synthetic oligonucleotide
auacaguccaguagguacu

SEQ ID NO: 2455963 - RNA, 19 nt, Artificial Sequence
  Description of Artificial Sequence: Synthetic oligonucleotide
uggucuugauggucucucc

SEQ ID NO: 2455964 - RNA, 19 nt, Artificial Sequence
  Description of Artificial Sequence: Synthetic oligonucleotide
cacuuacuugacaaucuga

SEQ ID NO: 2455965 - RNA, 19 nt, Artificial Sequence
  Description of Artificial Sequence: Synthetic oligonucleotide
agaauucuuuguugccuau

SEQ ID NO: 2455966 - RNA, 19 nt, Artificial Sequence
  Description of Artificial Sequence: Synthetic oligonucleotide
cugggugucuuucuaucuc

SEQ ID NO: 2455967 - RNA, 19 nt, Artificial Sequence
  Description of Artificial Sequence: Synthetic oligonucleotide
gccaucuggaaaacaacgg

SEQ ID NO: 2455968 - RNA, 19 nt, Artificial Sequence
  Description of Artificial Sequence: Synthetic oligonucleotide
caacacacucagcagguga

SEQ ID NO: 2455969 - RNA, 19 nt, Artificial Sequence
  Description of Artificial Sequence: Synthetic oligonucleotide
  modified_base (11)..(11): a, c, u, g, unknown or other
acauguggaunuauggcau

SEQ ID NO: 2455970 - RNA, 19 nt, Artificial Sequence
  Description of Artificial Sequence: Synthetic oligonucleotide
guccaguagguacuuccug

SEQ ID NO: 2455971 - RNA, 19 nt, Artificial Sequence
  Description of Artificial Sequence: Synthetic oligonucleotide
cuugagggaccacuguaca

SEQ ID NO: 2455972 - RNA, 19 nt, Artificial Sequence
  Description of Artificial Sequence: Synthetic oligonucleotide
caaagcgaccacacacuuc

SEQ ID NO: 2455973 - RNA, 19 nt, Artificial Sequence
  Description of Artificial Sequence: Synthetic oligonucleotide
accuguacacauugacuaa

SEQ ID NO: 2455974 - RNA, 19 nt, Artificial Sequence
  Description of Artificial Sequence: Synthetic oligonucleotide
uaaugagcacauggcugcc

SEQ ID NO: 2455975 - RNA, 19 nt, Artificial Sequence
  Description of Artificial Sequence: Synthetic oligonucleotide
agguacuuccuguccauuu

SEQ ID NO: 2455976 - RNA, 19 nt, Artificial Sequence
  Description of Artificial Sequence: Synthetic oligonucleotide
agcauuucuuugccugggu

SEQ ID NO: 2455977 - RNA, 19 nt, Artificial Sequence
  Description of Artificial Sequence: Synthetic oligonucleotide
ugccuauucccaacugcau

SEQ ID NO: 2455978 - RNA, 19 nt, Artificial Sequence
  Description of Artificial Sequence: Synthetic oligonucleotide
acccaguaaguggugcagg

SEQ ID NO: 2455979 - RNA, 19 nt, Artificial Sequence
  Description of Artificial Sequence: Synthetic oligonucleotide
uccucacaauuucuuccuc

SEQ ID NO: 2455980 - RNA, 19 nt, Artificial Sequence
  Description of Artificial Sequence: Synthetic oligonucleotide
cuuggugggaacucuucaa

SEQ ID NO: 2455981 - RNA, 19 nt, Artificial Sequence
  Description of Artificial Sequence: Synthetic oligonucleotide
caguuuuggaaaauguaau

SEQ ID NO: 2455982 - RNA, 19 nt, Artificial Sequence
  Description of Artificial Sequence: Synthetic oligonucleotide
gccuauucccaacugcaug

SEQ ID NO: 2455983 - RNA, 19 nt, Artificial Sequence
  Description of Artificial Sequence: Synthetic oligonucleotide
agcaggugacuggucaaag

SEQ ID NO: 2455984 - RNA, 19 nt, Artificial Sequence
  Description of Artificial Sequence: Synthetic oligonucleotide
gaacccuucuauuccuucu

SEQ ID NO: 2455985 - RNA, 19 nt, Artificial Sequence
  Description of Artificial Sequence: Synthetic oligonucleotide
gaauuaaaccugccauccu

SEQ ID NO: 2455986 - RNA, 19 nt, Artificial Sequence
  Description of Artificial Sequence: Synthetic oligonucleotide
cauuguuaaugagucgcca

SEQ ID NO: 2455987 - RNA, 19 nt, Artificial Sequence
  Description of Artificial Sequence: Synthetic oligonucleotide
guuuaugaacccuucuauu

SEQ ID NO: 2455988 - RNA, 19 nt, Artificial Sequence
  Description of Artificial Sequence: Synthetic oligonucleotide
gcauuucuuugccugggug

SEQ ID NO: 2455989 - RNA, 19 nt, Artificial Sequence
  Description of Artificial Sequence: Synthetic oligonucleotide
ggauaucucaaaccaaggu

SEQ ID NO: 2455990 - RNA, 19 nt, Artificial Sequence
  Description of Artificial Sequence: Synthetic oligonucleotide
gacacagaguuuggucccc

SEQ ID NO: 2455991 - RNA, 19 nt, Artificial Sequence
  Description of Artificial Sequence: Synthetic oligonucleotide
ggugacuggucaaagcgac

SEQ ID NO: 2455992 - RNA, 19 nt, Artificial Sequence
  Description of Artificial Sequence: Synthetic oligonucleotide
aguaaguggugcagggccu

SEQ ID NO: 2455993 - RNA, 19 nt, Artificial Sequence
  Description of Artificial Sequence: Synthetic oligonucleotide
gguuuaugaacccuucuau

SEQ ID NO: 2455994 - RNA, 19 nt, Artificial Sequence
  Description of Artificial Sequence: Synthetic oligonucleotide
cagaauucuuuguugccua

SEQ ID NO: 2455995 - RNA, 19 nt, Artificial Sequence
  Description of Artificial Sequence: Synthetic oligonucleotide
  modified_base (10)..(10): a, c, u, g, unknown or other
cauguggaunuauggcaua

SEQ ID NO: 2455996 - RNA, 19 nt, Artificial Sequence
  Description of Artificial Sequence: Synthetic oligonucleotide
acuggauaucucaaaccaa

SEQ ID NO: 2455997 - RNA, 19 nt, Artificial Sequence
  Description of Artificial Sequence: Synthetic oligonucleotide
uaccagcauuucuuugccu

SEQ ID NO: 2455998 - RNA, 19 nt, Artificial Sequence
  Description of Artificial Sequence: Synthetic oligonucleotide
cuuccucgguuaucuugag

SEQ ID NO: 2455999 - RNA, 19 nt, Artificial Sequence
  Description of Artificial Sequence: Synthetic oligonucleotide
uguuugcuauggugguguc

SEQ ID NO: 2456000 - RNA, 19 nt, Artificial Sequence
  Description of Artificial Sequence: Synthetic oligonucleotide
gagcacauggcugccaucu

SEQ ID NO: 2456001 - RNA, 19 nt, Artificial Sequence
  Description of Artificial Sequence: Synthetic oligonucleotide
uccuguccauuuuccucca

SEQ ID NO: 2456002 - RNA, 19 nt, Artificial Sequence
  Description of Artificial Sequence: Synthetic oligonucleotide
auggcauagaaaacuggua

SEQ ID NO: 2456003 - RNA, 19 nt, Artificial Sequence
  Description of Artificial Sequence: Synthetic oligonucleotide
caacccaguaaguggugca

SEQ ID NO: 2456004 - RNA, 19 nt, Artificial Sequence
  Description of Artificial Sequence: Synthetic oligonucleotide
agcgaccacacacuucauu

SEQ ID NO: 2456005 - RNA, 19 nt, Artificial Sequence
  Description of Artificial Sequence: Synthetic oligonucleotide
caaccaucaauagacuucu

SEQ ID NO: 2456006 - RNA, 19 nt, Artificial Sequence
  Description of Artificial Sequence: Synthetic oligonucleotide
acggacgggcauaccaagg

SEQ ID NO: 2456007 - RNA, 19 nt, Artificial Sequence
  Description of Artificial Sequence: Synthetic oligonucleotide
ccauagacacagaguuugg

SEQ ID NO: 2456008 - RNA, 19 nt, Artificial Sequence
  Description of Artificial Sequence: Synthetic oligonucleotide
gggccuauuccauuauaca

SEQ ID NO: 2456009 - RNA, 19 nt, Artificial Sequence
  Description of Artificial Sequence: Synthetic oligonucleotide
aggugacuggucaaagcga

SEQ ID NO: 2456010 - RNA, 19 nt, Artificial Sequence
  Description of Artificial Sequence: Synthetic oligonucleotide
cuaauuaugcuugcccacu

SEQ ID NO: 2456011 - RNA, 19 nt, Artificial Sequence
  Description of Artificial Sequence: Synthetic oligonucleotide
agcacauggcugccaucug

SEQ ID NO: 2456012 - RNA, 19 nt, Artificial Sequence
  Description of Artificial Sequence: Synthetic oligonucleotide
gucgccaaugggcacucuc

SEQ ID NO: 2456013 - RNA, 19 nt, Artificial Sequence
  Description of Artificial Sequence: Synthetic oligonucleotide
gggcauaccaagguuuaug

SEQ ID NO: 2456014 - RNA, 19 nt, Artificial Sequence
  Description of Artificial Sequence: Synthetic oligonucleotide
cuuugccugggugucuuuc

SEQ ID NO: 2456015 - RNA, 19 nt, Artificial Sequence
  Description of Artificial Sequence: Synthetic oligonucleotide
gcgaccacacacuucauua

SEQ ID NO: 2456016 - RNA, 19 nt, Artificial Sequence
  Description of Artificial Sequence: Synthetic oligonucleotide
acaacacacucagcaggug

SEQ ID NO: 2456017 - RNA, 19 nt, Artificial Sequence
  Description of Artificial Sequence: Synthetic oligonucleotide
caacuggcuggguguuugc

SEQ ID NO: 2456018 - RNA, 19 nt, Artificial Sequence
  Description of Artificial Sequence: Synthetic oligonucleotide
cuugcccacuuacuugaca

SEQ ID NO: 2456019 - RNA, 19 nt, Artificial Sequence
  Description of Artificial Sequence: Synthetic oligonucleotide
caaugggcacucucuacaa

SEQ ID NO: 2456020 - RNA, 19 nt, Artificial Sequence
  Description of Artificial Sequence: Synthetic oligonucleotide
ugcccacuuacuugacaau

SEQ ID NO: 2456021 - RNA, 19 nt, Artificial Sequence
  Description of Artificial Sequence: Synthetic oligonucleotide
cauucuccucacaauuucu

SEQ ID NO: 2456022 - RNA, 19 nt, Artificial Sequence
  Description of Artificial Sequence: Synthetic oligonucleotide
ccacuuacuugacaaucug

SEQ ID NO: 2456023 - RNA, 19 nt, Artificial Sequence
  Description of Artificial Sequence: Synthetic oligonucleotide
ugccacauaccagcauuuc

SEQ ID NO: 2456024 - RNA, 19 nt, Artificial Sequence
  Description of Artificial Sequence: Synthetic oligonucleotide
ugagcacauggcugccauc

SEQ ID NO: 2456025 - RNA, 19 nt, Artificial Sequence
  Description of Artificial Sequence: Synthetic oligonucleotide
ccaacugcauguauguaaa

SEQ ID NO: 2456026 - RNA, 19 nt, Artificial Sequence
  Description of Artificial Sequence: Synthetic oligonucleotide
caacggacgggcauaccaa

SEQ ID NO: 2456027 - RNA, 19 nt, Artificial Sequence
  Description of Artificial Sequence: Synthetic oligonucleotide
gucaaagcgaccacacacu

SEQ ID NO: 2456028 - RNA, 19 nt, Artificial Sequence
  Description of Artificial Sequence: Synthetic oligonucleotide
cauagaaaacugguagccu

SEQ ID NO: 2456029 - RNA, 19 nt, Artificial Sequence
  Description of Artificial Sequence: Synthetic oligonucleotide
cccaacugcauguauguaa

SEQ ID NO: 2456030 - RNA, 19 nt, Artificial Sequence
  Description of Artificial Sequence: Synthetic oligonucleotide
gugacuggucaaagcgacc

SEQ ID NO: 2456031 - RNA, 19 nt, Artificial Sequence
  Description of Artificial Sequence: Synthetic oligonucleotide
aucaacccaguaaguggug

SEQ ID NO: 2456032 - RNA, 19 nt, Artificial Sequence
  Description of Artificial Sequence: Synthetic oligonucleotide
gguuuaacacuaaaagcau

SEQ ID NO: 2456033 - RNA, 19 nt, Artificial Sequence
  Description of Artificial Sequence: Synthetic oligonucleotide
cacagaguuugguccccuc

SEQ ID NO: 2456034 - RNA, 19 nt, Artificial Sequence
  Description of Artificial Sequence: Synthetic oligonucleotide
gggcacucucuacaaagga

SEQ ID NO: 2456035 - RNA, 19 nt, Artificial Sequence
  Description of Artificial Sequence: Synthetic oligonucleotide
uggcuggguguuugcuaug

SEQ ID NO: 2456036 - RNA, 19 nt, Artificial Sequence
  Description of Artificial Sequence: Synthetic oligonucleotide
gccaaugggcacucucuac

SEQ ID NO: 2456037 - RNA, 19 nt, Artificial Sequence
  Description of Artificial Sequence: Synthetic oligonucleotide
ggaacucuucaaaaucaaa

SEQ ID NO: 2456038 - RNA, 19 nt, Artificial Sequence
  Description of Artificial Sequence: Synthetic oligonucleotide
cuuucuccucacuuucagu

SEQ ID NO: 2456039 - RNA, 19 nt, Artificial Sequence
  Description of Artificial Sequence: Synthetic oligonucleotide
cccuucuauuccuucuaug

SEQ ID NO: 2456040 - RNA, 19 nt, Artificial Sequence
  Description of Artificial Sequence: Synthetic oligonucleotide
gccuauuccauuauacagu

SEQ ID NO: 2456041 - RNA, 19 nt, Artificial Sequence
  Description of Artificial Sequence: Synthetic oligonucleotide
ccuauucccaacugcaugu

SEQ ID NO: 2456042 - RNA, 19 nt, Artificial Sequence
  Description of Artificial Sequence: Synthetic oligonucleotide
cauagacacagaguuuggu

SEQ ID NO: 2456043 - RNA, 19 nt, Artificial Sequence
  Description of Artificial Sequence: Synthetic oligonucleotide
gcccacuuacuugacaauc

SEQ ID NO: 2456044 - RNA, 19 nt, Artificial Sequence
  Description of Artificial Sequence: Synthetic oligonucleotide
gacgggcauaccaagguuu

SEQ ID NO: 2456045 - RNA, 19 nt, Artificial Sequence
  Description of Artificial Sequence: Synthetic oligonucleotide
uaaguggugcagggccuau

SEQ ID NO: 2456046 - RNA, 19 nt, Artificial Sequence
  Description of Artificial Sequence: Synthetic oligonucleotide
acacagaguuugguccccu

SEQ ID NO: 2456047 - RNA, 19 nt, Artificial Sequence
  Description of Artificial Sequence: Synthetic oligonucleotide
ugguggugucauuguuaau

SEQ ID NO: 2456048 - RNA, 19 nt, Artificial Sequence
  Description of Artificial Sequence: Synthetic oligonucleotide
caacugcauguauguaaaa

SEQ ID NO: 2456049 - RNA, 19 nt, Artificial Sequence
  Description of Artificial Sequence: Synthetic oligonucleotide
ucccaacugcauguaugua

SEQ ID NO: 2456050 - RNA, 19 nt, Artificial Sequence
  Description of Artificial Sequence: Synthetic oligonucleotide
cacuaaaagcauugucuuu

SEQ ID NO: 2456051 - RNA, 19 nt, Artificial Sequence
  Description of Artificial Sequence: Synthetic oligonucleotide
gaauucuuuguugccuauu

SEQ ID NO: 2456052 - RNA, 19 nt, Artificial Sequence
  Description of Artificial Sequence: Synthetic oligonucleotide
aaguggugcagggccuauu

SEQ ID NO: 2456053 - RNA, 19 nt, Artificial Sequence
  Description of Artificial Sequence: Synthetic oligonucleotide
augccacauaccagcauuu

SEQ ID NO: 2456054 - RNA, 19 nt, Artificial Sequence
  Description of Artificial Sequence: Synthetic oligonucleotide
gggaacucuucaaaaucaa

SEQ ID NO: 2456055 - RNA, 19 nt, Artificial Sequence
  Description of Artificial Sequence: Synthetic oligonucleotide
acgggcauaccaagguuua

SEQ ID NO: 2456056 - RNA, 19 nt, Artificial Sequence
  Description of Artificial Sequence: Synthetic oligonucleotide
gccacauaccagcauuucu

SEQ ID NO: 2456057 - RNA, 19 nt, Artificial Sequence
  Description of Artificial Sequence: Synthetic oligonucleotide
ucucuccuuugaagccaua

SEQ ID NO: 2456058 - RNA, 19 nt, Artificial Sequence
  Description of Artificial Sequence: Synthetic oligonucleotide
gcuaugguggugucauugu

SEQ ID NO: 2456059 - RNA, 19 nt, Artificial Sequence
  Description of Artificial Sequence: Synthetic oligonucleotide
gagucgccaaugggcacuc

SEQ ID NO: 2456060 - RNA, 19 nt, Artificial Sequence
  Description of Artificial Sequence: Synthetic oligonucleotide
caccucagaauucuuuguu

SEQ ID NO: 2456061 - RNA, 19 nt, Artificial Sequence
  Description of Artificial Sequence: Synthetic oligonucleotide
guaaguggugcagggccua

SEQ ID NO: 2456062 - RNA, 19 nt, Artificial Sequence
  Description of Artificial Sequence: Synthetic oligonucleotide
uugcuaugguggugucauu

SEQ ID NO: 2456063 - RNA, 19 nt, Artificial Sequence
  Description of Artificial Sequence: Synthetic oligonucleotide
cuggauggccaaugauaua

SEQ ID NO: 2456064 - RNA, 19 nt, Artificial Sequence
  Description of Artificial Sequence: Synthetic oligonucleotide
uccccuccuugugaaguuu

SEQ ID NO: 2456065 - RNA, 19 nt, Artificial Sequence
  Description of Artificial Sequence: Synthetic oligonucleotide
gggaccacuguacaaccau

SEQ ID NO: 2456066 - RNA, 19 nt, Artificial Sequence
  Description of Artificial Sequence: Synthetic oligonucleotide
cuaugguggugucauuguu

SEQ ID NO: 2456067 - RNA, 19 nt, Artificial Sequence
  Description of Artificial Sequence: Synthetic oligonucleotide
aaccaucaauagacuucuu

SEQ ID NO: 2456068 - RNA, 19 nt, Artificial Sequence
  Description of Artificial Sequence: Synthetic oligonucleotide
ggguguuugcuaugguggu

SEQ ID NO: 2456069 - RNA, 19 nt, Artificial Sequence
  Description of Artificial Sequence: Synthetic oligonucleotide
cuauucccaacugcaugua

SEQ ID NO: 2456070 - RNA, 19 nt, Artificial Sequence
  Description of Artificial Sequence: Synthetic oligonucleotide
cccacuuacuugacaaucu

SEQ ID NO: 2456071 - RNA, 19 nt, Artificial Sequence
  Description of Artificial Sequence: Synthetic oligonucleotide
acacaucaacuggcugggu

SEQ ID NO: 2456072 - RNA, 19 nt, Artificial Sequence
  Description of Artificial Sequence: Synthetic oligonucleotide
gcaccucagaauucuuugu

SEQ ID NO: 2456073 - RNA, 19 nt, Artificial Sequence
  Description of Artificial Sequence: Synthetic oligonucleotide
ccaguucaaggacagcaua

SEQ ID NO: 2456074 - RNA, 19 nt, Artificial Sequence
  Description of Artificial Sequence: Synthetic oligonucleotide
aucaacuggcuggguguuu

SEQ ID NO: 2456075 - RNA, 19 nt, Artificial Sequence
  Description of Artificial Sequence: Synthetic oligonucleotide
cagggccuauuccauuaua

SEQ ID NO: 2456076 - RNA, 19 nt, Artificial Sequence
  Description of Artificial Sequence: Synthetic oligonucleotide
ccucgguuaucuugaggga

SEQ ID NO: 2456077 - RNA, 19 nt, Artificial Sequence
  Description of Artificial Sequence: Synthetic oligonucleotide
ccccuccuugugaaguuuc

SEQ ID NO: 2456078 - RNA, 19 nt, Artificial Sequence
  Description of Artificial Sequence: Synthetic oligonucleotide
aagcgaccacacacuucau

SEQ ID NO: 2456079 - RNA, 19 nt, Artificial Sequence
  Description of Artificial Sequence: Synthetic oligonucleotide
ccaagguuuaugaacccuu

SEQ ID NO: 2456080 - RNA, 19 nt, Artificial Sequence
  Description of Artificial Sequence: Synthetic oligonucleotide
ccacuguacaaccaucaau

SEQ ID NO: 2456081 - RNA, 19 nt, Artificial Sequence
  Description of Artificial Sequence: Synthetic oligonucleotide
gcccuguaacacaucaacu

SEQ ID NO: 2456082 - RNA, 19 nt, Artificial Sequence
  Description of Artificial Sequence: Synthetic oligonucleotide
gucucuccuuugaagccau

SEQ ID NO: 2456083 - RNA, 19 nt, Artificial Sequence
  Description of Artificial Sequence: Synthetic oligonucleotide
ccugaacauucuccucaca

SEQ ID NO: 2456084 - RNA, 19 nt, Artificial Sequence
  Description of Artificial Sequence: Synthetic oligonucleotide
cagcauagucaaagucuuu

SEQ ID NO: 2456085 - RNA, 19 nt, Artificial Sequence
  Description of Artificial Sequence: Synthetic oligonucleotide
agucgccaaugggcacucu

SEQ ID NO: 2456086 - RNA, 19 nt, Artificial Sequence
  Description of Artificial Sequence: Synthetic oligonucleotide
ggacgggcauaccaagguu

SEQ ID NO: 2456087 - RNA, 19 nt, Artificial Sequence
  Description of Artificial Sequence: Synthetic oligonucleotide
  modified_base (17)..(17): a, c, u, g, unknown or other
ggguguacauguggaunua

SEQ ID NO: 2456088 - RNA, 19 nt, Artificial Sequence
  Description of Artificial Sequence: Synthetic oligonucleotide
ccugucuugccugaacauu

SEQ ID NO: 2456089 - RNA, 19 nt, Artificial Sequence
  Description of Artificial Sequence: Synthetic oligonucleotide
cggacgggcauaccaaggu

SEQ ID NO: 2456090 - RNA, 19 nt, Artificial Sequence
  Description of Artificial Sequence: Synthetic oligonucleotide
cgggcauaccaagguuuau

SEQ ID NO: 2456091 - RNA, 19 nt, Artificial Sequence
  Description of Artificial Sequence: Synthetic oligonucleotide
  modified_base (1)..(1): a, c, u, g, unknown or other
nuauggcauagaaaacugg

SEQ ID NO: 2456092 - RNA, 19 nt, Artificial Sequence
  Description of Artificial Sequence: Synthetic oligonucleotide
aaugccgaaguucuuaggc

SEQ ID NO: 2456093 - RNA, 19 nt, Artificial Sequence
  Description of Artificial Sequence: Synthetic oligonucleotide
uuguaauugguccuaauag

SEQ ID NO: 2456094 - RNA, 19 nt, Artificial Sequence
  Description of Artificial Sequence: Synthetic oligonucleotide
cuuuaagccgcuuauagag

SEQ ID NO: 2456095 - RNA, 19 nt, Artificial Sequence
  Description of Artificial Sequence: Synthetic oligonucleotide
cucaauggggucuacaucg

SEQ ID NO: 2456096 - RNA, 19 nt, Artificial Sequence
  Description of Artificial Sequence: Synthetic oligonucleotide
aguagcgaguucuuuagcc

SEQ ID NO: 2456097 - RNA, 19 nt, Artificial Sequence
  Description of Artificial Sequence: Synthetic oligonucleotide
agauuuaggacccaggaca

SEQ ID NO: 2456098 - RNA, 19 nt, Artificial Sequence
  Description of Artificial Sequence: Synthetic oligonucleotide
uguaauugguccuaauagc

SEQ ID NO: 2456099 - RNA, 19 nt, Artificial Sequence
  Description of Artificial Sequence: Synthetic oligonucleotide
auuuaacccaguuuaguag

SEQ ID NO: 2456100 - RNA, 19 nt, Artificial Sequence
  Description of Artificial Sequence: Synthetic oligonucleotide
uuuaacccaguuuaguagc

SEQ ID NO: 2456101 - RNA, 19 nt, Artificial Sequence
  Description of Artificial Sequence: Synthetic oligonucleotide
uccuguuucuucacgacgg

SEQ ID NO: 2456102 - RNA, 19 nt, Artificial Sequence
  Description of Artificial Sequence: Synthetic oligonucleotide
ucuuaguugggacaucccc

SEQ ID NO: 2456103 - RNA, 19 nt, Artificial Sequence
  Description of Artificial Sequence: Synthetic oligonucleotide
gaguuaaccugugugaagg

SEQ ID NO: 2456104 - RNA, 19 nt, Artificial Sequence
  Description of Artificial Sequence: Synthetic oligonucleotide
uuaguagcgaguucuuuag

SEQ ID NO: 2456105 - RNA, 19 nt, Artificial Sequence
  Description of Artificial Sequence: Synthetic oligonucleotide
uuuaagccgcuuauagagg

SEQ ID NO: 2456106 - RNA, 19 nt, Artificial Sequence
  Description of Artificial Sequence: Synthetic oligonucleotide
acauguuuuccuguggacc

SEQ ID NO: 2456107 - RNA, 19 nt, Artificial Sequence
  Description of Artificial Sequence: Synthetic oligonucleotide
uuuccuguggaccagucgu

SEQ ID NO: 2456108 - RNA, 19 nt, Artificial Sequence
  Description of Artificial Sequence: Synthetic oligonucleotide
ugggugaacugguuaaugg

SEQ ID NO: 2456109 - RNA, 19 nt, Artificial Sequence
  Description of Artificial Sequence: Synthetic oligonucleotide
uuaacccaguuuaguagcg

SEQ ID NO: 2456110 - RNA, 19 nt, Artificial Sequence
  Description of Artificial Sequence: Synthetic oligonucleotide
aauggggucuacaucgugg

SEQ ID NO: 2456111 - RNA, 19 nt, Artificial Sequence
  Description of Artificial Sequence: Synthetic oligonucleotide
acuguguugacuccugcuc

SEQ ID NO: 2456112 - RNA, 19 nt, Artificial Sequence
  Description of Artificial Sequence: Synthetic oligonucleotide
aaguucuuaggccucuucu

SEQ ID NO: 2456113 - RNA, 19 nt, Artificial Sequence
  Description of Artificial Sequence: Synthetic oligonucleotide
uguacauuuaacccaguuu

SEQ ID NO: 2456114 - RNA, 19 nt, Artificial Sequence
  Description of Artificial Sequence: Synthetic oligonucleotide
uaucugucguuguaauugg

SEQ ID NO: 2456115 - RNA, 19 nt, Artificial Sequence
  Description of Artificial Sequence: Synthetic oligonucleotide
aucgugggcgauuaccacc

SEQ ID NO: 2456116 - RNA, 19 nt, Artificial Sequence
  Description of Artificial Sequence: Synthetic oligonucleotide
uuaagccgcuuauagagga

SEQ ID NO: 2456117 - RNA, 19 nt, Artificial Sequence
  Description of Artificial Sequence: Synthetic oligonucleotide
cugucguuguaauuggucc

SEQ ID NO: 2456118 - RNA, 19 nt, Artificial Sequence
  Description of Artificial Sequence: Synthetic oligonucleotide
aacccaguuuaguagcgag

SEQ ID NO: 2456119 - RNA, 19 nt, Artificial Sequence
  Description of Artificial Sequence: Synthetic oligonucleotide
augccgaaguucuuaggcc

SEQ ID NO: 2456120 - RNA, 19 nt, Artificial Sequence
  Description of Artificial Sequence: Synthetic oligonucleotide
uugucuuccgaguuaaccu

SEQ ID NO: 2456121 - RNA, 19 nt, Artificial Sequence
  Description of Artificial Sequence: Synthetic oligonucleotide
uuuaguagcgaguucuuua

SEQ ID NO: 2456122 - RNA, 19 nt, Artificial Sequence
  Description of Artificial Sequence: Synthetic oligonucleotide
aacggugguacauguuuuc

SEQ ID NO: 2456123 - RNA, 19 nt, Artificial Sequence
  Description of Artificial Sequence: Synthetic oligonucleotide
uccagcuuggcaauucgag

SEQ ID NO: 2456124 - RNA, 19 nt, Artificial Sequence
  Description of Artificial Sequence: Synthetic oligonucleotide
ucucguuugggcuggaugu

SEQ ID NO: 2456125 - RNA, 19 nt, Artificial Sequence
  Description of Artificial Sequence: Synthetic oligonucleotide
uuuuccuguggaccagucg

SEQ ID NO: 2456126 - RNA, 19 nt, Artificial Sequence
  Description of Artificial Sequence: Synthetic oligonucleotide
auuaccaccagcugagccu

SEQ ID NO: 2456127 - RNA, 19 nt, Artificial Sequence
  Description of Artificial Sequence: Synthetic oligonucleotide
uuccgaguuaaccugugug

SEQ ID NO: 2456128 - RNA, 19 nt, Artificial Sequence
  Description of Artificial Sequence: Synthetic oligonucleotide
gaagacuaccagcucaaug

SEQ ID NO: 2456129 - RNA, 19 nt, Artificial Sequence
  Description of Artificial Sequence: Synthetic oligonucleotide
uuuccagcuuggcaauucg

SEQ ID NO: 2456130 - RNA, 19 nt, Artificial Sequence
  Description of Artificial Sequence: Synthetic oligonucleotide
aauguaucggggccauuug

SEQ ID NO: 2456131 - RNA, 19 nt, Artificial Sequence
  Description of Artificial Sequence: Synthetic oligonucleotide
uccgacacagggcaggcag

SEQ ID NO: 2456132 - RNA, 19 nt, Artificial Sequence
  Description of Artificial Sequence: Synthetic oligonucleotide
ucggaucucaucauaucug

SEQ ID NO: 2456133 - RNA, 19 nt, Artificial Sequence
  Description of Artificial Sequence: Synthetic oligonucleotide
uuugacgaagcgugugagg

SEQ ID NO: 2456134 - RNA, 19 nt, Artificial Sequence
  Description of Artificial Sequence: Synthetic oligonucleotide
cagcuuggcaauucgagcc

SEQ ID NO: 2456135 - RNA, 19 nt, Artificial Sequence
  Description of Artificial Sequence: Synthetic oligonucleotide
gacauugccuccccagugg

SEQ ID NO: 2456136 - RNA, 19 nt, Artificial Sequence
  Description of Artificial Sequence: Synthetic oligonucleotide
auagaggauggcccuuugc

SEQ ID NO: 2456137 - RNA, 19 nt, Artificial Sequence
  Description of Artificial Sequence: Synthetic oligonucleotide
gauuaccaccagcugagcc

SEQ ID NO: 2456138 - RNA, 19 nt, Artificial Sequence
  Description of Artificial Sequence: Synthetic oligonucleotide
uguuugccgguccagggcc

SEQ ID NO: 2456139 - RNA, 19 nt, Artificial Sequence
  Description of Artificial Sequence: Synthetic oligonucleotide
ugcucgaagaacagguggc

SEQ ID NO: 2456140 - RNA, 19 nt, Artificial Sequence
  Description of Artificial Sequence: Synthetic oligonucleotide
uccgaguuaaccuguguga

SEQ ID NO: 2456141 - RNA, 19 nt, Artificial Sequence
  Description of Artificial Sequence: Synthetic oligonucleotide
ugucuuccgaguuaaccug

SEQ ID NO: 2456142 - RNA, 19 nt, Artificial Sequence
  Description of Artificial Sequence: Synthetic oligonucleotide
agccaaagcacccuugucu

SEQ ID NO: 2456143 - RNA, 19 nt, Artificial Sequence
  Description of Artificial Sequence: Synthetic oligonucleotide
uguaucggggccauuugac

SEQ ID NO: 2456144 - RNA, 19 nt, Artificial Sequence
  Description of Artificial Sequence: Synthetic oligonucleotide
cagguggccucuuaguugg

SEQ ID NO: 2456145 - RNA, 19 nt, Artificial Sequence
  Description of Artificial Sequence: Synthetic oligonucleotide
uuuagccuuugccuuuucc

SEQ ID NO: 2456146 - RNA, 19 nt, Artificial Sequence
  Description of Artificial Sequence: Synthetic oligonucleotide
aaaggguucaccaccuucu

SEQ ID NO: 2456147 - RNA, 19 nt, Artificial Sequence
  Description of Artificial Sequence: Synthetic oligonucleotide
cuggguagcuguuugccgg

SEQ ID NO: 2456148 - RNA, 19 nt, Artificial Sequence
  Description of Artificial Sequence: Synthetic oligonucleotide
cuugucuuccgaguuaacc

SEQ ID NO: 2456149 - RNA, 19 nt, Artificial Sequence
  Description of Artificial Sequence: Synthetic oligonucleotide
agaacagguggccucuuag

SEQ ID NO: 2456150 - RNA, 19 nt, Artificial Sequence
  Description of Artificial Sequence: Synthetic oligonucleotide
agacuaccagcucaauggg

SEQ ID NO: 2456151 - RNA, 19 nt, Artificial Sequence
  Description of Artificial Sequence: Synthetic oligonucleotide
caggaggaacuuuaagccg

SEQ ID NO: 2456152 - RNA, 19 nt, Artificial Sequence
  Description of Artificial Sequence: Synthetic oligonucleotide
ucugucguuguaauugguc

SEQ ID NO: 2456153 - RNA, 19 nt, Artificial Sequence
  Description of Artificial Sequence: Synthetic oligonucleotide
uugacgaagcgugugaggu

SEQ ID NO: 2456154 - RNA, 19 nt, Artificial Sequence
  Description of Artificial Sequence: Synthetic oligonucleotide
auggggucuacaucguggg

SEQ ID NO: 2456155 - RNA, 19 nt, Artificial Sequence
  Description of Artificial Sequence: Synthetic oligonucleotide
uaucggggccauuugacga

SEQ ID NO: 2456156 - RNA, 19 nt, Artificial Sequence
  Description of Artificial Sequence: Synthetic oligonucleotide
acuuuaagccgcuuauaga

SEQ ID NO: 2456157 - RNA, 19 nt, Artificial Sequence
  Description of Artificial Sequence: Synthetic oligonucleotide
acauugccuccccaguggc

SEQ ID NO: 2456158 - RNA, 19 nt, Artificial Sequence
  Description of Artificial Sequence: Synthetic oligonucleotide
gauguccugcccaaugccg

SEQ ID NO: 2456159 - RNA, 19 nt, Artificial Sequence
  Description of Artificial Sequence: Synthetic oligonucleotide
uggauguccugcccaaugc

SEQ ID NO: 2456160 - RNA, 19 nt, Artificial Sequence
  Description of Artificial Sequence: Synthetic oligonucleotide
ucuuguucuccaccaaggu

SEQ ID NO: 2456161 - RNA, 19 nt, Artificial Sequence
  Description of Artificial Sequence: Synthetic oligonucleotide
cuguguugacuccugcucg

SEQ ID NO: 2456162 - RNA, 19 nt, Artificial Sequence
  Description of Artificial Sequence: Synthetic oligonucleotide
gguccuaauagcuuccacc

SEQ ID NO: 2456163 - RNA, 19 nt, Artificial Sequence
  Description of Artificial Sequence: Synthetic oligonucleotide
aucucaucauaucugucgu

SEQ ID NO: 2456164 - RNA, 19 nt, Artificial Sequence
  Description of Artificial Sequence: Synthetic oligonucleotide
aaagcacccuugucuuccg

SEQ ID NO: 2456165 - RNA, 19 nt, Artificial Sequence
  Description of Artificial Sequence: Synthetic oligonucleotide
auagcuuccaccagcuuag

SEQ ID NO: 2456166 - RNA, 19 nt, Artificial Sequence
  Description of Artificial Sequence: Synthetic oligonucleotide
guaucggggccauuugacg

SEQ ID NO: 2456167 - RNA, 19 nt, Artificial Sequence
  Description of Artificial Sequence: Synthetic oligonucleotide
guccuaauagcuuccacca

SEQ ID NO: 2456168 - RNA, 19 nt, Artificial Sequence
  Description of Artificial Sequence: Synthetic oligonucleotide
uaggccucuucucaaacaa

SEQ ID NO: 2456169 - RNA, 19 nt, Artificial Sequence
  Description of Artificial Sequence: Synthetic oligonucleotide
gaugaugcaguaggggacc

SEQ ID NO: 2456170 - RNA, 19 nt, Artificial Sequence
  Description of Artificial Sequence: Synthetic oligonucleotide
guuucuucacgacggcggg

SEQ ID NO: 2456171 - RNA, 19 nt, Artificial Sequence
  Description of Artificial Sequence: Synthetic oligonucleotide
ugucguuguaauugguccu

SEQ ID NO: 2456172 - RNA, 19 nt, Artificial Sequence
  Description of Artificial Sequence: Synthetic oligonucleotide
ucuuccgacacagggcagg

SEQ ID NO: 2456173 - RNA, 19 nt, Artificial Sequence
  Description of Artificial Sequence: Synthetic oligonucleotide
ugcagccgaauguaucggg

SEQ ID NO: 2456174 - RNA, 19 nt, Artificial Sequence
  Description of Artificial Sequence: Synthetic oligonucleotide
cauguuuuccuguggacca

SEQ ID NO: 2456175 - RNA, 19 nt, Artificial Sequence
  Description of Artificial Sequence: Synthetic oligonucleotide
ugccgaaguucuuaggccu

SEQ ID NO: 2456176 - RNA, 19 nt, Artificial Sequence
  Description of Artificial Sequence: Synthetic oligonucleotide
uguugacuccugcucgaag

SEQ ID NO: 2456177 - RNA, 19 nt, Artificial Sequence
  Description of Artificial Sequence: Synthetic oligonucleotide
uccuaauagcuuccaccag

SEQ ID NO: 2456178 - RNA, 19 nt, Artificial Sequence
  Description of Artificial Sequence: Synthetic oligonucleotide
aacugguuaauggcaggag

SEQ ID NO: 2456179 - RNA, 19 nt, Artificial Sequence
  Description of Artificial Sequence: Synthetic oligonucleotide
uuaggccucuucucaaaca

SEQ ID NO: 2456180 - RNA, 19 nt, Artificial Sequence
  Description of Artificial Sequence: Synthetic oligonucleotide
gcugcagccgaauguaucg

SEQ ID NO: 2456181 - RNA, 19 nt, Artificial Sequence
  Description of Artificial Sequence: Synthetic oligonucleotide
aguugggacauccccuuug

SEQ ID NO: 2456182 - RNA, 19 nt, Artificial Sequence
  Description of Artificial Sequence: Synthetic oligonucleotide
agccacagauuuaggaccc

SEQ ID NO: 2456183 - RNA, 19 nt, Artificial Sequence
  Description of Artificial Sequence: Synthetic oligonucleotide
aacaaaggguucaccaccu

SEQ ID NO: 2456184 - RNA, 19 nt, Artificial Sequence
  Description of Artificial Sequence: Synthetic oligonucleotide
aguggcgucggaucucauc

SEQ ID NO: 2456185 - RNA, 19 nt, Artificial Sequence
  Description of Artificial Sequence: Synthetic oligonucleotide
ccuaauagcuuccaccagc

SEQ ID NO: 2456186 - RNA, 19 nt, Artificial Sequence
  Description of Artificial Sequence: Synthetic oligonucleotide
acggugguacauguuuucc

SEQ ID NO: 2456187 - RNA, 19 nt, Artificial Sequence
  Description of Artificial Sequence: Synthetic oligonucleotide
aauggcaggaggaacuuua

SEQ ID NO: 2456188 - RNA, 19 nt, Artificial Sequence
  Description of Artificial Sequence: Synthetic oligonucleotide
auuugacgaagcgugugag

SEQ ID NO: 2456189 - RNA, 19 nt, Artificial Sequence
  Description of Artificial Sequence: Synthetic oligonucleotide
guggugacuguguugacuc

SEQ ID NO: 2456190 - RNA, 19 nt, Artificial Sequence
  Description of Artificial Sequence: Synthetic oligonucleotide
uggaccagucgucccagcc

SEQ ID NO: 2456191 - RNA, 19 nt, Artificial Sequence
  Description of Artificial Sequence: Synthetic oligonucleotide
acauuuaacccaguuuagu

SEQ ID NO: 2456192 - RNA, 19 nt, Artificial Sequence
  Description of Artificial Sequence: Synthetic oligonucleotide
guucuuaggccucuucuca

SEQ ID NO: 2456193 - RNA, 19 nt, Artificial Sequence
  Description of Artificial Sequence: Synthetic oligonucleotide
uguguugacuccugcucga

SEQ ID NO: 2456194 - RNA, 19 nt, Artificial Sequence
  Description of Artificial Sequence: Synthetic oligonucleotide
cagauuuaggacccaggac

SEQ ID NO: 2456195 - RNA, 19 nt, Artificial Sequence
  Description of Artificial Sequence: Synthetic oligonucleotide
uggcaggaggaacuuuaag

SEQ ID NO: 2456196 - RNA, 19 nt, Artificial Sequence
  Description of Artificial Sequence: Synthetic oligonucleotide
aaggcaacggugguacaug

SEQ ID NO: 2456197 - RNA, 19 nt, Artificial Sequence
  Description of Artificial Sequence: Synthetic oligonucleotide
ucgaagaacagguggccuc

SEQ ID NO: 2456198 - RNA, 19 nt, Artificial Sequence
  Description of Artificial Sequence: Synthetic oligonucleotide
aagccgcuuauagaggaug

SEQ ID NO: 2456199 - RNA, 19 nt, Artificial Sequence
  Description of Artificial Sequence: Synthetic oligonucleotide
uuaguugggacauccccuu

SEQ ID NO: 2456200 - RNA, 19 nt, Artificial Sequence
  Description of Artificial Sequence: Synthetic oligonucleotide
caucuuccgacacagggca

SEQ ID NO: 2456201 - RNA, 19 nt, Artificial Sequence
  Description of Artificial Sequence: Synthetic oligonucleotide
gaccagucgucccagccug

SEQ ID NO: 2456202 - RNA, 19 nt, Artificial Sequence
  Description of Artificial Sequence: Synthetic oligonucleotide
uaguagcgaguucuuuagc

SEQ ID NO: 2456203 - RNA, 19 nt, Artificial Sequence
  Description of Artificial Sequence: Synthetic oligonucleotide
gacuaccagcucaaugggg

SEQ ID NO: 2456204 - RNA, 19 nt, Artificial Sequence
  Description of Artificial Sequence: Synthetic oligonucleotide
guggcgucggaucucauca

SEQ ID NO: 2456205 - RNA, 19 nt, Artificial Sequence
  Description of Artificial Sequence: Synthetic oligonucleotide
ucuuccgaguuaaccugug

SEQ ID NO: 2456206 - RNA, 19 nt, Artificial Sequence
  Description of Artificial Sequence: Synthetic oligonucleotide
agcacccuugucuuccgag

SEQ ID NO: 2456207 - RNA, 19 nt, Artificial Sequence
  Description of Artificial Sequence: Synthetic oligonucleotide
caggacauugccuccccag

SEQ ID NO: 2456208 - RNA, 19 nt, Artificial Sequence
  Description of Artificial Sequence: Synthetic oligonucleotide
guaauugguccuaauagcu

SEQ ID NO: 2456209 - RNA, 19 nt, Artificial Sequence
  Description of Artificial Sequence: Synthetic oligonucleotide
cagcuuagccaaagcaccc

SEQ ID NO: 2456210 - RNA, 19 nt, Artificial Sequence
  Description of Artificial Sequence: Synthetic oligonucleotide
gacuccugcucgaagaaca

SEQ ID NO: 2456211 - RNA, 19 nt, Artificial Sequence
  Description of Artificial Sequence: Synthetic oligonucleotide
cuuaggccucuucucaaac

SEQ ID NO: 2456212 - RNA, 19 nt, Artificial Sequence
  Description of Artificial Sequence: Synthetic oligonucleotide
ugacuguguugacuccugc

SEQ ID NO: 2456213 - RNA, 19 nt, Artificial Sequence
  Description of Artificial Sequence: Synthetic oligonucleotide
caaugccgaaguucuuagg

SEQ ID NO: 2456214 - RNA, 19 nt, Artificial Sequence
  Description of Artificial Sequence: Synthetic oligonucleotide
cuuucccuugaugaugcag

SEQ ID NO: 2456215 - RNA, 19 nt, Artificial Sequence
  Description of Artificial Sequence: Synthetic oligonucleotide
ggggucuacaucgugggcg

SEQ ID NO: 2456216 - RNA, 19 nt, Artificial Sequence
  Description of Artificial Sequence: Synthetic oligonucleotide
auguaucggggccauuuga

SEQ ID NO: 2456217 - RNA, 19 nt, Artificial Sequence
  Description of Artificial Sequence: Synthetic oligonucleotide
gucucguuugggcuggaug

SEQ ID NO: 2456218 - RNA, 19 nt, Artificial Sequence
  Description of Artificial Sequence: Synthetic oligonucleotide
ucuacaucgugggcgauua

SEQ ID NO: 2456219 - RNA, 19 nt, Artificial Sequence
  Description of Artificial Sequence: Synthetic oligonucleotide
aggaacuuuaagccgcuua

SEQ ID NO: 2456220 - RNA, 19 nt, Artificial Sequence
  Description of Artificial Sequence: Synthetic oligonucleotide
ggccauuugacgaagcgug

SEQ ID NO: 2456221 - RNA, 19 nt, Artificial Sequence
  Description of Artificial Sequence: Synthetic oligonucleotide
uacuugugggcaagcuuga

SEQ ID NO: 2456222 - RNA, 19 nt, Artificial Sequence
  Description of Artificial Sequence: Synthetic oligonucleotide
uuccagcuuggcaauucga

SEQ ID NO: 2456223 - RNA, 19 nt, Artificial Sequence
  Description of Artificial Sequence: Synthetic oligonucleotide
cagccgaauguaucggggc

SEQ ID NO: 2456224 - RNA, 19 nt, Artificial Sequence
  Description of Artificial Sequence: Synthetic oligonucleotide
cucuucucaaacaaagggu

SEQ ID NO: 2456225 - RNA, 19 nt, Artificial Sequence
  Description of Artificial Sequence: Synthetic oligonucleotide
cuguuugccgguccagggc

SEQ ID NO: 2456226 - RNA, 19 nt, Artificial Sequence
  Description of Artificial Sequence: Synthetic oligonucleotide
uuucuucacgacggcgggg

SEQ ID NO: 2456227 - RNA, 19 nt, Artificial Sequence
  Description of Artificial Sequence: Synthetic oligonucleotide
uggccucuuaguugggaca

SEQ ID NO: 2456228 - RNA, 19 nt, Artificial Sequence
  Description of Artificial Sequence: Synthetic oligonucleotide
cucuuaguugggacauccc

SEQ ID NO: 2456229 - RNA, 19 nt, Artificial Sequence
  Description of Artificial Sequence: Synthetic oligonucleotide
gaacugguuaauggcagga

SEQ ID NO: 2456230 - RNA, 19 nt, Artificial Sequence
  Description of Artificial Sequence: Synthetic oligonucleotide
ggcaauucgagccacagau

SEQ ID NO: 2456231 - RNA, 19 nt, Artificial Sequence
  Description of Artificial Sequence: Synthetic oligonucleotide
cauuugacgaagcguguga

SEQ ID NO: 2456232 - RNA, 19 nt, Artificial Sequence
  Description of Artificial Sequence: Synthetic oligonucleotide
uucccuugggcaucuugcu

SEQ ID NO: 2456233 - RNA, 19 nt, Artificial Sequence
  Description of Artificial Sequence: Synthetic oligonucleotide
ggcgauuaccaccagcuga

SEQ ID NO: 2456234 - RNA, 19 nt, Artificial Sequence
  Description of Artificial Sequence: Synthetic oligonucleotide
agcuuggcaauucgagcca

SEQ ID NO: 2456235 - RNA, 19 nt, Artificial Sequence
  Description of Artificial Sequence: Synthetic oligonucleotide
auugccuccccaguggcgu

SEQ ID NO: 2456236 - RNA, 19 nt, Artificial Sequence
  Description of Artificial Sequence: Synthetic oligonucleotide
cuuaguugggacauccccu

SEQ ID NO: 2456237 - RNA, 19 nt, Artificial Sequence
  Description of Artificial Sequence: Synthetic oligonucleotide
augaugcaguaggggaccc

SEQ ID NO: 2456238 - RNA, 19 nt, Artificial Sequence
  Description of Artificial Sequence: Synthetic oligonucleotide
cauugccuccccaguggcg

SEQ ID NO: 2456239 - RNA, 19 nt, Artificial Sequence
  Description of Artificial Sequence: Synthetic oligonucleotide
ugguccuaauagcuuccac

SEQ ID NO: 2456240 - RNA, 19 nt, Artificial Sequence
  Description of Artificial Sequence: Synthetic oligonucleotide
uagcgaguucuuuagccuu

SEQ ID NO: 2456241 - RNA, 19 nt, Artificial Sequence
  Description of Artificial Sequence: Synthetic oligonucleotide
uccugcccaaugccgaagu

SEQ ID NO: 2456242 - RNA, 19 nt, Artificial Sequence
  Description of Artificial Sequence: Synthetic oligonucleotide
gaggucucguuugggcugg

SEQ ID NO: 2456243 - RNA, 19 nt, Artificial Sequence
  Description of Artificial Sequence: Synthetic oligonucleotide
agcuguuugccgguccagg

SEQ ID NO: 2456244 - RNA, 19 nt, Artificial Sequence
  Description of Artificial Sequence: Synthetic oligonucleotide
gcuguuugccgguccaggg

SEQ ID NO: 2456245 - RNA, 19 nt, Artificial Sequence
  Description of Artificial Sequence: Synthetic oligonucleotide
ggacccaggacauugccuc

SEQ ID NO: 2456246 - RNA, 19 nt, Artificial Sequence
  Description of Artificial Sequence: Synthetic oligonucleotide
aagcgugugaggucucguu

SEQ ID NO: 2456247 - RNA, 19 nt, Artificial Sequence
  Description of Artificial Sequence: Synthetic oligonucleotide
uccuguggaccagucgucc

SEQ ID NO: 2456248 - RNA, 19 nt, Artificial Sequence
  Description of Artificial Sequence: Synthetic oligonucleotide
uguggaccagucgucccag

SEQ ID NO: 2456249 - RNA, 19 nt, Artificial Sequence
  Description of Artificial Sequence: Synthetic oligonucleotide
agccgcuuauagaggaugg

SEQ ID NO: 2456250 - RNA, 19 nt, Artificial Sequence
  Description of Artificial Sequence: Synthetic oligonucleotide
cauccccuuugccagcagc

SEQ ID NO: 2456251 - RNA, 19 nt, Artificial Sequence
  Description of Artificial Sequence: Synthetic oligonucleotide
uuaauggcaggaggaacuu

SEQ ID NO: 2456252 - RNA, 19 nt, Artificial Sequence
  Description of Artificial Sequence: Synthetic oligonucleotide
uaacccaguuuaguagcga

SEQ ID NO: 2456253 - RNA, 19 nt, Artificial Sequence
  Description of Artificial Sequence: Synthetic oligonucleotide
ggggccauuugacgaagcg

SEQ ID NO: 2456254 - RNA, 19 nt, Artificial Sequence
  Description of Artificial Sequence: Synthetic oligonucleotide
aaggguucaccaccuucuu

SEQ ID NO: 2456255 - RNA, 19 nt, Artificial Sequence
  Description of Artificial Sequence: Synthetic oligonucleotide
agucgucccagccuggcuu

SEQ ID NO: 2456256 - RNA, 19 nt, Artificial Sequence
  Description of Artificial Sequence: Synthetic oligonucleotide
uuauagaggauggcccuuu

SEQ ID NO: 2456257 - RNA, 19 nt, Artificial Sequence
  Description of Artificial Sequence: Synthetic oligonucleotide
uaagccgcuuauagaggau

SEQ ID NO: 2456258 - RNA, 19 nt, Artificial Sequence
  Description of Artificial Sequence: Synthetic oligonucleotide
gcgauuaccaccagcugag

SEQ ID NO: 2456259 - RNA, 19 nt, Artificial Sequence
  Description of Artificial Sequence: Synthetic oligonucleotide
gcuggguagcuguuugccg

SEQ ID NO: 2456260 - RNA, 19 nt, Artificial Sequence
  Description of Artificial Sequence: Synthetic oligonucleotide
cgcuuauagaggauggccc

SEQ ID NO: 2456261 - RNA, 19 nt, Artificial Sequence
  Description of Artificial Sequence: Synthetic oligonucleotide
uggggucuacaucgugggc

SEQ ID NO: 2456262 - RNA, 19 nt, Artificial Sequence
  Description of Artificial Sequence: Synthetic oligonucleotide
uggugacuguguugacucc

SEQ ID NO: 2456263 - RNA, 19 nt, Artificial Sequence
  Description of Artificial Sequence: Synthetic oligonucleotide
ccagcuuggcaauucgagc

SEQ ID NO: 2456264 - RNA, 19 nt, Artificial Sequence
  Description of Artificial Sequence: Synthetic oligonucleotide
uucccuugaugaugcagua

SEQ ID NO: 2456265 - RNA, 19 nt, Artificial Sequence
  Description of Artificial Sequence: Synthetic oligonucleotide
guagcgaguucuuuagccu

SEQ ID NO: 2456266 - RNA, 19 nt, Artificial Sequence
  Description of Artificial Sequence: Synthetic oligonucleotide
guagcuguuugccggucca

SEQ ID NO: 2456267 - RNA, 19 nt, Artificial Sequence
  Description of Artificial Sequence: Synthetic oligonucleotide
uguuuuccuguggaccagu

SEQ ID NO: 2456268 - RNA, 19 nt, Artificial Sequence
  Description of Artificial Sequence: Synthetic oligonucleotide
ucucaucauaucugucguu

SEQ ID NO: 2456269 - RNA, 19 nt, Artificial Sequence
  Description of Artificial Sequence: Synthetic oligonucleotide
aggcaacggugguacaugu

SEQ ID NO: 2456270 - RNA, 19 nt, Artificial Sequence
  Description of Artificial Sequence: Synthetic oligonucleotide
agcgugugaggucucguuu

SEQ ID NO: 2456271 - RNA, 19 nt, Artificial Sequence
  Description of Artificial Sequence: Synthetic oligonucleotide
caguuuaguagcgaguucu

SEQ ID NO: 2456272 - RNA, 19 nt, Artificial Sequence
  Description of Artificial Sequence: Synthetic oligonucleotide
ggacauugccuccccagug

SEQ ID NO: 2456273 - RNA, 19 nt, Artificial Sequence
  Description of Artificial Sequence: Synthetic oligonucleotide
gacgaagcgugugaggucu

SEQ ID NO: 2456274 - RNA, 19 nt, Artificial Sequence
  Description of Artificial Sequence: Synthetic oligonucleotide
cugggugaacugguuaaug

SEQ ID NO: 2456275 - RNA, 19 nt, Artificial Sequence
  Description of Artificial Sequence: Synthetic oligonucleotide
caauucgagccacagauuu

SEQ ID NO: 2456276 - RNA, 19 nt, Artificial Sequence
  Description of Artificial Sequence: Synthetic oligonucleotide
ugcuuugucucuggccugu

SEQ ID NO: 2456277 - RNA, 19 nt, Artificial Sequence
  Description of Artificial Sequence: Synthetic oligonucleotide
cgagccacagauuuaggac

SEQ ID NO: 2456278 - RNA, 19 nt, Artificial Sequence
  Description of Artificial Sequence: Synthetic oligonucleotide
uggguagcuguuugccggu

SEQ ID NO: 2456279 - RNA, 19 nt, Artificial Sequence
  Description of Artificial Sequence: Synthetic oligonucleotide
ggcuuucccuugaugaugc

SEQ ID NO: 2456280 - RNA, 19 nt, Artificial Sequence
  Description of Artificial Sequence: Synthetic oligonucleotide
gugggcgauuaccaccagc

SEQ ID NO: 2456281 - RNA, 19 nt, Artificial Sequence
  Description of Artificial Sequence: Synthetic oligonucleotide
uugccgcugcagccgaaug

SEQ ID NO: 2456282 - RNA, 19 nt, Artificial Sequence
  Description of Artificial Sequence: Synthetic oligonucleotide
cugcccaaugccgaaguuc

SEQ ID NO: 2456283 - RNA, 19 nt, Artificial Sequence
  Description of Artificial Sequence: Synthetic oligonucleotide
gaacagguggccucuuagu

SEQ ID NO: 2456284 - RNA, 19 nt, Artificial Sequence
  Description of Artificial Sequence: Synthetic oligonucleotide
aucggggccauuugacgaa

SEQ ID NO: 2456285 - RNA, 19 nt, Artificial Sequence
  Description of Artificial Sequence: Synthetic oligonucleotide
agcacgggccaacagucuu

SEQ ID NO: 2456286 - RNA, 19 nt, Artificial Sequence
  Description of Artificial Sequence: Synthetic oligonucleotide
gguagcuguuugccggucc

SEQ ID NO: 2456287 - RNA, 19 nt, Artificial Sequence
  Description of Artificial Sequence: Synthetic oligonucleotide
uguccugcccaaugccgaa

SEQ ID NO: 2456288 - RNA, 19 nt, Artificial Sequence
  Description of Artificial Sequence: Synthetic oligonucleotide
ccucuuaguugggacaucc

SEQ ID NO: 2456289 - RNA, 19 nt, Artificial Sequence
  Description of Artificial Sequence: Synthetic oligonucleotide
aagcacccuugucuuccga

SEQ ID NO: 2456290 - RNA, 19 nt, Artificial Sequence
  Description of Artificial Sequence: Synthetic oligonucleotide
ggaacuuuaagccgcuuau

SEQ ID NO: 2456291 - RNA, 19 nt, Artificial Sequence
  Description of Artificial Sequence: Synthetic oligonucleotide
acgggccaacagucuuugc

SEQ ID NO: 2456292 - RNA, 19 nt, Artificial Sequence
  Description of Artificial Sequence: Synthetic oligonucleotide
uucucagcacgggccaaca

SEQ ID NO: 2456293 - RNA, 19 nt, Artificial Sequence
  Description of Artificial Sequence: Synthetic oligonucleotide
gcagccgaauguaucgggg

SEQ ID NO: 2456294 - RNA, 19 nt, Artificial Sequence
  Description of Artificial Sequence: Synthetic oligonucleotide
cagcuggguagcuguuugc

SEQ ID NO: 2456295 - RNA, 19 nt, Artificial Sequence
  Description of Artificial Sequence: Synthetic oligonucleotide
aggaagacuaccagcucaa

SEQ ID NO: 2456296 - RNA, 19 nt, Artificial Sequence
  Description of Artificial Sequence: Synthetic oligonucleotide
gaacuuuaagccgcuuaua

SEQ ID NO: 2456297 - RNA, 19 nt, Artificial Sequence
  Description of Artificial Sequence: Synthetic oligonucleotide
gcgugugaggucucguuug

SEQ ID NO: 2456298 - RNA, 19 nt, Artificial Sequence
  Description of Artificial Sequence: Synthetic oligonucleotide
gugaggucucguuugggcu

SEQ ID NO: 2456299 - RNA, 19 nt, Artificial Sequence
  Description of Artificial Sequence: Synthetic oligonucleotide
gugacuguguugacuccug

SEQ ID NO: 2456300 - RNA, 19 nt, Artificial Sequence
  Description of Artificial Sequence: Synthetic oligonucleotide
gauggcccuuugccgcugc

SEQ ID NO: 2456301 - RNA, 19 nt, Artificial Sequence
  Description of Artificial Sequence: Synthetic oligonucleotide
uagcuguuugccgguccag

SEQ ID NO: 2456302 - RNA, 19 nt, Artificial Sequence
  Description of Artificial Sequence: Synthetic oligonucleotide
gugugaggucucguuuggg

SEQ ID NO: 2456303 - RNA, 19 nt, Artificial Sequence
  Description of Artificial Sequence: Synthetic oligonucleotide
ccgcuuauagaggauggcc

SEQ ID NO: 2456304 - RNA, 19 nt, Artificial Sequence
  Description of Artificial Sequence: Synthetic oligonucleotide
ggcccuuugccgcugcagc

SEQ ID NO: 2456305 - RNA, 19 nt, Artificial Sequence
  Description of Artificial Sequence: Synthetic oligonucleotide
ucggggccauuugacgaag

SEQ ID NO: 2456306 - RNA, 19 nt, Artificial Sequence
  Description of Artificial Sequence: Synthetic oligonucleotide
ucguuguaauugguccuaa

SEQ ID NO: 2456307 - RNA, 19 nt, Artificial Sequence
  Description of Artificial Sequence: Synthetic oligonucleotide
auguccugcccaaugccga

SEQ ID NO: 2456308 - RNA, 19 nt, Artificial Sequence
  Description of Artificial Sequence: Synthetic oligonucleotide
uggcccuuugccgcugcag

SEQ ID NO: 2456309 - RNA, 19 nt, Artificial Sequence
  Description of Artificial Sequence: Synthetic oligonucleotide
uuugccgcugcagccgaau

SEQ ID NO: 2456310 - RNA, 19 nt, Artificial Sequence
  Description of Artificial Sequence: Synthetic oligonucleotide
gcucaauggggucuacauc

SEQ ID NO: 2456311 - RNA, 19 nt, Artificial Sequence
  Description of Artificial Sequence: Synthetic oligonucleotide
gacauccccuuugccagca

SEQ ID NO: 2456312 - RNA, 19 nt, Artificial Sequence
  Description of Artificial Sequence: Synthetic oligonucleotide
acccaguuuaguagcgagu

SEQ ID NO: 2456313 - RNA, 19 nt, Artificial Sequence
  Description of Artificial Sequence: Synthetic oligonucleotide
aggacccaggacauugccu

SEQ ID NO: 2456314 - RNA, 19 nt, Artificial Sequence
  Description of Artificial Sequence: Synthetic oligonucleotide
aguuuaguagcgaguucuu

SEQ ID NO: 2456315 - RNA, 19 nt, Artificial Sequence
  Description of Artificial Sequence: Synthetic oligonucleotide
gcuuauagaggauggcccu

SEQ ID NO: 2456316 - RNA, 19 nt, Artificial Sequence
  Description of Artificial Sequence: Synthetic oligonucleotide
cucagcacgggccaacagu

SEQ ID NO: 2456317 - RNA, 19 nt, Artificial Sequence
  Description of Artificial Sequence: Synthetic oligonucleotide
uuugccgguccagggccug

SEQ ID NO: 2456318 - RNA, 19 nt, Artificial Sequence
  Description of Artificial Sequence: Synthetic oligonucleotide
acccuugucuuccgaguua

SEQ ID NO: 2456319 - RNA, 19 nt, Artificial Sequence
  Description of Artificial Sequence: Synthetic oligonucleotide
uaguugggacauccccuuu

SEQ ID NO: 2456320 - RNA, 19 nt, Artificial Sequence
  Description of Artificial Sequence: Synthetic oligonucleotide
caccaagguggugacugug

SEQ ID NO: 2456321 - RNA, 19 nt, Artificial Sequence
  Description of Artificial Sequence: Synthetic oligonucleotide
gaaggcaacggugguacau

SEQ ID NO: 2456322 - RNA, 19 nt, Artificial Sequence
  Description of Artificial Sequence: Synthetic oligonucleotide
acaaaggguucaccaccuu

SEQ ID NO: 2456323 - RNA, 19 nt, Artificial Sequence
  Description of Artificial Sequence: Synthetic oligonucleotide
cgaguuaaccugugugaag

SEQ ID NO: 2456324 - RNA, 19 nt, Artificial Sequence
  Description of Artificial Sequence: Synthetic oligonucleotide
cacgggccaacagucuuug

SEQ ID NO: 2456325 - RNA, 19 nt, Artificial Sequence
  Description of Artificial Sequence: Synthetic oligonucleotide
gggucuacaucgugggcga

SEQ ID NO: 2456326 - RNA, 19 nt, Artificial Sequence
  Description of Artificial Sequence: Synthetic oligonucleotide
cucguuugggcuggauguc

SEQ ID NO: 2456327 - RNA, 19 nt, Artificial Sequence
  Description of Artificial Sequence: Synthetic oligonucleotide
gucguuguaauugguccua

SEQ ID NO: 2456328 - RNA, 19 nt, Artificial Sequence
  Description of Artificial Sequence: Synthetic oligonucleotide
ccugcucgaagaacaggug

SEQ ID NO: 2456329 - RNA, 19 nt, Artificial Sequence
  Description of Artificial Sequence: Synthetic oligonucleotide
gggcaucuugcucggcugc

SEQ ID NO: 2456330 - RNA, 19 nt, Artificial Sequence
  Description of Artificial Sequence: Synthetic oligonucleotide
ccauuugacgaagcgugug

SEQ ID NO: 2456331 - RNA, 19 nt, Artificial Sequence
  Description of Artificial Sequence: Synthetic oligonucleotide
ccuguggaccagucguccc

SEQ ID NO: 2456332 - RNA, 19 nt, Artificial Sequence
  Description of Artificial Sequence: Synthetic oligonucleotide
uugccgguccagggccugg

SEQ ID NO: 2456333 - RNA, 19 nt, Artificial Sequence
  Description of Artificial Sequence: Synthetic oligonucleotide
aguguacauuuaacccagu

SEQ ID NO: 2456334 - RNA, 19 nt, Artificial Sequence
  Description of Artificial Sequence: Synthetic oligonucleotide
cgugugaggucucguuugg

SEQ ID NO: 2456335 - RNA, 19 nt, Artificial Sequence
  Description of Artificial Sequence: Synthetic oligonucleotide
cuacaucgugggcgauuac

SEQ ID NO: 2456336 - RNA, 19 nt, Artificial Sequence
  Description of Artificial Sequence: Synthetic oligonucleotide
gccugggugaacugguuaa

SEQ ID NO: 2456337 - RNA, 19 nt, Artificial Sequence
  Description of Artificial Sequence: Synthetic oligonucleotide
gggcgauuaccaccagcug

SEQ ID NO: 2456338 - RNA, 19 nt, Artificial Sequence
  Description of Artificial Sequence: Synthetic oligonucleotide
uuccgacacagggcaggca

SEQ ID NO: 2456339 - RNA, 19 nt, Artificial Sequence
  Description of Artificial Sequence: Synthetic oligonucleotide
aucuuccgacacagggcag

SEQ ID NO: 2456340 - RNA, 19 nt, Artificial Sequence
  Description of Artificial Sequence: Synthetic oligonucleotide
auggcaggaggaacuuuaa

SEQ ID NO: 2456341 - RNA, 19 nt, Artificial Sequence
  Description of Artificial Sequence: Synthetic oligonucleotide
agcgaguucuuuagccuuu

SEQ ID NO: 2456342 - RNA, 19 nt, Artificial Sequence
  Description of Artificial Sequence: Synthetic oligonucleotide
ccacagauuuaggacccag

SEQ ID NO: 2456343 - RNA, 19 nt, Artificial Sequence
  Description of Artificial Sequence: Synthetic oligonucleotide
ccgacacagggcaggcagg

SEQ ID NO: 2456344 - RNA, 19 nt, Artificial Sequence
  Description of Artificial Sequence: Synthetic oligonucleotide
accagucgucccagccugg

SEQ ID NO: 2456345 - RNA, 19 nt, Artificial Sequence
  Description of Artificial Sequence: Synthetic oligonucleotide
cccuuugccgcugcagccg

SEQ ID NO: 2456346 - RNA, 19 nt, Artificial Sequence
  Description of Artificial Sequence: Synthetic oligonucleotide
accagcucaauggggucua

SEQ ID NO: 2456347 - RNA, 19 nt, Artificial Sequence
  Description of Artificial Sequence: Synthetic oligonucleotide
gccgcuuauagaggauggc

SEQ ID NO: 2456348 - RNA, 19 nt, Artificial Sequence
  Description of Artificial Sequence: Synthetic oligonucleotide
guuuaguagcgaguucuuu

SEQ ID NO: 2456349 - RNA, 19 nt, Artificial Sequence
  Description of Artificial Sequence: Synthetic oligonucleotide
ccaaagcacccuugucuuc

SEQ ID NO: 2456350 - RNA, 19 nt, Artificial Sequence
  Description of Artificial Sequence: Synthetic oligonucleotide
gaagcgugugaggucucgu

SEQ ID NO: 2456351 - RNA, 19 nt, Artificial Sequence
  Description of Artificial Sequence: Synthetic oligonucleotide
acgaagcgugugaggucuc

SEQ ID NO: 2456352 - RNA, 19 nt, Artificial Sequence
  Description of Artificial Sequence: Synthetic oligonucleotide
gccuguacuugugggcaag

SEQ ID NO: 2456353 - RNA, 19 nt, Artificial Sequence
  Description of Artificial Sequence: Synthetic oligonucleotide
cucgaagaacagguggccu

SEQ ID NO: 2456354 - RNA, 19 nt, Artificial Sequence
  Description of Artificial Sequence: Synthetic oligonucleotide
gucuuccgaguuaaccugu

SEQ ID NO: 2456355 - RNA, 19 nt, Artificial Sequence
  Description of Artificial Sequence: Synthetic oligonucleotide
ggugacuguguugacuccu

SEQ ID NO: 2456356 - RNA, 19 nt, Artificial Sequence
  Description of Artificial Sequence: Synthetic oligonucleotide
ccuguacuugugggcaagc

SEQ ID NO: 2456357 - RNA, 19 nt, Artificial Sequence
  Description of Artificial Sequence: Synthetic oligonucleotide
gccgaauguaucggggcca

SEQ ID NO: 2456358 - RNA, 19 nt, Artificial Sequence
  Description of Artificial Sequence: Synthetic oligonucleotide
cgucggaucucaucauauc

SEQ ID NO: 2456359 - RNA, 19 nt, Artificial Sequence
  Description of Artificial Sequence: Synthetic oligonucleotide
gcgaguucuuuagccuuug

SEQ ID NO: 2456360 - RNA, 19 nt, Artificial Sequence
  Description of Artificial Sequence: Synthetic oligonucleotide
agccuggcuuucccuugau

SEQ ID NO: 2456361 - RNA, 19 nt, Artificial Sequence
  Description of Artificial Sequence: Synthetic oligonucleotide
cccaggacauugccucccc

SEQ ID NO: 2456362 - RNA, 19 nt, Artificial Sequence
  Description of Artificial Sequence: Synthetic oligonucleotide
cagcucaauggggucuaca

SEQ ID NO: 2456363 - RNA, 19 nt, Artificial Sequence
  Description of Artificial Sequence: Synthetic oligonucleotide
ggcgucggaucucaucaua

SEQ ID NO: 2456364 - RNA, 19 nt, Artificial Sequence
  Description of Artificial Sequence: Synthetic oligonucleotide
guguugacuccugcucgaa

SEQ ID NO: 2456365 - RNA, 19 nt, Artificial Sequence
  Description of Artificial Sequence: Synthetic oligonucleotide
ccgaguuaaccugugugaa

SEQ ID NO: 2456366 - RNA, 19 nt, Artificial Sequence
  Description of Artificial Sequence: Synthetic oligonucleotide
ggccugggugaacugguua

SEQ ID NO: 2456367 - RNA, 19 nt, Artificial Sequence
  Description of Artificial Sequence: Synthetic oligonucleotide
gccgaaguucuuaggccuc

SEQ ID NO: 2456368 - RNA, 19 nt, Artificial Sequence
  Description of Artificial Sequence: Synthetic oligonucleotide
ccagucgucccagccuggc

SEQ ID NO: 2456369 - RNA, 19 nt, Artificial Sequence
  Description of Artificial Sequence: Synthetic oligonucleotide
cgaagcgugugaggucucg

SEQ ID NO: 2456370 - RNA, 19 nt, Artificial Sequence
  Description of Artificial Sequence: Synthetic oligonucleotide
gggccauuugacgaagcgu

SEQ ID NO: 2456371 - RNA, 19 nt, Artificial Sequence
  Description of Artificial Sequence: Synthetic oligonucleotide
ccccaucuuccgacacagg

SEQ ID NO: 2456372 - RNA, 19 nt, Artificial Sequence
  Description of Artificial Sequence: Synthetic oligonucleotide
cggaucucaucauaucugu

SEQ ID NO: 2456373 - RNA, 19 nt, Artificial Sequence
  Description of Artificial Sequence: Synthetic oligonucleotide
gccgcugcagccgaaugua

SEQ ID NO: 2456374 - RNA, 19 nt, Artificial Sequence
  Description of Artificial Sequence: Synthetic oligonucleotide
ggccuguacuugugggcaa

SEQ ID NO: 2456375 - RNA, 19 nt, Artificial Sequence
  Description of Artificial Sequence: Synthetic oligonucleotide
cuuugccgcugcagccgaa

SEQ ID NO: 2456376 - RNA, 19 nt, Artificial Sequence
  Description of Artificial Sequence: Synthetic oligonucleotide
ggaggaacuuuaagccgcu

SEQ ID NO: 2456377 - RNA, 19 nt, Artificial Sequence
  Description of Artificial Sequence: Synthetic oligonucleotide
gucuacaucgugggcgauu

SEQ ID NO: 2456378 - RNA, 19 nt, Artificial Sequence
  Description of Artificial Sequence: Synthetic oligonucleotide
gcuuucccuugaugaugca

SEQ ID NO: 2456379 - RNA, 19 nt, Artificial Sequence
  Description of Artificial Sequence: Synthetic oligonucleotide
cccuugucuuccgaguuaa

SEQ ID NO: 2456380 - RNA, 19 nt, Artificial Sequence
  Description of Artificial Sequence: Synthetic oligonucleotide
cccaguuuaguagcgaguu

SEQ ID NO: 2456381 - RNA, 19 nt, Artificial Sequence
  Description of Artificial Sequence: Synthetic oligonucleotide
cagcacgggccaacagucu

SEQ ID NO: 2456382 - RNA, 19 nt, Artificial Sequence
  Description of Artificial Sequence: Synthetic oligonucleotide
guuugccgguccagggccu

SEQ ID NO: 2456383 - RNA, 19 nt, Artificial Sequence
  Description of Artificial Sequence: Synthetic oligonucleotide
cgggccaacagucuuugcu

SEQ ID NO: 2456384 - RNA, 19 nt, Artificial Sequence
  Description of Artificial Sequence: Synthetic oligonucleotide
ccuuugccgcugcagccga

SEQ ID NO: 2456385 - RNA, 19 nt, Artificial Sequence
  Description of Artificial Sequence: Synthetic oligonucleotide
ccaguggcgucggaucuca

SEQ ID NO: 2456386 - RNA, 19 nt, Artificial Sequence
  Description of Artificial Sequence: Synthetic oligonucleotide
gccauuugacgaagcgugu

SEQ ID NO: 2456387 - RNA, 19 nt, Artificial Sequence
  Description of Artificial Sequence: Synthetic oligonucleotide
cggggccauuugacgaagc

SEQ ID NO: 2456388 - RNA, 19 nt, Artificial Sequence
  Description of Artificial Sequence: Synthetic oligonucleotide
ccggggccaccuucuuccc

SEQ ID NO: 2456389 - RNA, 19 nt, Artificial Sequence
  Description of Artificial Sequence: Synthetic oligonucleotide
gaggaacuuuaagccgcuu

SEQ ID NO: 2456390 - RNA, 19 nt, Artificial Sequence
  Description of Artificial Sequence: Synthetic oligonucleotide
gcgucggaucucaucauau

SEQ ID NO: 2456391 - RNA, 19 nt, Artificial Sequence
  Description of Artificial Sequence: Synthetic oligonucleotide
ccaggacauugccucccca

SEQ ID NO: 2456392 - RNA, 19 nt, Artificial Sequence
  Description of Artificial Sequence: Synthetic oligonucleotide
gccucuuaguugggacauc

SEQ ID NO: 2456393 - RNA, 19 nt, Artificial Sequence
  Description of Artificial Sequence: Synthetic oligonucleotide
aggucucguuugggcugga

SEQ ID NO: 2456394 - RNA, 19 nt, Artificial Sequence
  Description of Artificial Sequence: Synthetic oligonucleotide
gcaauucgagccacagauu

SEQ ID NO: 2456395 - RNA, 19 nt, Artificial Sequence
  Description of Artificial Sequence: Synthetic oligonucleotide
ggaagacuaccagcucaau

SEQ ID NO: 2456396 - RNA, 19 nt, Artificial Sequence
  Description of Artificial Sequence: Synthetic oligonucleotide
ccagcucaauggggucuac

SEQ ID NO: 2456397 - RNA, 19 nt, Artificial Sequence
  Description of Artificial Sequence: Synthetic oligonucleotide
cguuugggcuggauguccu

SEQ ID NO: 2456398 - RNA, 19 nt, Artificial Sequence
  Description of Artificial Sequence: Synthetic oligonucleotide
cgugggcgauuaccaccag

SEQ ID NO: 2456399 - RNA, 19 nt, Artificial Sequence
  Description of Artificial Sequence: Synthetic oligonucleotide
ccccaguggcgucggaucu

SEQ ID NO: 2456400 - RNA, 19 nt, Artificial Sequence
  Description of Artificial Sequence: Synthetic oligonucleotide
cuccaccaagguggugacu

SEQ ID NO: 2456401 - RNA, 19 nt, Artificial Sequence
  Description of Artificial Sequence: Synthetic oligonucleotide
ccgaaguucuuaggccucu

SEQ ID NO: 2456402 - RNA, 19 nt, Artificial Sequence
  Description of Artificial Sequence: Synthetic oligonucleotide
ggcaacggugguacauguu

SEQ ID NO: 2456403 - RNA, 19 nt, Artificial Sequence
  Description of Artificial Sequence: Synthetic oligonucleotide
gcacgggccaacagucuuu

SEQ ID NO: 2456404 - RNA, 19 nt, Artificial Sequence
  Description of Artificial Sequence: Synthetic oligonucleotide
ccgaauguaucggggccau

SEQ ID NO: 2456405 - RNA, 19 nt, Artificial Sequence
  Description of Artificial Sequence: Synthetic oligonucleotide
ggucucguuugggcuggau

SEQ ID NO: 2456406 - RNA, 19 nt, Artificial Sequence
  Description of Artificial Sequence: Synthetic oligonucleotide
caguggcgucggaucucau

SEQ ID NO: 2456407 - RNA, 19 nt, Artificial Sequence
  Description of Artificial Sequence: Synthetic oligonucleotide
ggucuacaucgugggcgau

SEQ ID NO: 2456408 - RNA, 19 nt, Artificial Sequence
  Description of Artificial Sequence: Synthetic oligonucleotide
ccugcccaaugccgaaguu

SEQ ID NO: 2456409 - RNA, 19 nt, Artificial Sequence
  Description of Artificial Sequence: Synthetic oligonucleotide
cgaaguucuuaggccucuu

SEQ ID NO: 2456410 - RNA, 19 nt, Artificial Sequence
  Description of Artificial Sequence: Synthetic oligonucleotide
aaacaguugagacagggcc

SEQ ID NO: 2456411 - RNA, 19 nt, Artificial Sequence
  Description of Artificial Sequence: Synthetic oligonucleotide
agacaugucuccuacgugc

SEQ ID NO: 2456412 - RNA, 19 nt, Artificial Sequence
  Description of Artificial Sequence: Synthetic oligonucleotide
uuuauuuccucucagggaa

SEQ ID NO: 2456413 - RNA, 19 nt, Artificial Sequence
  Description of Artificial Sequence: Synthetic oligonucleotide
ucauagaugauccugguuc

SEQ ID NO: 2456414 - RNA, 19 nt, Artificial Sequence
  Description of Artificial Sequence: Synthetic oligonucleotide
acuuuauuuccucucaggg

SEQ ID NO: 2456415 - RNA, 19 nt, Artificial Sequence
  Description of Artificial Sequence: Synthetic oligonucleotide
aaacugugacucuucaccg

SEQ ID NO: 2456416 - RNA, 19 nt, Artificial Sequence
  Description of Artificial Sequence: Synthetic oligonucleotide
caaacugugacucuucacc

SEQ ID NO: 2456417 - RNA, 19 nt, Artificial Sequence
  Description of Artificial Sequence: Synthetic oligonucleotide
gacugguuugcauaggagg

SEQ ID NO: 2456418 - RNA, 19 nt, Artificial Sequence
  Description of Artificial Sequence: Synthetic oligonucleotide
aauggagcaggacugggug

SEQ ID NO: 2456419 - RNA, 19 nt, Artificial Sequence
  Description of Artificial Sequence: Synthetic oligonucleotide
ugugcugguauucacaaaa

SEQ ID NO: 2456420 - RNA, 19 nt, Artificial Sequence
  Description of Artificial Sequence: Synthetic oligonucleotide
gaaaacaguugagacaggg

SEQ ID NO: 2456421 - RNA, 19 nt, Artificial Sequence
  Description of Artificial Sequence: Synthetic oligonucleotide
ugguauucacaaaauggag

SEQ ID NO: 2456422 - RNA, 19 nt, Artificial Sequence
  Description of Artificial Sequence: Synthetic oligonucleotide
aacugugacucuucaccgc

SEQ ID NO: 2456423 - RNA, 19 nt, Artificial Sequence
  Description of Artificial Sequence: Synthetic oligonucleotide
uugcauaggaggcucauca

SEQ ID NO: 2456424 - RNA, 19 nt, Artificial Sequence
  Description of Artificial Sequence: Synthetic oligonucleotide
aaggccugaccacuguggc

SEQ ID NO: 2456425 - RNA, 19 nt, Artificial Sequence
  Description of Artificial Sequence: Synthetic oligonucleotide
acuuccgggcauucgaugc

SEQ ID NO: 2456426 - RNA, 19 nt, Artificial Sequence
  Description of Artificial Sequence: Synthetic oligonucleotide
guauucacaaaauggagca

SEQ ID NO: 2456427 - RNA, 19 nt, Artificial Sequence
  Description of Artificial Sequence: Synthetic oligonucleotide
agaagcaucacuccguccu

SEQ ID NO: 2456428 - RNA, 19 nt, Artificial Sequence
  Description of Artificial Sequence: Synthetic oligonucleotide
uaaccuugggccuagggga

SEQ ID NO: 2456429 - RNA, 19 nt, Artificial Sequence
  Description of Artificial Sequence: Synthetic oligonucleotide
cacuccaucaggaauuucc

SEQ ID NO: 2456430 - RNA, 19 nt, Artificial Sequence
  Description of Artificial Sequence: Synthetic oligonucleotide
uggaguagcagcucaaugu

SEQ ID NO: 2456431 - RNA, 19 nt, Artificial Sequence
  Description of Artificial Sequence: Synthetic oligonucleotide
cuaaccuugggccuagggg

SEQ ID NO: 2456432 - RNA, 19 nt, Artificial Sequence
  Description of Artificial Sequence: Synthetic oligonucleotide
ugccagaugaccauucuga

SEQ ID NO: 2456433 - RNA, 19 nt, Artificial Sequence
  Description of Artificial Sequence: Synthetic oligonucleotide
aaagaagugaaggguagcu

SEQ ID NO: 2456434 - RNA, 19 nt, Artificial Sequence
  Description of Artificial Sequence: Synthetic oligonucleotide
aaugucaacagaggcacga

SEQ ID NO: 2456435 - RNA, 19 nt, Artificial Sequence
  Description of Artificial Sequence: Synthetic oligonucleotide
cagggaaagaagugaaggg

SEQ ID NO: 2456436 - RNA, 19 nt, Artificial Sequence
  Description of Artificial Sequence: Synthetic oligonucleotide
gaaaggguaggugugcucc

SEQ ID NO: 2456437 - RNA, 19 nt, Artificial Sequence
  Description of Artificial Sequence: Synthetic oligonucleotide
uuaucuuccgggcugcuau

SEQ ID NO: 2456438 - RNA, 19 nt, Artificial Sequence
  Description of Artificial Sequence: Synthetic oligonucleotide
ugcugguauucacaaaaug

SEQ ID NO: 2456439 - RNA, 19 nt, Artificial Sequence
  Description of Artificial Sequence: Synthetic oligonucleotide
uucacaaaauggagcagga

SEQ ID NO: 2456440 - RNA, 19 nt, Artificial Sequence
  Description of Artificial Sequence: Synthetic oligonucleotide
cugguauucacaaaaugga

SEQ ID NO: 2456441 - RNA, 19 nt, Artificial Sequence
  Description of Artificial Sequence: Synthetic oligonucleotide
agagucauuccccuggagu

SEQ ID NO: 2456442 - RNA, 19 nt, Artificial Sequence
  Description of Artificial Sequence: Synthetic oligonucleotide
cagcucaaugucaacagag

SEQ ID NO: 2456443 - RNA, 19 nt, Artificial Sequence
  Description of Artificial Sequence: Synthetic oligonucleotide
aaggguagcuuucccaggu

SEQ ID NO: 2456444 - RNA, 19 nt, Artificial Sequence
  Description of Artificial Sequence: Synthetic oligonucleotide
uaugugcugguauucacaa

SEQ ID NO: 2456445 - RNA, 19 nt, Artificial Sequence
  Description of Artificial Sequence: Synthetic oligonucleotide
ugcuauaguccccgggcgg

SEQ ID NO: 2456446 - RNA, 19 nt, Artificial Sequence
  Description of Artificial Sequence: Synthetic oligonucleotide
uguuuuggccacaggugag

SEQ ID NO: 2456447 - RNA, 19 nt, Artificial Sequence
  Description of Artificial Sequence: Synthetic oligonucleotide
uaccccaaccucaggaaag

SEQ ID NO: 2456448 - RNA, 19 nt, Artificial Sequence
  Description of Artificial Sequence: Synthetic oligonucleotide
acagggccuaaccuugggc

SEQ ID NO: 2456449 - RNA, 19 nt, Artificial Sequence
  Description of Artificial Sequence: Synthetic oligonucleotide
aguuccgacacuccaucag

SEQ ID NO: 2456450 - RNA, 19 nt, Artificial Sequence
  Description of Artificial Sequence: Synthetic oligonucleotide
ugacugguuugcauaggag

SEQ ID NO: 2456451 - RNA, 19 nt, Artificial Sequence
  Description of Artificial Sequence: Synthetic oligonucleotide
uugagacagggccuaaccu

SEQ ID NO: 2456452 - RNA, 19 nt, Artificial Sequence
  Description of Artificial Sequence: Synthetic oligonucleotide
uauggcuggucccuuaaau

SEQ ID NO: 2456453 - RNA, 19 nt, Artificial Sequence
  Description of Artificial Sequence: Synthetic oligonucleotide
cagggccuaaccuugggcc

SEQ ID NO: 2456454 - RNA, 19 nt, Artificial Sequence
  Description of Artificial Sequence: Synthetic oligonucleotide
cuuuauuuccucucaggga

SEQ ID NO: 2456455 - RNA, 19 nt, Artificial Sequence
  Description of Artificial Sequence: Synthetic oligonucleotide
gcaagagucauuccccugg

SEQ ID NO: 2456456 - RNA, 19 nt, Artificial Sequence
  Description of Artificial Sequence: Synthetic oligonucleotide
auggcuggucccuuaaaug

SEQ ID NO: 2456457 - RNA, 19 nt, Artificial Sequence
  Description of Artificial Sequence: Synthetic oligonucleotide
cuacgugccgcccacgacc

SEQ ID NO: 2456458 - RNA, 19 nt, Artificial Sequence
  Description of Artificial Sequence: Synthetic oligonucleotide
uuuccggucauagaugauc

SEQ ID NO: 2456459 - RNA, 19 nt, Artificial Sequence
  Description of Artificial Sequence: Synthetic oligonucleotide
aaccucaggaaaggguagg

SEQ ID NO: 2456460 - RNA, 19 nt, Artificial Sequence
  Description of Artificial Sequence: Synthetic oligonucleotide
gaugaccauucugacaggc

SEQ ID NO: 2456461 - RNA, 19 nt, Artificial Sequence
  Description of Artificial Sequence: Synthetic oligonucleotide
ugaguuccgacacuccauc

SEQ ID NO: 2456462 - RNA, 19 nt, Artificial Sequence
  Description of Artificial Sequence: Synthetic oligonucleotide
gaauuuccggucauagaug

SEQ ID NO: 2456463 - RNA, 19 nt, Artificial Sequence
  Description of Artificial Sequence: Synthetic oligonucleotide
auucgaugcaggguguggg

SEQ ID NO: 2456464 - RNA, 19 nt, Artificial Sequence
  Description of Artificial Sequence: Synthetic oligonucleotide
aucacuccguccuauggcu

SEQ ID NO: 2456465 - RNA, 19 nt, Artificial Sequence
  Description of Artificial Sequence: Synthetic oligonucleotide
uggugcuauaguccccggg

SEQ ID NO: 2456466 - RNA, 19 nt, Artificial Sequence
  Description of Artificial Sequence: Synthetic oligonucleotide
caucacuccguccuauggc

SEQ ID NO: 2456467 - RNA, 19 nt, Artificial Sequence
  Description of Artificial Sequence: Synthetic oligonucleotide
ugcagauggcucugacugg

SEQ ID NO: 2456468 - RNA, 19 nt, Artificial Sequence
  Description of Artificial Sequence: Synthetic oligonucleotide
acgacccuccagcagcccc

SEQ ID NO: 2456469 - RNA, 19 nt, Artificial Sequence
  Description of Artificial Sequence: Synthetic oligonucleotide
ggcacgaggagguaugugc

SEQ ID NO: 2456470 - RNA, 19 nt, Artificial Sequence
  Description of Artificial Sequence: Synthetic oligonucleotide
ucacuggucgggcuaguga

SEQ ID NO: 2456471 - RNA, 19 nt, Artificial Sequence
  Description of Artificial Sequence: Synthetic oligonucleotide
guguuuuggccacagguga

SEQ ID NO: 2456472 - RNA, 19 nt, Artificial Sequence
  Description of Artificial Sequence: Synthetic oligonucleotide
aaaggguaggugugcucca

SEQ ID NO: 2456473 - RNA, 19 nt, Artificial Sequence
  Description of Artificial Sequence: Synthetic oligonucleotide
guagcuuucccagguaccc

SEQ ID NO: 2456474 - RNA, 19 nt, Artificial Sequence
  Description of Artificial Sequence: Synthetic oligonucleotide
cucagggaaagaagugaag

SEQ ID NO: 2456475 - RNA, 19 nt, Artificial Sequence
  Description of Artificial Sequence: Synthetic oligonucleotide
cacuggucgggcuagugac

SEQ ID NO: 2456476 - RNA, 19 nt, Artificial Sequence
  Description of Artificial Sequence: Synthetic oligonucleotide
gagucauuccccuggagua

SEQ ID NO: 2456477 - RNA, 19 nt, Artificial Sequence
  Description of Artificial Sequence: Synthetic oligonucleotide
caggaauuuccggucauag

SEQ ID NO: 2456478 - RNA, 19 nt, Artificial Sequence
  Description of Artificial Sequence: Synthetic oligonucleotide
aaauggagcaggacugggu

SEQ ID NO: 2456479 - RNA, 19 nt, Artificial Sequence
  Description of Artificial Sequence: Synthetic oligonucleotide
cuagugaccccaggaauag

SEQ ID NO: 2456480 - RNA, 19 nt, Artificial Sequence
  Description of Artificial Sequence: Synthetic oligonucleotide
gucgccgagggcuacccgg

SEQ ID NO: 2456481 - RNA, 19 nt, Artificial Sequence
  Description of Artificial Sequence: Synthetic oligonucleotide
uggugcugaagagugugcc

SEQ ID NO: 2456482 - RNA, 19 nt, Artificial Sequence
  Description of Artificial Sequence: Synthetic oligonucleotide
ucugacugguuugcauagg

SEQ ID NO: 2456483 - RNA, 19 nt, Artificial Sequence
  Description of Artificial Sequence: Synthetic oligonucleotide
acaugucuccuacgugccg

SEQ ID NO: 2456484 - RNA, 19 nt, Artificial Sequence
  Description of Artificial Sequence: Synthetic oligonucleotide
uccguccuauggcuggucc

SEQ ID NO: 2456485 - RNA, 19 nt, Artificial Sequence
  Description of Artificial Sequence: Synthetic oligonucleotide
cacuccguccuauggcugg

SEQ ID NO: 2456486 - RNA, 19 nt, Artificial Sequence
  Description of Artificial Sequence: Synthetic oligonucleotide
agaguugccagaugaccau

SEQ ID NO: 2456487 - RNA, 19 nt, Artificial Sequence
  Description of Artificial Sequence: Synthetic oligonucleotide
cuuccgggcugcuaugcag

SEQ ID NO: 2456488 - RNA, 19 nt, Artificial Sequence
  Description of Artificial Sequence: Synthetic oligonucleotide
caugucuccuacgugccgc

SEQ ID NO: 2456489 - RNA, 19 nt, Artificial Sequence
  Description of Artificial Sequence: Synthetic oligonucleotide
ugcacgccgucgccgaggg

SEQ ID NO: 2456490 - RNA, 19 nt, Artificial Sequence
  Description of Artificial Sequence: Synthetic oligonucleotide
auaguccccgggcgggagc

SEQ ID NO: 2456491 - RNA, 19 nt, Artificial Sequence
  Description of Artificial Sequence: Synthetic oligonucleotide
gggcauucgaugcagggug

SEQ ID NO: 2456492 - RNA, 19 nt, Artificial Sequence
  Description of Artificial Sequence: Synthetic oligonucleotide
gacaugucuccuacgugcc

SEQ ID NO: 2456493 - RNA, 19 nt, Artificial Sequence
  Description of Artificial Sequence: Synthetic oligonucleotide
guggacuuuauuuccucuc

SEQ ID NO: 2456494 - RNA, 19 nt, Artificial Sequence
  Description of Artificial Sequence: Synthetic oligonucleotide
ucaucacuggucgggcuag

SEQ ID NO: 2456495 - RNA, 19 nt, Artificial Sequence
  Description of Artificial Sequence: Synthetic oligonucleotide
uacgugccgcccacgaccc

SEQ ID NO: 2456496 - RNA, 19 nt, Artificial Sequence
  Description of Artificial Sequence: Synthetic oligonucleotide
ugcauaggaggcucaucac

SEQ ID NO: 2456497 - RNA, 19 nt, Artificial Sequence
  Description of Artificial Sequence: Synthetic oligonucleotide
cucuucaccgccugcccgc

SEQ ID NO: 2456498 - RNA, 19 nt, Artificial Sequence
  Description of Artificial Sequence: Synthetic oligonucleotide
aguugccagaugaccauuc

SEQ ID NO: 2456499 - RNA, 19 nt, Artificial Sequence
  Description of Artificial Sequence: Synthetic oligonucleotide
aggagguaugugcugguau

SEQ ID NO: 2456500 - RNA, 19 nt, Artificial Sequence
  Description of Artificial Sequence: Synthetic oligonucleotide
ggcuagaguugccagauga

SEQ ID NO: 2456501 - RNA, 19 nt, Artificial Sequence
  Description of Artificial Sequence: Synthetic oligonucleotide
ggaguagcagcucaauguc

SEQ ID NO: 2456502 - RNA, 19 nt, Artificial Sequence
  Description of Artificial Sequence: Synthetic oligonucleotide
aggcucaucacuggucggg

SEQ ID NO: 2456503 - RNA, 19 nt, Artificial Sequence
  Description of Artificial Sequence: Synthetic oligonucleotide
agucauuccccuggaguag

SEQ ID NO: 2456504 - RNA, 19 nt, Artificial Sequence
  Description of Artificial Sequence: Synthetic oligonucleotide
aguagcagcucaaugucaa

SEQ ID NO: 2456505 - RNA, 19 nt, Artificial Sequence
  Description of Artificial Sequence: Synthetic oligonucleotide
gguguuuuggccacaggug

SEQ ID NO: 2456506 - RNA, 19 nt, Artificial Sequence
  Description of Artificial Sequence: Synthetic oligonucleotide
agggcuacccggcgagugg

SEQ ID NO: 2456507 - RNA, 19 nt, Artificial Sequence
  Description of Artificial Sequence: Synthetic oligonucleotide
gguggugcuauaguccccg

SEQ ID NO: 2456508 - RNA, 19 nt, Artificial Sequence
  Description of Artificial Sequence: Synthetic oligonucleotide
ucuuccgggcugcuaugca

SEQ ID NO: 2456509 - RNA, 19 nt, Artificial Sequence
  Description of Artificial Sequence: Synthetic oligonucleotide
uccuacgugccgcccacga

SEQ ID NO: 2456510 - RNA, 19 nt, Artificial Sequence
  Description of Artificial Sequence: Synthetic oligonucleotide
ggaaagguggacuuuauuu

SEQ ID NO: 2456511 - RNA, 19 nt, Artificial Sequence
  Description of Artificial Sequence: Synthetic oligonucleotide
ucacuccguccuauggcug

SEQ ID NO: 2456512 - RNA, 19 nt, Artificial Sequence
  Description of Artificial Sequence: Synthetic oligonucleotide
ucccuuaaauguccaucuc

SEQ ID NO: 2456513 - RNA, 19 nt, Artificial Sequence
  Description of Artificial Sequence: Synthetic oligonucleotide
gcaucacuccguccuaugg

SEQ ID NO: 2456514 - RNA, 19 nt, Artificial Sequence
  Description of Artificial Sequence: Synthetic oligonucleotide
gggguggugcuauaguccc

SEQ ID NO: 2456515 - RNA, 19 nt, Artificial Sequence
  Description of Artificial Sequence: Synthetic oligonucleotide
uggggcuagaguugccaga

SEQ ID NO: 2456516 - RNA, 19 nt, Artificial Sequence
  Description of Artificial Sequence: Synthetic oligonucleotide
uucugacaggcuccucugu

SEQ ID NO: 2456517 - RNA, 19 nt, Artificial Sequence
  Description of Artificial Sequence: Synthetic oligonucleotide
aggugugcuccagagguug

SEQ ID NO: 2456518 - RNA, 19 nt, Artificial Sequence
  Description of Artificial Sequence: Synthetic oligonucleotide
cugacugguuugcauagga

SEQ ID NO: 2456519 - RNA, 19 nt, Artificial Sequence
  Description of Artificial Sequence: Synthetic oligonucleotide
gucccuuaaauguccaucu

SEQ ID NO: 2456520 - RNA, 19 nt, Artificial Sequence
  Description of Artificial Sequence: Synthetic oligonucleotide
cuaugcagauggcucugac

SEQ ID NO: 2456521 - RNA, 19 nt, Artificial Sequence
  Description of Artificial Sequence: Synthetic oligonucleotide
uaucuuccgggcugcuaug

SEQ ID NO: 2456522 - RNA, 19 nt, Artificial Sequence
  Description of Artificial Sequence: Synthetic oligonucleotide
uccgggcauucgaugcagg

SEQ ID NO: 2456523 - RNA, 19 nt, Artificial Sequence
  Description of Artificial Sequence: Synthetic oligonucleotide
acuggucgggcuagugacc

SEQ ID NO: 2456524 - RNA, 19 nt, Artificial Sequence
  Description of Artificial Sequence: Synthetic oligonucleotide
ucuccuacgugccgcccac

SEQ ID NO: 2456525 - RNA, 19 nt, Artificial Sequence
  Description of Artificial Sequence: Synthetic oligonucleotide
accgccugcccgcuuaucu

SEQ ID NO: 2456526 - RNA, 19 nt, Artificial Sequence
  Description of Artificial Sequence: Synthetic oligonucleotide
cagacaugucuccuacgug

SEQ ID NO: 2456527 - RNA, 19 nt, Artificial Sequence
  Description of Artificial Sequence: Synthetic oligonucleotide
guaugugcugguauucaca

SEQ ID NO: 2456528 - RNA, 19 nt, Artificial Sequence
  Description of Artificial Sequence: Synthetic oligonucleotide
ugcaaggccugaccacugu

SEQ ID NO: 2456529 - RNA, 19 nt, Artificial Sequence
  Description of Artificial Sequence: Synthetic oligonucleotide
ucgggcuagugaccccagg

SEQ ID NO: 2456530 - RNA, 19 nt, Artificial Sequence
  Description of Artificial Sequence: Synthetic oligonucleotide
cucucagggaaagaaguga

SEQ ID NO: 2456531 - RNA, 19 nt, Artificial Sequence
  Description of Artificial Sequence: Synthetic oligonucleotide
agcaucacuccguccuaug

SEQ ID NO: 2456532 - RNA, 19 nt, Artificial Sequence
  Description of Artificial Sequence: Synthetic oligonucleotide
cuggucgggcuagugaccc

SEQ ID NO: 2456533 - RNA, 19 nt, Artificial Sequence
  Description of Artificial Sequence: Synthetic oligonucleotide
uggugcaaggccugaccac

SEQ ID NO: 2456534 - RNA, 19 nt, Artificial Sequence
  Description of Artificial Sequence: Synthetic oligonucleotide
uccgacacuccaucaggaa

SEQ ID NO: 2456535 - RNA, 19 nt, Artificial Sequence
  Description of Artificial Sequence: Synthetic oligonucleotide
gugugggcaagagucauuc

SEQ ID NO: 2456536 - RNA, 19 nt, Artificial Sequence
  Description of Artificial Sequence: Synthetic oligonucleotide
uuugcauaggaggcucauc

SEQ ID NO: 2456537 - RNA, 19 nt, Artificial Sequence
  Description of Artificial Sequence: Synthetic oligonucleotide
ggugaguuccgacacucca

SEQ ID NO: 2456538 - RNA, 19 nt, Artificial Sequence
  Description of Artificial Sequence: Synthetic oligonucleotide
uauaguccccgggcgggag

SEQ ID NO: 2456539 - RNA, 19 nt, Artificial Sequence
  Description of Artificial Sequence: Synthetic oligonucleotide
ugcuaugcagauggcucug

SEQ ID NO: 2456540 - RNA, 19 nt, Artificial Sequence
  Description of Artificial Sequence: Synthetic oligonucleotide
gguggugcugaagagugug

SEQ ID NO: 2456541 - RNA, 19 nt, Artificial Sequence
  Description of Artificial Sequence: Synthetic oligonucleotide
ugggguggugcugaagagu

SEQ ID NO: 2456542 - RNA, 19 nt, Artificial Sequence
  Description of Artificial Sequence: Synthetic oligonucleotide
gucugccuggugcaaggcc

SEQ ID NO: 2456543 - RNA, 19 nt, Artificial Sequence
  Description of Artificial Sequence: Synthetic oligonucleotide
uucaccgccugcccgcuua

SEQ ID NO: 2456544 - RNA, 19 nt, Artificial Sequence
  Description of Artificial Sequence: Synthetic oligonucleotide
uuccgggcauucgaugcag

SEQ ID NO: 2456545 - RNA, 19 nt, Artificial Sequence
  Description of Artificial Sequence: Synthetic oligonucleotide
aggugaguuccgacacucc

SEQ ID NO: 2456546 - RNA, 19 nt, Artificial Sequence
  Description of Artificial Sequence: Synthetic oligonucleotide
agguaugugcugguauuca

SEQ ID NO: 2456547 - RNA, 19 nt, Artificial Sequence
  Description of Artificial Sequence: Synthetic oligonucleotide
cacgaggagguaugugcug

SEQ ID NO: 2456548 - RNA, 19 nt, Artificial Sequence
  Description of Artificial Sequence: Synthetic oligonucleotide
gaguagcagcucaauguca

SEQ ID NO: 2456549 - RNA, 19 nt, Artificial Sequence
  Description of Artificial Sequence: Synthetic oligonucleotide
ucgccgagggcuacccggc

SEQ ID NO: 2456550 - RNA, 19 nt, Artificial Sequence
  Description of Artificial Sequence: Synthetic oligonucleotide
ccuuaaauguccaucucaa

SEQ ID NO: 2456551 - RNA, 19 nt, Artificial Sequence
  Description of Artificial Sequence: Synthetic oligonucleotide
uugggccuaggggaaaggu

SEQ ID NO: 2456552 - RNA, 19 nt, Artificial Sequence
  Description of Artificial Sequence: Synthetic oligonucleotide
ucagggccccagaagcauc

SEQ ID NO: 2456553 - RNA, 19 nt, Artificial Sequence
  Description of Artificial Sequence: Synthetic oligonucleotide
uagcuuucccagguacccc

SEQ ID NO: 2456554 - RNA, 19 nt, Artificial Sequence
  Description of Artificial Sequence: Synthetic oligonucleotide
gcugcuaugcagauggcuc

SEQ ID NO: 2456555 - RNA, 19 nt, Artificial Sequence
  Description of Artificial Sequence: Synthetic oligonucleotide
guagcagcucaaugucaac

SEQ ID NO: 2456556 - RNA, 19 nt, Artificial Sequence
  Description of Artificial Sequence: Synthetic oligonucleotide
gaguuccgacacuccauca

SEQ ID NO: 2456557 - RNA, 19 nt, Artificial Sequence
  Description of Artificial Sequence: Synthetic oligonucleotide
gcuauaguccccgggcggg

SEQ ID NO: 2456558 - RNA, 19 nt, Artificial Sequence
  Description of Artificial Sequence: Synthetic oligonucleotide
gguagcuuucccagguacc

SEQ ID NO: 2456559 - RNA, 19 nt, Artificial Sequence
  Description of Artificial Sequence: Synthetic oligonucleotide
uccggucauagaugauccu

SEQ ID NO: 2456560 - RNA, 19 nt, Artificial Sequence
  Description of Artificial Sequence: Synthetic oligonucleotide
cccacgacccuccagcagc

SEQ ID NO: 2456561 - RNA, 19 nt, Artificial Sequence
  Description of Artificial Sequence: Synthetic oligonucleotide
cugcccgcuuaucuuccgg

SEQ ID NO: 2456562 - RNA, 19 nt, Artificial Sequence
  Description of Artificial Sequence: Synthetic oligonucleotide
ggucccuuaaauguccauc

SEQ ID NO: 2456563 - RNA, 19 nt, Artificial Sequence
  Description of Artificial Sequence: Synthetic oligonucleotide
aagcaucacuccguccuau

SEQ ID NO: 2456564 - RNA, 19 nt, Artificial Sequence
  Description of Artificial Sequence: Synthetic oligonucleotide
uuuuggccacaggugaguu

SEQ ID NO: 2456565 - RNA, 19 nt, Artificial Sequence
  Description of Artificial Sequence: Synthetic oligonucleotide
ucaggaauuuccggucaua

SEQ ID NO: 2456566 - RNA, 19 nt, Artificial Sequence
  Description of Artificial Sequence: Synthetic oligonucleotide
uccucccaagggccucagg

SEQ ID NO: 2456567 - RNA, 19 nt, Artificial Sequence
  Description of Artificial Sequence: Synthetic oligonucleotide
gugacucuucaccgccugc

SEQ ID NO: 2456568 - RNA, 19 nt, Artificial Sequence
  Description of Artificial Sequence: Synthetic oligonucleotide
uggccacaggugaguuccg

SEQ ID NO: 2456569 - RNA, 19 nt, Artificial Sequence
  Description of Artificial Sequence: Synthetic oligonucleotide
gagggcuacccggcgagug

SEQ ID NO: 2456570 - RNA, 19 nt, Artificial Sequence
  Description of Artificial Sequence: Synthetic oligonucleotide
gagcugcacgccgucgccg

SEQ ID NO: 2456571 - RNA, 19 nt, Artificial Sequence
  Description of Artificial Sequence: Synthetic oligonucleotide
augaccauucugacaggcu

SEQ ID NO: 2456572 - RNA, 19 nt, Artificial Sequence
  Description of Artificial Sequence: Synthetic oligonucleotide
aggguaggugugcuccaga

SEQ ID NO: 2456573 - RNA, 19 nt, Artificial Sequence
  Description of Artificial Sequence: Synthetic oligonucleotide
uacccggcgaguggggaug

SEQ ID NO: 2456574 - RNA, 19 nt, Artificial Sequence
  Description of Artificial Sequence: Synthetic oligonucleotide
cuugggccuaggggaaagg

SEQ ID NO: 2456575 - RNA, 19 nt, Artificial Sequence
  Description of Artificial Sequence: Synthetic oligonucleotide
ggcgaguggggauggcccg

SEQ ID NO: 2456576 - RNA, 19 nt, Artificial Sequence
  Description of Artificial Sequence: Synthetic oligonucleotide
ccuaaccuugggccuaggg

SEQ ID NO: 2456577 - RNA, 19 nt, Artificial Sequence
  Description of Artificial Sequence: Synthetic oligonucleotide
aggccugaccacuguggcu

SEQ ID NO: 2456578 - RNA, 19 nt, Artificial Sequence
  Description of Artificial Sequence: Synthetic oligonucleotide
cccuuaaauguccaucuca

SEQ ID NO: 2456579 - RNA, 19 nt, Artificial Sequence
  Description of Artificial Sequence: Synthetic oligonucleotide
gauggcccggcugggaguc

SEQ ID NO: 2456580 - RNA, 19 nt, Artificial Sequence
  Description of Artificial Sequence: Synthetic oligonucleotide
gccagaugaccauucugac

SEQ ID NO: 2456581 - RNA, 19 nt, Artificial Sequence
  Description of Artificial Sequence: Synthetic oligonucleotide
caagagucauuccccugga

SEQ ID NO: 2456582 - RNA, 19 nt, Artificial Sequence
  Description of Artificial Sequence: Synthetic oligonucleotide
aaccuugggccuaggggaa

SEQ ID NO: 2456583 - RNA, 19 nt, Artificial Sequence
  Description of Artificial Sequence: Synthetic oligonucleotide
guggugcuauaguccccgg

SEQ ID NO: 2456584 - RNA, 19 nt, Artificial Sequence
  Description of Artificial Sequence: Synthetic oligonucleotide
cauuccccuggaguagcag

SEQ ID NO: 2456585 - RNA, 19 nt, Artificial Sequence
  Description of Artificial Sequence: Synthetic oligonucleotide
ggcaagagucauuccccug

SEQ ID NO: 2456586 - RNA, 19 nt, Artificial Sequence
  Description of Artificial Sequence: Synthetic oligonucleotide
augugcugguauucacaaa

SEQ ID NO: 2456587 - RNA, 19 nt, Artificial Sequence
  Description of Artificial Sequence: Synthetic oligonucleotide
ccaaccucaggaaagggua

SEQ ID NO: 2456588 - RNA, 19 nt, Artificial Sequence
  Description of Artificial Sequence: Synthetic oligonucleotide
uggucccuuaaauguccau

SEQ ID NO: 2456589 - RNA, 19 nt, Artificial Sequence
  Description of Artificial Sequence: Synthetic oligonucleotide
ggccugaccacuguggcuc

SEQ ID NO: 2456590 - RNA, 19 nt, Artificial Sequence
  Description of Artificial Sequence: Synthetic oligonucleotide
uccuauggcuggucccuua

SEQ ID NO: 2456591 - RNA, 19 nt, Artificial Sequence
  Description of Artificial Sequence: Synthetic oligonucleotide
cagguaccccaaccucagg

SEQ ID NO: 2456592 - RNA, 19 nt, Artificial Sequence
  Description of Artificial Sequence: Synthetic oligonucleotide
cuuccgggcauucgaugca

SEQ ID NO: 2456593 - RNA, 19 nt, Artificial Sequence
  Description of Artificial Sequence: Synthetic oligonucleotide
gucuccuacgugccgccca

SEQ ID NO: 2456594 - RNA, 19 nt, Artificial Sequence
  Description of Artificial Sequence: Synthetic oligonucleotide
gggagcugcacgccgucgc

SEQ ID NO: 2456595 - RNA, 19 nt, Artificial Sequence
  Description of Artificial Sequence: Synthetic oligonucleotide
ucuccucccaagggccuca

SEQ ID NO: 2456596 - RNA, 19 nt, Artificial Sequence
  Description of Artificial Sequence: Synthetic oligonucleotide
guugccagaugaccauucu

SEQ ID NO: 2456597 - RNA, 19 nt, Artificial Sequence
  Description of Artificial Sequence: Synthetic oligonucleotide
ccgggcauucgaugcaggg

SEQ ID NO: 2456598 - RNA, 19 nt, Artificial Sequence
  Description of Artificial Sequence: Synthetic oligonucleotide
gaccacuguggcucuccuc

SEQ ID NO: 2456599 - RNA, 19 nt, Artificial Sequence
  Description of Artificial Sequence: Synthetic oligonucleotide
gcuagaguugccagaugac

SEQ ID NO: 2456600 - RNA, 19 nt, Artificial Sequence
  Description of Artificial Sequence: Synthetic oligonucleotide
cugcuaugcagauggcucu

SEQ ID NO: 2456601 - RNA, 19 nt, Artificial Sequence
  Description of Artificial Sequence: Synthetic oligonucleotide
gcauaggaggcucaucacu

SEQ ID NO: 2456602 - RNA, 19 nt, Artificial Sequence
  Description of Artificial Sequence: Synthetic oligonucleotide
ugucuccuacgugccgccc

SEQ ID NO: 2456603 - RNA, 19 nt, Artificial Sequence
  Description of Artificial Sequence: Synthetic oligonucleotide
uggguggcccacaccugau

SEQ ID NO: 2456604 - RNA, 19 nt, Artificial Sequence
  Description of Artificial Sequence: Synthetic oligonucleotide
uggucgggcuagugacccc

SEQ ID NO: 2456605 - RNA, 19 nt, Artificial Sequence
  Description of Artificial Sequence: Synthetic oligonucleotide
uaguccccgggcgggagcu

SEQ ID NO: 2456606 - RNA, 19 nt, Artificial Sequence
  Description of Artificial Sequence: Synthetic oligonucleotide
cuaggggaaagguggacuu

SEQ ID NO: 2456607 - RNA, 19 nt, Artificial Sequence
  Description of Artificial Sequence: Synthetic oligonucleotide
ggugugcuccagagguugg

SEQ ID NO: 2456608 - RNA, 19 nt, Artificial Sequence
  Description of Artificial Sequence: Synthetic oligonucleotide
cugcacgccgucgccgagg

SEQ ID NO: 2456609 - RNA, 19 nt, Artificial Sequence
  Description of Artificial Sequence: Synthetic oligonucleotide
gcuagugaccccaggaaua

SEQ ID NO: 2456610 - RNA, 19 nt, Artificial Sequence
  Description of Artificial Sequence: Synthetic oligonucleotide
aggcacgaggagguaugug

SEQ ID NO: 2456611 - RNA, 19 nt, Artificial Sequence
  Description of Artificial Sequence: Synthetic oligonucleotide
guuuuggccacaggugagu

SEQ ID NO: 2456612 - RNA, 19 nt, Artificial Sequence
  Description of Artificial Sequence: Synthetic oligonucleotide
gggguguuuuggccacagg

SEQ ID NO: 2456613 - RNA, 19 nt, Artificial Sequence
  Description of Artificial Sequence: Synthetic oligonucleotide
ccgcuuaucuuccgggcug

SEQ ID NO: 2456614 - RNA, 19 nt, Artificial Sequence
  Description of Artificial Sequence: Synthetic oligonucleotide
gcccgcuuaucuuccgggc

SEQ ID NO: 2456615 - RNA, 19 nt, Artificial Sequence
  Description of Artificial Sequence: Synthetic oligonucleotide
gguggcccacaccugaugu

SEQ ID NO: 2456616 - RNA, 19 nt, Artificial Sequence
  Description of Artificial Sequence: Synthetic oligonucleotide
gggcuagugaccccaggaa

SEQ ID NO: 2456617 - RNA, 19 nt, Artificial Sequence
  Description of Artificial Sequence: Synthetic oligonucleotide
cagagguuggggcuagagu

SEQ ID NO: 2456618 - RNA, 19 nt, Artificial Sequence
  Description of Artificial Sequence: Synthetic oligonucleotide
caggaauagcuggcagguc

SEQ ID NO: 2456619 - RNA, 19 nt, Artificial Sequence
  Description of Artificial Sequence: Synthetic oligonucleotide
accucggcccagcccuucu

SEQ ID NO: 2456620 - RNA, 19 nt, Artificial Sequence
  Description of Artificial Sequence: Synthetic oligonucleotide
ccguccuauggcugguccc

SEQ ID NO: 2456621 - RNA, 19 nt, Artificial Sequence
  Description of Artificial Sequence: Synthetic oligonucleotide
ggagguaugugcugguauu

SEQ ID NO: 2456622 - RNA, 19 nt, Artificial Sequence
  Description of Artificial Sequence: Synthetic oligonucleotide
cacgccgucgccgagggcu

SEQ ID NO: 2456623 - RNA, 19 nt, Artificial Sequence
  Description of Artificial Sequence: Synthetic oligonucleotide
ccccagacaugucuccuac

SEQ ID NO: 2456624 - RNA, 19 nt, Artificial Sequence
  Description of Artificial Sequence: Synthetic oligonucleotide
cuauggcuggucccuuaaa

SEQ ID NO: 2456625 - RNA, 19 nt, Artificial Sequence
  Description of Artificial Sequence: Synthetic oligonucleotide
gaggagguaugugcuggua

SEQ ID NO: 2456626 - RNA, 19 nt, Artificial Sequence
  Description of Artificial Sequence: Synthetic oligonucleotide
ucaccgccugcccgcuuau

SEQ ID NO: 2456627 - RNA, 19 nt, Artificial Sequence
  Description of Artificial Sequence: Synthetic oligonucleotide
uccccuggaguagcagcuc

SEQ ID NO: 2456628 - RNA, 19 nt, Artificial Sequence
  Description of Artificial Sequence: Synthetic oligonucleotide
ccagacaugucuccuacgu

SEQ ID NO: 2456629 - RNA, 19 nt, Artificial Sequence
  Description of Artificial Sequence: Synthetic oligonucleotide
ggugcaaggccugaccacu

SEQ ID NO: 2456630 - RNA, 19 nt, Artificial Sequence
  Description of Artificial Sequence: Synthetic oligonucleotide
gcagccccgcggcaccucg

SEQ ID NO: 2456631 - RNA, 19 nt, Artificial Sequence
  Description of Artificial Sequence: Synthetic oligonucleotide
ccucaggaaaggguaggug

SEQ ID NO: 2456632 - RNA, 19 nt, Artificial Sequence
  Description of Artificial Sequence: Synthetic oligonucleotide
acuccguccuauggcuggu

SEQ ID NO: 2456633 - RNA, 19 nt, Artificial Sequence
  Description of Artificial Sequence: Synthetic oligonucleotide
cuuaucuuccgggcugcua

SEQ ID NO: 2456634 - RNA, 19 nt, Artificial Sequence
  Description of Artificial Sequence: Synthetic oligonucleotide
ggcuagugaccccaggaau

SEQ ID NO: 2456635 - RNA, 19 nt, Artificial Sequence
  Description of Artificial Sequence: Synthetic oligonucleotide
gacccuccagcagccccgc

SEQ ID NO: 2456636 - RNA, 19 nt, Artificial Sequence
  Description of Artificial Sequence: Synthetic oligonucleotide
cccacuuccgggcauucga

SEQ ID NO: 2456637 - RNA, 19 nt, Artificial Sequence
  Description of Artificial Sequence: Synthetic oligonucleotide
cugguuugcauaggaggcu

SEQ ID NO: 2456638 - RNA, 19 nt, Artificial Sequence
  Description of Artificial Sequence: Synthetic oligonucleotide
ccacgacccuccagcagcc

SEQ ID NO: 2456639 - RNA, 19 nt, Artificial Sequence
  Description of Artificial Sequence: Synthetic oligonucleotide
ggguggcccacaccugaug

SEQ ID NO: 2456640 - RNA, 19 nt, Artificial Sequence
  Description of Artificial Sequence: Synthetic oligonucleotide
acccggcgaguggggaugg

SEQ ID NO: 2456641 - RNA, 19 nt, Artificial Sequence
  Description of Artificial Sequence: Synthetic oligonucleotide
ccgggcgggagcugcacgc

SEQ ID NO: 2456642 - RNA, 19 nt, Artificial Sequence
  Description of Artificial Sequence: Synthetic oligonucleotide
cucuccucccaagggccuc

SEQ ID NO: 2456643 - RNA, 19 nt, Artificial Sequence
  Description of Artificial Sequence: Synthetic oligonucleotide
ccgagggcuacccggcgag

SEQ ID NO: 2456644 - RNA, 19 nt, Artificial Sequence
  Description of Artificial Sequence: Synthetic oligonucleotide
uccccgggcgggagcugca

SEQ ID NO: 2456645 - RNA, 19 nt, Artificial Sequence
  Description of Artificial Sequence: Synthetic oligonucleotide
cggcgaguggggauggccc

SEQ ID NO: 2456646 - RNA, 19 nt, Artificial Sequence
  Description of Artificial Sequence: Synthetic oligonucleotide
cuauaguccccgggcggga

SEQ ID NO: 2456647 - RNA, 19 nt, Artificial Sequence
  Description of Artificial Sequence: Synthetic oligonucleotide
gacacuccaucaggaauuu

SEQ ID NO: 2456648 - RNA, 19 nt, Artificial Sequence
  Description of Artificial Sequence: Synthetic oligonucleotide
gucgggcuagugaccccag

SEQ ID NO: 2456649 - RNA, 19 nt, Artificial Sequence
  Description of Artificial Sequence: Synthetic oligonucleotide
cuccuacgugccgcccacg

SEQ ID NO: 2456650 - RNA, 19 nt, Artificial Sequence
  Description of Artificial Sequence: Synthetic oligonucleotide
cagccccgcggcaccucgg

SEQ ID NO: 2456651 - RNA, 19 nt, Artificial Sequence
  Description of Artificial Sequence: Synthetic oligonucleotide
gggcuagaguugccagaug

SEQ ID NO: 2456652 - RNA, 19 nt, Artificial Sequence
  Description of Artificial Sequence: Synthetic oligonucleotide
gcccacgacccuccagcag

SEQ ID NO: 2456653 - RNA, 19 nt, Artificial Sequence
  Description of Artificial Sequence: Synthetic oligonucleotide
gggcaagagucauuccccu

SEQ ID NO: 2456654 - RNA, 19 nt, Artificial Sequence
  Description of Artificial Sequence: Synthetic oligonucleotide
ccuacgugccgcccacgac

SEQ ID NO: 2456655 - RNA, 19 nt, Artificial Sequence
  Description of Artificial Sequence: Synthetic oligonucleotide
gugccgcccgggguggugc

SEQ ID NO: 2456656 - RNA, 19 nt, Artificial Sequence
  Description of Artificial Sequence: Synthetic oligonucleotide
gcagauggcucugacuggu

SEQ ID NO: 2456657 - RNA, 19 nt, Artificial Sequence
  Description of Artificial Sequence: Synthetic oligonucleotide
gugccgcccacgacccucc

SEQ ID NO: 2456658 - RNA, 19 nt, Artificial Sequence
  Description of Artificial Sequence: Synthetic oligonucleotide
ugcccacuuccgggcauuc

SEQ ID NO: 2456659 - RNA, 19 nt, Artificial Sequence
  Description of Artificial Sequence: Synthetic oligonucleotide
ccaggaauagcuggcaggu

SEQ ID NO: 2456660 - RNA, 19 nt, Artificial Sequence
  Description of Artificial Sequence: Synthetic oligonucleotide
cacgacccuccagcagccc

SEQ ID NO: 2456661 - RNA, 19 nt, Artificial Sequence
  Description of Artificial Sequence: Synthetic oligonucleotide
gugcugguauucacaaaau

SEQ ID NO: 2456662 - RNA, 19 nt, Artificial Sequence
  Description of Artificial Sequence: Synthetic oligonucleotide
gaggcacgaggagguaugu

SEQ ID NO: 2456663 - RNA, 19 nt, Artificial Sequence
  Description of Artificial Sequence: Synthetic oligonucleotide
ccccaaccucaggaaaggg

SEQ ID NO: 2456664 - RNA, 19 nt, Artificial Sequence
  Description of Artificial Sequence: Synthetic oligonucleotide
gcuaugcagauggcucuga

SEQ ID NO: 2456665 - RNA, 19 nt, Artificial Sequence
  Description of Artificial Sequence: Synthetic oligonucleotide
ggcucugacugguuugcau

SEQ ID NO: 2456666 - RNA, 19 nt, Artificial Sequence
  Description of Artificial Sequence: Synthetic oligonucleotide
accuugggccuaggggaaa

SEQ ID NO: 2456667 - RNA, 19 nt, Artificial Sequence
  Description of Artificial Sequence: Synthetic oligonucleotide
ggguggugcuauagucccc

SEQ ID NO: 2456668 - RNA, 19 nt, Artificial Sequence
  Description of Artificial Sequence: Synthetic oligonucleotide
ccaagggccucagggcccc

SEQ ID NO: 2456669 - RNA, 19 nt, Artificial Sequence
  Description of Artificial Sequence: Synthetic oligonucleotide
ggcuacccggcgagugggg

SEQ ID NO: 2456670 - RNA, 19 nt, Artificial Sequence
  Description of Artificial Sequence: Synthetic oligonucleotide
gcccacuuccgggcauucg

SEQ ID NO: 2456671 - RNA, 19 nt, Artificial Sequence
  Description of Artificial Sequence: Synthetic oligonucleotide
gaguugccagaugaccauu

SEQ ID NO: 2456672 - RNA, 19 nt, Artificial Sequence
  Description of Artificial Sequence: Synthetic oligonucleotide
ggggcuagaguugccagau

SEQ ID NO: 2456673 - RNA, 19 nt, Artificial Sequence
  Description of Artificial Sequence: Synthetic oligonucleotide
ccggcgaguggggauggcc

SEQ ID NO: 2456674 - RNA, 19 nt, Artificial Sequence
  Description of Artificial Sequence: Synthetic oligonucleotide
cuccucccaagggccucag

SEQ ID NO: 2456675 - RNA, 19 nt, Artificial Sequence
  Description of Artificial Sequence: Synthetic oligonucleotide
gccuaggggaaagguggac

SEQ ID NO: 2456676 - RNA, 19 nt, Artificial Sequence
  Description of Artificial Sequence: Synthetic oligonucleotide
gcacgaggagguaugugcu

SEQ ID NO: 2456677 - RNA, 19 nt, Artificial Sequence
  Description of Artificial Sequence: Synthetic oligonucleotide
cgggcuagugaccccagga

SEQ ID NO: 2456678 - RNA, 19 nt, Artificial Sequence
  Description of Artificial Sequence: Synthetic oligonucleotide
cgcuuaucuuccgggcugc

SEQ ID NO: 2456679 - RNA, 19 nt, Artificial Sequence
  Description of Artificial Sequence: Synthetic oligonucleotide
ccuaggggaaagguggacu

SEQ ID NO: 2456680 - RNA, 19 nt, Artificial Sequence
  Description of Artificial Sequence: Synthetic oligonucleotide
gccgcccacgacccuccag

SEQ ID NO: 2456681 - RNA, 19 nt, Artificial Sequence
  Description of Artificial Sequence: Synthetic oligonucleotide
gccgagggcuacccggcga

SEQ ID NO: 2456682 - RNA, 19 nt, Artificial Sequence
  Description of Artificial Sequence: Synthetic oligonucleotide
cuacccggcgaguggggau

SEQ ID NO: 2456683 - RNA, 19 nt, Artificial Sequence
  Description of Artificial Sequence: Synthetic oligonucleotide
ggccuaggggaaaggugga

SEQ ID NO: 2456684 - RNA, 19 nt, Artificial Sequence
  Description of Artificial Sequence: Synthetic oligonucleotide
gcuacccggcgagugggga

SEQ ID NO: 2456685 - RNA, 19 nt, Artificial Sequence
  Description of Artificial Sequence: Synthetic oligonucleotide
ccgacacuccaucaggaau

SEQ ID NO: 2456686 - RNA, 19 nt, Artificial Sequence
  Description of Artificial Sequence: Synthetic oligonucleotide
acgugccgcccacgacccu

SEQ ID NO: 2456687 - RNA, 19 nt, Artificial Sequence
  Description of Artificial Sequence: Synthetic oligonucleotide
gcuccagagguuggggcua

SEQ ID NO: 2456688 - RNA, 19 nt, Artificial Sequence
  Description of Artificial Sequence: Synthetic oligonucleotide
gcggcaccucggcccagcc

SEQ ID NO: 2456689 - RNA, 19 nt, Artificial Sequence
  Description of Artificial Sequence: Synthetic oligonucleotide
ggcauucgaugcagggugu

SEQ ID NO: 2456690 - RNA, 19 nt, Artificial Sequence
  Description of Artificial Sequence: Synthetic oligonucleotide
caguugagacagggccuaa

SEQ ID NO: 2456691 - RNA, 19 nt, Artificial Sequence
  Description of Artificial Sequence: Synthetic oligonucleotide
ccgucgccgagggcuaccc

SEQ ID NO: 2456692 - RNA, 19 nt, Artificial Sequence
  Description of Artificial Sequence: Synthetic oligonucleotide
cccgcuuaucuuccgggcu

SEQ ID NO: 2456693 - RNA, 19 nt, Artificial Sequence
  Description of Artificial Sequence: Synthetic oligonucleotide
gggcugcuaugcagauggc

SEQ ID NO: 2456694 - RNA, 19 nt, Artificial Sequence
  Description of Artificial Sequence: Synthetic oligonucleotide
gccuaaccuugggccuagg

SEQ ID NO: 2456695 - RNA, 19 nt, Artificial Sequence
  Description of Artificial Sequence: Synthetic oligonucleotide
cagauggcucugacugguu

SEQ ID NO: 2456696 - RNA, 19 nt, Artificial Sequence
  Description of Artificial Sequence: Synthetic oligonucleotide
cgugccgcccacgacccuc

SEQ ID NO: 2456697 - RNA, 19 nt, Artificial Sequence
  Description of Artificial Sequence: Synthetic oligonucleotide
caccgccugcccgcuuauc

SEQ ID NO: 2456698 - RNA, 19 nt, Artificial Sequence
  Description of Artificial Sequence: Synthetic oligonucleotide
cgucgccgagggcuacccg

SEQ ID NO: 2456699 - RNA, 19 nt, Artificial Sequence
  Description of Artificial Sequence: Synthetic oligonucleotide
gcccggcugggagucuggc

SEQ ID NO: 2456700 - RNA, 19 nt, Artificial Sequence
  Description of Artificial Sequence: Synthetic oligonucleotide
ccgggcugcuaugcagaug

SEQ ID NO: 2456701 - RNA, 19 nt, Artificial Sequence
  Description of Artificial Sequence: Synthetic oligonucleotide
cgggagcugcacgccgucg

SEQ ID NO: 2456702 - RNA, 19 nt, Artificial Sequence
  Description of Artificial Sequence: Synthetic oligonucleotide
cgccgagggcuacccggcg

SEQ ID NO: 2456703 - RNA, 19 nt, Artificial Sequence
  Description of Artificial Sequence: Synthetic oligonucleotide
ggugugggcaagagucauu

SEQ ID NO: 2456704 - RNA, 19 nt, Artificial Sequence
  Description of Artificial Sequence: Synthetic oligonucleotide
ccacuuccgggcauucgau

SEQ ID NO: 2456705 - RNA, 19 nt, Artificial Sequence
  Description of Artificial Sequence: Synthetic oligonucleotide
caucacuggucgggcuagu

SEQ ID NO: 2456706 - RNA, 19 nt, Artificial Sequence
  Description of Artificial Sequence: Synthetic oligonucleotide
ccugaccacuguggcucuc

SEQ ID NO: 2456707 - RNA, 19 nt, Artificial Sequence
  Description of Artificial Sequence: Synthetic oligonucleotide
ggcgggagcugcacgccgu

SEQ ID NO: 2456708 - RNA, 19 nt, Artificial Sequence
  Description of Artificial Sequence: Synthetic oligonucleotide
gccugaccacuguggcucu

SEQ ID NO: 2456709 - RNA, 19 nt, Artificial Sequence
  Description of Artificial Sequence: Synthetic oligonucleotide
guccuauggcuggucccuu

SEQ ID NO: 2456710 - RNA, 19 nt, Artificial Sequence
  Description of Artificial Sequence: Synthetic oligonucleotide
cccgcggcaccucggccca

SEQ ID NO: 2456711 - RNA, 19 nt, Artificial Sequence
  Description of Artificial Sequence: Synthetic oligonucleotide
cgcccacgacccuccagca

SEQ ID NO: 2456712 - RNA, 19 nt, Artificial Sequence
  Description of Artificial Sequence: Synthetic oligonucleotide
caagggccucagggcccca

SEQ ID NO: 2456713 - RNA, 19 nt, Artificial Sequence
  Description of Artificial Sequence: Synthetic oligonucleotide
cgggcauucgaugcagggu

SEQ ID NO: 2456714 - RNA, 19 nt, Artificial Sequence
  Description of Artificial Sequence: Synthetic oligonucleotide
cgcggcaccucggcccagc

SEQ ID NO: 2456715 - RNA, 19 nt, Artificial Sequence
  Description of Artificial Sequence: Synthetic oligonucleotide
cccggcugggagucuggcu

SEQ ID NO: 2456716 - RNA, 19 nt, Artificial Sequence
  Description of Artificial Sequence: Synthetic oligonucleotide
cccggcgaguggggauggc

SEQ ID NO: 2456717 - RNA, 19 nt, Artificial Sequence
  Description of Artificial Sequence: Synthetic oligonucleotide
cuucaccgccugcccgcuu

SEQ ID NO: 2456718 - RNA, 19 nt, Artificial Sequence
  Description of Artificial Sequence: Synthetic oligonucleotide
ccgccugcccgcuuaucuu

SEQ ID NO: 2456719 - RNA, 19 nt, Artificial Sequence
  Description of Artificial Sequence: Synthetic oligonucleotide
cgccgucgccgagggcuac

SEQ ID NO: 2456720 - RNA, 19 nt, Artificial Sequence
  Description of Artificial Sequence: Synthetic oligonucleotide
ccgcggcaccucggcccag

SEQ ID NO: 2456721 - RNA, 19 nt, Artificial Sequence
  Description of Artificial Sequence: Synthetic oligonucleotide
gccgcccgggguggugcua

SEQ ID NO: 2456722 - RNA, 19 nt, Artificial Sequence
  Description of Artificial Sequence: Synthetic oligonucleotide
ccgcccgggguggugcuau

SEQ ID NO: 2456723 - RNA, 19 nt, Artificial Sequence
  Description of Artificial Sequence: Synthetic oligonucleotide
cgagggcuacccggcgagu

SEQ ID NO: 2456724 - RNA, 19 nt, Artificial Sequence
  Description of Artificial Sequence: Synthetic oligonucleotide
cgcccgggguggugcuaua

SEQ ID NO: 2456725 - RNA, 19 nt, Artificial Sequence
  Description of Artificial Sequence: Synthetic oligonucleotide
cuaucaacaaccaagaguc

SEQ ID NO: 2456726 - RNA, 19 nt, Artificial Sequence
  Description of Artificial Sequence: Synthetic oligonucleotide
aaaacuaauggccuagcag

SEQ ID NO: 2456727 - RNA, 19 nt, Artificial Sequence
  Description of Artificial Sequence: Synthetic oligonucleotide
gaaauaauagccuaucaac

SEQ ID NO: 2456728 - RNA, 19 nt, Artificial Sequence
  Description of Artificial Sequence: Synthetic oligonucleotide
aauaaauagcuuugauugg

SEQ ID NO: 2456729 - RNA, 19 nt, Artificial Sequence
  Description of Artificial Sequence: Synthetic oligonucleotide
cauagcaaaacuaauggcc

SEQ ID NO: 2456730 - RNA, 19 nt, Artificial Sequence
  Description of Artificial Sequence: Synthetic oligonucleotide
aaacuaauggccuagcaga

SEQ ID NO: 2456731 - RNA, 19 nt, Artificial Sequence
  Description of Artificial Sequence: Synthetic oligonucleotide
auaaauuacaagcugaaau

SEQ ID NO: 2456732 - RNA, 19 nt, Artificial Sequence
  Description of Artificial Sequence: Synthetic oligonucleotide
uaaauggucagggugaugg

SEQ ID NO: 2456733 - RNA, 19 nt, Artificial Sequence
  Description of Artificial Sequence: Synthetic oligonucleotide
gauaguacaacaugugugc

SEQ ID NO: 2456734 - RNA, 19 nt, Artificial Sequence
  Description of Artificial Sequence: Synthetic oligonucleotide
aagucuauagcauagcaaa

SEQ ID NO: 2456735 - RNA, 19 nt, Artificial Sequence
  Description of Artificial Sequence: Synthetic oligonucleotide
auaaauagcuuugauuggc

SEQ ID NO: 2456736 - RNA, 19 nt, Artificial Sequence
  Description of Artificial Sequence: Synthetic oligonucleotide
agguaggagauucaguugc

SEQ ID NO: 2456737 - RNA, 19 nt, Artificial Sequence
  Description of Artificial Sequence: Synthetic oligonucleotide
uagccuaucaacaaccaag

SEQ ID NO: 2456738 - RNA, 19 nt, Artificial Sequence
  Description of Artificial Sequence: Synthetic oligonucleotide
aacuccagagaccaccagc

SEQ ID NO: 2456739 - RNA, 19 nt, Artificial Sequence
  Description of Artificial Sequence: Synthetic oligonucleotide
ugcccaaacaccuuggagg

SEQ ID NO: 2456740 - RNA, 19 nt, Artificial Sequence
  Description of Artificial Sequence: Synthetic oligonucleotide
aauaauagccuaucaacaa

SEQ ID NO: 2456741 - RNA, 19 nt, Artificial Sequence
  Description of Artificial Sequence: Synthetic oligonucleotide
auaauagccuaucaacaac

SEQ ID NO: 2456742 - RNA, 19 nt, Artificial Sequence
  Description of Artificial Sequence: Synthetic oligonucleotide
ucuuaagucuauagcauag

SEQ ID NO: 2456743 - RNA, 19 nt, Artificial Sequence
  Description of Artificial Sequence: Synthetic oligonucleotide
guuguggcaacucagcugg

SEQ ID NO: 2456744 - RNA, 19 nt, Artificial Sequence
  Description of Artificial Sequence: Synthetic oligonucleotide
uaauagccuaucaacaacc

SEQ ID NO: 2456745 - RNA, 19 nt, Artificial Sequence
  Description of Artificial Sequence: Synthetic oligonucleotide
ugcucuuaagucuauagca

SEQ ID NO: 2456746 - RNA, 19 nt, Artificial Sequence
  Description of Artificial Sequence: Synthetic oligonucleotide
uaaauuacaagcugaaaua

SEQ ID NO: 2456747 - RNA, 19 nt, Artificial Sequence
  Description of Artificial Sequence: Synthetic oligonucleotide
aaacaggguacagaagucc

SEQ ID NO: 2456748 - RNA, 19 nt, Artificial Sequence
  Description of Artificial Sequence: Synthetic oligonucleotide
ugacgaagaacacaacucc

SEQ ID NO: 2456749 - RNA, 19 nt, Artificial Sequence
  Description of Artificial Sequence: Synthetic oligonucleotide
aaauaauagccuaucaaca

SEQ ID NO: 2456750 - RNA, 19 nt, Artificial Sequence
  Description of Artificial Sequence: Synthetic oligonucleotide
uuaagucuauagcauagca

SEQ ID NO: 2456751 - RNA, 19 nt, Artificial Sequence
  Description of Artificial Sequence: Synthetic oligonucleotide
gauggggucauacaaggcc

SEQ ID NO: 2456752 - RNA, 19 nt, Artificial Sequence
  Description of Artificial Sequence: Synthetic oligonucleotide
aagaacacaacuccagaga

SEQ ID NO: 2456753 - RNA, 19 nt, Artificial Sequence
  Description of Artificial Sequence: Synthetic oligonucleotide
guaguaaauggucagggug

SEQ ID NO: 2456754 - RNA, 19 nt, Artificial Sequence
  Description of Artificial Sequence: Synthetic oligonucleotide
acaagcugaaauaaauagc

SEQ ID NO: 2456755 - RNA, 19 nt, Artificial Sequence
  Description of Artificial Sequence: Synthetic oligonucleotide
aguucuagcgccugggcac

SEQ ID NO: 2456756 - RNA, 19 nt, Artificial Sequence
  Description of Artificial Sequence: Synthetic oligonucleotide
agugccuaggaccaguggg

SEQ ID NO: 2456757 - RNA, 19 nt, Artificial Sequence
  Description of Artificial Sequence: Synthetic oligonucleotide
uagcauagcaaaacuaaug

SEQ ID NO: 2456758 - RNA, 19 nt, Artificial Sequence
  Description of Artificial Sequence: Synthetic oligonucleotide
agaaauaauagccuaucaa

SEQ ID NO: 2456759 - RNA, 19 nt, Artificial Sequence
  Description of Artificial Sequence: Synthetic oligonucleotide
ucaaguuguggcaacucag

SEQ ID NO: 2456760 - RNA, 19 nt, Artificial Sequence
  Description of Artificial Sequence: Synthetic oligonucleotide
agugaaacaggguacagaa

SEQ ID NO: 2456761 - RNA, 19 nt, Artificial Sequence
  Description of Artificial Sequence: Synthetic oligonucleotide
ccuagcagaaauaauagcc

SEQ ID NO: 2456762 - RNA, 19 nt, Artificial Sequence
  Description of Artificial Sequence: Synthetic oligonucleotide
aguuguugggaugugcugc

SEQ ID NO: 2456763 - RNA, 19 nt, Artificial Sequence
  Description of Artificial Sequence: Synthetic oligonucleotide
gauucaguugccacgauug

SEQ ID NO: 2456764 - RNA, 19 nt, Artificial Sequence
  Description of Artificial Sequence: Synthetic oligonucleotide
cuugccauagaggaggugg

SEQ ID NO: 2456765 - RNA, 19 nt, Artificial Sequence
  Description of Artificial Sequence: Synthetic oligonucleotide
aacaacccgaagcugggag

SEQ ID NO: 2456766 - RNA, 19 nt, Artificial Sequence
  Description of Artificial Sequence: Synthetic oligonucleotide
gauggguagugaaacaggg

SEQ ID NO: 2456767 - RNA, 19 nt, Artificial Sequence
  Description of Artificial Sequence: Synthetic oligonucleotide
uugacgaagaacacaacuc

SEQ ID NO: 2456768 - RNA, 19 nt, Artificial Sequence
  Description of Artificial Sequence: Synthetic oligonucleotide
aaauagcuuugauuggcug

SEQ ID NO: 2456769 - RNA, 19 nt, Artificial Sequence
  Description of Artificial Sequence: Synthetic oligonucleotide
auagcuuugauuggcuggc

SEQ ID NO: 2456770 - RNA, 19 nt, Artificial Sequence
  Description of Artificial Sequence: Synthetic oligonucleotide
auuggcuggccucaggagg

SEQ ID NO: 2456771 - RNA, 19 nt, Artificial Sequence
  Description of Artificial Sequence: Synthetic oligonucleotide
aggagauucaguugccacg

SEQ ID NO: 2456772 - RNA, 19 nt, Artificial Sequence
  Description of Artificial Sequence: Synthetic oligonucleotide
ucccugucaggguugaugg

SEQ ID NO: 2456773 - RNA, 19 nt, Artificial Sequence
  Description of Artificial Sequence: Synthetic oligonucleotide
caccaugccaacauugacg

SEQ ID NO: 2456774 - RNA, 19 nt, Artificial Sequence
  Description of Artificial Sequence: Synthetic oligonucleotide
uaagucuauagcauagcaa

SEQ ID NO: 2456775 - RNA, 19 nt, Artificial Sequence
  Description of Artificial Sequence: Synthetic oligonucleotide
uggguagugaaacagggua

SEQ ID NO: 2456776 - RNA, 19 nt, Artificial Sequence
  Description of Artificial Sequence: Synthetic oligonucleotide
ugauuggcugcucuuaagu

SEQ ID NO: 2456777 - RNA, 19 nt, Artificial Sequence
  Description of Artificial Sequence: Synthetic oligonucleotide
gacaguaucaccaugccaa

SEQ ID NO: 2456778 - RNA, 19 nt, Artificial Sequence
  Description of Artificial Sequence: Synthetic oligonucleotide
auggguagcuaccaccugg

SEQ ID NO: 2456779 - RNA, 19 nt, Artificial Sequence
  Description of Artificial Sequence: Synthetic oligonucleotide
agcugaaauaaauagcuuu

SEQ ID NO: 2456780 - RNA, 19 nt, Artificial Sequence
  Description of Artificial Sequence: Synthetic oligonucleotide
ucuggagugccuaggacca

SEQ ID NO: 2456781 - RNA, 19 nt, Artificial Sequence
  Description of Artificial Sequence: Synthetic oligonucleotide
uucuacgcugcccaaacac

SEQ ID NO: 2456782 - RNA, 19 nt, Artificial Sequence
  Description of Artificial Sequence: Synthetic oligonucleotide
ugaguuguugggaugugcu

SEQ ID NO: 2456783 - RNA, 19 nt, Artificial Sequence
  Description of Artificial Sequence: Synthetic oligonucleotide
uggccuagcagaaauaaua

SEQ ID NO: 2456784 - RNA, 19 nt, Artificial Sequence
  Description of Artificial Sequence: Synthetic oligonucleotide
uaaauagcuuugauuggcu

SEQ ID NO: 2456785 - RNA, 19 nt, Artificial Sequence
  Description of Artificial Sequence: Synthetic oligonucleotide
auuggcugcucuuaagucu

SEQ ID NO: 2456786 - RNA, 19 nt, Artificial Sequence
  Description of Artificial Sequence: Synthetic oligonucleotide
ugcgauaguacaacaugug

SEQ ID NO: 2456787 - RNA, 19 nt, Artificial Sequence
  Description of Artificial Sequence: Synthetic oligonucleotide
aaauggucagggugauggg

SEQ ID NO: 2456788 - RNA, 19 nt, Artificial Sequence
  Description of Artificial Sequence: Synthetic oligonucleotide
acaguucugaguuguuggg

SEQ ID NO: 2456789 - RNA, 19 nt, Artificial Sequence
  Description of Artificial Sequence: Synthetic oligonucleotide
accaugccaacauugacga

SEQ ID NO: 2456790 - RNA, 19 nt, Artificial Sequence
  Description of Artificial Sequence: Synthetic oligonucleotide
ugauggguagcuaccaccu

SEQ ID NO: 2456791 - RNA, 19 nt, Artificial Sequence
  Description of Artificial Sequence: Synthetic oligonucleotide
auaguacaacaugugugcc

SEQ ID NO: 2456792 - RNA, 19 nt, Artificial Sequence
  Description of Artificial Sequence: Synthetic oligonucleotide
aguaucaccaugccaacau

SEQ ID NO: 2456793 - RNA, 19 nt, Artificial Sequence
  Description of Artificial Sequence: Synthetic oligonucleotide
ccaacauugacgaagaaca

SEQ ID NO: 2456794 - RNA, 19 nt, Artificial Sequence
  Description of Artificial Sequence: Synthetic oligonucleotide
caagcugaaauaaauagcu

SEQ ID NO: 2456795 - RNA, 19 nt, Artificial Sequence
  Description of Artificial Sequence: Synthetic oligonucleotide
ucuacgcugcccaaacacc

SEQ ID NO: 2456796 - RNA, 19 nt, Artificial Sequence
  Description of Artificial Sequence: Synthetic oligonucleotide
gguacagaaguccacauga

SEQ ID NO: 2456797 - RNA, 19 nt, Artificial Sequence
  Description of Artificial Sequence: Synthetic oligonucleotide
guagcuaccaccuggcaca

SEQ ID NO: 2456798 - RNA, 19 nt, Artificial Sequence
  Description of Artificial Sequence: Synthetic oligonucleotide
agcugauggguagugaaac

SEQ ID NO: 2456799 - RNA, 19 nt, Artificial Sequence
  Description of Artificial Sequence: Synthetic oligonucleotide
aauggccuagcagaaauaa

SEQ ID NO: 2456800 - RNA, 19 nt, Artificial Sequence
  Description of Artificial Sequence: Synthetic oligonucleotide
aguuguggcaacucagcug

SEQ ID NO: 2456801 - RNA, 19 nt, Artificial Sequence
  Description of Artificial Sequence: Synthetic oligonucleotide
auagcaaaacuaauggccu

SEQ ID NO: 2456802 - RNA, 19 nt, Artificial Sequence
  Description of Artificial Sequence: Synthetic oligonucleotide
uaguacaacaugugugcca

SEQ ID NO: 2456803 - RNA, 19 nt, Artificial Sequence
  Description of Artificial Sequence: Synthetic oligonucleotide
gaagcugggagucagggcu

SEQ ID NO: 2456804 - RNA, 19 nt, Artificial Sequence
  Description of Artificial Sequence: Synthetic oligonucleotide
acaguaucaccaugccaac

SEQ ID NO: 2456805 - RNA, 19 nt, Artificial Sequence
  Description of Artificial Sequence: Synthetic oligonucleotide
agcgauccugauuggcugc

SEQ ID NO: 2456806 - RNA, 19 nt, Artificial Sequence
  Description of Artificial Sequence: Synthetic oligonucleotide
cugcucuuaagucuauagc

SEQ ID NO: 2456807 - RNA, 19 nt, Artificial Sequence
  Description of Artificial Sequence: Synthetic oligonucleotide
caccuugccauagaggagg

SEQ ID NO: 2456808 - RNA, 19 nt, Artificial Sequence
  Description of Artificial Sequence: Synthetic oligonucleotide
uuagcaacugccagcgauc

SEQ ID NO: 2456809 - RNA, 19 nt, Artificial Sequence
  Description of Artificial Sequence: Synthetic oligonucleotide
acaacaugugugccaguuc

SEQ ID NO: 2456810 - RNA, 19 nt, Artificial Sequence
  Description of Artificial Sequence: Synthetic oligonucleotide
acauugacgaagaacacaa

SEQ ID NO: 2456811 - RNA, 19 nt, Artificial Sequence
  Description of Artificial Sequence: Synthetic oligonucleotide
agcaaaacuaauggccuag

SEQ ID NO: 2456812 - RNA, 19 nt, Artificial Sequence
  Description of Artificial Sequence: Synthetic oligonucleotide
cugauggguagugaaacag

SEQ ID NO: 2456813 - RNA, 19 nt, Artificial Sequence
  Description of Artificial Sequence: Synthetic oligonucleotide
gugauggguagcuaccacc

SEQ ID NO: 2456814 - RNA, 19 nt, Artificial Sequence
  Description of Artificial Sequence: Synthetic oligonucleotide
cuuaagucuauagcauagc

SEQ ID NO: 2456815 - RNA, 19 nt, Artificial Sequence
  Description of Artificial Sequence: Synthetic oligonucleotide
aucaacaaccaagagucca

SEQ ID NO: 2456816 - RNA, 19 nt, Artificial Sequence
  Description of Artificial Sequence: Synthetic oligonucleotide
ugugcugcgauaguacaac

SEQ ID NO: 2456817 - RNA, 19 nt, Artificial Sequence
  Description of Artificial Sequence: Synthetic oligonucleotide
aguugccacgauugacacc

SEQ ID NO: 2456818 - RNA, 19 nt, Artificial Sequence
  Description of Artificial Sequence: Synthetic oligonucleotide
gucuauagcauagcaaaac

SEQ ID NO: 2456819 - RNA, 19 nt, Artificial Sequence
  Description of Artificial Sequence: Synthetic oligonucleotide
gaggucagacaguaucacc

SEQ ID NO: 2456820 - RNA, 19 nt, Artificial Sequence
  Description of Artificial Sequence: Synthetic oligonucleotide
aauagccuaucaacaacca

SEQ ID NO: 2456821 - RNA, 19 nt, Artificial Sequence
  Description of Artificial Sequence: Synthetic oligonucleotide
uccagagaccaccagcauc

SEQ ID NO: 2456822 - RNA, 19 nt, Artificial Sequence
  Description of Artificial Sequence: Synthetic oligonucleotide
ugugcgcaccuucagcucu

SEQ ID NO: 2456823 - RNA, 19 nt, Artificial Sequence
  Description of Artificial Sequence: Synthetic oligonucleotide
gaugugcugcgauaguaca

SEQ ID NO: 2456824 - RNA, 19 nt, Artificial Sequence
  Description of Artificial Sequence: Synthetic oligonucleotide
uaucaacaaccaagagucc

SEQ ID NO: 2456825 - RNA, 19 nt, Artificial Sequence
  Description of Artificial Sequence: Synthetic oligonucleotide
agcgccugggcacuucuac

SEQ ID NO: 2456826 - RNA, 19 nt, Artificial Sequence
  Description of Artificial Sequence: Synthetic oligonucleotide
uagcagaaauaauagccua

SEQ ID NO: 2456827 - RNA, 19 nt, Artificial Sequence
  Description of Artificial Sequence: Synthetic oligonucleotide
gauuggcuggccucaggag

SEQ ID NO: 2456828 - RNA, 19 nt, Artificial Sequence
  Description of Artificial Sequence: Synthetic oligonucleotide
uucugaguuguugggaugu

SEQ ID NO: 2456829 - RNA, 19 nt, Artificial Sequence
  Description of Artificial Sequence: Synthetic oligonucleotide
aacaggguacagaagucca

SEQ ID NO: 2456830 - RNA, 19 nt, Artificial Sequence
  Description of Artificial Sequence: Synthetic oligonucleotide
ugauggggucauacaaggc

SEQ ID NO: 2456831 - RNA, 19 nt, Artificial Sequence
  Description of Artificial Sequence: Synthetic oligonucleotide
cuaggguccucccugucag

SEQ ID NO: 2456832 - RNA, 19 nt, Artificial Sequence
  Description of Artificial Sequence: Synthetic oligonucleotide
uggguagcuaccaccuggc

SEQ ID NO: 2456833 - RNA, 19 nt, Artificial Sequence
  Description of Artificial Sequence: Synthetic oligonucleotide
aggguugauggggucauac

SEQ ID NO: 2456834 - RNA, 19 nt, Artificial Sequence
  Description of Artificial Sequence: Synthetic oligonucleotide
ugggagucagggcuugcag

SEQ ID NO: 2456835 - RNA, 19 nt, Artificial Sequence
  Description of Artificial Sequence: Synthetic oligonucleotide
acgaagaacacaacuccag

SEQ ID NO: 2456836 - RNA, 19 nt, Artificial Sequence
  Description of Artificial Sequence: Synthetic oligonucleotide
aaccaagaguccagguagg

SEQ ID NO: 2456837 - RNA, 19 nt, Artificial Sequence
  Description of Artificial Sequence: Synthetic oligonucleotide
uagugaaacaggguacaga

SEQ ID NO: 2456838 - RNA, 19 nt, Artificial Sequence
  Description of Artificial Sequence: Synthetic oligonucleotide
agacaguaucaccaugcca

SEQ ID NO: 2456839 - RNA, 19 nt, Artificial Sequence
  Description of Artificial Sequence: Synthetic oligonucleotide
gcugcgauaguacaacaug

SEQ ID NO: 2456840 - RNA, 19 nt, Artificial Sequence
  Description of Artificial Sequence: Synthetic oligonucleotide
guugccacgauugacaccu

SEQ ID NO: 2456841 - RNA, 19 nt, Artificial Sequence
  Description of Artificial Sequence: Synthetic oligonucleotide
gagaccaccagcaucaggu

SEQ ID NO: 2456842 - RNA, 19 nt, Artificial Sequence
  Description of Artificial Sequence: Synthetic oligonucleotide
ggugagguuucugucaggg

SEQ ID NO: 2456843 - RNA, 19 nt, Artificial Sequence
  Description of Artificial Sequence: Synthetic oligonucleotide
gaguuguugggaugugcug

SEQ ID NO: 2456844 - RNA, 19 nt, Artificial Sequence
  Description of Artificial Sequence: Synthetic oligonucleotide
guuucugucaggggcgggg

SEQ ID NO: 2456845 - RNA, 19 nt, Artificial Sequence
  Description of Artificial Sequence: Synthetic oligonucleotide
gggaacaacccgaagcugg

SEQ ID NO: 2456846 - RNA, 19 nt, Artificial Sequence
  Description of Artificial Sequence: Synthetic oligonucleotide
gauugacaccuugccauag

SEQ ID NO: 2456847 - RNA, 19 nt, Artificial Sequence
  Description of Artificial Sequence: Synthetic oligonucleotide
cuagcagaaauaauagccu

SEQ ID NO: 2456848 - RNA, 19 nt, Artificial Sequence
  Description of Artificial Sequence: Synthetic oligonucleotide
gcugcucuuaagucuauag

SEQ ID NO: 2456849 - RNA, 19 nt, Artificial Sequence
  Description of Artificial Sequence: Synthetic oligonucleotide
caacauugacgaagaacac

SEQ ID NO: 2456850 - RNA, 19 nt, Artificial Sequence
  Description of Artificial Sequence: Synthetic oligonucleotide
uccagguaggagauucagu

SEQ ID NO: 2456851 - RNA, 19 nt, Artificial Sequence
  Description of Artificial Sequence: Synthetic oligonucleotide
caugugugccaguucuagc

SEQ ID NO: 2456852 - RNA, 19 nt, Artificial Sequence
  Description of Artificial Sequence: Synthetic oligonucleotide
uucaguugccacgauugac

SEQ ID NO: 2456853 - RNA, 19 nt, Artificial Sequence
  Description of Artificial Sequence: Synthetic oligonucleotide
uugccauagaggaggugga

SEQ ID NO: 2456854 - RNA, 19 nt, Artificial Sequence
  Description of Artificial Sequence: Synthetic oligonucleotide
ggggcugagaaauaaauua

SEQ ID NO: 2456855 - RNA, 19 nt, Artificial Sequence
  Description of Artificial Sequence: Synthetic oligonucleotide
cagggugauggguagcuac

SEQ ID NO: 2456856 - RNA, 19 nt, Artificial Sequence
  Description of Artificial Sequence: Synthetic oligonucleotide
ggaccagugggucaaguug

SEQ ID NO: 2456857 - RNA, 19 nt, Artificial Sequence
  Description of Artificial Sequence: Synthetic oligonucleotide
agggugauggguagcuacc

SEQ ID NO: 2456858 - RNA, 19 nt, Artificial Sequence
  Description of Artificial Sequence: Synthetic oligonucleotide
ugcagcccuggccaggagc

SEQ ID NO: 2456859 - RNA, 19 nt, Artificial Sequence
  Description of Artificial Sequence: Synthetic oligonucleotide
ugcugcgauaguacaacau

SEQ ID NO: 2456860 - RNA, 19 nt, Artificial Sequence
  Description of Artificial Sequence: Synthetic oligonucleotide
auagccuaucaacaaccaa

SEQ ID NO: 2456861 - RNA, 19 nt, Artificial Sequence
  Description of Artificial Sequence: Synthetic oligonucleotide
uggucagggugauggguag

SEQ ID NO: 2456862 - RNA, 19 nt, Artificial Sequence
  Description of Artificial Sequence: Synthetic oligonucleotide
cagaaauaauagccuauca

SEQ ID NO: 2456863 - RNA, 19 nt, Artificial Sequence
  Description of Artificial Sequence: Synthetic oligonucleotide
gcugcuuagcaacugccag

SEQ ID NO: 2456864 - RNA, 19 nt, Artificial Sequence
  Description of Artificial Sequence: Synthetic oligonucleotide
auugacaccuugccauaga

SEQ ID NO: 2456865 - RNA, 19 nt, Artificial Sequence
  Description of Artificial Sequence: Synthetic oligonucleotide
cugggcacuucuacgcugc

SEQ ID NO: 2456866 - RNA, 19 nt, Artificial Sequence
  Description of Artificial Sequence: Synthetic oligonucleotide
ugugccaguucuagcgccu

SEQ ID NO: 2456867 - RNA, 19 nt, Artificial Sequence
  Description of Artificial Sequence: Synthetic oligonucleotide
uacaacaugugugccaguu

SEQ ID NO: 2456868 - RNA, 19 nt, Artificial Sequence
  Description of Artificial Sequence: Synthetic oligonucleotide
ugaggucagacaguaucac

SEQ ID NO: 2456869 - RNA, 19 nt, Artificial Sequence
  Description of Artificial Sequence: Synthetic oligonucleotide
cagguaggagauucaguug

SEQ ID NO: 2456870 - RNA, 19 nt, Artificial Sequence
  Description of Artificial Sequence: Synthetic oligonucleotide
aacuaauggccuagcagaa

SEQ ID NO: 2456871 - RNA, 19 nt, Artificial Sequence
  Description of Artificial Sequence: Synthetic oligonucleotide
uguugggaugugcugcgau

SEQ ID NO: 2456872 - RNA, 19 nt, Artificial Sequence
  Description of Artificial Sequence: Synthetic oligonucleotide
gacgaagaacacaacucca

SEQ ID NO: 2456873 - RNA, 19 nt, Artificial Sequence
  Description of Artificial Sequence: Synthetic oligonucleotide
gagugccuaggaccagugg

SEQ ID NO: 2456874 - RNA, 19 nt, Artificial Sequence
  Description of Artificial Sequence: Synthetic oligonucleotide
auagcauagcaaaacuaau

SEQ ID NO: 2456875 - RNA, 19 nt, Artificial Sequence
  Description of Artificial Sequence: Synthetic oligonucleotide
agcuuugauuggcuggccu

SEQ ID NO: 2456876 - RNA, 19 nt, Artificial Sequence
  Description of Artificial Sequence: Synthetic oligonucleotide
caaaacuaauggccuagca

SEQ ID NO: 2456877 - RNA, 19 nt, Artificial Sequence
  Description of Artificial Sequence: Synthetic oligonucleotide
agauucaguugccacgauu

SEQ ID NO: 2456878 - RNA, 19 nt, Artificial Sequence
  Description of Artificial Sequence: Synthetic oligonucleotide
guucugaguuguugggaug

SEQ ID NO: 2456879 - RNA, 19 nt, Artificial Sequence
  Description of Artificial Sequence: Synthetic oligonucleotide
ugccacgauugacaccuug

SEQ ID NO: 2456880 - RNA, 19 nt, Artificial Sequence
  Description of Artificial Sequence: Synthetic oligonucleotide
uagcaacugccagcgaucc

SEQ ID NO: 2456881 - RNA, 19 nt, Artificial Sequence
  Description of Artificial Sequence: Synthetic oligonucleotide
uggggucauacaaggccug

SEQ ID NO: 2456882 - RNA, 19 nt, Artificial Sequence
  Description of Artificial Sequence: Synthetic oligonucleotide
agccuaucaacaaccaaga

SEQ ID NO: 2456883 - RNA, 19 nt, Artificial Sequence
  Description of Artificial Sequence: Synthetic oligonucleotide
uuugauuggcuggccucag

SEQ ID NO: 2456884 - RNA, 19 nt, Artificial Sequence
  Description of Artificial Sequence: Synthetic oligonucleotide
gauggguagcuaccaccug

SEQ ID NO: 2456885 - RNA, 19 nt, Artificial Sequence
  Description of Artificial Sequence: Synthetic oligonucleotide
uaauggccuagcagaaaua

SEQ ID NO: 2456886 - RNA, 19 nt, Artificial Sequence
  Description of Artificial Sequence: Synthetic oligonucleotide
ggccuagcagaaauaauag

SEQ ID NO: 2456887 - RNA, 19 nt, Artificial Sequence
  Description of Artificial Sequence: Synthetic oligonucleotide
acccugccaaugucagacc

SEQ ID NO: 2456888 - RNA, 19 nt, Artificial Sequence
  Description of Artificial Sequence: Synthetic oligonucleotide
uagcaaaacuaauggccua

SEQ ID NO: 2456889 - RNA, 19 nt, Artificial Sequence
  Description of Artificial Sequence: Synthetic oligonucleotide
cauugacgaagaacacaac

SEQ ID NO: 2456890 - RNA, 19 nt, Artificial Sequence
  Description of Artificial Sequence: Synthetic oligonucleotide
ccaugaaggcagcaaagag

SEQ ID NO: 2456891 - RNA, 19 nt, Artificial Sequence
  Description of Artificial Sequence: Synthetic oligonucleotide
cugaguuguugggaugugc

SEQ ID NO: 2456892 - RNA, 19 nt, Artificial Sequence
  Description of Artificial Sequence: Synthetic oligonucleotide
agcagaaauaauagccuau

SEQ ID NO: 2456893 - RNA, 19 nt, Artificial Sequence
  Description of Artificial Sequence: Synthetic oligonucleotide
caacaugugugccaguucu

SEQ ID NO: 2456894 - RNA, 19 nt, Artificial Sequence
  Description of Artificial Sequence: Synthetic oligonucleotide
aucaccaugccaacauuga

SEQ ID NO: 2456895 - RNA, 19 nt, Artificial Sequence
  Description of Artificial Sequence: Synthetic oligonucleotide
ucugucaggggcggggcug

SEQ ID NO: 2456896 - RNA, 19 nt, Artificial Sequence
  Description of Artificial Sequence: Synthetic oligonucleotide
ggcacuucuacgcugccca

SEQ ID NO: 2456897 - RNA, 19 nt, Artificial Sequence
  Description of Artificial Sequence: Synthetic oligonucleotide
uggugggaacaacccgaag

SEQ ID NO: 2456898 - RNA, 19 nt, Artificial Sequence
  Description of Artificial Sequence: Synthetic oligonucleotide
ccagagaccaccagcauca

SEQ ID NO: 2456899 - RNA, 19 nt, Artificial Sequence
  Description of Artificial Sequence: Synthetic oligonucleotide
aagcugaaauaaauagcuu

SEQ ID NO: 2456900 - RNA, 19 nt, Artificial Sequence
  Description of Artificial Sequence: Synthetic oligonucleotide
gcugcuaggguccucccug

SEQ ID NO: 2456901 - RNA, 19 nt, Artificial Sequence
  Description of Artificial Sequence: Synthetic oligonucleotide
ugccauagaggagguggag

SEQ ID NO: 2456902 - RNA, 19 nt, Artificial Sequence
  Description of Artificial Sequence: Synthetic oligonucleotide
gccuagcagaaauaauagc

SEQ ID NO: 2456903 - RNA, 19 nt, Artificial Sequence
  Description of Artificial Sequence: Synthetic oligonucleotide
ugggucaaguuguggcaac

SEQ ID NO: 2456904 - RNA, 19 nt, Artificial Sequence
  Description of Artificial Sequence: Synthetic oligonucleotide
cuaauggccuagcagaaau

SEQ ID NO: 2456905 - RNA, 19 nt, Artificial Sequence
  Description of Artificial Sequence: Synthetic oligonucleotide
acgcugcccaaacaccuug

SEQ ID NO: 2456906 - RNA, 19 nt, Artificial Sequence
  Description of Artificial Sequence: Synthetic oligonucleotide
ggaacaacccgaagcuggg

SEQ ID NO: 2456907 - RNA, 19 nt, Artificial Sequence
  Description of Artificial Sequence: Synthetic oligonucleotide
acugccagcgauccugauu

SEQ ID NO: 2456908 - RNA, 19 nt, Artificial Sequence
  Description of Artificial Sequence: Synthetic oligonucleotide
cacgauugacaccuugcca

SEQ ID NO: 2456909 - RNA, 19 nt, Artificial Sequence
  Description of Artificial Sequence: Synthetic oligonucleotide
cucccugucaggguugaug

SEQ ID NO: 2456910 - RNA, 19 nt, Artificial Sequence
  Description of Artificial Sequence: Synthetic oligonucleotide
cugcgauaguacaacaugu

SEQ ID NO: 2456911 - RNA, 19 nt, Artificial Sequence
  Description of Artificial Sequence: Synthetic oligonucleotide
cuaccaccuggcacaguag

SEQ ID NO: 2456912 - RNA, 19 nt, Artificial Sequence
  Description of Artificial Sequence: Synthetic oligonucleotide
cagggugagguuucuguca

SEQ ID NO: 2456913 - RNA, 19 nt, Artificial Sequence
  Description of Artificial Sequence: Synthetic oligonucleotide
augccaacauugacgaaga

SEQ ID NO: 2456914 - RNA, 19 nt, Artificial Sequence
  Description of Artificial Sequence: Synthetic oligonucleotide
gcagaaauaauagccuauc

SEQ ID NO: 2456915 - RNA, 19 nt, Artificial Sequence
  Description of Artificial Sequence: Synthetic oligonucleotide
ccuaucaacaaccaagagu

SEQ ID NO: 2456916 - RNA, 19 nt, Artificial Sequence
  Description of Artificial Sequence: Synthetic oligonucleotide
ugggaugugcugcgauagu

SEQ ID NO: 2456917 - RNA, 19 nt, Artificial Sequence
  Description of Artificial Sequence: Synthetic oligonucleotide
cugccaggccucuggagug

SEQ ID NO: 2456918 - RNA, 19 nt, Artificial Sequence
  Description of Artificial Sequence: Synthetic oligonucleotide
caacucagcuggugggaac

SEQ ID NO: 2456919 - RNA, 19 nt, Artificial Sequence
  Description of Artificial Sequence: Synthetic oligonucleotide
agucuauagcauagcaaaa

SEQ ID NO: 2456920 - RNA, 19 nt, Artificial Sequence
  Description of Artificial Sequence: Synthetic oligonucleotide
ccuacaccaggccagggug

SEQ ID NO: 2456921 - RNA, 19 nt, Artificial Sequence
  Description of Artificial Sequence: Synthetic oligonucleotide
gauccugauuggcugcucu

SEQ ID NO: 2456922 - RNA, 19 nt, Artificial Sequence
  Description of Artificial Sequence: Synthetic oligonucleotide
cagggcacgcugcagcaug

SEQ ID NO: 2456923 - RNA, 19 nt, Artificial Sequence
  Description of Artificial Sequence: Synthetic oligonucleotide
agguuucugucaggggcgg

SEQ ID NO: 2456924 - RNA, 19 nt, Artificial Sequence
  Description of Artificial Sequence: Synthetic oligonucleotide
ccacgauugacaccuugcc

SEQ ID NO: 2456925 - RNA, 19 nt, Artificial Sequence
  Description of Artificial Sequence: Synthetic oligonucleotide
aggaccagugggucaaguu

SEQ ID NO: 2456926 - RNA, 19 nt, Artificial Sequence
  Description of Artificial Sequence: Synthetic oligonucleotide
uucugucaggggcggggcu

SEQ ID NO: 2456927 - RNA, 19 nt, Artificial Sequence
  Description of Artificial Sequence: Synthetic oligonucleotide
uggagugccuaggaccagu

SEQ ID NO: 2456928 - RNA, 19 nt, Artificial Sequence
  Description of Artificial Sequence: Synthetic oligonucleotide
caguucuagcgccugggca

SEQ ID NO: 2456929 - RNA, 19 nt, Artificial Sequence
  Description of Artificial Sequence: Synthetic oligonucleotide
aggggcggggcugagaaau

SEQ ID NO: 2456930 - RNA, 19 nt, Artificial Sequence
  Description of Artificial Sequence: Synthetic oligonucleotide
gcuuugauuggcuggccuc

SEQ ID NO: 2456931 - RNA, 19 nt, Artificial Sequence
  Description of Artificial Sequence: Synthetic oligonucleotide
acuaauggccuagcagaaa

SEQ ID NO: 2456932 - RNA, 19 nt, Artificial Sequence
  Description of Artificial Sequence: Synthetic oligonucleotide
auggguagugaaacagggu

SEQ ID NO: 2456933 - RNA, 19 nt, Artificial Sequence
  Description of Artificial Sequence: Synthetic oligonucleotide
ugccagcgauccugauugg

SEQ ID NO: 2456934 - RNA, 19 nt, Artificial Sequence
  Description of Artificial Sequence: Synthetic oligonucleotide
gaccagugggucaaguugu

SEQ ID NO: 2456935 - RNA, 19 nt, Artificial Sequence
  Description of Artificial Sequence: Synthetic oligonucleotide
agcaugggugugcgcaccu

SEQ ID NO: 2456936 - RNA, 19 nt, Artificial Sequence
  Description of Artificial Sequence: Synthetic oligonucleotide
agcugcuaggguccucccu

SEQ ID NO: 2456937 - RNA, 19 nt, Artificial Sequence
  Description of Artificial Sequence: Synthetic oligonucleotide
ggaugugcugcgauaguac

SEQ ID NO: 2456938 - RNA, 19 nt, Artificial Sequence
  Description of Artificial Sequence: Synthetic oligonucleotide
guugggaugugcugcgaua

SEQ ID NO: 2456939 - RNA, 19 nt, Artificial Sequence
  Description of Artificial Sequence: Synthetic oligonucleotide
ggguagugaaacaggguac

SEQ ID NO: 2456940 - RNA, 19 nt, Artificial Sequence
  Description of Artificial Sequence: Synthetic oligonucleotide
gcuaccaccuggcacagua

SEQ ID NO: 2456941 - RNA, 19 nt, Artificial Sequence
  Description of Artificial Sequence: Synthetic oligonucleotide
cuacgcugcccaaacaccu

SEQ ID NO: 2456942 - RNA, 19 nt, Artificial Sequence
  Description of Artificial Sequence: Synthetic oligonucleotide
gccuaucaacaaccaagag

SEQ ID NO: 2456943 - RNA, 19 nt, Artificial Sequence
  Description of Artificial Sequence: Synthetic oligonucleotide
caggguacagaaguccaca

SEQ ID NO: 2456944 - RNA, 19 nt, Artificial Sequence
  Description of Artificial Sequence: Synthetic oligonucleotide
ugggcacuucuacgcugcc

SEQ ID NO: 2456945 - RNA, 19 nt, Artificial Sequence
  Description of Artificial Sequence: Synthetic oligonucleotide
ggugugcgcaccuucagcu

SEQ ID NO: 2456946 - RNA, 19 nt, Artificial Sequence
  Description of Artificial Sequence: Synthetic oligonucleotide
gccaucuugaggucagaca

SEQ ID NO: 2456947 - RNA, 19 nt, Artificial Sequence
  Description of Artificial Sequence: Synthetic oligonucleotide
aggccucuggagugccuag

SEQ ID NO: 2456948 - RNA, 19 nt, Artificial Sequence
  Description of Artificial Sequence: Synthetic oligonucleotide
cagggcccgagguccacag

SEQ ID NO: 2456949 - RNA, 19 nt, Artificial Sequence
  Description of Artificial Sequence: Synthetic oligonucleotide
gccacgauugacaccuugc

SEQ ID NO: 2456950 - RNA, 19 nt, Artificial Sequence
  Description of Artificial Sequence: Synthetic oligonucleotide
ugccaacauugacgaagaa

SEQ ID NO: 2456951 - RNA, 19 nt, Artificial Sequence
  Description of Artificial Sequence: Synthetic oligonucleotide
gguaguaaauggucagggu

SEQ ID NO: 2456952 - RNA, 19 nt, Artificial Sequence
  Description of Artificial Sequence: Synthetic oligonucleotide
gcaaaacuaauggccuagc

SEQ ID NO: 2456953 - RNA, 19 nt, Artificial Sequence
  Description of Artificial Sequence: Synthetic oligonucleotide
ugccuaggaccaguggguc

SEQ ID NO: 2456954 - RNA, 19 nt, Artificial Sequence
  Description of Artificial Sequence: Synthetic oligonucleotide
auccugauuggcugcucuu

SEQ ID NO: 2456955 - RNA, 19 nt, Artificial Sequence
  Description of Artificial Sequence: Synthetic oligonucleotide
gcgauaguacaacaugugu

SEQ ID NO: 2456956 - RNA, 19 nt, Artificial Sequence
  Description of Artificial Sequence: Synthetic oligonucleotide
aacccgaagcugggaguca

SEQ ID NO: 2456957 - RNA, 19 nt, Artificial Sequence
  Description of Artificial Sequence: Synthetic oligonucleotide
gcuggugggaacaacccga

SEQ ID NO: 2456958 - RNA, 19 nt, Artificial Sequence
  Description of Artificial Sequence: Synthetic oligonucleotide
augucagaccugguaguaa

SEQ ID NO: 2456959 - RNA, 19 nt, Artificial Sequence
  Description of Artificial Sequence: Synthetic oligonucleotide
gccaaugucagaccuggua

SEQ ID NO: 2456960 - RNA, 19 nt, Artificial Sequence
  Description of Artificial Sequence: Synthetic oligonucleotide
gagucagggcuugcaggug

SEQ ID NO: 2456961 - RNA, 19 nt, Artificial Sequence
  Description of Artificial Sequence: Synthetic oligonucleotide
agcaacugccagcgauccu

SEQ ID NO: 2456962 - RNA, 19 nt, Artificial Sequence
  Description of Artificial Sequence: Synthetic oligonucleotide
ugccaaugucagaccuggu

SEQ ID NO: 2456963 - RNA, 19 nt, Artificial Sequence
  Description of Artificial Sequence: Synthetic oligonucleotide
ggagucagggcuugcaggu

SEQ ID NO: 2456964 - RNA, 19 nt, Artificial Sequence
  Description of Artificial Sequence: Synthetic oligonucleotide
agaccaccagcaucagguu

SEQ ID NO: 2456965 - RNA, 19 nt, Artificial Sequence
  Description of Artificial Sequence: Synthetic oligonucleotide
gggugugcgcaccuucagc

SEQ ID NO: 2456966 - RNA, 19 nt, Artificial Sequence
  Description of Artificial Sequence: Synthetic oligonucleotide
gccaguucuagcgccuggg

SEQ ID NO: 2456967 - RNA, 19 nt, Artificial Sequence
  Description of Artificial Sequence: Synthetic oligonucleotide
gagguccacaguucugagu

SEQ ID NO: 2456968 - RNA, 19 nt, Artificial Sequence
  Description of Artificial Sequence: Synthetic oligonucleotide
augugcugcgauaguacaa

SEQ ID NO: 2456969 - RNA, 19 nt, Artificial Sequence
  Description of Artificial Sequence: Synthetic oligonucleotide
cagguugagcagggcacgc

SEQ ID NO: 2456970 - RNA, 19 nt, Artificial Sequence
  Description of Artificial Sequence: Synthetic oligonucleotide
gugcugcgauaguacaaca

SEQ ID NO: 2456971 - RNA, 19 nt, Artificial Sequence
  Description of Artificial Sequence: Synthetic oligonucleotide
agggcacgcugcagcaugg

SEQ ID NO: 2456972 - RNA, 19 nt, Artificial Sequence
  Description of Artificial Sequence: Synthetic oligonucleotide
uuguugggaugugcugcga

SEQ ID NO: 2456973 - RNA, 19 nt, Artificial Sequence
  Description of Artificial Sequence: Synthetic oligonucleotide
gaacaacccgaagcuggga

SEQ ID NO: 2456974 - RNA, 19 nt, Artificial Sequence
  Description of Artificial Sequence: Synthetic oligonucleotide
cuucuacgcugcccaaaca

SEQ ID NO: 2456975 - RNA, 19 nt, Artificial Sequence
  Description of Artificial Sequence: Synthetic oligonucleotide
cucagcuggugggaacaac

SEQ ID NO: 2456976 - RNA, 19 nt, Artificial Sequence
  Description of Artificial Sequence: Synthetic oligonucleotide
cuuggcacccugccaaugu

SEQ ID NO: 2456977 - RNA, 19 nt, Artificial Sequence
  Description of Artificial Sequence: Synthetic oligonucleotide
uuguggcaacucagcuggu

SEQ ID NO: 2456978 - RNA, 19 nt, Artificial Sequence
  Description of Artificial Sequence: Synthetic oligonucleotide
aggagcugauggguaguga

SEQ ID NO: 2456979 - RNA, 19 nt, Artificial Sequence
  Description of Artificial Sequence: Synthetic oligonucleotide
auggccuagcagaaauaau

SEQ ID NO: 2456980 - RNA, 19 nt, Artificial Sequence
  Description of Artificial Sequence: Synthetic oligonucleotide
gcccaugaaggcagcaaag

SEQ ID NO: 2456981 - RNA, 19 nt, Artificial Sequence
  Description of Artificial Sequence: Synthetic oligonucleotide
gugugcgcaccuucagcuc

SEQ ID NO: 2456982 - RNA, 19 nt, Artificial Sequence
  Description of Artificial Sequence: Synthetic oligonucleotide
aguccagguaggagauuca

SEQ ID NO: 2456983 - RNA, 19 nt, Artificial Sequence
  Description of Artificial Sequence: Synthetic oligonucleotide
ccagguaggagauucaguu

SEQ ID NO: 2456984 - RNA, 19 nt, Artificial Sequence
  Description of Artificial Sequence: Synthetic oligonucleotide
caacugccagcgauccuga

SEQ ID NO: 2456985 - RNA, 19 nt, Artificial Sequence
  Description of Artificial Sequence: Synthetic oligonucleotide
cuggugggaacaacccgaa

SEQ ID NO: 2456986 - RNA, 19 nt, Artificial Sequence
  Description of Artificial Sequence: Synthetic oligonucleotide
ggcccaugaaggcagcaaa

SEQ ID NO: 2456987 - RNA, 19 nt, Artificial Sequence
  Description of Artificial Sequence: Synthetic oligonucleotide
ccaguucuagcgccugggc

SEQ ID NO: 2456988 - RNA, 19 nt, Artificial Sequence
  Description of Artificial Sequence: Synthetic oligonucleotide
caucuugaggucagacagu

SEQ ID NO: 2456989 - RNA, 19 nt, Artificial Sequence
  Description of Artificial Sequence: Synthetic oligonucleotide
caguaucaccaugccaaca

SEQ ID NO: 2456990 - RNA, 19 nt, Artificial Sequence
  Description of Artificial Sequence: Synthetic oligonucleotide
ucagggugauggguagcua

SEQ ID NO: 2456991 - RNA, 19 nt, Artificial Sequence
  Description of Artificial Sequence: Synthetic oligonucleotide
ggucaaguuguggcaacuc

SEQ ID NO: 2456992 - RNA, 19 nt, Artificial Sequence
  Description of Artificial Sequence: Synthetic oligonucleotide
ccauagaggagguggagcu

SEQ ID NO: 2456993 - RNA, 19 nt, Artificial Sequence
  Description of Artificial Sequence: Synthetic oligonucleotide
cagcugcuaggguccuccc

SEQ ID NO: 2456994 - RNA, 19 nt, Artificial Sequence
  Description of Artificial Sequence: Synthetic oligonucleotide
ggaggcugcuuagcaacug

SEQ ID NO: 2456995 - RNA, 19 nt, Artificial Sequence
  Description of Artificial Sequence: Synthetic oligonucleotide
guggagcuuggcacccugc

SEQ ID NO: 2456996 - RNA, 19 nt, Artificial Sequence
  Description of Artificial Sequence: Synthetic oligonucleotide
uggcugcucuuaagucuau

SEQ ID NO: 2456997 - RNA, 19 nt, Artificial Sequence
  Description of Artificial Sequence: Synthetic oligonucleotide
gguggccaucuugagguca

SEQ ID NO: 2456998 - RNA, 19 nt, Artificial Sequence
  Description of Artificial Sequence: Synthetic oligonucleotide
ggcugcuuagcaacugcca

SEQ ID NO: 2456999 - RNA, 19 nt, Artificial Sequence
  Description of Artificial Sequence: Synthetic oligonucleotide
gugccuaggaccagugggu

SEQ ID NO: 2457000 - RNA, 19 nt, Artificial Sequence
  Description of Artificial Sequence: Synthetic oligonucleotide
cugggagucagggcuugca

SEQ ID NO: 2457001 - RNA, 19 nt, Artificial Sequence
  Description of Artificial Sequence: Synthetic oligonucleotide
gugccaguucuagcgccug

SEQ ID NO: 2457002 - RNA, 19 nt, Artificial Sequence
  Description of Artificial Sequence: Synthetic oligonucleotide
gguuucugucaggggcggg

SEQ ID NO: 2457003 - RNA, 19 nt, Artificial Sequence
  Description of Artificial Sequence: Synthetic oligonucleotide
gccagcgauccugauuggc

SEQ ID NO: 2457004 - RNA, 19 nt, Artificial Sequence
  Description of Artificial Sequence: Synthetic oligonucleotide
gggaugugcugcgauagua

SEQ ID NO: 2457005 - RNA, 19 nt, Artificial Sequence
  Description of Artificial Sequence: Synthetic oligonucleotide
cagagaccaccagcaucag

SEQ ID NO: 2457006 - RNA, 19 nt, Artificial Sequence
  Description of Artificial Sequence: Synthetic oligonucleotide
cuggagugccuaggaccag

SEQ ID NO: 2457007 - RNA, 19 nt, Artificial Sequence
  Description of Artificial Sequence: Synthetic oligonucleotide
accuugccauagaggaggu

SEQ ID NO: 2457008 - RNA, 19 nt, Artificial Sequence
  Description of Artificial Sequence: Synthetic oligonucleotide
gugcgcaccuucagcucug

SEQ ID NO: 2457009 - RNA, 19 nt, Artificial Sequence
  Description of Artificial Sequence: Synthetic oligonucleotide
ggucagacaguaucaccau

SEQ ID NO: 2457010 - RNA, 19 nt, Artificial Sequence
  Description of Artificial Sequence: Synthetic oligonucleotide
gccuaggaccaguggguca

SEQ ID NO: 2457011 - RNA, 19 nt, Artificial Sequence
  Description of Artificial Sequence: Synthetic oligonucleotide
agggcccgagguccacagu

SEQ ID NO: 2457012 - RNA, 19 nt, Artificial Sequence
  Description of Artificial Sequence: Synthetic oligonucleotide
cacuucuacgcugcccaaa

SEQ ID NO: 2457013 - RNA, 19 nt, Artificial Sequence
  Description of Artificial Sequence: Synthetic oligonucleotide
cccgaagcugggagucagg

SEQ ID NO: 2457014 - RNA, 19 nt, Artificial Sequence
  Description of Artificial Sequence: Synthetic oligonucleotide
gagauucaguugccacgau

SEQ ID NO: 2457015 - RNA, 19 nt, Artificial Sequence
  Description of Artificial Sequence: Synthetic oligonucleotide
ccagcgauccugauuggcu

SEQ ID NO: 2457016 - RNA, 19 nt, Artificial Sequence
  Description of Artificial Sequence: Synthetic oligonucleotide
agaguccagguaggagauu

SEQ ID NO: 2457017 - RNA, 19 nt, Artificial Sequence
  Description of Artificial Sequence: Synthetic oligonucleotide
cuagcgccugggcacuucu

SEQ ID NO: 2457018 - RNA, 19 nt, Artificial Sequence
  Description of Artificial Sequence: Synthetic oligonucleotide
cccgagguccacaguucug

SEQ ID NO: 2457019 - RNA, 19 nt, Artificial Sequence
  Description of Artificial Sequence: Synthetic oligonucleotide
guucuagcgccugggcacu

SEQ ID NO: 2457020 - RNA, 19 nt, Artificial Sequence
  Description of Artificial Sequence: Synthetic oligonucleotide
cugcagcccuggccaggag

SEQ ID NO: 2457021 - RNA, 19 nt, Artificial Sequence
  Description of Artificial Sequence: Synthetic oligonucleotide
uugccacgauugacaccuu

SEQ ID NO: 2457022 - RNA, 19 nt, Artificial Sequence
  Description of Artificial Sequence: Synthetic oligonucleotide
cccaaacaccuuggaggcc

SEQ ID NO: 2457023 - RNA, 19 nt, Artificial Sequence
  Description of Artificial Sequence: Synthetic oligonucleotide
gguccucccugucaggguu

SEQ ID NO: 2457024 - RNA, 19 nt, Artificial Sequence
  Description of Artificial Sequence: Synthetic oligonucleotide
caggccucuggagugccua

SEQ ID NO: 2457025 - RNA, 19 nt, Artificial Sequence
  Description of Artificial Sequence: Synthetic oligonucleotide
cugcuaggguccucccugu

SEQ ID NO: 2457026 - RNA, 19 nt, Artificial Sequence
  Description of Artificial Sequence: Synthetic oligonucleotide
ggcuugcaggugagccagg

SEQ ID NO: 2457027 - RNA, 19 nt, Artificial Sequence
  Description of Artificial Sequence: Synthetic oligonucleotide
gcggggcugagaaauaaau

SEQ ID NO: 2457028 - RNA, 19 nt, Artificial Sequence
  Description of Artificial Sequence: Synthetic oligonucleotide
uucuagcgccugggcacuu

SEQ ID NO: 2457029 - RNA, 19 nt, Artificial Sequence
  Description of Artificial Sequence: Synthetic oligonucleotide
gcuuagcaacugccagcga

SEQ ID NO: 2457030 - RNA, 19 nt, Artificial Sequence
  Description of Artificial Sequence: Synthetic oligonucleotide
gucaggggcggggcugaga

SEQ ID NO: 2457031 - RNA, 19 nt, Artificial Sequence
  Description of Artificial Sequence: Synthetic oligonucleotide
gcacccugccaaugucaga

SEQ ID NO: 2457032 - RNA, 19 nt, Artificial Sequence
  Description of Artificial Sequence: Synthetic oligonucleotide
ggcccgagguccacaguuc

SEQ ID NO: 2457033 - RNA, 19 nt, Artificial Sequence
  Description of Artificial Sequence: Synthetic oligonucleotide
gggucaaguuguggcaacu

SEQ ID NO: 2457034 - RNA, 19 nt, Artificial Sequence
  Description of Artificial Sequence: Synthetic oligonucleotide
gggcggggcugagaaauaa

SEQ ID NO: 2457035 - RNA, 19 nt, Artificial Sequence
  Description of Artificial Sequence: Synthetic oligonucleotide
ggcggggcugagaaauaaa

SEQ ID NO: 2457036 - RNA, 19 nt, Artificial Sequence
  Description of Artificial Sequence: Synthetic oligonucleotide
gcccgagguccacaguucu

SEQ ID NO: 2457037 - RNA, 19 nt, Artificial Sequence
  Description of Artificial Sequence: Synthetic oligonucleotide
gcugggagucagggcuugc

SEQ ID NO: 2457038 - RNA, 19 nt, Artificial Sequence
  Description of Artificial Sequence: Synthetic oligonucleotide
cgauugacaccuugccaua

SEQ ID NO: 2457039 - RNA, 19 nt, Artificial Sequence
  Description of Artificial Sequence: Synthetic oligonucleotide
ggcugcucuuaagucuaua

SEQ ID NO: 2457040 - RNA, 19 nt, Artificial Sequence
  Description of Artificial Sequence: Synthetic oligonucleotide
caggggcggggcugagaaa

SEQ ID NO: 2457041 - RNA, 19 nt, Artificial Sequence
  Description of Artificial Sequence: Synthetic oligonucleotide
cccuacaccaggccagggu

SEQ ID NO: 2457042 - RNA, 19 nt, Artificial Sequence
  Description of Artificial Sequence: Synthetic oligonucleotide
ccugcagcccuggccagga

SEQ ID NO: 2457043 - RNA, 19 nt, Artificial Sequence
  Description of Artificial Sequence: Synthetic oligonucleotide
ccccuacaccaggccaggg

SEQ ID NO: 2457044 - RNA, 19 nt, Artificial Sequence
  Description of Artificial Sequence: Synthetic oligonucleotide
gcgauccugauuggcugcu

SEQ ID NO: 2457045 - RNA, 19 nt, Artificial Sequence
  Description of Artificial Sequence: Synthetic oligonucleotide
gcgcaccuucagcucugga

SEQ ID NO: 2457046 - RNA, 19 nt, Artificial Sequence
  Description of Artificial Sequence: Synthetic oligonucleotide
cggggcugagaaauaaauu

SEQ ID NO: 2457047 - RNA, 19 nt, Artificial Sequence
  Description of Artificial Sequence: Synthetic oligonucleotide
cgauccugauuggcugcuc

SEQ ID NO: 2457048 - RNA, 19 nt, Artificial Sequence
  Description of Artificial Sequence: Synthetic oligonucleotide
gccagggcccgagguccac

SEQ ID NO: 2457049 - RNA, 19 nt, Artificial Sequence
  Description of Artificial Sequence: Synthetic oligonucleotide
ggaggcccucaggcccaug

SEQ ID NO: 2457050 - RNA, 19 nt, Artificial Sequence
  Description of Artificial Sequence: Synthetic oligonucleotide
gcagggcacgcugcagcau

SEQ ID NO: 2457051 - RNA, 19 nt, Artificial Sequence
  Description of Artificial Sequence: Synthetic oligonucleotide
gcaugggugugcgcaccuu

SEQ ID NO: 2457052 - RNA, 19 nt, Artificial Sequence
  Description of Artificial Sequence: Synthetic oligonucleotide
aagacgguaaaauucagcg

SEQ ID NO: 2457053 - RNA, 19 nt, Artificial Sequence
  Description of Artificial Sequence: Synthetic oligonucleotide
uauucuuugaacaugucag

SEQ ID NO: 2457054 - RNA, 19 nt, Artificial Sequence
  Description of Artificial Sequence: Synthetic oligonucleotide
uuugcaugaacucagcugc

SEQ ID NO: 2457055 - RNA, 19 nt, Artificial Sequence
  Description of Artificial Sequence: Synthetic oligonucleotide
ugaaagauggaaaagggga

SEQ ID NO: 2457056 - RNA, 19 nt, Artificial Sequence
  Description of Artificial Sequence: Synthetic oligonucleotide
aacacggccauccucaccg

SEQ ID NO: 2457057 - RNA, 19 nt, Artificial Sequence
  Description of Artificial Sequence: Synthetic oligonucleotide
aguaggaguggcuucgucc

SEQ ID NO: 2457058 - RNA, 19 nt, Artificial Sequence
  Description of Artificial Sequence: Synthetic oligonucleotide
cuuugaacaugucaggagg

SEQ ID NO: 2457059 - RNA, 19 nt, Artificial Sequence
  Description of Artificial Sequence: Synthetic oligonucleotide
uccaaagacgguaaaauuc

SEQ ID NO: 2457060 - RNA, 19 nt, Artificial Sequence
  Description of Artificial Sequence: Synthetic oligonucleotide
accauugaccaucuggccc

SEQ ID NO: 2457061 - RNA, 19 nt, Artificial Sequence
  Description of Artificial Sequence: Synthetic oligonucleotide
ucuacucuggaucuaggag

SEQ ID NO: 2457062 - RNA, 19 nt, Artificial Sequence
  Description of Artificial Sequence: Synthetic oligonucleotide
uccagugagaacuagggac

SEQ ID NO: 2457063 - RNA, 19 nt, Artificial Sequence
  Description of Artificial Sequence: Synthetic oligonucleotide
uuuugcaugaacucagcug

SEQ ID NO: 2457064 - RNA, 19 nt, Artificial Sequence
  Description of Artificial Sequence: Synthetic oligonucleotide
aaagacgguaaaauucagc

SEQ ID NO: 2457065 - RNA, 19 nt, Artificial Sequence
  Description of Artificial Sequence: Synthetic oligonucleotide
uuuuccagugagaacuagg

SEQ ID NO: 2457066 - RNA, 19 nt, Artificial Sequence
  Description of Artificial Sequence: Synthetic oligonucleotide
ugugguuuggccuccagcc

SEQ ID NO: 2457067 - RNA, 19 nt, Artificial Sequence
  Description of Artificial Sequence: Synthetic oligonucleotide
uuagcugaaagauggaaaa

SEQ ID NO: 2457068 - RNA, 19 nt, Artificial Sequence
  Description of Artificial Sequence: Synthetic oligonucleotide
aaccauugaccaucuggcc

SEQ ID NO: 2457069 - RNA, 19 nt, Artificial Sequence
  Description of Artificial Sequence: Synthetic oligonucleotide
acuggugggaaccauugac

SEQ ID NO: 2457070 - RNA, 19 nt, Artificial Sequence
  Description of Artificial Sequence: Synthetic oligonucleotide
uuuagcugaaagauggaaa

SEQ ID NO: 2457071 - RNA, 19 nt, Artificial Sequence
  Description of Artificial Sequence: Synthetic oligonucleotide
augcagucugcauucaggc

SEQ ID NO: 2457072 - RNA, 19 nt, Artificial Sequence
  Description of Artificial Sequence: Synthetic oligonucleotide
uuugccaaccaccugcagc

SEQ ID NO: 2457073 - RNA, 19 nt, Artificial Sequence
  Description of Artificial Sequence: Synthetic oligonucleotide
ucuuugaacaugucaggag

SEQ ID NO: 2457074 - RNA, 19 nt, Artificial Sequence
  Description of Artificial Sequence: Synthetic oligonucleotide
agcaaugcagucugcauuc

SEQ ID NO: 2457075 - RNA, 19 nt, Artificial Sequence
  Description of Artificial Sequence: Synthetic oligonucleotide
ugguuugccaaccaccugc

SEQ ID NO: 2457076 - RNA, 19 nt, Artificial Sequence
  Description of Artificial Sequence: Synthetic oligonucleotide
cugaaagauggaaaagggg

SEQ ID NO: 2457077 - RNA, 19 nt, Artificial Sequence
  Description of Artificial Sequence: Synthetic oligonucleotide
gacuguaccauuccuucgg

SEQ ID NO: 2457078 - RNA, 19 nt, Artificial Sequence
  Description of Artificial Sequence: Synthetic oligonucleotide
agcugaaagauggaaaagg

SEQ ID NO: 2457079 - RNA, 19 nt, Artificial Sequence
  Description of Artificial Sequence: Synthetic oligonucleotide
aauucagcgaaguccacau

SEQ ID NO: 2457080 - RNA, 19 nt, Artificial Sequence
  Description of Artificial Sequence: Synthetic oligonucleotide
auucuuugaacaugucagg

SEQ ID NO: 2457081 - RNA, 19 nt, Artificial Sequence
  Description of Artificial Sequence: Synthetic oligonucleotide
ugaugguuugccaaccacc

SEQ ID NO: 2457082 - RNA, 19 nt, Artificial Sequence
  Description of Artificial Sequence: Synthetic oligonucleotide
aaugcagucugcauucagg

SEQ ID NO: 2457083 - RNA, 19 nt, Artificial Sequence
  Description of Artificial Sequence: Synthetic oligonucleotide
uuugaacaugucaggaggc

SEQ ID NO: 2457084 - RNA, 19 nt, Artificial Sequence
  Description of Artificial Sequence: Synthetic oligonucleotide
gagaacuagggacagguac

SEQ ID NO: 2457085 - RNA, 19 nt, Artificial Sequence
  Description of Artificial Sequence: Synthetic oligonucleotide
gacgguaaaauucagcgaa

SEQ ID NO: 2457086 - RNA, 19 nt, Artificial Sequence
  Description of Artificial Sequence: Synthetic oligonucleotide
agcagugucugacagaccu

SEQ ID NO: 2457087 - RNA, 19 nt, Artificial Sequence
  Description of Artificial Sequence: Synthetic oligonucleotide
ggaaccauugaccaucugg

SEQ ID NO: 2457088 - RNA, 19 nt, Artificial Sequence
  Description of Artificial Sequence: Synthetic oligonucleotide
uguaccauuccuucggcca

SEQ ID NO: 2457089 - RNA, 19 nt, Artificial Sequence
  Description of Artificial Sequence: Synthetic oligonucleotide
cauucaggcuccaaagacg

SEQ ID NO: 2457090 - RNA, 19 nt, Artificial Sequence
  Description of Artificial Sequence: Synthetic oligonucleotide
ucaggaggcacucuugaug

SEQ ID NO: 2457091 - RNA, 19 nt, Artificial Sequence
  Description of Artificial Sequence: Synthetic oligonucleotide
ugcuauucuuugaacaugu

SEQ ID NO: 2457092 - RNA, 19 nt, Artificial Sequence
  Description of Artificial Sequence: Synthetic oligonucleotide
guuagugagaguaggagug

SEQ ID NO: 2457093 - RNA, 19 nt, Artificial Sequence
  Description of Artificial Sequence: Synthetic oligonucleotide
gaaccauugaccaucuggc

SEQ ID NO: 2457094 - RNA, 19 nt, Artificial Sequence
  Description of Artificial Sequence: Synthetic oligonucleotide
ucugguuagugagaguagg

SEQ ID NO: 2457095 - RNA, 19 nt, Artificial Sequence
  Description of Artificial Sequence: Synthetic oligonucleotide
cacauagggcucaacacgg

SEQ ID NO: 2457096 - RNA, 19 nt, Artificial Sequence
  Description of Artificial Sequence: Synthetic oligonucleotide
caggaggcacucuugaugg

SEQ ID NO: 2457097 - RNA, 19 nt, Artificial Sequence
  Description of Artificial Sequence: Synthetic oligonucleotide
gaucuaggaguuuagcuga

SEQ ID NO: 2457098 - RNA, 19 nt, Artificial Sequence
  Description of Artificial Sequence: Synthetic oligonucleotide
ucugacagaccugugguag

SEQ ID NO: 2457099 - RNA, 19 nt, Artificial Sequence
  Description of Artificial Sequence: Synthetic oligonucleotide
guggaagugagugagcagg

SEQ ID NO: 2457100 - RNA, 19 nt, Artificial Sequence
  Description of Artificial Sequence: Synthetic oligonucleotide
uccugcuauucuuugaaca

SEQ ID NO: 2457101 - RNA, 19 nt, Artificial Sequence
  Description of Artificial Sequence: Synthetic oligonucleotide
cuaggaguuuagcugaaag

SEQ ID NO: 2457102 - RNA, 19 nt, Artificial Sequence
  Description of Artificial Sequence: Synthetic oligonucleotide
agugagcaggucuggagcg

SEQ ID NO: 2457103 - RNA, 19 nt, Artificial Sequence
  Description of Artificial Sequence: Synthetic oligonucleotide
uggaucuaggaguuuagcu

SEQ ID NO: 2457104 - RNA, 19 nt, Artificial Sequence
  Description of Artificial Sequence: Synthetic oligonucleotide
uguucucuacucuggaucu

SEQ ID NO: 2457105 - RNA, 19 nt, Artificial Sequence
  Description of Artificial Sequence: Synthetic oligonucleotide
aagauggaaaaggggacag

SEQ ID NO: 2457106 - RNA, 19 nt, Artificial Sequence
  Description of Artificial Sequence: Synthetic oligonucleotide
aaagauggaaaaggggaca

SEQ ID NO: 2457107 - RNA, 19 nt, Artificial Sequence
  Description of Artificial Sequence: Synthetic oligonucleotide
uaggaguuuagcugaaaga

SEQ ID NO: 2457108 - RNA, 19 nt, Artificial Sequence
  Description of Artificial Sequence: Synthetic oligonucleotide
ugucugacagaccuguggu

SEQ ID NO: 2457109 - RNA, 19 nt, Artificial Sequence
  Description of Artificial Sequence: Synthetic oligonucleotide
ggaucuaggaguuuagcug

SEQ ID NO: 2457110 - RNA, 19 nt, Artificial Sequence
  Description of Artificial Sequence: Synthetic oligonucleotide
accaccugcagcuucccac

SEQ ID NO: 2457111 - RNA, 19 nt, Artificial Sequence
  Description of Artificial Sequence: Synthetic oligonucleotide
ucacaggcuauuccugggg

SEQ ID NO: 2457112 - RNA, 19 nt, Artificial Sequence
  Description of Artificial Sequence: Synthetic oligonucleotide
auucaggcuccaaagacgg

SEQ ID NO: 2457113 - RNA, 19 nt, Artificial Sequence
  Description of Artificial Sequence: Synthetic oligonucleotide
acagaccugugguaguugg

SEQ ID NO: 2457114 - RNA, 19 nt, Artificial Sequence
  Description of Artificial Sequence: Synthetic oligonucleotide
gaggcaaagggcaauagca

SEQ ID NO: 2457115 - RNA, 19 nt, Artificial Sequence
  Description of Artificial Sequence: Synthetic oligonucleotide
acuguaccauuccuucggc

SEQ ID NO: 2457116 - RNA, 19 nt, Artificial Sequence
  Description of Artificial Sequence: Synthetic oligonucleotide
uagggacagguacacaccc

SEQ ID NO: 2457117 - RNA, 19 nt, Artificial Sequence
  Description of Artificial Sequence: Synthetic oligonucleotide
uccccuauggcugcuauag

SEQ ID NO: 2457118 - RNA, 19 nt, Artificial Sequence
  Description of Artificial Sequence: Synthetic oligonucleotide
ugguuagugagaguaggag

SEQ ID NO: 2457119 - RNA, 19 nt, Artificial Sequence
  Description of Artificial Sequence: Synthetic oligonucleotide
uguguagaccagcaaugca

SEQ ID NO: 2457120 - RNA, 19 nt, Artificial Sequence
  Description of Artificial Sequence: Synthetic oligonucleotide
aggaguuuagcugaaagau

SEQ ID NO: 2457121 - RNA, 19 nt, Artificial Sequence
  Description of Artificial Sequence: Synthetic oligonucleotide
uccuguguagaccagcaau

SEQ ID NO: 2457122 - RNA, 19 nt, Artificial Sequence
  Description of Artificial Sequence: Synthetic oligonucleotide
gagguugaagcagggaggg

SEQ ID NO: 2457123 - RNA, 19 nt, Artificial Sequence
  Description of Artificial Sequence: Synthetic oligonucleotide
ucuggaucuaggaguuuag

SEQ ID NO: 2457124 - RNA, 19 nt, Artificial Sequence
  Description of Artificial Sequence: Synthetic oligonucleotide
cuauucuuugaacauguca

SEQ ID NO: 2457125 - RNA, 19 nt, Artificial Sequence
  Description of Artificial Sequence: Synthetic oligonucleotide
uuagugagaguaggagugg

SEQ ID NO: 2457126 - RNA, 19 nt, Artificial Sequence
  Description of Artificial Sequence: Synthetic oligonucleotide
uucuuugaacaugucagga

SEQ ID NO: 2457127 - RNA, 19 nt, Artificial Sequence
  Description of Artificial Sequence: Synthetic oligonucleotide
gagaguaggaguggcuucg

SEQ ID NO: 2457128 - RNA, 19 nt, Artificial Sequence
  Description of Artificial Sequence: Synthetic oligonucleotide
aacaugucaggaggcacuc

SEQ ID NO: 2457129 - RNA, 19 nt, Artificial Sequence
  Description of Artificial Sequence: Synthetic oligonucleotide
uuggcccugucuaaggaug

SEQ ID NO: 2457130 - RNA, 19 nt, Artificial Sequence
  Description of Artificial Sequence: Synthetic oligonucleotide
uguccuguuccccuauggc

SEQ ID NO: 2457131 - RNA, 19 nt, Artificial Sequence
  Description of Artificial Sequence: Synthetic oligonucleotide
ugcauucaggcuccaaaga

SEQ ID NO: 2457132 - RNA, 19 nt, Artificial Sequence
  Description of Artificial Sequence: Synthetic oligonucleotide
ucuggagcggaagaggccc

SEQ ID NO: 2457133 - RNA, 19 nt, Artificial Sequence
  Description of Artificial Sequence: Synthetic oligonucleotide
uggugggaaccauugacca

SEQ ID NO: 2457134 - RNA, 19 nt, Artificial Sequence
  Description of Artificial Sequence: Synthetic oligonucleotide
ugucaggaggcacucuuga

SEQ ID NO: 2457135 - RNA, 19 nt, Artificial Sequence
  Description of Artificial Sequence: Synthetic oligonucleotide
cugcauucaggcuccaaag

SEQ ID NO: 2457136 - RNA, 19 nt, Artificial Sequence
  Description of Artificial Sequence: Synthetic oligonucleotide
uugaugguuugccaaccac

SEQ ID NO: 2457137 - RNA, 19 nt, Artificial Sequence
  Description of Artificial Sequence: Synthetic oligonucleotide
ucucuacucuggaucuagg

SEQ ID NO: 2457138 - RNA, 19 nt, Artificial Sequence
  Description of Artificial Sequence: Synthetic oligonucleotide
gggagguugaagcagggag

SEQ ID NO: 2457139 - RNA, 19 nt, Artificial Sequence
  Description of Artificial Sequence: Synthetic oligonucleotide
agaccugugguaguugggg

SEQ ID NO: 2457140 - RNA, 19 nt, Artificial Sequence
  Description of Artificial Sequence: Synthetic oligonucleotide
gcugaaagauggaaaaggg

SEQ ID NO: 2457141 - RNA, 19 nt, Artificial Sequence
  Description of Artificial Sequence: Synthetic oligonucleotide
cuagggacagguacacacc

SEQ ID NO: 2457142 - RNA, 19 nt, Artificial Sequence
  Description of Artificial Sequence: Synthetic oligonucleotide
agcuucccacgcuuggccc

SEQ ID NO: 2457143 - RNA, 19 nt, Artificial Sequence
  Description of Artificial Sequence: Synthetic oligonucleotide
uucucuacucuggaucuag

SEQ ID NO: 2457144 - RNA, 19 nt, Artificial Sequence
  Description of Artificial Sequence: Synthetic oligonucleotide
cauccagaggcaaagggca

SEQ ID NO: 2457145 - RNA, 19 nt, Artificial Sequence
  Description of Artificial Sequence: Synthetic oligonucleotide
cagcgaaguccacauaggg

SEQ ID NO: 2457146 - RNA, 19 nt, Artificial Sequence
  Description of Artificial Sequence: Synthetic oligonucleotide
aaaauucagcgaaguccac

SEQ ID NO: 2457147 - RNA, 19 nt, Artificial Sequence
  Description of Artificial Sequence: Synthetic oligonucleotide
guguucucuacucuggauc

SEQ ID NO: 2457148 - RNA, 19 nt, Artificial Sequence
  Description of Artificial Sequence: Synthetic oligonucleotide
cugagaaggcaugacgagg

SEQ ID NO: 2457149 - RNA, 19 nt, Artificial Sequence
  Description of Artificial Sequence: Synthetic oligonucleotide
cucaacacggccauccuca

SEQ ID NO: 2457150 - RNA, 19 nt, Artificial Sequence
  Description of Artificial Sequence: Synthetic oligonucleotide
uugaccaucuggcccugag

SEQ ID NO: 2457151 - RNA, 19 nt, Artificial Sequence
  Description of Artificial Sequence: Synthetic oligonucleotide
accugugguaguugggguc

SEQ ID NO: 2457152 - RNA, 19 nt, Artificial Sequence
  Description of Artificial Sequence: Synthetic oligonucleotide
uaguugggguccauaggcc

SEQ ID NO: 2457153 - RNA, 19 nt, Artificial Sequence
  Description of Artificial Sequence: Synthetic oligonucleotide
augccugugguuuggccuc

SEQ ID NO: 2457154 - RNA, 19 nt, Artificial Sequence
  Description of Artificial Sequence: Synthetic oligonucleotide
aagggcaauagcagagguc

SEQ ID NO: 2457155 - RNA, 19 nt, Artificial Sequence
  Description of Artificial Sequence: Synthetic oligonucleotide
cauagggcucaacacggcc

SEQ ID NO: 2457156 - RNA, 19 nt, Artificial Sequence
  Description of Artificial Sequence: Synthetic oligonucleotide
gacagguacacaccccgug

SEQ ID NO: 2457157 - RNA, 19 nt, Artificial Sequence
  Description of Artificial Sequence: Synthetic oligonucleotide
aagugagugagcaggucug

SEQ ID NO: 2457158 - RNA, 19 nt, Artificial Sequence
  Description of Artificial Sequence: Synthetic oligonucleotide
caaagacgguaaaauucag

SEQ ID NO: 2457159 - RNA, 19 nt, Artificial Sequence
  Description of Artificial Sequence: Synthetic oligonucleotide
ucuugaugguuugccaacc

SEQ ID NO: 2457160 - RNA, 19 nt, Artificial Sequence
  Description of Artificial Sequence: Synthetic oligonucleotide
ugcagccugggacuguacc

SEQ ID NO: 2457161 - RNA, 19 nt, Artificial Sequence
  Description of Artificial Sequence: Synthetic oligonucleotide
agacgguaaaauucagcga

SEQ ID NO: 2457162 - RNA, 19 nt, Artificial Sequence
  Description of Artificial Sequence: Synthetic oligonucleotide
uguccugcagccugggacu

SEQ ID NO: 2457163 - RNA, 19 nt, Artificial Sequence
  Description of Artificial Sequence: Synthetic oligonucleotide
uagaccagcaaugcagucu

SEQ ID NO: 2457164 - RNA, 19 nt, Artificial Sequence
  Description of Artificial Sequence: Synthetic oligonucleotide
aaggaugccugugguuugg

SEQ ID NO: 2457165 - RNA, 19 nt, Artificial Sequence
  Description of Artificial Sequence: Synthetic oligonucleotide
cuauaggccccacuguuuc

SEQ ID NO: 2457166 - RNA, 19 nt, Artificial Sequence
  Description of Artificial Sequence: Synthetic oligonucleotide
aguugggguccauaggcca

SEQ ID NO: 2457167 - RNA, 19 nt, Artificial Sequence
  Description of Artificial Sequence: Synthetic oligonucleotide
uagcugaaagauggaaaag

SEQ ID NO: 2457168 - RNA, 19 nt, Artificial Sequence
  Description of Artificial Sequence: Synthetic oligonucleotide
cuggggagguugaagcagg

SEQ ID NO: 2457169 - RNA, 19 nt, Artificial Sequence
  Description of Artificial Sequence: Synthetic oligonucleotide
aaggcaugacgagggagag

SEQ ID NO: 2457170 - RNA, 19 nt, Artificial Sequence
  Description of Artificial Sequence: Synthetic oligonucleotide
agggagcagugucugacag

SEQ ID NO: 2457171 - RNA, 19 nt, Artificial Sequence
  Description of Artificial Sequence: Synthetic oligonucleotide
uguguguugguggacugga

SEQ ID NO: 2457172 - RNA, 19 nt, Artificial Sequence
  Description of Artificial Sequence: Synthetic oligonucleotide
guaggaguggcuucgucca

SEQ ID NO: 2457173 - RNA, 19 nt, Artificial Sequence
  Description of Artificial Sequence: Synthetic oligonucleotide
ugcuauaggccccacuguu

SEQ ID NO: 2457174 - RNA, 19 nt, Artificial Sequence
  Description of Artificial Sequence: Synthetic oligonucleotide
uaaggaugccugugguuug

SEQ ID NO: 2457175 - RNA, 19 nt, Artificial Sequence
  Description of Artificial Sequence: Synthetic oligonucleotide
gcugcuauaggccccacug

SEQ ID NO: 2457176 - RNA, 19 nt, Artificial Sequence
  Description of Artificial Sequence: Synthetic oligonucleotide
ggacuggagggucagagug

SEQ ID NO: 2457177 - RNA, 19 nt, Artificial Sequence
  Description of Artificial Sequence: Synthetic oligonucleotide
cuguccugcagccugggac

SEQ ID NO: 2457178 - RNA, 19 nt, Artificial Sequence
  Description of Artificial Sequence: Synthetic oligonucleotide
agguacacaccccguguuc

SEQ ID NO: 2457179 - RNA, 19 nt, Artificial Sequence
  Description of Artificial Sequence: Synthetic oligonucleotide
ugaacaugucaggaggcac

SEQ ID NO: 2457180 - RNA, 19 nt, Artificial Sequence
  Description of Artificial Sequence: Synthetic oligonucleotide
caaagggcaauagcagagg

SEQ ID NO: 2457181 - RNA, 19 nt, Artificial Sequence
  Description of Artificial Sequence: Synthetic oligonucleotide
uacucuggaucuaggaguu

SEQ ID NO: 2457182 - RNA, 19 nt, Artificial Sequence
  Description of Artificial Sequence: Synthetic oligonucleotide
acagguacacaccccgugu

SEQ ID NO: 2457183 - RNA, 19 nt, Artificial Sequence
  Description of Artificial Sequence: Synthetic oligonucleotide
uugaacaugucaggaggca

SEQ ID NO: 2457184 - RNA, 19 nt, Artificial Sequence
  Description of Artificial Sequence: Synthetic oligonucleotide
guaccauuccuucggccag

SEQ ID NO: 2457185 - RNA, 19 nt, Artificial Sequence
  Description of Artificial Sequence: Synthetic oligonucleotide
uaggccagcuuccugcuau

SEQ ID NO: 2457186 - RNA, 19 nt, Artificial Sequence
  Description of Artificial Sequence: Synthetic oligonucleotide
ugagaguaggaguggcuuc

SEQ ID NO: 2457187 - RNA, 19 nt, Artificial Sequence
  Description of Artificial Sequence: Synthetic oligonucleotide
gguaguugggguccauagg

SEQ ID NO: 2457188 - RNA, 19 nt, Artificial Sequence
  Description of Artificial Sequence: Synthetic oligonucleotide
ucucucugguccuucccug

SEQ ID NO: 2457189 - RNA, 19 nt, Artificial Sequence
  Description of Artificial Sequence: Synthetic oligonucleotide
ugguuuggccuccagccuc

SEQ ID NO: 2457190 - RNA, 19 nt, Artificial Sequence
  Description of Artificial Sequence: Synthetic oligonucleotide
agaaggcaugacgagggag

SEQ ID NO: 2457191 - RNA, 19 nt, Artificial Sequence
  Description of Artificial Sequence: Synthetic oligonucleotide
uugcaugaacucagcugcc

SEQ ID NO: 2457192 - RNA, 19 nt, Artificial Sequence
  Description of Artificial Sequence: Synthetic oligonucleotide
cuguccuguuccccuaugg

SEQ ID NO: 2457193 - RNA, 19 nt, Artificial Sequence
  Description of Artificial Sequence: Synthetic oligonucleotide
gaugccugugguuuggccu

SEQ ID NO: 2457194 - RNA, 19 nt, Artificial Sequence
  Description of Artificial Sequence: Synthetic oligonucleotide
ucaggcuccaaagacggua

SEQ ID NO: 2457195 - RNA, 19 nt, Artificial Sequence
  Description of Artificial Sequence: Synthetic oligonucleotide
cuguguagaccagcaaugc

SEQ ID NO: 2457196 - RNA, 19 nt, Artificial Sequence
  Description of Artificial Sequence: Synthetic oligonucleotide
cucugguuagugagaguag

SEQ ID NO: 2457197 - RNA, 19 nt, Artificial Sequence
  Description of Artificial Sequence: Synthetic oligonucleotide
ggagguugaagcagggagg

SEQ ID NO: 2457198 - RNA, 19 nt, Artificial Sequence
  Description of Artificial Sequence: Synthetic oligonucleotide
ccuauggcugcuauaggcc

SEQ ID NO: 2457199 - RNA, 19 nt, Artificial Sequence
  Description of Artificial Sequence: Synthetic oligonucleotide
uccauaggccagcuuccug

SEQ ID NO: 2457200 - RNA, 19 nt, Artificial Sequence
  Description of Artificial Sequence: Synthetic oligonucleotide
cuacucuggaucuaggagu

SEQ ID NO: 2457201 - RNA, 19 nt, Artificial Sequence
  Description of Artificial Sequence: Synthetic oligonucleotide
gaacuagggacagguacac

SEQ ID NO: 2457202 - RNA, 19 nt, Artificial Sequence
  Description of Artificial Sequence: Synthetic oligonucleotide
ucuaaggaugccugugguu

SEQ ID NO: 2457203 - RNA, 19 nt, Artificial Sequence
  Description of Artificial Sequence: Synthetic oligonucleotide
guggcuucguccagggugg

SEQ ID NO: 2457204 - RNA, 19 nt, Artificial Sequence
  Description of Artificial Sequence: Synthetic oligonucleotide
cucaccggguggaagugag

SEQ ID NO: 2457205 - RNA, 19 nt, Artificial Sequence
  Description of Artificial Sequence: Synthetic oligonucleotide
gcauucaggcuccaaagac

SEQ ID NO: 2457206 - RNA, 19 nt, Artificial Sequence
  Description of Artificial Sequence: Synthetic oligonucleotide
cucugcguguguguguugg

SEQ ID NO: 2457207 - RNA, 19 nt, Artificial Sequence
  Description of Artificial Sequence: Synthetic oligonucleotide
ugaccaucuggcccugaga

SEQ ID NO: 2457208 - RNA, 19 nt, Artificial Sequence
  Description of Artificial Sequence: Synthetic oligonucleotide
ccaaagacgguaaaauuca

SEQ ID NO: 2457209 - RNA, 19 nt, Artificial Sequence
  Description of Artificial Sequence: Synthetic oligonucleotide
auccucaccggguggaagu

SEQ ID NO: 2457210 - RNA, 19 nt, Artificial Sequence
  Description of Artificial Sequence: Synthetic oligonucleotide
ccauaggccagcuuccugc

SEQ ID NO: 2457211 - RNA, 19 nt, Artificial Sequence
  Description of Artificial Sequence: Synthetic oligonucleotide
aggcaaagggcaauagcag

SEQ ID NO: 2457212 - RNA, 19 nt, Artificial Sequence
  Description of Artificial Sequence: Synthetic oligonucleotide
gaggucacaggcuauuccu

SEQ ID NO: 2457213 - RNA, 19 nt, Artificial Sequence
  Description of Artificial Sequence: Synthetic oligonucleotide
cccuauggcugcuauaggc

SEQ ID NO: 2457214 - RNA, 19 nt, Artificial Sequence
  Description of Artificial Sequence: Synthetic oligonucleotide
gugggaaccauugaccauc

SEQ ID NO: 2457215 - RNA, 19 nt, Artificial Sequence
  Description of Artificial Sequence: Synthetic oligonucleotide
cauuccuucggccagcucu

SEQ ID NO: 2457216 - RNA, 19 nt, Artificial Sequence
  Description of Artificial Sequence: Synthetic oligonucleotide
cuguaccauuccuucggcc

SEQ ID NO: 2457217 - RNA, 19 nt, Artificial Sequence
  Description of Artificial Sequence: Synthetic oligonucleotide
cuggcuguccugcagccug

SEQ ID NO: 2457218 - RNA, 19 nt, Artificial Sequence
  Description of Artificial Sequence: Synthetic oligonucleotide
ugcagucugcauucaggcu

SEQ ID NO: 2457219 - RNA, 19 nt, Artificial Sequence
  Description of Artificial Sequence: Synthetic oligonucleotide
cugugguuuggccuccagc

SEQ ID NO: 2457220 - RNA, 19 nt, Artificial Sequence
  Description of Artificial Sequence: Synthetic oligonucleotide
caaugcagucugcauucag

SEQ ID NO: 2457221 - RNA, 19 nt, Artificial Sequence
  Description of Artificial Sequence: Synthetic oligonucleotide
guggacuggagggucagag

SEQ ID NO: 2457222 - RNA, 19 nt, Artificial Sequence
  Description of Artificial Sequence: Synthetic oligonucleotide
gcaaagggcaauagcagag

SEQ ID NO: 2457223 - RNA, 19 nt, Artificial Sequence
  Description of Artificial Sequence: Synthetic oligonucleotide
uuccugcuauucuuugaac

SEQ ID NO: 2457224 - RNA, 19 nt, Artificial Sequence
  Description of Artificial Sequence: Synthetic oligonucleotide
uggcccugucuaaggaugc

SEQ ID NO: 2457225 - RNA, 19 nt, Artificial Sequence
  Description of Artificial Sequence: Synthetic oligonucleotide
ggguccauaggccagcuuc

SEQ ID NO: 2457226 - RNA, 19 nt, Artificial Sequence
  Description of Artificial Sequence: Synthetic oligonucleotide
guuuagcugaaagauggaa

SEQ ID NO: 2457227 - RNA, 19 nt, Artificial Sequence
  Description of Artificial Sequence: Synthetic oligonucleotide
ccuguguagaccagcaaug

SEQ ID NO: 2457228 - RNA, 19 nt, Artificial Sequence
  Description of Artificial Sequence: Synthetic oligonucleotide
ucucuggcuuuuccaguga

SEQ ID NO: 2457229 - RNA, 19 nt, Artificial Sequence
  Description of Artificial Sequence: Synthetic oligonucleotide
ggacuguaccauuccuucg

SEQ ID NO: 2457230 - RNA, 19 nt, Artificial Sequence
  Description of Artificial Sequence: Synthetic oligonucleotide
accaucuggcccugagaag

SEQ ID NO: 2457231 - RNA, 19 nt, Artificial Sequence
  Description of Artificial Sequence: Synthetic oligonucleotide
ugcaugaacucagcugcca

SEQ ID NO: 2457232 - RNA, 19 nt, Artificial Sequence
  Description of Artificial Sequence: Synthetic oligonucleotide
acauagggcucaacacggc

SEQ ID NO: 2457233 - RNA, 19 nt, Artificial Sequence
  Description of Artificial Sequence: Synthetic oligonucleotide
cuuccugcuauucuuugaa

SEQ ID NO: 2457234 - RNA, 19 nt, Artificial Sequence
  Description of Artificial Sequence: Synthetic oligonucleotide
uagggcucaacacggccau

SEQ ID NO: 2457235 - RNA, 19 nt, Artificial Sequence
  Description of Artificial Sequence: Synthetic oligonucleotide
cagaccugugguaguuggg

SEQ ID NO: 2457236 - RNA, 19 nt, Artificial Sequence
  Description of Artificial Sequence: Synthetic oligonucleotide
agugagaacuagggacagg

SEQ ID NO: 2457237 - RNA, 19 nt, Artificial Sequence
  Description of Artificial Sequence: Synthetic oligonucleotide
ggaguuuagcugaaagaug

SEQ ID NO: 2457238 - RNA, 19 nt, Artificial Sequence
  Description of Artificial Sequence: Synthetic oligonucleotide
ggcuuuuccagugagaacu

SEQ ID NO: 2457239 - RNA, 19 nt, Artificial Sequence
  Description of Artificial Sequence: Synthetic oligonucleotide
cucuggcuuuuccagugag

SEQ ID NO: 2457240 - RNA, 19 nt, Artificial Sequence
  Description of Artificial Sequence: Synthetic oligonucleotide
cuggaucuaggaguuuagc

SEQ ID NO: 2457241 - RNA, 19 nt, Artificial Sequence
  Description of Artificial Sequence: Synthetic oligonucleotide
cucuacucuggaucuagga

SEQ ID NO: 2457242 - RNA, 19 nt, Artificial Sequence
  Description of Artificial Sequence: Synthetic oligonucleotide
ugagaacuagggacaggua

SEQ ID NO: 2457243 - RNA, 19 nt, Artificial Sequence
  Description of Artificial Sequence: Synthetic oligonucleotide
gguugaagcagggagggca

SEQ ID NO: 2457244 - RNA, 19 nt, Artificial Sequence
  Description of Artificial Sequence: Synthetic oligonucleotide
uguugguggacuggagggu

SEQ ID NO: 2457245 - RNA, 19 nt, Artificial Sequence
  Description of Artificial Sequence: Synthetic oligonucleotide
gcuucguccaggguggagg

SEQ ID NO: 2457246 - RNA, 19 nt, Artificial Sequence
  Description of Artificial Sequence: Synthetic oligonucleotide
cuuuuccagugagaacuag

SEQ ID NO: 2457247 - RNA, 19 nt, Artificial Sequence
  Description of Artificial Sequence: Synthetic oligonucleotide
ucuggcccugagaaggcau

SEQ ID NO: 2457248 - RNA, 19 nt, Artificial Sequence
  Description of Artificial Sequence: Synthetic oligonucleotide
aggaguggcuucguccagg

SEQ ID NO: 2457249 - RNA, 19 nt, Artificial Sequence
  Description of Artificial Sequence: Synthetic oligonucleotide
augguuugccaaccaccug

SEQ ID NO: 2457250 - RNA, 19 nt, Artificial Sequence
  Description of Artificial Sequence: Synthetic oligonucleotide
cagcuucccacgcuuggcc

SEQ ID NO: 2457251 - RNA, 19 nt, Artificial Sequence
  Description of Artificial Sequence: Synthetic oligonucleotide
cugucuaaggaugccugug

SEQ ID NO: 2457252 - RNA, 19 nt, Artificial Sequence
  Description of Artificial Sequence: Synthetic oligonucleotide
auagggcucaacacggcca

SEQ ID NO: 2457253 - RNA, 19 nt, Artificial Sequence
  Description of Artificial Sequence: Synthetic oligonucleotide
acgguaaaauucagcgaag

SEQ ID NO: 2457254 - RNA, 19 nt, Artificial Sequence
  Description of Artificial Sequence: Synthetic oligonucleotide
caucuggcccugagaaggc

SEQ ID NO: 2457255 - RNA, 19 nt, Artificial Sequence
  Description of Artificial Sequence: Synthetic oligonucleotide
uggcuuuuccagugagaac

SEQ ID NO: 2457256 - RNA, 19 nt, Artificial Sequence
  Description of Artificial Sequence: Synthetic oligonucleotide
caccggguggaagugagug

SEQ ID NO: 2457257 - RNA, 19 nt, Artificial Sequence
  Description of Artificial Sequence: Synthetic oligonucleotide
gugagaacuagggacaggu

SEQ ID NO: 2457258 - RNA, 19 nt, Artificial Sequence
  Description of Artificial Sequence: Synthetic oligonucleotide
guugggguccauaggccag

SEQ ID NO: 2457259 - RNA, 19 nt, Artificial Sequence
  Description of Artificial Sequence: Synthetic oligonucleotide
ggaguggcuucguccaggg

SEQ ID NO: 2457260 - RNA, 19 nt, Artificial Sequence
  Description of Artificial Sequence: Synthetic oligonucleotide
accagcaaugcagucugca

SEQ ID NO: 2457261 - RNA, 19 nt, Artificial Sequence
  Description of Artificial Sequence: Synthetic oligonucleotide
ugagcaggucuggagcgga

SEQ ID NO: 2457262 - RNA, 19 nt, Artificial Sequence
  Description of Artificial Sequence: Synthetic oligonucleotide
cuugaugguuugccaacca

SEQ ID NO: 2457263 - RNA, 19 nt, Artificial Sequence
  Description of Artificial Sequence: Synthetic oligonucleotide
guguguguugguggacugg

SEQ ID NO: 2457264 - RNA, 19 nt, Artificial Sequence
  Description of Artificial Sequence: Synthetic oligonucleotide
ucaacacggccauccucac

SEQ ID NO: 2457265 - RNA, 19 nt, Artificial Sequence
  Description of Artificial Sequence: Synthetic oligonucleotide
gguuagugagaguaggagu

SEQ ID NO: 2457266 - RNA, 19 nt, Artificial Sequence
  Description of Artificial Sequence: Synthetic oligonucleotide
gguggaagugagugagcag

SEQ ID NO: 2457267 - RNA, 19 nt, Artificial Sequence
  Description of Artificial Sequence: Synthetic oligonucleotide
cagugagaacuagggacag

SEQ ID NO: 2457268 - RNA, 19 nt, Artificial Sequence
  Description of Artificial Sequence: Synthetic oligonucleotide
ccugagaaggcaugacgag

SEQ ID NO: 2457269 - RNA, 19 nt, Artificial Sequence
  Description of Artificial Sequence: Synthetic oligonucleotide
cacucuugaugguuugcca

SEQ ID NO: 2457270 - RNA, 19 nt, Artificial Sequence
  Description of Artificial Sequence: Synthetic oligonucleotide
gaacaugucaggaggcacu

SEQ ID NO: 2457271 - RNA, 19 nt, Artificial Sequence
  Description of Artificial Sequence: Synthetic oligonucleotide
gagggagcagugucugaca

SEQ ID NO: 2457272 - RNA, 19 nt, Artificial Sequence
  Description of Artificial Sequence: Synthetic oligonucleotide
uacacaccccguguucucu

SEQ ID NO: 2457273 - RNA, 19 nt, Artificial Sequence
  Description of Artificial Sequence: Synthetic oligonucleotide
ucuaggaguuuagcugaaa

SEQ ID NO: 2457274 - RNA, 19 nt, Artificial Sequence
  Description of Artificial Sequence: Synthetic oligonucleotide
guagaccagcaaugcaguc

SEQ ID NO: 2457275 - RNA, 19 nt, Artificial Sequence
  Description of Artificial Sequence: Synthetic oligonucleotide
gacagaccugugguaguug

SEQ ID NO: 2457276 - RNA, 19 nt, Artificial Sequence
  Description of Artificial Sequence: Synthetic oligonucleotide
ggucuggagcggaagaggc

SEQ ID NO: 2457277 - RNA, 19 nt, Artificial Sequence
  Description of Artificial Sequence: Synthetic oligonucleotide
ucugcguguguguguuggu

SEQ ID NO: 2457278 - RNA, 19 nt, Artificial Sequence
  Description of Artificial Sequence: Synthetic oligonucleotide
aggaugccugugguuuggc

SEQ ID NO: 2457279 - RNA, 19 nt, Artificial Sequence
  Description of Artificial Sequence: Synthetic oligonucleotide
guuugccaaccaccugcag

SEQ ID NO: 2457280 - RNA, 19 nt, Artificial Sequence
  Description of Artificial Sequence: Synthetic oligonucleotide
guugguggacuggaggguc

SEQ ID NO: 2457281 - RNA, 19 nt, Artificial Sequence
  Description of Artificial Sequence: Synthetic oligonucleotide
ggccccacuguuucucugg

SEQ ID NO: 2457282 - RNA, 19 nt, Artificial Sequence
  Description of Artificial Sequence: Synthetic oligonucleotide
caccccguguucucuacuc

SEQ ID NO: 2457283 - RNA, 19 nt, Artificial Sequence
  Description of Artificial Sequence: Synthetic oligonucleotide
accggguggaagugaguga

SEQ ID NO: 2457284 - RNA, 19 nt, Artificial Sequence
  Description of Artificial Sequence: Synthetic oligonucleotide
agcaggucuggagcggaag

SEQ ID NO: 2457285 - RNA, 19 nt, Artificial Sequence
  Description of Artificial Sequence: Synthetic oligonucleotide
guccuguuccccuauggcu

SEQ ID NO: 2457286 - RNA, 19 nt, Artificial Sequence
  Description of Artificial Sequence: Synthetic oligonucleotide
ggggacagccauccagagg

SEQ ID NO: 2457287 - RNA, 19 nt, Artificial Sequence
  Description of Artificial Sequence: Synthetic oligonucleotide
ccagugagaacuagggaca

SEQ ID NO: 2457288 - RNA, 19 nt, Artificial Sequence
  Description of Artificial Sequence: Synthetic oligonucleotide
ugcugcucugcgugugugu

SEQ ID NO: 2457289 - RNA, 19 nt, Artificial Sequence
  Description of Artificial Sequence: Synthetic oligonucleotide
gaguaggaguggcuucguc

SEQ ID NO: 2457290 - RNA, 19 nt, Artificial Sequence
  Description of Artificial Sequence: Synthetic oligonucleotide
ccaaccaccugcagcuucc

SEQ ID NO: 2457291 - RNA, 19 nt, Artificial Sequence
  Description of Artificial Sequence: Synthetic oligonucleotide
uccagaggcaaagggcaau

SEQ ID NO: 2457292 - RNA, 19 nt, Artificial Sequence
  Description of Artificial Sequence: Synthetic oligonucleotide
cagaggcaaagggcaauag

SEQ ID NO: 2457293 - RNA, 19 nt, Artificial Sequence
  Description of Artificial Sequence: Synthetic oligonucleotide
uaccauuccuucggccagc

SEQ ID NO: 2457294 - RNA, 19 nt, Artificial Sequence
  Description of Artificial Sequence: Synthetic oligonucleotide
caacacggccauccucacc

SEQ ID NO: 2457295 - RNA, 19 nt, Artificial Sequence
  Description of Artificial Sequence: Synthetic oligonucleotide
cuucccuguccuguucccc

SEQ ID NO: 2457296 - RNA, 19 nt, Artificial Sequence
  Description of Artificial Sequence: Synthetic oligonucleotide
ugacagaccugugguaguu

SEQ ID NO: 2457297 - RNA, 19 nt, Artificial Sequence
  Description of Artificial Sequence: Synthetic oligonucleotide
cccguguucucuacucugg

SEQ ID NO: 2457298 - RNA, 19 nt, Artificial Sequence
  Description of Artificial Sequence: Synthetic oligonucleotide
ugguggacuggagggucag

SEQ ID NO: 2457299 - RNA, 19 nt, Artificial Sequence
  Description of Artificial Sequence: Synthetic oligonucleotide
cuaaggaugccugugguuu

SEQ ID NO: 2457300 - RNA, 19 nt, Artificial Sequence
  Description of Artificial Sequence: Synthetic oligonucleotide
uugaagcagggagggcagc

SEQ ID NO: 2457301 - RNA, 19 nt, Artificial Sequence
  Description of Artificial Sequence: Synthetic oligonucleotide
cacaggcuauuccugggga

SEQ ID NO: 2457302 - RNA, 19 nt, Artificial Sequence
  Description of Artificial Sequence: Synthetic oligonucleotide
ccaccugcagcuucccacg

SEQ ID NO: 2457303 - RNA, 19 nt, Artificial Sequence
  Description of Artificial Sequence: Synthetic oligonucleotide
gcuauuccuggggagguug

SEQ ID NO: 2457304 - RNA, 19 nt, Artificial Sequence
  Description of Artificial Sequence: Synthetic oligonucleotide
aggucacaggcuauuccug

SEQ ID NO: 2457305 - RNA, 19 nt, Artificial Sequence
  Description of Artificial Sequence: Synthetic oligonucleotide
accccguguucucuacucu

SEQ ID NO: 2457306 - RNA, 19 nt, Artificial Sequence
  Description of Artificial Sequence: Synthetic oligonucleotide
ugcucugcguguguguguu

SEQ ID NO: 2457307 - RNA, 19 nt, Artificial Sequence
  Description of Artificial Sequence: Synthetic oligonucleotide
cuggagcggaagaggcccc

SEQ ID NO: 2457308 - RNA, 19 nt, Artificial Sequence
  Description of Artificial Sequence: Synthetic oligonucleotide
cacggccauccucaccggg

SEQ ID NO: 2457309 - RNA, 19 nt, Artificial Sequence
  Description of Artificial Sequence: Synthetic oligonucleotide
gcucugguuagugagagua

SEQ ID NO: 2457310 - RNA, 19 nt, Artificial Sequence
  Description of Artificial Sequence: Synthetic oligonucleotide
uccucaccggguggaagug

SEQ ID NO: 2457311 - RNA, 19 nt, Artificial Sequence
  Description of Artificial Sequence: Synthetic oligonucleotide
gguccauaggccagcuucc

SEQ ID NO: 2457312 - RNA, 19 nt, Artificial Sequence
  Description of Artificial Sequence: Synthetic oligonucleotide
cuauuccuggggagguuga

SEQ ID NO: 2457313 - RNA, 19 nt, Artificial Sequence
  Description of Artificial Sequence: Synthetic oligonucleotide
acacggccauccucaccgg

SEQ ID NO: 2457314 - RNA, 19 nt, Artificial Sequence
  Description of Artificial Sequence: Synthetic oligonucleotide
augucaggaggcacucuug

SEQ ID NO: 2457315 - RNA, 19 nt, Artificial Sequence
  Description of Artificial Sequence: Synthetic oligonucleotide
gggcucaacacggccaucc

SEQ ID NO: 2457316 - RNA, 19 nt, Artificial Sequence
  Description of Artificial Sequence: Synthetic oligonucleotide
ccugugguaguuggggucc

SEQ ID NO: 2457317 - RNA, 19 nt, Artificial Sequence
  Description of Artificial Sequence: Synthetic oligonucleotide
gucuaaggaugccuguggu

SEQ ID NO: 2457318 - RNA, 19 nt, Artificial Sequence
  Description of Artificial Sequence: Synthetic oligonucleotide
ucaccggguggaagugagu

SEQ ID NO: 2457319 - RNA, 19 nt, Artificial Sequence
  Description of Artificial Sequence: Synthetic oligonucleotide
ggaugccugugguuuggcc

SEQ ID NO: 2457320 - RNA, 19 nt, Artificial Sequence
  Description of Artificial Sequence: Synthetic oligonucleotide
aggcuauuccuggggaggu

SEQ ID NO: 2457321 - RNA, 19 nt, Artificial Sequence
  Description of Artificial Sequence: Synthetic oligonucleotide
cauccucaccggguggaag

SEQ ID NO: 2457322 - RNA, 19 nt, Artificial Sequence
  Description of Artificial Sequence: Synthetic oligonucleotide
ccugggacuguaccauucc

SEQ ID NO: 2457323 - RNA, 19 nt, Artificial Sequence
  Description of Artificial Sequence: Synthetic oligonucleotide
caggcuccaaagacgguaa

SEQ ID NO: 2457324 - RNA, 19 nt, Artificial Sequence
  Description of Artificial Sequence: Synthetic oligonucleotide
cacaccccguguucucuac

SEQ ID NO: 2457325 - RNA, 19 nt, Artificial Sequence
  Description of Artificial Sequence: Synthetic oligonucleotide
cuggagggucagagugggg

SEQ ID NO: 2457326 - RNA, 19 nt, Artificial Sequence
  Description of Artificial Sequence: Synthetic oligonucleotide
auucagcgaaguccacaua

SEQ ID NO: 2457327 - RNA, 19 nt, Artificial Sequence
  Description of Artificial Sequence: Synthetic oligonucleotide
acgcuuggcccugucuaag

SEQ ID NO: 2457328 - RNA, 19 nt, Artificial Sequence
  Description of Artificial Sequence: Synthetic oligonucleotide
uccuucggccagcucucuc

SEQ ID NO: 2457329 - RNA, 19 nt, Artificial Sequence
  Description of Artificial Sequence: Synthetic oligonucleotide
acaccccguguucucuacu

SEQ ID NO: 2457330 - RNA, 19 nt, Artificial Sequence
  Description of Artificial Sequence: Synthetic oligonucleotide
ggcaauagcagaggucaca

SEQ ID NO: 2457331 - RNA, 19 nt, Artificial Sequence
  Description of Artificial Sequence: Synthetic oligonucleotide
gaccugugguaguuggggu

SEQ ID NO: 2457332 - RNA, 19 nt, Artificial Sequence
  Description of Artificial Sequence: Synthetic oligonucleotide
ccggguggaagugagugag

SEQ ID NO: 2457333 - RNA, 19 nt, Artificial Sequence
  Description of Artificial Sequence: Synthetic oligonucleotide
aggaggcacucuugauggu

SEQ ID NO: 2457334 - RNA, 19 nt, Artificial Sequence
  Description of Artificial Sequence: Synthetic oligonucleotide
gccuugagggagcaguguc

SEQ ID NO: 2457335 - RNA, 19 nt, Artificial Sequence
  Description of Artificial Sequence: Synthetic oligonucleotide
gucagaguggggcucuggu

SEQ ID NO: 2457336 - RNA, 19 nt, Artificial Sequence
  Description of Artificial Sequence: Synthetic oligonucleotide
gcagccugggacuguacca

SEQ ID NO: 2457337 - RNA, 19 nt, Artificial Sequence
  Description of Artificial Sequence: Synthetic oligonucleotide
cuccaaagacgguaaaauu

SEQ ID NO: 2457338 - RNA, 19 nt, Artificial Sequence
  Description of Artificial Sequence: Synthetic oligonucleotide
guguguugguggacuggag

SEQ ID NO: 2457339 - RNA, 19 nt, Artificial Sequence
  Description of Artificial Sequence: Synthetic oligonucleotide
ccuguuccccuauggcugc

SEQ ID NO: 2457340 - RNA, 19 nt, Artificial Sequence
  Description of Artificial Sequence: Synthetic oligonucleotide
acagccauccagaggcaaa

SEQ ID NO: 2457341 - RNA, 19 nt, Artificial Sequence
  Description of Artificial Sequence: Synthetic oligonucleotide
gcuuccugcuauucuuuga

SEQ ID NO: 2457342 - RNA, 19 nt, Artificial Sequence
  Description of Artificial Sequence: Synthetic oligonucleotide
uuccccuauggcugcuaua

SEQ ID NO: 2457343 - RNA, 19 nt, Artificial Sequence
  Description of Artificial Sequence: Synthetic oligonucleotide
caccugcagcuucccacgc

SEQ ID NO: 2457344 - RNA, 19 nt, Artificial Sequence
  Description of Artificial Sequence: Synthetic oligonucleotide
agaguaggaguggcuucgu

SEQ ID NO: 2457345 - RNA, 19 nt, Artificial Sequence
  Description of Artificial Sequence: Synthetic oligonucleotide
aaguccacauagggcucaa

SEQ ID NO: 2457346 - RNA, 19 nt, Artificial Sequence
  Description of Artificial Sequence: Synthetic oligonucleotide
agccuugagggagcagugu

SEQ ID NO: 2457347 - RNA, 19 nt, Artificial Sequence
  Description of Artificial Sequence: Synthetic oligonucleotide
acggccauccucaccgggu

SEQ ID NO: 2457348 - RNA, 19 nt, Artificial Sequence
  Description of Artificial Sequence: Synthetic oligonucleotide
gacagccauccagaggcaa

SEQ ID NO: 2457349 - RNA, 19 nt, Artificial Sequence
  Description of Artificial Sequence: Synthetic oligonucleotide
gcugcucugcgugugugug

SEQ ID NO: 2457350 - RNA, 19 nt, Artificial Sequence
  Description of Artificial Sequence: Synthetic oligonucleotide
gguuuggccuccagccucc

SEQ ID NO: 2457351 - RNA, 19 nt, Artificial Sequence
  Description of Artificial Sequence: Synthetic oligonucleotide
gcaggucuggagcggaaga

SEQ ID NO: 2457352 - RNA, 19 nt, Artificial Sequence
  Description of Artificial Sequence: Synthetic oligonucleotide
agcagggagggcagccuug

SEQ ID NO: 2457353 - RNA, 19 nt, Artificial Sequence
  Description of Artificial Sequence: Synthetic oligonucleotide
acaugucaggaggcacucu

SEQ ID NO: 2457354 - RNA, 19 nt, Artificial Sequence
  Description of Artificial Sequence: Synthetic oligonucleotide
acacaccccguguucucua

SEQ ID NO: 2457355 - RNA, 19 nt, Artificial Sequence
  Description of Artificial Sequence: Synthetic oligonucleotide
aggcuccaaagacgguaaa

SEQ ID NO: 2457356 - RNA, 19 nt, Artificial Sequence
  Description of Artificial Sequence: Synthetic oligonucleotide
gcucaacacggccauccuc

SEQ ID NO: 2457357 - RNA, 19 nt, Artificial Sequence
  Description of Artificial Sequence: Synthetic oligonucleotide
aucuggcccugagaaggca

SEQ ID NO: 2457358 - RNA, 19 nt, Artificial Sequence
  Description of Artificial Sequence: Synthetic oligonucleotide
ggcacucuugaugguuugc

SEQ ID NO: 2457359 - RNA, 19 nt, Artificial Sequence
  Description of Artificial Sequence: Synthetic oligonucleotide
gcuccaaagacgguaaaau

SEQ ID NO: 2457360 - RNA, 19 nt, Artificial Sequence
  Description of Artificial Sequence: Synthetic oligonucleotide
gugagaguaggaguggcuu

SEQ ID NO: 2457361 - RNA, 19 nt, Artificial Sequence
  Description of Artificial Sequence: Synthetic oligonucleotide
auaggccagcuuccugcua

SEQ ID NO: 2457362 - RNA, 19 nt, Artificial Sequence
  Description of Artificial Sequence: Synthetic oligonucleotide
cuucccacgcuuggcccug

SEQ ID NO: 2457363 - RNA, 19 nt, Artificial Sequence
  Description of Artificial Sequence: Synthetic oligonucleotide
ucccuguccuguuccccua

SEQ ID NO: 2457364 - RNA, 19 nt, Artificial Sequence
  Description of Artificial Sequence: Synthetic oligonucleotide
cagugucugacagaccugu

SEQ ID NO: 2457365 - RNA, 19 nt, Artificial Sequence
  Description of Artificial Sequence: Synthetic oligonucleotide
cacuggugggaaccauuga

SEQ ID NO: 2457366 - RNA, 19 nt, Artificial Sequence
  Description of Artificial Sequence: Synthetic oligonucleotide
cacgcuuggcccugucuaa

SEQ ID NO: 2457367 - RNA, 19 nt, Artificial Sequence
  Description of Artificial Sequence: Synthetic oligonucleotide
caaccaccugcagcuuccc

SEQ ID NO: 2457368 - RNA, 19 nt, Artificial Sequence
  Description of Artificial Sequence: Synthetic oligonucleotide
aucuaggaguuuagcugaa

SEQ ID NO: 2457369 - RNA, 19 nt, Artificial Sequence
  Description of Artificial Sequence: Synthetic oligonucleotide
cauaggccagcuuccugcu

SEQ ID NO: 2457370 - RNA, 19 nt, Artificial Sequence
  Description of Artificial Sequence: Synthetic oligonucleotide
ccccguguucucuacucug

SEQ ID NO: 2457371 - RNA, 19 nt, Artificial Sequence
  Description of Artificial Sequence: Synthetic oligonucleotide
gugguuuggccuccagccu

SEQ ID NO: 2457372 - RNA, 19 nt, Artificial Sequence
  Description of Artificial Sequence: Synthetic oligonucleotide
ugggguccauaggccagcu

SEQ ID NO: 2457373 - RNA, 19 nt, Artificial Sequence
  Description of Artificial Sequence: Synthetic oligonucleotide
ugugguaguugggguccau

SEQ ID NO: 2457374 - RNA, 19 nt, Artificial Sequence
  Description of Artificial Sequence: Synthetic oligonucleotide
ccauugaccaucuggcccu

SEQ ID NO: 2457375 - RNA, 19 nt, Artificial Sequence
  Description of Artificial Sequence: Synthetic oligonucleotide
cauugaccaucuggcccug

SEQ ID NO: 2457376 - RNA, 19 nt, Artificial Sequence
  Description of Artificial Sequence: Synthetic oligonucleotide
gcguguguguguuggugga

SEQ ID NO: 2457377 - RNA, 19 nt, Artificial Sequence
  Description of Artificial Sequence: Synthetic oligonucleotide
gguuugccaaccaccugca

SEQ ID NO: 2457378 - RNA, 19 nt, Artificial Sequence
  Description of Artificial Sequence: Synthetic oligonucleotide
ccugcuauucuuugaacau

SEQ ID NO: 2457379 - RNA, 19 nt, Artificial Sequence
  Description of Artificial Sequence: Synthetic oligonucleotide
gcagcuucccacgcuuggc

SEQ ID NO: 2457380 - RNA, 19 nt, Artificial Sequence
  Description of Artificial Sequence: Synthetic oligonucleotide
agccugggacuguaccauu

SEQ ID NO: 2457381 - RNA, 19 nt, Artificial Sequence
  Description of Artificial Sequence: Synthetic oligonucleotide
uguuccccuauggcugcua

SEQ ID NO: 2457382 - RNA, 19 nt, Artificial Sequence
  Description of Artificial Sequence: Synthetic oligonucleotide
gccaaccaccugcagcuuc

SEQ ID NO: 2457383 - RNA, 19 nt, Artificial Sequence
  Description of Artificial Sequence: Synthetic oligonucleotide
cugacagaccugugguagu

SEQ ID NO: 2457384 - RNA, 19 nt, Artificial Sequence
  Description of Artificial Sequence: Synthetic oligonucleotide
aggcaugacgagggagaga

SEQ ID NO: 2457385 - RNA, 19 nt, Artificial Sequence
  Description of Artificial Sequence: Synthetic oligonucleotide
ggcuccaaagacgguaaaa

SEQ ID NO: 2457386 - RNA, 19 nt, Artificial Sequence
  Description of Artificial Sequence: Synthetic oligonucleotide
agcagaggucacaggcuau

SEQ ID NO: 2457387 - RNA, 19 nt, Artificial Sequence
  Description of Artificial Sequence: Synthetic oligonucleotide
agggcucaacacggccauc

SEQ ID NO: 2457388 - RNA, 19 nt, Artificial Sequence
  Description of Artificial Sequence: Synthetic oligonucleotide
gaggcacucuugaugguuu

SEQ ID NO: 2457389 - RNA, 19 nt, Artificial Sequence
  Description of Artificial Sequence: Synthetic oligonucleotide
gcuauucuuugaacauguc

SEQ ID NO: 2457390 - RNA, 19 nt, Artificial Sequence
  Description of Artificial Sequence: Synthetic oligonucleotide
gcagccuugagggagcagu

SEQ ID NO: 2457391 - RNA, 19 nt, Artificial Sequence
  Description of Artificial Sequence: Synthetic oligonucleotide
cugcagccugggacuguac

SEQ ID NO: 2457392 - RNA, 19 nt, Artificial Sequence
  Description of Artificial Sequence: Synthetic oligonucleotide
cugcuauaggccccacugu

SEQ ID NO: 2457393 - RNA, 19 nt, Artificial Sequence
  Description of Artificial Sequence: Synthetic oligonucleotide
gucaggaggcacucuugau

SEQ ID NO: 2457394 - RNA, 19 nt, Artificial Sequence
  Description of Artificial Sequence: Synthetic oligonucleotide
cuccuguguagaccagcaa

SEQ ID NO: 2457395 - RNA, 19 nt, Artificial Sequence
  Description of Artificial Sequence: Synthetic oligonucleotide
ccccuauggcugcuauagg

SEQ ID NO: 2457396 - RNA, 19 nt, Artificial Sequence
  Description of Artificial Sequence: Synthetic oligonucleotide
auugaccaucuggcccuga

SEQ ID NO: 2457397 - RNA, 19 nt, Artificial Sequence
  Description of Artificial Sequence: Synthetic oligonucleotide
gcagugucugacagaccug

SEQ ID NO: 2457398 - RNA, 19 nt, Artificial Sequence
  Description of Artificial Sequence: Synthetic oligonucleotide
gccuccuguguagaccagc

SEQ ID NO: 2457399 - RNA, 19 nt, Artificial Sequence
  Description of Artificial Sequence: Synthetic oligonucleotide
cucucugguccuucccugu

SEQ ID NO: 2457400 - RNA, 19 nt, Artificial Sequence
  Description of Artificial Sequence: Synthetic oligonucleotide
ggcccugucuaaggaugcc

SEQ ID NO: 2457401 - RNA, 19 nt, Artificial Sequence
  Description of Artificial Sequence: Synthetic oligonucleotide
guucucuacucuggaucua

SEQ ID NO: 2457402 - RNA, 19 nt, Artificial Sequence
  Description of Artificial Sequence: Synthetic oligonucleotide
gggaaccauugaccaucug

SEQ ID NO: 2457403 - RNA, 19 nt, Artificial Sequence
  Description of Artificial Sequence: Synthetic oligonucleotide
ucccacgcuuggcccuguc

SEQ ID NO: 2457404 - RNA, 19 nt, Artificial Sequence
  Description of Artificial Sequence: Synthetic oligonucleotide
gcugccagcuggcuguccu

SEQ ID NO: 2457405 - RNA, 19 nt, Artificial Sequence
  Description of Artificial Sequence: Synthetic oligonucleotide
ggugggaaccauugaccau

SEQ ID NO: 2457406 - RNA, 19 nt, Artificial Sequence
  Description of Artificial Sequence: Synthetic oligonucleotide
gccugggacuguaccauuc

SEQ ID NO: 2457407 - RNA, 19 nt, Artificial Sequence
  Description of Artificial Sequence: Synthetic oligonucleotide
cagcucucucugguccuuc

SEQ ID NO: 2457408 - RNA, 19 nt, Artificial Sequence
  Description of Artificial Sequence: Synthetic oligonucleotide
ggcuguccugcagccuggg

SEQ ID NO: 2457409 - RNA, 19 nt, Artificial Sequence
  Description of Artificial Sequence: Synthetic oligonucleotide
ggggcucugguuagugaga

SEQ ID NO: 2457410 - RNA, 19 nt, Artificial Sequence
  Description of Artificial Sequence: Synthetic oligonucleotide
ggcccugagaaggcaugac

SEQ ID NO: 2457411 - RNA, 19 nt, Artificial Sequence
  Description of Artificial Sequence: Synthetic oligonucleotide
ccuguccuguuccccuaug

SEQ ID NO: 2457412 - RNA, 19 nt, Artificial Sequence
  Description of Artificial Sequence: Synthetic oligonucleotide
ggcuucguccaggguggag

SEQ ID NO: 2457413 - RNA, 19 nt, Artificial Sequence
  Description of Artificial Sequence: Synthetic oligonucleotide
cagguacacaccccguguu

SEQ ID NO: 2457414 - RNA, 19 nt, Artificial Sequence
  Description of Artificial Sequence: Synthetic oligonucleotide
uggcuucguccagggugga

SEQ ID NO: 2457415 - RNA, 19 nt, Artificial Sequence
  Description of Artificial Sequence: Synthetic oligonucleotide
gggcaauagcagaggucac

SEQ ID NO: 2457416 - RNA, 19 nt, Artificial Sequence
  Description of Artificial Sequence: Synthetic oligonucleotide
gcaaugcagucugcauuca

SEQ ID NO: 2457417 - RNA, 19 nt, Artificial Sequence
  Description of Artificial Sequence: Synthetic oligonucleotide
gaguggcuucguccagggu

SEQ ID NO: 2457418 - RNA, 19 nt, Artificial Sequence
  Description of Artificial Sequence: Synthetic oligonucleotide
guccauaggccagcuuccu

SEQ ID NO: 2457419 - RNA, 19 nt, Artificial Sequence
  Description of Artificial Sequence: Synthetic oligonucleotide
cugugguaguuggggucca

SEQ ID NO: 2457420 - RNA, 19 nt, Artificial Sequence
  Description of Artificial Sequence: Synthetic oligonucleotide
gcuuuuccagugagaacua

SEQ ID NO: 2457421 - RNA, 19 nt, Artificial Sequence
  Description of Artificial Sequence: Synthetic oligonucleotide
ccguguucucuacucugga

SEQ ID NO: 2457422 - RNA, 19 nt, Artificial Sequence
  Description of Artificial Sequence: Synthetic oligonucleotide
gucugcauucaggcuccaa

SEQ ID NO: 2457423 - RNA, 19 nt, Artificial Sequence
  Description of Artificial Sequence: Synthetic oligonucleotide
cugcucugcgugugugugu

SEQ ID NO: 2457424 - RNA, 19 nt, Artificial Sequence
  Description of Artificial Sequence: Synthetic oligonucleotide
ccccaucagagcuggagcu

SEQ ID NO: 2457425 - RNA, 19 nt, Artificial Sequence
  Description of Artificial Sequence: Synthetic oligonucleotide
gcuucccacgcuuggcccu

SEQ ID NO: 2457426 - RNA, 19 nt, Artificial Sequence
  Description of Artificial Sequence: Synthetic oligonucleotide
gcucugcguguguguguug

SEQ ID NO: 2457427 - RNA, 19 nt, Artificial Sequence
  Description of Artificial Sequence: Synthetic oligonucleotide
uucccacgcuuggcccugu

SEQ ID NO: 2457428 - RNA, 19 nt, Artificial Sequence
  Description of Artificial Sequence: Synthetic oligonucleotide
ggaggcacucuugaugguu

SEQ ID NO: 2457429 - RNA, 19 nt, Artificial Sequence
  Description of Artificial Sequence: Synthetic oligonucleotide
cagccugggacuguaccau

SEQ ID NO: 2457430 - RNA, 19 nt, Artificial Sequence
  Description of Artificial Sequence: Synthetic oligonucleotide
gcuguccugcagccuggga

SEQ ID NO: 2457431 - RNA, 19 nt, Artificial Sequence
  Description of Artificial Sequence: Synthetic oligonucleotide
gcuauaggccccacuguuu

SEQ ID NO: 2457432 - RNA, 19 nt, Artificial Sequence
  Description of Artificial Sequence: Synthetic oligonucleotide
ggacagccauccagaggca

SEQ ID NO: 2457433 - RNA, 19 nt, Artificial Sequence
  Description of Artificial Sequence: Synthetic oligonucleotide
ggcugcuauaggccccacu

SEQ ID NO: 2457434 - RNA, 19 nt, Artificial Sequence
  Description of Artificial Sequence: Synthetic oligonucleotide
gguggacuggagggucaga

SEQ ID NO: 2457435 - RNA, 19 nt, Artificial Sequence
  Description of Artificial Sequence: Synthetic oligonucleotide
gaguggggcucugguuagu

SEQ ID NO: 2457436 - RNA, 19 nt, Artificial Sequence
  Description of Artificial Sequence: Synthetic oligonucleotide
ggcucugguuagugagagu

SEQ ID NO: 2457437 - RNA, 19 nt, Artificial Sequence
  Description of Artificial Sequence: Synthetic oligonucleotide
gggucagaguggggcucug

SEQ ID NO: 2457438 - RNA, 19 nt, Artificial Sequence
  Description of Artificial Sequence: Synthetic oligonucleotide
gcagaggucacaggcuauu

SEQ ID NO: 2457439 - RNA, 19 nt, Artificial Sequence
  Description of Artificial Sequence: Synthetic oligonucleotide
ccauuccuucggccagcuc

SEQ ID NO: 2457440 - RNA, 19 nt, Artificial Sequence
  Description of Artificial Sequence: Synthetic oligonucleotide
ccucaccggguggaaguga

SEQ ID NO: 2457441 - RNA, 19 nt, Artificial Sequence
  Description of Artificial Sequence: Synthetic oligonucleotide
cuguuccccuauggcugcu

SEQ ID NO: 2457442 - RNA, 19 nt, Artificial Sequence
  Description of Artificial Sequence: Synthetic oligonucleotide
cccacgcuuggcccugucu

SEQ ID NO: 2457443 - RNA, 19 nt, Artificial Sequence
  Description of Artificial Sequence: Synthetic oligonucleotide
gccugugguuuggccucca

SEQ ID NO: 2457444 - RNA, 19 nt, Artificial Sequence
  Description of Artificial Sequence: Synthetic oligonucleotide
ggcuauuccuggggagguu

SEQ ID NO: 2457445 - RNA, 19 nt, Artificial Sequence
  Description of Artificial Sequence: Synthetic oligonucleotide
gggguccauaggccagcuu

SEQ ID NO: 2457446 - RNA, 19 nt, Artificial Sequence
  Description of Artificial Sequence: Synthetic oligonucleotide
cccuguccuguuccccuau

SEQ ID NO: 2457447 - RNA, 19 nt, Artificial Sequence
  Description of Artificial Sequence: Synthetic oligonucleotide
agaauuacagaugaaaagc

SEQ ID NO: 2457448 - RNA, 19 nt, Artificial Sequence
  Description of Artificial Sequence: Synthetic oligonucleotide
ucuucauugggaaacacgg

SEQ ID NO: 2457449 - RNA, 19 nt, Artificial Sequence
  Description of Artificial Sequence: Synthetic oligonucleotide
aagaauuacagaugaaaag

SEQ ID NO: 2457450 - RNA, 19 nt, Artificial Sequence
  Description of Artificial Sequence: Synthetic oligonucleotide
uuagaagaauuacagauga

SEQ ID NO: 2457451 - RNA, 19 nt, Artificial Sequence
  Description of Artificial Sequence: Synthetic oligonucleotide
ucuuagaagaauuacagau

SEQ ID NO: 2457452 - RNA, 19 nt, Artificial Sequence
  Description of Artificial Sequence: Synthetic oligonucleotide
uuucuuaugucaaagauuu

SEQ ID NO: 2457453 - RNA, 19 nt, Artificial Sequence
  Description of Artificial Sequence: Synthetic oligonucleotide
aacacggcaaaagaaaugg

SEQ ID NO: 2457454 - RNA, 19 nt, Artificial Sequence
  Description of Artificial Sequence: Synthetic oligonucleotide
cugaucauucccaacaugg

SEQ ID NO: 2457455 - RNA, 19 nt, Artificial Sequence
  Description of Artificial Sequence: Synthetic oligonucleotide
uacuucaugaucuugggca

SEQ ID NO: 2457456 - RNA, 19 nt, Artificial Sequence
  Description of Artificial Sequence: Synthetic oligonucleotide
aaugacucaugucuucacg

SEQ ID NO: 2457457 - RNA, 19 nt, Artificial Sequence
  Description of Artificial Sequence: Synthetic oligonucleotide
ucaguuuugaccccaagac

SEQ ID NO: 2457458 - RNA, 19 nt, Artificial Sequence
  Description of Artificial Sequence: Synthetic oligonucleotide
uugucugucacuuccacag

SEQ ID NO: 2457459 - RNA, 19 nt, Artificial Sequence
  Description of Artificial Sequence: Synthetic oligonucleotide
ugcauaaaucacauguucc

SEQ ID NO: 2457460 - RNA, 19 nt, Artificial Sequence
  Description of Artificial Sequence: Synthetic oligonucleotide
aacagcgaguuucugauca

SEQ ID NO: 2457461 - RNA, 19 nt, Artificial Sequence
  Description of Artificial Sequence: Synthetic oligonucleotide
uagacaaaguucuuagaag

SEQ ID NO: 2457462 - RNA, 19 nt, Artificial Sequence
  Description of Artificial Sequence: Synthetic oligonucleotide
agacaaaguucuuagaaga

SEQ ID NO: 2457463 - RNA, 19 nt, Artificial Sequence
  Description of Artificial Sequence: Synthetic oligonucleotide
aacauggugucgccgaggg

SEQ ID NO: 2457464 - RNA, 19 nt, Artificial Sequence
  Description of Artificial Sequence: Synthetic oligonucleotide
auaaaucacauguucccuc

SEQ ID NO: 2457465 - RNA, 19 nt, Artificial Sequence
  Description of Artificial Sequence: Synthetic oligonucleotide
uugaaauugguucggaauc

SEQ ID NO: 2457466 - RNA, 19 nt, Artificial Sequence
  Description of Artificial Sequence: Synthetic oligonucleotide
ucucccuagacaaaguucu

SEQ ID NO: 2457467 - RNA, 19 nt, Artificial Sequence
  Description of Artificial Sequence: Synthetic oligonucleotide
augcauaaaucacauguuc

SEQ ID NO: 2457468 - RNA, 19 nt, Artificial Sequence
  Description of Artificial Sequence: Synthetic oligonucleotide
uguucccucacuaacaaaa

SEQ ID NO: 2457469 - RNA, 19 nt, Artificial Sequence
  Description of Artificial Sequence: Synthetic oligonucleotide
auaaccacugaauugcgug

SEQ ID NO: 2457470 - RNA, 19 nt, Artificial Sequence
  Description of Artificial Sequence: Synthetic oligonucleotide
ucuuaugucaaagauuugu

SEQ ID NO: 2457471 - RNA, 19 nt, Artificial Sequence
  Description of Artificial Sequence: Synthetic oligonucleotide
ugaauugcguggaauagac

SEQ ID NO: 2457472 - RNA, 19 nt, Artificial Sequence
  Description of Artificial Sequence: Synthetic oligonucleotide
ucuacgcugccgaacagcg

SEQ ID NO: 2457473 - RNA, 19 nt, Artificial Sequence
  Description of Artificial Sequence: Synthetic oligonucleotide
cuuagaagaauuacagaug

SEQ ID NO: 2457474 - RNA, 19 nt, Artificial Sequence
  Description of Artificial Sequence: Synthetic oligonucleotide
uuugaaauugguucggaau

SEQ ID NO: 2457475 - RNA, 19 nt, Artificial Sequence
  Description of Artificial Sequence: Synthetic oligonucleotide
ucaugggagggucauagcc

SEQ ID NO: 2457476 - RNA, 19 nt, Artificial Sequence
  Description of Artificial Sequence: Synthetic oligonucleotide
aguuuugaccccaagacag

SEQ ID NO: 2457477 - RNA, 19 nt, Artificial Sequence
  Description of Artificial Sequence: Synthetic oligonucleotide
aaugggcacugucaucccc

SEQ ID NO: 2457478 - RNA, 19 nt, Artificial Sequence
  Description of Artificial Sequence: Synthetic oligonucleotide
uuugucauugguaccgccc

SEQ ID NO: 2457479 - RNA, 19 nt, Artificial Sequence
  Description of Artificial Sequence: Synthetic oligonucleotide
cauugcgacguccauaggg

SEQ ID NO: 2457480 - RNA, 19 nt, Artificial Sequence
  Description of Artificial Sequence: Synthetic oligonucleotide
agcgauguagucugcuucc

SEQ ID NO: 2457481 - RNA, 19 nt, Artificial Sequence
  Description of Artificial Sequence: Synthetic oligonucleotide
aaagaaaugggcacuguca

SEQ ID NO: 2457482 - RNA, 19 nt, Artificial Sequence
  Description of Artificial Sequence: Synthetic oligonucleotide
uugguuucucccuagacaa

SEQ ID NO: 2457483 - RNA, 19 nt, Artificial Sequence
  Description of Artificial Sequence: Synthetic oligonucleotide
auacuucaugaucuugggc

SEQ ID NO: 2457484 - RNA, 19 nt, Artificial Sequence
  Description of Artificial Sequence: Synthetic oligonucleotide
uacgcugccgaacagcgag

SEQ ID NO: 2457485 - RNA, 19 nt, Artificial Sequence
  Description of Artificial Sequence: Synthetic oligonucleotide
cucauugcgacguccauag

SEQ ID NO: 2457486 - RNA, 19 nt, Artificial Sequence
  Description of Artificial Sequence: Synthetic oligonucleotide
gaucauucccaacauggug

SEQ ID NO: 2457487 - RNA, 19 nt, Artificial Sequence
  Description of Artificial Sequence: Synthetic oligonucleotide
gagacuucuuccuugcccc

SEQ ID NO: 2457488 - RNA, 19 nt, Artificial Sequence
  Description of Artificial Sequence: Synthetic oligonucleotide
uucaucaccaggaaccggu

SEQ ID NO: 2457489 - RNA, 19 nt, Artificial Sequence
  Description of Artificial Sequence: Synthetic oligonucleotide
uaaccacugaauugcgugg

SEQ ID NO: 2457490 - RNA, 19 nt, Artificial Sequence
  Description of Artificial Sequence: Synthetic oligonucleotide
uccggaaccagacuuucag

SEQ ID NO: 2457491 - RNA, 19 nt, Artificial Sequence
  Description of Artificial Sequence: Synthetic oligonucleotide
guggaauagacaguuaugc

SEQ ID NO: 2457492 - RNA, 19 nt, Artificial Sequence
  Description of Artificial Sequence: Synthetic oligonucleotide
aagcucaugcauaaaucac

SEQ ID NO: 2457493 - RNA, 19 nt, Artificial Sequence
  Description of Artificial Sequence: Synthetic oligonucleotide
uaaaucacauguucccuca

SEQ ID NO: 2457494 - RNA, 19 nt, Artificial Sequence
  Description of Artificial Sequence: Synthetic oligonucleotide
cugcuuugaaauugguucg

SEQ ID NO: 2457495 - RNA, 19 nt, Artificial Sequence
  Description of Artificial Sequence: Synthetic oligonucleotide
aaaucacauguucccucac

SEQ ID NO: 2457496 - RNA, 19 nt, Artificial Sequence
  Description of Artificial Sequence: Synthetic oligonucleotide
uggaauagacaguuaugcc

SEQ ID NO: 2457497 - RNA, 19 nt, Artificial Sequence
  Description of Artificial Sequence: Synthetic oligonucleotide
ugggaaacacggcaaaaga

SEQ ID NO: 2457498 - RNA, 19 nt, Artificial Sequence
  Description of Artificial Sequence: Synthetic oligonucleotide
ucagaaccugccaaggcca

SEQ ID NO: 2457499 - RNA, 19 nt, Artificial Sequence
  Description of Artificial Sequence: Synthetic oligonucleotide
augucaaagauuuguauuu

SEQ ID NO: 2457500 - RNA, 19 nt, Artificial Sequence
  Description of Artificial Sequence: Synthetic oligonucleotide
caugggagggucauagccg

SEQ ID NO: 2457501 - RNA, 19 nt, Artificial Sequence
  Description of Artificial Sequence: Synthetic oligonucleotide
ugaaauugguucggaaucc

SEQ ID NO: 2457502 - RNA, 19 nt, Artificial Sequence
  Description of Artificial Sequence: Synthetic oligonucleotide
uucuuagaagaauuacaga

SEQ ID NO: 2457503 - RNA, 19 nt, Artificial Sequence
  Description of Artificial Sequence: Synthetic oligonucleotide
gaagaauuacagaugaaaa

SEQ ID NO: 2457504 - RNA, 19 nt, Artificial Sequence
  Description of Artificial Sequence: Synthetic oligonucleotide
aaucacauguucccucacu

SEQ ID NO: 2457505 - RNA, 19 nt, Artificial Sequence
  Description of Artificial Sequence: Synthetic oligonucleotide
ucuucacacuuucaucacc

SEQ ID NO: 2457506 - RNA, 19 nt, Artificial Sequence
  Description of Artificial Sequence: Synthetic oligonucleotide
ucgaucuucacacuuucau

SEQ ID NO: 2457507 - RNA, 19 nt, Artificial Sequence
  Description of Artificial Sequence: Synthetic oligonucleotide
uuugaccccaagacagggg

SEQ ID NO: 2457508 - RNA, 19 nt, Artificial Sequence
  Description of Artificial Sequence: Synthetic oligonucleotide
aguggcacacuuccagggc

SEQ ID NO: 2457509 - RNA, 19 nt, Artificial Sequence
  Description of Artificial Sequence: Synthetic oligonucleotide
cucagaaccugccaaggcc

SEQ ID NO: 2457510 - RNA, 19 nt, Artificial Sequence
  Description of Artificial Sequence: Synthetic oligonucleotide
aauagacaguuaugcccuc

SEQ ID NO: 2457511 - RNA, 19 nt, Artificial Sequence
  Description of Artificial Sequence: Synthetic oligonucleotide
aaaaucaguuuugacccca

SEQ ID NO: 2457512 - RNA, 19 nt, Artificial Sequence
  Description of Artificial Sequence: Synthetic oligonucleotide
agccagaccucauugcgac

SEQ ID NO: 2457513 - RNA, 19 nt, Artificial Sequence
  Description of Artificial Sequence: Synthetic oligonucleotide
uugaccccaagacagggga

SEQ ID NO: 2457514 - RNA, 19 nt, Artificial Sequence
  Description of Artificial Sequence: Synthetic oligonucleotide
ucgccgagggaucuggacg

SEQ ID NO: 2457515 - RNA, 19 nt, Artificial Sequence
  Description of Artificial Sequence: Synthetic oligonucleotide
auaggagacuucuuccuug

SEQ ID NO: 2457516 - RNA, 19 nt, Artificial Sequence
  Description of Artificial Sequence: Synthetic oligonucleotide
uuggcauaaccacugaauu

SEQ ID NO: 2457517 - RNA, 19 nt, Artificial Sequence
  Description of Artificial Sequence: Synthetic oligonucleotide
aguuucuucuguagggagc

SEQ ID NO: 2457518 - RNA, 19 nt, Artificial Sequence
  Description of Artificial Sequence: Synthetic oligonucleotide
ugguucggaauccggaacc

SEQ ID NO: 2457519 - RNA, 19 nt, Artificial Sequence
  Description of Artificial Sequence: Synthetic oligonucleotide
gacaguuaugcccucccgc

SEQ ID NO: 2457520 - RNA, 19 nt, Artificial Sequence
  Description of Artificial Sequence: Synthetic oligonucleotide
cuagacaaaguucuuagaa

SEQ ID NO: 2457521 - RNA, 19 nt, Artificial Sequence
  Description of Artificial Sequence: Synthetic oligonucleotide
uugggaaacacggcaaaag

SEQ ID NO: 2457522 - RNA, 19 nt, Artificial Sequence
  Description of Artificial Sequence: Synthetic oligonucleotide
aguucuuagaagaauuaca

SEQ ID NO: 2457523 - RNA, 19 nt, Artificial Sequence
  Description of Artificial Sequence: Synthetic oligonucleotide
gcauaaaucacauguuccc

SEQ ID NO: 2457524 - RNA, 19 nt, Artificial Sequence
  Description of Artificial Sequence: Synthetic oligonucleotide
gaaauugguucggaauccg

SEQ ID NO: 2457525 - RNA, 19 nt, Artificial Sequence
  Description of Artificial Sequence: Synthetic oligonucleotide
uugucauugguaccgccca

SEQ ID NO: 2457526 - RNA, 19 nt, Artificial Sequence
  Description of Artificial Sequence: Synthetic oligonucleotide
aaucaguuuugaccccaag

SEQ ID NO: 2457527 - RNA, 19 nt, Artificial Sequence
  Description of Artificial Sequence: Synthetic oligonucleotide
ugacucaugucuucacgag

SEQ ID NO: 2457528 - RNA, 19 nt, Artificial Sequence
  Description of Artificial Sequence: Synthetic oligonucleotide
aaauugguucggaauccgg

SEQ ID NO: 2457529 - RNA, 19 nt, Artificial Sequence
  Description of Artificial Sequence: Synthetic oligonucleotide
uaaaaucaguuuugacccc

SEQ ID NO: 2457530 - RNA, 19 nt, Artificial Sequence
  Description of Artificial Sequence: Synthetic oligonucleotide
aauccggaaccagacuuuc

SEQ ID NO: 2457531 - RNA, 19 nt, Artificial Sequence
  Description of Artificial Sequence: Synthetic oligonucleotide
ggcauaaccacugaauugc

SEQ ID NO: 2457532 - RNA, 19 nt, Artificial Sequence
  Description of Artificial Sequence: Synthetic oligonucleotide
acaggggacacaguggcac

SEQ ID NO: 2457533 - RNA, 19 nt, Artificial Sequence
  Description of Artificial Sequence: Synthetic oligonucleotide
uucggaauccggaaccaga

SEQ ID NO: 2457534 - RNA, 19 nt, Artificial Sequence
  Description of Artificial Sequence: Synthetic oligonucleotide
aaggccacgucucuacgcu

SEQ ID NO: 2457535 - RNA, 19 nt, Artificial Sequence
  Description of Artificial Sequence: Synthetic oligonucleotide
augacucaugucuucacga

SEQ ID NO: 2457536 - RNA, 19 nt, Artificial Sequence
  Description of Artificial Sequence: Synthetic oligonucleotide
uagacaguuaugcccuccc

SEQ ID NO: 2457537 - RNA, 19 nt, Artificial Sequence
  Description of Artificial Sequence: Synthetic oligonucleotide
ugaucauucccaacauggu

SEQ ID NO: 2457538 - RNA, 19 nt, Artificial Sequence
  Description of Artificial Sequence: Synthetic oligonucleotide
uuuuguuucuuaugucaaa

SEQ ID NO: 2457539 - RNA, 19 nt, Artificial Sequence
  Description of Artificial Sequence: Synthetic oligonucleotide
aaacacggcaaaagaaaug

SEQ ID NO: 2457540 - RNA, 19 nt, Artificial Sequence
  Description of Artificial Sequence: Synthetic oligonucleotide
acaguuaugcccucccgcu

SEQ ID NO: 2457541 - RNA, 19 nt, Artificial Sequence
  Description of Artificial Sequence: Synthetic oligonucleotide
uucccggagagccucgucc

SEQ ID NO: 2457542 - RNA, 19 nt, Artificial Sequence
  Description of Artificial Sequence: Synthetic oligonucleotide
acaguggcacacuuccagg

SEQ ID NO: 2457543 - RNA, 19 nt, Artificial Sequence
  Description of Artificial Sequence: Synthetic oligonucleotide
uucucccuagacaaaguuc

SEQ ID NO: 2457544 - RNA, 19 nt, Artificial Sequence
  Description of Artificial Sequence: Synthetic oligonucleotide
ucggaauccggaaccagac

SEQ ID NO: 2457545 - RNA, 19 nt, Artificial Sequence
  Description of Artificial Sequence: Synthetic oligonucleotide
ucauagccgguacaguagu

SEQ ID NO: 2457546 - RNA, 19 nt, Artificial Sequence
  Description of Artificial Sequence: Synthetic oligonucleotide
gaaaagcucaugcauaaau

SEQ ID NO: 2457547 - RNA, 19 nt, Artificial Sequence
  Description of Artificial Sequence: Synthetic oligonucleotide
acgagccagaccucauugc

SEQ ID NO: 2457548 - RNA, 19 nt, Artificial Sequence
  Description of Artificial Sequence: Synthetic oligonucleotide
ucuugggcauugcuucccg

SEQ ID NO: 2457549 - RNA, 19 nt, Artificial Sequence
  Description of Artificial Sequence: Synthetic oligonucleotide
aauuccuuugucauuggua

SEQ ID NO: 2457550 - RNA, 19 nt, Artificial Sequence
  Description of Artificial Sequence: Synthetic oligonucleotide
gucuucacgagccagaccu

SEQ ID NO: 2457551 - RNA, 19 nt, Artificial Sequence
  Description of Artificial Sequence: Synthetic oligonucleotide
auagacaguuaugcccucc

SEQ ID NO: 2457552 - RNA, 19 nt, Artificial Sequence
  Description of Artificial Sequence: Synthetic oligonucleotide
cacauguucccucacuaac

SEQ ID NO: 2457553 - RNA, 19 nt, Artificial Sequence
  Description of Artificial Sequence: Synthetic oligonucleotide
aguucagugaaugacucau

SEQ ID NO: 2457554 - RNA, 19 nt, Artificial Sequence
  Description of Artificial Sequence: Synthetic oligonucleotide
aaaguucuuagaagaauua

SEQ ID NO: 2457555 - RNA, 19 nt, Artificial Sequence
  Description of Artificial Sequence: Synthetic oligonucleotide
aguuaugcccucccgcucu

SEQ ID NO: 2457556 - RNA, 19 nt, Artificial Sequence
  Description of Artificial Sequence: Synthetic oligonucleotide
cuucacacuuucaucacca

SEQ ID NO: 2457557 - RNA, 19 nt, Artificial Sequence
  Description of Artificial Sequence: Synthetic oligonucleotide
ucauccccaugccaauucc

SEQ ID NO: 2457558 - RNA, 19 nt, Artificial Sequence
  Description of Artificial Sequence: Synthetic oligonucleotide
aggucacccugguaggugg

SEQ ID NO: 2457559 - RNA, 19 nt, Artificial Sequence
  Description of Artificial Sequence: Synthetic oligonucleotide
ugggcauugcuucccggag

SEQ ID NO: 2457560 - RNA, 19 nt, Artificial Sequence
  Description of Artificial Sequence: Synthetic oligonucleotide
guggcacacuuccagggcg

SEQ ID NO: 2457561 - RNA, 19 nt, Artificial Sequence
  Description of Artificial Sequence: Synthetic oligonucleotide
gguacaguaguagagguca

SEQ ID NO: 2457562 - RNA, 19 nt, Artificial Sequence
  Description of Artificial Sequence: Synthetic oligonucleotide
gaauagacaguuaugcccu

SEQ ID NO: 2457563 - RNA, 19 nt, Artificial Sequence
  Description of Artificial Sequence: Synthetic oligonucleotide
aggcucuuuccucauagga

SEQ ID NO: 2457564 - RNA, 19 nt, Artificial Sequence
  Description of Artificial Sequence: Synthetic oligonucleotide
uugguucggaauccggaac

SEQ ID NO: 2457565 - RNA, 19 nt, Artificial Sequence
  Description of Artificial Sequence: Synthetic oligonucleotide
agacaguuaugcccucccg

SEQ ID NO: 2457566 - RNA, 19 nt, Artificial Sequence
  Description of Artificial Sequence: Synthetic oligonucleotide
guaguagaggucacccugg

SEQ ID NO: 2457567 - RNA, 19 nt, Artificial Sequence
  Description of Artificial Sequence: Synthetic oligonucleotide
ucagugaaugacucauguc

SEQ ID NO: 2457568 - RNA, 19 nt, Artificial Sequence
  Description of Artificial Sequence: Synthetic oligonucleotide
agcgaguuucugaucauuc

SEQ ID NO: 2457569 - RNA, 19 nt, Artificial Sequence
  Description of Artificial Sequence: Synthetic oligonucleotide
aucacauguucccucacua

SEQ ID NO: 2457570 - RNA, 19 nt, Artificial Sequence
  Description of Artificial Sequence: Synthetic oligonucleotide
uacagaugaaaagcucaug

SEQ ID NO: 2457571 - RNA, 19 nt, Artificial Sequence
  Description of Artificial Sequence: Synthetic oligonucleotide
uacaguaguagaggucacc

SEQ ID NO: 2457572 - RNA, 19 nt, Artificial Sequence
  Description of Artificial Sequence: Synthetic oligonucleotide
augucuucacgagccagac

SEQ ID NO: 2457573 - RNA, 19 nt, Artificial Sequence
  Description of Artificial Sequence: Synthetic oligonucleotide
uucgaucuucacacuuuca

SEQ ID NO: 2457574 - RNA, 19 nt, Artificial Sequence
  Description of Artificial Sequence: Synthetic oligonucleotide
gagcgauguagucugcuuc

SEQ ID NO: 2457575 - RNA, 19 nt, Artificial Sequence
  Description of Artificial Sequence: Synthetic oligonucleotide
agcucaugcauaaaucaca

SEQ ID NO: 2457576 - RNA, 19 nt, Artificial Sequence
  Description of Artificial Sequence: Synthetic oligonucleotide
gaguuucugaucauuccca

SEQ ID NO: 2457577 - RNA, 19 nt, Artificial Sequence
  Description of Artificial Sequence: Synthetic oligonucleotide
cugucacuuccacaguggc

SEQ ID NO: 2457578 - RNA, 19 nt, Artificial Sequence
  Description of Artificial Sequence: Synthetic oligonucleotide
gucauagccgguacaguag

SEQ ID NO: 2457579 - RNA, 19 nt, Artificial Sequence
  Description of Artificial Sequence: Synthetic oligonucleotide
agggucauagccgguacag

SEQ ID NO: 2457580 - RNA, 19 nt, Artificial Sequence
  Description of Artificial Sequence: Synthetic oligonucleotide
acguccauagggcuucaug

SEQ ID NO: 2457581 - RNA, 19 nt, Artificial Sequence
  Description of Artificial Sequence: Synthetic oligonucleotide
cuucgaucuucacacuuuc

SEQ ID NO: 2457582 - RNA, 19 nt, Artificial Sequence
  Description of Artificial Sequence: Synthetic oligonucleotide
ucacauguucccucacuaa

SEQ ID NO: 2457583 - RNA, 19 nt, Artificial Sequence
  Description of Artificial Sequence: Synthetic oligonucleotide
cguccauagggcuucaugg

SEQ ID NO: 2457584 - RNA, 19 nt, Artificial Sequence
  Description of Artificial Sequence: Synthetic oligonucleotide
caaggccacgucucuacgc

SEQ ID NO: 2457585 - RNA, 19 nt, Artificial Sequence
  Description of Artificial Sequence: Synthetic oligonucleotide
aaccacugaauugcgugga

SEQ ID NO: 2457586 - RNA, 19 nt, Artificial Sequence
  Description of Artificial Sequence: Synthetic oligonucleotide
ucuucuguagggagccauc

SEQ ID NO: 2457587 - RNA, 19 nt, Artificial Sequence
  Description of Artificial Sequence: Synthetic oligonucleotide
gguggcgugagcgauguag

SEQ ID NO: 2457588 - RNA, 19 nt, Artificial Sequence
  Description of Artificial Sequence: Synthetic oligonucleotide
caucaccaggaaccggugg

SEQ ID NO: 2457589 - RNA, 19 nt, Artificial Sequence
  Description of Artificial Sequence: Synthetic oligonucleotide
ucauugguaccgcccacau

SEQ ID NO: 2457590 - RNA, 19 nt, Artificial Sequence
  Description of Artificial Sequence: Synthetic oligonucleotide
cacuuucaucaccaggaac

SEQ ID NO: 2457591 - RNA, 19 nt, Artificial Sequence
  Description of Artificial Sequence: Synthetic oligonucleotide
ugucuucacgagccagacc

SEQ ID NO: 2457592 - RNA, 19 nt, Artificial Sequence
  Description of Artificial Sequence: Synthetic oligonucleotide
acugucauccccaugccaa

SEQ ID NO: 2457593 - RNA, 19 nt, Artificial Sequence
  Description of Artificial Sequence: Synthetic oligonucleotide
cucuuuccucauaggagac

SEQ ID NO: 2457594 - RNA, 19 nt, Artificial Sequence
  Description of Artificial Sequence: Synthetic oligonucleotide
gaaccggugggcugcuuug

SEQ ID NO: 2457595 - RNA, 19 nt, Artificial Sequence
  Description of Artificial Sequence: Synthetic oligonucleotide
gcucuuuccucauaggaga

SEQ ID NO: 2457596 - RNA, 19 nt, Artificial Sequence
  Description of Artificial Sequence: Synthetic oligonucleotide
cccuagacaaaguucuuag

SEQ ID NO: 2457597 - RNA, 19 nt, Artificial Sequence
  Description of Artificial Sequence: Synthetic oligonucleotide
cugccgaacagcgaguuuc

SEQ ID NO: 2457598 - RNA, 19 nt, Artificial Sequence
  Description of Artificial Sequence: Synthetic oligonucleotide
cacgagccagaccucauug

SEQ ID NO: 2457599 - RNA, 19 nt, Artificial Sequence
  Description of Artificial Sequence: Synthetic oligonucleotide
gucucuacgcugccgaaca

SEQ ID NO: 2457600 - RNA, 19 nt, Artificial Sequence
  Description of Artificial Sequence: Synthetic oligonucleotide
guaccgcccacauacuuca

SEQ ID NO: 2457601 - RNA, 19 nt, Artificial Sequence
  Description of Artificial Sequence: Synthetic oligonucleotide
ggcaguacguagcugggug

SEQ ID NO: 2457602 - RNA, 19 nt, Artificial Sequence
  Description of Artificial Sequence: Synthetic oligonucleotide
gugaaugacucaugucuuc

SEQ ID NO: 2457603 - RNA, 19 nt, Artificial Sequence
  Description of Artificial Sequence: Synthetic oligonucleotide
uugcguggaauagacaguu

SEQ ID NO: 2457604 - RNA, 19 nt, Artificial Sequence
  Description of Artificial Sequence: Synthetic oligonucleotide
cuuugaaauugguucggaa

SEQ ID NO: 2457605 - RNA, 19 nt, Artificial Sequence
  Description of Artificial Sequence: Synthetic oligonucleotide
ucauugcgacguccauagg

SEQ ID NO: 2457606 - RNA, 19 nt, Artificial Sequence
  Description of Artificial Sequence: Synthetic oligonucleotide
ggaaacacggcaaaagaaa

SEQ ID NO: 2457607 - RNA, 19 nt, Artificial Sequence
  Description of Artificial Sequence: Synthetic oligonucleotide
ucucuacgcugccgaacag

SEQ ID NO: 2457608 - RNA, 19 nt, Artificial Sequence
  Description of Artificial Sequence: Synthetic oligonucleotide
auagggcuucaugggaggg

SEQ ID NO: 2457609 - RNA, 19 nt, Artificial Sequence
  Description of Artificial Sequence: Synthetic oligonucleotide
ugucauugguaccgcccac

SEQ ID NO: 2457610 - RNA, 19 nt, Artificial Sequence
  Description of Artificial Sequence: Synthetic oligonucleotide
cucaugcauaaaucacaug

SEQ ID NO: 2457611 - RNA, 19 nt, Artificial Sequence
  Description of Artificial Sequence: Synthetic oligonucleotide
ggcucuuuccucauaggag

SEQ ID NO: 2457612 - RNA, 19 nt, Artificial Sequence
  Description of Artificial Sequence: Synthetic oligonucleotide
caguuuugaccccaagaca

SEQ ID NO: 2457613 - RNA, 19 nt, Artificial Sequence
  Description of Artificial Sequence: Synthetic oligonucleotide
gguacucagaaccugccaa

SEQ ID NO: 2457614 - RNA, 19 nt, Artificial Sequence
  Description of Artificial Sequence: Synthetic oligonucleotide
cuugggcauugcuucccgg

SEQ ID NO: 2457615 - RNA, 19 nt, Artificial Sequence
  Description of Artificial Sequence: Synthetic oligonucleotide
cuuggcauaaccacugaau

SEQ ID NO: 2457616 - RNA, 19 nt, Artificial Sequence
  Description of Artificial Sequence: Synthetic oligonucleotide
ucuuuccucauaggagacu

SEQ ID NO: 2457617 - RNA, 19 nt, Artificial Sequence
  Description of Artificial Sequence: Synthetic oligonucleotide
gaaacacggcaaaagaaau

SEQ ID NO: 2457618 - RNA, 19 nt, Artificial Sequence
  Description of Artificial Sequence: Synthetic oligonucleotide
ugagcgauguagucugcuu

SEQ ID NO: 2457619 - RNA, 19 nt, Artificial Sequence
  Description of Artificial Sequence: Synthetic oligonucleotide
ugccgaacagcgaguuucu

SEQ ID NO: 2457620 - RNA, 19 nt, Artificial Sequence
  Description of Artificial Sequence: Synthetic oligonucleotide
caggcucuuuccucauagg

SEQ ID NO: 2457621 - RNA, 19 nt, Artificial Sequence
  Description of Artificial Sequence: Synthetic oligonucleotide
acacggcaaaagaaauggg

SEQ ID NO: 2457622 - RNA, 19 nt, Artificial Sequence
  Description of Artificial Sequence: Synthetic oligonucleotide
aguacguagcuggguggcg

SEQ ID NO: 2457623 - RNA, 19 nt, Artificial Sequence
  Description of Artificial Sequence: Synthetic oligonucleotide
aaccugccaaggccacguc

SEQ ID NO: 2457624 - RNA, 19 nt, Artificial Sequence
  Description of Artificial Sequence: Synthetic oligonucleotide
uacguagcuggguggcgug

SEQ ID NO: 2457625 - RNA, 19 nt, Artificial Sequence
  Description of Artificial Sequence: Synthetic oligonucleotide
agugaaugacucaugucuu

SEQ ID NO: 2457626 - RNA, 19 nt, Artificial Sequence
  Description of Artificial Sequence: Synthetic oligonucleotide
cuugucugucacuuccaca

SEQ ID NO: 2457627 - RNA, 19 nt, Artificial Sequence
  Description of Artificial Sequence: Synthetic oligonucleotide
gcaguacguagcugggugg

SEQ ID NO: 2457628 - RNA, 19 nt, Artificial Sequence
  Description of Artificial Sequence: Synthetic oligonucleotide
cucuacgcugccgaacagc

SEQ ID NO: 2457629 - RNA, 19 nt, Artificial Sequence
  Description of Artificial Sequence: Synthetic oligonucleotide
cacugaauugcguggaaua

SEQ ID NO: 2457630 - RNA, 19 nt, Artificial Sequence
  Description of Artificial Sequence: Synthetic oligonucleotide
cauguucccucacuaacaa

SEQ ID NO: 2457631 - RNA, 19 nt, Artificial Sequence
  Description of Artificial Sequence: Synthetic oligonucleotide
agccgguacaguaguagag

SEQ ID NO: 2457632 - RNA, 19 nt, Artificial Sequence
  Description of Artificial Sequence: Synthetic oligonucleotide
ggcuguugugcccuccagg

SEQ ID NO: 2457633 - RNA, 19 nt, Artificial Sequence
  Description of Artificial Sequence: Synthetic oligonucleotide
uucuucuguagggagccau

SEQ ID NO: 2457634 - RNA, 19 nt, Artificial Sequence
  Description of Artificial Sequence: Synthetic oligonucleotide
gcgugagcgauguagucug

SEQ ID NO: 2457635 - RNA, 19 nt, Artificial Sequence
  Description of Artificial Sequence: Synthetic oligonucleotide
ucccggagagccucgucca

SEQ ID NO: 2457636 - RNA, 19 nt, Artificial Sequence
  Description of Artificial Sequence: Synthetic oligonucleotide
aggggacacaguggcacac

SEQ ID NO: 2457637 - RNA, 19 nt, Artificial Sequence
  Description of Artificial Sequence: Synthetic oligonucleotide
augaucuugggcauugcuu

SEQ ID NO: 2457638 - RNA, 19 nt, Artificial Sequence
  Description of Artificial Sequence: Synthetic oligonucleotide
uggcacacuuccagggcgu

SEQ ID NO: 2457639 - RNA, 19 nt, Artificial Sequence
  Description of Artificial Sequence: Synthetic oligonucleotide
caguacguagcuggguggc

SEQ ID NO: 2457640 - RNA, 19 nt, Artificial Sequence
  Description of Artificial Sequence: Synthetic oligonucleotide
ccauagggcuucaugggag

SEQ ID NO: 2457641 - RNA, 19 nt, Artificial Sequence
  Description of Artificial Sequence: Synthetic oligonucleotide
uugcgacguccauagggcu

SEQ ID NO: 2457642 - RNA, 19 nt, Artificial Sequence
  Description of Artificial Sequence: Synthetic oligonucleotide
gccgguacaguaguagagg

SEQ ID NO: 2457643 - RNA, 19 nt, Artificial Sequence
  Description of Artificial Sequence: Synthetic oligonucleotide
uagguggcuguugugcccu

SEQ ID NO: 2457644 - RNA, 19 nt, Artificial Sequence
  Description of Artificial Sequence: Synthetic oligonucleotide
auugggaaacacggcaaaa

SEQ ID NO: 2457645 - RNA, 19 nt, Artificial Sequence
  Description of Artificial Sequence: Synthetic oligonucleotide
ugcgacguccauagggcuu

SEQ ID NO: 2457646 - RNA, 19 nt, Artificial Sequence
  Description of Artificial Sequence: Synthetic oligonucleotide
aaaucaguuuugaccccaa

SEQ ID NO: 2457647 - RNA, 19 nt, Artificial Sequence
  Description of Artificial Sequence: Synthetic oligonucleotide
cugaauugcguggaauaga

SEQ ID NO: 2457648 - RNA, 19 nt, Artificial Sequence
  Description of Artificial Sequence: Synthetic oligonucleotide
ggucauagccgguacagua

SEQ ID NO: 2457649 - RNA, 19 nt, Artificial Sequence
  Description of Artificial Sequence: Synthetic oligonucleotide
guuucuuaugucaaagauu

SEQ ID NO: 2457650 - RNA, 19 nt, Artificial Sequence
  Description of Artificial Sequence: Synthetic oligonucleotide
agaaccugccaaggccacg

SEQ ID NO: 2457651 - RNA, 19 nt, Artificial Sequence
  Description of Artificial Sequence: Synthetic oligonucleotide
ugguaccgcccacauacuu

SEQ ID NO: 2457652 - RNA, 19 nt, Artificial Sequence
  Description of Artificial Sequence: Synthetic oligonucleotide
uccagggcguucucaguuc

SEQ ID NO: 2457653 - RNA, 19 nt, Artificial Sequence
  Description of Artificial Sequence: Synthetic oligonucleotide
ugguuucucccuagacaaa

SEQ ID NO: 2457654 - RNA, 19 nt, Artificial Sequence
  Description of Artificial Sequence: Synthetic oligonucleotide
gaacagcgaguuucugauc

SEQ ID NO: 2457655 - RNA, 19 nt, Artificial Sequence
  Description of Artificial Sequence: Synthetic oligonucleotide
ucuucacgagccagaccuc

SEQ ID NO: 2457656 - RNA, 19 nt, Artificial Sequence
  Description of Artificial Sequence: Synthetic oligonucleotide
ucacgagccagaccucauu

SEQ ID NO: 2457657 - RNA, 19 nt, Artificial Sequence
  Description of Artificial Sequence: Synthetic oligonucleotide
ucccgcucuucgaucuuca

SEQ ID NO: 2457658 - RNA, 19 nt, Artificial Sequence
  Description of Artificial Sequence: Synthetic oligonucleotide
uucacgagccagaccucau

SEQ ID NO: 2457659 - RNA, 19 nt, Artificial Sequence
  Description of Artificial Sequence: Synthetic oligonucleotide
caucuucauugggaaacac

SEQ ID NO: 2457660 - RNA, 19 nt, Artificial Sequence
  Description of Artificial Sequence: Synthetic oligonucleotide
uugguaccgcccacauacu

SEQ ID NO: 2457661 - RNA, 19 nt, Artificial Sequence
  Description of Artificial Sequence: Synthetic oligonucleotide
cauugggaaacacggcaaa

SEQ ID NO: 2457662 - RNA, 19 nt, Artificial Sequence
  Description of Artificial Sequence: Synthetic oligonucleotide
cauucccaacauggugucg

SEQ ID NO: 2457663 - RNA, 19 nt, Artificial Sequence
  Description of Artificial Sequence: Synthetic oligonucleotide
cauaaaucacauguucccu

SEQ ID NO: 2457664 - RNA, 19 nt, Artificial Sequence
  Description of Artificial Sequence: Synthetic oligonucleotide
ggcguucucaguucaguga

SEQ ID NO: 2457665 - RNA, 19 nt, Artificial Sequence
  Description of Artificial Sequence: Synthetic oligonucleotide
guucggaauccggaaccag

SEQ ID NO: 2457666 - RNA, 19 nt, Artificial Sequence
  Description of Artificial Sequence: Synthetic oligonucleotide
gaauugcguggaauagaca

SEQ ID NO: 2457667 - RNA, 19 nt, Artificial Sequence
  Description of Artificial Sequence: Synthetic oligonucleotide
cacgucucuacgcugccga

SEQ ID NO: 2457668 - RNA, 19 nt, Artificial Sequence
  Description of Artificial Sequence: Synthetic oligonucleotide
gagggucauagccgguaca

SEQ ID NO: 2457669 - RNA, 19 nt, Artificial Sequence
  Description of Artificial Sequence: Synthetic oligonucleotide
cagaaccugccaaggccac

SEQ ID NO: 2457670 - RNA, 19 nt, Artificial Sequence
  Description of Artificial Sequence: Synthetic oligonucleotide
cccaagacaggggacacag

SEQ ID NO: 2457671 - RNA, 19 nt, Artificial Sequence
  Description of Artificial Sequence: Synthetic oligonucleotide
uccccaugccaauuccuuu

SEQ ID NO: 2457672 - RNA, 19 nt, Artificial Sequence
  Description of Artificial Sequence: Synthetic oligonucleotide
uggguggcgugagcgaugu

SEQ ID NO: 2457673 - RNA, 19 nt, Artificial Sequence
  Description of Artificial Sequence: Synthetic oligonucleotide
gugucgccgagggaucugg

SEQ ID NO: 2457674 - RNA, 19 nt, Artificial Sequence
  Description of Artificial Sequence: Synthetic oligonucleotide
gcccacauacuucaugauc

SEQ ID NO: 2457675 - RNA, 19 nt, Artificial Sequence
  Description of Artificial Sequence: Synthetic oligonucleotide
uggcgugagcgauguaguc

SEQ ID NO: 2457676 - RNA, 19 nt, Artificial Sequence
  Description of Artificial Sequence: Synthetic oligonucleotide
ugcguggaauagacaguua

SEQ ID NO: 2457677 - RNA, 19 nt, Artificial Sequence
  Description of Artificial Sequence: Synthetic oligonucleotide
auguucccucacuaacaaa

SEQ ID NO: 2457678 - RNA, 19 nt, Artificial Sequence
  Description of Artificial Sequence: Synthetic oligonucleotide
acagcgaguuucugaucau

SEQ ID NO: 2457679 - RNA, 19 nt, Artificial Sequence
  Description of Artificial Sequence: Synthetic oligonucleotide
guagcuggguggcgugagc

SEQ ID NO: 2457680 - RNA, 19 nt, Artificial Sequence
  Description of Artificial Sequence: Synthetic oligonucleotide
gucgccgagggaucuggac

SEQ ID NO: 2457681 - RNA, 19 nt, Artificial Sequence
  Description of Artificial Sequence: Synthetic oligonucleotide
accacugaauugcguggaa

SEQ ID NO: 2457682 - RNA, 19 nt, Artificial Sequence
  Description of Artificial Sequence: Synthetic oligonucleotide
gggaaacacggcaaaagaa

SEQ ID NO: 2457683 - RNA, 19 nt, Artificial Sequence
  Description of Artificial Sequence: Synthetic oligonucleotide
agggcguucucaguucagu

SEQ ID NO: 2457684 - RNA, 19 nt, Artificial Sequence
  Description of Artificial Sequence: Synthetic oligonucleotide
gggcguucucaguucagug

SEQ ID NO: 2457685 - RNA, 19 nt, Artificial Sequence
  Description of Artificial Sequence: Synthetic oligonucleotide
ggaauccggaaccagacuu

SEQ ID NO: 2457686 - RNA, 19 nt, Artificial Sequence
  Description of Artificial Sequence: Synthetic oligonucleotide
gagccagaccucauugcga

SEQ ID NO: 2457687 - RNA, 19 nt, Artificial Sequence
  Description of Artificial Sequence: Synthetic oligonucleotide
cccgguacucagaaccugc

SEQ ID NO: 2457688 - RNA, 19 nt, Artificial Sequence
  Description of Artificial Sequence: Synthetic oligonucleotide
caguuaugcccucccgcuc

SEQ ID NO: 2457689 - RNA, 19 nt, Artificial Sequence
  Description of Artificial Sequence: Synthetic oligonucleotide
gucauugguaccgcccaca

SEQ ID NO: 2457690 - RNA, 19 nt, Artificial Sequence
  Description of Artificial Sequence: Synthetic oligonucleotide
cauaaccacugaauugcgu

SEQ ID NO: 2457691 - RNA, 19 nt, Artificial Sequence
  Description of Artificial Sequence: Synthetic oligonucleotide
agagccucguccacaggcu

SEQ ID NO: 2457692 - RNA, 19 nt, Artificial Sequence
  Description of Artificial Sequence: Synthetic oligonucleotide
aaccggugggcugcuuuga

SEQ ID NO: 2457693 - RNA, 19 nt, Artificial Sequence
  Description of Artificial Sequence: Synthetic oligonucleotide
cuucacgagccagaccuca

SEQ ID NO: 2457694 - RNA, 19 nt, Artificial Sequence
  Description of Artificial Sequence: Synthetic oligonucleotide
ccccaugccaauuccuuug

SEQ ID NO: 2457695 - RNA, 19 nt, Artificial Sequence
  Description of Artificial Sequence: Synthetic oligonucleotide
ugucgccgagggaucugga

SEQ ID NO: 2457696 - RNA, 19 nt, Artificial Sequence
  Description of Artificial Sequence: Synthetic oligonucleotide
auggugucgccgagggauc

SEQ ID NO: 2457697 - RNA, 19 nt, Artificial Sequence
  Description of Artificial Sequence: Synthetic oligonucleotide
gcguucucaguucagugaa

SEQ ID NO: 2457698 - RNA, 19 nt, Artificial Sequence
  Description of Artificial Sequence: Synthetic oligonucleotide
gcuugucugucacuuccac

SEQ ID NO: 2457699 - RNA, 19 nt, Artificial Sequence
  Description of Artificial Sequence: Synthetic oligonucleotide
aggccacgucucuacgcug

SEQ ID NO: 2457700 - RNA, 19 nt, Artificial Sequence
  Description of Artificial Sequence: Synthetic oligonucleotide
gguaccgcccacauacuuc

SEQ ID NO: 2457701 - RNA, 19 nt, Artificial Sequence
  Description of Artificial Sequence: Synthetic oligonucleotide
accucauugcgacguccau

SEQ ID NO: 2457702 - RNA, 19 nt, Artificial Sequence
  Description of Artificial Sequence: Synthetic oligonucleotide
cagggcguucucaguucag

SEQ ID NO: 2457703 - RNA, 19 nt, Artificial Sequence
  Description of Artificial Sequence: Synthetic oligonucleotide
ugucauccccaugccaauu

SEQ ID NO: 2457704 - RNA, 19 nt, Artificial Sequence
  Description of Artificial Sequence: Synthetic oligonucleotide
ccgguacucagaaccugcc

SEQ ID NO: 2457705 - RNA, 19 nt, Artificial Sequence
  Description of Artificial Sequence: Synthetic oligonucleotide
uggugucgccgagggaucu

SEQ ID NO: 2457706 - RNA, 19 nt, Artificial Sequence
  Description of Artificial Sequence: Synthetic oligonucleotide
ccuagacaaaguucuuaga

SEQ ID NO: 2457707 - RNA, 19 nt, Artificial Sequence
  Description of Artificial Sequence: Synthetic oligonucleotide
ccgaacagcgaguuucuga

SEQ ID NO: 2457708 - RNA, 19 nt, Artificial Sequence
  Description of Artificial Sequence: Synthetic oligonucleotide
ccaaggccacgucucuacg

SEQ ID NO: 2457709 - RNA, 19 nt, Artificial Sequence
  Description of Artificial Sequence: Synthetic oligonucleotide
ccgcccacauacuucauga

SEQ ID NO: 2457710 - RNA, 19 nt, Artificial Sequence
  Description of Artificial Sequence: Synthetic oligonucleotide
gcguggaauagacaguuau

SEQ ID NO: 2457711 - RNA, 19 nt, Artificial Sequence
  Description of Artificial Sequence: Synthetic oligonucleotide
accggugggcugcuuugaa

SEQ ID NO: 2457712 - RNA, 19 nt, Artificial Sequence
  Description of Artificial Sequence: Synthetic oligonucleotide
ggccacgucucuacgcugc

SEQ ID NO: 2457713 - RNA, 19 nt, Artificial Sequence
  Description of Artificial Sequence: Synthetic oligonucleotide
gacaggggacacaguggca

SEQ ID NO: 2457714 - RNA, 19 nt, Artificial Sequence
  Description of Artificial Sequence: Synthetic oligonucleotide
agguggcuguugugcccuc

SEQ ID NO: 2457715 - RNA, 19 nt, Artificial Sequence
  Description of Artificial Sequence: Synthetic oligonucleotide
ccaacauggugucgccgag

SEQ ID NO: 2457716 - RNA, 19 nt, Artificial Sequence
  Description of Artificial Sequence: Synthetic oligonucleotide
gccagaccucauugcgacg

SEQ ID NO: 2457717 - RNA, 19 nt, Artificial Sequence
  Description of Artificial Sequence: Synthetic oligonucleotide
cauagccgguacaguagua

SEQ ID NO: 2457718 - RNA, 19 nt, Artificial Sequence
  Description of Artificial Sequence: Synthetic oligonucleotide
gaauccggaaccagacuuu

SEQ ID NO: 2457719 - RNA, 19 nt, Artificial Sequence
  Description of Artificial Sequence: Synthetic oligonucleotide
acgucucuacgcugccgaa

SEQ ID NO: 2457720 - RNA, 19 nt, Artificial Sequence
  Description of Artificial Sequence: Synthetic oligonucleotide
caggggacacaguggcaca

SEQ ID NO: 2457721 - RNA, 19 nt, Artificial Sequence
  Description of Artificial Sequence: Synthetic oligonucleotide
gguucggaauccggaacca

SEQ ID NO: 2457722 - RNA, 19 nt, Artificial Sequence
  Description of Artificial Sequence: Synthetic oligonucleotide
ggaaccagacuuucaguuu

SEQ ID NO: 2457723 - RNA, 19 nt, Artificial Sequence
  Description of Artificial Sequence: Synthetic oligonucleotide
gggcauugcuucccggaga

SEQ ID NO: 2457724 - RNA, 19 nt, Artificial Sequence
  Description of Artificial Sequence: Synthetic oligonucleotide
auccggaaccagacuuuca

SEQ ID NO: 2457725 - RNA, 19 nt, Artificial Sequence
  Description of Artificial Sequence: Synthetic oligonucleotide
cauccccaugccaauuccu

SEQ ID NO: 2457726 - RNA, 19 nt, Artificial Sequence
  Description of Artificial Sequence: Synthetic oligonucleotide
cuacgcugccgaacagcga

SEQ ID NO: 2457727 - RNA, 19 nt, Artificial Sequence
  Description of Artificial Sequence: Synthetic oligonucleotide
ccacaguggcaaacuuccc

SEQ ID NO: 2457728 - RNA, 19 nt, Artificial Sequence
  Description of Artificial Sequence: Synthetic oligonucleotide
guacguagcuggguggcgu

SEQ ID NO: 2457729 - RNA, 19 nt, Artificial Sequence
  Description of Artificial Sequence: Synthetic oligonucleotide
gugcccuccagggcaguac

SEQ ID NO: 2457730 - RNA, 19 nt, Artificial Sequence
  Description of Artificial Sequence: Synthetic oligonucleotide
acguagcuggguggcguga

SEQ ID NO: 2457731 - RNA, 19 nt, Artificial Sequence
  Description of Artificial Sequence: Synthetic oligonucleotide
gcucaugcauaaaucacau

SEQ ID NO: 2457732 - RNA, 19 nt, Artificial Sequence
  Description of Artificial Sequence: Synthetic oligonucleotide
uaccgcccacauacuucau

SEQ ID NO: 2457733 - RNA, 19 nt, Artificial Sequence
  Description of Artificial Sequence: Synthetic oligonucleotide
gcgacguccauagggcuuc

SEQ ID NO: 2457734 - RNA, 19 nt, Artificial Sequence
  Description of Artificial Sequence: Synthetic oligonucleotide
cggagagccucguccacag

SEQ ID NO: 2457735 - RNA, 19 nt, Artificial Sequence
  Description of Artificial Sequence: Synthetic oligonucleotide
ggcgugagcgauguagucu

SEQ ID NO: 2457736 - RNA, 19 nt, Artificial Sequence
  Description of Artificial Sequence: Synthetic oligonucleotide
cgguacaguaguagagguc

SEQ ID NO: 2457737 - RNA, 19 nt, Artificial Sequence
  Description of Artificial Sequence: Synthetic oligonucleotide
gccacgucucuacgcugcc

SEQ ID NO: 2457738 - RNA, 19 nt, Artificial Sequence
  Description of Artificial Sequence: Synthetic oligonucleotide
cgaacagcgaguuucugau

SEQ ID NO: 2457739 - RNA, 19 nt, Artificial Sequence
  Description of Artificial Sequence: Synthetic oligonucleotide
gagccucguccacaggcuu

SEQ ID NO: 2457740 - RNA, 19 nt, Artificial Sequence
  Description of Artificial Sequence: Synthetic oligonucleotide
ccccuucacaggcucuuuc

SEQ ID NO: 2457741 - RNA, 19 nt, Artificial Sequence
  Description of Artificial Sequence: Synthetic oligonucleotide
cacccugguagguggcugu

SEQ ID NO: 2457742 - RNA, 19 nt, Artificial Sequence
  Description of Artificial Sequence: Synthetic oligonucleotide
ggugucgccgagggaucug

SEQ ID NO: 2457743 - RNA, 19 nt, Artificial Sequence
  Description of Artificial Sequence: Synthetic oligonucleotide
ccgguacaguaguagaggu

SEQ ID NO: 2457744 - RNA, 19 nt, Artificial Sequence
  Description of Artificial Sequence: Synthetic oligonucleotide
ccacgucucuacgcugccg

SEQ ID NO: 2457745 - RNA, 19 nt, Artificial Sequence
  Description of Artificial Sequence: Synthetic oligonucleotide
ccagggcguucucaguuca

SEQ ID NO: 2457746 - RNA, 19 nt, Artificial Sequence
  Description of Artificial Sequence: Synthetic oligonucleotide
cacaggcucuuuccucaua

SEQ ID NO: 2457747 - RNA, 19 nt, Artificial Sequence
  Description of Artificial Sequence: Synthetic oligonucleotide
acgcugccgaacagcgagu

SEQ ID NO: 2457748 - RNA, 19 nt, Artificial Sequence
  Description of Artificial Sequence: Synthetic oligonucleotide
gggagggucauagccggua

SEQ ID NO: 2457749 - RNA, 19 nt, Artificial Sequence
  Description of Artificial Sequence: Synthetic oligonucleotide
ccagaccucauugcgacgu

SEQ ID NO: 2457750 - RNA, 19 nt, Artificial Sequence
  Description of Artificial Sequence: Synthetic oligonucleotide
ggaaccggugggcugcuuu

SEQ ID NO: 2457751 - RNA, 19 nt, Artificial Sequence
  Description of Artificial Sequence: Synthetic oligonucleotide
gccgaacagcgaguuucug

SEQ ID NO: 2457752 - RNA, 19 nt, Artificial Sequence
  Description of Artificial Sequence: Synthetic oligonucleotide
gcauugcuucccggagagc

SEQ ID NO: 2457753 - RNA, 19 nt, Artificial Sequence
  Description of Artificial Sequence: Synthetic oligonucleotide
cgccgagggaucuggacga

SEQ ID NO: 2457754 - RNA, 19 nt, Artificial Sequence
  Description of Artificial Sequence: Synthetic oligonucleotide
cccgcucuucgaucuucac

SEQ ID NO: 2457755 - RNA, 19 nt, Artificial Sequence
  Description of Artificial Sequence: Synthetic oligonucleotide
cguagcuggguggcgugag

SEQ ID NO: 2457756 - RNA, 19 nt, Artificial Sequence
  Description of Artificial Sequence: Synthetic oligonucleotide
ggcugcuuugaaauugguu

SEQ ID NO: 2457757 - RNA, 19 nt, Artificial Sequence
  Description of Artificial Sequence: Synthetic oligonucleotide
guuaugcccucccgcucuu

SEQ ID NO: 2457758 - RNA, 19 nt, Artificial Sequence
  Description of Artificial Sequence: Synthetic oligonucleotide
ggugggcugcuuugaaauu

SEQ ID NO: 2457759 - RNA, 19 nt, Artificial Sequence
  Description of Artificial Sequence: Synthetic oligonucleotide
gucacccugguagguggcu

SEQ ID NO: 2457760 - RNA, 19 nt, Artificial Sequence
  Description of Artificial Sequence: Synthetic oligonucleotide
gcacacuuccagggcguuc

SEQ ID NO: 2457761 - RNA, 19 nt, Artificial Sequence
  Description of Artificial Sequence: Synthetic oligonucleotide
ccucauugcgacguccaua

SEQ ID NO: 2457762 - RNA, 19 nt, Artificial Sequence
  Description of Artificial Sequence: Synthetic oligonucleotide
gcucuucgaucuucacacu

SEQ ID NO: 2457763 - RNA, 19 nt, Artificial Sequence
  Description of Artificial Sequence: Synthetic oligonucleotide
ccccgguacucagaaccug

SEQ ID NO: 2457764 - RNA, 19 nt, Artificial Sequence
  Description of Artificial Sequence: Synthetic oligonucleotide
cccggagagccucguccac

SEQ ID NO: 2457765 - RNA, 19 nt, Artificial Sequence
  Description of Artificial Sequence: Synthetic oligonucleotide
cgguacucagaaccugcca

SEQ ID NO: 2457766 - RNA, 19 nt, Artificial Sequence
  Description of Artificial Sequence: Synthetic oligonucleotide
gcccucccgcucuucgauc

SEQ ID NO: 2457767 - RNA, 19 nt, Artificial Sequence
  Description of Artificial Sequence: Synthetic oligonucleotide
ggcuucaugggagggucau

SEQ ID NO: 2457768 - RNA, 19 nt, Artificial Sequence
  Description of Artificial Sequence: Synthetic oligonucleotide
ccggaaccagacuuucagu

SEQ ID NO: 2457769 - RNA, 19 nt, Artificial Sequence
  Description of Artificial Sequence: Synthetic oligonucleotide
ccggugggcugcuuugaaa

SEQ ID NO: 2457770 - RNA, 19 nt, Artificial Sequence
  Description of Artificial Sequence: Synthetic oligonucleotide
cagcgaguuucugaucauu

SEQ ID NO: 2457771 - RNA, 19 nt, Artificial Sequence
  Description of Artificial Sequence: Synthetic oligonucleotide
gggcuucaugggaggguca

SEQ ID NO: 2457772 - RNA, 19 nt, Artificial Sequence
  Description of Artificial Sequence: Synthetic oligonucleotide
cccaugccaauuccuuugu

SEQ ID NO: 2457773 - RNA, 19 nt, Artificial Sequence
  Description of Artificial Sequence: Synthetic oligonucleotide
cccucccgcucuucgaucu

SEQ ID NO: 2457774 - RNA, 19 nt, Artificial Sequence
  Description of Artificial Sequence: Synthetic oligonucleotide
ccggagagccucguccaca

SEQ ID NO: 2457775 - RNA, 19 nt, Artificial Sequence
  Description of Artificial Sequence: Synthetic oligonucleotide
gccucguccacaggcuugu

SEQ ID NO: 2457776 - RNA, 19 nt, Artificial Sequence
  Description of Artificial Sequence: Synthetic oligonucleotide
gacguccauagggcuucau

SEQ ID NO: 2457777 - RNA, 19 nt, Artificial Sequence
  Description of Artificial Sequence: Synthetic oligonucleotide
aggaaccggugggcugcuu

SEQ ID NO: 2457778 - RNA, 19 nt, Artificial Sequence
  Description of Artificial Sequence: Synthetic oligonucleotide
ccacugaauugcguggaau

SEQ ID NO: 2457779 - RNA, 19 nt, Artificial Sequence
  Description of Artificial Sequence: Synthetic oligonucleotide
cccuccagggcaguacgua

SEQ ID NO: 2457780 - RNA, 19 nt, Artificial Sequence
  Description of Artificial Sequence: Synthetic oligonucleotide
ccaagacaggggacacagu

SEQ ID NO: 2457781 - RNA, 19 nt, Artificial Sequence
  Description of Artificial Sequence: Synthetic oligonucleotide
gcugccgaacagcgaguuu

SEQ ID NO: 2457782 - RNA, 19 nt, Artificial Sequence
  Description of Artificial Sequence: Synthetic oligonucleotide
cggaauccggaaccagacu

SEQ ID NO: 2457783 - RNA, 19 nt, Artificial Sequence
  Description of Artificial Sequence: Synthetic oligonucleotide
cguccacaggcuugucugu

SEQ ID NO: 2457784 - RNA, 19 nt, Artificial Sequence
  Description of Artificial Sequence: Synthetic oligonucleotide
caggaaccggugggcugcu

SEQ ID NO: 2457785 - RNA, 19 nt, Artificial Sequence
  Description of Artificial Sequence: Synthetic oligonucleotide
ggcacacuuccagggcguu

SEQ ID NO: 2457786 - RNA, 19 nt, Artificial Sequence
  Description of Artificial Sequence: Synthetic oligonucleotide
ggguggcgugagcgaugua

SEQ ID NO: 2457787 - RNA, 19 nt, Artificial Sequence
  Description of Artificial Sequence: Synthetic oligonucleotide
gccgagggaucuggacgau

SEQ ID NO: 2457788 - RNA, 19 nt, Artificial Sequence
  Description of Artificial Sequence: Synthetic oligonucleotide
cgacguccauagggcuuca

SEQ ID NO: 2457789 - RNA, 19 nt, Artificial Sequence
  Description of Artificial Sequence: Synthetic oligonucleotide
cgcugccgaacagcgaguu

SEQ ID NO: 2457790 - RNA, 19 nt, Artificial Sequence
  Description of Artificial Sequence: Synthetic oligonucleotide
ccucccgcucuucgaucuu

SEQ ID NO: 2457791 - RNA, 19 nt, Artificial Sequence
  Description of Artificial Sequence: Synthetic oligonucleotide
aaucccaggagccagaauc

SEQ ID NO: 2457792 - RNA, 19 nt, Artificial Sequence
  Description of Artificial Sequence: Synthetic oligonucleotide
ugucugaucacucugaucu

SEQ ID NO: 2457793 - RNA, 19 nt, Artificial Sequence
  Description of Artificial Sequence: Synthetic oligonucleotide
uaguuuaucuccaucaccc

SEQ ID NO: 2457794 - RNA, 19 nt, Artificial Sequence
  Description of Artificial Sequence: Synthetic oligonucleotide
aauguuauccugcuccauc

SEQ ID NO: 2457795 - RNA, 19 nt, Artificial Sequence
  Description of Artificial Sequence: Synthetic oligonucleotide
gauagauugguauagaugu

SEQ ID NO: 2457796 - RNA, 19 nt, Artificial Sequence
  Description of Artificial Sequence: Synthetic oligonucleotide
auuucgaccacagagcacc

SEQ ID NO: 2457797 - RNA, 19 nt, Artificial Sequence
  Description of Artificial Sequence: Synthetic oligonucleotide
uauagauguagccagggcu

SEQ ID NO: 2457798 - RNA, 19 nt, Artificial Sequence
  Description of Artificial Sequence: Synthetic oligonucleotide
auaguuuaucuccaucacc

SEQ ID NO: 2457799 - RNA, 19 nt, Artificial Sequence
  Description of Artificial Sequence: Synthetic oligonucleotide
ucucuuuuggcccuagagg

SEQ ID NO: 2457800 - RNA, 19 nt, Artificial Sequence
  Description of Artificial Sequence: Synthetic oligonucleotide
ucgaaggucaccauguaag

SEQ ID NO: 2457801 - RNA, 19 nt, Artificial Sequence
  Description of Artificial Sequence: Synthetic oligonucleotide
auagccaaagcacuguagg

SEQ ID NO: 2457802 - RNA, 19 nt, Artificial Sequence
  Description of Artificial Sequence: Synthetic oligonucleotide
agugacagcauuuacagau

SEQ ID NO: 2457803 - RNA, 19 nt, Artificial Sequence
  Description of Artificial Sequence: Synthetic oligonucleotide
uaauucugaagaaaauccc

SEQ ID NO: 2457804 - RNA, 19 nt, Artificial Sequence
  Description of Artificial Sequence: Synthetic oligonucleotide
aaaggaaugcugaucuugc

SEQ ID NO: 2457805 - RNA, 19 nt, Artificial Sequence
  Description of Artificial Sequence: Synthetic oligonucleotide
acuaugguaucacggaugg

SEQ ID NO: 2457806 - RNA, 19 nt, Artificial Sequence
  Description of Artificial Sequence: Synthetic oligonucleotide
agaaccagcaaguucacug

SEQ ID NO: 2457807 - RNA, 19 nt, Artificial Sequence
  Description of Artificial Sequence: Synthetic oligonucleotide
ugaucgaaaaggaaugcug

SEQ ID NO: 2457808 - RNA, 19 nt, Artificial Sequence
  Description of Artificial Sequence: Synthetic oligonucleotide
auuucugcucucuuuuggc

SEQ ID NO: 2457809 - RNA, 19 nt, Artificial Sequence
  Description of Artificial Sequence: Synthetic oligonucleotide
aggaaugcugaucuugccc

SEQ ID NO: 2457810 - RNA, 19 nt, Artificial Sequence
  Description of Artificial Sequence: Synthetic oligonucleotide
aguaagucaguuaagagca

SEQ ID NO: 2457811 - RNA, 19 nt, Artificial Sequence
  Description of Artificial Sequence: Synthetic oligonucleotide
aagguuugugugucugucc

SEQ ID NO: 2457812 - RNA, 19 nt, Artificial Sequence
  Description of Artificial Sequence: Synthetic oligonucleotide
agguaugagaaccagcaag

SEQ ID NO: 2457813 - RNA, 19 nt, Artificial Sequence
  Description of Artificial Sequence: Synthetic oligonucleotide
agggcugucacauuucgac

SEQ ID NO: 2457814 - RNA, 19 nt, Artificial Sequence
  Description of Artificial Sequence: Synthetic oligonucleotide
aaaaggaaugcugaucuug

SEQ ID NO: 2457815 - RNA, 19 nt, Artificial Sequence
  Description of Artificial Sequence: Synthetic oligonucleotide
ucaguuaagagcacguccu

SEQ ID NO: 2457816 - RNA, 19 nt, Artificial Sequence
  Description of Artificial Sequence: Synthetic oligonucleotide
agagcaccagcuuacgccc

SEQ ID NO: 2457817 - RNA, 19 nt, Artificial Sequence
  Description of Artificial Sequence: Synthetic oligonucleotide
agguuugugugucuguccc

SEQ ID NO: 2457818 - RNA, 19 nt, Artificial Sequence
  Description of Artificial Sequence: Synthetic oligonucleotide
cauaugcugaucgaaaagg

SEQ ID NO: 2457819 - RNA, 19 nt, Artificial Sequence
  Description of Artificial Sequence: Synthetic oligonucleotide
aaggaaugcugaucuugcc

SEQ ID NO: 2457820 - RNA, 19 nt, Artificial Sequence
  Description of Artificial Sequence: Synthetic oligonucleotide
gauugguauagauguagcc

SEQ ID NO: 2457821 - RNA, 19 nt, Artificial Sequence
  Description of Artificial Sequence: Synthetic oligonucleotide
acugacgagugcuucaagg

SEQ ID NO: 2457822 - RNA, 19 nt, Artificial Sequence
  Description of Artificial Sequence: Synthetic oligonucleotide
ugcugaucgaaaaggaaug

SEQ ID NO: 2457823 - RNA, 19 nt, Artificial Sequence
  Description of Artificial Sequence: Synthetic oligonucleotide
uacagauagauugguauag

SEQ ID NO: 2457824 - RNA, 19 nt, Artificial Sequence
  Description of Artificial Sequence: Synthetic oligonucleotide
uccacguccacuaugguau

SEQ ID NO: 2457825 - RNA, 19 nt, Artificial Sequence
  Description of Artificial Sequence: Synthetic oligonucleotide
aauucugaagaaaauccca

SEQ ID NO: 2457826 - RNA, 19 nt, Artificial Sequence
  Description of Artificial Sequence: Synthetic oligonucleotide
gaagaaaaucccaggagcc

SEQ ID NO: 2457827 - RNA, 19 nt, Artificial Sequence
  Description of Artificial Sequence: Synthetic oligonucleotide
ucuagcgcuccauaucugg

SEQ ID NO: 2457828 - RNA, 19 nt, Artificial Sequence
  Description of Artificial Sequence: Synthetic oligonucleotide
ucugaucuacgcuagcagc

SEQ ID NO: 2457829 - RNA, 19 nt, Artificial Sequence
  Description of Artificial Sequence: Synthetic oligonucleotide
uccucuugaucauggaggg

SEQ ID NO: 2457830 - RNA, 19 nt, Artificial Sequence
  Description of Artificial Sequence: Synthetic oligonucleotide
agcaacagggccaaaauag

SEQ ID NO: 2457831 - RNA, 19 nt, Artificial Sequence
  Description of Artificial Sequence: Synthetic oligonucleotide
ugacagcauuuacagauag

SEQ ID NO: 2457832 - RNA, 19 nt, Artificial Sequence
  Description of Artificial Sequence: Synthetic oligonucleotide
aauagcaccaggaucugug

SEQ ID NO: 2457833 - RNA, 19 nt, Artificial Sequence
  Description of Artificial Sequence: Synthetic oligonucleotide
uugucagagcaacagggcc

SEQ ID NO: 2457834 - RNA, 19 nt, Artificial Sequence
  Description of Artificial Sequence: Synthetic oligonucleotide
uuugucagagcaacagggc

SEQ ID NO: 2457835 - RNA, 19 nt, Artificial Sequence
  Description of Artificial Sequence: Synthetic oligonucleotide
ugucuagcgcuccauaucu

SEQ ID NO: 2457836 - RNA, 19 nt, Artificial Sequence
  Description of Artificial Sequence: Synthetic oligonucleotide
uguaggaucucaacugcug

SEQ ID NO: 2457837 - RNA, 19 nt, Artificial Sequence
  Description of Artificial Sequence: Synthetic oligonucleotide
uguguucuugucuagcgcu

SEQ ID NO: 2457838 - RNA, 19 nt, Artificial Sequence
  Description of Artificial Sequence: Synthetic oligonucleotide
cacauuucgaccacagagc

SEQ ID NO: 2457839 - RNA, 19 nt, Artificial Sequence
  Description of Artificial Sequence: Synthetic oligonucleotide
uguccacauagccaaagca

SEQ ID NO: 2457840 - RNA, 19 nt, Artificial Sequence
  Description of Artificial Sequence: Synthetic oligonucleotide
auugguauagauguagcca

SEQ ID NO: 2457841 - RNA, 19 nt, Artificial Sequence
  Description of Artificial Sequence: Synthetic oligonucleotide
accaggaucugugaggucg

SEQ ID NO: 2457842 - RNA, 19 nt, Artificial Sequence
  Description of Artificial Sequence: Synthetic oligonucleotide
aaccagcaaguucacugac

SEQ ID NO: 2457843 - RNA, 19 nt, Artificial Sequence
  Description of Artificial Sequence: Synthetic oligonucleotide
gucaguuaagagcacgucc

SEQ ID NO: 2457844 - RNA, 19 nt, Artificial Sequence
  Description of Artificial Sequence: Synthetic oligonucleotide
uuauccugcuccaucucag

SEQ ID NO: 2457845 - RNA, 19 nt, Artificial Sequence
  Description of Artificial Sequence: Synthetic oligonucleotide
accauguaagguuugugug

SEQ ID NO: 2457846 - RNA, 19 nt, Artificial Sequence
  Description of Artificial Sequence: Synthetic oligonucleotide
gacaauguggccucgcuuc

SEQ ID NO: 2457847 - RNA, 19 nt, Artificial Sequence
  Description of Artificial Sequence: Synthetic oligonucleotide
cugacgagugcuucaaggg

SEQ ID NO: 2457848 - RNA, 19 nt, Artificial Sequence
  Description of Artificial Sequence: Synthetic oligonucleotide
uacgcuagcagcucugagc

SEQ ID NO: 2457849 - RNA, 19 nt, Artificial Sequence
  Description of Artificial Sequence: Synthetic oligonucleotide
cuggauacugcugauggcg

SEQ ID NO: 2457850 - RNA, 19 nt, Artificial Sequence
  Description of Artificial Sequence: Synthetic oligonucleotide
uccacuaugguaucacgga

SEQ ID NO: 2457851 - RNA, 19 nt, Artificial Sequence
  Description of Artificial Sequence: Synthetic oligonucleotide
cagagcaccagcuuacgcc

SEQ ID NO: 2457852 - RNA, 19 nt, Artificial Sequence
  Description of Artificial Sequence: Synthetic oligonucleotide
ugucagagcaacagggcca

SEQ ID NO: 2457853 - RNA, 19 nt, Artificial Sequence
  Description of Artificial Sequence: Synthetic oligonucleotide
ugacgagugcuucaagggc

SEQ ID NO: 2457854 - RNA, 19 nt, Artificial Sequence
  Description of Artificial Sequence: Synthetic oligonucleotide
cacuguaggaucucaacug

SEQ ID NO: 2457855 - RNA, 19 nt, Artificial Sequence
  Description of Artificial Sequence: Synthetic oligonucleotide
agauugguauagauguagc

SEQ ID NO: 2457856 - RNA, 19 nt, Artificial Sequence
  Description of Artificial Sequence: Synthetic oligonucleotide
uaugcugaucgaaaaggaa

SEQ ID NO: 2457857 - RNA, 19 nt, Artificial Sequence
  Description of Artificial Sequence: Synthetic oligonucleotide
acauuucgaccacagagca

SEQ ID NO: 2457858 - RNA, 19 nt, Artificial Sequence
  Description of Artificial Sequence: Synthetic oligonucleotide
cuguccacguccacuaugg

SEQ ID NO: 2457859 - RNA, 19 nt, Artificial Sequence
  Description of Artificial Sequence: Synthetic oligonucleotide
acaauguggccucgcuucc

SEQ ID NO: 2457860 - RNA, 19 nt, Artificial Sequence
  Description of Artificial Sequence: Synthetic oligonucleotide
uuucugcucucuuuuggcc

SEQ ID NO: 2457861 - RNA, 19 nt, Artificial Sequence
  Description of Artificial Sequence: Synthetic oligonucleotide
agauagauugguauagaug

SEQ ID NO: 2457862 - RNA, 19 nt, Artificial Sequence
  Description of Artificial Sequence: Synthetic oligonucleotide
acagagcaccagcuuacgc

SEQ ID NO: 2457863 - RNA, 19 nt, Artificial Sequence
  Description of Artificial Sequence: Synthetic oligonucleotide
uuacagauagauugguaua

SEQ ID NO: 2457864 - RNA, 19 nt, Artificial Sequence
  Description of Artificial Sequence: Synthetic oligonucleotide
ucgaccacagagcaccagc

SEQ ID NO: 2457865 - RNA, 19 nt, Artificial Sequence
  Description of Artificial Sequence: Synthetic oligonucleotide
agccagaauccugagauag

SEQ ID NO: 2457866 - RNA, 19 nt, Artificial Sequence
  Description of Artificial Sequence: Synthetic oligonucleotide
uguaagguuugugugucug

SEQ ID NO: 2457867 - RNA, 19 nt, Artificial Sequence
  Description of Artificial Sequence: Synthetic oligonucleotide
agaaaaucccaggagccag

SEQ ID NO: 2457868 - RNA, 19 nt, Artificial Sequence
  Description of Artificial Sequence: Synthetic oligonucleotide
auaucuggagccaucagca

SEQ ID NO: 2457869 - RNA, 19 nt, Artificial Sequence
  Description of Artificial Sequence: Synthetic oligonucleotide
ugaucacucugaucuacgc

SEQ ID NO: 2457870 - RNA, 19 nt, Artificial Sequence
  Description of Artificial Sequence: Synthetic oligonucleotide
gaucgaaaaggaaugcuga

SEQ ID NO: 2457871 - RNA, 19 nt, Artificial Sequence
  Description of Artificial Sequence: Synthetic oligonucleotide
cucucuuuuggcccuagag

SEQ ID NO: 2457872 - RNA, 19 nt, Artificial Sequence
  Description of Artificial Sequence: Synthetic oligonucleotide
ucuuuuggcccuagaggcc

SEQ ID NO: 2457873 - RNA, 19 nt, Artificial Sequence
  Description of Artificial Sequence: Synthetic oligonucleotide
ugcauaugcugaucgaaaa

SEQ ID NO: 2457874 - RNA, 19 nt, Artificial Sequence
  Description of Artificial Sequence: Synthetic oligonucleotide
aggcugcauaugcugaucg

SEQ ID NO: 2457875 - RNA, 19 nt, Artificial Sequence
  Description of Artificial Sequence: Synthetic oligonucleotide
aagaaaaucccaggagcca

SEQ ID NO: 2457876 - RNA, 19 nt, Artificial Sequence
  Description of Artificial Sequence: Synthetic oligonucleotide
ucacucugaucuacgcuag

SEQ ID NO: 2457877 - RNA, 19 nt, Artificial Sequence
  Description of Artificial Sequence: Synthetic oligonucleotide
uaucacggauggcaccacg

SEQ ID NO: 2457878 - RNA, 19 nt, Artificial Sequence
  Description of Artificial Sequence: Synthetic oligonucleotide
acgcuagcagcucugagca

SEQ ID NO: 2457879 - RNA, 19 nt, Artificial Sequence
  Description of Artificial Sequence: Synthetic oligonucleotide
auggcgacaauguggccuc

SEQ ID NO: 2457880 - RNA, 19 nt, Artificial Sequence
  Description of Artificial Sequence: Synthetic oligonucleotide
cauagccaaagcacuguag

SEQ ID NO: 2457881 - RNA, 19 nt, Artificial Sequence
  Description of Artificial Sequence: Synthetic oligonucleotide
cugaucacucugaucuacg

SEQ ID NO: 2457882 - RNA, 19 nt, Artificial Sequence
  Description of Artificial Sequence: Synthetic oligonucleotide
acugcugauggcgacaaug

SEQ ID NO: 2457883 - RNA, 19 nt, Artificial Sequence
  Description of Artificial Sequence: Synthetic oligonucleotide
cagaauccugagauagacg

SEQ ID NO: 2457884 - RNA, 19 nt, Artificial Sequence
  Description of Artificial Sequence: Synthetic oligonucleotide
cacuaugguaucacggaug

SEQ ID NO: 2457885 - RNA, 19 nt, Artificial Sequence
  Description of Artificial Sequence: Synthetic oligonucleotide
uuuccccacggcagcaagg

SEQ ID NO: 2457886 - RNA, 19 nt, Artificial Sequence
  Description of Artificial Sequence: Synthetic oligonucleotide
ugugguacugucugaucac

SEQ ID NO: 2457887 - RNA, 19 nt, Artificial Sequence
  Description of Artificial Sequence: Synthetic oligonucleotide
cacggcagcaaggacaucc

SEQ ID NO: 2457888 - RNA, 19 nt, Artificial Sequence
  Description of Artificial Sequence: Synthetic oligonucleotide
uuuuccccacggcagcaag

SEQ ID NO: 2457889 - RNA, 19 nt, Artificial Sequence
  Description of Artificial Sequence: Synthetic oligonucleotide
gaucauggagggcaguaga

SEQ ID NO: 2457890 - RNA, 19 nt, Artificial Sequence
  Description of Artificial Sequence: Synthetic oligonucleotide
uuugugugucugucccugg

SEQ ID NO: 2457891 - RNA, 19 nt, Artificial Sequence
  Description of Artificial Sequence: Synthetic oligonucleotide
gaaccagcaaguucacuga

SEQ ID NO: 2457892 - RNA, 19 nt, Artificial Sequence
  Description of Artificial Sequence: Synthetic oligonucleotide
gaccccagcauuauugaug

SEQ ID NO: 2457893 - RNA, 19 nt, Artificial Sequence
  Description of Artificial Sequence: Synthetic oligonucleotide
guccacuaugguaucacgg

SEQ ID NO: 2457894 - RNA, 19 nt, Artificial Sequence
  Description of Artificial Sequence: Synthetic oligonucleotide
gugugguacugucugauca

SEQ ID NO: 2457895 - RNA, 19 nt, Artificial Sequence
  Description of Artificial Sequence: Synthetic oligonucleotide
uggauacugcugauggcga

SEQ ID NO: 2457896 - RNA, 19 nt, Artificial Sequence
  Description of Artificial Sequence: Synthetic oligonucleotide
ggcaguagagcuuuuguca

SEQ ID NO: 2457897 - RNA, 19 nt, Artificial Sequence
  Description of Artificial Sequence: Synthetic oligonucleotide
uaggaucucaacugcugcu

SEQ ID NO: 2457898 - RNA, 19 nt, Artificial Sequence
  Description of Artificial Sequence: Synthetic oligonucleotide
uccugagauagacggccag

SEQ ID NO: 2457899 - RNA, 19 nt, Artificial Sequence
  Description of Artificial Sequence: Synthetic oligonucleotide
aagucaguuaagagcacgu

SEQ ID NO: 2457900 - RNA, 19 nt, Artificial Sequence
  Description of Artificial Sequence: Synthetic oligonucleotide
ugagauagacggccaggga

SEQ ID NO: 2457901 - RNA, 19 nt, Artificial Sequence
  Description of Artificial Sequence: Synthetic oligonucleotide
uagcgcuccauaucuggag

SEQ ID NO: 2457902 - RNA, 19 nt, Artificial Sequence
  Description of Artificial Sequence: Synthetic oligonucleotide
ugugugucugucccuggga

SEQ ID NO: 2457903 - RNA, 19 nt, Artificial Sequence
  Description of Artificial Sequence: Synthetic oligonucleotide
ucgaaaaggaaugcugauc

SEQ ID NO: 2457904 - RNA, 19 nt, Artificial Sequence
  Description of Artificial Sequence: Synthetic oligonucleotide
ugaucauggagggcaguag

SEQ ID NO: 2457905 - RNA, 19 nt, Artificial Sequence
  Description of Artificial Sequence: Synthetic oligonucleotide
uauugaugaggauguccac

SEQ ID NO: 2457906 - RNA, 19 nt, Artificial Sequence
  Description of Artificial Sequence: Synthetic oligonucleotide
cucuugaucauggagggca

SEQ ID NO: 2457907 - RNA, 19 nt, Artificial Sequence
  Description of Artificial Sequence: Synthetic oligonucleotide
gcaguaagucaguuaagag

SEQ ID NO: 2457908 - RNA, 19 nt, Artificial Sequence
  Description of Artificial Sequence: Synthetic oligonucleotide
agaggccauaauucugaag

SEQ ID NO: 2457909 - RNA, 19 nt, Artificial Sequence
  Description of Artificial Sequence: Synthetic oligonucleotide
gagcuuuugucagagcaac

SEQ ID NO: 2457910 - RNA, 19 nt, Artificial Sequence
  Description of Artificial Sequence: Synthetic oligonucleotide
guccacauagccaaagcac

SEQ ID NO: 2457911 - RNA, 19 nt, Artificial Sequence
  Description of Artificial Sequence: Synthetic oligonucleotide
cauguaagguuuguguguc

SEQ ID NO: 2457912 - RNA, 19 nt, Artificial Sequence
  Description of Artificial Sequence: Synthetic oligonucleotide
agucaguuaagagcacguc

SEQ ID NO: 2457913 - RNA, 19 nt, Artificial Sequence
  Description of Artificial Sequence: Synthetic oligonucleotide
augguaucacggauggcac

SEQ ID NO: 2457914 - RNA, 19 nt, Artificial Sequence
  Description of Artificial Sequence: Synthetic oligonucleotide
aguuuaucuccaucacccu

SEQ ID NO: 2457915 - RNA, 19 nt, Artificial Sequence
  Description of Artificial Sequence: Synthetic oligonucleotide
aucgaaaaggaaugcugau

SEQ ID NO: 2457916 - RNA, 19 nt, Artificial Sequence
  Description of Artificial Sequence: Synthetic oligonucleotide
uguagccagggcuuaucac

SEQ ID NO: 2457917 - RNA, 19 nt, Artificial Sequence
  Description of Artificial Sequence: Synthetic oligonucleotide
guuauccugcuccaucuca

SEQ ID NO: 2457918 - RNA, 19 nt, Artificial Sequence
  Description of Artificial Sequence: Synthetic oligonucleotide
ggagguaugagaaccagca

SEQ ID NO: 2457919 - RNA, 19 nt, Artificial Sequence
  Description of Artificial Sequence: Synthetic oligonucleotide
agauagacggccagggaug

SEQ ID NO: 2457920 - RNA, 19 nt, Artificial Sequence
  Description of Artificial Sequence: Synthetic oligonucleotide
auaugcugaucgaaaagga

SEQ ID NO: 2457921 - RNA, 19 nt, Artificial Sequence
  Description of Artificial Sequence: Synthetic oligonucleotide
uuggauuucugcucucuuu

SEQ ID NO: 2457922 - RNA, 19 nt, Artificial Sequence
  Description of Artificial Sequence: Synthetic oligonucleotide
agggcaguagagcuuuugu

SEQ ID NO: 2457923 - RNA, 19 nt, Artificial Sequence
  Description of Artificial Sequence: Synthetic oligonucleotide
augcugaucgaaaaggaau

SEQ ID NO: 2457924 - RNA, 19 nt, Artificial Sequence
  Description of Artificial Sequence: Synthetic oligonucleotide
uggcaguaagucaguuaag

SEQ ID NO: 2457925 - RNA, 19 nt, Artificial Sequence
  Description of Artificial Sequence: Synthetic oligonucleotide
gcauaugcugaucgaaaag

SEQ ID NO: 2457926 - RNA, 19 nt, Artificial Sequence
  Description of Artificial Sequence: Synthetic oligonucleotide
gagauagacggccagggau

SEQ ID NO: 2457927 - RNA, 19 nt, Artificial Sequence
  Description of Artificial Sequence: Synthetic oligonucleotide
ugguaucacggauggcacc

SEQ ID NO: 2457928 - RNA, 19 nt, Artificial Sequence
  Description of Artificial Sequence: Synthetic oligonucleotide
uagacggccagggauggca

SEQ ID NO: 2457929 - RNA, 19 nt, Artificial Sequence
  Description of Artificial Sequence: Synthetic oligonucleotide
ucacggauggcaccacggu

SEQ ID NO: 2457930 - RNA, 19 nt, Artificial Sequence
  Description of Artificial Sequence: Synthetic oligonucleotide
ucaagggcugucacauuuc

SEQ ID NO: 2457931 - RNA, 19 nt, Artificial Sequence
  Description of Artificial Sequence: Synthetic oligonucleotide
gaaugcugaucuugcccug

SEQ ID NO: 2457932 - RNA, 19 nt, Artificial Sequence
  Description of Artificial Sequence: Synthetic oligonucleotide
gaauccugagauagacggc

SEQ ID NO: 2457933 - RNA, 19 nt, Artificial Sequence
  Description of Artificial Sequence: Synthetic oligonucleotide
acguccacuaugguaucac

SEQ ID NO: 2457934 - RNA, 19 nt, Artificial Sequence
  Description of Artificial Sequence: Synthetic oligonucleotide
uguuauccugcuccaucuc

SEQ ID NO: 2457935 - RNA, 19 nt, Artificial Sequence
  Description of Artificial Sequence: Synthetic oligonucleotide
aucucaacugcugcugcag

SEQ ID NO: 2457936 - RNA, 19 nt, Artificial Sequence
  Description of Artificial Sequence: Synthetic oligonucleotide
gcuuaucacagucaccuca

SEQ ID NO: 2457937 - RNA, 19 nt, Artificial Sequence
  Description of Artificial Sequence: Synthetic oligonucleotide
ccagcuuacgcccugcagc

SEQ ID NO: 2457938 - RNA, 19 nt, Artificial Sequence
  Description of Artificial Sequence: Synthetic oligonucleotide
ucuugucuagcgcuccaua

SEQ ID NO: 2457939 - RNA, 19 nt, Artificial Sequence
  Description of Artificial Sequence: Synthetic oligonucleotide
ucaccauguaagguuugug

SEQ ID NO: 2457940 - RNA, 19 nt, Artificial Sequence
  Description of Artificial Sequence: Synthetic oligonucleotide
ugggagguaugagaaccag

SEQ ID NO: 2457941 - RNA, 19 nt, Artificial Sequence
  Description of Artificial Sequence: Synthetic oligonucleotide
acucugaucuacgcuagca

SEQ ID NO: 2457942 - RNA, 19 nt, Artificial Sequence
  Description of Artificial Sequence: Synthetic oligonucleotide
ggccaaaauaguuuaucuc

SEQ ID NO: 2457943 - RNA, 19 nt, Artificial Sequence
  Description of Artificial Sequence: Synthetic oligonucleotide
ugguacugucugaucacuc

SEQ ID NO: 2457944 - RNA, 19 nt, Artificial Sequence
  Description of Artificial Sequence: Synthetic oligonucleotide
ucuugcccuggauacugcu

SEQ ID NO: 2457945 - RNA, 19 nt, Artificial Sequence
  Description of Artificial Sequence: Synthetic oligonucleotide
accagcuuacgcccugcag

SEQ ID NO: 2457946 - RNA, 19 nt, Artificial Sequence
  Description of Artificial Sequence: Synthetic oligonucleotide
gauacugcugauggcgaca

SEQ ID NO: 2457947 - RNA, 19 nt, Artificial Sequence
  Description of Artificial Sequence: Synthetic oligonucleotide
acagauagauugguauaga

SEQ ID NO: 2457948 - RNA, 19 nt, Artificial Sequence
  Description of Artificial Sequence: Synthetic oligonucleotide
agccaaagcacuguaggau

SEQ ID NO: 2457949 - RNA, 19 nt, Artificial Sequence
  Description of Artificial Sequence: Synthetic oligonucleotide
cauuucgaccacagagcac

SEQ ID NO: 2457950 - RNA, 19 nt, Artificial Sequence
  Description of Artificial Sequence: Synthetic oligonucleotide
uugaucauggagggcagua

SEQ ID NO: 2457951 - RNA, 19 nt, Artificial Sequence
  Description of Artificial Sequence: Synthetic oligonucleotide
acgguagcugaccccagca

SEQ ID NO: 2457952 - RNA, 19 nt, Artificial Sequence
  Description of Artificial Sequence: Synthetic oligonucleotide
caaguucacugacgagugc

SEQ ID NO: 2457953 - RNA, 19 nt, Artificial Sequence
  Description of Artificial Sequence: Synthetic oligonucleotide
gaucacucugaucuacgcu

SEQ ID NO: 2457954 - RNA, 19 nt, Artificial Sequence
  Description of Artificial Sequence: Synthetic oligonucleotide
uugcaugcuuggaggcugc

SEQ ID NO: 2457955 - RNA, 19 nt, Artificial Sequence
  Description of Artificial Sequence: Synthetic oligonucleotide
agggcuuaucacagucacc

SEQ ID NO: 2457956 - RNA, 19 nt, Artificial Sequence
  Description of Artificial Sequence: Synthetic oligonucleotide
ugaucuacgcuagcagcuc

SEQ ID NO: 2457957 - RNA, 19 nt, Artificial Sequence
  Description of Artificial Sequence: Synthetic oligonucleotide
ucuacgcuagcagcucuga

SEQ ID NO: 2457958 - RNA, 19 nt, Artificial Sequence
  Description of Artificial Sequence: Synthetic oligonucleotide
aggccauaauucugaagaa

SEQ ID NO: 2457959 - RNA, 19 nt, Artificial Sequence
  Description of Artificial Sequence: Synthetic oligonucleotide
ggcaguaagucaguuaaga

SEQ ID NO: 2457960 - RNA, 19 nt, Artificial Sequence
  Description of Artificial Sequence: Synthetic oligonucleotide
uuucgaccacagagcacca

SEQ ID NO: 2457961 - RNA, 19 nt, Artificial Sequence
  Description of Artificial Sequence: Synthetic oligonucleotide
uuaucacagucaccucaau

SEQ ID NO: 2457962 - RNA, 19 nt, Artificial Sequence
  Description of Artificial Sequence: Synthetic oligonucleotide
cacccuccuguccacgucc

SEQ ID NO: 2457963 - RNA, 19 nt, Artificial Sequence
  Description of Artificial Sequence: Synthetic oligonucleotide
cauggagggcaguagagcu

SEQ ID NO: 2457964 - RNA, 19 nt, Artificial Sequence
  Description of Artificial Sequence: Synthetic oligonucleotide
gugaggucgaaggucacca

SEQ ID NO: 2457965 - RNA, 19 nt, Artificial Sequence
  Description of Artificial Sequence: Synthetic oligonucleotide
gagcaacagggccaaaaua

SEQ ID NO: 2457966 - RNA, 19 nt, Artificial Sequence
  Description of Artificial Sequence: Synthetic oligonucleotide
caccauguaagguuugugu

SEQ ID NO: 2457967 - RNA, 19 nt, Artificial Sequence
  Description of Artificial Sequence: Synthetic oligonucleotide
cugcauaugcugaucgaaa

SEQ ID NO: 2457968 - RNA, 19 nt, Artificial Sequence
  Description of Artificial Sequence: Synthetic oligonucleotide
ugucccugggagguaugag

SEQ ID NO: 2457969 - RNA, 19 nt, Artificial Sequence
  Description of Artificial Sequence: Synthetic oligonucleotide
ggaaugcugaucuugcccu

SEQ ID NO: 2457970 - RNA, 19 nt, Artificial Sequence
  Description of Artificial Sequence: Synthetic oligonucleotide
cuuuuggcccuagaggcca

SEQ ID NO: 2457971 - RNA, 19 nt, Artificial Sequence
  Description of Artificial Sequence: Synthetic oligonucleotide
ccuagaggccauaauucug

SEQ ID NO: 2457972 - RNA, 19 nt, Artificial Sequence
  Description of Artificial Sequence: Synthetic oligonucleotide
ccagaauccugagauagac

SEQ ID NO: 2457973 - RNA, 19 nt, Artificial Sequence
  Description of Artificial Sequence: Synthetic oligonucleotide
ggaucucaacugcugcugc

SEQ ID NO: 2457974 - RNA, 19 nt, Artificial Sequence
  Description of Artificial Sequence: Synthetic oligonucleotide
aggagccagaauccugaga

SEQ ID NO: 2457975 - RNA, 19 nt, Artificial Sequence
  Description of Artificial Sequence: Synthetic oligonucleotide
auguaagguuugugugucu

SEQ ID NO: 2457976 - RNA, 19 nt, Artificial Sequence
  Description of Artificial Sequence: Synthetic oligonucleotide
cugaucuacgcuagcagcu

SEQ ID NO: 2457977 - RNA, 19 nt, Artificial Sequence
  Description of Artificial Sequence: Synthetic oligonucleotide
cuacgcuagcagcucugag

SEQ ID NO: 2457978 - RNA, 19 nt, Artificial Sequence
  Description of Artificial Sequence: Synthetic oligonucleotide
gagguaugagaaccagcaa

SEQ ID NO: 2457979 - RNA, 19 nt, Artificial Sequence
  Description of Artificial Sequence: Synthetic oligonucleotide
aguuaagagcacguccuuu

SEQ ID NO: 2457980 - RNA, 19 nt, Artificial Sequence
  Description of Artificial Sequence: Synthetic oligonucleotide
cagcuuacgcccugcagca

SEQ ID NO: 2457981 - RNA, 19 nt, Artificial Sequence
  Description of Artificial Sequence: Synthetic oligonucleotide
aggaucugugaggucgaag

SEQ ID NO: 2457982 - RNA, 19 nt, Artificial Sequence
  Description of Artificial Sequence: Synthetic oligonucleotide
gacgagugcuucaagggcu

SEQ ID NO: 2457983 - RNA, 19 nt, Artificial Sequence
  Description of Artificial Sequence: Synthetic oligonucleotide
gucgaaggucaccauguaa

SEQ ID NO: 2457984 - RNA, 19 nt, Artificial Sequence
  Description of Artificial Sequence: Synthetic oligonucleotide
cagggauggcaguaaguca

SEQ ID NO: 2457985 - RNA, 19 nt, Artificial Sequence
  Description of Artificial Sequence: Synthetic oligonucleotide
gguaucacggauggcacca

SEQ ID NO: 2457986 - RNA, 19 nt, Artificial Sequence
  Description of Artificial Sequence: Synthetic oligonucleotide
cagcaaguucacugacgag

SEQ ID NO: 2457987 - RNA, 19 nt, Artificial Sequence
  Description of Artificial Sequence: Synthetic oligonucleotide
cuagcgcuccauaucugga

SEQ ID NO: 2457988 - RNA, 19 nt, Artificial Sequence
  Description of Artificial Sequence: Synthetic oligonucleotide
gcugaucgaaaaggaaugc

SEQ ID NO: 2457989 - RNA, 19 nt, Artificial Sequence
  Description of Artificial Sequence: Synthetic oligonucleotide
uucgaccacagagcaccag

SEQ ID NO: 2457990 - RNA, 19 nt, Artificial Sequence
  Description of Artificial Sequence: Synthetic oligonucleotide
auagacggccagggauggc

SEQ ID NO: 2457991 - RNA, 19 nt, Artificial Sequence
  Description of Artificial Sequence: Synthetic oligonucleotide
cacagagcaccagcuuacg

SEQ ID NO: 2457992 - RNA, 19 nt, Artificial Sequence
  Description of Artificial Sequence: Synthetic oligonucleotide
cacgguagcugaccccagc

SEQ ID NO: 2457993 - RNA, 19 nt, Artificial Sequence
  Description of Artificial Sequence: Synthetic oligonucleotide
gguaugagaaccagcaagu

SEQ ID NO: 2457994 - RNA, 19 nt, Artificial Sequence
  Description of Artificial Sequence: Synthetic oligonucleotide
ugcuuggaggcugcauaug

SEQ ID NO: 2457995 - RNA, 19 nt, Artificial Sequence
  Description of Artificial Sequence: Synthetic oligonucleotide
gggcuuaucacagucaccu

SEQ ID NO: 2457996 - RNA, 19 nt, Artificial Sequence
  Description of Artificial Sequence: Synthetic oligonucleotide
ccagcaaguucacugacga

SEQ ID NO: 2457997 - RNA, 19 nt, Artificial Sequence
  Description of Artificial Sequence: Synthetic oligonucleotide
ugcugaucuugcccuggau

SEQ ID NO: 2457998 - RNA, 19 nt, Artificial Sequence
  Description of Artificial Sequence: Synthetic oligonucleotide
cacucugaucuacgcuagc

SEQ ID NO: 2457999 - RNA, 19 nt, Artificial Sequence
  Description of Artificial Sequence: Synthetic oligonucleotide
cagcagugacagcauuuac

SEQ ID NO: 2458000 - RNA, 19 nt, Artificial Sequence
  Description of Artificial Sequence: Synthetic oligonucleotide
agcaguaucaggaguucuu

SEQ ID NO: 2458001 - RNA, 19 nt, Artificial Sequence
  Description of Artificial Sequence: Synthetic oligonucleotide
gggcaguagagcuuuuguc

SEQ ID NO: 2458002 - RNA, 19 nt, Artificial Sequence
  Description of Artificial Sequence: Synthetic oligonucleotide
gcaaggacauccugggcca

SEQ ID NO: 2458003 - RNA, 19 nt, Artificial Sequence
  Description of Artificial Sequence: Synthetic oligonucleotide
cagauagauugguauagau

SEQ ID NO: 2458004 - RNA, 19 nt, Artificial Sequence
  Description of Artificial Sequence: Synthetic oligonucleotide
gaucuacgcuagcagcucu

SEQ ID NO: 2458005 - RNA, 19 nt, Artificial Sequence
  Description of Artificial Sequence: Synthetic oligonucleotide
gguacugucugaucacucu

SEQ ID NO: 2458006 - RNA, 19 nt, Artificial Sequence
  Description of Artificial Sequence: Synthetic oligonucleotide
guagcugaccccagcauua

SEQ ID NO: 2458007 - RNA, 19 nt, Artificial Sequence
  Description of Artificial Sequence: Synthetic oligonucleotide
ugaggucgaaggucaccau

SEQ ID NO: 2458008 - RNA, 19 nt, Artificial Sequence
  Description of Artificial Sequence: Synthetic oligonucleotide
auagauugguauagaugua

SEQ ID NO: 2458009 - RNA, 19 nt, Artificial Sequence
  Description of Artificial Sequence: Synthetic oligonucleotide
caccacgguagcugacccc

SEQ ID NO: 2458010 - RNA, 19 nt, Artificial Sequence
  Description of Artificial Sequence: Synthetic oligonucleotide
cuugucuagcgcuccauau

SEQ ID NO: 2458011 - RNA, 19 nt, Artificial Sequence
  Description of Artificial Sequence: Synthetic oligonucleotide
aggugugguacugucugau

SEQ ID NO: 2458012 - RNA, 19 nt, Artificial Sequence
  Description of Artificial Sequence: Synthetic oligonucleotide
guucuugucuagcgcucca

SEQ ID NO: 2458013 - RNA, 19 nt, Artificial Sequence
  Description of Artificial Sequence: Synthetic oligonucleotide
ggauacugcugauggcgac

SEQ ID NO: 2458014 - RNA, 19 nt, Artificial Sequence
  Description of Artificial Sequence: Synthetic oligonucleotide
cugagcaguaucaggaguu

SEQ ID NO: 2458015 - RNA, 19 nt, Artificial Sequence
  Description of Artificial Sequence: Synthetic oligonucleotide
ccacagagcaccagcuuac

SEQ ID NO: 2458016 - RNA, 19 nt, Artificial Sequence
  Description of Artificial Sequence: Synthetic oligonucleotide
cuaugguaucacggauggc

SEQ ID NO: 2458017 - RNA, 19 nt, Artificial Sequence
  Description of Artificial Sequence: Synthetic oligonucleotide
cgaaaaggaaugcugaucu

SEQ ID NO: 2458018 - RNA, 19 nt, Artificial Sequence
  Description of Artificial Sequence: Synthetic oligonucleotide
uucuugucuagcgcuccau

SEQ ID NO: 2458019 - RNA, 19 nt, Artificial Sequence
  Description of Artificial Sequence: Synthetic oligonucleotide
aucuacgcuagcagcucug

SEQ ID NO: 2458020 - RNA, 19 nt, Artificial Sequence
  Description of Artificial Sequence: Synthetic oligonucleotide
gcugaucuugcccuggaua

SEQ ID NO: 2458021 - RNA, 19 nt, Artificial Sequence
  Description of Artificial Sequence: Synthetic oligonucleotide
acgagugcuucaagggcug

SEQ ID NO: 2458022 - RNA, 19 nt, Artificial Sequence
  Description of Artificial Sequence: Synthetic oligonucleotide
gccagggcuuaucacaguc

SEQ ID NO: 2458023 - RNA, 19 nt, Artificial Sequence
  Description of Artificial Sequence: Synthetic oligonucleotide
uuuuggcccuagaggccau

SEQ ID NO: 2458024 - RNA, 19 nt, Artificial Sequence
  Description of Artificial Sequence: Synthetic oligonucleotide
ccaggagccagaauccuga

SEQ ID NO: 2458025 - RNA, 19 nt, Artificial Sequence
  Description of Artificial Sequence: Synthetic oligonucleotide
aacugcugcugcagcaaua

SEQ ID NO: 2458026 - RNA, 19 nt, Artificial Sequence
  Description of Artificial Sequence: Synthetic oligonucleotide
agcuuuugucagagcaaca

SEQ ID NO: 2458027 - RNA, 19 nt, Artificial Sequence
  Description of Artificial Sequence: Synthetic oligonucleotide
gagugcuucaagggcuguc

SEQ ID NO: 2458028 - RNA, 19 nt, Artificial Sequence
  Description of Artificial Sequence: Synthetic oligonucleotide
guguucuugucuagcgcuc

SEQ ID NO: 2458029 - RNA, 19 nt, Artificial Sequence
  Description of Artificial Sequence: Synthetic oligonucleotide
ucgcuuccucuugaucaug

SEQ ID NO: 2458030 - RNA, 19 nt, Artificial Sequence
  Description of Artificial Sequence: Synthetic oligonucleotide
cuccuguccacguccacua

SEQ ID NO: 2458031 - RNA, 19 nt, Artificial Sequence
  Description of Artificial Sequence: Synthetic oligonucleotide
cagagcaacagggccaaaa

SEQ ID NO: 2458032 - RNA, 19 nt, Artificial Sequence
  Description of Artificial Sequence: Synthetic oligonucleotide
cugaucgaaaaggaaugcu

SEQ ID NO: 2458033 - RNA, 19 nt, Artificial Sequence
  Description of Artificial Sequence: Synthetic oligonucleotide
gcugucacauuucgaccac

SEQ ID NO: 2458034 - RNA, 19 nt, Artificial Sequence
  Description of Artificial Sequence: Synthetic oligonucleotide
gcgcuccauaucuggagcc

SEQ ID NO: 2458035 - RNA, 19 nt, Artificial Sequence
  Description of Artificial Sequence: Synthetic oligonucleotide
ggcaccacgguagcugacc

SEQ ID NO: 2458036 - RNA, 19 nt, Artificial Sequence
  Description of Artificial Sequence: Synthetic oligonucleotide
uccuguccacguccacuau

SEQ ID NO: 2458037 - RNA, 19 nt, Artificial Sequence
  Description of Artificial Sequence: Synthetic oligonucleotide
cuguaggaucucaacugcu

SEQ ID NO: 2458038 - RNA, 19 nt, Artificial Sequence
  Description of Artificial Sequence: Synthetic oligonucleotide
ggccauaauucugaagaaa

SEQ ID NO: 2458039 - RNA, 19 nt, Artificial Sequence
  Description of Artificial Sequence: Synthetic oligonucleotide
gucuagcgcuccauaucug

SEQ ID NO: 2458040 - RNA, 19 nt, Artificial Sequence
  Description of Artificial Sequence: Synthetic oligonucleotide
cguccacuaugguaucacg

SEQ ID NO: 2458041 - RNA, 19 nt, Artificial Sequence
  Description of Artificial Sequence: Synthetic oligonucleotide
agauguagccagggcuuau

SEQ ID NO: 2458042 - RNA, 19 nt, Artificial Sequence
  Description of Artificial Sequence: Synthetic oligonucleotide
gugacagcauuuacagaua

SEQ ID NO: 2458043 - RNA, 19 nt, Artificial Sequence
  Description of Artificial Sequence: Synthetic oligonucleotide
acggcagcaaggacauccu

SEQ ID NO: 2458044 - RNA, 19 nt, Artificial Sequence
  Description of Artificial Sequence: Synthetic oligonucleotide
uggcgacaauguggccucg

SEQ ID NO: 2458045 - RNA, 19 nt, Artificial Sequence
  Description of Artificial Sequence: Synthetic oligonucleotide
gagcaguaucaggaguucu

SEQ ID NO: 2458046 - RNA, 19 nt, Artificial Sequence
  Description of Artificial Sequence: Synthetic oligonucleotide
ccauguaagguuugugugu

SEQ ID NO: 2458047 - RNA, 19 nt, Artificial Sequence
  Description of Artificial Sequence: Synthetic oligonucleotide
ggcugcauaugcugaucga

SEQ ID NO: 2458048 - RNA, 19 nt, Artificial Sequence
  Description of Artificial Sequence: Synthetic oligonucleotide
cacauagccaaagcacugu

SEQ ID NO: 2458049 - RNA, 19 nt, Artificial Sequence
  Description of Artificial Sequence: Synthetic oligonucleotide
guaucacggauggcaccac

SEQ ID NO: 2458050 - RNA, 19 nt, Artificial Sequence
  Description of Artificial Sequence: Synthetic oligonucleotide
uacugcugauggcgacaau

SEQ ID NO: 2458051 - RNA, 19 nt, Artificial Sequence
  Description of Artificial Sequence: Synthetic oligonucleotide
gcuagcagcucugagcagu

SEQ ID NO: 2458052 - RNA, 19 nt, Artificial Sequence
  Description of Artificial Sequence: Synthetic oligonucleotide
gguagcugaccccagcauu

SEQ ID NO: 2458053 - RNA, 19 nt, Artificial Sequence
  Description of Artificial Sequence: Synthetic oligonucleotide
ggcuuaucacagucaccuc

SEQ ID NO: 2458054 - RNA, 19 nt, Artificial Sequence
  Description of Artificial Sequence: Synthetic oligonucleotide
gcaauagcaccaggaucug

SEQ ID NO: 2458055 - RNA, 19 nt, Artificial Sequence
  Description of Artificial Sequence: Synthetic oligonucleotide
caaggacauccugggccac

SEQ ID NO: 2458056 - RNA, 19 nt, Artificial Sequence
  Description of Artificial Sequence: Synthetic oligonucleotide
gaccacagagcaccagcuu

SEQ ID NO: 2458057 - RNA, 19 nt, Artificial Sequence
  Description of Artificial Sequence: Synthetic oligonucleotide
uuuggcccuagaggccaua

SEQ ID NO: 2458058 - RNA, 19 nt, Artificial Sequence
  Description of Artificial Sequence: Synthetic oligonucleotide
guaugagaaccagcaaguu

SEQ ID NO: 2458059 - RNA, 19 nt, Artificial Sequence
  Description of Artificial Sequence: Synthetic oligonucleotide
ccagggcuuaucacaguca

SEQ ID NO: 2458060 - RNA, 19 nt, Artificial Sequence
  Description of Artificial Sequence: Synthetic oligonucleotide
ccucaauguuauccugcuc

SEQ ID NO: 2458061 - RNA, 19 nt, Artificial Sequence
  Description of Artificial Sequence: Synthetic oligonucleotide
cacguccacuaugguauca

SEQ ID NO: 2458062 - RNA, 19 nt, Artificial Sequence
  Description of Artificial Sequence: Synthetic oligonucleotide
ccaaagcacuguaggaucu

SEQ ID NO: 2458063 - RNA, 19 nt, Artificial Sequence
  Description of Artificial Sequence: Synthetic oligonucleotide
cccuagaggccauaauucu

SEQ ID NO: 2458064 - RNA, 19 nt, Artificial Sequence
  Description of Artificial Sequence: Synthetic oligonucleotide
ggcgacaauguggccucgc

SEQ ID NO: 2458065 - RNA, 19 nt, Artificial Sequence
  Description of Artificial Sequence: Synthetic oligonucleotide
cagcacgcagacagucaaa

SEQ ID NO: 2458066 - RNA, 19 nt, Artificial Sequence
  Description of Artificial Sequence: Synthetic oligonucleotide
gccagaauccugagauaga

SEQ ID NO: 2458067 - RNA, 19 nt, Artificial Sequence
  Description of Artificial Sequence: Synthetic oligonucleotide
ggaaggugugguacugucu

SEQ ID NO: 2458068 - RNA, 19 nt, Artificial Sequence
  Description of Artificial Sequence: Synthetic oligonucleotide
ccucuugaucauggagggc

SEQ ID NO: 2458069 - RNA, 19 nt, Artificial Sequence
  Description of Artificial Sequence: Synthetic oligonucleotide
gccucgcuuccucuugauc

SEQ ID NO: 2458070 - RNA, 19 nt, Artificial Sequence
  Description of Artificial Sequence: Synthetic oligonucleotide
acccuccuguccacgucca

SEQ ID NO: 2458071 - RNA, 19 nt, Artificial Sequence
  Description of Artificial Sequence: Synthetic oligonucleotide
gguugcaugcuuggaggcu

SEQ ID NO: 2458072 - RNA, 19 nt, Artificial Sequence
  Description of Artificial Sequence: Synthetic oligonucleotide
cuugaucauggagggcagu

SEQ ID NO: 2458073 - RNA, 19 nt, Artificial Sequence
  Description of Artificial Sequence: Synthetic oligonucleotide
caauagcaccaggaucugu

SEQ ID NO: 2458074 - RNA, 19 nt, Artificial Sequence
  Description of Artificial Sequence: Synthetic oligonucleotide
caguuaagagcacguccuu

SEQ ID NO: 2458075 - RNA, 19 nt, Artificial Sequence
  Description of Artificial Sequence: Synthetic oligonucleotide
caucagcagugacagcauu

SEQ ID NO: 2458076 - RNA, 19 nt, Artificial Sequence
  Description of Artificial Sequence: Synthetic oligonucleotide
cagggccaaaauaguuuau

SEQ ID NO: 2458077 - RNA, 19 nt, Artificial Sequence
  Description of Artificial Sequence: Synthetic oligonucleotide
gcgacaauguggccucgcu

SEQ ID NO: 2458078 - RNA, 19 nt, Artificial Sequence
  Description of Artificial Sequence: Synthetic oligonucleotide
caauguuauccugcuccau

SEQ ID NO: 2458079 - RNA, 19 nt, Artificial Sequence
  Description of Artificial Sequence: Synthetic oligonucleotide
gcucucuuuuggcccuaga

SEQ ID NO: 2458080 - RNA, 19 nt, Artificial Sequence
  Description of Artificial Sequence: Synthetic oligonucleotide
gucugucccugggagguau

SEQ ID NO: 2458081 - RNA, 19 nt, Artificial Sequence
  Description of Artificial Sequence: Synthetic oligonucleotide
ccacguccacuaugguauc

SEQ ID NO: 2458082 - RNA, 19 nt, Artificial Sequence
  Description of Artificial Sequence: Synthetic oligonucleotide
ccacgguagcugaccccag

SEQ ID NO: 2458083 - RNA, 19 nt, Artificial Sequence
  Description of Artificial Sequence: Synthetic oligonucleotide
caauguggccucgcuuccu

SEQ ID NO: 2458084 - RNA, 19 nt, Artificial Sequence
  Description of Artificial Sequence: Synthetic oligonucleotide
ccacuaugguaucacggau

SEQ ID NO: 2458085 - RNA, 19 nt, Artificial Sequence
  Description of Artificial Sequence: Synthetic oligonucleotide
cgcuagcagcucugagcag

SEQ ID NO: 2458086 - RNA, 19 nt, Artificial Sequence
  Description of Artificial Sequence: Synthetic oligonucleotide
gggauggcaguaagucagu

SEQ ID NO: 2458087 - RNA, 19 nt, Artificial Sequence
  Description of Artificial Sequence: Synthetic oligonucleotide
cggcagcaaggacauccug

SEQ ID NO: 2458088 - RNA, 19 nt, Artificial Sequence
  Description of Artificial Sequence: Synthetic oligonucleotide
cgaccacagagcaccagcu

SEQ ID NO: 2458089 - RNA, 19 nt, Artificial Sequence
  Description of Artificial Sequence: Synthetic oligonucleotide
ggauggcaguaagucaguu

SEQ ID NO: 2458090 - RNA, 19 nt, Artificial Sequence
  Description of Artificial Sequence: Synthetic oligonucleotide
ccaucagcagugacagcau

SEQ ID NO: 2458091 - RNA, 19 nt, Artificial Sequence
  Description of Artificial Sequence: Synthetic oligonucleotide
cccuccuguccacguccac

SEQ ID NO: 2458092 - RNA, 19 nt, Artificial Sequence
  Description of Artificial Sequence: Synthetic oligonucleotide
cgcuccauaucuggagcca

SEQ ID NO: 2458093 - RNA, 19 nt, Artificial Sequence
  Description of Artificial Sequence: Synthetic oligonucleotide
ggccucgcuuccucuugau

SEQ ID NO: 2458094 - RNA, 19 nt, Artificial Sequence
  Description of Artificial Sequence: Synthetic oligonucleotide
cgguagcugaccccagcau

SEQ ID NO: 2458095 - RNA, 19 nt, Artificial Sequence
  Description of Artificial Sequence: Synthetic oligonucleotide
ggagggcaguagagcuuuu

SEQ ID NO: 2458096 - RNA, 19 nt, Artificial Sequence
  Description of Artificial Sequence: Synthetic oligonucleotide
ucacgaacaaucaugguga

SEQ ID NO: 2458097 - RNA, 19 nt, Artificial Sequence
  Description of Artificial Sequence: Synthetic oligonucleotide
acacccaucaaucugcagg

SEQ ID NO: 2458098 - RNA, 19 nt, Artificial Sequence
  Description of Artificial Sequence: Synthetic oligonucleotide
ugaucuuuucugcugacgc

SEQ ID NO: 2458099 - RNA, 19 nt, Artificial Sequence
  Description of Artificial Sequence: Synthetic oligonucleotide
ugugacuucagaugucugg

SEQ ID NO: 2458100 - RNA, 19 nt, Artificial Sequence
  Description of Artificial Sequence: Synthetic oligonucleotide
accauaugcucauagauca

SEQ ID NO: 2458101 - RNA, 19 nt, Artificial Sequence
  Description of Artificial Sequence: Synthetic oligonucleotide
cuuaucgacagccugcagg

SEQ ID NO: 2458102 - RNA, 19 nt, Artificial Sequence
  Description of Artificial Sequence: Synthetic oligonucleotide
agugugaugacguuuccag

SEQ ID NO: 2458103 - RNA, 19 nt, Artificial Sequence
  Description of Artificial Sequence: Synthetic oligonucleotide
cuuuguaugugcuccaccc

SEQ ID NO: 2458104 - RNA, 19 nt, Artificial Sequence
  Description of Artificial Sequence: Synthetic oligonucleotide
agauggaucucacgcaccc

SEQ ID NO: 2458105 - RNA, 19 nt, Artificial Sequence
  Description of Artificial Sequence: Synthetic oligonucleotide
cauagugacaguccgcugg

SEQ ID NO: 2458106 - RNA, 19 nt, Artificial Sequence
  Description of Artificial Sequence: Synthetic oligonucleotide
cacaaagagccccuuaucg

SEQ ID NO: 2458107 - RNA, 19 nt, Artificial Sequence
  Description of Artificial Sequence: Synthetic oligonucleotide
ugucaucugaggauugccg

SEQ ID NO: 2458108 - RNA, 19 nt, Artificial Sequence
  Description of Artificial Sequence: Synthetic oligonucleotide
uuaucgacagccugcaggc

SEQ ID NO: 2458109 - RNA, 19 nt, Artificial Sequence
  Description of Artificial Sequence: Synthetic oligonucleotide
acagauggaucucacgcac

SEQ ID NO: 2458110 - RNA, 19 nt, Artificial Sequence
  Description of Artificial Sequence: Synthetic oligonucleotide
cauauugucaccaucugga

SEQ ID NO: 2458111 - RNA, 19 nt, Artificial Sequence
  Description of Artificial Sequence: Synthetic oligonucleotide
guagugguuagugagaagc

SEQ ID NO: 2458112 - RNA, 19 nt, Artificial Sequence
  Description of Artificial Sequence: Synthetic oligonucleotide
uuagugagaagcccguuac

SEQ ID NO: 2458113 - RNA, 19 nt, Artificial Sequence
  Description of Artificial Sequence: Synthetic oligonucleotide
ugagcuuuguaugugcucc

SEQ ID NO: 2458114 - RNA, 19 nt, Artificial Sequence
  Description of Artificial Sequence: Synthetic oligonucleotide
cugucacgaacaaucaugg

SEQ ID NO: 2458115 - RNA, 19 nt, Artificial Sequence
  Description of Artificial Sequence: Synthetic oligonucleotide
ugaccauaugcucauagau

SEQ ID NO: 2458116 - RNA, 19 nt, Artificial Sequence
  Description of Artificial Sequence: Synthetic oligonucleotide
aaagcgcaaccccacgagg

SEQ ID NO: 2458117 - RNA, 19 nt, Artificial Sequence
  Description of Artificial Sequence: Synthetic oligonucleotide
uguucccagagacuggugc

SEQ ID NO: 2458118 - RNA, 19 nt, Artificial Sequence
  Description of Artificial Sequence: Synthetic oligonucleotide
aucgacagccugcaggcgc

SEQ ID NO: 2458119 - RNA, 19 nt, Artificial Sequence
  Description of Artificial Sequence: Synthetic oligonucleotide
ugcuuugugagcuuuguau

SEQ ID NO: 2458120 - RNA, 19 nt, Artificial Sequence
  Description of Artificial Sequence: Synthetic oligonucleotide
ugagaagcccguuacgggc

SEQ ID NO: 2458121 - RNA, 19 nt, Artificial Sequence
  Description of Artificial Sequence: Synthetic oligonucleotide
agcccaaugacguucuguc

SEQ ID NO: 2458122 - RNA, 19 nt, Artificial Sequence
  Description of Artificial Sequence: Synthetic oligonucleotide
agugagaagcccguuacgg

SEQ ID NO: 2458123 - RNA, 19 nt, Artificial Sequence
  Description of Artificial Sequence: Synthetic oligonucleotide
agugguuagugagaagccc

SEQ ID NO: 2458124 - RNA, 19 nt, Artificial Sequence
  Description of Artificial Sequence: Synthetic oligonucleotide
aguucugccaaguuugggu

SEQ ID NO: 2458125 - RNA, 19 nt, Artificial Sequence
  Description of Artificial Sequence: Synthetic oligonucleotide
cugaggauugccgaguucg

SEQ ID NO: 2458126 - RNA, 19 nt, Artificial Sequence
  Description of Artificial Sequence: Synthetic oligonucleotide
gugacaguccgcuggaacg

SEQ ID NO: 2458127 - RNA, 19 nt, Artificial Sequence
  Description of Artificial Sequence: Synthetic oligonucleotide
aggaucugauccccaaagc

SEQ ID NO: 2458128 - RNA, 19 nt, Artificial Sequence
  Description of Artificial Sequence: Synthetic oligonucleotide
uguccuugugcauagugac

SEQ ID NO: 2458129 - RNA, 19 nt, Artificial Sequence
  Description of Artificial Sequence: Synthetic oligonucleotide
agugacaguccgcuggaac

SEQ ID NO: 2458130 - RNA, 19 nt, Artificial Sequence
  Description of Artificial Sequence: Synthetic oligonucleotide
agagacuggugcuaccacg

SEQ ID NO: 2458131 - RNA, 19 nt, Artificial Sequence
  Description of Artificial Sequence: Synthetic oligonucleotide
guucaccucacacacguag

SEQ ID NO: 2458132 - RNA, 19 nt, Artificial Sequence
  Description of Artificial Sequence: Synthetic oligonucleotide
ggaucugauccccaaagcg

SEQ ID NO: 2458133 - RNA, 19 nt, Artificial Sequence
  Description of Artificial Sequence: Synthetic oligonucleotide
gaucugauccccaaagcgc

SEQ ID NO: 2458134 - RNA, 19 nt, Artificial Sequence
  Description of Artificial Sequence: Synthetic oligonucleotide
auccccaaagcgcaacccc

SEQ ID NO: 2458135 - RNA, 19 nt, Artificial Sequence
  Description of Artificial Sequence: Synthetic oligonucleotide
aguguuggccuggacaagc

SEQ ID NO: 2458136 - RNA, 19 nt, Artificial Sequence
  Description of Artificial Sequence: Synthetic oligonucleotide
uugugcauagugacagucc

SEQ ID NO: 2458137 - RNA, 19 nt, Artificial Sequence
  Description of Artificial Sequence: Synthetic oligonucleotide
uggugaagcagcagcgggg

SEQ ID NO: 2458138 - RNA, 19 nt, Artificial Sequence
  Description of Artificial Sequence: Synthetic oligonucleotide
caaagagccccuuaucgac

SEQ ID NO: 2458139 - RNA, 19 nt, Artificial Sequence
  Description of Artificial Sequence: Synthetic oligonucleotide
acagucacacccaucaauc

SEQ ID NO: 2458140 - RNA, 19 nt, Artificial Sequence
  Description of Artificial Sequence: Synthetic oligonucleotide
ucuucuggacuucuuggcu

SEQ ID NO: 2458141 - RNA, 19 nt, Artificial Sequence
  Description of Artificial Sequence: Synthetic oligonucleotide
gaucuuuucugcugacgcc

SEQ ID NO: 2458142 - RNA, 19 nt, Artificial Sequence
  Description of Artificial Sequence: Synthetic oligonucleotide
acaaagagccccuuaucga

SEQ ID NO: 2458143 - RNA, 19 nt, Artificial Sequence
  Description of Artificial Sequence: Synthetic oligonucleotide
acuggugcuaccacguggc

SEQ ID NO: 2458144 - RNA, 19 nt, Artificial Sequence
  Description of Artificial Sequence: Synthetic oligonucleotide
gcuagugaccaccauauug

SEQ ID NO: 2458145 - RNA, 19 nt, Artificial Sequence
  Description of Artificial Sequence: Synthetic oligonucleotide
uguccguucaccucacaca

SEQ ID NO: 2458146 - RNA, 19 nt, Artificial Sequence
  Description of Artificial Sequence: Synthetic oligonucleotide
uucgcugcaggauggcagg

SEQ ID NO: 2458147 - RNA, 19 nt, Artificial Sequence
  Description of Artificial Sequence: Synthetic oligonucleotide
agucacacccaucaaucug

SEQ ID NO: 2458148 - RNA, 19 nt, Artificial Sequence
  Description of Artificial Sequence: Synthetic oligonucleotide
ugcacaaagagccccuuau

SEQ ID NO: 2458149 - RNA, 19 nt, Artificial Sequence
  Description of Artificial Sequence: Synthetic oligonucleotide
uuuagcccaaugacguucu

SEQ ID NO: 2458150 - RNA, 19 nt, Artificial Sequence
  Description of Artificial Sequence: Synthetic oligonucleotide
ugcacagauggaucucacg

SEQ ID NO: 2458151 - RNA, 19 nt, Artificial Sequence
  Description of Artificial Sequence: Synthetic oligonucleotide
uagugagaagcccguuacg

SEQ ID NO: 2458152 - RNA, 19 nt, Artificial Sequence
  Description of Artificial Sequence: Synthetic oligonucleotide
acgcaacacacccagguug

SEQ ID NO: 2458153 - RNA, 19 nt, Artificial Sequence
  Description of Artificial Sequence: Synthetic oligonucleotide
uuccccuucuugaugaaaa

SEQ ID NO: 2458154 - RNA, 19 nt, Artificial Sequence
  Description of Artificial Sequence: Synthetic oligonucleotide
ucaaucugcaggaucugau

SEQ ID NO: 2458155 - RNA, 19 nt, Artificial Sequence
  Description of Artificial Sequence: Synthetic oligonucleotide
caggcuugaucucugcacg

SEQ ID NO: 2458156 - RNA, 19 nt, Artificial Sequence
  Description of Artificial Sequence: Synthetic oligonucleotide
ugcauagugacaguccgcu

SEQ ID NO: 2458157 - RNA, 19 nt, Artificial Sequence
  Description of Artificial Sequence: Synthetic oligonucleotide
uggugaucuuuucugcuga

SEQ ID NO: 2458158 - RNA, 19 nt, Artificial Sequence
  Description of Artificial Sequence: Synthetic oligonucleotide
uugaccauaugcucauaga

SEQ ID NO: 2458159 - RNA, 19 nt, Artificial Sequence
  Description of Artificial Sequence: Synthetic oligonucleotide
gugguuagugagaagcccg

SEQ ID NO: 2458160 - RNA, 19 nt, Artificial Sequence
  Description of Artificial Sequence: Synthetic oligonucleotide
acuucagaugucugggaug

SEQ ID NO: 2458161 - RNA, 19 nt, Artificial Sequence
  Description of Artificial Sequence: Synthetic oligonucleotide
aagcgcaaccccacgaggg

SEQ ID NO: 2458162 - RNA, 19 nt, Artificial Sequence
  Description of Artificial Sequence: Synthetic oligonucleotide
uucuggacuucuuggcuag

SEQ ID NO: 2458163 - RNA, 19 nt, Artificial Sequence
  Description of Artificial Sequence: Synthetic oligonucleotide
aaugcuuugugagcuuugu

SEQ ID NO: 2458164 - RNA, 19 nt, Artificial Sequence
  Description of Artificial Sequence: Synthetic oligonucleotide
ugugagcuuuguaugugcu

SEQ ID NO: 2458165 - RNA, 19 nt, Artificial Sequence
  Description of Artificial Sequence: Synthetic oligonucleotide
aggauugccgaguucgcug

SEQ ID NO: 2458166 - RNA, 19 nt, Artificial Sequence
  Description of Artificial Sequence: Synthetic oligonucleotide
agguuguucccagagacug

SEQ ID NO: 2458167 - RNA, 19 nt, Artificial Sequence
  Description of Artificial Sequence: Synthetic oligonucleotide
agggaugcaggaguguugg

SEQ ID NO: 2458168 - RNA, 19 nt, Artificial Sequence
  Description of Artificial Sequence: Synthetic oligonucleotide
gcacagauggaucucacgc

SEQ ID NO: 2458169 - RNA, 19 nt, Artificial Sequence
  Description of Artificial Sequence: Synthetic oligonucleotide
gguguggugaagcagcagc

SEQ ID NO: 2458170 - RNA, 19 nt, Artificial Sequence
  Description of Artificial Sequence: Synthetic oligonucleotide
aacuuggccugagcugucc

SEQ ID NO: 2458171 - RNA, 19 nt, Artificial Sequence
  Description of Artificial Sequence: Synthetic oligonucleotide
aggcuugaucucugcacgc

SEQ ID NO: 2458172 - RNA, 19 nt, Artificial Sequence
  Description of Artificial Sequence: Synthetic oligonucleotide
ucacacacguagugguuag

SEQ ID NO: 2458173 - RNA, 19 nt, Artificial Sequence
  Description of Artificial Sequence: Synthetic oligonucleotide
uccuugcacagauggaucu

SEQ ID NO: 2458174 - RNA, 19 nt, Artificial Sequence
  Description of Artificial Sequence: Synthetic oligonucleotide
ugacaguccgcuggaacgg

SEQ ID NO: 2458175 - RNA, 19 nt, Artificial Sequence
  Description of Artificial Sequence: Synthetic oligonucleotide
aaccccacgagggaugcag

SEQ ID NO: 2458176 - RNA, 19 nt, Artificial Sequence
  Description of Artificial Sequence: Synthetic oligonucleotide
gugaugacguuuccagcgg

SEQ ID NO: 2458177 - RNA, 19 nt, Artificial Sequence
  Description of Artificial Sequence: Synthetic oligonucleotide
auggaucucacgcacccca

SEQ ID NO: 2458178 - RNA, 19 nt, Artificial Sequence
  Description of Artificial Sequence: Synthetic oligonucleotide
cuuggcuagagagggacag

SEQ ID NO: 2458179 - RNA, 19 nt, Artificial Sequence
  Description of Artificial Sequence: Synthetic oligonucleotide
gaucucugcacgcaacaca

SEQ ID NO: 2458180 - RNA, 19 nt, Artificial Sequence
  Description of Artificial Sequence: Synthetic oligonucleotide
uucuuggcuagagagggac

SEQ ID NO: 2458181 - RNA, 19 nt, Artificial Sequence
  Description of Artificial Sequence: Synthetic oligonucleotide
gucacacccaucaaucugc

SEQ ID NO: 2458182 - RNA, 19 nt, Artificial Sequence
  Description of Artificial Sequence: Synthetic oligonucleotide
uucaccucacacacguagu

SEQ ID NO: 2458183 - RNA, 19 nt, Artificial Sequence
  Description of Artificial Sequence: Synthetic oligonucleotide
accucacacacguaguggu

SEQ ID NO: 2458184 - RNA, 19 nt, Artificial Sequence
  Description of Artificial Sequence: Synthetic oligonucleotide
uggcuagagagggacagcc

SEQ ID NO: 2458185 - RNA, 19 nt, Artificial Sequence
  Description of Artificial Sequence: Synthetic oligonucleotide
cuagugaccaccauauugu

SEQ ID NO: 2458186 - RNA, 19 nt, Artificial Sequence
  Description of Artificial Sequence: Synthetic oligonucleotide
gaccauaugcucauagauc

SEQ ID NO: 2458187 - RNA, 19 nt, Artificial Sequence
  Description of Artificial Sequence: Synthetic oligonucleotide
gauggcaggaggccugggc

SEQ ID NO: 2458188 - RNA, 19 nt, Artificial Sequence
  Description of Artificial Sequence: Synthetic oligonucleotide
uuaccacagauacaaucuu

SEQ ID NO: 2458189 - RNA, 19 nt, Artificial Sequence
  Description of Artificial Sequence: Synthetic oligonucleotide
caaagcgcaaccccacgag

SEQ ID NO: 2458190 - RNA, 19 nt, Artificial Sequence
  Description of Artificial Sequence: Synthetic oligonucleotide
ccugucacgaacaaucaug

SEQ ID NO: 2458191 - RNA, 19 nt, Artificial Sequence
  Description of Artificial Sequence: Synthetic oligonucleotide
aucuuuucugcugacgccu

SEQ ID NO: 2458192 - RNA, 19 nt, Artificial Sequence
  Description of Artificial Sequence: Synthetic oligonucleotide
uccccaaagcgcaacccca

SEQ ID NO: 2458193 - RNA, 19 nt, Artificial Sequence
  Description of Artificial Sequence: Synthetic oligonucleotide
guccguucaccucacacac

SEQ ID NO: 2458194 - RNA, 19 nt, Artificial Sequence
  Description of Artificial Sequence: Synthetic oligonucleotide
cuuuagcccaaugacguuc

SEQ ID NO: 2458195 - RNA, 19 nt, Artificial Sequence
  Description of Artificial Sequence: Synthetic oligonucleotide
agccaacuuggccugagcu

SEQ ID NO: 2458196 - RNA, 19 nt, Artificial Sequence
  Description of Artificial Sequence: Synthetic oligonucleotide
ugguuagugagaagcccgu

SEQ ID NO: 2458197 - RNA, 19 nt, Artificial Sequence
  Description of Artificial Sequence: Synthetic oligonucleotide
ugaggauugccgaguucgc

SEQ ID NO: 2458198 - RNA, 19 nt, Artificial Sequence
  Description of Artificial Sequence: Synthetic oligonucleotide
gcuagagagggacagcccc

SEQ ID NO: 2458199 - RNA, 19 nt, Artificial Sequence
  Description of Artificial Sequence: Synthetic oligonucleotide
uuuccagcgguggucagga

SEQ ID NO: 2458200 - RNA, 19 nt, Artificial Sequence
  Description of Artificial Sequence: Synthetic oligonucleotide
auagugacaguccgcugga

SEQ ID NO: 2458201 - RNA, 19 nt, Artificial Sequence
  Description of Artificial Sequence: Synthetic oligonucleotide
aaagccaacuuggccugag

SEQ ID NO: 2458202 - RNA, 19 nt, Artificial Sequence
  Description of Artificial Sequence: Synthetic oligonucleotide
cuugugcauagugacaguc

SEQ ID NO: 2458203 - RNA, 19 nt, Artificial Sequence
  Description of Artificial Sequence: Synthetic oligonucleotide
uccagcgguggucaggauc

SEQ ID NO: 2458204 - RNA, 19 nt, Artificial Sequence
  Description of Artificial Sequence: Synthetic oligonucleotide
uccaugguguggugaagca

SEQ ID NO: 2458205 - RNA, 19 nt, Artificial Sequence
  Description of Artificial Sequence: Synthetic oligonucleotide
aacaaucauggugaucuuu

SEQ ID NO: 2458206 - RNA, 19 nt, Artificial Sequence
  Description of Artificial Sequence: Synthetic oligonucleotide
uccguucaccucacacacg

SEQ ID NO: 2458207 - RNA, 19 nt, Artificial Sequence
  Description of Artificial Sequence: Synthetic oligonucleotide
ugaugacguuuccagcggu

SEQ ID NO: 2458208 - RNA, 19 nt, Artificial Sequence
  Description of Artificial Sequence: Synthetic oligonucleotide
gucaucugaggauugccga

SEQ ID NO: 2458209 - RNA, 19 nt, Artificial Sequence
  Description of Artificial Sequence: Synthetic oligonucleotide
ugacuucagaugucuggga

SEQ ID NO: 2458210 - RNA, 19 nt, Artificial Sequence
  Description of Artificial Sequence: Synthetic oligonucleotide
gagccccuuaucgacagcc

SEQ ID NO: 2458211 - RNA, 19 nt, Artificial Sequence
  Description of Artificial Sequence: Synthetic oligonucleotide
acacacguagugguuagug

SEQ ID NO: 2458212 - RNA, 19 nt, Artificial Sequence
  Description of Artificial Sequence: Synthetic oligonucleotide
gugaucuuuucugcugacg

SEQ ID NO: 2458213 - RNA, 19 nt, Artificial Sequence
  Description of Artificial Sequence: Synthetic oligonucleotide
cugacgccuucuucaaugc

SEQ ID NO: 2458214 - RNA, 19 nt, Artificial Sequence
  Description of Artificial Sequence: Synthetic oligonucleotide
gcugacgccuucuucaaug

SEQ ID NO: 2458215 - RNA, 19 nt, Artificial Sequence
  Description of Artificial Sequence: Synthetic oligonucleotide
ucuuggcuagagagggaca

SEQ ID NO: 2458216 - RNA, 19 nt, Artificial Sequence
  Description of Artificial Sequence: Synthetic oligonucleotide
uggaucucacgcaccccag

SEQ ID NO: 2458217 - RNA, 19 nt, Artificial Sequence
  Description of Artificial Sequence: Synthetic oligonucleotide
cuguccguucaccucacac

SEQ ID NO: 2458218 - RNA, 19 nt, Artificial Sequence
  Description of Artificial Sequence: Synthetic oligonucleotide
gugugaugacguuuccagc

SEQ ID NO: 2458219 - RNA, 19 nt, Artificial Sequence
  Description of Artificial Sequence: Synthetic oligonucleotide
cauaugcucauagaucaca

SEQ ID NO: 2458220 - RNA, 19 nt, Artificial Sequence
  Description of Artificial Sequence: Synthetic oligonucleotide
ucugccaaguuuggguaca

SEQ ID NO: 2458221 - RNA, 19 nt, Artificial Sequence
  Description of Artificial Sequence: Synthetic oligonucleotide
guucgcugcaggauggcag

SEQ ID NO: 2458222 - RNA, 19 nt, Artificial Sequence
  Description of Artificial Sequence: Synthetic oligonucleotide
aucugauccccaaagcgca

SEQ ID NO: 2458223 - RNA, 19 nt, Artificial Sequence
  Description of Artificial Sequence: Synthetic oligonucleotide
uaccacguggccaggccca

SEQ ID NO: 2458224 - RNA, 19 nt, Artificial Sequence
  Description of Artificial Sequence: Synthetic oligonucleotide
uucugccaaguuuggguac

SEQ ID NO: 2458225 - RNA, 19 nt, Artificial Sequence
  Description of Artificial Sequence: Synthetic oligonucleotide
gaugacguuuccagcggug

SEQ ID NO: 2458226 - RNA, 19 nt, Artificial Sequence
  Description of Artificial Sequence: Synthetic oligonucleotide
ucacacccaucaaucugca

SEQ ID NO: 2458227 - RNA, 19 nt, Artificial Sequence
  Description of Artificial Sequence: Synthetic oligonucleotide
ugacguuuccagcgguggu

SEQ ID NO: 2458228 - RNA, 19 nt, Artificial Sequence
  Description of Artificial Sequence: Synthetic oligonucleotide
cagauggaucucacgcacc

SEQ ID NO: 2458229 - RNA, 19 nt, Artificial Sequence
  Description of Artificial Sequence: Synthetic oligonucleotide
guuagugagaagcccguua

SEQ ID NO: 2458230 - RNA, 19 nt, Artificial Sequence
  Description of Artificial Sequence: Synthetic oligonucleotide
cuaccacguggccaggccc

SEQ ID NO: 2458231 - RNA, 19 nt, Artificial Sequence
  Description of Artificial Sequence: Synthetic oligonucleotide
uaugugcuccacccagcac

SEQ ID NO: 2458232 - RNA, 19 nt, Artificial Sequence
  Description of Artificial Sequence: Synthetic oligonucleotide
ugcacgcaacacacccagg

SEQ ID NO: 2458233 - RNA, 19 nt, Artificial Sequence
  Description of Artificial Sequence: Synthetic oligonucleotide
gauccccaaagcgcaaccc

SEQ ID NO: 2458234 - RNA, 19 nt, Artificial Sequence
  Description of Artificial Sequence: Synthetic oligonucleotide
ugcaggaucugauccccaa

SEQ ID NO: 2458235 - RNA, 19 nt, Artificial Sequence
  Description of Artificial Sequence: Synthetic oligonucleotide
ugucacgaacaaucauggu

SEQ ID NO: 2458236 - RNA, 19 nt, Artificial Sequence
  Description of Artificial Sequence: Synthetic oligonucleotide
cacagauggaucucacgca

SEQ ID NO: 2458237 - RNA, 19 nt, Artificial Sequence
  Description of Artificial Sequence: Synthetic oligonucleotide
ugacguucuguccguucac

SEQ ID NO: 2458238 - RNA, 19 nt, Artificial Sequence
  Description of Artificial Sequence: Synthetic oligonucleotide
gacguucuguccguucacc

SEQ ID NO: 2458239 - RNA, 19 nt, Artificial Sequence
  Description of Artificial Sequence: Synthetic oligonucleotide
guaugugcuccacccagca

SEQ ID NO: 2458240 - RNA, 19 nt, Artificial Sequence
  Description of Artificial Sequence: Synthetic oligonucleotide
agggcuagugaccaccaua

SEQ ID NO: 2458241 - RNA, 19 nt, Artificial Sequence
  Description of Artificial Sequence: Synthetic oligonucleotide
acguucuguccguucaccu

SEQ ID NO: 2458242 - RNA, 19 nt, Artificial Sequence
  Description of Artificial Sequence: Synthetic oligonucleotide
gagagggacagccccaugu

SEQ ID NO: 2458243 - RNA, 19 nt, Artificial Sequence
  Description of Artificial Sequence: Synthetic oligonucleotide
uuacgggcugcagagcuuc

SEQ ID NO: 2458244 - RNA, 19 nt, Artificial Sequence
  Description of Artificial Sequence: Synthetic oligonucleotide
acgaacaaucauggugauc

SEQ ID NO: 2458245 - RNA, 19 nt, Artificial Sequence
  Description of Artificial Sequence: Synthetic oligonucleotide
agggucagugugaugacgu

SEQ ID NO: 2458246 - RNA, 19 nt, Artificial Sequence
  Description of Artificial Sequence: Synthetic oligonucleotide
ggauugccgaguucgcugc

SEQ ID NO: 2458247 - RNA, 19 nt, Artificial Sequence
  Description of Artificial Sequence: Synthetic oligonucleotide
cacgagggaugcaggagug

SEQ ID NO: 2458248 - RNA, 19 nt, Artificial Sequence
  Description of Artificial Sequence: Synthetic oligonucleotide
ggaacggccugucacgaac

SEQ ID NO: 2458249 - RNA, 19 nt, Artificial Sequence
  Description of Artificial Sequence: Synthetic oligonucleotide
uaucgacagccugcaggcg

SEQ ID NO: 2458250 - RNA, 19 nt, Artificial Sequence
  Description of Artificial Sequence: Synthetic oligonucleotide
cacacguagugguuaguga

SEQ ID NO: 2458251 - RNA, 19 nt, Artificial Sequence
  Description of Artificial Sequence: Synthetic oligonucleotide
gacguuuccagcggugguc

SEQ ID NO: 2458252 - RNA, 19 nt, Artificial Sequence
  Description of Artificial Sequence: Synthetic oligonucleotide
gauggaucucacgcacccc

SEQ ID NO: 2458253 - RNA, 19 nt, Artificial Sequence
  Description of Artificial Sequence: Synthetic oligonucleotide
ccaaguuuggguacagcuc

SEQ ID NO: 2458254 - RNA, 19 nt, Artificial Sequence
  Description of Artificial Sequence: Synthetic oligonucleotide
accaccauauugucaccau

SEQ ID NO: 2458255 - RNA, 19 nt, Artificial Sequence
  Description of Artificial Sequence: Synthetic oligonucleotide
gugagcuuuguaugugcuc

SEQ ID NO: 2458256 - RNA, 19 nt, Artificial Sequence
  Description of Artificial Sequence: Synthetic oligonucleotide
aacggccugucacgaacaa

SEQ ID NO: 2458257 - RNA, 19 nt, Artificial Sequence
  Description of Artificial Sequence: Synthetic oligonucleotide
uuguucccagagacuggug

SEQ ID NO: 2458258 - RNA, 19 nt, Artificial Sequence
  Description of Artificial Sequence: Synthetic oligonucleotide
cacguagugguuagugaga

SEQ ID NO: 2458259 - RNA, 19 nt, Artificial Sequence
  Description of Artificial Sequence: Synthetic oligonucleotide
gaccaccauauugucacca

SEQ ID NO: 2458260 - RNA, 19 nt, Artificial Sequence
  Description of Artificial Sequence: Synthetic oligonucleotide
acaguccgcuggaacggcc

SEQ ID NO: 2458261 - RNA, 19 nt, Artificial Sequence
  Description of Artificial Sequence: Synthetic oligonucleotide
cuugcacagauggaucuca

SEQ ID NO: 2458262 - RNA, 19 nt, Artificial Sequence
  Description of Artificial Sequence: Synthetic oligonucleotide
uggggaugagggucagugu

SEQ ID NO: 2458263 - RNA, 19 nt, Artificial Sequence
  Description of Artificial Sequence: Synthetic oligonucleotide
cuagagagggacagcccca

SEQ ID NO: 2458264 - RNA, 19 nt, Artificial Sequence
  Description of Artificial Sequence: Synthetic oligonucleotide
acguagugguuagugagaa

SEQ ID NO: 2458265 - RNA, 19 nt, Artificial Sequence
  Description of Artificial Sequence: Synthetic oligonucleotide
agcgcaaccccacgaggga

SEQ ID NO: 2458266 - RNA, 19 nt, Artificial Sequence
  Description of Artificial Sequence: Synthetic oligonucleotide
uucaaugcuuugugagcuu

SEQ ID NO: 2458267 - RNA, 19 nt, Artificial Sequence
  Description of Artificial Sequence: Synthetic oligonucleotide
ugccgaguucgcugcagga

SEQ ID NO: 2458268 - RNA, 19 nt, Artificial Sequence
  Description of Artificial Sequence: Synthetic oligonucleotide
cugugacuucagaugucug

SEQ ID NO: 2458269 - RNA, 19 nt, Artificial Sequence
  Description of Artificial Sequence: Synthetic oligonucleotide
auugccgaguucgcugcag

SEQ ID NO: 2458270 - RNA, 19 nt, Artificial Sequence
  Description of Artificial Sequence: Synthetic oligonucleotide
cccguuacgggcugcagag

SEQ ID NO: 2458271 - RNA, 19 nt, Artificial Sequence
  Description of Artificial Sequence: Synthetic oligonucleotide
ugggauggagugguccaug

SEQ ID NO: 2458272 - RNA, 19 nt, Artificial Sequence
  Description of Artificial Sequence: Synthetic oligonucleotide
gcuuuguaugugcuccacc

SEQ ID NO: 2458273 - RNA, 19 nt, Artificial Sequence
  Description of Artificial Sequence: Synthetic oligonucleotide
ggaucucacgcaccccagg

SEQ ID NO: 2458274 - RNA, 19 nt, Artificial Sequence
  Description of Artificial Sequence: Synthetic oligonucleotide
acgggcugcagagcuuccc

SEQ ID NO: 2458275 - RNA, 19 nt, Artificial Sequence
  Description of Artificial Sequence: Synthetic oligonucleotide
acgcaccccaggcuugauc

SEQ ID NO: 2458276 - RNA, 19 nt, Artificial Sequence
  Description of Artificial Sequence: Synthetic oligonucleotide
aguccagucuugccacgcu

SEQ ID NO: 2458277 - RNA, 19 nt, Artificial Sequence
  Description of Artificial Sequence: Synthetic oligonucleotide
aaaagccaacuuggccuga

SEQ ID NO: 2458278 - RNA, 19 nt, Artificial Sequence
  Description of Artificial Sequence: Synthetic oligonucleotide
agaagcccguuacgggcug

SEQ ID NO: 2458279 - RNA, 19 nt, Artificial Sequence
  Description of Artificial Sequence: Synthetic oligonucleotide
gagcuuuguaugugcucca

SEQ ID NO: 2458280 - RNA, 19 nt, Artificial Sequence
  Description of Artificial Sequence: Synthetic oligonucleotide
ccacagauacaaucuuccc

SEQ ID NO: 2458281 - RNA, 19 nt, Artificial Sequence
  Description of Artificial Sequence: Synthetic oligonucleotide
aggcgcaguccagucuugc

SEQ ID NO: 2458282 - RNA, 19 nt, Artificial Sequence
  Description of Artificial Sequence: Synthetic oligonucleotide
uucuguccguucaccucac

SEQ ID NO: 2458283 - RNA, 19 nt, Artificial Sequence
  Description of Artificial Sequence: Synthetic oligonucleotide
aucugaggauugccgaguu

SEQ ID NO: 2458284 - RNA, 19 nt, Artificial Sequence
  Description of Artificial Sequence: Synthetic oligonucleotide
gagggacagccccauguaa

SEQ ID NO: 2458285 - RNA, 19 nt, Artificial Sequence
  Description of Artificial Sequence: Synthetic oligonucleotide
cuuuucugcugacgccuuc

SEQ ID NO: 2458286 - RNA, 19 nt, Artificial Sequence
  Description of Artificial Sequence: Synthetic oligonucleotide
cgaacaaucauggugaucu

SEQ ID NO: 2458287 - RNA, 19 nt, Artificial Sequence
  Description of Artificial Sequence: Synthetic oligonucleotide
cccuuuaccacagauacaa

SEQ ID NO: 2458288 - RNA, 19 nt, Artificial Sequence
  Description of Artificial Sequence: Synthetic oligonucleotide
acguuuccagcggugguca

SEQ ID NO: 2458289 - RNA, 19 nt, Artificial Sequence
  Description of Artificial Sequence: Synthetic oligonucleotide
ccccuuaucgacagccugc

SEQ ID NO: 2458290 - RNA, 19 nt, Artificial Sequence
  Description of Artificial Sequence: Synthetic oligonucleotide
ugguguggugaagcagcag

SEQ ID NO: 2458291 - RNA, 19 nt, Artificial Sequence
  Description of Artificial Sequence: Synthetic oligonucleotide
aguccgcuggaacggccug

SEQ ID NO: 2458292 - RNA, 19 nt, Artificial Sequence
  Description of Artificial Sequence: Synthetic oligonucleotide
cucacgcaccccaggcuug

SEQ ID NO: 2458293 - RNA, 19 nt, Artificial Sequence
  Description of Artificial Sequence: Synthetic oligonucleotide
gacaguccgcuggaacggc

SEQ ID NO: 2458294 - RNA, 19 nt, Artificial Sequence
  Description of Artificial Sequence: Synthetic oligonucleotide
gagacuggugcuaccacgu

SEQ ID NO: 2458295 - RNA, 19 nt, Artificial Sequence
  Description of Artificial Sequence: Synthetic oligonucleotide
ucuguccguucaccucaca

SEQ ID NO: 2458296 - RNA, 19 nt, Artificial Sequence
  Description of Artificial Sequence: Synthetic oligonucleotide
cacacccaucaaucugcag

SEQ ID NO: 2458297 - RNA, 19 nt, Artificial Sequence
  Description of Artificial Sequence: Synthetic oligonucleotide
caguccagucuugccacgc

SEQ ID NO: 2458298 - RNA, 19 nt, Artificial Sequence
  Description of Artificial Sequence: Synthetic oligonucleotide
cugauccccaaagcgcaac

SEQ ID NO: 2458299 - RNA, 19 nt, Artificial Sequence
  Description of Artificial Sequence: Synthetic oligonucleotide
cggccugucacgaacaauc

SEQ ID NO: 2458300 - RNA, 19 nt, Artificial Sequence
  Description of Artificial Sequence: Synthetic oligonucleotide
aguucgcugcaggauggca

SEQ ID NO: 2458301 - RNA, 19 nt, Artificial Sequence
  Description of Artificial Sequence: Synthetic oligonucleotide
gaacggccugucacgaaca

SEQ ID NO: 2458302 - RNA, 19 nt, Artificial Sequence
  Description of Artificial Sequence: Synthetic oligonucleotide
ggugaucuuuucugcugac

SEQ ID NO: 2458303 - RNA, 19 nt, Artificial Sequence
  Description of Artificial Sequence: Synthetic oligonucleotide
ugcugacgccuucuucaau

SEQ ID NO: 2458304 - RNA, 19 nt, Artificial Sequence
  Description of Artificial Sequence: Synthetic oligonucleotide
uacgggcugcagagcuucc

SEQ ID NO: 2458305 - RNA, 19 nt, Artificial Sequence
  Description of Artificial Sequence: Synthetic oligonucleotide
gauugccgaguucgcugca

SEQ ID NO: 2458306 - RNA, 19 nt, Artificial Sequence
  Description of Artificial Sequence: Synthetic oligonucleotide
gcuaccacguggccaggcc

SEQ ID NO: 2458307 - RNA, 19 nt, Artificial Sequence
  Description of Artificial Sequence: Synthetic oligonucleotide
ccgaguucgcugcaggaug

SEQ ID NO: 2458308 - RNA, 19 nt, Artificial Sequence
  Description of Artificial Sequence: Synthetic oligonucleotide
auguaacucuccaguucug

SEQ ID NO: 2458309 - RNA, 19 nt, Artificial Sequence
  Description of Artificial Sequence: Synthetic oligonucleotide
cauccuugcacagauggau

SEQ ID NO: 2458310 - RNA, 19 nt, Artificial Sequence
  Description of Artificial Sequence: Synthetic oligonucleotide
cgaguucgcugcaggaugg

SEQ ID NO: 2458311 - RNA, 19 nt, Artificial Sequence
  Description of Artificial Sequence: Synthetic oligonucleotide
uggaacggccugucacgaa

SEQ ID NO: 2458312 - RNA, 19 nt, Artificial Sequence
  Description of Artificial Sequence: Synthetic oligonucleotide
gaguucgcugcaggauggc

SEQ ID NO: 2458313 - RNA, 19 nt, Artificial Sequence
  Description of Artificial Sequence: Synthetic oligonucleotide
ggucaggaucucuguaauc

SEQ ID NO: 2458314 - RNA, 19 nt, Artificial Sequence
  Description of Artificial Sequence: Synthetic oligonucleotide
gcacaaagagccccuuauc

SEQ ID NO: 2458315 - RNA, 19 nt, Artificial Sequence
  Description of Artificial Sequence: Synthetic oligonucleotide
cauagaucacaguggggau

SEQ ID NO: 2458316 - RNA, 19 nt, Artificial Sequence
  Description of Artificial Sequence: Synthetic oligonucleotide
ugggcugcccugugacuuc

SEQ ID NO: 2458317 - RNA, 19 nt, Artificial Sequence
  Description of Artificial Sequence: Synthetic oligonucleotide
ucacgcaccccaggcuuga

SEQ ID NO: 2458318 - RNA, 19 nt, Artificial Sequence
  Description of Artificial Sequence: Synthetic oligonucleotide
augguguggugaagcagca

SEQ ID NO: 2458319 - RNA, 19 nt, Artificial Sequence
  Description of Artificial Sequence: Synthetic oligonucleotide
gccccuuaucgacagccug

SEQ ID NO: 2458320 - RNA, 19 nt, Artificial Sequence
  Description of Artificial Sequence: Synthetic oligonucleotide
agcagcggggacaacuuuu

SEQ ID NO: 2458321 - RNA, 19 nt, Artificial Sequence
  Description of Artificial Sequence: Synthetic oligonucleotide
ggcgcaguccagucuugcc

SEQ ID NO: 2458322 - RNA, 19 nt, Artificial Sequence
  Description of Artificial Sequence: Synthetic oligonucleotide
ccauaugcucauagaucac

SEQ ID NO: 2458323 - RNA, 19 nt, Artificial Sequence
  Description of Artificial Sequence: Synthetic oligonucleotide
guccuugugcauagugaca

SEQ ID NO: 2458324 - RNA, 19 nt, Artificial Sequence
  Description of Artificial Sequence: Synthetic oligonucleotide
cagccccauguaacucucc

SEQ ID NO: 2458325 - RNA, 19 nt, Artificial Sequence
  Description of Artificial Sequence: Synthetic oligonucleotide
uucagaugucugggaugga

SEQ ID NO: 2458326 - RNA, 19 nt, Artificial Sequence
  Description of Artificial Sequence: Synthetic oligonucleotide
gcgcaguccagucuugcca

SEQ ID NO: 2458327 - RNA, 19 nt, Artificial Sequence
  Description of Artificial Sequence: Synthetic oligonucleotide
acgccuucuucaaugcuuu

SEQ ID NO: 2458328 - RNA, 19 nt, Artificial Sequence
  Description of Artificial Sequence: Synthetic oligonucleotide
uccgcuggaacggccuguc

SEQ ID NO: 2458329 - RNA, 19 nt, Artificial Sequence
  Description of Artificial Sequence: Synthetic oligonucleotide
gagaagcccguuacgggcu

SEQ ID NO: 2458330 - RNA, 19 nt, Artificial Sequence
  Description of Artificial Sequence: Synthetic oligonucleotide
gcauagugacaguccgcug

SEQ ID NO: 2458331 - RNA, 19 nt, Artificial Sequence
  Description of Artificial Sequence: Synthetic oligonucleotide
cccaaagcgcaaccccacg

SEQ ID NO: 2458332 - RNA, 19 nt, Artificial Sequence
  Description of Artificial Sequence: Synthetic oligonucleotide
gaagcccguuacgggcugc

SEQ ID NO: 2458333 - RNA, 19 nt, Artificial Sequence
  Description of Artificial Sequence: Synthetic oligonucleotide
gaggauugccgaguucgcu

SEQ ID NO: 2458334 - RNA, 19 nt, Artificial Sequence
  Description of Artificial Sequence: Synthetic oligonucleotide
gcacgcaacacacccaggu

SEQ ID NO: 2458335 - RNA, 19 nt, Artificial Sequence
  Description of Artificial Sequence: Synthetic oligonucleotide
accccacgagggaugcagg

SEQ ID NO: 2458336 - RNA, 19 nt, Artificial Sequence
  Description of Artificial Sequence: Synthetic oligonucleotide
gguggucaggaucucugua

SEQ ID NO: 2458337 - RNA, 19 nt, Artificial Sequence
  Description of Artificial Sequence: Synthetic oligonucleotide
acgagggaugcaggagugu

SEQ ID NO: 2458338 - RNA, 19 nt, Artificial Sequence
  Description of Artificial Sequence: Synthetic oligonucleotide
cuggaacggccugucacga

SEQ ID NO: 2458339 - RNA, 19 nt, Artificial Sequence
  Description of Artificial Sequence: Synthetic oligonucleotide
gcuugaucucugcacgcaa

SEQ ID NO: 2458340 - RNA, 19 nt, Artificial Sequence
  Description of Artificial Sequence: Synthetic oligonucleotide
ggcuagagagggacagccc

SEQ ID NO: 2458341 - RNA, 19 nt, Artificial Sequence
  Description of Artificial Sequence: Synthetic oligonucleotide
cugcugacgccuucuucaa

SEQ ID NO: 2458342 - RNA, 19 nt, Artificial Sequence
  Description of Artificial Sequence: Synthetic oligonucleotide
caggcgcaguccagucuug

SEQ ID NO: 2458343 - RNA, 19 nt, Artificial Sequence
  Description of Artificial Sequence: Synthetic oligonucleotide
uagugacaguccgcuggaa

SEQ ID NO: 2458344 - RNA, 19 nt, Artificial Sequence
  Description of Artificial Sequence: Synthetic oligonucleotide
caggaguguuggccuggac

SEQ ID NO: 2458345 - RNA, 19 nt, Artificial Sequence
  Description of Artificial Sequence: Synthetic oligonucleotide
gaacaaucauggugaucuu

SEQ ID NO: 2458346 - RNA, 19 nt, Artificial Sequence
  Description of Artificial Sequence: Synthetic oligonucleotide
ccaaagcgcaaccccacga

SEQ ID NO: 2458347 - RNA, 19 nt, Artificial Sequence
  Description of Artificial Sequence: Synthetic oligonucleotide
cgcuggaacggccugucac

SEQ ID NO: 2458348 - RNA, 19 nt, Artificial Sequence
  Description of Artificial Sequence: Synthetic oligonucleotide
ggcuugaucucugcacgca

SEQ ID NO: 2458349 - RNA, 19 nt, Artificial Sequence
  Description of Artificial Sequence: Synthetic oligonucleotide
cugcaggaucugaucccca

SEQ ID NO: 2458350 - RNA, 19 nt, Artificial Sequence
  Description of Artificial Sequence: Synthetic oligonucleotide
agccccuuaucgacagccu

SEQ ID NO: 2458351 - RNA, 19 nt, Artificial Sequence
  Description of Artificial Sequence: Synthetic oligonucleotide
ccccaaagcgcaaccccac

SEQ ID NO: 2458352 - RNA, 19 nt, Artificial Sequence
  Description of Artificial Sequence: Synthetic oligonucleotide
gggaugcaggaguguuggc

SEQ ID NO: 2458353 - RNA, 19 nt, Artificial Sequence
  Description of Artificial Sequence: Synthetic oligonucleotide
ggaaucugaggcaggcucu

SEQ ID NO: 2458354 - RNA, 19 nt, Artificial Sequence
  Description of Artificial Sequence: Synthetic oligonucleotide
agcccguuacgggcugcag

SEQ ID NO: 2458355 - RNA, 19 nt, Artificial Sequence
  Description of Artificial Sequence: Synthetic oligonucleotide
gggcuagugaccaccauau

SEQ ID NO: 2458356 - RNA, 19 nt, Artificial Sequence
  Description of Artificial Sequence: Synthetic oligonucleotide
ggccugagcuguccuugug

SEQ ID NO: 2458357 - RNA, 19 nt, Artificial Sequence
  Description of Artificial Sequence: Synthetic oligonucleotide
gaaucugaggcaggcucuu

SEQ ID NO: 2458358 - RNA, 19 nt, Artificial Sequence
  Description of Artificial Sequence: Synthetic oligonucleotide
gcccguuacgggcugcaga

SEQ ID NO: 2458359 - RNA, 19 nt, Artificial Sequence
  Description of Artificial Sequence: Synthetic oligonucleotide
acggccugucacgaacaau

SEQ ID NO: 2458360 - RNA, 19 nt, Artificial Sequence
  Description of Artificial Sequence: Synthetic oligonucleotide
cccagagacuggugcuacc

SEQ ID NO: 2458361 - RNA, 19 nt, Artificial Sequence
  Description of Artificial Sequence: Synthetic oligonucleotide
ccccauguaacucuccagu

SEQ ID NO: 2458362 - RNA, 19 nt, Artificial Sequence
  Description of Artificial Sequence: Synthetic oligonucleotide
ccuuaucgacagccugcag

SEQ ID NO: 2458363 - RNA, 19 nt, Artificial Sequence
  Description of Artificial Sequence: Synthetic oligonucleotide
ccguucaccucacacacgu

SEQ ID NO: 2458364 - RNA, 19 nt, Artificial Sequence
  Description of Artificial Sequence: Synthetic oligonucleotide
caguggggaugagggucag

SEQ ID NO: 2458365 - RNA, 19 nt, Artificial Sequence
  Description of Artificial Sequence: Synthetic oligonucleotide
caguccgcuggaacggccu

SEQ ID NO: 2458366 - RNA, 19 nt, Artificial Sequence
  Description of Artificial Sequence: Synthetic oligonucleotide
uuccagcgguggucaggau

SEQ ID NO: 2458367 - RNA, 19 nt, Artificial Sequence
  Description of Artificial Sequence: Synthetic oligonucleotide
gugcuaccacguggccagg

SEQ ID NO: 2458368 - RNA, 19 nt, Artificial Sequence
  Description of Artificial Sequence: Synthetic oligonucleotide
ggauggagugguccauggu

SEQ ID NO: 2458369 - RNA, 19 nt, Artificial Sequence
  Description of Artificial Sequence: Synthetic oligonucleotide
cgcaaccccacgagggaug

SEQ ID NO: 2458370 - RNA, 19 nt, Artificial Sequence
  Description of Artificial Sequence: Synthetic oligonucleotide
ccugugacuucagaugucu

SEQ ID NO: 2458371 - RNA, 19 nt, Artificial Sequence
  Description of Artificial Sequence: Synthetic oligonucleotide
cacgcaacacacccagguu

SEQ ID NO: 2458372 - RNA, 19 nt, Artificial Sequence
  Description of Artificial Sequence: Synthetic oligonucleotide
ccagggcuagugaccacca

SEQ ID NO: 2458373 - RNA, 19 nt, Artificial Sequence
  Description of Artificial Sequence: Synthetic oligonucleotide
cccagguuguucccagaga

SEQ ID NO: 2458374 - RNA, 19 nt, Artificial Sequence
  Description of Artificial Sequence: Synthetic oligonucleotide
cccuuaucgacagccugca

SEQ ID NO: 2458375 - RNA, 19 nt, Artificial Sequence
  Description of Artificial Sequence: Synthetic oligonucleotide
caccccaggcuugaucucu

SEQ ID NO: 2458376 - RNA, 19 nt, Artificial Sequence
  Description of Artificial Sequence: Synthetic oligonucleotide
cagauacaaucuuccccuu

SEQ ID NO: 2458377 - RNA, 19 nt, Artificial Sequence
  Description of Artificial Sequence: Synthetic oligonucleotide
cguuacgggcugcagagcu

SEQ ID NO: 2458378 - RNA, 19 nt, Artificial Sequence
  Description of Artificial Sequence: Synthetic oligonucleotide
gcaggauggcaggaggccu

SEQ ID NO: 2458379 - RNA, 19 nt, Artificial Sequence
  Description of Artificial Sequence: Synthetic oligonucleotide
gccugucacgaacaaucau

SEQ ID NO: 2458380 - RNA, 19 nt, Artificial Sequence
  Description of Artificial Sequence: Synthetic oligonucleotide
guuacgggcugcagagcuu

SEQ ID NO: 2458381 - RNA, 19 nt, Artificial Sequence
  Description of Artificial Sequence: Synthetic oligonucleotide
cccauguaacucuccaguu

SEQ ID NO: 2458382 - RNA, 19 nt, Artificial Sequence
  Description of Artificial Sequence: Synthetic oligonucleotide
ccguuacgggcugcagagc

SEQ ID NO: 2458383 - RNA, 19 nt, Artificial Sequence
  Description of Artificial Sequence: Synthetic oligonucleotide
cacacacguagugguuagu

SEQ ID NO: 2458384 - RNA, 19 nt, Artificial Sequence
  Description of Artificial Sequence: Synthetic oligonucleotide
guccgcuggaacggccugu

SEQ ID NO: 2458385 - RNA, 19 nt, Artificial Sequence
  Description of Artificial Sequence: Synthetic oligonucleotide
cagcgguggucaggaucuc

SEQ ID NO: 2458386 - RNA, 19 nt, Artificial Sequence
  Description of Artificial Sequence: Synthetic oligonucleotide
gguuagugagaagcccguu

SEQ ID NO: 2458387 - RNA, 19 nt, Artificial Sequence
  Description of Artificial Sequence: Synthetic oligonucleotide
caaccccacgagggaugca

SEQ ID NO: 2458388 - RNA, 19 nt, Artificial Sequence
  Description of Artificial Sequence: Synthetic oligonucleotide
gccgaguucgcugcaggau

SEQ ID NO: 2458389 - RNA, 19 nt, Artificial Sequence
  Description of Artificial Sequence: Synthetic oligonucleotide
cagggcuagugaccaccau

SEQ ID NO: 2458390 - RNA, 19 nt, Artificial Sequence
  Description of Artificial Sequence: Synthetic oligonucleotide
ggcuagugaccaccauauu

SEQ ID NO: 2458391 - RNA, 19 nt, Artificial Sequence
  Description of Artificial Sequence: Synthetic oligonucleotide
ccuuuagcccaaugacguu

SEQ ID NO: 2458392 - RNA, 19 nt, Artificial Sequence
  Description of Artificial Sequence: Synthetic oligonucleotide
ccucacacacguagugguu

SEQ ID NO: 2458393 - RNA, 19 nt, Artificial Sequence
  Description of Artificial Sequence: Synthetic oligonucleotide
gcgcaaccccacgagggau

SEQ ID NO: 2458394 - RNA, 19 nt, Artificial Sequence
  Description of Artificial Sequence: Synthetic oligonucleotide
cguucaccucacacacgua

SEQ ID NO: 2458395 - RNA, 19 nt, Artificial Sequence
  Description of Artificial Sequence: Synthetic oligonucleotide
cacgcaccccaggcuugau

SEQ ID NO: 2458396 - RNA, 19 nt, Artificial Sequence
  Description of Artificial Sequence: Synthetic oligonucleotide
aaagagauugguuucaaac

SEQ ID NO: 2458397 - RNA, 19 nt, Artificial Sequence
  Description of Artificial Sequence: Synthetic oligonucleotide
aaugcuuugauauuuagcu

SEQ ID NO: 2458398 - RNA, 19 nt, Artificial Sequence
  Description of Artificial Sequence: Synthetic oligonucleotide
aaagcguuugcaaagaagc

SEQ ID NO: 2458399 - RNA, 19 nt, Artificial Sequence
  Description of Artificial Sequence: Synthetic oligonucleotide
aaagaagcgaagcagccac

SEQ ID NO: 2458400 - RNA, 19 nt, Artificial Sequence
  Description of Artificial Sequence: Synthetic oligonucleotide
aacacgcuuuuccagaucc

SEQ ID NO: 2458401 - RNA, 19 nt, Artificial Sequence
  Description of Artificial Sequence: Synthetic oligonucleotide
ugcuuugauauuuagcugg

SEQ ID NO: 2458402 - RNA, 19 nt, Artificial Sequence
  Description of Artificial Sequence: Synthetic oligonucleotide
uuugauaaaauuucucagc

SEQ ID NO: 2458403 - RNA, 19 nt, Artificial Sequence
  Description of Artificial Sequence: Synthetic oligonucleotide
cauaauucgucccaaagcc

SEQ ID NO: 2458404 - RNA, 19 nt, Artificial Sequence
  Description of Artificial Sequence: Synthetic oligonucleotide
aaaguggccaaagagauug

SEQ ID NO: 2458405 - RNA, 19 nt, Artificial Sequence
  Description of Artificial Sequence: Synthetic oligonucleotide
uugauaaaauuucucagca

SEQ ID NO: 2458406 - RNA, 19 nt, Artificial Sequence
  Description of Artificial Sequence: Synthetic oligonucleotide
uaagguuugauaaaauuuc

SEQ ID NO: 2458407 - RNA, 19 nt, Artificial Sequence
  Description of Artificial Sequence: Synthetic oligonucleotide
aaucacauuucuugaaaag

SEQ ID NO: 2458408 - RNA, 19 nt, Artificial Sequence
  Description of Artificial Sequence: Synthetic oligonucleotide
ucaauggugauccuaacac

SEQ ID NO: 2458409 - RNA, 19 nt, Artificial Sequence
  Description of Artificial Sequence: Synthetic oligonucleotide
uuugauauuuagcugggga

SEQ ID NO: 2458410 - RNA, 19 nt, Artificial Sequence
  Description of Artificial Sequence: Synthetic oligonucleotide
uggggauuaggcaugaucc

SEQ ID NO: 2458411 - RNA, 19 nt, Artificial Sequence
  Description of Artificial Sequence: Synthetic oligonucleotide
aaaugcuuugauauuuagc

SEQ ID NO: 2458412 - RNA, 19 nt, Artificial Sequence
  Description of Artificial Sequence: Synthetic oligonucleotide
ucuuugaaacuuuuguuug

SEQ ID NO: 2458413 - RNA, 19 nt, Artificial Sequence
  Description of Artificial Sequence: Synthetic oligonucleotide
aagcgaagcagccacauca

SEQ ID NO: 2458414 - RNA, 19 nt, Artificial Sequence
  Description of Artificial Sequence: Synthetic oligonucleotide
gauauaaguagucuaaucu

SEQ ID NO: 2458415 - RNA, 19 nt, Artificial Sequence
  Description of Artificial Sequence: Synthetic oligonucleotide
gauccuaacacgcuuuucc

SEQ ID NO: 2458416 - RNA, 19 nt, Artificial Sequence
  Description of Artificial Sequence: Synthetic oligonucleotide
uuggucagaggauugagag

SEQ ID NO: 2458417 - RNA, 19 nt, Artificial Sequence
  Description of Artificial Sequence: Synthetic oligonucleotide
agauauaaguagucuaauc

SEQ ID NO: 2458418 - RNA, 19 nt, Artificial Sequence
  Description of Artificial Sequence: Synthetic oligonucleotide
ugugguagagcucagguau

SEQ ID NO: 2458419 - RNA, 19 nt, Artificial Sequence
  Description of Artificial Sequence: Synthetic oligonucleotide
agcauucagauauaaguag

SEQ ID NO: 2458420 - RNA, 19 nt, Artificial Sequence
  Description of Artificial Sequence: Synthetic oligonucleotide
aagagguuccaauucccgg

SEQ ID NO: 2458421 - RNA, 19 nt, Artificial Sequence
  Description of Artificial Sequence: Synthetic oligonucleotide
aaagggccagcccaaugcc

SEQ ID NO: 2458422 - RNA, 19 nt, Artificial Sequence
  Description of Artificial Sequence: Synthetic oligonucleotide
uccuacacgccaaacacag

SEQ ID NO: 2458423 - RNA, 19 nt, Artificial Sequence
  Description of Artificial Sequence: Synthetic oligonucleotide
ugguggaaaagccacacca

SEQ ID NO: 2458424 - RNA, 19 nt, Artificial Sequence
  Description of Artificial Sequence: Synthetic oligonucleotide
uuuucaauggugauccuaa

SEQ ID NO: 2458425 - RNA, 19 nt, Artificial Sequence
  Description of Artificial Sequence: Synthetic oligonucleotide
gaacauaugaaucacauuu

SEQ ID NO: 2458426 - RNA, 19 nt, Artificial Sequence
  Description of Artificial Sequence: Synthetic oligonucleotide
guagucuaaucuuugaaac

SEQ ID NO: 2458427 - RNA, 19 nt, Artificial Sequence
  Description of Artificial Sequence: Synthetic oligonucleotide
uaauucgucccaaagccug

SEQ ID NO: 2458428 - RNA, 19 nt, Artificial Sequence
  Description of Artificial Sequence: Synthetic oligonucleotide
ugaaacuuuuguuugacuu

SEQ ID NO: 2458429 - RNA, 19 nt, Artificial Sequence
  Description of Artificial Sequence: Synthetic oligonucleotide
gacauaauucgucccaaag

SEQ ID NO: 2458430 - RNA, 19 nt, Artificial Sequence
  Description of Artificial Sequence: Synthetic oligonucleotide
auugcaaagggccagccca

SEQ ID NO: 2458431 - RNA, 19 nt, Artificial Sequence
  Description of Artificial Sequence: Synthetic oligonucleotide
aacauaugaaucacauuuc

SEQ ID NO: 2458432 - RNA, 19 nt, Artificial Sequence
  Description of Artificial Sequence: Synthetic oligonucleotide
uccagauccaguaagguuu

SEQ ID NO: 2458433 - RNA, 19 nt, Artificial Sequence
  Description of Artificial Sequence: Synthetic oligonucleotide
ugauaaaauuucucagcag

SEQ ID NO: 2458434 - RNA, 19 nt, Artificial Sequence
  Description of Artificial Sequence: Synthetic oligonucleotide
gaagcagccacaucaccgg

SEQ ID NO: 2458435 - RNA, 19 nt, Artificial Sequence
  Description of Artificial Sequence: Synthetic oligonucleotide
cacagaugagcugagaggg

SEQ ID NO: 2458436 - RNA, 19 nt, Artificial Sequence
  Description of Artificial Sequence: Synthetic oligonucleotide
ggugaucugauuuucaaug

SEQ ID NO: 2458437 - RNA, 19 nt, Artificial Sequence
  Description of Artificial Sequence: Synthetic oligonucleotide
ugcacaauggugacuucgg

SEQ ID NO: 2458438 - RNA, 19 nt, Artificial Sequence
  Description of Artificial Sequence: Synthetic oligonucleotide
aaugccacugcucgccccg

SEQ ID NO: 2458439 - RNA, 19 nt, Artificial Sequence
  Description of Artificial Sequence: Synthetic oligonucleotide
uucaauggugauccuaaca

SEQ ID NO: 2458440 - RNA, 19 nt, Artificial Sequence
  Description of Artificial Sequence: Synthetic oligonucleotide
cagaauuccacagaugagc

SEQ ID NO: 2458441 - RNA, 19 nt, Artificial Sequence
  Description of Artificial Sequence: Synthetic oligonucleotide
uuagcuggggauuaggcau

SEQ ID NO: 2458442 - RNA, 19 nt, Artificial Sequence
  Description of Artificial Sequence: Synthetic oligonucleotide
aguagucuaaucuuugaaa

SEQ ID NO: 2458443 - RNA, 19 nt, Artificial Sequence
  Description of Artificial Sequence: Synthetic oligonucleotide
acauaugaaucacauuucu

SEQ ID NO: 2458444 - RNA, 19 nt, Artificial Sequence
  Description of Artificial Sequence: Synthetic oligonucleotide
ucaucuauguccaucuuuu

SEQ ID NO: 2458445 - RNA, 19 nt, Artificial Sequence
  Description of Artificial Sequence: Synthetic oligonucleotide
auauaaguagucuaaucuu

SEQ ID NO: 2458446 - RNA, 19 nt, Artificial Sequence
  Description of Artificial Sequence: Synthetic oligonucleotide
ggauaaaguggccaaagag

SEQ ID NO: 2458447 - RNA, 19 nt, Artificial Sequence
  Description of Artificial Sequence: Synthetic oligonucleotide
agaggauugagagacucgg

SEQ ID NO: 2458448 - RNA, 19 nt, Artificial Sequence
  Description of Artificial Sequence: Synthetic oligonucleotide
auuucuugaaaagaugcca

SEQ ID NO: 2458449 - RNA, 19 nt, Artificial Sequence
  Description of Artificial Sequence: Synthetic oligonucleotide
gaccuugucauucuggguc

SEQ ID NO: 2458450 - RNA, 19 nt, Artificial Sequence
  Description of Artificial Sequence: Synthetic oligonucleotide
aaguagucuaaucuuugaa

SEQ ID NO: 2458451 - RNA, 19 nt, Artificial Sequence
  Description of Artificial Sequence: Synthetic oligonucleotide
uugauauuuagcuggggau

SEQ ID NO: 2458452 - RNA, 19 nt, Artificial Sequence
  Description of Artificial Sequence: Synthetic oligonucleotide
accggcaggagcaaggucc

SEQ ID NO: 2458453 - RNA, 19 nt, Artificial Sequence
  Description of Artificial Sequence: Synthetic oligonucleotide
uggcuccugacauaauucg

SEQ ID NO: 2458454 - RNA, 19 nt, Artificial Sequence
  Description of Artificial Sequence: Synthetic oligonucleotide
ucagguauuuggucagagg

SEQ ID NO: 2458455 - RNA, 19 nt, Artificial Sequence
  Description of Artificial Sequence: Synthetic oligonucleotide
uucuugaaaagaugccaag

SEQ ID NO: 2458456 - RNA, 19 nt, Artificial Sequence
  Description of Artificial Sequence: Synthetic oligonucleotide
auuuagcuggggauuaggc

SEQ ID NO: 2458457 - RNA, 19 nt, Artificial Sequence
  Description of Artificial Sequence: Synthetic oligonucleotide
ugaucugauuuucaauggu

SEQ ID NO: 2458458 - RNA, 19 nt, Artificial Sequence
  Description of Artificial Sequence: Synthetic oligonucleotide
aagguccacacaaagggag

SEQ ID NO: 2458459 - RNA, 19 nt, Artificial Sequence
  Description of Artificial Sequence: Synthetic oligonucleotide
uccgcuguggagaacauau

SEQ ID NO: 2458460 - RNA, 19 nt, Artificial Sequence
  Description of Artificial Sequence: Synthetic oligonucleotide
uguuugacuuccuuugcac

SEQ ID NO: 2458461 - RNA, 19 nt, Artificial Sequence
  Description of Artificial Sequence: Synthetic oligonucleotide
caauggugauccuaacacg

SEQ ID NO: 2458462 - RNA, 19 nt, Artificial Sequence
  Description of Artificial Sequence: Synthetic oligonucleotide
uaaguagucuaaucuuuga

SEQ ID NO: 2458463 - RNA, 19 nt, Artificial Sequence
  Description of Artificial Sequence: Synthetic oligonucleotide
guuccuacacgccaaacac

SEQ ID NO: 2458464 - RNA, 19 nt, Artificial Sequence
  Description of Artificial Sequence: Synthetic oligonucleotide
ucuugaaaagaugccaaga

SEQ ID NO: 2458465 - RNA, 19 nt, Artificial Sequence
  Description of Artificial Sequence: Synthetic oligonucleotide
caagaaaaugcuuugauau

SEQ ID NO: 2458466 - RNA, 19 nt, Artificial Sequence
  Description of Artificial Sequence: Synthetic oligonucleotide
uacggggucauggugaaag

SEQ ID NO: 2458467 - RNA, 19 nt, Artificial Sequence
  Description of Artificial Sequence: Synthetic oligonucleotide
uuaggcaugaucccagcau

SEQ ID NO: 2458468 - RNA, 19 nt, Artificial Sequence
  Description of Artificial Sequence: Synthetic oligonucleotide
cagccgauugcaaagggcc

SEQ ID NO: 2458469 - RNA, 19 nt, Artificial Sequence
  Description of Artificial Sequence: Synthetic oligonucleotide
uuguacggggucaugguga

SEQ ID NO: 2458470 - RNA, 19 nt, Artificial Sequence
  Description of Artificial Sequence: Synthetic oligonucleotide
ucugcuccauuguacgggg

SEQ ID NO: 2458471 - RNA, 19 nt, Artificial Sequence
  Description of Artificial Sequence: Synthetic oligonucleotide
caaagggccagcccaaugc

SEQ ID NO: 2458472 - RNA, 19 nt, Artificial Sequence
  Description of Artificial Sequence: Synthetic oligonucleotide
gaaagcguuugcaaagaag

SEQ ID NO: 2458473 - RNA, 19 nt, Artificial Sequence
  Description of Artificial Sequence: Synthetic oligonucleotide
aacccaucagcagugaccu

SEQ ID NO: 2458474 - RNA, 19 nt, Artificial Sequence
  Description of Artificial Sequence: Synthetic oligonucleotide
cauucagauauaaguaguc

SEQ ID NO: 2458475 - RNA, 19 nt, Artificial Sequence
  Description of Artificial Sequence: Synthetic oligonucleotide
uuguuugacuuccuuugca

SEQ ID NO: 2458476 - RNA, 19 nt, Artificial Sequence
  Description of Artificial Sequence: Synthetic oligonucleotide
aggauugagagacucgggu

SEQ ID NO: 2458477 - RNA, 19 nt, Artificial Sequence
  Description of Artificial Sequence: Synthetic oligonucleotide
uauuuagcuggggauuagg

SEQ ID NO: 2458478 - RNA, 19 nt, Artificial Sequence
  Description of Artificial Sequence: Synthetic oligonucleotide
ugaucaaagccaccuuucu

SEQ ID NO: 2458479 - RNA, 19 nt, Artificial Sequence
  Description of Artificial Sequence: Synthetic oligonucleotide
gaagagguuccaauucccg

SEQ ID NO: 2458480 - RNA, 19 nt, Artificial Sequence
  Description of Artificial Sequence: Synthetic oligonucleotide
uuuggcuccugacauaauu

SEQ ID NO: 2458481 - RNA, 19 nt, Artificial Sequence
  Description of Artificial Sequence: Synthetic oligonucleotide
aagguuugauaaaauuucu

SEQ ID NO: 2458482 - RNA, 19 nt, Artificial Sequence
  Description of Artificial Sequence: Synthetic oligonucleotide
aagggaggcagaauuccac

SEQ ID NO: 2458483 - RNA, 19 nt, Artificial Sequence
  Description of Artificial Sequence: Synthetic oligonucleotide
cagguauuuggucagagga

SEQ ID NO: 2458484 - RNA, 19 nt, Artificial Sequence
  Description of Artificial Sequence: Synthetic oligonucleotide
agacucggguuucuggugg

SEQ ID NO: 2458485 - RNA, 19 nt, Artificial Sequence
  Description of Artificial Sequence: Synthetic oligonucleotide
aagcguuugcaaagaagcg

SEQ ID NO: 2458486 - RNA, 19 nt, Artificial Sequence
  Description of Artificial Sequence: Synthetic oligonucleotide
ggcagaauuccacagauga

SEQ ID NO: 2458487 - RNA, 19 nt, Artificial Sequence
  Description of Artificial Sequence: Synthetic oligonucleotide
aggagcaagguccacacaa

SEQ ID NO: 2458488 - RNA, 19 nt, Artificial Sequence
  Description of Artificial Sequence: Synthetic oligonucleotide
uccuaacacgcuuuuccag

SEQ ID NO: 2458489 - RNA, 19 nt, Artificial Sequence
  Description of Artificial Sequence: Synthetic oligonucleotide
agcugagagggguugucac

SEQ ID NO: 2458490 - RNA, 19 nt, Artificial Sequence
  Description of Artificial Sequence: Synthetic oligonucleotide
cuccugacauaauucgucc

SEQ ID NO: 2458491 - RNA, 19 nt, Artificial Sequence
  Description of Artificial Sequence: Synthetic oligonucleotide
ggaaaagccacaccagugc

SEQ ID NO: 2458492 - RNA, 19 nt, Artificial Sequence
  Description of Artificial Sequence: Synthetic oligonucleotide
auuguacggggucauggug

SEQ ID NO: 2458493 - RNA, 19 nt, Artificial Sequence
  Description of Artificial Sequence: Synthetic oligonucleotide
uuugcacccuggaccacgg

SEQ ID NO: 2458494 - RNA, 19 nt, Artificial Sequence
  Description of Artificial Sequence: Synthetic oligonucleotide
uuggcuccugacauaauuc

SEQ ID NO: 2458495 - RNA, 19 nt, Artificial Sequence
  Description of Artificial Sequence: Synthetic oligonucleotide
uguggcagagaagagguuc

SEQ ID NO: 2458496 - RNA, 19 nt, Artificial Sequence
  Description of Artificial Sequence: Synthetic oligonucleotide
uugucacuguggcagagaa

SEQ ID NO: 2458497 - RNA, 19 nt, Artificial Sequence
  Description of Artificial Sequence: Synthetic oligonucleotide
agguuugauaaaauuucuc

SEQ ID NO: 2458498 - RNA, 19 nt, Artificial Sequence
  Description of Artificial Sequence: Synthetic oligonucleotide
gagggguugucacuguggc

SEQ ID NO: 2458499 - RNA, 19 nt, Artificial Sequence
  Description of Artificial Sequence: Synthetic oligonucleotide
uuccaauucccggaucagg

SEQ ID NO: 2458500 - RNA, 19 nt, Artificial Sequence
  Description of Artificial Sequence: Synthetic oligonucleotide
ucuucuuccagcagccgau

SEQ ID NO: 2458501 - RNA, 19 nt, Artificial Sequence
  Description of Artificial Sequence: Synthetic oligonucleotide
ggucagaggauugagagac

SEQ ID NO: 2458502 - RNA, 19 nt, Artificial Sequence
  Description of Artificial Sequence: Synthetic oligonucleotide
gauugcaaagggccagccc

SEQ ID NO: 2458503 - RNA, 19 nt, Artificial Sequence
  Description of Artificial Sequence: Synthetic oligonucleotide
aucaggauaaaguggccaa

SEQ ID NO: 2458504 - RNA, 19 nt, Artificial Sequence
  Description of Artificial Sequence: Synthetic oligonucleotide
agauugguuucaaacaccu

SEQ ID NO: 2458505 - RNA, 19 nt, Artificial Sequence
  Description of Artificial Sequence: Synthetic oligonucleotide
gagcucagguauuugguca

SEQ ID NO: 2458506 - RNA, 19 nt, Artificial Sequence
  Description of Artificial Sequence: Synthetic oligonucleotide
gauccaguaagguuugaua

SEQ ID NO: 2458507 - RNA, 19 nt, Artificial Sequence
  Description of Artificial Sequence: Synthetic oligonucleotide
ugauauuuagcuggggauu

SEQ ID NO: 2458508 - RNA, 19 nt, Artificial Sequence
  Description of Artificial Sequence: Synthetic oligonucleotide
agcucagguauuuggucag

SEQ ID NO: 2458509 - RNA, 19 nt, Artificial Sequence
  Description of Artificial Sequence: Synthetic oligonucleotide
uggagaacauaugaaucac

SEQ ID NO: 2458510 - RNA, 19 nt, Artificial Sequence
  Description of Artificial Sequence: Synthetic oligonucleotide
acacgccaaacacagguga

SEQ ID NO: 2458511 - RNA, 19 nt, Artificial Sequence
  Description of Artificial Sequence: Synthetic oligonucleotide
uucgucccaaagccugugg

SEQ ID NO: 2458512 - RNA, 19 nt, Artificial Sequence
  Description of Artificial Sequence: Synthetic oligonucleotide
uuccuacacgccaaacaca

SEQ ID NO: 2458513 - RNA, 19 nt, Artificial Sequence
  Description of Artificial Sequence: Synthetic oligonucleotide
gauuaggcaugaucccagc

SEQ ID NO: 2458514 - RNA, 19 nt, Artificial Sequence
  Description of Artificial Sequence: Synthetic oligonucleotide
uauuuggucagaggauuga

SEQ ID NO: 2458515 - RNA, 19 nt, Artificial Sequence
  Description of Artificial Sequence: Synthetic oligonucleotide
aggauaaaguggccaaaga

SEQ ID NO: 2458516 - RNA, 19 nt, Artificial Sequence
  Description of Artificial Sequence: Synthetic oligonucleotide
uccugacauaauucguccc

SEQ ID NO: 2458517 - RNA, 19 nt, Artificial Sequence
  Description of Artificial Sequence: Synthetic oligonucleotide
cugauuuucaauggugauc

SEQ ID NO: 2458518 - RNA, 19 nt, Artificial Sequence
  Description of Artificial Sequence: Synthetic oligonucleotide
cagaggauugagagacucg

SEQ ID NO: 2458519 - RNA, 19 nt, Artificial Sequence
  Description of Artificial Sequence: Synthetic oligonucleotide
agaauuccacagaugagcu

SEQ ID NO: 2458520 - RNA, 19 nt, Artificial Sequence
  Description of Artificial Sequence: Synthetic oligonucleotide
ugaaagcguuugcaaagaa

SEQ ID NO: 2458521 - RNA, 19 nt, Artificial Sequence
  Description of Artificial Sequence: Synthetic oligonucleotide
aauucccggaucaggauaa

SEQ ID NO: 2458522 - RNA, 19 nt, Artificial Sequence
  Description of Artificial Sequence: Synthetic oligonucleotide
gaucaggauaaaguggcca

SEQ ID NO: 2458523 - RNA, 19 nt, Artificial Sequence
  Description of Artificial Sequence: Synthetic oligonucleotide
cuuugaaacuuuuguuuga

SEQ ID NO: 2458524 - RNA, 19 nt, Artificial Sequence
  Description of Artificial Sequence: Synthetic oligonucleotide
auuaggcaugaucccagca

SEQ ID NO: 2458525 - RNA, 19 nt, Artificial Sequence
  Description of Artificial Sequence: Synthetic oligonucleotide
cacuguggcagagaagagg

SEQ ID NO: 2458526 - RNA, 19 nt, Artificial Sequence
  Description of Artificial Sequence: Synthetic oligonucleotide
uccaucuuuuggcuccuga

SEQ ID NO: 2458527 - RNA, 19 nt, Artificial Sequence
  Description of Artificial Sequence: Synthetic oligonucleotide
auugagagacucggguuuc

SEQ ID NO: 2458528 - RNA, 19 nt, Artificial Sequence
  Description of Artificial Sequence: Synthetic oligonucleotide
agcguuugcaaagaagcga

SEQ ID NO: 2458529 - RNA, 19 nt, Artificial Sequence
  Description of Artificial Sequence: Synthetic oligonucleotide
aguccuuccgcuguggaga

SEQ ID NO: 2458530 - RNA, 19 nt, Artificial Sequence
  Description of Artificial Sequence: Synthetic oligonucleotide
cacaucaccggcaggagca

SEQ ID NO: 2458531 - RNA, 19 nt, Artificial Sequence
  Description of Artificial Sequence: Synthetic oligonucleotide
agcagccgauugcaaaggg

SEQ ID NO: 2458532 - RNA, 19 nt, Artificial Sequence
  Description of Artificial Sequence: Synthetic oligonucleotide
ucugggucaacaguccuuc

SEQ ID NO: 2458533 - RNA, 19 nt, Artificial Sequence
  Description of Artificial Sequence: Synthetic oligonucleotide
uuucaauggugauccuaac

SEQ ID NO: 2458534 - RNA, 19 nt, Artificial Sequence
  Description of Artificial Sequence: Synthetic oligonucleotide
cuggggauuaggcaugauc

SEQ ID NO: 2458535 - RNA, 19 nt, Artificial Sequence
  Description of Artificial Sequence: Synthetic oligonucleotide
ugcuccauuguacgggguc

SEQ ID NO: 2458536 - RNA, 19 nt, Artificial Sequence
  Description of Artificial Sequence: Synthetic oligonucleotide
aaagggaggcagaauucca

SEQ ID NO: 2458537 - RNA, 19 nt, Artificial Sequence
  Description of Artificial Sequence: Synthetic oligonucleotide
aacacaggugaagcucguc

SEQ ID NO: 2458538 - RNA, 19 nt, Artificial Sequence
  Description of Artificial Sequence: Synthetic oligonucleotide
cacaauggugacuucggca

SEQ ID NO: 2458539 - RNA, 19 nt, Artificial Sequence
  Description of Artificial Sequence: Synthetic oligonucleotide
acggggucauggugaaagc

SEQ ID NO: 2458540 - RNA, 19 nt, Artificial Sequence
  Description of Artificial Sequence: Synthetic oligonucleotide
cuuugauauuuagcugggg

SEQ ID NO: 2458541 - RNA, 19 nt, Artificial Sequence
  Description of Artificial Sequence: Synthetic oligonucleotide
ucggguuucugguggaaaa

SEQ ID NO: 2458542 - RNA, 19 nt, Artificial Sequence
  Description of Artificial Sequence: Synthetic oligonucleotide
gaggauugagagacucggg

SEQ ID NO: 2458543 - RNA, 19 nt, Artificial Sequence
  Description of Artificial Sequence: Synthetic oligonucleotide
uggucagaggauugagaga

SEQ ID NO: 2458544 - RNA, 19 nt, Artificial Sequence
  Description of Artificial Sequence: Synthetic oligonucleotide
ucgucccaaagccuguggu

SEQ ID NO: 2458545 - RNA, 19 nt, Artificial Sequence
  Description of Artificial Sequence: Synthetic oligonucleotide
aacaguccuuccgcugugg

SEQ ID NO: 2458546 - RNA, 19 nt, Artificial Sequence
  Description of Artificial Sequence: Synthetic oligonucleotide
guaagguuugauaaaauuu

SEQ ID NO: 2458547 - RNA, 19 nt, Artificial Sequence
  Description of Artificial Sequence: Synthetic oligonucleotide
caucuuuuggcuccugaca

SEQ ID NO: 2458548 - RNA, 19 nt, Artificial Sequence
  Description of Artificial Sequence: Synthetic oligonucleotide
gagacucggguuucuggug

SEQ ID NO: 2458549 - RNA, 19 nt, Artificial Sequence
  Description of Artificial Sequence: Synthetic oligonucleotide
cagcauucagauauaagua

SEQ ID NO: 2458550 - RNA, 19 nt, Artificial Sequence
  Description of Artificial Sequence: Synthetic oligonucleotide
gagaacauaugaaucacau

SEQ ID NO: 2458551 - RNA, 19 nt, Artificial Sequence
  Description of Artificial Sequence: Synthetic oligonucleotide
aucugcacaauggugacuu

SEQ ID NO: 2458552 - RNA, 19 nt, Artificial Sequence
  Description of Artificial Sequence: Synthetic oligonucleotide
cggaucaggauaaaguggc

SEQ ID NO: 2458553 - RNA, 19 nt, Artificial Sequence
  Description of Artificial Sequence: Synthetic oligonucleotide
agcucgggugaucugauuu

SEQ ID NO: 2458554 - RNA, 19 nt, Artificial Sequence
  Description of Artificial Sequence: Synthetic oligonucleotide
agggaggcagaauuccaca

SEQ ID NO: 2458555 - RNA, 19 nt, Artificial Sequence
  Description of Artificial Sequence: Synthetic oligonucleotide
agcagugucuucaucuaug

SEQ ID NO: 2458556 - RNA, 19 nt, Artificial Sequence
  Description of Artificial Sequence: Synthetic oligonucleotide
ucgggugaucugauuuuca

SEQ ID NO: 2458557 - RNA, 19 nt, Artificial Sequence
  Description of Artificial Sequence: Synthetic oligonucleotide
auuuucaauggugauccua

SEQ ID NO: 2458558 - RNA, 19 nt, Artificial Sequence
  Description of Artificial Sequence: Synthetic oligonucleotide
caucacgaacagcuucugc

SEQ ID NO: 2458559 - RNA, 19 nt, Artificial Sequence
  Description of Artificial Sequence: Synthetic oligonucleotide
auaauucgucccaaagccu

SEQ ID NO: 2458560 - RNA, 19 nt, Artificial Sequence
  Description of Artificial Sequence: Synthetic oligonucleotide
uaaaguggccaaagagauu

SEQ ID NO: 2458561 - RNA, 19 nt, Artificial Sequence
  Description of Artificial Sequence: Synthetic oligonucleotide
cuacacgccaaacacaggu

SEQ ID NO: 2458562 - RNA, 19 nt, Artificial Sequence
  Description of Artificial Sequence: Synthetic oligonucleotide
cgaagcagccacaucaccg

SEQ ID NO: 2458563 - RNA, 19 nt, Artificial Sequence
  Description of Artificial Sequence: Synthetic oligonucleotide
ccggaucaggauaaagugg

SEQ ID NO: 2458564 - RNA, 19 nt, Artificial Sequence
  Description of Artificial Sequence: Synthetic oligonucleotide
uguacggggucauggugaa

SEQ ID NO: 2458565 - RNA, 19 nt, Artificial Sequence
  Description of Artificial Sequence: Synthetic oligonucleotide
cacgcuuuuccagauccag

SEQ ID NO: 2458566 - RNA, 19 nt, Artificial Sequence
  Description of Artificial Sequence: Synthetic oligonucleotide
aauucgucccaaagccugu

SEQ ID NO: 2458567 - RNA, 19 nt, Artificial Sequence
  Description of Artificial Sequence: Synthetic oligonucleotide
aucaccggcaggagcaagg

SEQ ID NO: 2458568 - RNA, 19 nt, Artificial Sequence
  Description of Artificial Sequence: Synthetic oligonucleotide
caucuauguccaucuuuug

SEQ ID NO: 2458569 - RNA, 19 nt, Artificial Sequence
  Description of Artificial Sequence: Synthetic oligonucleotide
gggucaacaguccuuccgc

SEQ ID NO: 2458570 - RNA, 19 nt, Artificial Sequence
  Description of Artificial Sequence: Synthetic oligonucleotide
aucagcucgggugaucuga

SEQ ID NO: 2458571 - RNA, 19 nt, Artificial Sequence
  Description of Artificial Sequence: Synthetic oligonucleotide
gguuccuacacgccaaaca

SEQ ID NO: 2458572 - RNA, 19 nt, Artificial Sequence
  Description of Artificial Sequence: Synthetic oligonucleotide
gguuucugguggaaaagcc

SEQ ID NO: 2458573 - RNA, 19 nt, Artificial Sequence
  Description of Artificial Sequence: Synthetic oligonucleotide
gaggcagaauuccacagau

SEQ ID NO: 2458574 - RNA, 19 nt, Artificial Sequence
  Description of Artificial Sequence: Synthetic oligonucleotide
gcuuugauauuuagcuggg

SEQ ID NO: 2458575 - RNA, 19 nt, Artificial Sequence
  Description of Artificial Sequence: Synthetic oligonucleotide
ggugacuucggcagagggg

SEQ ID NO: 2458576 - RNA, 19 nt, Artificial Sequence
  Description of Artificial Sequence: Synthetic oligonucleotide
uucugggucaacaguccuu

SEQ ID NO: 2458577 - RNA, 19 nt, Artificial Sequence
  Description of Artificial Sequence: Synthetic oligonucleotide
cucgccccggugaucaaag

SEQ ID NO: 2458578 - RNA, 19 nt, Artificial Sequence
  Description of Artificial Sequence: Synthetic oligonucleotide
aaguggccaaagagauugg

SEQ ID NO: 2458579 - RNA, 19 nt, Artificial Sequence
  Description of Artificial Sequence: Synthetic oligonucleotide
uugcaaagggccagcccaa

SEQ ID NO: 2458580 - RNA, 19 nt, Artificial Sequence
  Description of Artificial Sequence: Synthetic oligonucleotide
agguccacacaaagggagg

SEQ ID NO: 2458581 - RNA, 19 nt, Artificial Sequence
  Description of Artificial Sequence: Synthetic oligonucleotide
ggauuaggcaugaucccag

SEQ ID NO: 2458582 - RNA, 19 nt, Artificial Sequence
  Description of Artificial Sequence: Synthetic oligonucleotide
acgccaaacacaggugaag

SEQ ID NO: 2458583 - RNA, 19 nt, Artificial Sequence
  Description of Artificial Sequence: Synthetic oligonucleotide
gugaucaaagccaccuuuc

SEQ ID NO: 2458584 - RNA, 19 nt, Artificial Sequence
  Description of Artificial Sequence: Synthetic oligonucleotide
agguuccaauucccggauc

SEQ ID NO: 2458585 - RNA, 19 nt, Artificial Sequence
  Description of Artificial Sequence: Synthetic oligonucleotide
uaacacgcuuuuccagauc

SEQ ID NO: 2458586 - RNA, 19 nt, Artificial Sequence
  Description of Artificial Sequence: Synthetic oligonucleotide
gaccacggaccgcaggcug

SEQ ID NO: 2458587 - RNA, 19 nt, Artificial Sequence
  Description of Artificial Sequence: Synthetic oligonucleotide
cagcagggcaucacgaaca

SEQ ID NO: 2458588 - RNA, 19 nt, Artificial Sequence
  Description of Artificial Sequence: Synthetic oligonucleotide
caguccuuccgcuguggag

SEQ ID NO: 2458589 - RNA, 19 nt, Artificial Sequence
  Description of Artificial Sequence: Synthetic oligonucleotide
ggggauuaggcaugauccc

SEQ ID NO: 2458590 - RNA, 19 nt, Artificial Sequence
  Description of Artificial Sequence: Synthetic oligonucleotide
aacaccuccuggaacccau

SEQ ID NO: 2458591 - RNA, 19 nt, Artificial Sequence
  Description of Artificial Sequence: Synthetic oligonucleotide
caaacaccuccuggaaccc

SEQ ID NO: 2458592 - RNA, 19 nt, Artificial Sequence
  Description of Artificial Sequence: Synthetic oligonucleotide
ggugaagcucgucaucuuc

SEQ ID NO: 2458593 - RNA, 19 nt, Artificial Sequence
  Description of Artificial Sequence: Synthetic oligonucleotide
cuguggagaacauaugaau

SEQ ID NO: 2458594 - RNA, 19 nt, Artificial Sequence
  Description of Artificial Sequence: Synthetic oligonucleotide
aguggccaaagagauuggu

SEQ ID NO: 2458595 - RNA, 19 nt, Artificial Sequence
  Description of Artificial Sequence: Synthetic oligonucleotide
ucagcucgggugaucugau

SEQ ID NO: 2458596 - RNA, 19 nt, Artificial Sequence
  Description of Artificial Sequence: Synthetic oligonucleotide
aaacaccuccuggaaccca

SEQ ID NO: 2458597 - RNA, 19 nt, Artificial Sequence
  Description of Artificial Sequence: Synthetic oligonucleotide
gaagcgaagcagccacauc

SEQ ID NO: 2458598 - RNA, 19 nt, Artificial Sequence
  Description of Artificial Sequence: Synthetic oligonucleotide
ccauuguacggggucaugg

SEQ ID NO: 2458599 - RNA, 19 nt, Artificial Sequence
  Description of Artificial Sequence: Synthetic oligonucleotide
agauccaguaagguuugau

SEQ ID NO: 2458600 - RNA, 19 nt, Artificial Sequence
  Description of Artificial Sequence: Synthetic oligonucleotide
gugacuucggcagaggggu

SEQ ID NO: 2458601 - RNA, 19 nt, Artificial Sequence
  Description of Artificial Sequence: Synthetic oligonucleotide
agaagcgaagcagccacau

SEQ ID NO: 2458602 - RNA, 19 nt, Artificial Sequence
  Description of Artificial Sequence: Synthetic oligonucleotide
ugagagggguugucacugu

SEQ ID NO: 2458603 - RNA, 19 nt, Artificial Sequence
  Description of Artificial Sequence: Synthetic oligonucleotide
gugaaagcguuugcaaaga

SEQ ID NO: 2458604 - RNA, 19 nt, Artificial Sequence
  Description of Artificial Sequence: Synthetic oligonucleotide
agguuccuacacgccaaac

SEQ ID NO: 2458605 - RNA, 19 nt, Artificial Sequence
  Description of Artificial Sequence: Synthetic oligonucleotide
caaagaagcgaagcagcca

SEQ ID NO: 2458606 - RNA, 19 nt, Artificial Sequence
  Description of Artificial Sequence: Synthetic oligonucleotide
aaacacaggugaagcucgu

SEQ ID NO: 2458607 - RNA, 19 nt, Artificial Sequence
  Description of Artificial Sequence: Synthetic oligonucleotide
ccaaacacaggugaagcuc

SEQ ID NO: 2458608 - RNA, 19 nt, Artificial Sequence
  Description of Artificial Sequence: Synthetic oligonucleotide
ugauccuaacacgcuuuuc

SEQ ID NO: 2458609 - RNA, 19 nt, Artificial Sequence
  Description of Artificial Sequence: Synthetic oligonucleotide
ggccaaagagauugguuuc

SEQ ID NO: 2458610 - RNA, 19 nt, Artificial Sequence
  Description of Artificial Sequence: Synthetic oligonucleotide
ccaucuuuuggcuccugac

SEQ ID NO: 2458611 - RNA, 19 nt, Artificial Sequence
  Description of Artificial Sequence: Synthetic oligonucleotide
ccuaacacgcuuuuccaga

SEQ ID NO: 2458612 - RNA, 19 nt, Artificial Sequence
  Description of Artificial Sequence: Synthetic oligonucleotide
ugacuucggcagaggggug

SEQ ID NO: 2458613 - RNA, 19 nt, Artificial Sequence
  Description of Artificial Sequence: Synthetic oligonucleotide
caauucccggaucaggaua

SEQ ID NO: 2458614 - RNA, 19 nt, Artificial Sequence
  Description of Artificial Sequence: Synthetic oligonucleotide
cagcagccgauugcaaagg

SEQ ID NO: 2458615 - RNA, 19 nt, Artificial Sequence
  Description of Artificial Sequence: Synthetic oligonucleotide
accgcaggcugcugacauc

SEQ ID NO: 2458616 - RNA, 19 nt, Artificial Sequence
  Description of Artificial Sequence: Synthetic oligonucleotide
auggugacuucggcagagg

SEQ ID NO: 2458617 - RNA, 19 nt, Artificial Sequence
  Description of Artificial Sequence: Synthetic oligonucleotide
caucuucuuccagcagccg

SEQ ID NO: 2458618 - RNA, 19 nt, Artificial Sequence
  Description of Artificial Sequence: Synthetic oligonucleotide
uuuuggcuccugacauaau

SEQ ID NO: 2458619 - RNA, 19 nt, Artificial Sequence
  Description of Artificial Sequence: Synthetic oligonucleotide
gguccacacaaagggaggc

SEQ ID NO: 2458620 - RNA, 19 nt, Artificial Sequence
  Description of Artificial Sequence: Synthetic oligonucleotide
cauaugaaucacauuucuu

SEQ ID NO: 2458621 - RNA, 19 nt, Artificial Sequence
  Description of Artificial Sequence: Synthetic oligonucleotide
agcuucugcuuugcucagg

SEQ ID NO: 2458622 - RNA, 19 nt, Artificial Sequence
  Description of Artificial Sequence: Synthetic oligonucleotide
ggaggcagaauuccacaga

SEQ ID NO: 2458623 - RNA, 19 nt, Artificial Sequence
  Description of Artificial Sequence: Synthetic oligonucleotide
uccauuguacggggucaug

SEQ ID NO: 2458624 - RNA, 19 nt, Artificial Sequence
  Description of Artificial Sequence: Synthetic oligonucleotide
acggaccgcaggcugcuga

SEQ ID NO: 2458625 - RNA, 19 nt, Artificial Sequence
  Description of Artificial Sequence: Synthetic oligonucleotide
agggguugucacuguggca

SEQ ID NO: 2458626 - RNA, 19 nt, Artificial Sequence
  Description of Artificial Sequence: Synthetic oligonucleotide
auucgucccaaagccugug

SEQ ID NO: 2458627 - RNA, 19 nt, Artificial Sequence
  Description of Artificial Sequence: Synthetic oligonucleotide
cucgggugaucugauuuuc

SEQ ID NO: 2458628 - RNA, 19 nt, Artificial Sequence
  Description of Artificial Sequence: Synthetic oligonucleotide
gacuucggcagagggguga

SEQ ID NO: 2458629 - RNA, 19 nt, Artificial Sequence
  Description of Artificial Sequence: Synthetic oligonucleotide
ucccagcauucagauauaa

SEQ ID NO: 2458630 - RNA, 19 nt, Artificial Sequence
  Description of Artificial Sequence: Synthetic oligonucleotide
ucaccggcaggagcaaggu

SEQ ID NO: 2458631 - RNA, 19 nt, Artificial Sequence
  Description of Artificial Sequence: Synthetic oligonucleotide
ugaucccagcauucagaua

SEQ ID NO: 2458632 - RNA, 19 nt, Artificial Sequence
  Description of Artificial Sequence: Synthetic oligonucleotide
aagccacaccagugcuucu

SEQ ID NO: 2458633 - RNA, 19 nt, Artificial Sequence
  Description of Artificial Sequence: Synthetic oligonucleotide
acuucggcagaggggugag

SEQ ID NO: 2458634 - RNA, 19 nt, Artificial Sequence
  Description of Artificial Sequence: Synthetic oligonucleotide
ggagaacauaugaaucaca

SEQ ID NO: 2458635 - RNA, 19 nt, Artificial Sequence
  Description of Artificial Sequence: Synthetic oligonucleotide
cauccaucugcacaauggu

SEQ ID NO: 2458636 - RNA, 19 nt, Artificial Sequence
  Description of Artificial Sequence: Synthetic oligonucleotide
cagcccaaugccacugcuc

SEQ ID NO: 2458637 - RNA, 19 nt, Artificial Sequence
  Description of Artificial Sequence: Synthetic oligonucleotide
gcacaauggugacuucggc

SEQ ID NO: 2458638 - RNA, 19 nt, Artificial Sequence
  Description of Artificial Sequence: Synthetic oligonucleotide
cuugucauucugggucaac

SEQ ID NO: 2458639 - RNA, 19 nt, Artificial Sequence
  Description of Artificial Sequence: Synthetic oligonucleotide
cacacaaagggaggcagaa

SEQ ID NO: 2458640 - RNA, 19 nt, Artificial Sequence
  Description of Artificial Sequence: Synthetic oligonucleotide
gggauuaggcaugauccca

SEQ ID NO: 2458641 - RNA, 19 nt, Artificial Sequence
  Description of Artificial Sequence: Synthetic oligonucleotide
uuccacagaugagcugaga

SEQ ID NO: 2458642 - RNA, 19 nt, Artificial Sequence
  Description of Artificial Sequence: Synthetic oligonucleotide
ccagauccaguaagguuug

SEQ ID NO: 2458643 - RNA, 19 nt, Artificial Sequence
  Description of Artificial Sequence: Synthetic oligonucleotide
gacucggguuucuggugga

SEQ ID NO: 2458644 - RNA, 19 nt, Artificial Sequence
  Description of Artificial Sequence: Synthetic oligonucleotide
cauuguacggggucauggu

SEQ ID NO: 2458645 - RNA, 19 nt, Artificial Sequence
  Description of Artificial Sequence: Synthetic oligonucleotide
cccaaugccacugcucgcc

SEQ ID NO: 2458646 - RNA, 19 nt, Artificial Sequence
  Description of Artificial Sequence: Synthetic oligonucleotide
uggaacccaucagcaguga

SEQ ID NO: 2458647 - RNA, 19 nt, Artificial Sequence
  Description of Artificial Sequence: Synthetic oligonucleotide
acgcuuuuccagauccagu

SEQ ID NO: 2458648 - RNA, 19 nt, Artificial Sequence
  Description of Artificial Sequence: Synthetic oligonucleotide
aggcagaauuccacagaug

SEQ ID NO: 2458649 - RNA, 19 nt, Artificial Sequence
  Description of Artificial Sequence: Synthetic oligonucleotide
ggaucaggauaaaguggcc

SEQ ID NO: 2458650 - RNA, 19 nt, Artificial Sequence
  Description of Artificial Sequence: Synthetic oligonucleotide
gauuuucaauggugauccu

SEQ ID NO: 2458651 - RNA, 19 nt, Artificial Sequence
  Description of Artificial Sequence: Synthetic oligonucleotide
gcaaagggccagcccaaug

SEQ ID NO: 2458652 - RNA, 19 nt, Artificial Sequence
  Description of Artificial Sequence: Synthetic oligonucleotide
gccgauugcaaagggccag

SEQ ID NO: 2458653 - RNA, 19 nt, Artificial Sequence
  Description of Artificial Sequence: Synthetic oligonucleotide
cacgccaaacacaggugaa

SEQ ID NO: 2458654 - RNA, 19 nt, Artificial Sequence
  Description of Artificial Sequence: Synthetic oligonucleotide
caucagcucgggugaucug

SEQ ID NO: 2458655 - RNA, 19 nt, Artificial Sequence
  Description of Artificial Sequence: Synthetic oligonucleotide
cuaacacgcuuuuccagau

SEQ ID NO: 2458656 - RNA, 19 nt, Artificial Sequence
  Description of Artificial Sequence: Synthetic oligonucleotide
gcuguggagaacauaugaa

SEQ ID NO: 2458657 - RNA, 19 nt, Artificial Sequence
  Description of Artificial Sequence: Synthetic oligonucleotide
gcguuugcaaagaagcgaa

SEQ ID NO: 2458658 - RNA, 19 nt, Artificial Sequence
  Description of Artificial Sequence: Synthetic oligonucleotide
gcagccgauugcaaagggc

SEQ ID NO: 2458659 - RNA, 19 nt, Artificial Sequence
  Description of Artificial Sequence: Synthetic oligonucleotide
augagcugagagggguugu

SEQ ID NO: 2458660 - RNA, 19 nt, Artificial Sequence
  Description of Artificial Sequence: Synthetic oligonucleotide
caauggugacuucggcaga

SEQ ID NO: 2458661 - RNA, 19 nt, Artificial Sequence
  Description of Artificial Sequence: Synthetic oligonucleotide
gcauucagauauaaguagu

SEQ ID NO: 2458662 - RNA, 19 nt, Artificial Sequence
  Description of Artificial Sequence: Synthetic oligonucleotide
agccgauugcaaagggcca

SEQ ID NO: 2458663 - RNA, 19 nt, Artificial Sequence
  Description of Artificial Sequence: Synthetic oligonucleotide
ucgccccggugaucaaagc

SEQ ID NO: 2458664 - RNA, 19 nt, Artificial Sequence
  Description of Artificial Sequence: Synthetic oligonucleotide
caggugaagcucgucaucu

SEQ ID NO: 2458665 - RNA, 19 nt, Artificial Sequence
  Description of Artificial Sequence: Synthetic oligonucleotide
gccacaccagugcuucugc

SEQ ID NO: 2458666 - RNA, 19 nt, Artificial Sequence
  Description of Artificial Sequence: Synthetic oligonucleotide
ccuacacgccaaacacagg

SEQ ID NO: 2458667 - RNA, 19 nt, Artificial Sequence
  Description of Artificial Sequence: Synthetic oligonucleotide
acugcucgccccggugauc

SEQ ID NO: 2458668 - RNA, 19 nt, Artificial Sequence
  Description of Artificial Sequence: Synthetic oligonucleotide
caucaccggcaggagcaag

SEQ ID NO: 2458669 - RNA, 19 nt, Artificial Sequence
  Description of Artificial Sequence: Synthetic oligonucleotide
ggcaugaucccagcauuca

SEQ ID NO: 2458670 - RNA, 19 nt, Artificial Sequence
  Description of Artificial Sequence: Synthetic oligonucleotide
ugcaaagggccagcccaau

SEQ ID NO: 2458671 - RNA, 19 nt, Artificial Sequence
  Description of Artificial Sequence: Synthetic oligonucleotide
uugcacccuggaccacgga

SEQ ID NO: 2458672 - RNA, 19 nt, Artificial Sequence
  Description of Artificial Sequence: Synthetic oligonucleotide
caguaagguuugauaaaau

SEQ ID NO: 2458673 - RNA, 19 nt, Artificial Sequence
  Description of Artificial Sequence: Synthetic oligonucleotide
cacaggugaagcucgucau

SEQ ID NO: 2458674 - RNA, 19 nt, Artificial Sequence
  Description of Artificial Sequence: Synthetic oligonucleotide
ggauugagagacucggguu

SEQ ID NO: 2458675 - RNA, 19 nt, Artificial Sequence
  Description of Artificial Sequence: Synthetic oligonucleotide
cagauauaaguagucuaau

SEQ ID NO: 2458676 - RNA, 19 nt, Artificial Sequence
  Description of Artificial Sequence: Synthetic oligonucleotide
ugcuuugcucagguuccua

SEQ ID NO: 2458677 - RNA, 19 nt, Artificial Sequence
  Description of Artificial Sequence: Synthetic oligonucleotide
agcuggggauuaggcauga

SEQ ID NO: 2458678 - RNA, 19 nt, Artificial Sequence
  Description of Artificial Sequence: Synthetic oligonucleotide
cccaaagccugugguagag

SEQ ID NO: 2458679 - RNA, 19 nt, Artificial Sequence
  Description of Artificial Sequence: Synthetic oligonucleotide
acccuggaccacggaccgc

SEQ ID NO: 2458680 - RNA, 19 nt, Artificial Sequence
  Description of Artificial Sequence: Synthetic oligonucleotide
uuccgcuguggagaacaua

SEQ ID NO: 2458681 - RNA, 19 nt, Artificial Sequence
  Description of Artificial Sequence: Synthetic oligonucleotide
cguuugcaaagaagcgaag

SEQ ID NO: 2458682 - RNA, 19 nt, Artificial Sequence
  Description of Artificial Sequence: Synthetic oligonucleotide
gcuccauuguacgggguca

SEQ ID NO: 2458683 - RNA, 19 nt, Artificial Sequence
  Description of Artificial Sequence: Synthetic oligonucleotide
ccuuccgcuguggagaaca

SEQ ID NO: 2458684 - RNA, 19 nt, Artificial Sequence
  Description of Artificial Sequence: Synthetic oligonucleotide
guccuuccgcuguggagaa

SEQ ID NO: 2458685 - RNA, 19 nt, Artificial Sequence
  Description of Artificial Sequence: Synthetic oligonucleotide
gucuaaucuuugaaacuuu

SEQ ID NO: 2458686 - RNA, 19 nt, Artificial Sequence
  Description of Artificial Sequence: Synthetic oligonucleotide
ccccggugaucaaagccac

SEQ ID NO: 2458687 - RNA, 19 nt, Artificial Sequence
  Description of Artificial Sequence: Synthetic oligonucleotide
ggggucauggugaaagcgu

SEQ ID NO: 2458688 - RNA, 19 nt, Artificial Sequence
  Description of Artificial Sequence: Synthetic oligonucleotide
cggggucauggugaaagcg

SEQ ID NO: 2458689 - RNA, 19 nt, Artificial Sequence
  Description of Artificial Sequence: Synthetic oligonucleotide
gugauccuaacacgcuuuu

SEQ ID NO: 2458690 - RNA, 19 nt, Artificial Sequence
  Description of Artificial Sequence: Synthetic oligonucleotide
ggucaacaguccuuccgcu

SEQ ID NO: 2458691 - RNA, 19 nt, Artificial Sequence
  Description of Artificial Sequence: Synthetic oligonucleotide
acaucaccggcaggagcaa

SEQ ID NO: 2458692 - RNA, 19 nt, Artificial Sequence
  Description of Artificial Sequence: Synthetic oligonucleotide
ggagcaagguccacacaaa

SEQ ID NO: 2458693 - RNA, 19 nt, Artificial Sequence
  Description of Artificial Sequence: Synthetic oligonucleotide
cucggguuucugguggaaa

SEQ ID NO: 2458694 - RNA, 19 nt, Artificial Sequence
  Description of Artificial Sequence: Synthetic oligonucleotide
gcaucacgaacagcuucug

SEQ ID NO: 2458695 - RNA, 19 nt, Artificial Sequence
  Description of Artificial Sequence: Synthetic oligonucleotide
ccgauugcaaagggccagc

SEQ ID NO: 2458696 - RNA, 19 nt, Artificial Sequence
  Description of Artificial Sequence: Synthetic oligonucleotide
gcugagagggguugucacu

SEQ ID NO: 2458697 - RNA, 19 nt, Artificial Sequence
  Description of Artificial Sequence: Synthetic oligonucleotide
gccacaucaccggcaggag

SEQ ID NO: 2458698 - RNA, 19 nt, Artificial Sequence
  Description of Artificial Sequence: Synthetic oligonucleotide
acucggguuucugguggaa

SEQ ID NO: 2458699 - RNA, 19 nt, Artificial Sequence
  Description of Artificial Sequence: Synthetic oligonucleotide
ggguugucacuguggcaga

SEQ ID NO: 2458700 - RNA, 19 nt, Artificial Sequence
  Description of Artificial Sequence: Synthetic oligonucleotide
auucccggaucaggauaaa

SEQ ID NO: 2458701 - RNA, 19 nt, Artificial Sequence
  Description of Artificial Sequence: Synthetic oligonucleotide
cccggugaucaaagccacc

SEQ ID NO: 2458702 - RNA, 19 nt, Artificial Sequence
  Description of Artificial Sequence: Synthetic oligonucleotide
ccacacaaagggaggcaga

SEQ ID NO: 2458703 - RNA, 19 nt, Artificial Sequence
  Description of Artificial Sequence: Synthetic oligonucleotide
ccgcuguggagaacauaug

SEQ ID NO: 2458704 - RNA, 19 nt, Artificial Sequence
  Description of Artificial Sequence: Synthetic oligonucleotide
cggguuucugguggaaaag

SEQ ID NO: 2458705 - RNA, 19 nt, Artificial Sequence
  Description of Artificial Sequence: Synthetic oligonucleotide
cgauugcaaagggccagcc

SEQ ID NO: 2458706 - RNA, 19 nt, Artificial Sequence
  Description of Artificial Sequence: Synthetic oligonucleotide
ggugauccuaacacgcuuu

SEQ ID NO: 2458707 - RNA, 19 nt, Artificial Sequence
  Description of Artificial Sequence: Synthetic oligonucleotide
uccuuccgcuguggagaac

SEQ ID NO: 2458708 - RNA, 19 nt, Artificial Sequence
  Description of Artificial Sequence: Synthetic oligonucleotide
aucccagcauucagauaua

SEQ ID NO: 2458709 - RNA, 19 nt, Artificial Sequence
  Description of Artificial Sequence: Synthetic oligonucleotide
ggcuccugacauaauucgu

SEQ ID NO: 2458710 - RNA, 19 nt, Artificial Sequence
  Description of Artificial Sequence: Synthetic oligonucleotide
ccaaagagauugguuucaa

SEQ ID NO: 2458711 - RNA, 19 nt, Artificial Sequence
  Description of Artificial Sequence: Synthetic oligonucleotide
gucagaggauugagagacu

SEQ ID NO: 2458712 - RNA, 19 nt, Artificial Sequence
  Description of Artificial Sequence: Synthetic oligonucleotide
caucugcacaauggugacu

SEQ ID NO: 2458713 - RNA, 19 nt, Artificial Sequence
  Description of Artificial Sequence: Synthetic oligonucleotide
ccggugaucaaagccaccu

SEQ ID NO: 2458714 - RNA, 19 nt, Artificial Sequence
  Description of Artificial Sequence: Synthetic oligonucleotide
cagauccaguaagguuuga

SEQ ID NO: 2458715 - RNA, 19 nt, Artificial Sequence
  Description of Artificial Sequence: Synthetic oligonucleotide
gcucgggugaucugauuuu

SEQ ID NO: 2458716 - RNA, 19 nt, Artificial Sequence
  Description of Artificial Sequence: Synthetic oligonucleotide
ccggcaggagcaaggucca

SEQ ID NO: 2458717 - RNA, 19 nt, Artificial Sequence
  Description of Artificial Sequence: Synthetic oligonucleotide
cuuccgcuguggagaacau

SEQ ID NO: 2458718 - RNA, 19 nt, Artificial Sequence
  Description of Artificial Sequence: Synthetic oligonucleotide
cggaccgcaggcugcugac

SEQ ID NO: 2458719 - RNA, 19 nt, Artificial Sequence
  Description of Artificial Sequence: Synthetic oligonucleotide
ccaauucccggaucaggau

SEQ ID NO: 2458720 - RNA, 19 nt, Artificial Sequence
  Description of Artificial Sequence: Synthetic oligonucleotide
cugcuccauuguacggggu

SEQ ID NO: 2458721 - RNA, 19 nt, Artificial Sequence
  Description of Artificial Sequence: Synthetic oligonucleotide
cgucccaaagccuguggua

SEQ ID NO: 2458722 - RNA, 19 nt, Artificial Sequence
  Description of Artificial Sequence: Synthetic oligonucleotide
guacggggucauggugaaa

SEQ ID NO: 2458723 - RNA, 19 nt, Artificial Sequence
  Description of Artificial Sequence: Synthetic oligonucleotide
cacugcucgccccggugau

SEQ ID NO: 2458724 - RNA, 19 nt, Artificial Sequence
  Description of Artificial Sequence: Synthetic oligonucleotide
ccuuugcacccuggaccac

SEQ ID NO: 2458725 - RNA, 19 nt, Artificial Sequence
  Description of Artificial Sequence: Synthetic oligonucleotide
ggaccacggaccgcaggcu

SEQ ID NO: 2458726 - RNA, 19 nt, Artificial Sequence
  Description of Artificial Sequence: Synthetic oligonucleotide
ccagcccaaugccacugcu

SEQ ID NO: 2458727 - RNA, 19 nt, Artificial Sequence
  Description of Artificial Sequence: Synthetic oligonucleotide
cagcucgggugaucugauu

SEQ ID NO: 2458728 - RNA, 19 nt, Artificial Sequence
  Description of Artificial Sequence: Synthetic oligonucleotide
cgcaggcugcugacaucca

SEQ ID NO: 2458729 - RNA, 19 nt, Artificial Sequence
  Description of Artificial Sequence: Synthetic oligonucleotide
gcuggggauuaggcaugau

SEQ ID NO: 2458730 - RNA, 19 nt, Artificial Sequence
  Description of Artificial Sequence: Synthetic oligonucleotide
aaauguaagauacuaauca

SEQ ID NO: 2458731 - RNA, 19 nt, Artificial Sequence
  Description of Artificial Sequence: Synthetic oligonucleotide
uuuagcauguucuugaucc

SEQ ID NO: 2458732 - RNA, 19 nt, Artificial Sequence
  Description of Artificial Sequence: Synthetic oligonucleotide
aacuagaaagagcaaauac

SEQ ID NO: 2458733 - RNA, 19 nt, Artificial Sequence
  Description of Artificial Sequence: Synthetic oligonucleotide
aaauguaucgccaugcagc

SEQ ID NO: 2458734 - RNA, 19 nt, Artificial Sequence
  Description of Artificial Sequence: Synthetic oligonucleotide
acugaaauagcucagggag

SEQ ID NO: 2458735 - RNA, 19 nt, Artificial Sequence
  Description of Artificial Sequence: Synthetic oligonucleotide
aagauacuaaucaauaugg

SEQ ID NO: 2458736 - RNA, 19 nt, Artificial Sequence
  Description of Artificial Sequence: Synthetic oligonucleotide
aauguaucgccaugcagcc

SEQ ID NO: 2458737 - RNA, 19 nt, Artificial Sequence
  Description of Artificial Sequence: Synthetic oligonucleotide
uaagauacuaaucaauaug

SEQ ID NO: 2458738 - RNA, 19 nt, Artificial Sequence
  Description of Artificial Sequence: Synthetic oligonucleotide
auacuaaucaauauggugg

SEQ ID NO: 2458739 - RNA, 19 nt, Artificial Sequence
  Description of Artificial Sequence: Synthetic oligonucleotide
uuuguuagaauccacgacu

SEQ ID NO: 2458740 - RNA, 19 nt, Artificial Sequence
  Description of Artificial Sequence: Synthetic oligonucleotide
aaagagcaaauacuccugc

SEQ ID NO: 2458741 - RNA, 19 nt, Artificial Sequence
  Description of Artificial Sequence: Synthetic oligonucleotide
gauucauucauucauucug

SEQ ID NO: 2458742 - RNA, 19 nt, Artificial Sequence
  Description of Artificial Sequence: Synthetic oligonucleotide
auaugcuaaauguaucgcc

SEQ ID NO: 2458743 - RNA, 19 nt, Artificial Sequence
  Description of Artificial Sequence: Synthetic oligonucleotide
aagacugugaaacacugug

SEQ ID NO: 2458744 - RNA, 19 nt, Artificial Sequence
  Description of Artificial Sequence: Synthetic oligonucleotide
gauacuaaucaauauggug

SEQ ID NO: 2458745 - RNA, 19 nt, Artificial Sequence
  Description of Artificial Sequence: Synthetic oligonucleotide
cuauaugcuaaauguaucg

SEQ ID NO: 2458746 - RNA, 19 nt, Artificial Sequence
  Description of Artificial Sequence: Synthetic oligonucleotide
aaauacuccugccacaucu

SEQ ID NO: 2458747 - RNA, 19 nt, Artificial Sequence
  Description of Artificial Sequence: Synthetic oligonucleotide
caugguaaagauuuggaag

SEQ ID NO: 2458748 - RNA, 19 nt, Artificial Sequence
  Description of Artificial Sequence: Synthetic oligonucleotide
aauaaucuuuaugugcugg

SEQ ID NO: 2458749 - RNA, 19 nt, Artificial Sequence
  Description of Artificial Sequence: Synthetic oligonucleotide
aggaagaucagcgaggcgc

SEQ ID NO: 2458750 - RNA, 19 nt, Artificial Sequence
  Description of Artificial Sequence: Synthetic oligonucleotide
uuuaaaucugucaaaccac

SEQ ID NO: 2458751 - RNA, 19 nt, Artificial Sequence
  Description of Artificial Sequence: Synthetic oligonucleotide
auuaauauccuguucuucu

SEQ ID NO: 2458752 - RNA, 19 nt, Artificial Sequence
  Description of Artificial Sequence: Synthetic oligonucleotide
aaucugucaaaccacacau

SEQ ID NO: 2458753 - RNA, 19 nt, Artificial Sequence
  Description of Artificial Sequence: Synthetic oligonucleotide
agagauuucagcuuugagu

SEQ ID NO: 2458754 - RNA, 19 nt, Artificial Sequence
  Description of Artificial Sequence: Synthetic oligonucleotide
uggauaaauaaucuuuaug

SEQ ID NO: 2458755 - RNA, 19 nt, Artificial Sequence
  Description of Artificial Sequence: Synthetic oligonucleotide
cuagaaagagcaaauacuc

SEQ ID NO: 2458756 - RNA, 19 nt, Artificial Sequence
  Description of Artificial Sequence: Synthetic oligonucleotide
ucauuagauauuuuaaauc

SEQ ID NO: 2458757 - RNA, 19 nt, Artificial Sequence
  Description of Artificial Sequence: Synthetic oligonucleotide
aaccacacauuggagagcc

SEQ ID NO: 2458758 - RNA, 19 nt, Artificial Sequence
  Description of Artificial Sequence: Synthetic oligonucleotide
uaugcuaaauguaucgcca

SEQ ID NO: 2458759 - RNA, 19 nt, Artificial Sequence
  Description of Artificial Sequence: Synthetic oligonucleotide
agaaagagcaaauacuccu

SEQ ID NO: 2458760 - RNA, 19 nt, Artificial Sequence
  Description of Artificial Sequence: Synthetic oligonucleotide
aauguaagauacuaaucaa

SEQ ID NO: 2458761 - RNA, 19 nt, Artificial Sequence
  Description of Artificial Sequence: Synthetic oligonucleotide
uauuuuaaaucugucaaac

SEQ ID NO: 2458762 - RNA, 19 nt, Artificial Sequence
  Description of Artificial Sequence: Synthetic oligonucleotide
agugucucaguccuuggcc

SEQ ID NO: 2458763 - RNA, 19 nt, Artificial Sequence
  Description of Artificial Sequence: Synthetic oligonucleotide
aauaugguggugaggauuc

SEQ ID NO: 2458764 - RNA, 19 nt, Artificial Sequence
  Description of Artificial Sequence: Synthetic oligonucleotide
ugaaauagcucagggaggg

SEQ ID NO: 2458765 - RNA, 19 nt, Artificial Sequence
  Description of Artificial Sequence: Synthetic oligonucleotide
uucuauaugcuaaauguau

SEQ ID NO: 2458766 - RNA, 19 nt, Artificial Sequence
  Description of Artificial Sequence: Synthetic oligonucleotide
uuaaaucugucaaaccaca

SEQ ID NO: 2458767 - RNA, 19 nt, Artificial Sequence
  Description of Artificial Sequence: Synthetic oligonucleotide
augguaaagauuuggaaga

SEQ ID NO: 2458768 - RNA, 19 nt, Artificial Sequence
  Description of Artificial Sequence: Synthetic oligonucleotide
caucaauugacucaaggug

SEQ ID NO: 2458769 - RNA, 19 nt, Artificial Sequence
  Description of Artificial Sequence: Synthetic oligonucleotide
uucagaaaacuagaaagag

SEQ ID NO: 2458770 - RNA, 19 nt, Artificial Sequence
  Description of Artificial Sequence: Synthetic oligonucleotide
uucauaggaguauauggcc

SEQ ID NO: 2458771 - RNA, 19 nt, Artificial Sequence
  Description of Artificial Sequence: Synthetic oligonucleotide
uuauucagaaaacuagaaa

SEQ ID NO: 2458772 - RNA, 19 nt, Artificial Sequence
  Description of Artificial Sequence: Synthetic oligonucleotide
uugaguuugucucuucgcc

SEQ ID NO: 2458773 - RNA, 19 nt, Artificial Sequence
  Description of Artificial Sequence: Synthetic oligonucleotide
aucuuuaugugcuggaaug

SEQ ID NO: 2458774 - RNA, 19 nt, Artificial Sequence
  Description of Artificial Sequence: Synthetic oligonucleotide
cucgguguuuucuauaugc

SEQ ID NO: 2458775 - RNA, 19 nt, Artificial Sequence
  Description of Artificial Sequence: Synthetic oligonucleotide
agaaccagcucaucuacgg

SEQ ID NO: 2458776 - RNA, 19 nt, Artificial Sequence
  Description of Artificial Sequence: Synthetic oligonucleotide
caaaccacacauuggagag

SEQ ID NO: 2458777 - RNA, 19 nt, Artificial Sequence
  Description of Artificial Sequence: Synthetic oligonucleotide
caucaaucagcucaguaag

SEQ ID NO: 2458778 - RNA, 19 nt, Artificial Sequence
  Description of Artificial Sequence: Synthetic oligonucleotide
uagaaagagcaaauacucc

SEQ ID NO: 2458779 - RNA, 19 nt, Artificial Sequence
  Description of Artificial Sequence: Synthetic oligonucleotide
aauagcucagggagggugc

SEQ ID NO: 2458780 - RNA, 19 nt, Artificial Sequence
  Description of Artificial Sequence: Synthetic oligonucleotide
ggauaaauaaucuuuaugu

SEQ ID NO: 2458781 - RNA, 19 nt, Artificial Sequence
  Description of Artificial Sequence: Synthetic oligonucleotide
uucaugguaaagauuugga

SEQ ID NO: 2458782 - RNA, 19 nt, Artificial Sequence
  Description of Artificial Sequence: Synthetic oligonucleotide
ucuauaugcuaaauguauc

SEQ ID NO: 2458783 - RNA, 19 nt, Artificial Sequence
  Description of Artificial Sequence: Synthetic oligonucleotide
uguuaaauguaagauacua

SEQ ID NO: 2458784 - RNA, 19 nt, Artificial Sequence
  Description of Artificial Sequence: Synthetic oligonucleotide
uaaucaauaugguggugag

SEQ ID NO: 2458785 - RNA, 19 nt, Artificial Sequence
  Description of Artificial Sequence: Synthetic oligonucleotide
aaccagcucaucuacggug

SEQ ID NO: 2458786 - RNA, 19 nt, Artificial Sequence
  Description of Artificial Sequence: Synthetic oligonucleotide
ugugaggauuaaaugagaa

SEQ ID NO: 2458787 - RNA, 19 nt, Artificial Sequence
  Description of Artificial Sequence: Synthetic oligonucleotide
cauuagauauuuuaaaucu

SEQ ID NO: 2458788 - RNA, 19 nt, Artificial Sequence
  Description of Artificial Sequence: Synthetic oligonucleotide
aauauccuguucuucugga

SEQ ID NO: 2458789 - RNA, 19 nt, Artificial Sequence
  Description of Artificial Sequence: Synthetic oligonucleotide
ugccgugacacugaaauag

SEQ ID NO: 2458790 - RNA, 19 nt, Artificial Sequence
  Description of Artificial Sequence: Synthetic oligonucleotide
aaucuuuaugugcuggaau

SEQ ID NO: 2458791 - RNA, 19 nt, Artificial Sequence
  Description of Artificial Sequence: Synthetic oligonucleotide
aggauucauucauucauuc

SEQ ID NO: 2458792 - RNA, 19 nt, Artificial Sequence
  Description of Artificial Sequence: Synthetic oligonucleotide
cucaguaagcacuuggcac

SEQ ID NO: 2458793 - RNA, 19 nt, Artificial Sequence
  Description of Artificial Sequence: Synthetic oligonucleotide
acuagaaagagcaaauacu

SEQ ID NO: 2458794 - RNA, 19 nt, Artificial Sequence
  Description of Artificial Sequence: Synthetic oligonucleotide
uuaauauccuguucuucug

SEQ ID NO: 2458795 - RNA, 19 nt, Artificial Sequence
  Description of Artificial Sequence: Synthetic oligonucleotide
uuuaugugcuggaaugcca

SEQ ID NO: 2458796 - RNA, 19 nt, Artificial Sequence
  Description of Artificial Sequence: Synthetic oligonucleotide
acacugaaauagcucaggg

SEQ ID NO: 2458797 - RNA, 19 nt, Artificial Sequence
  Description of Artificial Sequence: Synthetic oligonucleotide
aagccuaauuucugugagg

SEQ ID NO: 2458798 - RNA, 19 nt, Artificial Sequence
  Description of Artificial Sequence: Synthetic oligonucleotide
uguaucgccaugcagccuc

SEQ ID NO: 2458799 - RNA, 19 nt, Artificial Sequence
  Description of Artificial Sequence: Synthetic oligonucleotide
aaauagcucagggagggug

SEQ ID NO: 2458800 - RNA, 19 nt, Artificial Sequence
  Description of Artificial Sequence: Synthetic oligonucleotide
guaagcacuuggcacaucc

SEQ ID NO: 2458801 - RNA, 19 nt, Artificial Sequence
  Description of Artificial Sequence: Synthetic oligonucleotide
uuucuauaugcuaaaugua

SEQ ID NO: 2458802 - RNA, 19 nt, Artificial Sequence
  Description of Artificial Sequence: Synthetic oligonucleotide
ugacucaagguguucuggg

SEQ ID NO: 2458803 - RNA, 19 nt, Artificial Sequence
  Description of Artificial Sequence: Synthetic oligonucleotide
uacuaaucaauaugguggu

SEQ ID NO: 2458804 - RNA, 19 nt, Artificial Sequence
  Description of Artificial Sequence: Synthetic oligonucleotide
gauccuuguaaacagcaga

SEQ ID NO: 2458805 - RNA, 19 nt, Artificial Sequence
  Description of Artificial Sequence: Synthetic oligonucleotide
ucauucauucauucugccc

SEQ ID NO: 2458806 - RNA, 19 nt, Artificial Sequence
  Description of Artificial Sequence: Synthetic oligonucleotide
ucaugguaaagauuuggaa

SEQ ID NO: 2458807 - RNA, 19 nt, Artificial Sequence
  Description of Artificial Sequence: Synthetic oligonucleotide
gaaaacuagaaagagcaaa

SEQ ID NO: 2458808 - RNA, 19 nt, Artificial Sequence
  Description of Artificial Sequence: Synthetic oligonucleotide
aauccacgacuucaagcuc

SEQ ID NO: 2458809 - RNA, 19 nt, Artificial Sequence
  Description of Artificial Sequence: Synthetic oligonucleotide
ucaaucagcucaguaagca

SEQ ID NO: 2458810 - RNA, 19 nt, Artificial Sequence
  Description of Artificial Sequence: Synthetic oligonucleotide
aaucagcucaguaagcacu

SEQ ID NO: 2458811 - RNA, 19 nt, Artificial Sequence
  Description of Artificial Sequence: Synthetic oligonucleotide
uaaagauuuggaagacugu

SEQ ID NO: 2458812 - RNA, 19 nt, Artificial Sequence
  Description of Artificial Sequence: Synthetic oligonucleotide
ugaguuugucucuucgccc

SEQ ID NO: 2458813 - RNA, 19 nt, Artificial Sequence
  Description of Artificial Sequence: Synthetic oligonucleotide
uagauauuuuaaaucuguc

SEQ ID NO: 2458814 - RNA, 19 nt, Artificial Sequence
  Description of Artificial Sequence: Synthetic oligonucleotide
cugaaauagcucagggagg

SEQ ID NO: 2458815 - RNA, 19 nt, Artificial Sequence
  Description of Artificial Sequence: Synthetic oligonucleotide
gaauccacgacuucaagcu

SEQ ID NO: 2458816 - RNA, 19 nt, Artificial Sequence
  Description of Artificial Sequence: Synthetic oligonucleotide
uacagucucuccuggaagc

SEQ ID NO: 2458817 - RNA, 19 nt, Artificial Sequence
  Description of Artificial Sequence: Synthetic oligonucleotide
cauucauucugcccuacag

SEQ ID NO: 2458818 - RNA, 19 nt, Artificial Sequence
  Description of Artificial Sequence: Synthetic oligonucleotide
uuagaauccacgacuucaa

SEQ ID NO: 2458819 - RNA, 19 nt, Artificial Sequence
  Description of Artificial Sequence: Synthetic oligonucleotide
gagauuucagcuuugaguu

SEQ ID NO: 2458820 - RNA, 19 nt, Artificial Sequence
  Description of Artificial Sequence: Synthetic oligonucleotide
aaucaauaugguggugagg

SEQ ID NO: 2458821 - RNA, 19 nt, Artificial Sequence
  Description of Artificial Sequence: Synthetic oligonucleotide
uagagauuucagcuuugag

SEQ ID NO: 2458822 - RNA, 19 nt, Artificial Sequence
  Description of Artificial Sequence: Synthetic oligonucleotide
cuuuguuagaauccacgac

SEQ ID NO: 2458823 - RNA, 19 nt, Artificial Sequence
  Description of Artificial Sequence: Synthetic oligonucleotide
uuuggaagacugugaaaca

SEQ ID NO: 2458824 - RNA, 19 nt, Artificial Sequence
  Description of Artificial Sequence: Synthetic oligonucleotide
uguuucaccaagccuaauu

SEQ ID NO: 2458825 - RNA, 19 nt, Artificial Sequence
  Description of Artificial Sequence: Synthetic oligonucleotide
aucaauugacucaaggugu

SEQ ID NO: 2458826 - RNA, 19 nt, Artificial Sequence
  Description of Artificial Sequence: Synthetic oligonucleotide
uggaagcuuuguuagaauc

SEQ ID NO: 2458827 - RNA, 19 nt, Artificial Sequence
  Description of Artificial Sequence: Synthetic oligonucleotide
ggaguauauggccuggagg

SEQ ID NO: 2458828 - RNA, 19 nt, Artificial Sequence
  Description of Artificial Sequence: Synthetic oligonucleotide
ugauccagugucucagucc

SEQ ID NO: 2458829 - RNA, 19 nt, Artificial Sequence
  Description of Artificial Sequence: Synthetic oligonucleotide
uuacuucaucaucaaucag

SEQ ID NO: 2458830 - RNA, 19 nt, Artificial Sequence
  Description of Artificial Sequence: Synthetic oligonucleotide
aagauccuuguaaacagca

SEQ ID NO: 2458831 - RNA, 19 nt, Artificial Sequence
  Description of Artificial Sequence: Synthetic oligonucleotide
acgacuucaagcucuccag

SEQ ID NO: 2458832 - RNA, 19 nt, Artificial Sequence
  Description of Artificial Sequence: Synthetic oligonucleotide
gacacugaaauagcucagg

SEQ ID NO: 2458833 - RNA, 19 nt, Artificial Sequence
  Description of Artificial Sequence: Synthetic oligonucleotide
agcuuuguuagaauccacg

SEQ ID NO: 2458834 - RNA, 19 nt, Artificial Sequence
  Description of Artificial Sequence: Synthetic oligonucleotide
caagccuaauuucugugag

SEQ ID NO: 2458835 - RNA, 19 nt, Artificial Sequence
  Description of Artificial Sequence: Synthetic oligonucleotide
uggcacaucccaucaauug

SEQ ID NO: 2458836 - RNA, 19 nt, Artificial Sequence
  Description of Artificial Sequence: Synthetic oligonucleotide
cacuccuagagauuucagc

SEQ ID NO: 2458837 - RNA, 19 nt, Artificial Sequence
  Description of Artificial Sequence: Synthetic oligonucleotide
ugcuaaauguaucgccaug

SEQ ID NO: 2458838 - RNA, 19 nt, Artificial Sequence
  Description of Artificial Sequence: Synthetic oligonucleotide
acugugaaacacugugcuc

SEQ ID NO: 2458839 - RNA, 19 nt, Artificial Sequence
  Description of Artificial Sequence: Synthetic oligonucleotide
ucaucuacggugccgugac

SEQ ID NO: 2458840 - RNA, 19 nt, Artificial Sequence
  Description of Artificial Sequence: Synthetic oligonucleotide
agaaucaccugagccgugc

SEQ ID NO: 2458841 - RNA, 19 nt, Artificial Sequence
  Description of Artificial Sequence: Synthetic oligonucleotide
cauaggaguauauggccug

SEQ ID NO: 2458842 - RNA, 19 nt, Artificial Sequence
  Description of Artificial Sequence: Synthetic oligonucleotide
auacuccugccacaucucg

SEQ ID NO: 2458843 - RNA, 19 nt, Artificial Sequence
  Description of Artificial Sequence: Synthetic oligonucleotide
gccagaaucaccugagccg

SEQ ID NO: 2458844 - RNA, 19 nt, Artificial Sequence
  Description of Artificial Sequence: Synthetic oligonucleotide
agacugugaaacacugugc

SEQ ID NO: 2458845 - RNA, 19 nt, Artificial Sequence
  Description of Artificial Sequence: Synthetic oligonucleotide
cuuuaugugcuggaaugcc

SEQ ID NO: 2458846 - RNA, 19 nt, Artificial Sequence
  Description of Artificial Sequence: Synthetic oligonucleotide
uuggauaaauaaucuuuau

SEQ ID NO: 2458847 - RNA, 19 nt, Artificial Sequence
  Description of Artificial Sequence: Synthetic oligonucleotide
uuguuaaauguaagauacu

SEQ ID NO: 2458848 - RNA, 19 nt, Artificial Sequence
  Description of Artificial Sequence: Synthetic oligonucleotide
aucuacggugccgugacac

SEQ ID NO: 2458849 - RNA, 19 nt, Artificial Sequence
  Description of Artificial Sequence: Synthetic oligonucleotide
gugggcgacagccauggcg

SEQ ID NO: 2458850 - RNA, 19 nt, Artificial Sequence
  Description of Artificial Sequence: Synthetic oligonucleotide
cuaaucaauauggugguga

SEQ ID NO: 2458851 - RNA, 19 nt, Artificial Sequence
  Description of Artificial Sequence: Synthetic oligonucleotide
agcucaguaagcacuuggc

SEQ ID NO: 2458852 - RNA, 19 nt, Artificial Sequence
  Description of Artificial Sequence: Synthetic oligonucleotide
uauuaauauccuguucuuc

SEQ ID NO: 2458853 - RNA, 19 nt, Artificial Sequence
  Description of Artificial Sequence: Synthetic oligonucleotide
uucugggcagucauuagau

SEQ ID NO: 2458854 - RNA, 19 nt, Artificial Sequence
  Description of Artificial Sequence: Synthetic oligonucleotide
uucgccccaggcaugaaga

SEQ ID NO: 2458855 - RNA, 19 nt, Artificial Sequence
  Description of Artificial Sequence: Synthetic oligonucleotide
aauacuccugccacaucuc

SEQ ID NO: 2458856 - RNA, 19 nt, Artificial Sequence
  Description of Artificial Sequence: Synthetic oligonucleotide
uauauggccuggagggagc

SEQ ID NO: 2458857 - RNA, 19 nt, Artificial Sequence
  Description of Artificial Sequence: Synthetic oligonucleotide
cauucauucauucugcccu

SEQ ID NO: 2458858 - RNA, 19 nt, Artificial Sequence
  Description of Artificial Sequence: Synthetic oligonucleotide
auugacucaagguguucug

SEQ ID NO: 2458859 - RNA, 19 nt, Artificial Sequence
  Description of Artificial Sequence: Synthetic oligonucleotide
aucagcgaggcgcuguguc

SEQ ID NO: 2458860 - RNA, 19 nt, Artificial Sequence
  Description of Artificial Sequence: Synthetic oligonucleotide
uuguuagaauccacgacuu

SEQ ID NO: 2458861 - RNA, 19 nt, Artificial Sequence
  Description of Artificial Sequence: Synthetic oligonucleotide
acacauuggagagcccucc

SEQ ID NO: 2458862 - RNA, 19 nt, Artificial Sequence
  Description of Artificial Sequence: Synthetic oligonucleotide
guaaacagcagacucuuua

SEQ ID NO: 2458863 - RNA, 19 nt, Artificial Sequence
  Description of Artificial Sequence: Synthetic oligonucleotide
aucaaucagcucaguaagc

SEQ ID NO: 2458864 - RNA, 19 nt, Artificial Sequence
  Description of Artificial Sequence: Synthetic oligonucleotide
ucgguguuuucuauaugcu

SEQ ID NO: 2458865 - RNA, 19 nt, Artificial Sequence
  Description of Artificial Sequence: Synthetic oligonucleotide
gacucaagguguucugggc

SEQ ID NO: 2458866 - RNA, 19 nt, Artificial Sequence
  Description of Artificial Sequence: Synthetic oligonucleotide
agccuaauuucugugagga

SEQ ID NO: 2458867 - RNA, 19 nt, Artificial Sequence
  Description of Artificial Sequence: Synthetic oligonucleotide
uuugucucuucgccccagg

SEQ ID NO: 2458868 - RNA, 19 nt, Artificial Sequence
  Description of Artificial Sequence: Synthetic oligonucleotide
aggaguauauggccuggag

SEQ ID NO: 2458869 - RNA, 19 nt, Artificial Sequence
  Description of Artificial Sequence: Synthetic oligonucleotide
gagagcccucccuucauag

SEQ ID NO: 2458870 - RNA, 19 nt, Artificial Sequence
  Description of Artificial Sequence: Synthetic oligonucleotide
ucaauugacucaagguguu

SEQ ID NO: 2458871 - RNA, 19 nt, Artificial Sequence
  Description of Artificial Sequence: Synthetic oligonucleotide
cauucugcccuacagucuc

SEQ ID NO: 2458872 - RNA, 19 nt, Artificial Sequence
  Description of Artificial Sequence: Synthetic oligonucleotide
accugagccgugcaggaag

SEQ ID NO: 2458873 - RNA, 19 nt, Artificial Sequence
  Description of Artificial Sequence: Synthetic oligonucleotide
ucauucugcccuacagucu

SEQ ID NO: 2458874 - RNA, 19 nt, Artificial Sequence
  Description of Artificial Sequence: Synthetic oligonucleotide
aagaaccagcucaucuacg

SEQ ID NO: 2458875 - RNA, 19 nt, Artificial Sequence
  Description of Artificial Sequence: Synthetic oligonucleotide
gucauuagauauuuuaaau

SEQ ID NO: 2458876 - RNA, 19 nt, Artificial Sequence
  Description of Artificial Sequence: Synthetic oligonucleotide
gacugugaaacacugugcu

SEQ ID NO: 2458877 - RNA, 19 nt, Artificial Sequence
  Description of Artificial Sequence: Synthetic oligonucleotide
accaagccuaauuucugug

SEQ ID NO: 2458878 - RNA, 19 nt, Artificial Sequence
  Description of Artificial Sequence: Synthetic oligonucleotide
cugugaaacacugugcuca

SEQ ID NO: 2458879 - RNA, 19 nt, Artificial Sequence
  Description of Artificial Sequence: Synthetic oligonucleotide
caucccaucaauugacuca

SEQ ID NO: 2458880 - RNA, 19 nt, Artificial Sequence
  Description of Artificial Sequence: Synthetic oligonucleotide
cuaauuucugugaggauua

SEQ ID NO: 2458881 - RNA, 19 nt, Artificial Sequence
  Description of Artificial Sequence: Synthetic oligonucleotide
ugguggugaggauucauuc

SEQ ID NO: 2458882 - RNA, 19 nt, Artificial Sequence
  Description of Artificial Sequence: Synthetic oligonucleotide
uaagcacuuggcacauccc

SEQ ID NO: 2458883 - RNA, 19 nt, Artificial Sequence
  Description of Artificial Sequence: Synthetic oligonucleotide
uuagcauguucuugaucca

SEQ ID NO: 2458884 - RNA, 19 nt, Artificial Sequence
  Description of Artificial Sequence: Synthetic oligonucleotide
aagucuugguuuagcaugu

SEQ ID NO: 2458885 - RNA, 19 nt, Artificial Sequence
  Description of Artificial Sequence: Synthetic oligonucleotide
guauauggccuggagggag

SEQ ID NO: 2458886 - RNA, 19 nt, Artificial Sequence
  Description of Artificial Sequence: Synthetic oligonucleotide
cagcucaguaagcacuugg

SEQ ID NO: 2458887 - RNA, 19 nt, Artificial Sequence
  Description of Artificial Sequence: Synthetic oligonucleotide
uuguucauuucaugguaaa

SEQ ID NO: 2458888 - RNA, 19 nt, Artificial Sequence
  Description of Artificial Sequence: Synthetic oligonucleotide
acugccgcaggugacccgc

SEQ ID NO: 2458889 - RNA, 19 nt, Artificial Sequence
  Description of Artificial Sequence: Synthetic oligonucleotide
ucacuccuagagauuucag

SEQ ID NO: 2458890 - RNA, 19 nt, Artificial Sequence
  Description of Artificial Sequence: Synthetic oligonucleotide
caaucagcucaguaagcac

SEQ ID NO: 2458891 - RNA, 19 nt, Artificial Sequence
  Description of Artificial Sequence: Synthetic oligonucleotide
ggggacaccacacacugcc

SEQ ID NO: 2458892 - RNA, 19 nt, Artificial Sequence
  Description of Artificial Sequence: Synthetic oligonucleotide
aucucgguguuuucuauau

SEQ ID NO: 2458893 - RNA, 19 nt, Artificial Sequence
  Description of Artificial Sequence: Synthetic oligonucleotide
gauccagugucucaguccu

SEQ ID NO: 2458894 - RNA, 19 nt, Artificial Sequence
  Description of Artificial Sequence: Synthetic oligonucleotide
uaaucuuuaugugcuggaa

SEQ ID NO: 2458895 - RNA, 19 nt, Artificial Sequence
  Description of Artificial Sequence: Synthetic oligonucleotide
ugugaaacacugugcucac

SEQ ID NO: 2458896 - RNA, 19 nt, Artificial Sequence
  Description of Artificial Sequence: Synthetic oligonucleotide
uguuagaauccacgacuuc

SEQ ID NO: 2458897 - RNA, 19 nt, Artificial Sequence
  Description of Artificial Sequence: Synthetic oligonucleotide
cagucauuagauauuuuaa

SEQ ID NO: 2458898 - RNA, 19 nt, Artificial Sequence
  Description of Artificial Sequence: Synthetic oligonucleotide
ucauucauucugcccuaca

SEQ ID NO: 2458899 - RNA, 19 nt, Artificial Sequence
  Description of Artificial Sequence: Synthetic oligonucleotide
ggaagcuuuguuagaaucc

SEQ ID NO: 2458900 - RNA, 19 nt, Artificial Sequence
  Description of Artificial Sequence: Synthetic oligonucleotide
uagcauguucuugauccag

SEQ ID NO: 2458901 - RNA, 19 nt, Artificial Sequence
  Description of Artificial Sequence: Synthetic oligonucleotide
auaggaguauauggccugg

SEQ ID NO: 2458902 - RNA, 19 nt, Artificial Sequence
  Description of Artificial Sequence: Synthetic oligonucleotide
gcuaaauguaucgccaugc

SEQ ID NO: 2458903 - RNA, 19 nt, Artificial Sequence
  Description of Artificial Sequence: Synthetic oligonucleotide
uuguaaacagcagacucuu

SEQ ID NO: 2458904 - RNA, 19 nt, Artificial Sequence
  Description of Artificial Sequence: Synthetic oligonucleotide
ccaggcaugaagaaccagc

SEQ ID NO: 2458905 - RNA, 19 nt, Artificial Sequence
  Description of Artificial Sequence: Synthetic oligonucleotide
aggcaugaagaaccagcuc

SEQ ID NO: 2458906 - RNA, 19 nt, Artificial Sequence
  Description of Artificial Sequence: Synthetic oligonucleotide
ugcccuacagucucuccug

SEQ ID NO: 2458907 - RNA, 19 nt, Artificial Sequence
  Description of Artificial Sequence: Synthetic oligonucleotide
caugcagccucccauagaa

SEQ ID NO: 2458908 - RNA, 19 nt, Artificial Sequence
  Description of Artificial Sequence: Synthetic oligonucleotide
agcucaguuuuguucauuu

SEQ ID NO: 2458909 - RNA, 19 nt, Artificial Sequence
  Description of Artificial Sequence: Synthetic oligonucleotide
agauacuaaucaauauggu

SEQ ID NO: 2458910 - RNA, 19 nt, Artificial Sequence
  Description of Artificial Sequence: Synthetic oligonucleotide
ucucgguguuuucuauaug

SEQ ID NO: 2458911 - RNA, 19 nt, Artificial Sequence
  Description of Artificial Sequence: Synthetic oligonucleotide
gagcccucccuucauagga

SEQ ID NO: 2458912 - RNA, 19 nt, Artificial Sequence
  Description of Artificial Sequence: Synthetic oligonucleotide
uguuuucuauaugcuaaau

SEQ ID NO: 2458913 - RNA, 19 nt, Artificial Sequence
  Description of Artificial Sequence: Synthetic oligonucleotide
cuaaauguaucgccaugca

SEQ ID NO: 2458914 - RNA, 19 nt, Artificial Sequence
  Description of Artificial Sequence: Synthetic oligonucleotide
ggccagaaucaccugagcc

SEQ ID NO: 2458915 - RNA, 19 nt, Artificial Sequence
  Description of Artificial Sequence: Synthetic oligonucleotide
aagaucagcgaggcgcugu

SEQ ID NO: 2458916 - RNA, 19 nt, Artificial Sequence
  Description of Artificial Sequence: Synthetic oligonucleotide
ggagccguuggauaaauaa

SEQ ID NO: 2458917 - RNA, 19 nt, Artificial Sequence
  Description of Artificial Sequence: Synthetic oligonucleotide
ggagggugcgcucagcuug

SEQ ID NO: 2458918 - RNA, 19 nt, Artificial Sequence
  Description of Artificial Sequence: Synthetic oligonucleotide
agcucuccagcucaguuuu

SEQ ID NO: 2458919 - RNA, 19 nt, Artificial Sequence
  Description of Artificial Sequence: Synthetic oligonucleotide
agccucccauagaaaaucc

SEQ ID NO: 2458920 - RNA, 19 nt, Artificial Sequence
  Description of Artificial Sequence: Synthetic oligonucleotide
cugugggcgacagccaugg

SEQ ID NO: 2458921 - RNA, 19 nt, Artificial Sequence
  Description of Artificial Sequence: Synthetic oligonucleotide
cccaucaauugacucaagg

SEQ ID NO: 2458922 - RNA, 19 nt, Artificial Sequence
  Description of Artificial Sequence: Synthetic oligonucleotide
uccuuguaaacagcagacu

SEQ ID NO: 2458923 - RNA, 19 nt, Artificial Sequence
  Description of Artificial Sequence: Synthetic oligonucleotide
agauccuuguaaacagcag

SEQ ID NO: 2458924 - RNA, 19 nt, Artificial Sequence
  Description of Artificial Sequence: Synthetic oligonucleotide
augcuaaauguaucgccau

SEQ ID NO: 2458925 - RNA, 19 nt, Artificial Sequence
  Description of Artificial Sequence: Synthetic oligonucleotide
ccuauuaauauccuguucu

SEQ ID NO: 2458926 - RNA, 19 nt, Artificial Sequence
  Description of Artificial Sequence: Synthetic oligonucleotide
ccgugcaggaagaucagcg

SEQ ID NO: 2458927 - RNA, 19 nt, Artificial Sequence
  Description of Artificial Sequence: Synthetic oligonucleotide
gugaggauucauucauuca

SEQ ID NO: 2458928 - RNA, 19 nt, Artificial Sequence
  Description of Artificial Sequence: Synthetic oligonucleotide
gcuuuguuagaauccacga

SEQ ID NO: 2458929 - RNA, 19 nt, Artificial Sequence
  Description of Artificial Sequence: Synthetic oligonucleotide
ugcucacuccuagagauuu

SEQ ID NO: 2458930 - RNA, 19 nt, Artificial Sequence
  Description of Artificial Sequence: Synthetic oligonucleotide
aggugacccgcgcuguggg

SEQ ID NO: 2458931 - RNA, 19 nt, Artificial Sequence
  Description of Artificial Sequence: Synthetic oligonucleotide
uacggugccgugacacuga

SEQ ID NO: 2458932 - RNA, 19 nt, Artificial Sequence
  Description of Artificial Sequence: Synthetic oligonucleotide
agaucagcgaggcgcugug

SEQ ID NO: 2458933 - RNA, 19 nt, Artificial Sequence
  Description of Artificial Sequence: Synthetic oligonucleotide
cagugucucaguccuuggc

SEQ ID NO: 2458934 - RNA, 19 nt, Artificial Sequence
  Description of Artificial Sequence: Synthetic oligonucleotide
agcgaggcgcugugucucc

SEQ ID NO: 2458935 - RNA, 19 nt, Artificial Sequence
  Description of Artificial Sequence: Synthetic oligonucleotide
ucuacggugccgugacacu

SEQ ID NO: 2458936 - RNA, 19 nt, Artificial Sequence
  Description of Artificial Sequence: Synthetic oligonucleotide
auauccuguucuucuggau

SEQ ID NO: 2458937 - RNA, 19 nt, Artificial Sequence
  Description of Artificial Sequence: Synthetic oligonucleotide
auuucaugguaaagauuug

SEQ ID NO: 2458938 - RNA, 19 nt, Artificial Sequence
  Description of Artificial Sequence: Synthetic oligonucleotide
cacgacuucaagcucucca

SEQ ID NO: 2458939 - RNA, 19 nt, Artificial Sequence
  Description of Artificial Sequence: Synthetic oligonucleotide
auagcucagggagggugcg

SEQ ID NO: 2458940 - RNA, 19 nt, Artificial Sequence
  Description of Artificial Sequence: Synthetic oligonucleotide
aucccaucaauugacucaa

SEQ ID NO: 2458941 - RNA, 19 nt, Artificial Sequence
  Description of Artificial Sequence: Synthetic oligonucleotide
ggugccgugacacugaaau

SEQ ID NO: 2458942 - RNA, 19 nt, Artificial Sequence
  Description of Artificial Sequence: Synthetic oligonucleotide
ggugcgcucagcuugcuga

SEQ ID NO: 2458943 - RNA, 19 nt, Artificial Sequence
  Description of Artificial Sequence: Synthetic oligonucleotide
acuaaucaauaugguggug

SEQ ID NO: 2458944 - RNA, 19 nt, Artificial Sequence
  Description of Artificial Sequence: Synthetic oligonucleotide
acacugccgcaggugaccc

SEQ ID NO: 2458945 - RNA, 19 nt, Artificial Sequence
  Description of Artificial Sequence: Synthetic oligonucleotide
uggccagaaucaccugagc

SEQ ID NO: 2458946 - RNA, 19 nt, Artificial Sequence
  Description of Artificial Sequence: Synthetic oligonucleotide
auucauucauucugcccua

SEQ ID NO: 2458947 - RNA, 19 nt, Artificial Sequence
  Description of Artificial Sequence: Synthetic oligonucleotide
gucuugguuuagcauguuc

SEQ ID NO: 2458948 - RNA, 19 nt, Artificial Sequence
  Description of Artificial Sequence: Synthetic oligonucleotide
acaucucgguguuuucuau

SEQ ID NO: 2458949 - RNA, 19 nt, Artificial Sequence
  Description of Artificial Sequence: Synthetic oligonucleotide
cuucgccccaggcaugaag

SEQ ID NO: 2458950 - RNA, 19 nt, Artificial Sequence
  Description of Artificial Sequence: Synthetic oligonucleotide
cacauuggagagcccuccc

SEQ ID NO: 2458951 - RNA, 19 nt, Artificial Sequence
  Description of Artificial Sequence: Synthetic oligonucleotide
gcugaagauccuuguaaac

SEQ ID NO: 2458952 - RNA, 19 nt, Artificial Sequence
  Description of Artificial Sequence: Synthetic oligonucleotide
cugugaggauuaaaugaga

SEQ ID NO: 2458953 - RNA, 19 nt, Artificial Sequence
  Description of Artificial Sequence: Synthetic oligonucleotide
agcucaucuacggugccgu

SEQ ID NO: 2458954 - RNA, 19 nt, Artificial Sequence
  Description of Artificial Sequence: Synthetic oligonucleotide
ucgccaugcagccucccau

SEQ ID NO: 2458955 - RNA, 19 nt, Artificial Sequence
  Description of Artificial Sequence: Synthetic oligonucleotide
cacacauuggagagcccuc

SEQ ID NO: 2458956 - RNA, 19 nt, Artificial Sequence
  Description of Artificial Sequence: Synthetic oligonucleotide
gguggugaggauucauuca

SEQ ID NO: 2458957 - RNA, 19 nt, Artificial Sequence
  Description of Artificial Sequence: Synthetic oligonucleotide
aguauauggccuggaggga

SEQ ID NO: 2458958 - RNA, 19 nt, Artificial Sequence
  Description of Artificial Sequence: Synthetic oligonucleotide
cagccucccauagaaaauc

SEQ ID NO: 2458959 - RNA, 19 nt, Artificial Sequence
  Description of Artificial Sequence: Synthetic oligonucleotide
uccacgacuucaagcucuc

SEQ ID NO: 2458960 - RNA, 19 nt, Artificial Sequence
  Description of Artificial Sequence: Synthetic oligonucleotide
agauuucagcuuugaguuu

SEQ ID NO: 2458961 - RNA, 19 nt, Artificial Sequence
  Description of Artificial Sequence: Synthetic oligonucleotide
ucugggcagucauuagaua

SEQ ID NO: 2458962 - RNA, 19 nt, Artificial Sequence
  Description of Artificial Sequence: Synthetic oligonucleotide
ucccuucauaggaguauau

SEQ ID NO: 2458963 - RNA, 19 nt, Artificial Sequence
  Description of Artificial Sequence: Synthetic oligonucleotide
cacacacugccgcagguga

SEQ ID NO: 2458964 - RNA, 19 nt, Artificial Sequence
  Description of Artificial Sequence: Synthetic oligonucleotide
agaaaacuagaaagagcaa

SEQ ID NO: 2458965 - RNA, 19 nt, Artificial Sequence
  Description of Artificial Sequence: Synthetic oligonucleotide
aguuugucucuucgcccca

SEQ ID NO: 2458966 - RNA, 19 nt, Artificial Sequence
  Description of Artificial Sequence: Synthetic oligonucleotide
cugggcagucauuagauau

SEQ ID NO: 2458967 - RNA, 19 nt, Artificial Sequence
  Description of Artificial Sequence: Synthetic oligonucleotide
cuacggugccgugacacug

SEQ ID NO: 2458968 - RNA, 19 nt, Artificial Sequence
  Description of Artificial Sequence: Synthetic oligonucleotide
gccccaggcaugaagaacc

SEQ ID NO: 2458969 - RNA, 19 nt, Artificial Sequence
  Description of Artificial Sequence: Synthetic oligonucleotide
ugagccgugcaggaagauc

SEQ ID NO: 2458970 - RNA, 19 nt, Artificial Sequence
  Description of Artificial Sequence: Synthetic oligonucleotide
uggugaggauucauucauu

SEQ ID NO: 2458971 - RNA, 19 nt, Artificial Sequence
  Description of Artificial Sequence: Synthetic oligonucleotide
ucccaucaauugacucaag

SEQ ID NO: 2458972 - RNA, 19 nt, Artificial Sequence
  Description of Artificial Sequence: Synthetic oligonucleotide
cucacuccuagagauuuca

SEQ ID NO: 2458973 - RNA, 19 nt, Artificial Sequence
  Description of Artificial Sequence: Synthetic oligonucleotide
uucauucauucugcccuac

SEQ ID NO: 2458974 - RNA, 19 nt, Artificial Sequence
  Description of Artificial Sequence: Synthetic oligonucleotide
gcagacucuuuauucagaa

SEQ ID NO: 2458975 - RNA, 19 nt, Artificial Sequence
  Description of Artificial Sequence: Synthetic oligonucleotide
caccacacacugccgcagg

SEQ ID NO: 2458976 - RNA, 19 nt, Artificial Sequence
  Description of Artificial Sequence: Synthetic oligonucleotide
uaggaguauauggccugga

SEQ ID NO: 2458977 - RNA, 19 nt, Artificial Sequence
  Description of Artificial Sequence: Synthetic oligonucleotide
gcucaguaagcacuuggca

SEQ ID NO: 2458978 - RNA, 19 nt, Artificial Sequence
  Description of Artificial Sequence: Synthetic oligonucleotide
aucgccaugcagccuccca

SEQ ID NO: 2458979 - RNA, 19 nt, Artificial Sequence
  Description of Artificial Sequence: Synthetic oligonucleotide
caggcaugaagaaccagcu

SEQ ID NO: 2458980 - RNA, 19 nt, Artificial Sequence
  Description of Artificial Sequence: Synthetic oligonucleotide
caaauacuccugccacauc

SEQ ID NO: 2458981 - RNA, 19 nt, Artificial Sequence
  Description of Artificial Sequence: Synthetic oligonucleotide
cacuuggcacaucccauca

SEQ ID NO: 2458982 - RNA, 19 nt, Artificial Sequence
  Description of Artificial Sequence: Synthetic oligonucleotide
cagcucaucuacggugccg

SEQ ID NO: 2458983 - RNA, 19 nt, Artificial Sequence
  Description of Artificial Sequence: Synthetic oligonucleotide
caugaagaaccagcucauc

SEQ ID NO: 2458984 - RNA, 19 nt, Artificial Sequence
  Description of Artificial Sequence: Synthetic oligonucleotide
uggagagcccucccuucau

SEQ ID NO: 2458985 - RNA, 19 nt, Artificial Sequence
  Description of Artificial Sequence: Synthetic oligonucleotide
ggagggagccguuggauaa

SEQ ID NO: 2458986 - RNA, 19 nt, Artificial Sequence
  Description of Artificial Sequence: Synthetic oligonucleotide
aguaagcacuuggcacauc

SEQ ID NO: 2458987 - RNA, 19 nt, Artificial Sequence
  Description of Artificial Sequence: Synthetic oligonucleotide
ucucaguccuuggccagaa

SEQ ID NO: 2458988 - RNA, 19 nt, Artificial Sequence
  Description of Artificial Sequence: Synthetic oligonucleotide
ggcgcugugucucccggcc

SEQ ID NO: 2458989 - RNA, 19 nt, Artificial Sequence
  Description of Artificial Sequence: Synthetic oligonucleotide
gagggugcgcucagcuugc

SEQ ID NO: 2458990 - RNA, 19 nt, Artificial Sequence
  Description of Artificial Sequence: Synthetic oligonucleotide
gcuggaaugccaagucuug

SEQ ID NO: 2458991 - RNA, 19 nt, Artificial Sequence
  Description of Artificial Sequence: Synthetic oligonucleotide
gaagaucagcgaggcgcug

SEQ ID NO: 2458992 - RNA, 19 nt, Artificial Sequence
  Description of Artificial Sequence: Synthetic oligonucleotide
ccaucaauugacucaaggu

SEQ ID NO: 2458993 - RNA, 19 nt, Artificial Sequence
  Description of Artificial Sequence: Synthetic oligonucleotide
cuuggcacaucccaucaau

SEQ ID NO: 2458994 - RNA, 19 nt, Artificial Sequence
  Description of Artificial Sequence: Synthetic oligonucleotide
ugcgcucagcuugcugaag

SEQ ID NO: 2458995 - RNA, 19 nt, Artificial Sequence
  Description of Artificial Sequence: Synthetic oligonucleotide
ugacccgcgcugugggcga

SEQ ID NO: 2458996 - RNA, 19 nt, Artificial Sequence
  Description of Artificial Sequence: Synthetic oligonucleotide
cucaucuacggugccguga

SEQ ID NO: 2458997 - RNA, 19 nt, Artificial Sequence
  Description of Artificial Sequence: Synthetic oligonucleotide
agucucuccuggaagcuuu

SEQ ID NO: 2458998 - RNA, 19 nt, Artificial Sequence
  Description of Artificial Sequence: Synthetic oligonucleotide
cccuauuaauauccuguuc

SEQ ID NO: 2458999 - RNA, 19 nt, Artificial Sequence
  Description of Artificial Sequence: Synthetic oligonucleotide
ccaagccuaauuucuguga

SEQ ID NO: 2459000 - RNA, 19 nt, Artificial Sequence
  Description of Artificial Sequence: Synthetic oligonucleotide
gaagacugugaaacacugu

SEQ ID NO: 2459001 - RNA, 19 nt, Artificial Sequence
  Description of Artificial Sequence: Synthetic oligonucleotide
ugccgcaggugacccgcgc

SEQ ID NO: 2459002 - RNA, 19 nt, Artificial Sequence
  Description of Artificial Sequence: Synthetic oligonucleotide
cauguucuugauccagugu

SEQ ID NO: 2459003 - RNA, 19 nt, Artificial Sequence
  Description of Artificial Sequence: Synthetic oligonucleotide
cagaaucaccugagccgug

SEQ ID NO: 2459004 - RNA, 19 nt, Artificial Sequence
  Description of Artificial Sequence: Synthetic oligonucleotide
ccuagagauuucagcuuug

SEQ ID NO: 2459005 - RNA, 19 nt, Artificial Sequence
  Description of Artificial Sequence: Synthetic oligonucleotide
accacacauuggagagccc

SEQ ID NO: 2459006 - RNA, 19 nt, Artificial Sequence
  Description of Artificial Sequence: Synthetic oligonucleotide
ccggggacaccacacacug

SEQ ID NO: 2459007 - RNA, 19 nt, Artificial Sequence
  Description of Artificial Sequence: Synthetic oligonucleotide
gaggauucauucauucauu

SEQ ID NO: 2459008 - RNA, 19 nt, Artificial Sequence
  Description of Artificial Sequence: Synthetic oligonucleotide
caucucgguguuuucuaua

SEQ ID NO: 2459009 - RNA, 19 nt, Artificial Sequence
  Description of Artificial Sequence: Synthetic oligonucleotide
auaugguggugaggauuca

SEQ ID NO: 2459010 - RNA, 19 nt, Artificial Sequence
  Description of Artificial Sequence: Synthetic oligonucleotide
ugugggcgacagccauggc

SEQ ID NO: 2459011 - RNA, 19 nt, Artificial Sequence
  Description of Artificial Sequence: Synthetic oligonucleotide
gcccuacagucucuccugg

SEQ ID NO: 2459012 - RNA, 19 nt, Artificial Sequence
  Description of Artificial Sequence: Synthetic oligonucleotide
caccaagccuaauuucugu

SEQ ID NO: 2459013 - RNA, 19 nt, Artificial Sequence
  Description of Artificial Sequence: Synthetic oligonucleotide
cacugccgcaggugacccg

SEQ ID NO: 2459014 - RNA, 19 nt, Artificial Sequence
  Description of Artificial Sequence: Synthetic oligonucleotide
caauaugguggugaggauu

SEQ ID NO: 2459015 - RNA, 19 nt, Artificial Sequence
  Description of Artificial Sequence: Synthetic oligonucleotide
ugucucccggccggggaca

SEQ ID NO: 2459016 - RNA, 19 nt, Artificial Sequence
  Description of Artificial Sequence: Synthetic oligonucleotide
ccagugucucaguccuugg

SEQ ID NO: 2459017 - RNA, 19 nt, Artificial Sequence
  Description of Artificial Sequence: Synthetic oligonucleotide
cccuucauaggaguauaug

SEQ ID NO: 2459018 - RNA, 19 nt, Artificial Sequence
  Description of Artificial Sequence: Synthetic oligonucleotide
gccgugacacugaaauagc

SEQ ID NO: 2459019 - RNA, 19 nt, Artificial Sequence
  Description of Artificial Sequence: Synthetic oligonucleotide
aucugucaaaccacacauu

SEQ ID NO: 2459020 - RNA, 19 nt, Artificial Sequence
  Description of Artificial Sequence: Synthetic oligonucleotide
cguuggauaaauaaucuuu

SEQ ID NO: 2459021 - RNA, 19 nt, Artificial Sequence
  Description of Artificial Sequence: Synthetic oligonucleotide
uaucgccaugcagccuccc

SEQ ID NO: 2459022 - RNA, 19 nt, Artificial Sequence
  Description of Artificial Sequence: Synthetic oligonucleotide
guaucgccaugcagccucc

SEQ ID NO: 2459023 - RNA, 19 nt, Artificial Sequence
  Description of Artificial Sequence: Synthetic oligonucleotide
cagcgaggcgcugugucuc

SEQ ID NO: 2459024 - RNA, 19 nt, Artificial Sequence
  Description of Artificial Sequence: Synthetic oligonucleotide
cugcccuacagucucuccu

SEQ ID NO: 2459025 - RNA, 19 nt, Artificial Sequence
  Description of Artificial Sequence: Synthetic oligonucleotide
gggacaccacacacugccg

SEQ ID NO: 2459026 - RNA, 19 nt, Artificial Sequence
  Description of Artificial Sequence: Synthetic oligonucleotide
gcgcucagcuugcugaaga

SEQ ID NO: 2459027 - RNA, 19 nt, Artificial Sequence
  Description of Artificial Sequence: Synthetic oligonucleotide
auguaucgccaugcagccu

SEQ ID NO: 2459028 - RNA, 19 nt, Artificial Sequence
  Description of Artificial Sequence: Synthetic oligonucleotide
cugugucucccggccgggg

SEQ ID NO: 2459029 - RNA, 19 nt, Artificial Sequence
  Description of Artificial Sequence: Synthetic oligonucleotide
agggagccguuggauaaau

SEQ ID NO: 2459030 - RNA, 19 nt, Artificial Sequence
  Description of Artificial Sequence: Synthetic oligonucleotide
acggugccgugacacugaa

SEQ ID NO: 2459031 - RNA, 19 nt, Artificial Sequence
  Description of Artificial Sequence: Synthetic oligonucleotide
cugccgcaggugacccgcg

SEQ ID NO: 2459032 - RNA, 19 nt, Artificial Sequence
  Description of Artificial Sequence: Synthetic oligonucleotide
cauuggagagcccucccuu

SEQ ID NO: 2459033 - RNA, 19 nt, Artificial Sequence
  Description of Artificial Sequence: Synthetic oligonucleotide
gccguuggauaaauaaucu

SEQ ID NO: 2459034 - RNA, 19 nt, Artificial Sequence
  Description of Artificial Sequence: Synthetic oligonucleotide
gaaauagcucagggagggu

SEQ ID NO: 2459035 - RNA, 19 nt, Artificial Sequence
  Description of Artificial Sequence: Synthetic oligonucleotide
caagcucuccagcucaguu

SEQ ID NO: 2459036 - RNA, 19 nt, Artificial Sequence
  Description of Artificial Sequence: Synthetic oligonucleotide
cucuucgccccaggcauga

SEQ ID NO: 2459037 - RNA, 19 nt, Artificial Sequence
  Description of Artificial Sequence: Synthetic oligonucleotide
cucccuucauaggaguaua

SEQ ID NO: 2459038 - RNA, 19 nt, Artificial Sequence
  Description of Artificial Sequence: Synthetic oligonucleotide
auucugcccuacagucucu

SEQ ID NO: 2459039 - RNA, 19 nt, Artificial Sequence
  Description of Artificial Sequence: Synthetic oligonucleotide
gagggagccguuggauaaa

SEQ ID NO: 2459040 - RNA, 19 nt, Artificial Sequence
  Description of Artificial Sequence: Synthetic oligonucleotide
gugcgcucagcuugcugaa

SEQ ID NO: 2459041 - RNA, 19 nt, Artificial Sequence
  Description of Artificial Sequence: Synthetic oligonucleotide
gugccgugacacugaaaua

SEQ ID NO: 2459042 - RNA, 19 nt, Artificial Sequence
  Description of Artificial Sequence: Synthetic oligonucleotide
ggaagaucagcgaggcgcu

SEQ ID NO: 2459043 - RNA, 19 nt, Artificial Sequence
  Description of Artificial Sequence: Synthetic oligonucleotide
gcgcugugucucccggccg

SEQ ID NO: 2459044 - RNA, 19 nt, Artificial Sequence
  Description of Artificial Sequence: Synthetic oligonucleotide
cgcugugucucccggccgg

SEQ ID NO: 2459045 - RNA, 19 nt, Artificial Sequence
  Description of Artificial Sequence: Synthetic oligonucleotide
agucuugguuuagcauguu

SEQ ID NO: 2459046 - RNA, 19 nt, Artificial Sequence
  Description of Artificial Sequence: Synthetic oligonucleotide
gcaggugacccgcgcugug

SEQ ID NO: 2459047 - RNA, 19 nt, Artificial Sequence
  Description of Artificial Sequence: Synthetic oligonucleotide
gcucaucuacggugccgug

SEQ ID NO: 2459048 - RNA, 19 nt, Artificial Sequence
  Description of Artificial Sequence: Synthetic oligonucleotide
caucuacggugccgugaca

SEQ ID NO: 2459049 - RNA, 19 nt, Artificial Sequence
  Description of Artificial Sequence: Synthetic oligonucleotide
ccagaaucaccugagccgu

SEQ ID NO: 2459050 - RNA, 19 nt, Artificial Sequence
  Description of Artificial Sequence: Synthetic oligonucleotide
ccugagccgugcaggaaga

SEQ ID NO: 2459051 - RNA, 19 nt, Artificial Sequence
  Description of Artificial Sequence: Synthetic oligonucleotide
gcugugggcgacagccaug

SEQ ID NO: 2459052 - RNA, 19 nt, Artificial Sequence
  Description of Artificial Sequence: Synthetic oligonucleotide
ggagagcccucccuucaua

SEQ ID NO: 2459053 - RNA, 19 nt, Artificial Sequence
  Description of Artificial Sequence: Synthetic oligonucleotide
ucuucgccccaggcaugaa

SEQ ID NO: 2459054 - RNA, 19 nt, Artificial Sequence
  Description of Artificial Sequence: Synthetic oligonucleotide
ucucccggccggggacacc

SEQ ID NO: 2459055 - RNA, 19 nt, Artificial Sequence
  Description of Artificial Sequence: Synthetic oligonucleotide
cgaggcgcugugucucccg

SEQ ID NO: 2459056 - RNA, 19 nt, Artificial Sequence
  Description of Artificial Sequence: Synthetic oligonucleotide
gaucagcgaggcgcugugu

SEQ ID NO: 2459057 - RNA, 19 nt, Artificial Sequence
  Description of Artificial Sequence: Synthetic oligonucleotide
ccacacauuggagagcccu

SEQ ID NO: 2459058 - RNA, 19 nt, Artificial Sequence
  Description of Artificial Sequence: Synthetic oligonucleotide
ccgugacacugaaauagcu

SEQ ID NO: 2459059 - RNA, 19 nt, Artificial Sequence
  Description of Artificial Sequence: Synthetic oligonucleotide
ccuggagggagccguugga

SEQ ID NO: 2459060 - RNA, 19 nt, Artificial Sequence
  Description of Artificial Sequence: Synthetic oligonucleotide
gggcagucauuagauauuu

SEQ ID NO: 2459061 - RNA, 19 nt, Artificial Sequence
  Description of Artificial Sequence: Synthetic oligonucleotide
ccaugcagccucccauaga

SEQ ID NO: 2459062 - RNA, 19 nt, Artificial Sequence
  Description of Artificial Sequence: Synthetic oligonucleotide
ccguuggauaaauaaucuu

SEQ ID NO: 2459063 - RNA, 19 nt, Artificial Sequence
  Description of Artificial Sequence: Synthetic oligonucleotide
agggugcgcucagcuugcu

SEQ ID NO: 2459064 - RNA, 19 nt, Artificial Sequence
  Description of Artificial Sequence: Synthetic oligonucleotide
ccccuauuaauauccuguu

SEQ ID NO: 2459065 - RNA, 19 nt, Artificial Sequence
  Description of Artificial Sequence: Synthetic oligonucleotide
ccacgacuucaagcucucc

SEQ ID NO: 2459066 - RNA, 19 nt, Artificial Sequence
  Description of Artificial Sequence: Synthetic oligonucleotide
caccugagccgugcaggaa

SEQ ID NO: 2459067 - RNA, 19 nt, Artificial Sequence
  Description of Artificial Sequence: Synthetic oligonucleotide
gacccgcgcugugggcgac

SEQ ID NO: 2459068 - RNA, 19 nt, Artificial Sequence
  Description of Artificial Sequence: Synthetic oligonucleotide
gcccucccuucauaggagu

SEQ ID NO: 2459069 - RNA, 19 nt, Artificial Sequence
  Description of Artificial Sequence: Synthetic oligonucleotide
cagcuugcugaagauccuu

SEQ ID NO: 2459070 - RNA, 19 nt, Artificial Sequence
  Description of Artificial Sequence: Synthetic oligonucleotide
gcgaggcgcugugucuccc

SEQ ID NO: 2459071 - RNA, 19 nt, Artificial Sequence
  Description of Artificial Sequence: Synthetic oligonucleotide
cccucccuucauaggagua

SEQ ID NO: 2459072 - RNA, 19 nt, Artificial Sequence
  Description of Artificial Sequence: Synthetic oligonucleotide
gccgcaggugacccgcgcu

SEQ ID NO: 2459073 - RNA, 19 nt, Artificial Sequence
  Description of Artificial Sequence: Synthetic oligonucleotide
acccgcgcugugggcgaca

SEQ ID NO: 2459074 - RNA, 19 nt, Artificial Sequence
  Description of Artificial Sequence: Synthetic oligonucleotide
gugcucacuccuagagauu

SEQ ID NO: 2459075 - RNA, 19 nt, Artificial Sequence
  Description of Artificial Sequence: Synthetic oligonucleotide
cccgcgcugugggcgacag

SEQ ID NO: 2459076 - RNA, 19 nt, Artificial Sequence
  Description of Artificial Sequence: Synthetic oligonucleotide
gggagccguuggauaaaua

SEQ ID NO: 2459077 - RNA, 19 nt, Artificial Sequence
  Description of Artificial Sequence: Synthetic oligonucleotide
ggcagucauuagauauuuu

SEQ ID NO: 2459078 - RNA, 19 nt, Artificial Sequence
  Description of Artificial Sequence: Synthetic oligonucleotide
cuguuucaccaagccuaau

SEQ ID NO: 2459079 - RNA, 19 nt, Artificial Sequence
  Description of Artificial Sequence: Synthetic oligonucleotide
cugagccgugcaggaagau

SEQ ID NO: 2459080 - RNA, 19 nt, Artificial Sequence
  Description of Artificial Sequence: Synthetic oligonucleotide
cgccaugcagccucccaua

SEQ ID NO: 2459081 - RNA, 19 nt, Artificial Sequence
  Description of Artificial Sequence: Synthetic oligonucleotide
cgcugugggcgacagccau

SEQ ID NO: 2459082 - RNA, 19 nt, Artificial Sequence
  Description of Artificial Sequence: Synthetic oligonucleotide
cggugccgugacacugaaa

SEQ ID NO: 2459083 - RNA, 19 nt, Artificial Sequence
  Description of Artificial Sequence: Synthetic oligonucleotide
cgcaggugacccgcgcugu

SEQ ID NO: 2459084 - RNA, 19 nt, Artificial Sequence
  Description of Artificial Sequence: Synthetic oligonucleotide
ugagucugucugcaaaacc

SEQ ID NO: 2459085 - RNA, 19 nt, Artificial Sequence
  Description of Artificial Sequence: Synthetic oligonucleotide
aggcgaacugacuguaccc

SEQ ID NO: 2459086 - RNA, 19 nt, Artificial Sequence
  Description of Artificial Sequence: Synthetic oligonucleotide
uaggcgaacugacuguacc

SEQ ID NO: 2459087 - RNA, 19 nt, Artificial Sequence
  Description of Artificial Sequence: Synthetic oligonucleotide
ucgauccucggauucucgg

SEQ ID NO: 2459088 - RNA, 19 nt, Artificial Sequence
  Description of Artificial Sequence: Synthetic oligonucleotide
gagucugucugcaaaacca

SEQ ID NO: 2459089 - RNA, 19 nt, Artificial Sequence
  Description of Artificial Sequence: Synthetic oligonucleotide
gaacugacuguacccgcgg

SEQ ID NO: 2459090 - RNA, 19 nt, Artificial Sequence
  Description of Artificial Sequence: Synthetic oligonucleotide
ucucccucucccaauacuc

SEQ ID NO: 2459091 - RNA, 19 nt, Artificial Sequence
  Description of Artificial Sequence: Synthetic oligonucleotide
ucccucucccaauacuccg

SEQ ID NO: 2459092 - RNA, 19 nt, Artificial Sequence
  Description of Artificial Sequence: Synthetic oligonucleotide
aacugacuguacccgcgga

SEQ ID NO: 2459093 - RNA, 19 nt, Artificial Sequence
  Description of Artificial Sequence: Synthetic oligonucleotide
cucccucucccaauacucc

SEQ ID NO: 2459094 - RNA, 19 nt, Artificial Sequence
  Description of Artificial Sequence: Synthetic oligonucleotide
aggcccugagucugucugc

SEQ ID NO: 2459095 - RNA, 19 nt, Artificial Sequence
  Description of Artificial Sequence: Synthetic oligonucleotide
cucgauccucggauucucg

SEQ ID NO: 2459096 - RNA, 19 nt, Artificial Sequence
  Description of Artificial Sequence: Synthetic oligonucleotide
ggcgaacugacuguacccg

SEQ ID NO: 2459097 - RNA, 19 nt, Artificial Sequence
  Description of Artificial Sequence: Synthetic oligonucleotide
uuggcguuccgcgucuccc

SEQ ID NO: 2459098 - RNA, 19 nt, Artificial Sequence
  Description of Artificial Sequence: Synthetic oligonucleotide
cugagucugucugcaaaac

SEQ ID NO: 2459099 - RNA, 19 nt, Artificial Sequence
  Description of Artificial Sequence: Synthetic oligonucleotide
cuuggcguuccgcgucucc

SEQ ID NO: 2459100 - RNA, 19 nt, Artificial Sequence
  Description of Artificial Sequence: Synthetic oligonucleotide
cgaacugacuguacccgcg

SEQ ID NO: 2459101 - RNA, 19 nt, Artificial Sequence
  Description of Artificial Sequence: Synthetic oligonucleotide
uggcguuccgcgucucccu

SEQ ID NO: 2459102 - RNA, 19 nt, Artificial Sequence
  Description of Artificial Sequence: Synthetic oligonucleotide
gcgaacugacuguacccgc

SEQ ID NO: 2459103 - RNA, 19 nt, Artificial Sequence
  Description of Artificial Sequence: Synthetic oligonucleotide
ggcucccucggucauucug

SEQ ID NO: 2459104 - RNA, 19 nt, Artificial Sequence
  Description of Artificial Sequence: Synthetic oligonucleotide
gcucccucggucauucugc

SEQ ID NO: 2459105 - RNA, 19 nt, Artificial Sequence
  Description of Artificial Sequence: Synthetic oligonucleotide
guaggcgaacugacuguac

SEQ ID NO: 2459106 - RNA, 19 nt, Artificial Sequence
  Description of Artificial Sequence: Synthetic oligonucleotide
cgauccucggauucucggc

SEQ ID NO: 2459107 - RNA, 19 nt, Artificial Sequence
  Description of Artificial Sequence: Synthetic oligonucleotide
ugaggcucccucggucauu

SEQ ID NO: 2459108 - RNA, 19 nt, Artificial Sequence
  Description of Artificial Sequence: Synthetic oligonucleotide
gcucgauccucggauucuc

SEQ ID NO: 2459109 - RNA, 19 nt, Artificial Sequence
  Description of Artificial Sequence: Synthetic oligonucleotide
ggcguuccgcgucucccuc

SEQ ID NO: 2459110 - RNA, 19 nt, Artificial Sequence
  Description of Artificial Sequence: Synthetic oligonucleotide
aggcucccucggucauucu

SEQ ID NO: 2459111 - RNA, 19 nt, Artificial Sequence
  Description of Artificial Sequence: Synthetic oligonucleotide
ggcucgauccucggauucu

SEQ ID NO: 2459112 - RNA, 19 nt, Artificial Sequence
  Description of Artificial Sequence: Synthetic oligonucleotide
cggcucgauccucggauuc

SEQ ID NO: 2459113 - RNA, 19 nt, Artificial Sequence
  Description of Artificial Sequence: Synthetic oligonucleotide
cguuccgcgucucccucuc

SEQ ID NO: 2459114 - RNA, 19 nt, Artificial Sequence
  Description of Artificial Sequence: Synthetic oligonucleotide
gcguuccgcgucucccucu

SEQ ID NO: 2459115 - RNA, 19 nt, Artificial Sequence
  Description of Artificial Sequence: Synthetic oligonucleotide
gcggcucgauccucggauu

SEQ ID NO: 2459116 - RNA, 19 nt, Artificial Sequence
  Description of Artificial Sequence: Synthetic oligonucleotide
cgcggcucgauccucggau

SEQ ID NO: 2459117 - RNA, 19 nt, Artificial Sequence
  Description of Artificial Sequence: Synthetic oligonucleotide
ccuuggcguuccgcgucuc

SEQ ID NO: 2459118 - RNA, 19 nt, Artificial Sequence
  Description of Artificial Sequence: Synthetic oligonucleotide
cccuuggcguuccgcgucu

SEQ ID NO: 2459119 - RNA, 19 nt, Artificial Sequence
  Description of Artificial Sequence: Synthetic oligonucleotide
aauucgauuggcuacccuc

SEQ ID NO: 2459120 - RNA, 19 nt, Artificial Sequence
  Description of Artificial Sequence: Synthetic oligonucleotide
aagguaaccuuccaacucg

SEQ ID NO: 2459121 - RNA, 19 nt, Artificial Sequence
  Description of Artificial Sequence: Synthetic oligonucleotide
uuaucaaacccucugaauc

SEQ ID NO: 2459122 - RNA, 19 nt, Artificial Sequence
  Description of Artificial Sequence: Synthetic oligonucleotide
aaaacuggacgccagguug

SEQ ID NO: 2459123 - RNA, 19 nt, Artificial Sequence
  Description of Artificial Sequence: Synthetic oligonucleotide
uuucgaucccuucagacag

SEQ ID NO: 2459124 - RNA, 19 nt, Artificial Sequence
  Description of Artificial Sequence: Synthetic oligonucleotide
agaaauuguggucgaaacc

SEQ ID NO: 2459125 - RNA, 19 nt, Artificial Sequence
  Description of Artificial Sequence: Synthetic oligonucleotide
uucuuuaagcaacagagaa

SEQ ID NO: 2459126 - RNA, 19 nt, Artificial Sequence
  Description of Artificial Sequence: Synthetic oligonucleotide
uccuuuggcaauucgauug

SEQ ID NO: 2459127 - RNA, 19 nt, Artificial Sequence
  Description of Artificial Sequence: Synthetic oligonucleotide
guaggguugcuucugaagg

SEQ ID NO: 2459128 - RNA, 19 nt, Artificial Sequence
  Description of Artificial Sequence: Synthetic oligonucleotide
ucugaauccuccauggaga

SEQ ID NO: 2459129 - RNA, 19 nt, Artificial Sequence
  Description of Artificial Sequence: Synthetic oligonucleotide
uauacuuccaggacccucc

SEQ ID NO: 2459130 - RNA, 19 nt, Artificial Sequence
  Description of Artificial Sequence: Synthetic oligonucleotide
gaaauuguggucgaaacca

SEQ ID NO: 2459131 - RNA, 19 nt, Artificial Sequence
  Description of Artificial Sequence: Synthetic oligonucleotide
ucagucuucuuuaagcaac

SEQ ID NO: 2459132 - RNA, 19 nt, Artificial Sequence
  Description of Artificial Sequence: Synthetic oligonucleotide
acucgagagaacuggacac

SEQ ID NO: 2459133 - RNA, 19 nt, Artificial Sequence
  Description of Artificial Sequence: Synthetic oligonucleotide
uguaaaacuggacgccagg

SEQ ID NO: 2459134 - RNA, 19 nt, Artificial Sequence
  Description of Artificial Sequence: Synthetic oligonucleotide
auuggcuacccucccaacc

SEQ ID NO: 2459135 - RNA, 19 nt, Artificial Sequence
  Description of Artificial Sequence: Synthetic oligonucleotide
augauguccacggucagcc

SEQ ID NO: 2459136 - RNA, 19 nt, Artificial Sequence
  Description of Artificial Sequence: Synthetic oligonucleotide
acaugcagagcagugaucg

SEQ ID NO: 2459137 - RNA, 19 nt, Artificial Sequence
  Description of Artificial Sequence: Synthetic oligonucleotide
uuucuuucgaucccuucag

SEQ ID NO: 2459138 - RNA, 19 nt, Artificial Sequence
  Description of Artificial Sequence: Synthetic oligonucleotide
cagacagaaauuguggucg

SEQ ID NO: 2459139 - RNA, 19 nt, Artificial Sequence
  Description of Artificial Sequence: Synthetic oligonucleotide
ucuuuaagcaacagagaac

SEQ ID NO: 2459140 - RNA, 19 nt, Artificial Sequence
  Description of Artificial Sequence: Synthetic oligonucleotide
gaauccuccauggagacug

SEQ ID NO: 2459141 - RNA, 19 nt, Artificial Sequence
  Description of Artificial Sequence: Synthetic oligonucleotide
gacuucuccacucuugccc

SEQ ID NO: 2459142 - RNA, 19 nt, Artificial Sequence
  Description of Artificial Sequence: Synthetic oligonucleotide
ucuccaaacacgguucugg

SEQ ID NO: 2459143 - RNA, 19 nt, Artificial Sequence
  Description of Artificial Sequence: Synthetic oligonucleotide
aaaccagagugcuuggggu

SEQ ID NO: 2459144 - RNA, 19 nt, Artificial Sequence
  Description of Artificial Sequence: Synthetic oligonucleotide
uuccaacucggcaaagccg

SEQ ID NO: 2459145 - RNA, 19 nt, Artificial Sequence
  Description of Artificial Sequence: Synthetic oligonucleotide
cugauugaccgcaucaggc

SEQ ID NO: 2459146 - RNA, 19 nt, Artificial Sequence
  Description of Artificial Sequence: Synthetic oligonucleotide
uccaacucggcaaagccga

SEQ ID NO: 2459147 - RNA, 19 nt, Artificial Sequence
  Description of Artificial Sequence: Synthetic oligonucleotide
aaagccgagcaccacgucu

SEQ ID NO: 2459148 - RNA, 19 nt, Artificial Sequence
  Description of Artificial Sequence: Synthetic oligonucleotide
caguuuugagucucgaggc

SEQ ID NO: 2459149 - RNA, 19 nt, Artificial Sequence
  Description of Artificial Sequence: Synthetic oligonucleotide
uguacuccuccccaggccc

SEQ ID NO: 2459150 - RNA, 19 nt, Artificial Sequence
  Description of Artificial Sequence: Synthetic oligonucleotide
ugauugaccgcaucaggcc

SEQ ID NO: 2459151 - RNA, 19 nt, Artificial Sequence
  Description of Artificial Sequence: Synthetic oligonucleotide
auuguggucgaaaccaugg

SEQ ID NO: 2459152 - RNA, 19 nt, Artificial Sequence
  Description of Artificial Sequence: Synthetic oligonucleotide
uucagacagaaauuguggu

SEQ ID NO: 2459153 - RNA, 19 nt, Artificial Sequence
  Description of Artificial Sequence: Synthetic oligonucleotide
acugacucgagagaacugg

SEQ ID NO: 2459154 - RNA, 19 nt, Artificial Sequence
  Description of Artificial Sequence: Synthetic oligonucleotide
uaaccuuccaacucggcaa

SEQ ID NO: 2459155 - RNA, 19 nt, Artificial Sequence
  Description of Artificial Sequence: Synthetic oligonucleotide
ugaagguaaccuuccaacu

SEQ ID NO: 2459156 - RNA, 19 nt, Artificial Sequence
  Description of Artificial Sequence: Synthetic oligonucleotide
cucugaauccuccauggag

SEQ ID NO: 2459157 - RNA, 19 nt, Artificial Sequence
  Description of Artificial Sequence: Synthetic oligonucleotide
ucuuucgaucccuucagac

SEQ ID NO: 2459158 - RNA, 19 nt, Artificial Sequence
  Description of Artificial Sequence: Synthetic oligonucleotide
uccaaaguaggguugcuuc

SEQ ID NO: 2459159 - RNA, 19 nt, Artificial Sequence
  Description of Artificial Sequence: Synthetic oligonucleotide
aguaggguugcuucugaag

SEQ ID NO: 2459160 - RNA, 19 nt, Artificial Sequence
  Description of Artificial Sequence: Synthetic oligonucleotide
gaagguaaccuuccaacuc

SEQ ID NO: 2459161 - RNA, 19 nt, Artificial Sequence
  Description of Artificial Sequence: Synthetic oligonucleotide
auucgauuggcuacccucc

SEQ ID NO: 2459162 - RNA, 19 nt, Artificial Sequence
  Description of Artificial Sequence: Synthetic oligonucleotide
cagaaauuguggucgaaac

SEQ ID NO: 2459163 - RNA, 19 nt, Artificial Sequence
  Description of Artificial Sequence: Synthetic oligonucleotide
gaccuuaucaaacccucug

SEQ ID NO: 2459164 - RNA, 19 nt, Artificial Sequence
  Description of Artificial Sequence: Synthetic oligonucleotide
gguguauacuuccaggacc

SEQ ID NO: 2459165 - RNA, 19 nt, Artificial Sequence
  Description of Artificial Sequence: Synthetic oligonucleotide
agggcagcucuccaaacac

SEQ ID NO: 2459166 - RNA, 19 nt, Artificial Sequence
  Description of Artificial Sequence: Synthetic oligonucleotide
aacacgguucuggucaccg

SEQ ID NO: 2459167 - RNA, 19 nt, Artificial Sequence
  Description of Artificial Sequence: Synthetic oligonucleotide
uuuggcaauucgauuggcu

SEQ ID NO: 2459168 - RNA, 19 nt, Artificial Sequence
  Description of Artificial Sequence: Synthetic oligonucleotide
gccuguguaaaacuggacg

SEQ ID NO: 2459169 - RNA, 19 nt, Artificial Sequence
  Description of Artificial Sequence: Synthetic oligonucleotide
ucuccuuuggcaauucgau

SEQ ID NO: 2459170 - RNA, 19 nt, Artificial Sequence
  Description of Artificial Sequence: Synthetic oligonucleotide
ucagacagaaauugugguc

SEQ ID NO: 2459171 - RNA, 19 nt, Artificial Sequence
  Description of Artificial Sequence: Synthetic oligonucleotide
cuuccaacucggcaaagcc

SEQ ID NO: 2459172 - RNA, 19 nt, Artificial Sequence
  Description of Artificial Sequence: Synthetic oligonucleotide
uuggcuacccucccaacca

SEQ ID NO: 2459173 - RNA, 19 nt, Artificial Sequence
  Description of Artificial Sequence: Synthetic oligonucleotide
aaaaugcuuuucuuucgau

SEQ ID NO: 2459174 - RNA, 19 nt, Artificial Sequence
  Description of Artificial Sequence: Synthetic oligonucleotide
acuugaaccagguggugug

SEQ ID NO: 2459175 - RNA, 19 nt, Artificial Sequence
  Description of Artificial Sequence: Synthetic oligonucleotide
ucccacuuccagcauggcg

SEQ ID NO: 2459176 - RNA, 19 nt, Artificial Sequence
  Description of Artificial Sequence: Synthetic oligonucleotide
gacaccguuggacaacacc

SEQ ID NO: 2459177 - RNA, 19 nt, Artificial Sequence
  Description of Artificial Sequence: Synthetic oligonucleotide
ccaguuuugagucucgagg

SEQ ID NO: 2459178 - RNA, 19 nt, Artificial Sequence
  Description of Artificial Sequence: Synthetic oligonucleotide
gucuggacugacucgagag

SEQ ID NO: 2459179 - RNA, 19 nt, Artificial Sequence
  Description of Artificial Sequence: Synthetic oligonucleotide
uggacaacaccugaggggu

SEQ ID NO: 2459180 - RNA, 19 nt, Artificial Sequence
  Description of Artificial Sequence: Synthetic oligonucleotide
ucgagagaacuggacaccg

SEQ ID NO: 2459181 - RNA, 19 nt, Artificial Sequence
  Description of Artificial Sequence: Synthetic oligonucleotide
uggucgaaaccauggaugu

SEQ ID NO: 2459182 - RNA, 19 nt, Artificial Sequence
  Description of Artificial Sequence: Synthetic oligonucleotide
aaacuggacgccagguugg

SEQ ID NO: 2459183 - RNA, 19 nt, Artificial Sequence
  Description of Artificial Sequence: Synthetic oligonucleotide
uugccuguguaaaacugga

SEQ ID NO: 2459184 - RNA, 19 nt, Artificial Sequence
  Description of Artificial Sequence: Synthetic oligonucleotide
uguggucgaaaccauggau

SEQ ID NO: 2459185 - RNA, 19 nt, Artificial Sequence
  Description of Artificial Sequence: Synthetic oligonucleotide
aaccauggaugugaugauc

SEQ ID NO: 2459186 - RNA, 19 nt, Artificial Sequence
  Description of Artificial Sequence: Synthetic oligonucleotide
guugccuguguaaaacugg

SEQ ID NO: 2459187 - RNA, 19 nt, Artificial Sequence
  Description of Artificial Sequence: Synthetic oligonucleotide
ucccuucagacagaaauug

SEQ ID NO: 2459188 - RNA, 19 nt, Artificial Sequence
  Description of Artificial Sequence: Synthetic oligonucleotide
agcaccacgucugaggcuc

SEQ ID NO: 2459189 - RNA, 19 nt, Artificial Sequence
  Description of Artificial Sequence: Synthetic oligonucleotide
uuggcaauucgauuggcua

SEQ ID NO: 2459190 - RNA, 19 nt, Artificial Sequence
  Description of Artificial Sequence: Synthetic oligonucleotide
uuuugagucucgaggcaga

SEQ ID NO: 2459191 - RNA, 19 nt, Artificial Sequence
  Description of Artificial Sequence: Synthetic oligonucleotide
gaccaggucacaucuucag

SEQ ID NO: 2459192 - RNA, 19 nt, Artificial Sequence
  Description of Artificial Sequence: Synthetic oligonucleotide
ugguguauacuuccaggac

SEQ ID NO: 2459193 - RNA, 19 nt, Artificial Sequence
  Description of Artificial Sequence: Synthetic oligonucleotide
ucugaccgaagcuggaacu

SEQ ID NO: 2459194 - RNA, 19 nt, Artificial Sequence
  Description of Artificial Sequence: Synthetic oligonucleotide
ucuccgucuggacugacuc

SEQ ID NO: 2459195 - RNA, 19 nt, Artificial Sequence
  Description of Artificial Sequence: Synthetic oligonucleotide
uggcaauucgauuggcuac

SEQ ID NO: 2459196 - RNA, 19 nt, Artificial Sequence
  Description of Artificial Sequence: Synthetic oligonucleotide
uuuccaagcuccacugggu

SEQ ID NO: 2459197 - RNA, 19 nt, Artificial Sequence
  Description of Artificial Sequence: Synthetic oligonucleotide
aacuugaaccagguggugu

SEQ ID NO: 2459198 - RNA, 19 nt, Artificial Sequence
  Description of Artificial Sequence: Synthetic oligonucleotide
caacagagaacuugaacca

SEQ ID NO: 2459199 - RNA, 19 nt, Artificial Sequence
  Description of Artificial Sequence: Synthetic oligonucleotide
guguauacuuccaggaccc

SEQ ID NO: 2459200 - RNA, 19 nt, Artificial Sequence
  Description of Artificial Sequence: Synthetic oligonucleotide
guaaccuuccaacucggca

SEQ ID NO: 2459201 - RNA, 19 nt, Artificial Sequence
  Description of Artificial Sequence: Synthetic oligonucleotide
cugugaaucuccuuuggca

SEQ ID NO: 2459202 - RNA, 19 nt, Artificial Sequence
  Description of Artificial Sequence: Synthetic oligonucleotide
guuuugagucucgaggcag

SEQ ID NO: 2459203 - RNA, 19 nt, Artificial Sequence
  Description of Artificial Sequence: Synthetic oligonucleotide
aauuguggucgaaaccaug

SEQ ID NO: 2459204 - RNA, 19 nt, Artificial Sequence
  Description of Artificial Sequence: Synthetic oligonucleotide
guacucuucccauccacug

SEQ ID NO: 2459205 - RNA, 19 nt, Artificial Sequence
  Description of Artificial Sequence: Synthetic oligonucleotide
uuguacuccuccccaggcc

SEQ ID NO: 2459206 - RNA, 19 nt, Artificial Sequence
  Description of Artificial Sequence: Synthetic oligonucleotide
gauugaccgcaucaggcca

SEQ ID NO: 2459207 - RNA, 19 nt, Artificial Sequence
  Description of Artificial Sequence: Synthetic oligonucleotide
guggucgaaaccauggaug

SEQ ID NO: 2459208 - RNA, 19 nt, Artificial Sequence
  Description of Artificial Sequence: Synthetic oligonucleotide
cccacuuccagcauggcgc

SEQ ID NO: 2459209 - RNA, 19 nt, Artificial Sequence
  Description of Artificial Sequence: Synthetic oligonucleotide
uccaagcuccacuggguag

SEQ ID NO: 2459210 - RNA, 19 nt, Artificial Sequence
  Description of Artificial Sequence: Synthetic oligonucleotide
aaaccauggaugugaugau

SEQ ID NO: 2459211 - RNA, 19 nt, Artificial Sequence
  Description of Artificial Sequence: Synthetic oligonucleotide
aguuuugagucucgaggca

SEQ ID NO: 2459212 - RNA, 19 nt, Artificial Sequence
  Description of Artificial Sequence: Synthetic oligonucleotide
agugccauccaggaaguug

SEQ ID NO: 2459213 - RNA, 19 nt, Artificial Sequence
  Description of Artificial Sequence: Synthetic oligonucleotide
aggaccuuaucaaacccuc

SEQ ID NO: 2459214 - RNA, 19 nt, Artificial Sequence
  Description of Artificial Sequence: Synthetic oligonucleotide
cuuucgaucccuucagaca

SEQ ID NO: 2459215 - RNA, 19 nt, Artificial Sequence
  Description of Artificial Sequence: Synthetic oligonucleotide
cucggcaaagccgagcacc

SEQ ID NO: 2459216 - RNA, 19 nt, Artificial Sequence
  Description of Artificial Sequence: Synthetic oligonucleotide
cuggacgccagguugggug

SEQ ID NO: 2459217 - RNA, 19 nt, Artificial Sequence
  Description of Artificial Sequence: Synthetic oligonucleotide
acaccguuggacaacaccu

SEQ ID NO: 2459218 - RNA, 19 nt, Artificial Sequence
  Description of Artificial Sequence: Synthetic oligonucleotide
gugguguauacuuccagga

SEQ ID NO: 2459219 - RNA, 19 nt, Artificial Sequence
  Description of Artificial Sequence: Synthetic oligonucleotide
cuguguaaaacuggacgcc

SEQ ID NO: 2459220 - RNA, 19 nt, Artificial Sequence
  Description of Artificial Sequence: Synthetic oligonucleotide
uccugcagguguuuccaag

SEQ ID NO: 2459221 - RNA, 19 nt, Artificial Sequence
  Description of Artificial Sequence: Synthetic oligonucleotide
gucgaaaccauggauguga

SEQ ID NO: 2459222 - RNA, 19 nt, Artificial Sequence
  Description of Artificial Sequence: Synthetic oligonucleotide
uuguggucgaaaccaugga

SEQ ID NO: 2459223 - RNA, 19 nt, Artificial Sequence
  Description of Artificial Sequence: Synthetic oligonucleotide
ugacucgagagaacuggac

SEQ ID NO: 2459224 - RNA, 19 nt, Artificial Sequence
  Description of Artificial Sequence: Synthetic oligonucleotide
uggacgccagguugggugg

SEQ ID NO: 2459225 - RNA, 19 nt, Artificial Sequence
  Description of Artificial Sequence: Synthetic oligonucleotide
guuguacuccuccccaggc

SEQ ID NO: 2459226 - RNA, 19 nt, Artificial Sequence
  Description of Artificial Sequence: Synthetic oligonucleotide
uucuccacugucccucccc

SEQ ID NO: 2459227 - RNA, 19 nt, Artificial Sequence
  Description of Artificial Sequence: Synthetic oligonucleotide
aaccagguggugugguugu

SEQ ID NO: 2459228 - RNA, 19 nt, Artificial Sequence
  Description of Artificial Sequence: Synthetic oligonucleotide
gcagaaaccagagugcuug

SEQ ID NO: 2459229 - RNA, 19 nt, Artificial Sequence
  Description of Artificial Sequence: Synthetic oligonucleotide
uccagaggaccuuaucaaa

SEQ ID NO: 2459230 - RNA, 19 nt, Artificial Sequence
  Description of Artificial Sequence: Synthetic oligonucleotide
gacaacaccugaggggucc

SEQ ID NO: 2459231 - RNA, 19 nt, Artificial Sequence
  Description of Artificial Sequence: Synthetic oligonucleotide
ugguacucuucccauccac

SEQ ID NO: 2459232 - RNA, 19 nt, Artificial Sequence
  Description of Artificial Sequence: Synthetic oligonucleotide
cugaauccuccauggagac

SEQ ID NO: 2459233 - RNA, 19 nt, Artificial Sequence
  Description of Artificial Sequence: Synthetic oligonucleotide
cuucuuuaagcaacagaga

SEQ ID NO: 2459234 - RNA, 19 nt, Artificial Sequence
  Description of Artificial Sequence: Synthetic oligonucleotide
ccuucagacagaaauugug

SEQ ID NO: 2459235 - RNA, 19 nt, Artificial Sequence
  Description of Artificial Sequence: Synthetic oligonucleotide
cacugugaaucuccuuugg

SEQ ID NO: 2459236 - RNA, 19 nt, Artificial Sequence
  Description of Artificial Sequence: Synthetic oligonucleotide
agagaacuugaaccaggug

SEQ ID NO: 2459237 - RNA, 19 nt, Artificial Sequence
  Description of Artificial Sequence: Synthetic oligonucleotide
ggcaaagccgagcaccacg

SEQ ID NO: 2459238 - RNA, 19 nt, Artificial Sequence
  Description of Artificial Sequence: Synthetic oligonucleotide
aaacacgguucuggucacc

SEQ ID NO: 2459239 - RNA, 19 nt, Artificial Sequence
  Description of Artificial Sequence: Synthetic oligonucleotide
ucggcaaagccgagcacca

SEQ ID NO: 2459240 - RNA, 19 nt, Artificial Sequence
  Description of Artificial Sequence: Synthetic oligonucleotide
agaaaccagagugcuuggg

SEQ ID NO: 2459241 - RNA, 19 nt, Artificial Sequence
  Description of Artificial Sequence: Synthetic oligonucleotide
agucucgaggcagaaacca

SEQ ID NO: 2459242 - RNA, 19 nt, Artificial Sequence
  Description of Artificial Sequence: Synthetic oligonucleotide
guugaugggcagaugguac

SEQ ID NO: 2459243 - RNA, 19 nt, Artificial Sequence
  Description of Artificial Sequence: Synthetic oligonucleotide
gaugauguccacggucagc

SEQ ID NO: 2459244 - RNA, 19 nt, Artificial Sequence
  Description of Artificial Sequence: Synthetic oligonucleotide
uucuuucgaucccuucaga

SEQ ID NO: 2459245 - RNA, 19 nt, Artificial Sequence
  Description of Artificial Sequence: Synthetic oligonucleotide
agcucuccaaacacgguuc

SEQ ID NO: 2459246 - RNA, 19 nt, Artificial Sequence
  Description of Artificial Sequence: Synthetic oligonucleotide
accgcaucaggccaguuuu

SEQ ID NO: 2459247 - RNA, 19 nt, Artificial Sequence
  Description of Artificial Sequence: Synthetic oligonucleotide
gcugauugaccgcaucagg

SEQ ID NO: 2459248 - RNA, 19 nt, Artificial Sequence
  Description of Artificial Sequence: Synthetic oligonucleotide
uggucaccgacaccaugag

SEQ ID NO: 2459249 - RNA, 19 nt, Artificial Sequence
  Description of Artificial Sequence: Synthetic oligonucleotide
aaccagagugcuuggggua

SEQ ID NO: 2459250 - RNA, 19 nt, Artificial Sequence
  Description of Artificial Sequence: Synthetic oligonucleotide
gacccucccacuuccagca

SEQ ID NO: 2459251 - RNA, 19 nt, Artificial Sequence
  Description of Artificial Sequence: Synthetic oligonucleotide
guagacuucuccacucuug

SEQ ID NO: 2459252 - RNA, 19 nt, Artificial Sequence
  Description of Artificial Sequence: Synthetic oligonucleotide
agguggugugguuguacuc

SEQ ID NO: 2459253 - RNA, 19 nt, Artificial Sequence
  Description of Artificial Sequence: Synthetic oligonucleotide
aagccgagcaccacgucug

SEQ ID NO: 2459254 - RNA, 19 nt, Artificial Sequence
  Description of Artificial Sequence: Synthetic oligonucleotide
uccgucuggacugacucga

SEQ ID NO: 2459255 - RNA, 19 nt, Artificial Sequence
  Description of Artificial Sequence: Synthetic oligonucleotide
acagaaauuguggucgaaa

SEQ ID NO: 2459256 - RNA, 19 nt, Artificial Sequence
  Description of Artificial Sequence: Synthetic oligonucleotide
acgucugaggcucuccccu

SEQ ID NO: 2459257 - RNA, 19 nt, Artificial Sequence
  Description of Artificial Sequence: Synthetic oligonucleotide
gguccagaggaccuuauca

SEQ ID NO: 2459258 - RNA, 19 nt, Artificial Sequence
  Description of Artificial Sequence: Synthetic oligonucleotide
gugaugauccugcaggugu

SEQ ID NO: 2459259 - RNA, 19 nt, Artificial Sequence
  Description of Artificial Sequence: Synthetic oligonucleotide
aaguaggguugcuucugaa

SEQ ID NO: 2459260 - RNA, 19 nt, Artificial Sequence
  Description of Artificial Sequence: Synthetic oligonucleotide
agugcuugggguagacuuc

SEQ ID NO: 2459261 - RNA, 19 nt, Artificial Sequence
  Description of Artificial Sequence: Synthetic oligonucleotide
acggucagccggucugacc

SEQ ID NO: 2459262 - RNA, 19 nt, Artificial Sequence
  Description of Artificial Sequence: Synthetic oligonucleotide
aaauuguggucgaaaccau

SEQ ID NO: 2459263 - RNA, 19 nt, Artificial Sequence
  Description of Artificial Sequence: Synthetic oligonucleotide
gguuguacuccuccccagg

SEQ ID NO: 2459264 - RNA, 19 nt, Artificial Sequence
  Description of Artificial Sequence: Synthetic oligonucleotide
ccaaacacgguucugguca

SEQ ID NO: 2459265 - RNA, 19 nt, Artificial Sequence
  Description of Artificial Sequence: Synthetic oligonucleotide
accguuggacaacaccuga

SEQ ID NO: 2459266 - RNA, 19 nt, Artificial Sequence
  Description of Artificial Sequence: Synthetic oligonucleotide
cacgguucuggucaccgac

SEQ ID NO: 2459267 - RNA, 19 nt, Artificial Sequence
  Description of Artificial Sequence: Synthetic oligonucleotide
cauggaugugaugauccug

SEQ ID NO: 2459268 - RNA, 19 nt, Artificial Sequence
  Description of Artificial Sequence: Synthetic oligonucleotide
uuccaagcuccacugggua

SEQ ID NO: 2459269 - RNA, 19 nt, Artificial Sequence
  Description of Artificial Sequence: Synthetic oligonucleotide
gcagguguuuccaagcucc

SEQ ID NO: 2459270 - RNA, 19 nt, Artificial Sequence
  Description of Artificial Sequence: Synthetic oligonucleotide
ucgauuggcuacccuccca

SEQ ID NO: 2459271 - RNA, 19 nt, Artificial Sequence
  Description of Artificial Sequence: Synthetic oligonucleotide
uccaggaaguugccugugu

SEQ ID NO: 2459272 - RNA, 19 nt, Artificial Sequence
  Description of Artificial Sequence: Synthetic oligonucleotide
gguggugugguuguacucc

SEQ ID NO: 2459273 - RNA, 19 nt, Artificial Sequence
  Description of Artificial Sequence: Synthetic oligonucleotide
agacagaaauuguggucga

SEQ ID NO: 2459274 - RNA, 19 nt, Artificial Sequence
  Description of Artificial Sequence: Synthetic oligonucleotide
ugggugguguauacuucca

SEQ ID NO: 2459275 - RNA, 19 nt, Artificial Sequence
  Description of Artificial Sequence: Synthetic oligonucleotide
uggacugacucgagagaac

SEQ ID NO: 2459276 - RNA, 19 nt, Artificial Sequence
  Description of Artificial Sequence: Synthetic oligonucleotide
uccaaacacgguucugguc

SEQ ID NO: 2459277 - RNA, 19 nt, Artificial Sequence
  Description of Artificial Sequence: Synthetic oligonucleotide
cucgagagaacuggacacc

SEQ ID NO: 2459278 - RNA, 19 nt, Artificial Sequence
  Description of Artificial Sequence: Synthetic oligonucleotide
gagggcagcucuccaaaca

SEQ ID NO: 2459279 - RNA, 19 nt, Artificial Sequence
  Description of Artificial Sequence: Synthetic oligonucleotide
ugaugauccugcagguguu

SEQ ID NO: 2459280 - RNA, 19 nt, Artificial Sequence
  Description of Artificial Sequence: Synthetic oligonucleotide
uggaugugaugauccugca

SEQ ID NO: 2459281 - RNA, 19 nt, Artificial Sequence
  Description of Artificial Sequence: Synthetic oligonucleotide
ucgaaaccauggaugugau

SEQ ID NO: 2459282 - RNA, 19 nt, Artificial Sequence
  Description of Artificial Sequence: Synthetic oligonucleotide
agagaacuggacaccguug

SEQ ID NO: 2459283 - RNA, 19 nt, Artificial Sequence
  Description of Artificial Sequence: Synthetic oligonucleotide
ggaugugaugauccugcag

SEQ ID NO: 2459284 - RNA, 19 nt, Artificial Sequence
  Description of Artificial Sequence: Synthetic oligonucleotide
aucuccuuuggcaauucga

SEQ ID NO: 2459285 - RNA, 19 nt, Artificial Sequence
  Description of Artificial Sequence: Synthetic oligonucleotide
ccagaggaccuuaucaaac

SEQ ID NO: 2459286 - RNA, 19 nt, Artificial Sequence
  Description of Artificial Sequence: Synthetic oligonucleotide
gagugcuugggguagacuu

SEQ ID NO: 2459287 - RNA, 19 nt, Artificial Sequence
  Description of Artificial Sequence: Synthetic oligonucleotide
gucugaccgaagcuggaac

SEQ ID NO: 2459288 - RNA, 19 nt, Artificial Sequence
  Description of Artificial Sequence: Synthetic oligonucleotide
cuguugggcucuuuguuga

SEQ ID NO: 2459289 - RNA, 19 nt, Artificial Sequence
  Description of Artificial Sequence: Synthetic oligonucleotide
aggacccucccacuuccag

SEQ ID NO: 2459290 - RNA, 19 nt, Artificial Sequence
  Description of Artificial Sequence: Synthetic oligonucleotide
cuccgucuggacugacucg

SEQ ID NO: 2459291 - RNA, 19 nt, Artificial Sequence
  Description of Artificial Sequence: Synthetic oligonucleotide
agguguuuccaagcuccac

SEQ ID NO: 2459292 - RNA, 19 nt, Artificial Sequence
  Description of Artificial Sequence: Synthetic oligonucleotide
gugguuguacuccucccca

SEQ ID NO: 2459293 - RNA, 19 nt, Artificial Sequence
  Description of Artificial Sequence: Synthetic oligonucleotide
uggacaccguuggacaaca

SEQ ID NO: 2459294 - RNA, 19 nt, Artificial Sequence
  Description of Artificial Sequence: Synthetic oligonucleotide
cauggcgcacccuugcaca

SEQ ID NO: 2459295 - RNA, 19 nt, Artificial Sequence
  Description of Artificial Sequence: Synthetic oligonucleotide
ucgaggcagaaaccagagu

SEQ ID NO: 2459296 - RNA, 19 nt, Artificial Sequence
  Description of Artificial Sequence: Synthetic oligonucleotide
caaacacgguucuggucac

SEQ ID NO: 2459297 - RNA, 19 nt, Artificial Sequence
  Description of Artificial Sequence: Synthetic oligonucleotide
gauuggcuacccucccaac

SEQ ID NO: 2459298 - RNA, 19 nt, Artificial Sequence
  Description of Artificial Sequence: Synthetic oligonucleotide
uucgaucccuucagacaga

SEQ ID NO: 2459299 - RNA, 19 nt, Artificial Sequence
  Description of Artificial Sequence: Synthetic oligonucleotide
uccaggacccucccacuuc

SEQ ID NO: 2459300 - RNA, 19 nt, Artificial Sequence
  Description of Artificial Sequence: Synthetic oligonucleotide
auugaccgcaucaggccag

SEQ ID NO: 2459301 - RNA, 19 nt, Artificial Sequence
  Description of Artificial Sequence: Synthetic oligonucleotide
cuuccagcauggcgcaccc

SEQ ID NO: 2459302 - RNA, 19 nt, Artificial Sequence
  Description of Artificial Sequence: Synthetic oligonucleotide
ggaacuggggcugauugac

SEQ ID NO: 2459303 - RNA, 19 nt, Artificial Sequence
  Description of Artificial Sequence: Synthetic oligonucleotide
ggcaauucgauuggcuacc

SEQ ID NO: 2459304 - RNA, 19 nt, Artificial Sequence
  Description of Artificial Sequence: Synthetic oligonucleotide
agcuccacuggguagccuu

SEQ ID NO: 2459305 - RNA, 19 nt, Artificial Sequence
  Description of Artificial Sequence: Synthetic oligonucleotide
accacgucugaggcucucc

SEQ ID NO: 2459306 - RNA, 19 nt, Artificial Sequence
  Description of Artificial Sequence: Synthetic oligonucleotide
gagucucgaggcagaaacc

SEQ ID NO: 2459307 - RNA, 19 nt, Artificial Sequence
  Description of Artificial Sequence: Synthetic oligonucleotide
gcagaugguacucuuccca

SEQ ID NO: 2459308 - RNA, 19 nt, Artificial Sequence
  Description of Artificial Sequence: Synthetic oligonucleotide
caccguuggacaacaccug

SEQ ID NO: 2459309 - RNA, 19 nt, Artificial Sequence
  Description of Artificial Sequence: Synthetic oligonucleotide
cacgucugaggcucucccc

SEQ ID NO: 2459310 - RNA, 19 nt, Artificial Sequence
  Description of Artificial Sequence: Synthetic oligonucleotide
uuugagucucgaggcagaa

SEQ ID NO: 2459311 - RNA, 19 nt, Artificial Sequence
  Description of Artificial Sequence: Synthetic oligonucleotide
gaacuugaaccagguggug

SEQ ID NO: 2459312 - RNA, 19 nt, Artificial Sequence
  Description of Artificial Sequence: Synthetic oligonucleotide
cagguugggugguguauac

SEQ ID NO: 2459313 - RNA, 19 nt, Artificial Sequence
  Description of Artificial Sequence: Synthetic oligonucleotide
ccugcagguguuuccaagc

SEQ ID NO: 2459314 - RNA, 19 nt, Artificial Sequence
  Description of Artificial Sequence: Synthetic oligonucleotide
caucaggccaguuuugagu

SEQ ID NO: 2459315 - RNA, 19 nt, Artificial Sequence
  Description of Artificial Sequence: Synthetic oligonucleotide
ccucagagugccauccagg

SEQ ID NO: 2459316 - RNA, 19 nt, Artificial Sequence
  Description of Artificial Sequence: Synthetic oligonucleotide
cugagggguccagaggacc

SEQ ID NO: 2459317 - RNA, 19 nt, Artificial Sequence
  Description of Artificial Sequence: Synthetic oligonucleotide
guauacuuccaggacccuc

SEQ ID NO: 2459318 - RNA, 19 nt, Artificial Sequence
  Description of Artificial Sequence: Synthetic oligonucleotide
ccacucuugccccucagag

SEQ ID NO: 2459319 - RNA, 19 nt, Artificial Sequence
  Description of Artificial Sequence: Synthetic oligonucleotide
gaacuggggcugauugacc

SEQ ID NO: 2459320 - RNA, 19 nt, Artificial Sequence
  Description of Artificial Sequence: Synthetic oligonucleotide
gcuugggguagacuucucc

SEQ ID NO: 2459321 - RNA, 19 nt, Artificial Sequence
  Description of Artificial Sequence: Synthetic oligonucleotide
ccgagcaccacgucugagg

SEQ ID NO: 2459322 - RNA, 19 nt, Artificial Sequence
  Description of Artificial Sequence: Synthetic oligonucleotide
gccaguuuugagucucgag

SEQ ID NO: 2459323 - RNA, 19 nt, Artificial Sequence
  Description of Artificial Sequence: Synthetic oligonucleotide
ccucccacuuccagcaugg

SEQ ID NO: 2459324 - RNA, 19 nt, Artificial Sequence
  Description of Artificial Sequence: Synthetic oligonucleotide
cagcauggcgcacccuugc

SEQ ID NO: 2459325 - RNA, 19 nt, Artificial Sequence
  Description of Artificial Sequence: Synthetic oligonucleotide
cggucagccggucugaccg

SEQ ID NO: 2459326 - RNA, 19 nt, Artificial Sequence
  Description of Artificial Sequence: Synthetic oligonucleotide
uuccaggacccucccacuu

SEQ ID NO: 2459327 - RNA, 19 nt, Artificial Sequence
  Description of Artificial Sequence: Synthetic oligonucleotide
uggcuacccucccaaccac

SEQ ID NO: 2459328 - RNA, 19 nt, Artificial Sequence
  Description of Artificial Sequence: Synthetic oligonucleotide
ucgaucccuucagacagaa

SEQ ID NO: 2459329 - RNA, 19 nt, Artificial Sequence
  Description of Artificial Sequence: Synthetic oligonucleotide
ucccauccacugugaaucu

SEQ ID NO: 2459330 - RNA, 19 nt, Artificial Sequence
  Description of Artificial Sequence: Synthetic oligonucleotide
gagagaacuggacaccguu

SEQ ID NO: 2459331 - RNA, 19 nt, Artificial Sequence
  Description of Artificial Sequence: Synthetic oligonucleotide
ggucaccgacaccaugagg

SEQ ID NO: 2459332 - RNA, 19 nt, Artificial Sequence
  Description of Artificial Sequence: Synthetic oligonucleotide
caggaaguugccuguguaa

SEQ ID NO: 2459333 - RNA, 19 nt, Artificial Sequence
  Description of Artificial Sequence: Synthetic oligonucleotide
gcaucaggccaguuuugag

SEQ ID NO: 2459334 - RNA, 19 nt, Artificial Sequence
  Description of Artificial Sequence: Synthetic oligonucleotide
uguauacuuccaggacccu

SEQ ID NO: 2459335 - RNA, 19 nt, Artificial Sequence
  Description of Artificial Sequence: Synthetic oligonucleotide
cuggacugacucgagagaa

SEQ ID NO: 2459336 - RNA, 19 nt, Artificial Sequence
  Description of Artificial Sequence: Synthetic oligonucleotide
ggcugauugaccgcaucag

SEQ ID NO: 2459337 - RNA, 19 nt, Artificial Sequence
  Description of Artificial Sequence: Synthetic oligonucleotide
cucuccccugccugucugg

SEQ ID NO: 2459338 - RNA, 19 nt, Artificial Sequence
  Description of Artificial Sequence: Synthetic oligonucleotide
agcauggcgcacccuugca

SEQ ID NO: 2459339 - RNA, 19 nt, Artificial Sequence
  Description of Artificial Sequence: Synthetic oligonucleotide
ggacccucccacuuccagc

SEQ ID NO: 2459340 - RNA, 19 nt, Artificial Sequence
  Description of Artificial Sequence: Synthetic oligonucleotide
caaccacugcuccaaagua

SEQ ID NO: 2459341 - RNA, 19 nt, Artificial Sequence
  Description of Artificial Sequence: Synthetic oligonucleotide
aggucacaucuucagucuu

SEQ ID NO: 2459342 - RNA, 19 nt, Artificial Sequence
  Description of Artificial Sequence: Synthetic oligonucleotide
gacaugcagagcagugauc

SEQ ID NO: 2459343 - RNA, 19 nt, Artificial Sequence
  Description of Artificial Sequence: Synthetic oligonucleotide
gaggaccuuaucaaacccu

SEQ ID NO: 2459344 - RNA, 19 nt, Artificial Sequence
  Description of Artificial Sequence: Synthetic oligonucleotide
agccggucugaccgaagcu

SEQ ID NO: 2459345 - RNA, 19 nt, Artificial Sequence
  Description of Artificial Sequence: Synthetic oligonucleotide
cuggacaccguuggacaac

SEQ ID NO: 2459346 - RNA, 19 nt, Artificial Sequence
  Description of Artificial Sequence: Synthetic oligonucleotide
ggaaguugccuguguaaaa

SEQ ID NO: 2459347 - RNA, 19 nt, Artificial Sequence
  Description of Artificial Sequence: Synthetic oligonucleotide
gggguagacuucuccacuc

SEQ ID NO: 2459348 - RNA, 19 nt, Artificial Sequence
  Description of Artificial Sequence: Synthetic oligonucleotide
cacuggguagccuuccucu

SEQ ID NO: 2459349 - RNA, 19 nt, Artificial Sequence
  Description of Artificial Sequence: Synthetic oligonucleotide
uggugugguuguacuccuc

SEQ ID NO: 2459350 - RNA, 19 nt, Artificial Sequence
  Description of Artificial Sequence: Synthetic oligonucleotide
agugaucgugcagccccag

SEQ ID NO: 2459351 - RNA, 19 nt, Artificial Sequence
  Description of Artificial Sequence: Synthetic oligonucleotide
acacgguucuggucaccga

SEQ ID NO: 2459352 - RNA, 19 nt, Artificial Sequence
  Description of Artificial Sequence: Synthetic oligonucleotide
gacagaaauuguggucgaa

SEQ ID NO: 2459353 - RNA, 19 nt, Artificial Sequence
  Description of Artificial Sequence: Synthetic oligonucleotide
auggcgcacccuugcacaa

SEQ ID NO: 2459354 - RNA, 19 nt, Artificial Sequence
  Description of Artificial Sequence: Synthetic oligonucleotide
ccguuggacaacaccugag

SEQ ID NO: 2459355 - RNA, 19 nt, Artificial Sequence
  Description of Artificial Sequence: Synthetic oligonucleotide
cuccacuggguagccuucc

SEQ ID NO: 2459356 - RNA, 19 nt, Artificial Sequence
  Description of Artificial Sequence: Synthetic oligonucleotide
gaacuucuccacugucccu

SEQ ID NO: 2459357 - RNA, 19 nt, Artificial Sequence
  Description of Artificial Sequence: Synthetic oligonucleotide
cucuccaaacacgguucug

SEQ ID NO: 2459358 - RNA, 19 nt, Artificial Sequence
  Description of Artificial Sequence: Synthetic oligonucleotide
gggcagcucuccaaacacg

SEQ ID NO: 2459359 - RNA, 19 nt, Artificial Sequence
  Description of Artificial Sequence: Synthetic oligonucleotide
ggucacaucuucagucuuc

SEQ ID NO: 2459360 - RNA, 19 nt, Artificial Sequence
  Description of Artificial Sequence: Synthetic oligonucleotide
caaagccgagcaccacguc

SEQ ID NO: 2459361 - RNA, 19 nt, Artificial Sequence
  Description of Artificial Sequence: Synthetic oligonucleotide
ccacugcuccaaaguaggg

SEQ ID NO: 2459362 - RNA, 19 nt, Artificial Sequence
  Description of Artificial Sequence: Synthetic oligonucleotide
gugaaucuccuuuggcaau

SEQ ID NO: 2459363 - RNA, 19 nt, Artificial Sequence
  Description of Artificial Sequence: Synthetic oligonucleotide
uugaccgcaucaggccagu

SEQ ID NO: 2459364 - RNA, 19 nt, Artificial Sequence
  Description of Artificial Sequence: Synthetic oligonucleotide
acgguucuggucaccgaca

SEQ ID NO: 2459365 - RNA, 19 nt, Artificial Sequence
  Description of Artificial Sequence: Synthetic oligonucleotide
gguaaccuuccaacucggc

SEQ ID NO: 2459366 - RNA, 19 nt, Artificial Sequence
  Description of Artificial Sequence: Synthetic oligonucleotide
gcauggcgcacccuugcac

SEQ ID NO: 2459367 - RNA, 19 nt, Artificial Sequence
  Description of Artificial Sequence: Synthetic oligonucleotide
accuuccaacucggcaaag

SEQ ID NO: 2459368 - RNA, 19 nt, Artificial Sequence
  Description of Artificial Sequence: Synthetic oligonucleotide
cagagugcuugggguagac

SEQ ID NO: 2459369 - RNA, 19 nt, Artificial Sequence
  Description of Artificial Sequence: Synthetic oligonucleotide
guacuccuccccaggcccc

SEQ ID NO: 2459370 - RNA, 19 nt, Artificial Sequence
  Description of Artificial Sequence: Synthetic oligonucleotide
cagguguuuccaagcucca

SEQ ID NO: 2459371 - RNA, 19 nt, Artificial Sequence
  Description of Artificial Sequence: Synthetic oligonucleotide
cuccaaacacgguucuggu

SEQ ID NO: 2459372 - RNA, 19 nt, Artificial Sequence
  Description of Artificial Sequence: Synthetic oligonucleotide
ccacgucugaggcucuccc

SEQ ID NO: 2459373 - RNA, 19 nt, Artificial Sequence
  Description of Artificial Sequence: Synthetic oligonucleotide
agccgagcaccacgucuga

SEQ ID NO: 2459374 - RNA, 19 nt, Artificial Sequence
  Description of Artificial Sequence: Synthetic oligonucleotide
ggacugacucgagagaacu

SEQ ID NO: 2459375 - RNA, 19 nt, Artificial Sequence
  Description of Artificial Sequence: Synthetic oligonucleotide
uccucuccgucuggacuga

SEQ ID NO: 2459376 - RNA, 19 nt, Artificial Sequence
  Description of Artificial Sequence: Synthetic oligonucleotide
uggggcugauugaccgcau

SEQ ID NO: 2459377 - RNA, 19 nt, Artificial Sequence
  Description of Artificial Sequence: Synthetic oligonucleotide
ggucgaaaccauggaugug

SEQ ID NO: 2459378 - RNA, 19 nt, Artificial Sequence
  Description of Artificial Sequence: Synthetic oligonucleotide
gcaauucgauuggcuaccc

SEQ ID NO: 2459379 - RNA, 19 nt, Artificial Sequence
  Description of Artificial Sequence: Synthetic oligonucleotide
gacgccagguuggguggug

SEQ ID NO: 2459380 - RNA, 19 nt, Artificial Sequence
  Description of Artificial Sequence: Synthetic oligonucleotide
gaccgcaucaggccaguuu

SEQ ID NO: 2459381 - RNA, 19 nt, Artificial Sequence
  Description of Artificial Sequence: Synthetic oligonucleotide
guggugugguuguacuccu

SEQ ID NO: 2459382 - RNA, 19 nt, Artificial Sequence
  Description of Artificial Sequence: Synthetic oligonucleotide
cagguggugugguuguacu

SEQ ID NO: 2459383 - RNA, 19 nt, Artificial Sequence
  Description of Artificial Sequence: Synthetic oligonucleotide
ugccccucagagugccauc

SEQ ID NO: 2459384 - RNA, 19 nt, Artificial Sequence
  Description of Artificial Sequence: Synthetic oligonucleotide
cugcagguguuuccaagcu

SEQ ID NO: 2459385 - RNA, 19 nt, Artificial Sequence
  Description of Artificial Sequence: Synthetic oligonucleotide
cacucuugccccucagagu

SEQ ID NO: 2459386 - RNA, 19 nt, Artificial Sequence
  Description of Artificial Sequence: Synthetic oligonucleotide
gccccucagagugccaucc

SEQ ID NO: 2459387 - RNA, 19 nt, Artificial Sequence
  Description of Artificial Sequence: Synthetic oligonucleotide
acuggacgccagguugggu

SEQ ID NO: 2459388 - RNA, 19 nt, Artificial Sequence
  Description of Artificial Sequence: Synthetic oligonucleotide
gugcuugggguagacuucu

SEQ ID NO: 2459389 - RNA, 19 nt, Artificial Sequence
  Description of Artificial Sequence: Synthetic oligonucleotide
gguacucuucccauccacu

SEQ ID NO: 2459390 - RNA, 19 nt, Artificial Sequence
  Description of Artificial Sequence: Synthetic oligonucleotide
ggguccagaggaccuuauc

SEQ ID NO: 2459391 - RNA, 19 nt, Artificial Sequence
  Description of Artificial Sequence: Synthetic oligonucleotide
ggcgcacccuugcacaaaa

SEQ ID NO: 2459392 - RNA, 19 nt, Artificial Sequence
  Description of Artificial Sequence: Synthetic oligonucleotide
ggaccaggucacaucuuca

SEQ ID NO: 2459393 - RNA, 19 nt, Artificial Sequence
  Description of Artificial Sequence: Synthetic oligonucleotide
ccaacucggcaaagccgag

SEQ ID NO: 2459394 - RNA, 19 nt, Artificial Sequence
  Description of Artificial Sequence: Synthetic oligonucleotide
caauucgauuggcuacccu

SEQ ID NO: 2459395 - RNA, 19 nt, Artificial Sequence
  Description of Artificial Sequence: Synthetic oligonucleotide
caugcagagcagugaucgu

SEQ ID NO: 2459396 - RNA, 19 nt, Artificial Sequence
  Description of Artificial Sequence: Synthetic oligonucleotide
gagcaccacgucugaggcu

SEQ ID NO: 2459397 - RNA, 19 nt, Artificial Sequence
  Description of Artificial Sequence: Synthetic oligonucleotide
ggggcugauugaccgcauc

SEQ ID NO: 2459398 - RNA, 19 nt, Artificial Sequence
  Description of Artificial Sequence: Synthetic oligonucleotide
cucccacuuccagcauggc

SEQ ID NO: 2459399 - RNA, 19 nt, Artificial Sequence
  Description of Artificial Sequence: Synthetic oligonucleotide
uggcgcacccuugcacaaa

SEQ ID NO: 2459400 - RNA, 19 nt, Artificial Sequence
  Description of Artificial Sequence: Synthetic oligonucleotide
ccagguggugugguuguac

SEQ ID NO: 2459401 - RNA, 19 nt, Artificial Sequence
  Description of Artificial Sequence: Synthetic oligonucleotide
ggaaaguggugggcgugca

SEQ ID NO: 2459402 - RNA, 19 nt, Artificial Sequence
  Description of Artificial Sequence: Synthetic oligonucleotide
cacggucagccggucugac

SEQ ID NO: 2459403 - RNA, 19 nt, Artificial Sequence
  Description of Artificial Sequence: Synthetic oligonucleotide
uguccacggucagccgguc

SEQ ID NO: 2459404 - RNA, 19 nt, Artificial Sequence
  Description of Artificial Sequence: Synthetic oligonucleotide
ggucugaccgaagcuggaa

SEQ ID NO: 2459405 - RNA, 19 nt, Artificial Sequence
  Description of Artificial Sequence: Synthetic oligonucleotide
caccgacaccaugaggaaa

SEQ ID NO: 2459406 - RNA, 19 nt, Artificial Sequence
  Description of Artificial Sequence: Synthetic oligonucleotide
cucuccgucuggacugacu

SEQ ID NO: 2459407 - RNA, 19 nt, Artificial Sequence
  Description of Artificial Sequence: Synthetic oligonucleotide
gcaaagccgagcaccacgu

SEQ ID NO: 2459408 - RNA, 19 nt, Artificial Sequence
  Description of Artificial Sequence: Synthetic oligonucleotide
gcagcacaggagggaacug

SEQ ID NO: 2459409 - RNA, 19 nt, Artificial Sequence
  Description of Artificial Sequence: Synthetic oligonucleotide
gcucuccaaacacgguucu

SEQ ID NO: 2459410 - RNA, 19 nt, Artificial Sequence
  Description of Artificial Sequence: Synthetic oligonucleotide
ccgcaucaggccaguuuug

SEQ ID NO: 2459411 - RNA, 19 nt, Artificial Sequence
  Description of Artificial Sequence: Synthetic oligonucleotide
auccuccauggagacuguu

SEQ ID NO: 2459412 - RNA, 19 nt, Artificial Sequence
  Description of Artificial Sequence: Synthetic oligonucleotide
ccgucuggacugacucgag

SEQ ID NO: 2459413 - RNA, 19 nt, Artificial Sequence
  Description of Artificial Sequence: Synthetic oligonucleotide
ccacuuccagcauggcgca

SEQ ID NO: 2459414 - RNA, 19 nt, Artificial Sequence
  Description of Artificial Sequence: Synthetic oligonucleotide
ccucccaaccacugcucca

SEQ ID NO: 2459415 - RNA, 19 nt, Artificial Sequence
  Description of Artificial Sequence: Synthetic oligonucleotide
ccucugaauccuccaugga

SEQ ID NO: 2459416 - RNA, 19 nt, Artificial Sequence
  Description of Artificial Sequence: Synthetic oligonucleotide
ggucagccggucugaccga

SEQ ID NO: 2459417 - RNA, 19 nt, Artificial Sequence
  Description of Artificial Sequence: Synthetic oligonucleotide
ggccaguuuugagucucga

SEQ ID NO: 2459418 - RNA, 19 nt, Artificial Sequence
  Description of Artificial Sequence: Synthetic oligonucleotide
cgagggcagcucuccaaac

SEQ ID NO: 2459419 - RNA, 19 nt, Artificial Sequence
  Description of Artificial Sequence: Synthetic oligonucleotide
caccacgucugaggcucuc

SEQ ID NO: 2459420 - RNA, 19 nt, Artificial Sequence
  Description of Artificial Sequence: Synthetic oligonucleotide
cuccaaaguaggguugcuu

SEQ ID NO: 2459421 - RNA, 19 nt, Artificial Sequence
  Description of Artificial Sequence: Synthetic oligonucleotide
ggaccuuaucaaacccucu

SEQ ID NO: 2459422 - RNA, 19 nt, Artificial Sequence
  Description of Artificial Sequence: Synthetic oligonucleotide
gccgagcaccacgucugag

SEQ ID NO: 2459423 - RNA, 19 nt, Artificial Sequence
  Description of Artificial Sequence: Synthetic oligonucleotide
cccuucagacagaaauugu

SEQ ID NO: 2459424 - RNA, 19 nt, Artificial Sequence
  Description of Artificial Sequence: Synthetic oligonucleotide
cugaggcucuccccugccu

SEQ ID NO: 2459425 - RNA, 19 nt, Artificial Sequence
  Description of Artificial Sequence: Synthetic oligonucleotide
ugaccgcaucaggccaguu

SEQ ID NO: 2459426 - RNA, 19 nt, Artificial Sequence
  Description of Artificial Sequence: Synthetic oligonucleotide
ggacaacaccugagggguc

SEQ ID NO: 2459427 - RNA, 19 nt, Artificial Sequence
  Description of Artificial Sequence: Synthetic oligonucleotide
ccauggaugugaugauccu

SEQ ID NO: 2459428 - RNA, 19 nt, Artificial Sequence
  Description of Artificial Sequence: Synthetic oligonucleotide
gcuccacuggguagccuuc

SEQ ID NO: 2459429 - RNA, 19 nt, Artificial Sequence
  Description of Artificial Sequence: Synthetic oligonucleotide
gagggaacuggggcugauu

SEQ ID NO: 2459430 - RNA, 19 nt, Artificial Sequence
  Description of Artificial Sequence: Synthetic oligonucleotide
cgucuggacugacucgaga

SEQ ID NO: 2459431 - RNA, 19 nt, Artificial Sequence
  Description of Artificial Sequence: Synthetic oligonucleotide
ggacaccguuggacaacac

SEQ ID NO: 2459432 - RNA, 19 nt, Artificial Sequence
  Description of Artificial Sequence: Synthetic oligonucleotide
gccauccaggaaguugccu

SEQ ID NO: 2459433 - RNA, 19 nt, Artificial Sequence
  Description of Artificial Sequence: Synthetic oligonucleotide
cggucugaccgaagcugga

SEQ ID NO: 2459434 - RNA, 19 nt, Artificial Sequence
  Description of Artificial Sequence: Synthetic oligonucleotide
ccacggucagccggucuga

SEQ ID NO: 2459435 - RNA, 19 nt, Artificial Sequence
  Description of Artificial Sequence: Synthetic oligonucleotide
cgaucccuucagacagaaa

SEQ ID NO: 2459436 - RNA, 19 nt, Artificial Sequence
  Description of Artificial Sequence: Synthetic oligonucleotide
ggacgccagguuggguggu

SEQ ID NO: 2459437 - RNA, 19 nt, Artificial Sequence
  Description of Artificial Sequence: Synthetic oligonucleotide
gggguccagaggaccuuau

SEQ ID NO: 2459438 - RNA, 19 nt, Artificial Sequence
  Description of Artificial Sequence: Synthetic oligonucleotide
ggagacuguugggcucuuu

SEQ ID NO: 2459439 - RNA, 19 nt, Artificial Sequence
  Description of Artificial Sequence: Synthetic oligonucleotide
ccgacaccaugaggaaagu

SEQ ID NO: 2459440 - RNA, 19 nt, Artificial Sequence
  Description of Artificial Sequence: Synthetic oligonucleotide
agaaccacagaucacucgc

SEQ ID NO: 2459441 - RNA, 19 nt, Artificial Sequence
  Description of Artificial Sequence: Synthetic oligonucleotide
aaagaucugggccuugagu

SEQ ID NO: 2459442 - RNA, 19 nt, Artificial Sequence
  Description of Artificial Sequence: Synthetic oligonucleotide
cuugaguuaauuuagcagu

SEQ ID NO: 2459443 - RNA, 19 nt, Artificial Sequence
  Description of Artificial Sequence: Synthetic oligonucleotide
gaucacucgccacuugagg

SEQ ID NO: 2459444 - RNA, 19 nt, Artificial Sequence
  Description of Artificial Sequence: Synthetic oligonucleotide
ucagugugagacagaacgc

SEQ ID NO: 2459445 - RNA, 19 nt, Artificial Sequence
  Description of Artificial Sequence: Synthetic oligonucleotide
ugggccuugaguuaauuua

SEQ ID NO: 2459446 - RNA, 19 nt, Artificial Sequence
  Description of Artificial Sequence: Synthetic oligonucleotide
aucacucgccacuugaggu

SEQ ID NO: 2459447 - RNA, 19 nt, Artificial Sequence
  Description of Artificial Sequence: Synthetic oligonucleotide
uccgagaguggaaugcucu

SEQ ID NO: 2459448 - RNA, 19 nt, Artificial Sequence
  Description of Artificial Sequence: Synthetic oligonucleotide
aaccacagaucacucgcca

SEQ ID NO: 2459449 - RNA, 19 nt, Artificial Sequence
  Description of Artificial Sequence: Synthetic oligonucleotide
ccuugaguuaauuuagcag

SEQ ID NO: 2459450 - RNA, 19 nt, Artificial Sequence
  Description of Artificial Sequence: Synthetic oligonucleotide
ugugagacagaacgccacu

SEQ ID NO: 2459451 - RNA, 19 nt, Artificial Sequence
  Description of Artificial Sequence: Synthetic oligonucleotide
accacagaucacucgccac

SEQ ID NO: 2459452 - RNA, 19 nt, Artificial Sequence
  Description of Artificial Sequence: Synthetic oligonucleotide
cagugugagacagaacgcc

SEQ ID NO: 2459453 - RNA, 19 nt, Artificial Sequence
  Description of Artificial Sequence: Synthetic oligonucleotide
gagaguggaaugcucucca

SEQ ID NO: 2459454 - RNA, 19 nt, Artificial Sequence
  Description of Artificial Sequence: Synthetic oligonucleotide
ucaaagaucugggccuuga

SEQ ID NO: 2459455 - RNA, 19 nt, Artificial Sequence
  Description of Artificial Sequence: Synthetic oligonucleotide
ucacucgccacuugagguc

SEQ ID NO: 2459456 - RNA, 19 nt, Artificial Sequence
  Description of Artificial Sequence: Synthetic oligonucleotide
caaagaucugggccuugag

SEQ ID NO: 2459457 - RNA, 19 nt, Artificial Sequence
  Description of Artificial Sequence: Synthetic oligonucleotide
gaaccacagaucacucgcc

SEQ ID NO: 2459458 - RNA, 19 nt, Artificial Sequence
  Description of Artificial Sequence: Synthetic oligonucleotide
agugugagacagaacgcca

SEQ ID NO: 2459459 - RNA, 19 nt, Artificial Sequence
  Description of Artificial Sequence: Synthetic oligonucleotide
cacucgccacuugaggucg

SEQ ID NO: 2459460 - RNA, 19 nt, Artificial Sequence
  Description of Artificial Sequence: Synthetic oligonucleotide
agaucacucgccacuugag

SEQ ID NO: 2459461 - RNA, 19 nt, Artificial Sequence
  Description of Artificial Sequence: Synthetic oligonucleotide
acagaucacucgccacuug

SEQ ID NO: 2459462 - RNA, 19 nt, Artificial Sequence
  Description of Artificial Sequence: Synthetic oligonucleotide
gggccuugaguuaauuuag

SEQ ID NO: 2459463 - RNA, 19 nt, Artificial Sequence
  Description of Artificial Sequence: Synthetic oligonucleotide
agaucugggccuugaguua

SEQ ID NO: 2459464 - RNA, 19 nt, Artificial Sequence
  Description of Artificial Sequence: Synthetic oligonucleotide
cagaucacucgccacuuga

SEQ ID NO: 2459465 - RNA, 19 nt, Artificial Sequence
  Description of Artificial Sequence: Synthetic oligonucleotide
gugugagacagaacgccac

SEQ ID NO: 2459466 - RNA, 19 nt, Artificial Sequence
  Description of Artificial Sequence: Synthetic oligonucleotide
gccuugaguuaauuuagca

SEQ ID NO: 2459467 - RNA, 19 nt, Artificial Sequence
  Description of Artificial Sequence: Synthetic oligonucleotide
gaucugggccuugaguuaa

SEQ ID NO: 2459468 - RNA, 19 nt, Artificial Sequence
  Description of Artificial Sequence: Synthetic oligonucleotide
cuccgagaguggaaugcuc

SEQ ID NO: 2459469 - RNA, 19 nt, Artificial Sequence
  Description of Artificial Sequence: Synthetic oligonucleotide
ucgccacuugaggucgaug

SEQ ID NO: 2459470 - RNA, 19 nt, Artificial Sequence
  Description of Artificial Sequence: Synthetic oligonucleotide
ucugggccuugaguuaauu

SEQ ID NO: 2459471 - RNA, 19 nt, Artificial Sequence
  Description of Artificial Sequence: Synthetic oligonucleotide
cgagaguggaaugcucucc

SEQ ID NO: 2459472 - RNA, 19 nt, Artificial Sequence
  Description of Artificial Sequence: Synthetic oligonucleotide
ccgagaguggaaugcucuc

SEQ ID NO: 2459473 - RNA, 19 nt, Artificial Sequence
  Description of Artificial Sequence: Synthetic oligonucleotide
cugggccuugaguuaauuu

SEQ ID NO: 2459474 - RNA, 19 nt, Artificial Sequence
  Description of Artificial Sequence: Synthetic oligonucleotide
cacagaucacucgccacuu

SEQ ID NO: 2459475 - RNA, 19 nt, Artificial Sequence
  Description of Artificial Sequence: Synthetic oligonucleotide
aucugggccuugaguuaau

SEQ ID NO: 2459476 - RNA, 19 nt, Artificial Sequence
  Description of Artificial Sequence: Synthetic oligonucleotide
acucgccacuugaggucga

SEQ ID NO: 2459477 - RNA, 19 nt, Artificial Sequence
  Description of Artificial Sequence: Synthetic oligonucleotide
cucgccacuugaggucgau

SEQ ID NO: 2459478 - RNA, 19 nt, Artificial Sequence
  Description of Artificial Sequence: Synthetic oligonucleotide
uguagaguagccaagaucg

SEQ ID NO: 2459479 - RNA, 19 nt, Artificial Sequence
  Description of Artificial Sequence: Synthetic oligonucleotide
aauacuuuguuuguucugc

SEQ ID NO: 2459480 - RNA, 19 nt, Artificial Sequence
  Description of Artificial Sequence: Synthetic oligonucleotide
aaaauuaucauacuuccaa

SEQ ID NO: 2459481 - RNA, 19 nt, Artificial Sequence
  Description of Artificial Sequence: Synthetic oligonucleotide
acucauuugucuuugaggg

SEQ ID NO: 2459482 - RNA, 19 nt, Artificial Sequence
  Description of Artificial Sequence: Synthetic oligonucleotide
uuguuuaucaaugaaagcc

SEQ ID NO: 2459483 - RNA, 19 nt, Artificial Sequence
  Description of Artificial Sequence: Synthetic oligonucleotide
aauucuacacuccaauauc

SEQ ID NO: 2459484 - RNA, 19 nt, Artificial Sequence
  Description of Artificial Sequence: Synthetic oligonucleotide
aaugcguuaccccacagag

SEQ ID NO: 2459485 - RNA, 19 nt, Artificial Sequence
  Description of Artificial Sequence: Synthetic oligonucleotide
aaguagccaauucauagac

SEQ ID NO: 2459486 - RNA, 19 nt, Artificial Sequence
  Description of Artificial Sequence: Synthetic oligonucleotide
uuuacagcccuuuugaaug

SEQ ID NO: 2459487 - RNA, 19 nt, Artificial Sequence
  Description of Artificial Sequence: Synthetic oligonucleotide
uguucgaugagcaaaauua

SEQ ID NO: 2459488 - RNA, 19 nt, Artificial Sequence
  Description of Artificial Sequence: Synthetic oligonucleotide
aaaaggugaacauaccuga

SEQ ID NO: 2459489 - RNA, 19 nt, Artificial Sequence
  Description of Artificial Sequence: Synthetic oligonucleotide
auauggaauacuuuguuug

SEQ ID NO: 2459490 - RNA, 19 nt, Artificial Sequence
  Description of Artificial Sequence: Synthetic oligonucleotide
uucaguguggaaaacacca

SEQ ID NO: 2459491 - RNA, 19 nt, Artificial Sequence
  Description of Artificial Sequence: Synthetic oligonucleotide
ucgaugagcaaaauuauca

SEQ ID NO: 2459492 - RNA, 19 nt, Artificial Sequence
  Description of Artificial Sequence: Synthetic oligonucleotide
cuauuuugcaccaugguac

SEQ ID NO: 2459493 - RNA, 19 nt, Artificial Sequence
  Description of Artificial Sequence: Synthetic oligonucleotide
aggugaacauaccugaggc

SEQ ID NO: 2459494 - RNA, 19 nt, Artificial Sequence
  Description of Artificial Sequence: Synthetic oligonucleotide
aaauucuacacuccaauau

SEQ ID NO: 2459495 - RNA, 19 nt, Artificial Sequence
  Description of Artificial Sequence: Synthetic oligonucleotide
uguuuaucaaugaaagcca

SEQ ID NO: 2459496 - RNA, 19 nt, Artificial Sequence
  Description of Artificial Sequence: Synthetic oligonucleotide
ucaguggugaaaaggaugc

SEQ ID NO: 2459497 - RNA, 19 nt, Artificial Sequence
  Description of Artificial Sequence: Synthetic oligonucleotide
auauccaaccaauucagag

SEQ ID NO: 2459498 - RNA, 19 nt, Artificial Sequence
  Description of Artificial Sequence: Synthetic oligonucleotide
uuaucauacuuccaaauau

SEQ ID NO: 2459499 - RNA, 19 nt, Artificial Sequence
  Description of Artificial Sequence: Synthetic oligonucleotide
guagccaagaucgacaugg

SEQ ID NO: 2459500 - RNA, 19 nt, Artificial Sequence
  Description of Artificial Sequence: Synthetic oligonucleotide
gaaaacaccaacuagugua

SEQ ID NO: 2459501 - RNA, 19 nt, Artificial Sequence
  Description of Artificial Sequence: Synthetic oligonucleotide
ugucccaucacuuugccug

SEQ ID NO: 2459502 - RNA, 19 nt, Artificial Sequence
  Description of Artificial Sequence: Synthetic oligonucleotide
uguggaaaacaccaacuag

SEQ ID NO: 2459503 - RNA, 19 nt, Artificial Sequence
  Description of Artificial Sequence: Synthetic oligonucleotide
aaggugaacauaccugagg

SEQ ID NO: 2459504 - RNA, 19 nt, Artificial Sequence
  Description of Artificial Sequence: Synthetic oligonucleotide
cuugaaauuuuccaggaac

SEQ ID NO: 2459505 - RNA, 19 nt, Artificial Sequence
  Description of Artificial Sequence: Synthetic oligonucleotide
aauuaucauacuuccaaau

SEQ ID NO: 2459506 - RNA, 19 nt, Artificial Sequence
  Description of Artificial Sequence: Synthetic oligonucleotide
aaccaauucagagugagcu

SEQ ID NO: 2459507 - RNA, 19 nt, Artificial Sequence
  Description of Artificial Sequence: Synthetic oligonucleotide
uuaucauuggccaaggcuu

SEQ ID NO: 2459508 - RNA, 19 nt, Artificial Sequence
  Description of Artificial Sequence: Synthetic oligonucleotide
ugcguuaccccacagagcu

SEQ ID NO: 2459509 - RNA, 19 nt, Artificial Sequence
  Description of Artificial Sequence: Synthetic oligonucleotide
ugcggaauucauaaaaugu

SEQ ID NO: 2459510 - RNA, 19 nt, Artificial Sequence
  Description of Artificial Sequence: Synthetic oligonucleotide
aauucuucuugccaugccu

SEQ ID NO: 2459511 - RNA, 19 nt, Artificial Sequence
  Description of Artificial Sequence: Synthetic oligonucleotide
aaugucccaucacuuugcc

SEQ ID NO: 2459512 - RNA, 19 nt, Artificial Sequence
  Description of Artificial Sequence: Synthetic oligonucleotide
aaaguagccaauucauaga

SEQ ID NO: 2459513 - RNA, 19 nt, Artificial Sequence
  Description of Artificial Sequence: Synthetic oligonucleotide
uauucaguguggaaaacac

SEQ ID NO: 2459514 - RNA, 19 nt, Artificial Sequence
  Description of Artificial Sequence: Synthetic oligonucleotide
ucgacaugggcauuuacag

SEQ ID NO: 2459515 - RNA, 19 nt, Artificial Sequence
  Description of Artificial Sequence: Synthetic oligonucleotide
uagcaaaaggugaacauac

SEQ ID NO: 2459516 - RNA, 19 nt, Artificial Sequence
  Description of Artificial Sequence: Synthetic oligonucleotide
acugucugcacucucguuc

SEQ ID NO: 2459517 - RNA, 19 nt, Artificial Sequence
  Description of Artificial Sequence: Synthetic oligonucleotide
ugagacucgagguaguuga

SEQ ID NO: 2459518 - RNA, 19 nt, Artificial Sequence
  Description of Artificial Sequence: Synthetic oligonucleotide
gaaagccaaauuuggaaug

SEQ ID NO: 2459519 - RNA, 19 nt, Artificial Sequence
  Description of Artificial Sequence: Synthetic oligonucleotide
uggaaaacaccaacuagug

SEQ ID NO: 2459520 - RNA, 19 nt, Artificial Sequence
  Description of Artificial Sequence: Synthetic oligonucleotide
caaaaggugaacauaccug

SEQ ID NO: 2459521 - RNA, 19 nt, Artificial Sequence
  Description of Artificial Sequence: Synthetic oligonucleotide
caauauccaaccaauucag

SEQ ID NO: 2459522 - RNA, 19 nt, Artificial Sequence
  Description of Artificial Sequence: Synthetic oligonucleotide
aaaugucccaucacuuugc

SEQ ID NO: 2459523 - RNA, 19 nt, Artificial Sequence
  Description of Artificial Sequence: Synthetic oligonucleotide
auccaaccaauucagagug

SEQ ID NO: 2459524 - RNA, 19 nt, Artificial Sequence
  Description of Artificial Sequence: Synthetic oligonucleotide
uuccuauuuugcaccaugg

SEQ ID NO: 2459525 - RNA, 19 nt, Artificial Sequence
  Description of Artificial Sequence: Synthetic oligonucleotide
cauacuuccaaauauggaa

SEQ ID NO: 2459526 - RNA, 19 nt, Artificial Sequence
  Description of Artificial Sequence: Synthetic oligonucleotide
aauucagagugagcugucc

SEQ ID NO: 2459527 - RNA, 19 nt, Artificial Sequence
  Description of Artificial Sequence: Synthetic oligonucleotide
ugaggaauucuucuugcca

SEQ ID NO: 2459528 - RNA, 19 nt, Artificial Sequence
  Description of Artificial Sequence: Synthetic oligonucleotide
uacacuccaauauccaacc

SEQ ID NO: 2459529 - RNA, 19 nt, Artificial Sequence
  Description of Artificial Sequence: Synthetic oligonucleotide
uauccaaccaauucagagu

SEQ ID NO: 2459530 - RNA, 19 nt, Artificial Sequence
  Description of Artificial Sequence: Synthetic oligonucleotide
caugguaccagguagguga

SEQ ID NO: 2459531 - RNA, 19 nt, Artificial Sequence
  Description of Artificial Sequence: Synthetic oligonucleotide
uuuccuauuuugcaccaug

SEQ ID NO: 2459532 - RNA, 19 nt, Artificial Sequence
  Description of Artificial Sequence: Synthetic oligonucleotide
guagccaauucauagacuc

SEQ ID NO: 2459533 - RNA, 19 nt, Artificial Sequence
  Description of Artificial Sequence: Synthetic oligonucleotide
uuaucaaugaaagccaaau

SEQ ID NO: 2459534 - RNA, 19 nt, Artificial Sequence
  Description of Artificial Sequence: Synthetic oligonucleotide
uccgaaugcgagcauggcg

SEQ ID NO: 2459535 - RNA, 19 nt, Artificial Sequence
  Description of Artificial Sequence: Synthetic oligonucleotide
ccaaauauggaauacuuug

SEQ ID NO: 2459536 - RNA, 19 nt, Artificial Sequence
  Description of Artificial Sequence: Synthetic oligonucleotide
uucagagugagcuguccgg

SEQ ID NO: 2459537 - RNA, 19 nt, Artificial Sequence
  Description of Artificial Sequence: Synthetic oligonucleotide
cuuguuuaucaaugaaagc

SEQ ID NO: 2459538 - RNA, 19 nt, Artificial Sequence
  Description of Artificial Sequence: Synthetic oligonucleotide
ugaaagccaaauuuggaau

SEQ ID NO: 2459539 - RNA, 19 nt, Artificial Sequence
  Description of Artificial Sequence: Synthetic oligonucleotide
augaggaauucuucuugcc

SEQ ID NO: 2459540 - RNA, 19 nt, Artificial Sequence
  Description of Artificial Sequence: Synthetic oligonucleotide
ugagggcuugagaaaauag

SEQ ID NO: 2459541 - RNA, 19 nt, Artificial Sequence
  Description of Artificial Sequence: Synthetic oligonucleotide
uccaccacagaacaugaac

SEQ ID NO: 2459542 - RNA, 19 nt, Artificial Sequence
  Description of Artificial Sequence: Synthetic oligonucleotide
uccauauucaguguggaaa

SEQ ID NO: 2459543 - RNA, 19 nt, Artificial Sequence
  Description of Artificial Sequence: Synthetic oligonucleotide
acuaguguagaguagccaa

SEQ ID NO: 2459544 - RNA, 19 nt, Artificial Sequence
  Description of Artificial Sequence: Synthetic oligonucleotide
cuuuugaaugcguuacccc

SEQ ID NO: 2459545 - RNA, 19 nt, Artificial Sequence
  Description of Artificial Sequence: Synthetic oligonucleotide
ggcuugagaaaauaggugc

SEQ ID NO: 2459546 - RNA, 19 nt, Artificial Sequence
  Description of Artificial Sequence: Synthetic oligonucleotide
uauuuugcaccaugguacc

SEQ ID NO: 2459547 - RNA, 19 nt, Artificial Sequence
  Description of Artificial Sequence: Synthetic oligonucleotide
gagggcuugagaaaauagg

SEQ ID NO: 2459548 - RNA, 19 nt, Artificial Sequence
  Description of Artificial Sequence: Synthetic oligonucleotide
auuaucauacuuccaaaua

SEQ ID NO: 2459549 - RNA, 19 nt, Artificial Sequence
  Description of Artificial Sequence: Synthetic oligonucleotide
aaugcgagcauggcgcgac

SEQ ID NO: 2459550 - RNA, 19 nt, Artificial Sequence
  Description of Artificial Sequence: Synthetic oligonucleotide
uauggaauacuuuguuugu

SEQ ID NO: 2459551 - RNA, 19 nt, Artificial Sequence
  Description of Artificial Sequence: Synthetic oligonucleotide
auucagagugagcuguccg

SEQ ID NO: 2459552 - RNA, 19 nt, Artificial Sequence
  Description of Artificial Sequence: Synthetic oligonucleotide
gaacucauuugucuuugag

SEQ ID NO: 2459553 - RNA, 19 nt, Artificial Sequence
  Description of Artificial Sequence: Synthetic oligonucleotide
gacucgagguaguugacgc

SEQ ID NO: 2459554 - RNA, 19 nt, Artificial Sequence
  Description of Artificial Sequence: Synthetic oligonucleotide
uguugagggcuccauauuc

SEQ ID NO: 2459555 - RNA, 19 nt, Artificial Sequence
  Description of Artificial Sequence: Synthetic oligonucleotide
uugccaugccuuaucauug

SEQ ID NO: 2459556 - RNA, 19 nt, Artificial Sequence
  Description of Artificial Sequence: Synthetic oligonucleotide
uagacuccuucuuugggag

SEQ ID NO: 2459557 - RNA, 19 nt, Artificial Sequence
  Description of Artificial Sequence: Synthetic oligonucleotide
uguagcaaaaggugaacau

SEQ ID NO: 2459558 - RNA, 19 nt, Artificial Sequence
  Description of Artificial Sequence: Synthetic oligonucleotide
gaauacuuuguuuguucug

SEQ ID NO: 2459559 - RNA, 19 nt, Artificial Sequence
  Description of Artificial Sequence: Synthetic oligonucleotide
cuacacuccaauauccaac

SEQ ID NO: 2459560 - RNA, 19 nt, Artificial Sequence
  Description of Artificial Sequence: Synthetic oligonucleotide
uuccaaauauggaauacuu

SEQ ID NO: 2459561 - RNA, 19 nt, Artificial Sequence
  Description of Artificial Sequence: Synthetic oligonucleotide
uggaaacuacuucaguggu

SEQ ID NO: 2459562 - RNA, 19 nt, Artificial Sequence
  Description of Artificial Sequence: Synthetic oligonucleotide
aaagccaaauuuggaauga

SEQ ID NO: 2459563 - RNA, 19 nt, Artificial Sequence
  Description of Artificial Sequence: Synthetic oligonucleotide
ugggaucaggaacauauuc

SEQ ID NO: 2459564 - RNA, 19 nt, Artificial Sequence
  Description of Artificial Sequence: Synthetic oligonucleotide
uuuugcaccaugguaccag

SEQ ID NO: 2459565 - RNA, 19 nt, Artificial Sequence
  Description of Artificial Sequence: Synthetic oligonucleotide
ucaggaacauauucugcug

SEQ ID NO: 2459566 - RNA, 19 nt, Artificial Sequence
  Description of Artificial Sequence: Synthetic oligonucleotide
aaccucuuguuuaucaaug

SEQ ID NO: 2459567 - RNA, 19 nt, Artificial Sequence
  Description of Artificial Sequence: Synthetic oligonucleotide
ucuguugagggcuccauau

SEQ ID NO: 2459568 - RNA, 19 nt, Artificial Sequence
  Description of Artificial Sequence: Synthetic oligonucleotide
ucucguuccaccacagaac

SEQ ID NO: 2459569 - RNA, 19 nt, Artificial Sequence
  Description of Artificial Sequence: Synthetic oligonucleotide
agguaggugaucucaaccu

SEQ ID NO: 2459570 - RNA, 19 nt, Artificial Sequence
  Description of Artificial Sequence: Synthetic oligonucleotide
uguccggagguuaacauuu

SEQ ID NO: 2459571 - RNA, 19 nt, Artificial Sequence
  Description of Artificial Sequence: Synthetic oligonucleotide
uaaaaugucccaucacuuu

SEQ ID NO: 2459572 - RNA, 19 nt, Artificial Sequence
  Description of Artificial Sequence: Synthetic oligonucleotide
uucgaugagcaaaauuauc

SEQ ID NO: 2459573 - RNA, 19 nt, Artificial Sequence
  Description of Artificial Sequence: Synthetic oligonucleotide
ugagcaaaauuaucauacu

SEQ ID NO: 2459574 - RNA, 19 nt, Artificial Sequence
  Description of Artificial Sequence: Synthetic oligonucleotide
agagugagcuguccggagg

SEQ ID NO: 2459575 - RNA, 19 nt, Artificial Sequence
  Description of Artificial Sequence: Synthetic oligonucleotide
aggaacauauucugcugag

SEQ ID NO: 2459576 - RNA, 19 nt, Artificial Sequence
  Description of Artificial Sequence: Synthetic oligonucleotide
cuuccgaaugcgagcaugg

SEQ ID NO: 2459577 - RNA, 19 nt, Artificial Sequence
  Description of Artificial Sequence: Synthetic oligonucleotide
uggugaaaaggaugcuggg

SEQ ID NO: 2459578 - RNA, 19 nt, Artificial Sequence
  Description of Artificial Sequence: Synthetic oligonucleotide
auucaguguggaaaacacc

SEQ ID NO: 2459579 - RNA, 19 nt, Artificial Sequence
  Description of Artificial Sequence: Synthetic oligonucleotide
caucacuuugccuggggcc

SEQ ID NO: 2459580 - RNA, 19 nt, Artificial Sequence
  Description of Artificial Sequence: Synthetic oligonucleotide
agccaagaucgacaugggc

SEQ ID NO: 2459581 - RNA, 19 nt, Artificial Sequence
  Description of Artificial Sequence: Synthetic oligonucleotide
agaaaauaggugcggaauu

SEQ ID NO: 2459582 - RNA, 19 nt, Artificial Sequence
  Description of Artificial Sequence: Synthetic oligonucleotide
ucuacacuccaauauccaa

SEQ ID NO: 2459583 - RNA, 19 nt, Artificial Sequence
  Description of Artificial Sequence: Synthetic oligonucleotide
aaauuuggaaugaggaauu

SEQ ID NO: 2459584 - RNA, 19 nt, Artificial Sequence
  Description of Artificial Sequence: Synthetic oligonucleotide
ugagaaaauaggugcggaa

SEQ ID NO: 2459585 - RNA, 19 nt, Artificial Sequence
  Description of Artificial Sequence: Synthetic oligonucleotide
caugccuuaucauuggcca

SEQ ID NO: 2459586 - RNA, 19 nt, Artificial Sequence
  Description of Artificial Sequence: Synthetic oligonucleotide
uuugguuucugggacucgc

SEQ ID NO: 2459587 - RNA, 19 nt, Artificial Sequence
  Description of Artificial Sequence: Synthetic oligonucleotide
uccaaauauggaauacuuu

SEQ ID NO: 2459588 - RNA, 19 nt, Artificial Sequence
  Description of Artificial Sequence: Synthetic oligonucleotide
gacucugggguccucauga

SEQ ID NO: 2459589 - RNA, 19 nt, Artificial Sequence
  Description of Artificial Sequence: Synthetic oligonucleotide
uuggccaaggcuuuacgaa

SEQ ID NO: 2459590 - RNA, 19 nt, Artificial Sequence
  Description of Artificial Sequence: Synthetic oligonucleotide
ugucuuugagggcuugaga

SEQ ID NO: 2459591 - RNA, 19 nt, Artificial Sequence
  Description of Artificial Sequence: Synthetic oligonucleotide
acgaacugcuguucgauga

SEQ ID NO: 2459592 - RNA, 19 nt, Artificial Sequence
  Description of Artificial Sequence: Synthetic oligonucleotide
gguaguugacgcuuucccg

SEQ ID NO: 2459593 - RNA, 19 nt, Artificial Sequence
  Description of Artificial Sequence: Synthetic oligonucleotide
guaguugacgcuuucccga

SEQ ID NO: 2459594 - RNA, 19 nt, Artificial Sequence
  Description of Artificial Sequence: Synthetic oligonucleotide
uccuauuuugcaccauggu

SEQ ID NO: 2459595 - RNA, 19 nt, Artificial Sequence
  Description of Artificial Sequence: Synthetic oligonucleotide
auauucaguguggaaaaca

SEQ ID NO: 2459596 - RNA, 19 nt, Artificial Sequence
  Description of Artificial Sequence: Synthetic oligonucleotide
agugacggccuuugguuuc

SEQ ID NO: 2459597 - RNA, 19 nt, Artificial Sequence
  Description of Artificial Sequence: Synthetic oligonucleotide
aggcuuuacgaacugcugu

SEQ ID NO: 2459598 - RNA, 19 nt, Artificial Sequence
  Description of Artificial Sequence: Synthetic oligonucleotide
uggggccuguagcaaaagg

SEQ ID NO: 2459599 - RNA, 19 nt, Artificial Sequence
  Description of Artificial Sequence: Synthetic oligonucleotide
gacgcuuucccgaacagca

SEQ ID NO: 2459600 - RNA, 19 nt, Artificial Sequence
  Description of Artificial Sequence: Synthetic oligonucleotide
gugcggaauucauaaaaug

SEQ ID NO: 2459601 - RNA, 19 nt, Artificial Sequence
  Description of Artificial Sequence: Synthetic oligonucleotide
uagccaauucauagacucc

SEQ ID NO: 2459602 - RNA, 19 nt, Artificial Sequence
  Description of Artificial Sequence: Synthetic oligonucleotide
agcaaaaggugaacauacc

SEQ ID NO: 2459603 - RNA, 19 nt, Artificial Sequence
  Description of Artificial Sequence: Synthetic oligonucleotide
gaucucaaccucuuguuua

SEQ ID NO: 2459604 - RNA, 19 nt, Artificial Sequence
  Description of Artificial Sequence: Synthetic oligonucleotide
augaacucuguugagggcu

SEQ ID NO: 2459605 - RNA, 19 nt, Artificial Sequence
  Description of Artificial Sequence: Synthetic oligonucleotide
aggugcggaauucauaaaa

SEQ ID NO: 2459606 - RNA, 19 nt, Artificial Sequence
  Description of Artificial Sequence: Synthetic oligonucleotide
cauauucugcugagacucg

SEQ ID NO: 2459607 - RNA, 19 nt, Artificial Sequence
  Description of Artificial Sequence: Synthetic oligonucleotide
caacuaguguagaguagcc

SEQ ID NO: 2459608 - RNA, 19 nt, Artificial Sequence
  Description of Artificial Sequence: Synthetic oligonucleotide
ugccaugccuuaucauugg

SEQ ID NO: 2459609 - RNA, 19 nt, Artificial Sequence
  Description of Artificial Sequence: Synthetic oligonucleotide
ugccuuaucauuggccaag

SEQ ID NO: 2459610 - RNA, 19 nt, Artificial Sequence
  Description of Artificial Sequence: Synthetic oligonucleotide
aacuaguguagaguagcca

SEQ ID NO: 2459611 - RNA, 19 nt, Artificial Sequence
  Description of Artificial Sequence: Synthetic oligonucleotide
ggaauucauaaaauguccc

SEQ ID NO: 2459612 - RNA, 19 nt, Artificial Sequence
  Description of Artificial Sequence: Synthetic oligonucleotide
uugaaugcguuaccccaca

SEQ ID NO: 2459613 - RNA, 19 nt, Artificial Sequence
  Description of Artificial Sequence: Synthetic oligonucleotide
auucauagacuccuucuuu

SEQ ID NO: 2459614 - RNA, 19 nt, Artificial Sequence
  Description of Artificial Sequence: Synthetic oligonucleotide
ucugcacucucguuccacc

SEQ ID NO: 2459615 - RNA, 19 nt, Artificial Sequence
  Description of Artificial Sequence: Synthetic oligonucleotide
accaauucagagugagcug

SEQ ID NO: 2459616 - RNA, 19 nt, Artificial Sequence
  Description of Artificial Sequence: Synthetic oligonucleotide
cuuaucauuggccaaggcu

SEQ ID NO: 2459617 - RNA, 19 nt, Artificial Sequence
  Description of Artificial Sequence: Synthetic oligonucleotide
guguagaguagccaagauc

SEQ ID NO: 2459618 - RNA, 19 nt, Artificial Sequence
  Description of Artificial Sequence: Synthetic oligonucleotide
agccaaauuuggaaugagg

SEQ ID NO: 2459619 - RNA, 19 nt, Artificial Sequence
  Description of Artificial Sequence: Synthetic oligonucleotide
aauauccaaccaauucaga

SEQ ID NO: 2459620 - RNA, 19 nt, Artificial Sequence
  Description of Artificial Sequence: Synthetic oligonucleotide
caaaauuaucauacuucca

SEQ ID NO: 2459621 - RNA, 19 nt, Artificial Sequence
  Description of Artificial Sequence: Synthetic oligonucleotide
caugaacucuguugagggc

SEQ ID NO: 2459622 - RNA, 19 nt, Artificial Sequence
  Description of Artificial Sequence: Synthetic oligonucleotide
agccaauucauagacuccu

SEQ ID NO: 2459623 - RNA, 19 nt, Artificial Sequence
  Description of Artificial Sequence: Synthetic oligonucleotide
ugaaugcguuaccccacag

SEQ ID NO: 2459624 - RNA, 19 nt, Artificial Sequence
  Description of Artificial Sequence: Synthetic oligonucleotide
acauaccugaggcgccagc

SEQ ID NO: 2459625 - RNA, 19 nt, Artificial Sequence
  Description of Artificial Sequence: Synthetic oligonucleotide
uggccaaggcuuuacgaac

SEQ ID NO: 2459626 - RNA, 19 nt, Artificial Sequence
  Description of Artificial Sequence: Synthetic oligonucleotide
ggugaacauaccugaggcg

SEQ ID NO: 2459627 - RNA, 19 nt, Artificial Sequence
  Description of Artificial Sequence: Synthetic oligonucleotide
uugacgcuuucccgaacag

SEQ ID NO: 2459628 - RNA, 19 nt, Artificial Sequence
  Description of Artificial Sequence: Synthetic oligonucleotide
uagaguagccaagaucgac

SEQ ID NO: 2459629 - RNA, 19 nt, Artificial Sequence
  Description of Artificial Sequence: Synthetic oligonucleotide
aacuacuucaguggugaaa

SEQ ID NO: 2459630 - RNA, 19 nt, Artificial Sequence
  Description of Artificial Sequence: Synthetic oligonucleotide
ccgaaugcgagcauggcgc

SEQ ID NO: 2459631 - RNA, 19 nt, Artificial Sequence
  Description of Artificial Sequence: Synthetic oligonucleotide
auaaaaugucccaucacuu

SEQ ID NO: 2459632 - RNA, 19 nt, Artificial Sequence
  Description of Artificial Sequence: Synthetic oligonucleotide
ugaucucaaccucuuguuu

SEQ ID NO: 2459633 - RNA, 19 nt, Artificial Sequence
  Description of Artificial Sequence: Synthetic oligonucleotide
uagccaagaucgacauggg

SEQ ID NO: 2459634 - RNA, 19 nt, Artificial Sequence
  Description of Artificial Sequence: Synthetic oligonucleotide
agugucucccagccgcgcg

SEQ ID NO: 2459635 - RNA, 19 nt, Artificial Sequence
  Description of Artificial Sequence: Synthetic oligonucleotide
gagaccagugucucccagc

SEQ ID NO: 2459636 - RNA, 19 nt, Artificial Sequence
  Description of Artificial Sequence: Synthetic oligonucleotide
aaggcuuuacgaacugcug

SEQ ID NO: 2459637 - RNA, 19 nt, Artificial Sequence
  Description of Artificial Sequence: Synthetic oligonucleotide
agaguagccaagaucgaca

SEQ ID NO: 2459638 - RNA, 19 nt, Artificial Sequence
  Description of Artificial Sequence: Synthetic oligonucleotide
ggcuuuccuauuuugcacc

SEQ ID NO: 2459639 - RNA, 19 nt, Artificial Sequence
  Description of Artificial Sequence: Synthetic oligonucleotide
uacgaacugcuguucgaug

SEQ ID NO: 2459640 - RNA, 19 nt, Artificial Sequence
  Description of Artificial Sequence: Synthetic oligonucleotide
ccaauauccaaccaauuca

SEQ ID NO: 2459641 - RNA, 19 nt, Artificial Sequence
  Description of Artificial Sequence: Synthetic oligonucleotide
aggagugacggccuuuggu

SEQ ID NO: 2459642 - RNA, 19 nt, Artificial Sequence
  Description of Artificial Sequence: Synthetic oligonucleotide
gaaugcguuaccccacaga

SEQ ID NO: 2459643 - RNA, 19 nt, Artificial Sequence
  Description of Artificial Sequence: Synthetic oligonucleotide
aucgacaugggcauuuaca

SEQ ID NO: 2459644 - RNA, 19 nt, Artificial Sequence
  Description of Artificial Sequence: Synthetic oligonucleotide
cggaauucauaaaaugucc

SEQ ID NO: 2459645 - RNA, 19 nt, Artificial Sequence
  Description of Artificial Sequence: Synthetic oligonucleotide
agacucgagguaguugacg

SEQ ID NO: 2459646 - RNA, 19 nt, Artificial Sequence
  Description of Artificial Sequence: Synthetic oligonucleotide
uccucaggcagcuuccgaa

SEQ ID NO: 2459647 - RNA, 19 nt, Artificial Sequence
  Description of Artificial Sequence: Synthetic oligonucleotide
aucucaaccucuuguuuau

SEQ ID NO: 2459648 - RNA, 19 nt, Artificial Sequence
  Description of Artificial Sequence: Synthetic oligonucleotide
cauuggccaaggcuuuacg

SEQ ID NO: 2459649 - RNA, 19 nt, Artificial Sequence
  Description of Artificial Sequence: Synthetic oligonucleotide
aaauaggugcggaauucau

SEQ ID NO: 2459650 - RNA, 19 nt, Artificial Sequence
  Description of Artificial Sequence: Synthetic oligonucleotide
caaccaauucagagugagc

SEQ ID NO: 2459651 - RNA, 19 nt, Artificial Sequence
  Description of Artificial Sequence: Synthetic oligonucleotide
ucaugagaccagugucucc

SEQ ID NO: 2459652 - RNA, 19 nt, Artificial Sequence
  Description of Artificial Sequence: Synthetic oligonucleotide
ugagcuguccggagguuaa

SEQ ID NO: 2459653 - RNA, 19 nt, Artificial Sequence
  Description of Artificial Sequence: Synthetic oligonucleotide
aguugacgcuuucccgaac

SEQ ID NO: 2459654 - RNA, 19 nt, Artificial Sequence
  Description of Artificial Sequence: Synthetic oligonucleotide
guugacgcuuucccgaaca

SEQ ID NO: 2459655 - RNA, 19 nt, Artificial Sequence
  Description of Artificial Sequence: Synthetic oligonucleotide
guggaaaacaccaacuagu

SEQ ID NO: 2459656 - RNA, 19 nt, Artificial Sequence
  Description of Artificial Sequence: Synthetic oligonucleotide
uuugagggcuugagaaaau

SEQ ID NO: 2459657 - RNA, 19 nt, Artificial Sequence
  Description of Artificial Sequence: Synthetic oligonucleotide
cucguuccaccacagaaca

SEQ ID NO: 2459658 - RNA, 19 nt, Artificial Sequence
  Description of Artificial Sequence: Synthetic oligonucleotide
acaugggcauuuacagccc

SEQ ID NO: 2459659 - RNA, 19 nt, Artificial Sequence
  Description of Artificial Sequence: Synthetic oligonucleotide
ccaacuaguguagaguagc

SEQ ID NO: 2459660 - RNA, 19 nt, Artificial Sequence
  Description of Artificial Sequence: Synthetic oligonucleotide
uuuguuuguucugccucca

SEQ ID NO: 2459661 - RNA, 19 nt, Artificial Sequence
  Description of Artificial Sequence: Synthetic oligonucleotide
uccgggcuucaucugaaaa

SEQ ID NO: 2459662 - RNA, 19 nt, Artificial Sequence
  Description of Artificial Sequence: Synthetic oligonucleotide
uuacgaacugcuguucgau

SEQ ID NO: 2459663 - RNA, 19 nt, Artificial Sequence
  Description of Artificial Sequence: Synthetic oligonucleotide
aagaucgacaugggcauuu

SEQ ID NO: 2459664 - RNA, 19 nt, Artificial Sequence
  Description of Artificial Sequence: Synthetic oligonucleotide
ucuuugggaggcuuuccua

SEQ ID NO: 2459665 - RNA, 19 nt, Artificial Sequence
  Description of Artificial Sequence: Synthetic oligonucleotide
aucacuuugccuggggccu

SEQ ID NO: 2459666 - RNA, 19 nt, Artificial Sequence
  Description of Artificial Sequence: Synthetic oligonucleotide
agcagccacgacucugggg

SEQ ID NO: 2459667 - RNA, 19 nt, Artificial Sequence
  Description of Artificial Sequence: Synthetic oligonucleotide
cucucguuccaccacagaa

SEQ ID NO: 2459668 - RNA, 19 nt, Artificial Sequence
  Description of Artificial Sequence: Synthetic oligonucleotide
gucccaucacuuugccugg

SEQ ID NO: 2459669 - RNA, 19 nt, Artificial Sequence
  Description of Artificial Sequence: Synthetic oligonucleotide
uccaaccaauucagaguga

SEQ ID NO: 2459670 - RNA, 19 nt, Artificial Sequence
  Description of Artificial Sequence: Synthetic oligonucleotide
cuccaaauucuacacucca

SEQ ID NO: 2459671 - RNA, 19 nt, Artificial Sequence
  Description of Artificial Sequence: Synthetic oligonucleotide
ugacgcuuucccgaacagc

SEQ ID NO: 2459672 - RNA, 19 nt, Artificial Sequence
  Description of Artificial Sequence: Synthetic oligonucleotide
cauauucaguguggaaaac

SEQ ID NO: 2459673 - RNA, 19 nt, Artificial Sequence
  Description of Artificial Sequence: Synthetic oligonucleotide
gccuccaaauucuacacuc

SEQ ID NO: 2459674 - RNA, 19 nt, Artificial Sequence
  Description of Artificial Sequence: Synthetic oligonucleotide
cuuugagggcuugagaaaa

SEQ ID NO: 2459675 - RNA, 19 nt, Artificial Sequence
  Description of Artificial Sequence: Synthetic oligonucleotide
guagcaaaaggugaacaua

SEQ ID NO: 2459676 - RNA, 19 nt, Artificial Sequence
  Description of Artificial Sequence: Synthetic oligonucleotide
gaucgacaugggcauuuac

SEQ ID NO: 2459677 - RNA, 19 nt, Artificial Sequence
  Description of Artificial Sequence: Synthetic oligonucleotide
gccaagaucgacaugggca

SEQ ID NO: 2459678 - RNA, 19 nt, Artificial Sequence
  Description of Artificial Sequence: Synthetic oligonucleotide
ugggguccucaugagacca

SEQ ID NO: 2459679 - RNA, 19 nt, Artificial Sequence
  Description of Artificial Sequence: Synthetic oligonucleotide
uugggaggcuuuccuauuu

SEQ ID NO: 2459680 - RNA, 19 nt, Artificial Sequence
  Description of Artificial Sequence: Synthetic oligonucleotide
gggacucgcgcucuucucg

SEQ ID NO: 2459681 - RNA, 19 nt, Artificial Sequence
  Description of Artificial Sequence: Synthetic oligonucleotide
gagaaaauaggugcggaau

SEQ ID NO: 2459682 - RNA, 19 nt, Artificial Sequence
  Description of Artificial Sequence: Synthetic oligonucleotide
cacuccaauauccaaccaa

SEQ ID NO: 2459683 - RNA, 19 nt, Artificial Sequence
  Description of Artificial Sequence: Synthetic oligonucleotide
uaguugacgcuuucccgaa

SEQ ID NO: 2459684 - RNA, 19 nt, Artificial Sequence
  Description of Artificial Sequence: Synthetic oligonucleotide
ccuuuugaaugcguuaccc

SEQ ID NO: 2459685 - RNA, 19 nt, Artificial Sequence
  Description of Artificial Sequence: Synthetic oligonucleotide
gcggaauucauaaaauguc

SEQ ID NO: 2459686 - RNA, 19 nt, Artificial Sequence
  Description of Artificial Sequence: Synthetic oligonucleotide
accaacuaguguagaguag

SEQ ID NO: 2459687 - RNA, 19 nt, Artificial Sequence
  Description of Artificial Sequence: Synthetic oligonucleotide
aacauaccugaggcgccag

SEQ ID NO: 2459688 - RNA, 19 nt, Artificial Sequence
  Description of Artificial Sequence: Synthetic oligonucleotide
auauucugcugagacucga

SEQ ID NO: 2459689 - RNA, 19 nt, Artificial Sequence
  Description of Artificial Sequence: Synthetic oligonucleotide
ucuugccaugccuuaucau

SEQ ID NO: 2459690 - RNA, 19 nt, Artificial Sequence
  Description of Artificial Sequence: Synthetic oligonucleotide
uuugggaggcuuuccuauu

SEQ ID NO: 2459691 - RNA, 19 nt, Artificial Sequence
  Description of Artificial Sequence: Synthetic oligonucleotide
ccaugccuuaucauuggcc

SEQ ID NO: 2459692 - RNA, 19 nt, Artificial Sequence
  Description of Artificial Sequence: Synthetic oligonucleotide
ggaauucuucuugccaugc

SEQ ID NO: 2459693 - RNA, 19 nt, Artificial Sequence
  Description of Artificial Sequence: Synthetic oligonucleotide
ucucccagccgcgcgacug

SEQ ID NO: 2459694 - RNA, 19 nt, Artificial Sequence
  Description of Artificial Sequence: Synthetic oligonucleotide
guugagggcuccauauuca

SEQ ID NO: 2459695 - RNA, 19 nt, Artificial Sequence
  Description of Artificial Sequence: Synthetic oligonucleotide
acucgagguaguugacgcu

SEQ ID NO: 2459696 - RNA, 19 nt, Artificial Sequence
  Description of Artificial Sequence: Synthetic oligonucleotide
cugaggcgccagcacacgg

SEQ ID NO: 2459697 - RNA, 19 nt, Artificial Sequence
  Description of Artificial Sequence: Synthetic oligonucleotide
uugagggcuugagaaaaua

SEQ ID NO: 2459698 - RNA, 19 nt, Artificial Sequence
  Description of Artificial Sequence: Synthetic oligonucleotide
accugaggcgccagcacac

SEQ ID NO: 2459699 - RNA, 19 nt, Artificial Sequence
  Description of Artificial Sequence: Synthetic oligonucleotide
ggugaucucaaccucuugu

SEQ ID NO: 2459700 - RNA, 19 nt, Artificial Sequence
  Description of Artificial Sequence: Synthetic oligonucleotide
uuguuuguucugccuccaa

SEQ ID NO: 2459701 - RNA, 19 nt, Artificial Sequence
  Description of Artificial Sequence: Synthetic oligonucleotide
cuugccaugccuuaucauu

SEQ ID NO: 2459702 - RNA, 19 nt, Artificial Sequence
  Description of Artificial Sequence: Synthetic oligonucleotide
aguagccaauucauagacu

SEQ ID NO: 2459703 - RNA, 19 nt, Artificial Sequence
  Description of Artificial Sequence: Synthetic oligonucleotide
acacuccaauauccaacca

SEQ ID NO: 2459704 - RNA, 19 nt, Artificial Sequence
  Description of Artificial Sequence: Synthetic oligonucleotide
aggugaucucaaccucuug

SEQ ID NO: 2459705 - RNA, 19 nt, Artificial Sequence
  Description of Artificial Sequence: Synthetic oligonucleotide
cacucucguuccaccacag

SEQ ID NO: 2459706 - RNA, 19 nt, Artificial Sequence
  Description of Artificial Sequence: Synthetic oligonucleotide
aacucuguugagggcucca

SEQ ID NO: 2459707 - RNA, 19 nt, Artificial Sequence
  Description of Artificial Sequence: Synthetic oligonucleotide
augcgagcauggcgcgacc

SEQ ID NO: 2459708 - RNA, 19 nt, Artificial Sequence
  Description of Artificial Sequence: Synthetic oligonucleotide
agcccuuuugaaugcguua

SEQ ID NO: 2459709 - RNA, 19 nt, Artificial Sequence
  Description of Artificial Sequence: Synthetic oligonucleotide
cugagacucgagguaguug

SEQ ID NO: 2459710 - RNA, 19 nt, Artificial Sequence
  Description of Artificial Sequence: Synthetic oligonucleotide
uuccgaaugcgagcauggc

SEQ ID NO: 2459711 - RNA, 19 nt, Artificial Sequence
  Description of Artificial Sequence: Synthetic oligonucleotide
uuccaccacagaacaugaa

SEQ ID NO: 2459712 - RNA, 19 nt, Artificial Sequence
  Description of Artificial Sequence: Synthetic oligonucleotide
gggccuguagcaaaaggug

SEQ ID NO: 2459713 - RNA, 19 nt, Artificial Sequence
  Description of Artificial Sequence: Synthetic oligonucleotide
gaacauaccugaggcgcca

SEQ ID NO: 2459714 - RNA, 19 nt, Artificial Sequence
  Description of Artificial Sequence: Synthetic oligonucleotide
ugggaggcuuuccuauuuu

SEQ ID NO: 2459715 - RNA, 19 nt, Artificial Sequence
  Description of Artificial Sequence: Synthetic oligonucleotide
gcagccacgacucuggggu

SEQ ID NO: 2459716 - RNA, 19 nt, Artificial Sequence
  Description of Artificial Sequence: Synthetic oligonucleotide
guuccaccacagaacauga

SEQ ID NO: 2459717 - RNA, 19 nt, Artificial Sequence
  Description of Artificial Sequence: Synthetic oligonucleotide
uuaccccacagagcugggc

SEQ ID NO: 2459718 - RNA, 19 nt, Artificial Sequence
  Description of Artificial Sequence: Synthetic oligonucleotide
gagcauggcgcgaccuggg

SEQ ID NO: 2459719 - RNA, 19 nt, Artificial Sequence
  Description of Artificial Sequence: Synthetic oligonucleotide
augccuuaucauuggccaa

SEQ ID NO: 2459720 - RNA, 19 nt, Artificial Sequence
  Description of Artificial Sequence: Synthetic oligonucleotide
ugggcauuuacagcccuuu

SEQ ID NO: 2459721 - RNA, 19 nt, Artificial Sequence
  Description of Artificial Sequence: Synthetic oligonucleotide
ccaaauuuggaaugaggaa

SEQ ID NO: 2459722 - RNA, 19 nt, Artificial Sequence
  Description of Artificial Sequence: Synthetic oligonucleotide
cauaccugaggcgccagca

SEQ ID NO: 2459723 - RNA, 19 nt, Artificial Sequence
  Description of Artificial Sequence: Synthetic oligonucleotide
ucgagguaguugacgcuuu

SEQ ID NO: 2459724 - RNA, 19 nt, Artificial Sequence
  Description of Artificial Sequence: Synthetic oligonucleotide
auuuugcaccaugguacca

SEQ ID NO: 2459725 - RNA, 19 nt, Artificial Sequence
  Description of Artificial Sequence: Synthetic oligonucleotide
accaugguaccagguaggu

SEQ ID NO: 2459726 - RNA, 19 nt, Artificial Sequence
  Description of Artificial Sequence: Synthetic oligonucleotide
gagugagcuguccggaggu

SEQ ID NO: 2459727 - RNA, 19 nt, Artificial Sequence
  Description of Artificial Sequence: Synthetic oligonucleotide
cuuugggaggcuuuccuau

SEQ ID NO: 2459728 - RNA, 19 nt, Artificial Sequence
  Description of Artificial Sequence: Synthetic oligonucleotide
aggaugcugggaucaggaa

SEQ ID NO: 2459729 - RNA, 19 nt, Artificial Sequence
  Description of Artificial Sequence: Synthetic oligonucleotide
gcgacugucugcacucucg

SEQ ID NO: 2459730 - RNA, 19 nt, Artificial Sequence
  Description of Artificial Sequence: Synthetic oligonucleotide
ucccaucacuuugccuggg

SEQ ID NO: 2459731 - RNA, 19 nt, Artificial Sequence
  Description of Artificial Sequence: Synthetic oligonucleotide
gcugggaucaggaacauau

SEQ ID NO: 2459732 - RNA, 19 nt, Artificial Sequence
  Description of Artificial Sequence: Synthetic oligonucleotide
cagcgccuuccucaggcag

SEQ ID NO: 2459733 - RNA, 19 nt, Artificial Sequence
  Description of Artificial Sequence: Synthetic oligonucleotide
ccaucacuuugccuggggc

SEQ ID NO: 2459734 - RNA, 19 nt, Artificial Sequence
  Description of Artificial Sequence: Synthetic oligonucleotide
gcccuuuugaaugcguuac

SEQ ID NO: 2459735 - RNA, 19 nt, Artificial Sequence
  Description of Artificial Sequence: Synthetic oligonucleotide
agcuguccggagguuaaca

SEQ ID NO: 2459736 - RNA, 19 nt, Artificial Sequence
  Description of Artificial Sequence: Synthetic oligonucleotide
cucgcgcucuucucgcuuc

SEQ ID NO: 2459737 - RNA, 19 nt, Artificial Sequence
  Description of Artificial Sequence: Synthetic oligonucleotide
guaggugaucucaaccucu

SEQ ID NO: 2459738 - RNA, 19 nt, Artificial Sequence
  Description of Artificial Sequence: Synthetic oligonucleotide
ucguuccaccacagaacau

SEQ ID NO: 2459739 - RNA, 19 nt, Artificial Sequence
  Description of Artificial Sequence: Synthetic oligonucleotide
caggagugacggccuuugg

SEQ ID NO: 2459740 - RNA, 19 nt, Artificial Sequence
  Description of Artificial Sequence: Synthetic oligonucleotide
gagacucgagguaguugac

SEQ ID NO: 2459741 - RNA, 19 nt, Artificial Sequence
  Description of Artificial Sequence: Synthetic oligonucleotide
cguuccaccacagaacaug

SEQ ID NO: 2459742 - RNA, 19 nt, Artificial Sequence
  Description of Artificial Sequence: Synthetic oligonucleotide
guucgaugagcaaaauuau

SEQ ID NO: 2459743 - RNA, 19 nt, Artificial Sequence
  Description of Artificial Sequence: Synthetic oligonucleotide
gugaucucaaccucuuguu

SEQ ID NO: 2459744 - RNA, 19 nt, Artificial Sequence
  Description of Artificial Sequence: Synthetic oligonucleotide
ggacucgcgcucuucucgc

SEQ ID NO: 2459745 - RNA, 19 nt, Artificial Sequence
  Description of Artificial Sequence: Synthetic oligonucleotide
gcuuuccuauuuugcacca

SEQ ID NO: 2459746 - RNA, 19 nt, Artificial Sequence
  Description of Artificial Sequence: Synthetic oligonucleotide
ucacuuugccuggggccug

SEQ ID NO: 2459747 - RNA, 19 nt, Artificial Sequence
  Description of Artificial Sequence: Synthetic oligonucleotide
ucucaaccucuuguuuauc

SEQ ID NO: 2459748 - RNA, 19 nt, Artificial Sequence
  Description of Artificial Sequence: Synthetic oligonucleotide
gcuuccgaaugcgagcaug

SEQ ID NO: 2459749 - RNA, 19 nt, Artificial Sequence
  Description of Artificial Sequence: Synthetic oligonucleotide
ugcgagcauggcgcgaccu

SEQ ID NO: 2459750 - RNA, 19 nt, Artificial Sequence
  Description of Artificial Sequence: Synthetic oligonucleotide
guagaguagccaagaucga

SEQ ID NO: 2459751 - RNA, 19 nt, Artificial Sequence
  Description of Artificial Sequence: Synthetic oligonucleotide
ggaccagcgccuuccucag

SEQ ID NO: 2459752 - RNA, 19 nt, Artificial Sequence
  Description of Artificial Sequence: Synthetic oligonucleotide
cagcuuccgaaugcgagca

SEQ ID NO: 2459753 - RNA, 19 nt, Artificial Sequence
  Description of Artificial Sequence: Synthetic oligonucleotide
caaccucuuguuuaucaau

SEQ ID NO: 2459754 - RNA, 19 nt, Artificial Sequence
  Description of Artificial Sequence: Synthetic oligonucleotide
cccuuuugaaugcguuacc

SEQ ID NO: 2459755 - RNA, 19 nt, Artificial Sequence
  Description of Artificial Sequence: Synthetic oligonucleotide
cuucaguggugaaaaggau

SEQ ID NO: 2459756 - RNA, 19 nt, Artificial Sequence
  Description of Artificial Sequence: Synthetic oligonucleotide
gggcgcgcaggagugacgg

SEQ ID NO: 2459757 - RNA, 19 nt, Artificial Sequence
  Description of Artificial Sequence: Synthetic oligonucleotide
acgacucugggguccucau

SEQ ID NO: 2459758 - RNA, 19 nt, Artificial Sequence
  Description of Artificial Sequence: Synthetic oligonucleotide
acagcccuuuugaaugcgu

SEQ ID NO: 2459759 - RNA, 19 nt, Artificial Sequence
  Description of Artificial Sequence: Synthetic oligonucleotide
agccgcgcgacugucugca

SEQ ID NO: 2459760 - RNA, 19 nt, Artificial Sequence
  Description of Artificial Sequence: Synthetic oligonucleotide
acgcuuucccgaacagcag

SEQ ID NO: 2459761 - RNA, 19 nt, Artificial Sequence
  Description of Artificial Sequence: Synthetic oligonucleotide
ggagugacggccuuugguu

SEQ ID NO: 2459762 - RNA, 19 nt, Artificial Sequence
  Description of Artificial Sequence: Synthetic oligonucleotide
ggccuguagcaaaagguga

SEQ ID NO: 2459763 - RNA, 19 nt, Artificial Sequence
  Description of Artificial Sequence: Synthetic oligonucleotide
ccuuaucauuggccaaggc

SEQ ID NO: 2459764 - RNA, 19 nt, Artificial Sequence
  Description of Artificial Sequence: Synthetic oligonucleotide
auggcgcgaccuggggcgc

SEQ ID NO: 2459765 - RNA, 19 nt, Artificial Sequence
  Description of Artificial Sequence: Synthetic oligonucleotide
acucgcgcucuucucgcuu

SEQ ID NO: 2459766 - RNA, 19 nt, Artificial Sequence
  Description of Artificial Sequence: Synthetic oligonucleotide
uggggcgcgcaggagugac

SEQ ID NO: 2459767 - RNA, 19 nt, Artificial Sequence
  Description of Artificial Sequence: Synthetic oligonucleotide
gaaugcgagcauggcgcga

SEQ ID NO: 2459768 - RNA, 19 nt, Artificial Sequence
  Description of Artificial Sequence: Synthetic oligonucleotide
gagugacggccuuugguuu

SEQ ID NO: 2459769 - RNA, 19 nt, Artificial Sequence
  Description of Artificial Sequence: Synthetic oligonucleotide
acucuguugagggcuccau

SEQ ID NO: 2459770 - RNA, 19 nt, Artificial Sequence
  Description of Artificial Sequence: Synthetic oligonucleotide
ugucucccagccgcgcgac

SEQ ID NO: 2459771 - RNA, 19 nt, Artificial Sequence
  Description of Artificial Sequence: Synthetic oligonucleotide
cgcuuucccgaacagcagc

SEQ ID NO: 2459772 - RNA, 19 nt, Artificial Sequence
  Description of Artificial Sequence: Synthetic oligonucleotide
gugucucccagccgcgcga

SEQ ID NO: 2459773 - RNA, 19 nt, Artificial Sequence
  Description of Artificial Sequence: Synthetic oligonucleotide
gcacucucguuccaccaca

SEQ ID NO: 2459774 - RNA, 19 nt, Artificial Sequence
  Description of Artificial Sequence: Synthetic oligonucleotide
cccaucacuuugccugggg

SEQ ID NO: 2459775 - RNA, 19 nt, Artificial Sequence
  Description of Artificial Sequence: Synthetic oligonucleotide
ccagugucucccagccgcg

SEQ ID NO: 2459776 - RNA, 19 nt, Artificial Sequence
  Description of Artificial Sequence: Synthetic oligonucleotide
cgaaugcgagcauggcgcg

SEQ ID NO: 2459777 - RNA, 19 nt, Artificial Sequence
  Description of Artificial Sequence: Synthetic oligonucleotide
gcuuuacgaacugcuguuc

SEQ ID NO: 2459778 - RNA, 19 nt, Artificial Sequence
  Description of Artificial Sequence: Synthetic oligonucleotide
ccuuugguuucugggacuc

SEQ ID NO: 2459779 - RNA, 19 nt, Artificial Sequence
  Description of Artificial Sequence: Synthetic oligonucleotide
cuguucgaugagcaaaauu

SEQ ID NO: 2459780 - RNA, 19 nt, Artificial Sequence
  Description of Artificial Sequence: Synthetic oligonucleotide
cagugucucccagccgcgc

SEQ ID NO: 2459781 - RNA, 19 nt, Artificial Sequence
  Description of Artificial Sequence: Synthetic oligonucleotide
cuggggccuguagcaaaag

SEQ ID NO: 2459782 - RNA, 19 nt, Artificial Sequence
  Description of Artificial Sequence: Synthetic oligonucleotide
cucuguugagggcuccaua

SEQ ID NO: 2459783 - RNA, 19 nt, Artificial Sequence
  Description of Artificial Sequence: Synthetic oligonucleotide
agaucgacaugggcauuua

SEQ ID NO: 2459784 - RNA, 19 nt, Artificial Sequence
  Description of Artificial Sequence: Synthetic oligonucleotide
ggcuuuacgaacugcuguu

SEQ ID NO: 2459785 - RNA, 19 nt, Artificial Sequence
  Description of Artificial Sequence: Synthetic oligonucleotide
gcgcgcaggagugacggcc

SEQ ID NO: 2459786 - RNA, 19 nt, Artificial Sequence
  Description of Artificial Sequence: Synthetic oligonucleotide
ccaauucagagugagcugu

SEQ ID NO: 2459787 - RNA, 19 nt, Artificial Sequence
  Description of Artificial Sequence: Synthetic oligonucleotide
ggugcggaauucauaaaau

SEQ ID NO: 2459788 - RNA, 19 nt, Artificial Sequence
  Description of Artificial Sequence: Synthetic oligonucleotide
ccuggggcgcgcaggagug

SEQ ID NO: 2459789 - RNA, 19 nt, Artificial Sequence
  Description of Artificial Sequence: Synthetic oligonucleotide
gagcuguccggagguuaac

SEQ ID NO: 2459790 - RNA, 19 nt, Artificial Sequence
  Description of Artificial Sequence: Synthetic oligonucleotide
ccgaacagcagccacgacu

SEQ ID NO: 2459791 - RNA, 19 nt, Artificial Sequence
  Description of Artificial Sequence: Synthetic oligonucleotide
ccaagaucgacaugggcau

SEQ ID NO: 2459792 - RNA, 19 nt, Artificial Sequence
  Description of Artificial Sequence: Synthetic oligonucleotide
agcuuccgaaugcgagcau

SEQ ID NO: 2459793 - RNA, 19 nt, Artificial Sequence
  Description of Artificial Sequence: Synthetic oligonucleotide
gcgagcauggcgcgaccug

SEQ ID NO: 2459794 - RNA, 19 nt, Artificial Sequence
  Description of Artificial Sequence: Synthetic oligonucleotide
ccucaugagaccagugucu

SEQ ID NO: 2459795 - RNA, 19 nt, Artificial Sequence
  Description of Artificial Sequence: Synthetic oligonucleotide
caugggcauuuacagcccu

SEQ ID NO: 2459796 - RNA, 19 nt, Artificial Sequence
  Description of Artificial Sequence: Synthetic oligonucleotide
gugagcuguccggagguua

SEQ ID NO: 2459797 - RNA, 19 nt, Artificial Sequence
  Description of Artificial Sequence: Synthetic oligonucleotide
cagccgcgcgacugucugc

SEQ ID NO: 2459798 - RNA, 19 nt, Artificial Sequence
  Description of Artificial Sequence: Synthetic oligonucleotide
cuccaauauccaaccaauu

SEQ ID NO: 2459799 - RNA, 19 nt, Artificial Sequence
  Description of Artificial Sequence: Synthetic oligonucleotide
cgagcauggcgcgaccugg

SEQ ID NO: 2459800 - RNA, 19 nt, Artificial Sequence
  Description of Artificial Sequence: Synthetic oligonucleotide
ugcugggaucaggaacaua

SEQ ID NO: 2459801 - RNA, 19 nt, Artificial Sequence
  Description of Artificial Sequence: Synthetic oligonucleotide
cacgacucugggguccuca

SEQ ID NO: 2459802 - RNA, 19 nt, Artificial Sequence
  Description of Artificial Sequence: Synthetic oligonucleotide
cuguccggagguuaacauu

SEQ ID NO: 2459803 - RNA, 19 nt, Artificial Sequence
  Description of Artificial Sequence: Synthetic oligonucleotide
uggcgcgaccuggggcgcg

SEQ ID NO: 2459804 - RNA, 19 nt, Artificial Sequence
  Description of Artificial Sequence: Synthetic oligonucleotide
cucgagguaguugacgcuu

SEQ ID NO: 2459805 - RNA, 19 nt, Artificial Sequence
  Description of Artificial Sequence: Synthetic oligonucleotide
gaccuggggcgcgcaggag

SEQ ID NO: 2459806 - RNA, 19 nt, Artificial Sequence
  Description of Artificial Sequence: Synthetic oligonucleotide
ugacggccuuugguuucug

SEQ ID NO: 2459807 - RNA, 19 nt, Artificial Sequence
  Description of Artificial Sequence: Synthetic oligonucleotide
agugagcuguccggagguu

SEQ ID NO: 2459808 - RNA, 19 nt, Artificial Sequence
  Description of Artificial Sequence: Synthetic oligonucleotide
gcgaccuggggcgcgcagg

SEQ ID NO: 2459809 - RNA, 19 nt, Artificial Sequence
  Description of Artificial Sequence: Synthetic oligonucleotide
gggccuccgggcuucaucu

SEQ ID NO: 2459810 - RNA, 19 nt, Artificial Sequence
  Description of Artificial Sequence: Synthetic oligonucleotide
cugggacucgcgcucuucu

SEQ ID NO: 2459811 - RNA, 19 nt, Artificial Sequence
  Description of Artificial Sequence: Synthetic oligonucleotide
gacucgcgcucuucucgcu

SEQ ID NO: 2459812 - RNA, 19 nt, Artificial Sequence
  Description of Artificial Sequence: Synthetic oligonucleotide
ccaugguaccagguaggug

SEQ ID NO: 2459813 - RNA, 19 nt, Artificial Sequence
  Description of Artificial Sequence: Synthetic oligonucleotide
cauuugucuuugagggcuu

SEQ ID NO: 2459814 - RNA, 19 nt, Artificial Sequence
  Description of Artificial Sequence: Synthetic oligonucleotide
gcuguccggagguuaacau

SEQ ID NO: 2459815 - RNA, 19 nt, Artificial Sequence
  Description of Artificial Sequence: Synthetic oligonucleotide
cgcgcgacugucugcacuc

SEQ ID NO: 2459816 - RNA, 19 nt, Artificial Sequence
  Description of Artificial Sequence: Synthetic oligonucleotide
ggccaaggcuuuacgaacu

SEQ ID NO: 2459817 - RNA, 19 nt, Artificial Sequence
  Description of Artificial Sequence: Synthetic oligonucleotide
cugggaucaggaacauauu

SEQ ID NO: 2459818 - RNA, 19 nt, Artificial Sequence
  Description of Artificial Sequence: Synthetic oligonucleotide
cagcccuuuugaaugcguu

SEQ ID NO: 2459819 - RNA, 19 nt, Artificial Sequence
  Description of Artificial Sequence: Synthetic oligonucleotide
cggccuuugguuucuggga

SEQ ID NO: 2459820 - RNA, 19 nt, Artificial Sequence
  Description of Artificial Sequence: Synthetic oligonucleotide
gugacggccuuugguuucu

SEQ ID NO: 2459821 - RNA, 19 nt, Artificial Sequence
  Description of Artificial Sequence: Synthetic oligonucleotide
cuuuccuauuuugcaccau

SEQ ID NO: 2459822 - RNA, 19 nt, Artificial Sequence
  Description of Artificial Sequence: Synthetic oligonucleotide
ggggcgcgcaggagugacg

SEQ ID NO: 2459823 - RNA, 19 nt, Artificial Sequence
  Description of Artificial Sequence: Synthetic oligonucleotide
gggcuucaucugaaaagua

SEQ ID NO: 2459824 - RNA, 19 nt, Artificial Sequence
  Description of Artificial Sequence: Synthetic oligonucleotide
gcguuaccccacagagcug

SEQ ID NO: 2459825 - RNA, 19 nt, Artificial Sequence
  Description of Artificial Sequence: Synthetic oligonucleotide
acuuugccuggggccugua

SEQ ID NO: 2459826 - RNA, 19 nt, Artificial Sequence
  Description of Artificial Sequence: Synthetic oligonucleotide
cucccagccgcgcgacugu

SEQ ID NO: 2459827 - RNA, 19 nt, Artificial Sequence
  Description of Artificial Sequence: Synthetic oligonucleotide
ggcgcgaccuggggcgcgc

SEQ ID NO: 2459828 - RNA, 19 nt, Artificial Sequence
  Description of Artificial Sequence: Synthetic oligonucleotide
cgcgacugucugcacucuc

SEQ ID NO: 2459829 - RNA, 19 nt, Artificial Sequence
  Description of Artificial Sequence: Synthetic oligonucleotide
cccgaacagcagccacgac

SEQ ID NO: 2459830 - RNA, 19 nt, Artificial Sequence
  Description of Artificial Sequence: Synthetic oligonucleotide
caagaucgacaugggcauu

SEQ ID NO: 2459831 - RNA, 19 nt, Artificial Sequence
  Description of Artificial Sequence: Synthetic oligonucleotide
cuggggcgcgcaggaguga

SEQ ID NO: 2459832 - RNA, 19 nt, Artificial Sequence
  Description of Artificial Sequence: Synthetic oligonucleotide
cuccuucuuugggaggcuu

SEQ ID NO: 2459833 - RNA, 19 nt, Artificial Sequence
  Description of Artificial Sequence: Synthetic oligonucleotide
guccggagguuaacauuuu

SEQ ID NO: 2459834 - RNA, 19 nt, Artificial Sequence
  Description of Artificial Sequence: Synthetic oligonucleotide
gccaauucauagacuccuu

SEQ ID NO: 2459835 - RNA, 19 nt, Artificial Sequence
  Description of Artificial Sequence: Synthetic oligonucleotide
cacuuugccuggggccugu

SEQ ID NO: 2459836 - RNA, 19 nt, Artificial Sequence
  Description of Artificial Sequence: Synthetic oligonucleotide
gucucccagccgcgcgacu

SEQ ID NO: 2459837 - RNA, 19 nt, Artificial Sequence
  Description of Artificial Sequence: Synthetic oligonucleotide
gcgccuuccucaggcagcu

SEQ ID NO: 2459838 - RNA, 19 nt, Artificial Sequence
  Description of Artificial Sequence: Synthetic oligonucleotide
cgcgaccuggggcgcgcag

SEQ ID NO: 2459839 - RNA, 19 nt, Artificial Sequence
  Description of Artificial Sequence: Synthetic oligonucleotide
ccacgacucugggguccuc

SEQ ID NO: 2459840 - RNA, 19 nt, Artificial Sequence
  Description of Artificial Sequence: Synthetic oligonucleotide
gcgcgacugucugcacucu

SEQ ID NO: 2459841 - RNA, 19 nt, Artificial Sequence
  Description of Artificial Sequence: Synthetic oligonucleotide
gcgcgaccuggggcgcgca

SEQ ID NO: 2459842 - RNA, 19 nt, Artificial Sequence
  Description of Artificial Sequence: Synthetic oligonucleotide
aaauucccaauuuucuucc

SEQ ID NO: 2459843 - RNA, 19 nt, Artificial Sequence
  Description of Artificial Sequence: Synthetic oligonucleotide
aacgucuucaagaagaugg

SEQ ID NO: 2459844 - RNA, 19 nt, Artificial Sequence
  Description of Artificial Sequence: Synthetic oligonucleotide
aagacugaguauuuauccc

SEQ ID NO: 2459845 - RNA, 19 nt, Artificial Sequence
  Description of Artificial Sequence: Synthetic oligonucleotide
uuagguguaaaauccacgg

SEQ ID NO: 2459846 - RNA, 19 nt, Artificial Sequence
  Description of Artificial Sequence: Synthetic oligonucleotide
aaagauucagauguucgcc

SEQ ID NO: 2459847 - RNA, 19 nt, Artificial Sequence
  Description of Artificial Sequence: Synthetic oligonucleotide
cuaagaacucuucauaucg

SEQ ID NO: 2459848 - RNA, 19 nt, Artificial Sequence
  Description of Artificial Sequence: Synthetic oligonucleotide
aaaagucacauuguugggc

SEQ ID NO: 2459849 - RNA, 19 nt, Artificial Sequence
  Description of Artificial Sequence: Synthetic oligonucleotide
aaaccucuuacacagaagu

SEQ ID NO: 2459850 - RNA, 19 nt, Artificial Sequence
  Description of Artificial Sequence: Synthetic oligonucleotide
uuuagguguaaaauccacg

SEQ ID NO: 2459851 - RNA, 19 nt, Artificial Sequence
  Description of Artificial Sequence: Synthetic oligonucleotide
uguacauuaucuuuaggug

SEQ ID NO: 2459852 - RNA, 19 nt, Artificial Sequence
  Description of Artificial Sequence: Synthetic oligonucleotide
uucccaaacaucuucaucu

SEQ ID NO: 2459853 - RNA, 19 nt, Artificial Sequence
  Description of Artificial Sequence: Synthetic oligonucleotide
gacauuaaaccucuuacac

SEQ ID NO: 2459854 - RNA, 19 nt, Artificial Sequence
  Description of Artificial Sequence: Synthetic oligonucleotide
uccaacgucuucaagaaga

SEQ ID NO: 2459855 - RNA, 19 nt, Artificial Sequence
  Description of Artificial Sequence: Synthetic oligonucleotide
gaucuuaacaccgggaucc

SEQ ID NO: 2459856 - RNA, 19 nt, Artificial Sequence
  Description of Artificial Sequence: Synthetic oligonucleotide
aaaauccacgggcaugacg

SEQ ID NO: 2459857 - RNA, 19 nt, Artificial Sequence
  Description of Artificial Sequence: Synthetic oligonucleotide
ucauaucgccucuacaccg

SEQ ID NO: 2459858 - RNA, 19 nt, Artificial Sequence
  Description of Artificial Sequence: Synthetic oligonucleotide
cuucauaucgccucuacac

SEQ ID NO: 2459859 - RNA, 19 nt, Artificial Sequence
  Description of Artificial Sequence: Synthetic oligonucleotide
agacugaguauuuaucccg

SEQ ID NO: 2459860 - RNA, 19 nt, Artificial Sequence
  Description of Artificial Sequence: Synthetic oligonucleotide
aacuaagaacucuucauau

SEQ ID NO: 2459861 - RNA, 19 nt, Artificial Sequence
  Description of Artificial Sequence: Synthetic oligonucleotide
ucaagaagauggcuggucc

SEQ ID NO: 2459862 - RNA, 19 nt, Artificial Sequence
  Description of Artificial Sequence: Synthetic oligonucleotide
uuuacucaguccaacgucu

SEQ ID NO: 2459863 - RNA, 19 nt, Artificial Sequence
  Description of Artificial Sequence: Synthetic oligonucleotide
ucuuuaggugcaaaaguca

SEQ ID NO: 2459864 - RNA, 19 nt, Artificial Sequence
  Description of Artificial Sequence: Synthetic oligonucleotide
acugacgucguucucuugg

SEQ ID NO: 2459865 - RNA, 19 nt, Artificial Sequence
  Description of Artificial Sequence: Synthetic oligonucleotide
aaagccuggccagaaauuc

SEQ ID NO: 2459866 - RNA, 19 nt, Artificial Sequence
  Description of Artificial Sequence: Synthetic oligonucleotide
aucgucagaaaguugaaga

SEQ ID NO: 2459867 - RNA, 19 nt, Artificial Sequence
  Description of Artificial Sequence: Synthetic oligonucleotide
aaauccacgggcaugacgu

SEQ ID NO: 2459868 - RNA, 19 nt, Artificial Sequence
  Description of Artificial Sequence: Synthetic oligonucleotide
acuaagaacucuucauauc

SEQ ID NO: 2459869 - RNA, 19 nt, Artificial Sequence
  Description of Artificial Sequence: Synthetic oligonucleotide
gucucgaggaacuucaacc

SEQ ID NO: 2459870 - RNA, 19 nt, Artificial Sequence
  Description of Artificial Sequence: Synthetic oligonucleotide
uacaccgaaagccuggcca

SEQ ID NO: 2459871 - RNA, 19 nt, Artificial Sequence
  Description of Artificial Sequence: Synthetic oligonucleotide
uucauaucgccucuacacc

SEQ ID NO: 2459872 - RNA, 19 nt, Artificial Sequence
  Description of Artificial Sequence: Synthetic oligonucleotide
aagauucagauguucgccu

SEQ ID NO: 2459873 - RNA, 19 nt, Artificial Sequence
  Description of Artificial Sequence: Synthetic oligonucleotide
aacaccgggauccgguuuc

SEQ ID NO: 2459874 - RNA, 19 nt, Artificial Sequence
  Description of Artificial Sequence: Synthetic oligonucleotide
uagguguaaaauccacggg

SEQ ID NO: 2459875 - RNA, 19 nt, Artificial Sequence
  Description of Artificial Sequence: Synthetic oligonucleotide
ugggacgccacguagagcu

SEQ ID NO: 2459876 - RNA, 19 nt, Artificial Sequence
  Description of Artificial Sequence: Synthetic oligonucleotide
ugacccuucuucaugagaa

SEQ ID NO: 2459877 - RNA, 19 nt, Artificial Sequence
  Description of Artificial Sequence: Synthetic oligonucleotide
cuuuaggugcaaaagucac

SEQ ID NO: 2459878 - RNA, 19 nt, Artificial Sequence
  Description of Artificial Sequence: Synthetic oligonucleotide
uuuugacccuucuucauga

SEQ ID NO: 2459879 - RNA, 19 nt, Artificial Sequence
  Description of Artificial Sequence: Synthetic oligonucleotide
auuuaucccgcuuuacucu

SEQ ID NO: 2459880 - RNA, 19 nt, Artificial Sequence
  Description of Artificial Sequence: Synthetic oligonucleotide
uaagaacucuucauaucgc

SEQ ID NO: 2459881 - RNA, 19 nt, Artificial Sequence
  Description of Artificial Sequence: Synthetic oligonucleotide
uagaucuuaacaccgggau

SEQ ID NO: 2459882 - RNA, 19 nt, Artificial Sequence
  Description of Artificial Sequence: Synthetic oligonucleotide
cauagaucuuaacaccggg

SEQ ID NO: 2459883 - RNA, 19 nt, Artificial Sequence
  Description of Artificial Sequence: Synthetic oligonucleotide
ucuuuagguguaaaaucca

SEQ ID NO: 2459884 - RNA, 19 nt, Artificial Sequence
  Description of Artificial Sequence: Synthetic oligonucleotide
uccuuuacucaguccaacg

SEQ ID NO: 2459885 - RNA, 19 nt, Artificial Sequence
  Description of Artificial Sequence: Synthetic oligonucleotide
uuccgaacagugcuuggcg

SEQ ID NO: 2459886 - RNA, 19 nt, Artificial Sequence
  Description of Artificial Sequence: Synthetic oligonucleotide
acauuaaaccucuuacaca

SEQ ID NO: 2459887 - RNA, 19 nt, Artificial Sequence
  Description of Artificial Sequence: Synthetic oligonucleotide
ugaagacugaguauuuauc

SEQ ID NO: 2459888 - RNA, 19 nt, Artificial Sequence
  Description of Artificial Sequence: Synthetic oligonucleotide
agaaguuugucagggugcc

SEQ ID NO: 2459889 - RNA, 19 nt, Artificial Sequence
  Description of Artificial Sequence: Synthetic oligonucleotide
cacauuguugggcagguag

SEQ ID NO: 2459890 - RNA, 19 nt, Artificial Sequence
  Description of Artificial Sequence: Synthetic oligonucleotide
uuuaggugcaaaagucaca

SEQ ID NO: 2459891 - RNA, 19 nt, Artificial Sequence
  Description of Artificial Sequence: Synthetic oligonucleotide
aucgccucuacaccgaaag

SEQ ID NO: 2459892 - RNA, 19 nt, Artificial Sequence
  Description of Artificial Sequence: Synthetic oligonucleotide
uaaaccucuuacacagaag

SEQ ID NO: 2459893 - RNA, 19 nt, Artificial Sequence
  Description of Artificial Sequence: Synthetic oligonucleotide
agaucuuaacaccgggauc

SEQ ID NO: 2459894 - RNA, 19 nt, Artificial Sequence
  Description of Artificial Sequence: Synthetic oligonucleotide
ucagggacauuaaaccucu

SEQ ID NO: 2459895 - RNA, 19 nt, Artificial Sequence
  Description of Artificial Sequence: Synthetic oligonucleotide
ugaguauuuaucccgcuuu

SEQ ID NO: 2459896 - RNA, 19 nt, Artificial Sequence
  Description of Artificial Sequence: Synthetic oligonucleotide
cuuuagguguaaaauccac

SEQ ID NO: 2459897 - RNA, 19 nt, Artificial Sequence
  Description of Artificial Sequence: Synthetic oligonucleotide
ggaacuucaaccugaucgg

SEQ ID NO: 2459898 - RNA, 19 nt, Artificial Sequence
  Description of Artificial Sequence: Synthetic oligonucleotide
aaaugugucucgggugagc

SEQ ID NO: 2459899 - RNA, 19 nt, Artificial Sequence
  Description of Artificial Sequence: Synthetic oligonucleotide
uguaaaauccacgggcaug

SEQ ID NO: 2459900 - RNA, 19 nt, Artificial Sequence
  Description of Artificial Sequence: Synthetic oligonucleotide
uuggucucgaggaacuuca

SEQ ID NO: 2459901 - RNA, 19 nt, Artificial Sequence
  Description of Artificial Sequence: Synthetic oligonucleotide
ucgaggaacuucaaccuga

SEQ ID NO: 2459902 - RNA, 19 nt, Artificial Sequence
  Description of Artificial Sequence: Synthetic oligonucleotide
uuggcgugagugaaccugg

SEQ ID NO: 2459903 - RNA, 19 nt, Artificial Sequence
  Description of Artificial Sequence: Synthetic oligonucleotide
uguugaccccggauaaggg

SEQ ID NO: 2459904 - RNA, 19 nt, Artificial Sequence
  Description of Artificial Sequence: Synthetic oligonucleotide
uuaggugcaaaagucacau

SEQ ID NO: 2459905 - RNA, 19 nt, Artificial Sequence
  Description of Artificial Sequence: Synthetic oligonucleotide
acucaaaugugucucgggu

SEQ ID NO: 2459906 - RNA, 19 nt, Artificial Sequence
  Description of Artificial Sequence: Synthetic oligonucleotide
uucacucgaggccaacucc

SEQ ID NO: 2459907 - RNA, 19 nt, Artificial Sequence
  Description of Artificial Sequence: Synthetic oligonucleotide
cagaaguuugucagggugc

SEQ ID NO: 2459908 - RNA, 19 nt, Artificial Sequence
  Description of Artificial Sequence: Synthetic oligonucleotide
agaaccuccaggcggcaac

SEQ ID NO: 2459909 - RNA, 19 nt, Artificial Sequence
  Description of Artificial Sequence: Synthetic oligonucleotide
uugaagacugaguauuuau

SEQ ID NO: 2459910 - RNA, 19 nt, Artificial Sequence
  Description of Artificial Sequence: Synthetic oligonucleotide
ucucgaggaacuucaaccu

SEQ ID NO: 2459911 - RNA, 19 nt, Artificial Sequence
  Description of Artificial Sequence: Synthetic oligonucleotide
uuuaucccgcuuuacucug

SEQ ID NO: 2459912 - RNA, 19 nt, Artificial Sequence
  Description of Artificial Sequence: Synthetic oligonucleotide
ucgucagaaaguugaagac

SEQ ID NO: 2459913 - RNA, 19 nt, Artificial Sequence
  Description of Artificial Sequence: Synthetic oligonucleotide
aguauuuaucccgcuuuac

SEQ ID NO: 2459914 - RNA, 19 nt, Artificial Sequence
  Description of Artificial Sequence: Synthetic oligonucleotide
agaaauucccaauuuucuu

SEQ ID NO: 2459915 - RNA, 19 nt, Artificial Sequence
  Description of Artificial Sequence: Synthetic oligonucleotide
cuuuacucaguccaacguc

SEQ ID NO: 2459916 - RNA, 19 nt, Artificial Sequence
  Description of Artificial Sequence: Synthetic oligonucleotide
aucuuuugacccuucuuca

SEQ ID NO: 2459917 - RNA, 19 nt, Artificial Sequence
  Description of Artificial Sequence: Synthetic oligonucleotide
uccgaacagugcuuggcgg

SEQ ID NO: 2459918 - RNA, 19 nt, Artificial Sequence
  Description of Artificial Sequence: Synthetic oligonucleotide
agggucagggacauuaaac

SEQ ID NO: 2459919 - RNA, 19 nt, Artificial Sequence
  Description of Artificial Sequence: Synthetic oligonucleotide
acuucaaccugaucggagu

SEQ ID NO: 2459920 - RNA, 19 nt, Artificial Sequence
  Description of Artificial Sequence: Synthetic oligonucleotide
gaacuaagaacucuucaua

SEQ ID NO: 2459921 - RNA, 19 nt, Artificial Sequence
  Description of Artificial Sequence: Synthetic oligonucleotide
aaugugucucgggugagcu

SEQ ID NO: 2459922 - RNA, 19 nt, Artificial Sequence
  Description of Artificial Sequence: Synthetic oligonucleotide
gggacauuaaaccucuuac

SEQ ID NO: 2459923 - RNA, 19 nt, Artificial Sequence
  Description of Artificial Sequence: Synthetic oligonucleotide
cuuuugacccuucuucaug

SEQ ID NO: 2459924 - RNA, 19 nt, Artificial Sequence
  Description of Artificial Sequence: Synthetic oligonucleotide
uaucccgcuuuacucuggg

SEQ ID NO: 2459925 - RNA, 19 nt, Artificial Sequence
  Description of Artificial Sequence: Synthetic oligonucleotide
aacuucaaccugaucggag

SEQ ID NO: 2459926 - RNA, 19 nt, Artificial Sequence
  Description of Artificial Sequence: Synthetic oligonucleotide
gccuuuguaggccaggccg

SEQ ID NO: 2459927 - RNA, 19 nt, Artificial Sequence
  Description of Artificial Sequence: Synthetic oligonucleotide
gggucagggacauuaaacc

SEQ ID NO: 2459928 - RNA, 19 nt, Artificial Sequence
  Description of Artificial Sequence: Synthetic oligonucleotide
aggccgacuacuguugacc

SEQ ID NO: 2459929 - RNA, 19 nt, Artificial Sequence
  Description of Artificial Sequence: Synthetic oligonucleotide
cucuacaccgaaagccugg

SEQ ID NO: 2459930 - RNA, 19 nt, Artificial Sequence
  Description of Artificial Sequence: Synthetic oligonucleotide
caagaagauggcugguccc

SEQ ID NO: 2459931 - RNA, 19 nt, Artificial Sequence
  Description of Artificial Sequence: Synthetic oligonucleotide
aguccaacgucuucaagaa

SEQ ID NO: 2459932 - RNA, 19 nt, Artificial Sequence
  Description of Artificial Sequence: Synthetic oligonucleotide
uacuguugaccccggauaa

SEQ ID NO: 2459933 - RNA, 19 nt, Artificial Sequence
  Description of Artificial Sequence: Synthetic oligonucleotide
ugagugaaccuggaggaca

SEQ ID NO: 2459934 - RNA, 19 nt, Artificial Sequence
  Description of Artificial Sequence: Synthetic oligonucleotide
auaagggucagggacauua

SEQ ID NO: 2459935 - RNA, 19 nt, Artificial Sequence
  Description of Artificial Sequence: Synthetic oligonucleotide
agauucagauguucgccug

SEQ ID NO: 2459936 - RNA, 19 nt, Artificial Sequence
  Description of Artificial Sequence: Synthetic oligonucleotide
guacauuaucuuuaggugu

SEQ ID NO: 2459937 - RNA, 19 nt, Artificial Sequence
  Description of Artificial Sequence: Synthetic oligonucleotide
cucugggaucgucagaaag

SEQ ID NO: 2459938 - RNA, 19 nt, Artificial Sequence
  Description of Artificial Sequence: Synthetic oligonucleotide
acgggcaugacgucuuuag

SEQ ID NO: 2459939 - RNA, 19 nt, Artificial Sequence
  Description of Artificial Sequence: Synthetic oligonucleotide
agugggacgccacguagag

SEQ ID NO: 2459940 - RNA, 19 nt, Artificial Sequence
  Description of Artificial Sequence: Synthetic oligonucleotide
ucacucgaggccaacuccu

SEQ ID NO: 2459941 - RNA, 19 nt, Artificial Sequence
  Description of Artificial Sequence: Synthetic oligonucleotide
gcgugagugaaccuggagg

SEQ ID NO: 2459942 - RNA, 19 nt, Artificial Sequence
  Description of Artificial Sequence: Synthetic oligonucleotide
ucuuacacagaaguuuguc

SEQ ID NO: 2459943 - RNA, 19 nt, Artificial Sequence
  Description of Artificial Sequence: Synthetic oligonucleotide
aauucccaauuuucuuccu

SEQ ID NO: 2459944 - RNA, 19 nt, Artificial Sequence
  Description of Artificial Sequence: Synthetic oligonucleotide
gaucgucagaaaguugaag

SEQ ID NO: 2459945 - RNA, 19 nt, Artificial Sequence
  Description of Artificial Sequence: Synthetic oligonucleotide
caguccaacgucuucaaga

SEQ ID NO: 2459946 - RNA, 19 nt, Artificial Sequence
  Description of Artificial Sequence: Synthetic oligonucleotide
uuaucccgcuuuacucugg

SEQ ID NO: 2459947 - RNA, 19 nt, Artificial Sequence
  Description of Artificial Sequence: Synthetic oligonucleotide
ucggcuucgcucccacucg

SEQ ID NO: 2459948 - RNA, 19 nt, Artificial Sequence
  Description of Artificial Sequence: Synthetic oligonucleotide
uugacccuucuucaugaga

SEQ ID NO: 2459949 - RNA, 19 nt, Artificial Sequence
  Description of Artificial Sequence: Synthetic oligonucleotide
acgucuuuaggugcaaaag

SEQ ID NO: 2459950 - RNA, 19 nt, Artificial Sequence
  Description of Artificial Sequence: Synthetic oligonucleotide
ucaugagaacuaagaacuc

SEQ ID NO: 2459951 - RNA, 19 nt, Artificial Sequence
  Description of Artificial Sequence: Synthetic oligonucleotide
acaccgaaagccuggccag

SEQ ID NO: 2459952 - RNA, 19 nt, Artificial Sequence
  Description of Artificial Sequence: Synthetic oligonucleotide
gucuuuaggugcaaaaguc

SEQ ID NO: 2459953 - RNA, 19 nt, Artificial Sequence
  Description of Artificial Sequence: Synthetic oligonucleotide
cuguugaccccggauaagg

SEQ ID NO: 2459954 - RNA, 19 nt, Artificial Sequence
  Description of Artificial Sequence: Synthetic oligonucleotide
ugugucucgggugagcuuc

SEQ ID NO: 2459955 - RNA, 19 nt, Artificial Sequence
  Description of Artificial Sequence: Synthetic oligonucleotide
ugacugcuugucacugacg

SEQ ID NO: 2459956 - RNA, 19 nt, Artificial Sequence
  Description of Artificial Sequence: Synthetic oligonucleotide
gauccgguuucugucggcg

SEQ ID NO: 2459957 - RNA, 19 nt, Artificial Sequence
  Description of Artificial Sequence: Synthetic oligonucleotide
agucacauuguugggcagg

SEQ ID NO: 2459958 - RNA, 19 nt, Artificial Sequence
  Description of Artificial Sequence: Synthetic oligonucleotide
ucccgcuuuacucugggua

SEQ ID NO: 2459959 - RNA, 19 nt, Artificial Sequence
  Description of Artificial Sequence: Synthetic oligonucleotide
cugaucggaguccucuucc

SEQ ID NO: 2459960 - RNA, 19 nt, Artificial Sequence
  Description of Artificial Sequence: Synthetic oligonucleotide
agaaaguugaagacugagu

SEQ ID NO: 2459961 - RNA, 19 nt, Artificial Sequence
  Description of Artificial Sequence: Synthetic oligonucleotide
gacugaguauuuaucccgc

SEQ ID NO: 2459962 - RNA, 19 nt, Artificial Sequence
  Description of Artificial Sequence: Synthetic oligonucleotide
acccuucagaaccuccagg

SEQ ID NO: 2459963 - RNA, 19 nt, Artificial Sequence
  Description of Artificial Sequence: Synthetic oligonucleotide
acgucguucucuuggucuc

SEQ ID NO: 2459964 - RNA, 19 nt, Artificial Sequence
  Description of Artificial Sequence: Synthetic oligonucleotide
aaccugaucggaguccucu

SEQ ID NO: 2459965 - RNA, 19 nt, Artificial Sequence
  Description of Artificial Sequence: Synthetic oligonucleotide
acuacuguugaccccggau

SEQ ID NO: 2459966 - RNA, 19 nt, Artificial Sequence
  Description of Artificial Sequence: Synthetic oligonucleotide
caacgcacagccauagauc

SEQ ID NO: 2459967 - RNA, 19 nt, Artificial Sequence
  Description of Artificial Sequence: Synthetic oligonucleotide
agcaaacuccucccgucuc

SEQ ID NO: 2459968 - RNA, 19 nt, Artificial Sequence
  Description of Artificial Sequence: Synthetic oligonucleotide
ucuuuugacccuucuucau

SEQ ID NO: 2459969 - RNA, 19 nt, Artificial Sequence
  Description of Artificial Sequence: Synthetic oligonucleotide
uccgguuucugucggcgug

SEQ ID NO: 2459970 - RNA, 19 nt, Artificial Sequence
  Description of Artificial Sequence: Synthetic oligonucleotide
cuuggcgugagugaaccug

SEQ ID NO: 2459971 - RNA, 19 nt, Artificial Sequence
  Description of Artificial Sequence: Synthetic oligonucleotide
aggcauccguuccagagca

SEQ ID NO: 2459972 - RNA, 19 nt, Artificial Sequence
  Description of Artificial Sequence: Synthetic oligonucleotide
ggcaugacgucuuuaggug

SEQ ID NO: 2459973 - RNA, 19 nt, Artificial Sequence
  Description of Artificial Sequence: Synthetic oligonucleotide
ucucgggugagcuucccaa

SEQ ID NO: 2459974 - RNA, 19 nt, Artificial Sequence
  Description of Artificial Sequence: Synthetic oligonucleotide
uccuuggcgugagugaacc

SEQ ID NO: 2459975 - RNA, 19 nt, Artificial Sequence
  Description of Artificial Sequence: Synthetic oligonucleotide
accucuuacacagaaguuu

SEQ ID NO: 2459976 - RNA, 19 nt, Artificial Sequence
  Description of Artificial Sequence: Synthetic oligonucleotide
cucccacucggucaugccg

SEQ ID NO: 2459977 - RNA, 19 nt, Artificial Sequence
  Description of Artificial Sequence: Synthetic oligonucleotide
gagcuucccaaacaucuuc

SEQ ID NO: 2459978 - RNA, 19 nt, Artificial Sequence
  Description of Artificial Sequence: Synthetic oligonucleotide
cugacugcuugucacugac

SEQ ID NO: 2459979 - RNA, 19 nt, Artificial Sequence
  Description of Artificial Sequence: Synthetic oligonucleotide
ucuggguaggccgacuacu

SEQ ID NO: 2459980 - RNA, 19 nt, Artificial Sequence
  Description of Artificial Sequence: Synthetic oligonucleotide
acucaguccaacgucuuca

SEQ ID NO: 2459981 - RNA, 19 nt, Artificial Sequence
  Description of Artificial Sequence: Synthetic oligonucleotide
guauuuaucccgcuuuacu

SEQ ID NO: 2459982 - RNA, 19 nt, Artificial Sequence
  Description of Artificial Sequence: Synthetic oligonucleotide
ucuuaacaccgggauccgg

SEQ ID NO: 2459983 - RNA, 19 nt, Artificial Sequence
  Description of Artificial Sequence: Synthetic oligonucleotide
ggacauuaaaccucuuaca

SEQ ID NO: 2459984 - RNA, 19 nt, Artificial Sequence
  Description of Artificial Sequence: Synthetic oligonucleotide
cuuccgaacagugcuuggc

SEQ ID NO: 2459985 - RNA, 19 nt, Artificial Sequence
  Description of Artificial Sequence: Synthetic oligonucleotide
ucuacaccgaaagccuggc

SEQ ID NO: 2459986 - RNA, 19 nt, Artificial Sequence
  Description of Artificial Sequence: Synthetic oligonucleotide
gacgucuuuaggugcaaaa

SEQ ID NO: 2459987 - RNA, 19 nt, Artificial Sequence
  Description of Artificial Sequence: Synthetic oligonucleotide
cagggugccacucaaaugu

SEQ ID NO: 2459988 - RNA, 19 nt, Artificial Sequence
  Description of Artificial Sequence: Synthetic oligonucleotide
ucgccuggccuuccgaaca

SEQ ID NO: 2459989 - RNA, 19 nt, Artificial Sequence
  Description of Artificial Sequence: Synthetic oligonucleotide
ugggaucgucagaaaguug

SEQ ID NO: 2459990 - RNA, 19 nt, Artificial Sequence
  Description of Artificial Sequence: Synthetic oligonucleotide
cuucacucgaggccaacuc

SEQ ID NO: 2459991 - RNA, 19 nt, Artificial Sequence
  Description of Artificial Sequence: Synthetic oligonucleotide
ccggauaagggucagggac

SEQ ID NO: 2459992 - RNA, 19 nt, Artificial Sequence
  Description of Artificial Sequence: Synthetic oligonucleotide
ucucuuggucucgaggaac

SEQ ID NO: 2459993 - RNA, 19 nt, Artificial Sequence
  Description of Artificial Sequence: Synthetic oligonucleotide
ccucuuacacagaaguuug

SEQ ID NO: 2459994 - RNA, 19 nt, Artificial Sequence
  Description of Artificial Sequence: Synthetic oligonucleotide
ugccacucaaaugugucuc

SEQ ID NO: 2459995 - RNA, 19 nt, Artificial Sequence
  Description of Artificial Sequence: Synthetic oligonucleotide
caggcauccguuccagagc

SEQ ID NO: 2459996 - RNA, 19 nt, Artificial Sequence
  Description of Artificial Sequence: Synthetic oligonucleotide
gggaucgucagaaaguuga

SEQ ID NO: 2459997 - RNA, 19 nt, Artificial Sequence
  Description of Artificial Sequence: Synthetic oligonucleotide
agaacucuucauaucgccu

SEQ ID NO: 2459998 - RNA, 19 nt, Artificial Sequence
  Description of Artificial Sequence: Synthetic oligonucleotide
caugacgucuuuaggugca

SEQ ID NO: 2459999 - RNA, 19 nt, Artificial Sequence
  Description of Artificial Sequence: Synthetic oligonucleotide
uuucugucggcguggcuuc

SEQ ID NO: 2460000 - RNA, 19 nt, Artificial Sequence
  Description of Artificial Sequence: Synthetic oligonucleotide
cucgaggaacuucaaccug

SEQ ID NO: 2460001 - RNA, 19 nt, Artificial Sequence
  Description of Artificial Sequence: Synthetic oligonucleotide
ugaucggaguccucuuccu

SEQ ID NO: 2460002 - RNA, 19 nt, Artificial Sequence
  Description of Artificial Sequence: Synthetic oligonucleotide
gaggccaacuccuuguccu

SEQ ID NO: 2460003 - RNA, 19 nt, Artificial Sequence
  Description of Artificial Sequence: Synthetic oligonucleotide
ccauagaucuuaacaccgg

SEQ ID NO: 2460004 - RNA, 19 nt, Artificial Sequence
  Description of Artificial Sequence: Synthetic oligonucleotide
uacucaguccaacgucuuc

SEQ ID NO: 2460005 - RNA, 19 nt, Artificial Sequence
  Description of Artificial Sequence: Synthetic oligonucleotide
uucgcucccacucggucau

SEQ ID NO: 2460006 - RNA, 19 nt, Artificial Sequence
  Description of Artificial Sequence: Synthetic oligonucleotide
gaaccuccaggcggcaacg

SEQ ID NO: 2460007 - RNA, 19 nt, Artificial Sequence
  Description of Artificial Sequence: Synthetic oligonucleotide
cucuucauaucgccucuac

SEQ ID NO: 2460008 - RNA, 19 nt, Artificial Sequence
  Description of Artificial Sequence: Synthetic oligonucleotide
uuccuuuacucaguccaac

SEQ ID NO: 2460009 - RNA, 19 nt, Artificial Sequence
  Description of Artificial Sequence: Synthetic oligonucleotide
cucggcuucgcucccacuc

SEQ ID NO: 2460010 - RNA, 19 nt, Artificial Sequence
  Description of Artificial Sequence: Synthetic oligonucleotide
cuggcucugggaucgucag

SEQ ID NO: 2460011 - RNA, 19 nt, Artificial Sequence
  Description of Artificial Sequence: Synthetic oligonucleotide
aaccuccaggcggcaacgc

SEQ ID NO: 2460012 - RNA, 19 nt, Artificial Sequence
  Description of Artificial Sequence: Synthetic oligonucleotide
ucgccucuacaccgaaagc

SEQ ID NO: 2460013 - RNA, 19 nt, Artificial Sequence
  Description of Artificial Sequence: Synthetic oligonucleotide
uggguaggccgacuacugu

SEQ ID NO: 2460014 - RNA, 19 nt, Artificial Sequence
  Description of Artificial Sequence: Synthetic oligonucleotide
agauguucgccuggccuuc

SEQ ID NO: 2460015 - RNA, 19 nt, Artificial Sequence
  Description of Artificial Sequence: Synthetic oligonucleotide
acucgaggccaacuccuug

SEQ ID NO: 2460016 - RNA, 19 nt, Artificial Sequence
  Description of Artificial Sequence: Synthetic oligonucleotide
accgggauccgguuucugu

SEQ ID NO: 2460017 - RNA, 19 nt, Artificial Sequence
  Description of Artificial Sequence: Synthetic oligonucleotide
acucggucaugccgggguc

SEQ ID NO: 2460018 - RNA, 19 nt, Artificial Sequence
  Description of Artificial Sequence: Synthetic oligonucleotide
uuaacaccgggauccgguu

SEQ ID NO: 2460019 - RNA, 19 nt, Artificial Sequence
  Description of Artificial Sequence: Synthetic oligonucleotide
uguucgccuggccuuccga

SEQ ID NO: 2460020 - RNA, 19 nt, Artificial Sequence
  Description of Artificial Sequence: Synthetic oligonucleotide
cuuaacaccgggauccggu

SEQ ID NO: 2460021 - RNA, 19 nt, Artificial Sequence
  Description of Artificial Sequence: Synthetic oligonucleotide
aucuuaacaccgggauccg

SEQ ID NO: 2460022 - RNA, 19 nt, Artificial Sequence
  Description of Artificial Sequence: Synthetic oligonucleotide
caaacuccucccgucucgg

SEQ ID NO: 2460023 - RNA, 19 nt, Artificial Sequence
  Description of Artificial Sequence: Synthetic oligonucleotide
gacccuucuucaugagaac

SEQ ID NO: 2460024 - RNA, 19 nt, Artificial Sequence
  Description of Artificial Sequence: Synthetic oligonucleotide
ccaggcauccguuccagag

SEQ ID NO: 2460025 - RNA, 19 nt, Artificial Sequence
  Description of Artificial Sequence: Synthetic oligonucleotide
gcaugacgucuuuaggugc

SEQ ID NO: 2460026 - RNA, 19 nt, Artificial Sequence
  Description of Artificial Sequence: Synthetic oligonucleotide
cuuggucucgaggaacuuc

SEQ ID NO: 2460027 - RNA, 19 nt, Artificial Sequence
  Description of Artificial Sequence: Synthetic oligonucleotide
cuacuguugaccccggaua

SEQ ID NO: 2460028 - RNA, 19 nt, Artificial Sequence
  Description of Artificial Sequence: Synthetic oligonucleotide
ggagugggacgccacguag

SEQ ID NO: 2460029 - RNA, 19 nt, Artificial Sequence
  Description of Artificial Sequence: Synthetic oligonucleotide
agauggcugguccccucag

SEQ ID NO: 2460030 - RNA, 19 nt, Artificial Sequence
  Description of Artificial Sequence: Synthetic oligonucleotide
ucccaaacaucuucaucuu

SEQ ID NO: 2460031 - RNA, 19 nt, Artificial Sequence
  Description of Artificial Sequence: Synthetic oligonucleotide
uucgccuggccuuccgaac

SEQ ID NO: 2460032 - RNA, 19 nt, Artificial Sequence
  Description of Artificial Sequence: Synthetic oligonucleotide
gccacucaaaugugucucg

SEQ ID NO: 2460033 - RNA, 19 nt, Artificial Sequence
  Description of Artificial Sequence: Synthetic oligonucleotide
cauaucgccucuacaccga

SEQ ID NO: 2460034 - RNA, 19 nt, Artificial Sequence
  Description of Artificial Sequence: Synthetic oligonucleotide
gguggagugggacgccacg

SEQ ID NO: 2460035 - RNA, 19 nt, Artificial Sequence
  Description of Artificial Sequence: Synthetic oligonucleotide
acuguugaccccggauaag

SEQ ID NO: 2460036 - RNA, 19 nt, Artificial Sequence
  Description of Artificial Sequence: Synthetic oligonucleotide
ggcugguccccucaggggc

SEQ ID NO: 2460037 - RNA, 19 nt, Artificial Sequence
  Description of Artificial Sequence: Synthetic oligonucleotide
guccaacgucuucaagaag

SEQ ID NO: 2460038 - RNA, 19 nt, Artificial Sequence
  Description of Artificial Sequence: Synthetic oligonucleotide
ccgacuacuguugaccccg

SEQ ID NO: 2460039 - RNA, 19 nt, Artificial Sequence
  Description of Artificial Sequence: Synthetic oligonucleotide
gaacuucaaccugaucgga

SEQ ID NO: 2460040 - RNA, 19 nt, Artificial Sequence
  Description of Artificial Sequence: Synthetic oligonucleotide
cuucgcucccacucgguca

SEQ ID NO: 2460041 - RNA, 19 nt, Artificial Sequence
  Description of Artificial Sequence: Synthetic oligonucleotide
aaccucuuacacagaaguu

SEQ ID NO: 2460042 - RNA, 19 nt, Artificial Sequence
  Description of Artificial Sequence: Synthetic oligonucleotide
cccgcuuuacucuggguag

SEQ ID NO: 2460043 - RNA, 19 nt, Artificial Sequence
  Description of Artificial Sequence: Synthetic oligonucleotide
ucgaggccaacuccuuguc

SEQ ID NO: 2460044 - RNA, 19 nt, Artificial Sequence
  Description of Artificial Sequence: Synthetic oligonucleotide
auguucgccuggccuuccg

SEQ ID NO: 2460045 - RNA, 19 nt, Artificial Sequence
  Description of Artificial Sequence: Synthetic oligonucleotide
ugucagggugccacucaaa

SEQ ID NO: 2460046 - RNA, 19 nt, Artificial Sequence
  Description of Artificial Sequence: Synthetic oligonucleotide
cuacaccgaaagccuggcc

SEQ ID NO: 2460047 - RNA, 19 nt, Artificial Sequence
  Description of Artificial Sequence: Synthetic oligonucleotide
caggccguguacauuaucu

SEQ ID NO: 2460048 - RNA, 19 nt, Artificial Sequence
  Description of Artificial Sequence: Synthetic oligonucleotide
uggagugggacgccacgua

SEQ ID NO: 2460049 - RNA, 19 nt, Artificial Sequence
  Description of Artificial Sequence: Synthetic oligonucleotide
uccacgggcaugacgucuu

SEQ ID NO: 2460050 - RNA, 19 nt, Artificial Sequence
  Description of Artificial Sequence: Synthetic oligonucleotide
ccgaacagugcuuggcggg

SEQ ID NO: 2460051 - RNA, 19 nt, Artificial Sequence
  Description of Artificial Sequence: Synthetic oligonucleotide
cacagccauagaucuuaac

SEQ ID NO: 2460052 - RNA, 19 nt, Artificial Sequence
  Description of Artificial Sequence: Synthetic oligonucleotide
uaggccgacuacuguugac

SEQ ID NO: 2460053 - RNA, 19 nt, Artificial Sequence
  Description of Artificial Sequence: Synthetic oligonucleotide
caaaugugucucgggugag

SEQ ID NO: 2460054 - RNA, 19 nt, Artificial Sequence
  Description of Artificial Sequence: Synthetic oligonucleotide
gacgccacguagagcuggg

SEQ ID NO: 2460055 - RNA, 19 nt, Artificial Sequence
  Description of Artificial Sequence: Synthetic oligonucleotide
uaucgccucuacaccgaaa

SEQ ID NO: 2460056 - RNA, 19 nt, Artificial Sequence
  Description of Artificial Sequence: Synthetic oligonucleotide
uuuguaggccaggccgugu

SEQ ID NO: 2460057 - RNA, 19 nt, Artificial Sequence
  Description of Artificial Sequence: Synthetic oligonucleotide
ucccgucucggcuucgcuc

SEQ ID NO: 2460058 - RNA, 19 nt, Artificial Sequence
  Description of Artificial Sequence: Synthetic oligonucleotide
auuaaaccucuuacacaga

SEQ ID NO: 2460059 - RNA, 19 nt, Artificial Sequence
  Description of Artificial Sequence: Synthetic oligonucleotide
guugaccccggauaagggu

SEQ ID NO: 2460060 - RNA, 19 nt, Artificial Sequence
  Description of Artificial Sequence: Synthetic oligonucleotide
ggccgacuacuguugaccc

SEQ ID NO: 2460061 - RNA, 19 nt, Artificial Sequence
  Description of Artificial Sequence: Synthetic oligonucleotide
auaucgccucuacaccgaa

SEQ ID NO: 2460062 - RNA, 19 nt, Artificial Sequence
  Description of Artificial Sequence: Synthetic oligonucleotide
agagcaucuuuugacccuu

SEQ ID NO: 2460063 - RNA, 19 nt, Artificial Sequence
  Description of Artificial Sequence: Synthetic oligonucleotide
aguugaagacugaguauuu

SEQ ID NO: 2460064 - RNA, 19 nt, Artificial Sequence
  Description of Artificial Sequence: Synthetic oligonucleotide
gggauccgguuucugucgg

SEQ ID NO: 2460065 - RNA, 19 nt, Artificial Sequence
  Description of Artificial Sequence: Synthetic oligonucleotide
uaaaauccacgggcaugac

SEQ ID NO: 2460066 - RNA, 19 nt, Artificial Sequence
  Description of Artificial Sequence: Synthetic oligonucleotide
agaagauggcugguccccu

SEQ ID NO: 2460067 - RNA, 19 nt, Artificial Sequence
  Description of Artificial Sequence: Synthetic oligonucleotide
caacgucuucaagaagaug

SEQ ID NO: 2460068 - RNA, 19 nt, Artificial Sequence
  Description of Artificial Sequence: Synthetic oligonucleotide
ccguguacauuaucuuuag

SEQ ID NO: 2460069 - RNA, 19 nt, Artificial Sequence
  Description of Artificial Sequence: Synthetic oligonucleotide
cuuuguaggccaggccgug

SEQ ID NO: 2460070 - RNA, 19 nt, Artificial Sequence
  Description of Artificial Sequence: Synthetic oligonucleotide
cucuggguaggccgacuac

SEQ ID NO: 2460071 - RNA, 19 nt, Artificial Sequence
  Description of Artificial Sequence: Synthetic oligonucleotide
acucuggguaggccgacua

SEQ ID NO: 2460072 - RNA, 19 nt, Artificial Sequence
  Description of Artificial Sequence: Synthetic oligonucleotide
agugaaccuggaggacagg

SEQ ID NO: 2460073 - RNA, 19 nt, Artificial Sequence
  Description of Artificial Sequence: Synthetic oligonucleotide
uggcgugagugaaccugga

SEQ ID NO: 2460074 - RNA, 19 nt, Artificial Sequence
  Description of Artificial Sequence: Synthetic oligonucleotide
ggucagggacauuaaaccu

SEQ ID NO: 2460075 - RNA, 19 nt, Artificial Sequence
  Description of Artificial Sequence: Synthetic oligonucleotide
gggcaugacgucuuuaggu

SEQ ID NO: 2460076 - RNA, 19 nt, Artificial Sequence
  Description of Artificial Sequence: Synthetic oligonucleotide
ugucggcguggcuuccucu

SEQ ID NO: 2460077 - RNA, 19 nt, Artificial Sequence
  Description of Artificial Sequence: Synthetic oligonucleotide
cguucucuuggucucgagg

SEQ ID NO: 2460078 - RNA, 19 nt, Artificial Sequence
  Description of Artificial Sequence: Synthetic oligonucleotide
ggugccacucaaauguguc

SEQ ID NO: 2460079 - RNA, 19 nt, Artificial Sequence
  Description of Artificial Sequence: Synthetic oligonucleotide
auccgguuucugucggcgu

SEQ ID NO: 2460080 - RNA, 19 nt, Artificial Sequence
  Description of Artificial Sequence: Synthetic oligonucleotide
gucacugacgucguucucu

SEQ ID NO: 2460081 - RNA, 19 nt, Artificial Sequence
  Description of Artificial Sequence: Synthetic oligonucleotide
guaggccgacuacuguuga

SEQ ID NO: 2460082 - RNA, 19 nt, Artificial Sequence
  Description of Artificial Sequence: Synthetic oligonucleotide
cccgucucggcuucgcucc

SEQ ID NO: 2460083 - RNA, 19 nt, Artificial Sequence
  Description of Artificial Sequence: Synthetic oligonucleotide
gucagggugccacucaaau

SEQ ID NO: 2460084 - RNA, 19 nt, Artificial Sequence
  Description of Artificial Sequence: Synthetic oligonucleotide
gagugggacgccacguaga

SEQ ID NO: 2460085 - RNA, 19 nt, Artificial Sequence
  Description of Artificial Sequence: Synthetic oligonucleotide
ggcgugagugaaccuggag

SEQ ID NO: 2460086 - RNA, 19 nt, Artificial Sequence
  Description of Artificial Sequence: Synthetic oligonucleotide
gauguucgccuggccuucc

SEQ ID NO: 2460087 - RNA, 19 nt, Artificial Sequence
  Description of Artificial Sequence: Synthetic oligonucleotide
ggacgccacguagagcugg

SEQ ID NO: 2460088 - RNA, 19 nt, Artificial Sequence
  Description of Artificial Sequence: Synthetic oligonucleotide
uggucucgaggaacuucaa

SEQ ID NO: 2460089 - RNA, 19 nt, Artificial Sequence
  Description of Artificial Sequence: Synthetic oligonucleotide
cgccucuacaccgaaagcc

SEQ ID NO: 2460090 - RNA, 19 nt, Artificial Sequence
  Description of Artificial Sequence: Synthetic oligonucleotide
cuuggcgggguccaggccu

SEQ ID NO: 2460091 - RNA, 19 nt, Artificial Sequence
  Description of Artificial Sequence: Synthetic oligonucleotide
cucggucaugccggggucc

SEQ ID NO: 2460092 - RNA, 19 nt, Artificial Sequence
  Description of Artificial Sequence: Synthetic oligonucleotide
ucggucaugccggggucca
